United States Patent Application Publication US 2010/0105134 A1 - sequence listing, part 5

SEQ ID NO: 97898 - RNA, 13 nt, Artificial Sequence
  Description of Artificial Sequence: Synthetic oligonucleotide
ugccuaaaauugu

SEQ ID NO: 97899 - RNA, 12 nt, Artificial Sequence
  Description of Artificial Sequence: Synthetic oligonucleotide
agacugugagcu

SEQ ID NO: 97900 - RNA, 14 nt, Artificial Sequence
  Description of Artificial Sequence: Synthetic oligonucleotide
ugcuuuuuauuaau

SEQ ID NO: 97901 - RNA, 13 nt, Artificial Sequence
  Description of Artificial Sequence: Synthetic oligonucleotide
cucuucuuacauu

SEQ ID NO: 97902 - RNA, 15 nt, Artificial Sequence
  Description of Artificial Sequence: Synthetic oligonucleotide
cauuuguaaaaaugu

SEQ ID NO: 97903 - RNA, 15 nt, Artificial Sequence
  Description of Artificial Sequence: Synthetic oligonucleotide
aucuuaauucauauu

SEQ ID NO: 97904 - RNA, 13 nt, Artificial Sequence
  Description of Artificial Sequence: Synthetic oligonucleotide
gaacuaaucauga

SEQ ID NO: 97905 - RNA, 12 nt, Artificial Sequence
  Description of Artificial Sequence: Synthetic oligonucleotide
ucugcucuuggg

SEQ ID NO: 97906 - RNA, 13 nt, Artificial Sequence
  Description of Artificial Sequence: Synthetic oligonucleotide
caguagcuuugag

SEQ ID NO: 97907 - RNA, 14 nt, Artificial Sequence
  Description of Artificial Sequence: Synthetic oligonucleotide
cacguaauauuuca

SEQ ID NO: 97908 - RNA, 13 nt, Artificial Sequence
  Description of Artificial Sequence: Synthetic oligonucleotide
uauucucuucacu

SEQ ID NO: 97909 - RNA, 14 nt, Artificial Sequence
  Description of Artificial Sequence: Synthetic oligonucleotide
cuaaugcuaagaaa

SEQ ID NO: 97910 - RNA, 12 nt, Artificial Sequence
  Description of Artificial Sequence: Synthetic oligonucleotide
gcugaaaaucaa

SEQ ID NO: 97911 - RNA, 14 nt, Artificial Sequence
  Description of Artificial Sequence: Synthetic oligonucleotide
aauaugauuacuuu

SEQ ID NO: 97912 - RNA, 14 nt, Artificial Sequence
  Description of Artificial Sequence: Synthetic oligonucleotide
cauuuuguucuaca

SEQ ID NO: 97913 - RNA, 12 nt, Artificial Sequence
  Description of Artificial Sequence: Synthetic oligonucleotide
cccgggacucuc

SEQ ID NO: 97914 - RNA, 14 nt, Artificial Sequence
  Description of Artificial Sequence: Synthetic oligonucleotide
ccuuuaaaguaaag

SEQ ID NO: 97915 - RNA, 13 nt, Artificial Sequence
  Description of Artificial Sequence: Synthetic oligonucleotide
ucuggaagccugg

SEQ ID NO: 97916 - RNA, 14 nt, Artificial Sequence
  Description of Artificial Sequence: Synthetic oligonucleotide
aaaacaaaagagag

SEQ ID NO: 97917 - RNA, 13 nt, Artificial Sequence
  Description of Artificial Sequence: Synthetic oligonucleotide
aucaguuaugccg

SEQ ID NO: 97918 - RNA, 13 nt, Artificial Sequence
  Description of Artificial Sequence: Synthetic oligonucleotide
uaaaagaagucca

SEQ ID NO: 97919 - RNA, 11 nt, Artificial Sequence
  Description of Artificial Sequence: Synthetic oligonucleotide
aggugagguua

SEQ ID NO: 97920 - RNA, 11 nt, Artificial Sequence
  Description of Artificial Sequence: Synthetic oligonucleotide
gggaagaggac

SEQ ID NO: 97921 - RNA, 13 nt, Artificial Sequence
  Description of Artificial Sequence: Synthetic oligonucleotide
aagcaaguauugu

SEQ ID NO: 97922 - RNA, 12 nt, Artificial Sequence
  Description of Artificial Sequence: Synthetic oligonucleotide
auuguagcacuc

SEQ ID NO: 97923 - RNA, 14 nt, Artificial Sequence
  Description of Artificial Sequence: Synthetic oligonucleotide
acaaaaccacaaau

SEQ ID NO: 97924 - RNA, 12 nt, Artificial Sequence
  Description of Artificial Sequence: Synthetic oligonucleotide
uaagcccauaca

SEQ ID NO: 97925 - RNA, 11 nt, Artificial Sequence
  Description of Artificial Sequence: Synthetic oligonucleotide
agcccauacag

SEQ ID NO: 97926 - RNA, 12 nt, Artificial Sequence
  Description of Artificial Sequence: Synthetic oligonucleotide
cagaaaccuucc

SEQ ID NO: 97927 - RNA, 10 nt, Artificial Sequence
  Description of Artificial Sequence: Synthetic oligonucleotide
guauaccuac

SEQ ID NO: 97928 - RNA, 13 nt, Artificial Sequence
  Description of Artificial Sequence: Synthetic oligonucleotide
gccaguuuucgga

SEQ ID NO: 97929 - RNA, 9 nt, Artificial Sequence
  Description of Artificial Sequence: Synthetic oligonucleotide
ggaacaggg

SEQ ID NO: 97930 - RNA, 13 nt, Artificial Sequence
  Description of Artificial Sequence: Synthetic oligonucleotide
uuaacuuuccagu

SEQ ID NO: 97931 - RNA, 14 nt, Artificial Sequence
  Description of Artificial Sequence: Synthetic oligonucleotide
aaaguuugguuuug

SEQ ID NO: 97932 - RNA, 12 nt, Artificial Sequence
  Description of Artificial Sequence: Synthetic oligonucleotide
cuucccacugua

SEQ ID NO: 97933 - RNA, 13 nt, Artificial Sequence
  Description of Artificial Sequence: Synthetic oligonucleotide
ugauaccauauga

SEQ ID NO: 97934 - RNA, 11 nt, Artificial Sequence
  Description of Artificial Sequence: Synthetic oligonucleotide
aacaugggcug

SEQ ID NO: 97935 - RNA, 13 nt, Artificial Sequence
  Description of Artificial Sequence: Synthetic oligonucleotide
caacuuuuucaua

SEQ ID NO: 97936 - RNA, 12 nt, Artificial Sequence
  Description of Artificial Sequence: Synthetic oligonucleotide
caugaggccgga

SEQ ID NO: 97937 - RNA, 11 nt, Artificial Sequence
  Description of Artificial Sequence: Synthetic oligonucleotide
acugcauuugu

SEQ ID NO: 97938 - RNA, 13 nt, Artificial Sequence
  Description of Artificial Sequence: Synthetic oligonucleotide
aauguuuacuacc

SEQ ID NO: 97939 - RNA, 15 nt, Artificial Sequence
  Description of Artificial Sequence: Synthetic oligonucleotide
aauuuuuugaugaaa

SEQ ID NO: 97940 - RNA, 14 nt, Artificial Sequence
  Description of Artificial Sequence: Synthetic oligonucleotide
cagugugugaauuu

SEQ ID NO: 97941 - RNA, 13 nt, Artificial Sequence
  Description of Artificial Sequence: Synthetic oligonucleotide
gagcaauguaugu

SEQ ID NO: 97942 - RNA, 14 nt, Artificial Sequence
  Description of Artificial Sequence: Synthetic oligonucleotide
aaagcacauauaua

SEQ ID NO: 97943 - RNA, 14 nt, Artificial Sequence
  Description of Artificial Sequence: Synthetic oligonucleotide
guaauaguuucucc

SEQ ID NO: 97944 - RNA, 13 nt, Artificial Sequence
  Description of Artificial Sequence: Synthetic oligonucleotide
aguuucuccaaau

SEQ ID NO: 97945 - RNA, 13 nt, Artificial Sequence
  Description of Artificial Sequence: Synthetic oligonucleotide
uacuuccuagaaa

SEQ ID NO: 97946 - RNA, 13 nt, Artificial Sequence
  Description of Artificial Sequence: Synthetic oligonucleotide
uacaccauauaug

SEQ ID NO: 97947 - RNA, 14 nt, Artificial Sequence
  Description of Artificial Sequence: Synthetic oligonucleotide
auauaugaauggag

SEQ ID NO: 97948 - RNA, 13 nt, Artificial Sequence
  Description of Artificial Sequence: Synthetic oligonucleotide
acgagaagaagau

SEQ ID NO: 97949 - RNA, 13 nt, Artificial Sequence
  Description of Artificial Sequence: Synthetic oligonucleotide
ucauuuacaggga

SEQ ID NO: 97950 - RNA, 13 nt, Artificial Sequence
  Description of Artificial Sequence: Synthetic oligonucleotide
cauuuacagggac

SEQ ID NO: 97951 - RNA, 10 nt, Artificial Sequence
  Description of Artificial Sequence: Synthetic oligonucleotide
agggaccuga

SEQ ID NO: 97952 - RNA, 14 nt, Artificial Sequence
  Description of Artificial Sequence: Synthetic oligonucleotide
uguuugacugcauc

SEQ ID NO: 97953 - RNA, 13 nt, Artificial Sequence
  Description of Artificial Sequence: Synthetic oligonucleotide
uuugacugcaucg

SEQ ID NO: 97954 - RNA, 12 nt, Artificial Sequence
  Description of Artificial Sequence: Synthetic oligonucleotide
gaguucacaggg

SEQ ID NO: 97955 - RNA, 13 nt, Artificial Sequence
  Description of Artificial Sequence: Synthetic oligonucleotide
ggcaccucugucc

SEQ ID NO: 97956 - RNA, 15 nt, Artificial Sequence
  Description of Artificial Sequence: Synthetic oligonucleotide
gguuugucuuuuuaa

SEQ ID NO: 97957 - RNA, 14 nt, Artificial Sequence
  Description of Artificial Sequence: Synthetic oligonucleotide
uuugucuuuuuaag

SEQ ID NO: 97958 - RNA, 13 nt, Artificial Sequence
  Description of Artificial Sequence: Synthetic oligonucleotide
ccuaaagguuguc

SEQ ID NO: 97959 - RNA, 12 nt, Artificial Sequence
  Description of Artificial Sequence: Synthetic oligonucleotide
aagguugucgac

SEQ ID NO: 97960 - RNA, 13 nt, Artificial Sequence
  Description of Artificial Sequence: Synthetic oligonucleotide
accuggcaauugu

SEQ ID NO: 97961 - RNA, 12 nt, Artificial Sequence
  Description of Artificial Sequence: Synthetic oligonucleotide
aguggugcgagg

SEQ ID NO: 97962 - RNA, 13 nt, Artificial Sequence
  Description of Artificial Sequence: Synthetic oligonucleotide
agagacaugaaau

SEQ ID NO: 97963 - RNA, 13 nt, Artificial Sequence
  Description of Artificial Sequence: Synthetic oligonucleotide
auauauuucucca

SEQ ID NO: 97964 - RNA, 10 nt, Artificial Sequence
  Description of Artificial Sequence: Synthetic oligonucleotide
caugaaggcu

SEQ ID NO: 97965 - RNA, 11 nt, Artificial Sequence
  Description of Artificial Sequence: Synthetic oligonucleotide
gcuggaguggu

SEQ ID NO: 97966 - RNA, 11 nt, Artificial Sequence
  Description of Artificial Sequence: Synthetic oligonucleotide
aggaagagagg

SEQ ID NO: 97967 - RNA, 12 nt, Artificial Sequence
  Description of Artificial Sequence: Synthetic oligonucleotide
cuugcaucgggc

SEQ ID NO: 97968 - RNA, 13 nt, Artificial Sequence
  Description of Artificial Sequence: Synthetic oligonucleotide
auauccuacugug

SEQ ID NO: 97969 - RNA, 13 nt, Artificial Sequence
  Description of Artificial Sequence: Synthetic oligonucleotide
uccuacuguguaa

SEQ ID NO: 97970 - RNA, 12 nt, Artificial Sequence
  Description of Artificial Sequence: Synthetic oligonucleotide
ccuuguagugua

SEQ ID NO: 97971 - RNA, 13 nt, Artificial Sequence
  Description of Artificial Sequence: Synthetic oligonucleotide
ucuuuguugauug

SEQ ID NO: 97972 - RNA, 14 nt, Artificial Sequence
  Description of Artificial Sequence: Synthetic oligonucleotide
uuuguugauugaaa

SEQ ID NO: 97973 - RNA, 15 nt, Artificial Sequence
  Description of Artificial Sequence: Synthetic oligonucleotide
uucuuuuucuuccau

SEQ ID NO: 97974 - RNA, 13 nt, Artificial Sequence
  Description of Artificial Sequence: Synthetic oligonucleotide
aaucuuccuucua

SEQ ID NO: 97975 - RNA, 13 nt, Artificial Sequence
  Description of Artificial Sequence: Synthetic oligonucleotide
uugaaugcuucau

SEQ ID NO: 97976 - RNA, 13 nt, Artificial Sequence
  Description of Artificial Sequence: Synthetic oligonucleotide
ugaaugcuucaug

SEQ ID NO: 97977 - RNA, 13 nt, Artificial Sequence
  Description of Artificial Sequence: Synthetic oligonucleotide
aauucuacuuuga

SEQ ID NO: 97978 - RNA, 13 nt, Artificial Sequence
  Description of Artificial Sequence: Synthetic oligonucleotide
agcaacuacagac

SEQ ID NO: 97979 - RNA, 13 nt, Artificial Sequence
  Description of Artificial Sequence: Synthetic oligonucleotide
gaccaaggucaac

SEQ ID NO: 97980 - RNA, 13 nt, Artificial Sequence
  Description of Artificial Sequence: Synthetic oligonucleotide
cgacuaucucgac

SEQ ID NO: 97981 - RNA, 13 nt, Artificial Sequence
  Description of Artificial Sequence: Synthetic oligonucleotide
aaccuucccaaac

SEQ ID NO: 97982 - RNA, 14 nt, Artificial Sequence
  Description of Artificial Sequence: Synthetic oligonucleotide
ccaagcuuagaacu

SEQ ID NO: 97983 - RNA, 15 nt, Artificial Sequence
  Description of Artificial Sequence: Synthetic oligonucleotide
agcuuagaacuuuaa

SEQ ID NO: 97984 - RNA, 11 nt, Artificial Sequence
  Description of Artificial Sequence: Synthetic oligonucleotide
aagaccaccac

SEQ ID NO: 97985 - RNA, 14 nt, Artificial Sequence
  Description of Artificial Sequence: Synthetic oligonucleotide
gcgagaaauaaagu

SEQ ID NO: 97986 - RNA, 14 nt, Artificial Sequence
  Description of Artificial Sequence: Synthetic oligonucleotide
cgagaaauaaaguu

SEQ ID NO: 97987 - RNA, 12 nt, Artificial Sequence
  Description of Artificial Sequence: Synthetic oligonucleotide
aggaaaugaucc

SEQ ID NO: 97988 - RNA, 13 nt, Artificial Sequence
  Description of Artificial Sequence: Synthetic oligonucleotide
gaagaaaugaaac

SEQ ID NO: 97989 - RNA, 13 nt, Artificial Sequence
  Description of Artificial Sequence: Synthetic oligonucleotide
guuuccauccucc

SEQ ID NO: 97990 - RNA, 15 nt, Artificial Sequence
  Description of Artificial Sequence: Synthetic oligonucleotide
acugaaaaucuuuga

SEQ ID NO: 97991 - RNA, 11 nt, Artificial Sequence
  Description of Artificial Sequence: Synthetic oligonucleotide
ugccguucagg

SEQ ID NO: 97992 - RNA, 13 nt, Artificial Sequence
  Description of Artificial Sequence: Synthetic oligonucleotide
caggguccagaag

SEQ ID NO: 97993 - RNA, 13 nt, Artificial Sequence
  Description of Artificial Sequence: Synthetic oligonucleotide
ucaagacugcuug

SEQ ID NO: 97994 - RNA, 13 nt, Artificial Sequence
  Description of Artificial Sequence: Synthetic oligonucleotide
uccaugucuuugg

SEQ ID NO: 97995 - RNA, 11 nt, Artificial Sequence
  Description of Artificial Sequence: Synthetic oligonucleotide
gccugaaacac

SEQ ID NO: 97996 - RNA, 12 nt, Artificial Sequence
  Description of Artificial Sequence: Synthetic oligonucleotide
ucucuguaccuc

SEQ ID NO: 97997 - RNA, 12 nt, Artificial Sequence
  Description of Artificial Sequence: Synthetic oligonucleotide
agcaagacaaga

SEQ ID NO: 97998 - RNA, 13 nt, Artificial Sequence
  Description of Artificial Sequence: Synthetic oligonucleotide
gcaagacaagaaa

SEQ ID NO: 97999 - RNA, 12 nt, Artificial Sequence
  Description of Artificial Sequence: Synthetic oligonucleotide
uguacaagaucc

SEQ ID NO: 98000 - RNA, 12 nt, Artificial Sequence
  Description of Artificial Sequence: Synthetic oligonucleotide
cguacuugcaga

SEQ ID NO: 98001 - RNA, 13 nt, Artificial Sequence
  Description of Artificial Sequence: Synthetic oligonucleotide
cgaucgauacaga

SEQ ID NO: 98002 - RNA, 13 nt, Artificial Sequence
  Description of Artificial Sequence: Synthetic oligonucleotide
uauaaaaauaaau

SEQ ID NO: 98003 - RNA, 13 nt, Artificial Sequence
  Description of Artificial Sequence: Synthetic oligonucleotide
uaaaaauaaauau

SEQ ID NO: 98004 - RNA, 13 nt, Artificial Sequence
  Description of Artificial Sequence: Synthetic oligonucleotide
uuugacugcugug

SEQ ID NO: 98005 - RNA, 13 nt, Artificial Sequence
  Description of Artificial Sequence: Synthetic oligonucleotide
ggagaugagagac

SEQ ID NO: 98006 - RNA, 10 nt, Artificial Sequence
  Description of Artificial Sequence: Synthetic oligonucleotide
ucccacuugg

SEQ ID NO: 98007 - RNA, 10 nt, Artificial Sequence
  Description of Artificial Sequence: Synthetic oligonucleotide
guucacggcc

SEQ ID NO: 98008 - RNA, 12 nt, Artificial Sequence
  Description of Artificial Sequence: Synthetic oligonucleotide
accaucacacca

SEQ ID NO: 98009 - RNA, 10 nt, Artificial Sequence
  Description of Artificial Sequence: Synthetic oligonucleotide
cugcggguuu

SEQ ID NO: 98010 - RNA, 9 nt, Artificial Sequence
  Description of Artificial Sequence: Synthetic oligonucleotide
uccaguuug

SEQ ID NO: 98011 - RNA, 12 nt, Artificial Sequence
  Description of Artificial Sequence: Synthetic oligonucleotide
uuaaggacuucu

SEQ ID NO: 98012 - RNA, 12 nt, Artificial Sequence
  Description of Artificial Sequence: Synthetic oligonucleotide
agugggacagag

SEQ ID NO: 98013 - RNA, 13 nt, Artificial Sequence
  Description of Artificial Sequence: Synthetic oligonucleotide
auuuguuauugug

SEQ ID NO: 98014 - RNA, 12 nt, Artificial Sequence
  Description of Artificial Sequence: Synthetic oligonucleotide
ucaaaugcauuu

SEQ ID NO: 98015 - RNA, 9 nt, Artificial Sequence
  Description of Artificial Sequence: Synthetic oligonucleotide
aggaaagcc

SEQ ID NO: 98016 - RNA, 10 nt, Artificial Sequence
  Description of Artificial Sequence: Synthetic oligonucleotide
ggaaagcccu

SEQ ID NO: 98017 - RNA, 11 nt, Artificial Sequence
  Description of Artificial Sequence: Synthetic oligonucleotide
ccagcauggcc

SEQ ID NO: 98018 - RNA, 10 nt, Artificial Sequence
  Description of Artificial Sequence: Synthetic oligonucleotide
uucucccuga

SEQ ID NO: 98019 - RNA, 11 nt, Artificial Sequence
  Description of Artificial Sequence: Synthetic oligonucleotide
aagaagcccuu

SEQ ID NO: 98020 - RNA, 11 nt, Artificial Sequence
  Description of Artificial Sequence: Synthetic oligonucleotide
gaagcccuuca

SEQ ID NO: 98021 - RNA, 10 nt, Artificial Sequence
  Description of Artificial Sequence: Synthetic oligonucleotide
cccuucagcg

SEQ ID NO: 98022 - RNA, 10 nt, Artificial Sequence
  Description of Artificial Sequence: Synthetic oligonucleotide
cuucagcggc

SEQ ID NO: 98023 - RNA, 11 nt, Artificial Sequence
  Description of Artificial Sequence: Synthetic oligonucleotide
cagcggccagu

SEQ ID NO: 98024 - RNA, 11 nt, Artificial Sequence
  Description of Artificial Sequence: Synthetic oligonucleotide
gaaaagcuccg

SEQ ID NO: 98025 - RNA, 10 nt, Artificial Sequence
  Description of Artificial Sequence: Synthetic oligonucleotide
aaagcuccgg

SEQ ID NO: 98026 - RNA, 12 nt, Artificial Sequence
  Description of Artificial Sequence: Synthetic oligonucleotide
gucaacagucug

SEQ ID NO: 98027 - RNA, 12 nt, Artificial Sequence
  Description of Artificial Sequence: Synthetic oligonucleotide
agaguucaaaag

SEQ ID NO: 98028 - RNA, 12 nt, Artificial Sequence
  Description of Artificial Sequence: Synthetic oligonucleotide
gaguucaaaagc

SEQ ID NO: 98029 - RNA, 11 nt, Artificial Sequence
  Description of Artificial Sequence: Synthetic oligonucleotide
ucaaaagcccu

SEQ ID NO: 98030 - RNA, 11 nt, Artificial Sequence
  Description of Artificial Sequence: Synthetic oligonucleotide
caaaagcccuu

SEQ ID NO: 98031 - RNA, 11 nt, Artificial Sequence
  Description of Artificial Sequence: Synthetic oligonucleotide
aaagcccuuca

SEQ ID NO: 98032 - RNA, 11 nt, Artificial Sequence
  Description of Artificial Sequence: Synthetic oligonucleotide
aagcccuucag

SEQ ID NO: 98033 - RNA, 12 nt, Artificial Sequence
  Description of Artificial Sequence: Synthetic oligonucleotide
ugaagccgcucg

SEQ ID NO: 98034 - RNA, 11 nt, Artificial Sequence
  Description of Artificial Sequence: Synthetic oligonucleotide
acgccagucaa

SEQ ID NO: 98035 - RNA, 12 nt, Artificial Sequence
  Description of Artificial Sequence: Synthetic oligonucleotide
ucuuggugcgug

SEQ ID NO: 98036 - RNA, 13 nt, Artificial Sequence
  Description of Artificial Sequence: Synthetic oligonucleotide
uuggauucaucag

SEQ ID NO: 98037 - RNA, 12 nt, Artificial Sequence
  Description of Artificial Sequence: Synthetic oligonucleotide
ggaauaccuaag

SEQ ID NO: 98038 - RNA, 11 nt, Artificial Sequence
  Description of Artificial Sequence: Synthetic oligonucleotide
uuugaggcuca

SEQ ID NO: 98039 - RNA, 10 nt, Artificial Sequence
  Description of Artificial Sequence: Synthetic oligonucleotide
cuacaauugg

SEQ ID NO: 98040 - RNA, 11 nt, Artificial Sequence
  Description of Artificial Sequence: Synthetic oligonucleotide
aguuaggagcc

SEQ ID NO: 98041 - RNA, 12 nt, Artificial Sequence
  Description of Artificial Sequence: Synthetic oligonucleotide
gucaauauccac

SEQ ID NO: 98042 - RNA, 12 nt, Artificial Sequence
  Description of Artificial Sequence: Synthetic oligonucleotide
uguucagucaca

SEQ ID NO: 98043 - RNA, 11 nt, Artificial Sequence
  Description of Artificial Sequence: Synthetic oligonucleotide
cacacacauac

SEQ ID NO: 98044 - RNA, 11 nt, Artificial Sequence
  Description of Artificial Sequence: Synthetic oligonucleotide
uccuuuugcuu

SEQ ID NO: 98045 - RNA, 15 nt, Artificial Sequence
  Description of Artificial Sequence: Synthetic oligonucleotide
uuuaaaguaauuuuu

SEQ ID NO: 98046 - RNA, 12 nt, Artificial Sequence
  Description of Artificial Sequence: Synthetic oligonucleotide
aacagucaaugg

SEQ ID NO: 98047 - RNA, 12 nt, Artificial Sequence
  Description of Artificial Sequence: Synthetic oligonucleotide
cgacaaaccaau

SEQ ID NO: 98048 - RNA, 11 nt, Artificial Sequence
  Description of Artificial Sequence: Synthetic oligonucleotide
cugcuaccacu

SEQ ID NO: 98049 - RNA, 12 nt, Artificial Sequence
  Description of Artificial Sequence: Synthetic oligonucleotide
caagcggucuua

SEQ ID NO: 98050 - RNA, 12 nt, Artificial Sequence
  Description of Artificial Sequence: Synthetic oligonucleotide
gucuuaccggcu

SEQ ID NO: 98051 - RNA, 10 nt, Artificial Sequence
  Description of Artificial Sequence: Synthetic oligonucleotide
auggguuacc

SEQ ID NO: 98052 - RNA, 10 nt, Artificial Sequence
  Description of Artificial Sequence: Synthetic oligonucleotide
uuaccugcga

SEQ ID NO: 98053 - RNA, 11 nt, Artificial Sequence
  Description of Artificial Sequence: Synthetic oligonucleotide
aucuugcugag

SEQ ID NO: 98054 - RNA, 12 nt, Artificial Sequence
  Description of Artificial Sequence: Synthetic oligonucleotide
gcauaaaacagu

SEQ ID NO: 98055 - RNA, 11 nt, Artificial Sequence
  Description of Artificial Sequence: Synthetic oligonucleotide
uccuuuauccu

SEQ ID NO: 98056 - RNA, 11 nt, Artificial Sequence
  Description of Artificial Sequence: Synthetic oligonucleotide
aacgcaaguug

SEQ ID NO: 98057 - RNA, 12 nt, Artificial Sequence
  Description of Artificial Sequence: Synthetic oligonucleotide
aacugaaaccau

SEQ ID NO: 98058 - RNA, 13 nt, Artificial Sequence
  Description of Artificial Sequence: Synthetic oligonucleotide
cuuuguuaaauau

SEQ ID NO: 98059 - RNA, 13 nt, Artificial Sequence
  Description of Artificial Sequence: Synthetic oligonucleotide
uauauuaaaaguu

SEQ ID NO: 98060 - RNA, 12 nt, Artificial Sequence
  Description of Artificial Sequence: Synthetic oligonucleotide
uuuugacuuaac

SEQ ID NO: 98061 - RNA, 12 nt, Artificial Sequence
  Description of Artificial Sequence: Synthetic oligonucleotide
caaacucagcac

SEQ ID NO: 98062 - RNA, 10 nt, Artificial Sequence
  Description of Artificial Sequence: Synthetic oligonucleotide
gcugaccuca

SEQ ID NO: 98063 - RNA, 13 nt, Artificial Sequence
  Description of Artificial Sequence: Synthetic oligonucleotide
uuauucagaucgc

SEQ ID NO: 98064 - RNA, 12 nt, Artificial Sequence
  Description of Artificial Sequence: Synthetic oligonucleotide
ggguucugggau

SEQ ID NO: 98065 - RNA, 14 nt, Artificial Sequence
  Description of Artificial Sequence: Synthetic oligonucleotide
uauuggaaauuaug

SEQ ID NO: 98066 - RNA, 12 nt, Artificial Sequence
  Description of Artificial Sequence: Synthetic oligonucleotide
uggaagcacuag

SEQ ID NO: 98067 - RNA, 12 nt, Artificial Sequence
  Description of Artificial Sequence: Synthetic oligonucleotide
uuuuuaugugga

SEQ ID NO: 98068 - RNA, 11 nt, Artificial Sequence
  Description of Artificial Sequence: Synthetic oligonucleotide
gaauugguaga

SEQ ID NO: 98069 - RNA, 12 nt, Artificial Sequence
  Description of Artificial Sequence: Synthetic oligonucleotide
uagacuuggaga

SEQ ID NO: 98070 - RNA, 12 nt, Artificial Sequence
  Description of Artificial Sequence: Synthetic oligonucleotide
uacaguauucca

SEQ ID NO: 98071 - RNA, 14 nt, Artificial Sequence
  Description of Artificial Sequence: Synthetic oligonucleotide
cacugaugaauuaa

SEQ ID NO: 98072 - RNA, 11 nt, Artificial Sequence
  Description of Artificial Sequence: Synthetic oligonucleotide
cacaucaucac

SEQ ID NO: 98073 - RNA, 12 nt, Artificial Sequence
  Description of Artificial Sequence: Synthetic oligonucleotide
ucaccaaacaga

SEQ ID NO: 98074 - RNA, 11 nt, Artificial Sequence
  Description of Artificial Sequence: Synthetic oligonucleotide
gaacaugaugg

SEQ ID NO: 98075 - RNA, 11 nt, Artificial Sequence
  Description of Artificial Sequence: Synthetic oligonucleotide
auguagacugc

SEQ ID NO: 98076 - RNA, 12 nt, Artificial Sequence
  Description of Artificial Sequence: Synthetic oligonucleotide
gaucuauuuaug

SEQ ID NO: 98077 - RNA, 11 nt, Artificial Sequence
  Description of Artificial Sequence: Synthetic oligonucleotide
cacuauuauca

SEQ ID NO: 98078 - RNA, 10 nt, Artificial Sequence
  Description of Artificial Sequence: Synthetic oligonucleotide
ucaguucugc

SEQ ID NO: 98079 - RNA, 12 nt, Artificial Sequence
  Description of Artificial Sequence: Synthetic oligonucleotide
gauuaaaccuac

SEQ ID NO: 98080 - RNA, 12 nt, Artificial Sequence
  Description of Artificial Sequence: Synthetic oligonucleotide
uaaaauccuucu

SEQ ID NO: 98081 - RNA, 11 nt, Artificial Sequence
  Description of Artificial Sequence: Synthetic oligonucleotide
augcuguagac

SEQ ID NO: 98082 - RNA, 12 nt, Artificial Sequence
  Description of Artificial Sequence: Synthetic oligonucleotide
ugauaggaauag

SEQ ID NO: 98083 - RNA, 10 nt, Artificial Sequence
  Description of Artificial Sequence: Synthetic oligonucleotide
auggcccuga

SEQ ID NO: 98084 - RNA, 10 nt, Artificial Sequence
  Description of Artificial Sequence: Synthetic oligonucleotide
uccucaagca

SEQ ID NO: 98085 - RNA, 9 nt, Artificial Sequence
  Description of Artificial Sequence: Synthetic oligonucleotide
uucagccca

SEQ ID NO: 98086 - RNA, 10 nt, Artificial Sequence
  Description of Artificial Sequence: Synthetic oligonucleotide
cugcugaacc

SEQ ID NO: 98087 - RNA, 11 nt, Artificial Sequence
  Description of Artificial Sequence: Synthetic oligonucleotide
aguucucuuca

SEQ ID NO: 98088 - RNA, 10 nt, Artificial Sequence
  Description of Artificial Sequence: Synthetic oligonucleotide
cagccuagag

SEQ ID NO: 98089 - RNA, 12 nt, Artificial Sequence
  Description of Artificial Sequence: Synthetic oligonucleotide
ucugugaagugu

SEQ ID NO: 98090 - RNA, 13 nt, Artificial Sequence
  Description of Artificial Sequence: Synthetic oligonucleotide
gagaaaauuucaa

SEQ ID NO: 98091 - RNA, 10 nt, Artificial Sequence
  Description of Artificial Sequence: Synthetic oligonucleotide
auccuccuga

SEQ ID NO: 98092 - RNA, 11 nt, Artificial Sequence
  Description of Artificial Sequence: Synthetic oligonucleotide
ugacaucauau

SEQ ID NO: 98093 - RNA, 12 nt, Artificial Sequence
  Description of Artificial Sequence: Synthetic oligonucleotide
aucuucaucaua

SEQ ID NO: 98094 - RNA, 12 nt, Artificial Sequence
  Description of Artificial Sequence: Synthetic oligonucleotide
acuagcuauuaa

SEQ ID NO: 98095 - RNA, 13 nt, Artificial Sequence
  Description of Artificial Sequence: Synthetic oligonucleotide
cucuacuaaaaau

SEQ ID NO: 98096 - RNA, 11 nt, Artificial Sequence
  Description of Artificial Sequence: Synthetic oligonucleotide
cuaucucgccu

SEQ ID NO: 98097 - RNA, 12 nt, Artificial Sequence
  Description of Artificial Sequence: Synthetic oligonucleotide
uucgguccaguu

SEQ ID NO: 98098 - RNA, 10 nt, Artificial Sequence
  Description of Artificial Sequence: Synthetic oligonucleotide
auguagccgc

SEQ ID NO: 98099 - RNA, 11 nt, Artificial Sequence
  Description of Artificial Sequence: Synthetic oligonucleotide
gaggagacuug

SEQ ID NO: 98100 - RNA, 11 nt, Artificial Sequence
  Description of Artificial Sequence: Synthetic oligonucleotide
aguagugagga

SEQ ID NO: 98101 - RNA, 13 nt, Artificial Sequence
  Description of Artificial Sequence: Synthetic oligonucleotide
agaugaguacaaa

SEQ ID NO: 98102 - RNA, 12 nt, Artificial Sequence
  Description of Artificial Sequence: Synthetic oligonucleotide
uuguuaaugggc

SEQ ID NO: 98103 - RNA, 12 nt, Artificial Sequence
  Description of Artificial Sequence: Synthetic oligonucleotide
uuuuaauuuauu

SEQ ID NO: 98104 - RNA, 11 nt, Artificial Sequence
  Description of Artificial Sequence: Synthetic oligonucleotide
auuuaaauaug

SEQ ID NO: 98105 - RNA, 12 nt, Artificial Sequence
  Description of Artificial Sequence: Synthetic oligonucleotide
auccuuuguuuc

SEQ ID NO: 98106 - RNA, 13 nt, Artificial Sequence
  Description of Artificial Sequence: Synthetic oligonucleotide
gucuaaguguuug

SEQ ID NO: 98107 - RNA, 11 nt, Artificial Sequence
  Description of Artificial Sequence: Synthetic oligonucleotide
ccugugacaaa

SEQ ID NO: 98108 - RNA, 12 nt, Artificial Sequence
  Description of Artificial Sequence: Synthetic oligonucleotide
caggcugaauua

SEQ ID NO: 98109 - RNA, 13 nt, Artificial Sequence
  Description of Artificial Sequence: Synthetic oligonucleotide
ucauucuuacaau

SEQ ID NO: 98110 - RNA, 14 nt, Artificial Sequence
  Description of Artificial Sequence: Synthetic oligonucleotide
cauucuuacaauug

SEQ ID NO: 98111 - RNA, 11 nt, Artificial Sequence
  Description of Artificial Sequence: Synthetic oligonucleotide
agagaguguac

SEQ ID NO: 98112 - RNA, 11 nt, Artificial Sequence
  Description of Artificial Sequence: Synthetic oligonucleotide
gaacucagcag

SEQ ID NO: 98113 - RNA, 12 nt, Artificial Sequence
  Description of Artificial Sequence: Synthetic oligonucleotide
uuauuuucagua

SEQ ID NO: 98114 - RNA, 11 nt, Artificial Sequence
  Description of Artificial Sequence: Synthetic oligonucleotide
cuuaaauggaa

SEQ ID NO: 98115 - RNA, 12 nt, Artificial Sequence
  Description of Artificial Sequence: Synthetic oligonucleotide
gccuaaaauugu

SEQ ID NO: 98116 - RNA, 12 nt, Artificial Sequence
  Description of Artificial Sequence: Synthetic oligonucleotide
acuaacaucugg

SEQ ID NO: 98117 - RNA, 11 nt, Artificial Sequence
  Description of Artificial Sequence: Synthetic oligonucleotide
gacugugagcu

SEQ ID NO: 98118 - RNA, 13 nt, Artificial Sequence
  Description of Artificial Sequence: Synthetic oligonucleotide
gcuuuuuauuaau

SEQ ID NO: 98119 - RNA, 12 nt, Artificial Sequence
  Description of Artificial Sequence: Synthetic oligonucleotide
ucuucuuacauu

SEQ ID NO: 98120 - RNA, 14 nt, Artificial Sequence
  Description of Artificial Sequence: Synthetic oligonucleotide
auuuguaaaaaugu

SEQ ID NO: 98121 - RNA, 14 nt, Artificial Sequence
  Description of Artificial Sequence: Synthetic oligonucleotide
ucuuaauucauauu

SEQ ID NO: 98122 - RNA, 12 nt, Artificial Sequence
  Description of Artificial Sequence: Synthetic oligonucleotide
aacuaaucauga

SEQ ID NO: 98123 - RNA, 11 nt, Artificial Sequence
  Description of Artificial Sequence: Synthetic oligonucleotide
cugcucuuggg

SEQ ID NO: 98124 - RNA, 12 nt, Artificial Sequence
  Description of Artificial Sequence: Synthetic oligonucleotide
aguagcuuugag

SEQ ID NO: 98125 - RNA, 13 nt, Artificial Sequence
  Description of Artificial Sequence: Synthetic oligonucleotide
acguaauauuuca

SEQ ID NO: 98126 - RNA, 12 nt, Artificial Sequence
  Description of Artificial Sequence: Synthetic oligonucleotide
auucucuucacu

SEQ ID NO: 98127 - RNA, 13 nt, Artificial Sequence
  Description of Artificial Sequence: Synthetic oligonucleotide
uaaugcuaagaaa

SEQ ID NO: 98128 - RNA, 11 nt, Artificial Sequence
  Description of Artificial Sequence: Synthetic oligonucleotide
cugaaaaucaa

SEQ ID NO: 98129 - RNA, 13 nt, Artificial Sequence
  Description of Artificial Sequence: Synthetic oligonucleotide
auaugauuacuuu

SEQ ID NO: 98130 - RNA, 13 nt, Artificial Sequence
  Description of Artificial Sequence: Synthetic oligonucleotide
auuuuguucuaca

SEQ ID NO: 98131 - RNA, 11 nt, Artificial Sequence
  Description of Artificial Sequence: Synthetic oligonucleotide
ccgggacucuc

SEQ ID NO: 98132 - RNA, 13 nt, Artificial Sequence
  Description of Artificial Sequence: Synthetic oligonucleotide
cuuuaaaguaaag

SEQ ID NO: 98133 - RNA, 12 nt, Artificial Sequence
  Description of Artificial Sequence: Synthetic oligonucleotide
cuggaagccugg

SEQ ID NO: 98134 - RNA, 13 nt, Artificial Sequence
  Description of Artificial Sequence: Synthetic oligonucleotide
aaacaaaagagag

SEQ ID NO: 98135 - RNA, 12 nt, Artificial Sequence
  Description of Artificial Sequence: Synthetic oligonucleotide
ucaguuaugccg

SEQ ID NO: 98136 - RNA, 12 nt, Artificial Sequence
  Description of Artificial Sequence: Synthetic oligonucleotide
aaaagaagucca

SEQ ID NO: 98137 - RNA, 10 nt, Artificial Sequence
  Description of Artificial Sequence: Synthetic oligonucleotide
ggugagguua

SEQ ID NO: 98138 - RNA, 10 nt, Artificial Sequence
  Description of Artificial Sequence: Synthetic oligonucleotide
ggaagaggac

SEQ ID NO: 98139 - RNA, 12 nt, Artificial Sequence
  Description of Artificial Sequence: Synthetic oligonucleotide
agcaaguauugu

SEQ ID NO: 98140 - RNA, 11 nt, Artificial Sequence
  Description of Artificial Sequence: Synthetic oligonucleotide
uuguagcacuc

SEQ ID NO: 98141 - RNA, 13 nt, Artificial Sequence
  Description of Artificial Sequence: Synthetic oligonucleotide
caaaaccacaaau

SEQ ID NO: 98142 - RNA, 11 nt, Artificial Sequence
  Description of Artificial Sequence: Synthetic oligonucleotide
aagcccauaca

SEQ ID NO: 98143 - RNA, 10 nt, Artificial Sequence
  Description of Artificial Sequence: Synthetic oligonucleotide
gcccauacag

SEQ ID NO: 98144 - RNA, 11 nt, Artificial Sequence
  Description of Artificial Sequence: Synthetic oligonucleotide
agaaaccuucc

SEQ ID NO: 98145 - RNA, 9 nt, Artificial Sequence
  Description of Artificial Sequence: Synthetic oligonucleotide
uauaccuac

SEQ ID NO: 98146 - RNA, 12 nt, Artificial Sequence
  Description of Artificial Sequence: Synthetic oligonucleotide
ccaguuuucgga

SEQ ID NO: 98147 - RNA, 8 nt, Artificial Sequence
  Description of Artificial Sequence: Synthetic oligonucleotide
gaacaggg

SEQ ID NO: 98148 - RNA, 12 nt, Artificial Sequence
  Description of Artificial Sequence: Synthetic oligonucleotide
uaacuuuccagu

SEQ ID NO: 98149 - RNA, 13 nt, Artificial Sequence
  Description of Artificial Sequence: Synthetic oligonucleotide
aaguuugguuuug

SEQ ID NO: 98150 - RNA, 11 nt, Artificial Sequence
  Description of Artificial Sequence: Synthetic oligonucleotide
uucccacugua

SEQ ID NO: 98151 - RNA, 12 nt, Artificial Sequence
  Description of Artificial Sequence: Synthetic oligonucleotide
gauaccauauga

SEQ ID NO: 98152 - RNA, 10 nt, Artificial Sequence
  Description of Artificial Sequence: Synthetic oligonucleotide
acaugggcug

SEQ ID NO: 98153 - RNA, 12 nt, Artificial Sequence
  Description of Artificial Sequence: Synthetic oligonucleotide
aacuuuuucaua

SEQ ID NO: 98154 - RNA, 11 nt, Artificial Sequence
  Description of Artificial Sequence: Synthetic oligonucleotide
augaggccgga

SEQ ID NO: 98155 - RNA, 10 nt, Artificial Sequence
  Description of Artificial Sequence: Synthetic oligonucleotide
cugcauuugu

SEQ ID NO: 98156 - RNA, 12 nt, Artificial Sequence
  Description of Artificial Sequence: Synthetic oligonucleotide
auguuuacuacc

SEQ ID NO: 98157 - RNA, 14 nt, Artificial Sequence
  Description of Artificial Sequence: Synthetic oligonucleotide
auuuuuugaugaaa

SEQ ID NO: 98158 - RNA, 13 nt, Artificial Sequence
  Description of Artificial Sequence: Synthetic oligonucleotide
agugugugaauuu

SEQ ID NO: 98159 - RNA, 12 nt, Artificial Sequence
  Description of Artificial Sequence: Synthetic oligonucleotide
agcaauguaugu

SEQ ID NO: 98160 - RNA, 13 nt, Artificial Sequence
  Description of Artificial Sequence: Synthetic oligonucleotide
aagcacauauaua

SEQ ID NO: 98161 - RNA, 13 nt, Artificial Sequence
  Description of Artificial Sequence: Synthetic oligonucleotide
uaauaguuucucc

SEQ ID NO: 98162 - RNA, 12 nt, Artificial Sequence
  Description of Artificial Sequence: Synthetic oligonucleotide
guuucuccaaau

SEQ ID NO: 98163 - RNA, 12 nt, Artificial Sequence
  Description of Artificial Sequence: Synthetic oligonucleotide
acuuccuagaaa

SEQ ID NO: 98164 - RNA, 12 nt, Artificial Sequence
  Description of Artificial Sequence: Synthetic oligonucleotide
acaccauauaug

SEQ ID NO: 98165 - RNA, 13 nt, Artificial Sequence
  Description of Artificial Sequence: Synthetic oligonucleotide
uauaugaauggag

SEQ ID NO: 98166 - RNA, 12 nt, Artificial Sequence
  Description of Artificial Sequence: Synthetic oligonucleotide
cauuuacaggga

SEQ ID NO: 98167 - RNA, 12 nt, Artificial Sequence
  Description of Artificial Sequence: Synthetic oligonucleotide
auuuacagggac

SEQ ID NO: 98168 - RNA, 9 nt, Artificial Sequence
  Description of Artificial Sequence: Synthetic oligonucleotide
gggaccuga

SEQ ID NO: 98169 - RNA, 13 nt, Artificial Sequence
  Description of Artificial Sequence: Synthetic oligonucleotide
guuugacugcauc

SEQ ID NO: 98170 - RNA, 12 nt, Artificial Sequence
  Description of Artificial Sequence: Synthetic oligonucleotide
uugacugcaucg

SEQ ID NO: 98171 - RNA, 11 nt, Artificial Sequence
  Description of Artificial Sequence: Synthetic oligonucleotide
aguucacaggg

SEQ ID NO: 98172 - RNA, 12 nt, Artificial Sequence
  Description of Artificial Sequence: Synthetic oligonucleotide
gcaccucugucc

SEQ ID NO: 98173 - RNA, 14 nt, Artificial Sequence
  Description of Artificial Sequence: Synthetic oligonucleotide
guuugucuuuuuaa

SEQ ID NO: 98174 - RNA, 13 nt, Artificial Sequence
  Description of Artificial Sequence: Synthetic oligonucleotide
uugucuuuuuaag

SEQ ID NO: 98175 - RNA, 12 nt, Artificial Sequence
  Description of Artificial Sequence: Synthetic oligonucleotide
cuaaagguuguc

SEQ ID NO: 98176 - RNA, 11 nt, Artificial Sequence
  Description of Artificial Sequence: Synthetic oligonucleotide
agguugucgac

SEQ ID NO: 98177 - RNA, 12 nt, Artificial Sequence
  Description of Artificial Sequence: Synthetic oligonucleotide
ccuggcaauugu

SEQ ID NO: 98178 - RNA, 11 nt, Artificial Sequence
  Description of Artificial Sequence: Synthetic oligonucleotide
guggugcgagg

SEQ ID NO: 98179 - RNA, 12 nt, Artificial Sequence
  Description of Artificial Sequence: Synthetic oligonucleotide
gagacaugaaau

SEQ ID NO: 98180 - RNA, 12 nt, Artificial Sequence
  Description of Artificial Sequence: Synthetic oligonucleotide
uauauuucucca

SEQ ID NO: 98181 - RNA, 9 nt, Artificial Sequence
  Description of Artificial Sequence: Synthetic oligonucleotide
augaaggcu

SEQ ID NO: 98182 - RNA, 10 nt, Artificial Sequence
  Description of Artificial Sequence: Synthetic oligonucleotide
cuggaguggu

SEQ ID NO: 98183 - RNA, 10 nt, Artificial Sequence
  Description of Artificial Sequence: Synthetic oligonucleotide
ggaagagagg

SEQ ID NO: 98184 - RNA, 11 nt, Artificial Sequence
  Description of Artificial Sequence: Synthetic oligonucleotide
uugcaucgggc

SEQ ID NO: 98185 - RNA, 12 nt, Artificial Sequence
  Description of Artificial Sequence: Synthetic oligonucleotide
uauccuacugug

SEQ ID NO: 98186 - RNA, 12 nt, Artificial Sequence
  Description of Artificial Sequence: Synthetic oligonucleotide
ccuacuguguaa

SEQ ID NO: 98187 - RNA, 11 nt, Artificial Sequence
  Description of Artificial Sequence: Synthetic oligonucleotide
cuuguagugua

SEQ ID NO: 98188 - RNA, 12 nt, Artificial Sequence
  Description of Artificial Sequence: Synthetic oligonucleotide
cuuuguugauug

SEQ ID NO: 98189 - RNA, 13 nt, Artificial Sequence
  Description of Artificial Sequence: Synthetic oligonucleotide
uuguugauugaaa

SEQ ID NO: 98190 - RNA, 14 nt, Artificial Sequence
  Description of Artificial Sequence: Synthetic oligonucleotide
ucuuuuucuuccau

SEQ ID NO: 98191 - RNA, 12 nt, Artificial Sequence
  Description of Artificial Sequence: Synthetic oligonucleotide
aucuuccuucua

SEQ ID NO: 98192 - RNA, 12 nt, Artificial Sequence
  Description of Artificial Sequence: Synthetic oligonucleotide
ugaaugcuucau

SEQ ID NO: 98193 - RNA, 12 nt, Artificial Sequence
  Description of Artificial Sequence: Synthetic oligonucleotide
gaaugcuucaug

SEQ ID NO: 98194 - RNA, 12 nt, Artificial Sequence
  Description of Artificial Sequence: Synthetic oligonucleotide
auucuacuuuga

SEQ ID NO: 98195 - RNA, 12 nt, Artificial Sequence
  Description of Artificial Sequence: Synthetic oligonucleotide
gcaacuacagac

SEQ ID NO: 98196 - RNA, 12 nt, Artificial Sequence
  Description of Artificial Sequence: Synthetic oligonucleotide
accaaggucaac

SEQ ID NO: 98197 - RNA, 12 nt, Artificial Sequence
  Description of Artificial Sequence: Synthetic oligonucleotide
gacuaucucgac

SEQ ID NO: 98198 - RNA, 12 nt, Artificial Sequence
  Description of Artificial Sequence: Synthetic oligonucleotide
accuucccaaac

SEQ ID NO: 98199 - RNA, 13 nt, Artificial Sequence
  Description of Artificial Sequence: Synthetic oligonucleotide
caagcuuagaacu

SEQ ID NO: 98200 - RNA, 14 nt, Artificial Sequence
  Description of Artificial Sequence: Synthetic oligonucleotide
gcuuagaacuuuaa

SEQ ID NO: 98201 - RNA, 13 nt, Artificial Sequence
  Description of Artificial Sequence: Synthetic oligonucleotide
aacuuuaagcaac

SEQ ID NO: 98202 - RNA, 10 nt, Artificial Sequence
  Description of Artificial Sequence: Synthetic oligonucleotide
agaccaccac

SEQ ID NO: 98203 - RNA, 13 nt, Artificial Sequence
  Description of Artificial Sequence: Synthetic oligonucleotide
cgagaaauaaagu

SEQ ID NO: 98204 - RNA, 13 nt, Artificial Sequence
  Description of Artificial Sequence: Synthetic oligonucleotide
gagaaauaaaguu

SEQ ID NO: 98205 - RNA, 11 nt, Artificial Sequence
  Description of Artificial Sequence: Synthetic oligonucleotide
ggaaaugaucc

SEQ ID NO: 98206 - RNA, 12 nt, Artificial Sequence
  Description of Artificial Sequence: Synthetic oligonucleotide
aagaaaugaaac

SEQ ID NO: 98207 - RNA, 12 nt, Artificial Sequence
  Description of Artificial Sequence: Synthetic oligonucleotide
uuuccauccucc

SEQ ID NO: 98208 - RNA, 14 nt, Artificial Sequence
  Description of Artificial Sequence: Synthetic oligonucleotide
cugaaaaucuuuga

SEQ ID NO: 98209 - RNA, 10 nt, Artificial Sequence
  Description of Artificial Sequence: Synthetic oligonucleotide
gccguucagg

SEQ ID NO: 98210 - RNA, 12 nt, Artificial Sequence
  Description of Artificial Sequence: Synthetic oligonucleotide
aggguccagaag

SEQ ID NO: 98211 - RNA, 12 nt, Artificial Sequence
  Description of Artificial Sequence: Synthetic oligonucleotide
caagacugcuug

SEQ ID NO: 98212 - RNA, 12 nt, Artificial Sequence
  Description of Artificial Sequence: Synthetic oligonucleotide
ccaugucuuugg

SEQ ID NO: 98213 - RNA, 10 nt, Artificial Sequence
  Description of Artificial Sequence: Synthetic oligonucleotide
ccugaaacac

SEQ ID NO: 98214 - RNA, 11 nt, Artificial Sequence
  Description of Artificial Sequence: Synthetic oligonucleotide
cucuguaccuc

SEQ ID NO: 98215 - RNA, 11 nt, Artificial Sequence
  Description of Artificial Sequence: Synthetic oligonucleotide
gcaagacaaga

SEQ ID NO: 98216 - RNA, 12 nt, Artificial Sequence
  Description of Artificial Sequence: Synthetic oligonucleotide
caagacaagaaa

SEQ ID NO: 98217 - RNA, 11 nt, Artificial Sequence
  Description of Artificial Sequence: Synthetic oligonucleotide
guacaagaucc

SEQ ID NO: 98218 - RNA, 11 nt, Artificial Sequence
  Description of Artificial Sequence: Synthetic oligonucleotide
guacuugcaga

SEQ ID NO: 98219 - RNA, 12 nt, Artificial Sequence
  Description of Artificial Sequence: Synthetic oligonucleotide
gaucgauacaga

SEQ ID NO: 98220 - RNA, 12 nt, Artificial Sequence
  Description of Artificial Sequence: Synthetic oligonucleotide
auaaaaauaaau

SEQ ID NO: 98221 - RNA, 12 nt, Artificial Sequence
  Description of Artificial Sequence: Synthetic oligonucleotide
aaaaauaaauau

SEQ ID NO: 98222 - RNA, 12 nt, Artificial Sequence
  Description of Artificial Sequence: Synthetic oligonucleotide
uugacugcugug

SEQ ID NO: 98223 - RNA, 12 nt, Artificial Sequence
  Description of Artificial Sequence: Synthetic oligonucleotide
gagaugagagac

SEQ ID NO: 98224 - RNA, 9 nt, Artificial Sequence
  Description of Artificial Sequence: Synthetic oligonucleotide
cccacuugg

SEQ ID NO: 98225 - RNA, 1405 nt, Homo sapiens
acaauucagaggcugcugccugcuuaggagguuguagaaagcucuguagguucucucuguguguccuacaggagucuucaggccagcucccugucggauggcuuuuaugaaaaaauaucuccuccccauucuggggcucuucauggccuacuacuacuauucugcaaacgaggaauucagaccagagaugcuccaaggaaagaaagugauugucacaggggccagcaaagggaucggaagagagauggcuuaucaucuggcgaagaugggagcccaugugguggugacagcgaggucaaaagaaacucuacagaaggugguaucccacugccuggagcuuggagcagccucagcacacuacauugcuggcaccauggaagacaugaccuucgcagagcaauuuguugcccaagcaggaaagcucaugggaggacuagacaugcucauucucaaccacaucaccaacacuucuuugaaucuuuuucaugaugauauucaccaugugcgcaaaagcauggaagucaacuuccucaguuacgugguccugacuguagcugccuugcccaugcugaagcagagcaauggaagcauuguugucgucuccucucuggcugggaaaguggcuuauccaaugguugcugccuauucugcaagcaaguuugcuuuggauggguucuucuccuccaucagaaaggaauauucaguguccagggucaauguaucaaucacucucuguguucuuggccucauagacacagaaacagccaugaaggcaguuucugggauaguccauaugcaagcagcuccaaaggaggaaugugcccuggagaucaucaaagggggagcucugcgccaagaagaaguguauuaugacagcucacucuggaccacucuucugaucagaaauccaugcaggaagauccuggaauuucucuacucaacgagcuauaauauggacagauucauaaacaaguaggaacucccugagggcugggcaugcugagggauuuugggacuguucugucucauguuuaucugagcucuuaucuaugaagacaucuucccagaguguccccagagacaugcaagucaugggucacaccugacaaauggaaggaguuccucuaacauuugcaaaauggaaauguaauaauaaugaaugucaugcaccgcugcagccagcaguuguaaaauuguuaguaaacauagguauaauuaccagauaguuauauuaaauuuauaucuuauauauaauaauaugugaugauuaauacaauauuaauuauaauaaaggucacauaaacuuuauaaauucauaacugguagcuauaacuugagcuuauucaggaugguuucuuuaaaaccauaaacuguacaaaugaaauuuuucaauauuuguuucuua

SEQ ID NO: 98226 - RNA, 1415 nt, Homo sapiens
ggaggagggagagagagagaagagaagaaaaagaaaaaagaacaucaauaaaaagaagucagauuuguucgaaaucuugaggagucuucaggccagcucccugucggauggcuuuuaugaaaaaauaucuccuccccauucuggggcucuucauggccuacuacuacuauucugcaaacgaggaauucagaccagagaugcuccaaggaaagaaagugauugucacaggggccagcaaagggaucggaagagagauggcuuaucaucuggcgaagaugggagcccaugugguggugacagcgaggucaaaagaaacucuacagaaggugguaucccacugccuggagcuuggagcagccucagcacacuacauugcuggcaccauggaagacaugaccuucgcagagcaauuuguugcccaagcaggaaagcucaugggaggacuagacaugcucauucucaaccacaucaccaacacuucuuugaaucuuuuucaugaugauauucaccaugugcgcaaaagcauggaagucaacuuccucaguuacgugguccugacuguagcugccuugcccaugcugaagcagagcaauggaagcauuguugucgucuccucucuggcugggaaaguggcuuauccaaugguugcugccuauucugcaagcaaguuugcuuuggauggguucuucuccuccaucagaaaggaauauucaguguccagggucaauguaucaaucacucucuguguucuuggccucauagacacagaaacagccaugaaggcaguuucugggauaguccauaugcaagcagcuccaaaggaggaaugugcccuggagaucaucaaagggggagcucugcgccaagaagaaguguauuaugacagcucacucuggaccacucuucugaucagaaauccaugcaggaagauccuggaauuucucuacucaacgagcuauaauauggacagauucauaaacaaguaggaacucccugagggcugggcaugcugagggauuuugggacuguucugucucauguuuaucugagcucuuaucuaugaagacaucuucccagaguguccccagagacaugcaagucaugggucacaccugacaaauggaaggaguuccucuaacauuugcaaaauggaaauguaauaauaaugaaugucaugcaccgcugcagccagcaguuguaaaauuguuaguaaacauagguauaauuaccagauaguuauauuaaauuuauaucuuauauauaauaauaugugaugauuaauacaauauuaauuauaauaaaggucacauaaacuuuauaaauucauaacugguagcuauaacuugagcuuauucaggaugguuucuuuaaaaccauaaacuguacaaaugaaauuuuucaauauuuguuucuua

SEQ ID NO: 98227 - RNA, 19 nt, Artificial Sequence
  Description of Artificial Sequence: Synthetic oligonucleotide
ggaggagggagagagagag

SEQ ID NO: 98228 - RNA, 19 nt, Artificial Sequence
  Description of Artificial Sequence: Synthetic oligonucleotide
gaagagaagaaaaagaaaa

SEQ ID NO: 98229 - RNA, 19 nt, Artificial Sequence
  Description of Artificial Sequence: Synthetic oligonucleotide
aaagaacaucaauaaaaag

SEQ ID NO: 98230 - RNA, 19 nt, Artificial Sequence
  Description of Artificial Sequence: Synthetic oligonucleotide
gaagucagauuuguucgaa

SEQ ID NO: 98231 - RNA, 19 nt, Artificial Sequence
  Description of Artificial Sequence: Synthetic oligonucleotide
aaucuugaggagucuucag

SEQ ID NO: 98232 - RNA, 19 nt, Artificial Sequence
  Description of Artificial Sequence: Synthetic oligonucleotide
ggccagcucccugucggau

SEQ ID NO: 98233 - RNA, 19 nt, Artificial Sequence
  Description of Artificial Sequence: Synthetic oligonucleotide
uggcuuuuaugaaaaaaua

SEQ ID NO: 98234 - RNA, 19 nt, Artificial Sequence
  Description of Artificial Sequence: Synthetic oligonucleotide
aucuccuccccauucuggg

SEQ ID NO: 98235 - RNA, 19 nt, Artificial Sequence
  Description of Artificial Sequence: Synthetic oligonucleotide
ggcucuucauggccuacua

SEQ ID NO: 98236 - RNA, 19 nt, Artificial Sequence
  Description of Artificial Sequence: Synthetic oligonucleotide
acuacuauucugcaaacga

SEQ ID NO: 98237 - RNA, 19 nt, Artificial Sequence
  Description of Artificial Sequence: Synthetic oligonucleotide
aggaauucagaccagagau

SEQ ID NO: 98238 - RNA, 19 nt, Artificial Sequence
  Description of Artificial Sequence: Synthetic oligonucleotide
ugcuccaaggaaagaaagu

SEQ ID NO: 98239 - RNA, 19 nt, Artificial Sequence
  Description of Artificial Sequence: Synthetic oligonucleotide
ugauugucacaggggccag

SEQ ID NO: 98240 - RNA, 19 nt, Artificial Sequence
  Description of Artificial Sequence: Synthetic oligonucleotide
gcaaagggaucggaagaga

SEQ ID NO: 98241 - RNA, 19 nt, Artificial Sequence
  Description of Artificial Sequence: Synthetic oligonucleotide
agauggcuuaucaucuggc

SEQ ID NO: 98242 - RNA, 19 nt, Artificial Sequence
  Description of Artificial Sequence: Synthetic oligonucleotide
cgaagaugggagcccaugu

SEQ ID NO: 98243 - RNA, 19 nt, Artificial Sequence
  Description of Artificial Sequence: Synthetic oligonucleotide
ugguggugacagcgagguc

SEQ ID NO: 98244 - RNA, 19 nt, Artificial Sequence
  Description of Artificial Sequence: Synthetic oligonucleotide
caaaagaaacucuacagaa

SEQ ID NO: 98245 - RNA, 19 nt, Artificial Sequence
  Description of Artificial Sequence: Synthetic oligonucleotide
aggugguaucccacugccu

SEQ ID NO: 98246 - RNA, 19 nt, Artificial Sequence
  Description of Artificial Sequence: Synthetic oligonucleotide
uggagcuuggagcagccuc

SEQ ID NO: 98247 - RNA, 19 nt, Artificial Sequence
  Description of Artificial Sequence: Synthetic oligonucleotide
cagcacacuacauugcugg

SEQ ID NO: 98248 - RNA, 19 nt, Artificial Sequence
  Description of Artificial Sequence: Synthetic oligonucleotide
gcaccauggaagacaugac

SEQ ID NO: 98249 - RNA, 19 nt, Artificial Sequence
  Description of Artificial Sequence: Synthetic oligonucleotide
ccuucgcagagcaauuugu

SEQ ID NO: 98250 - RNA, 19 nt, Artificial Sequence
  Description of Artificial Sequence: Synthetic oligonucleotide
uugcccaagcaggaaagcu

SEQ ID NO: 98251 - RNA, 19 nt, Artificial Sequence
  Description of Artificial Sequence: Synthetic oligonucleotide
ucaugggaggacuagacau

SEQ ID NO: 98252 - RNA, 19 nt, Artificial Sequence
  Description of Artificial Sequence: Synthetic oligonucleotide
ugcucauucucaaccacau

SEQ ID NO: 98253 - RNA, 19 nt, Artificial Sequence
  Description of Artificial Sequence: Synthetic oligonucleotide
ucaccaacacuucuuugaa

SEQ ID NO: 98254 - RNA, 19 nt, Artificial Sequence
  Description of Artificial Sequence: Synthetic oligonucleotide
aucuuuuucaugaugauau

SEQ ID NO: 98255 - RNA, 19 nt, Artificial Sequence
  Description of Artificial Sequence: Synthetic oligonucleotide
uucaccaugugcgcaaaag

SEQ ID NO: 98256 - RNA, 19 nt, Artificial Sequence
  Description of Artificial Sequence: Synthetic oligonucleotide
gcauggaagucaacuuccu

SEQ ID NO: 98257 - RNA, 19 nt, Artificial Sequence
  Description of Artificial Sequence: Synthetic oligonucleotide
ucaguuacgugguccugac

SEQ ID NO: 98258 - RNA, 19 nt, Artificial Sequence
  Description of Artificial Sequence: Synthetic oligonucleotide
cuguagcugccuugcccau

SEQ ID NO: 98259 - RNA, 19 nt, Artificial Sequence
  Description of Artificial Sequence: Synthetic oligonucleotide
ugcugaagcagagcaaugg

SEQ ID NO: 98260 - RNA, 19 nt, Artificial Sequence
  Description of Artificial Sequence: Synthetic oligonucleotide
gaagcauuguugucgucuc

SEQ ID NO: 98261 - RNA, 19 nt, Artificial Sequence
  Description of Artificial Sequence: Synthetic oligonucleotide
ccucucuggcugggaaagu

SEQ ID NO: 98262 - RNA, 19 nt, Artificial Sequence
  Description of Artificial Sequence: Synthetic oligonucleotide
uggcuuauccaaugguugc

SEQ ID NO: 98263 - RNA, 19 nt, Artificial Sequence
  Description of Artificial Sequence: Synthetic oligonucleotide
cugccuauucugcaagcaa

SEQ ID NO: 98264 - RNA, 19 nt, Artificial Sequence
  Description of Artificial Sequence: Synthetic oligonucleotide
aguuugcuuuggauggguu

SEQ ID NO: 98265 - RNA, 19 nt, Artificial Sequence
  Description of Artificial Sequence: Synthetic oligonucleotide
ucuucuccuccaucagaaa

SEQ ID NO: 98266 - RNA, 19 nt, Artificial Sequence
  Description of Artificial Sequence: Synthetic oligonucleotide
aggaauauucaguguccag

SEQ ID NO: 98267 - RNA, 19 nt, Artificial Sequence
  Description of Artificial Sequence: Synthetic oligonucleotide
gggucaauguaucaaucac

SEQ ID NO: 98268 - RNA, 19 nt, Artificial Sequence
  Description of Artificial Sequence: Synthetic oligonucleotide
cucucuguguucuuggccu

SEQ ID NO: 98269 - RNA, 19 nt, Artificial Sequence
  Description of Artificial Sequence: Synthetic oligonucleotide
ucauagacacagaaacagc

SEQ ID NO: 98270 - RNA, 19 nt, Artificial Sequence
  Description of Artificial Sequence: Synthetic oligonucleotide
ccaugaaggcaguuucugg

SEQ ID NO: 98271 - RNA, 19 nt, Artificial Sequence
  Description of Artificial Sequence: Synthetic oligonucleotide
ggauaguccauaugcaagc

SEQ ID NO: 98272 - RNA, 19 nt, Artificial Sequence
  Description of Artificial Sequence: Synthetic oligonucleotide
cagcuccaaaggaggaaug

SEQ ID NO: 98273 - RNA, 19 nt, Artificial Sequence
  Description of Artificial Sequence: Synthetic oligonucleotide
gugcccuggagaucaucaa

SEQ ID NO: 98274 - RNA, 19 nt, Artificial Sequence
  Description of Artificial Sequence: Synthetic oligonucleotide
aagggggagcucugcgcca

SEQ ID NO: 98275 - RNA, 19 nt, Artificial Sequence
  Description of Artificial Sequence: Synthetic oligonucleotide
aagaagaaguguauuauga

SEQ ID NO: 98276 - RNA, 19 nt, Artificial Sequence
  Description of Artificial Sequence: Synthetic oligonucleotide
acagcucacucuggaccac

SEQ ID NO: 98277 - RNA, 19 nt, Artificial Sequence
  Description of Artificial Sequence: Synthetic oligonucleotide
cucuucugaucagaaaucc

SEQ ID NO: 98278 - RNA, 19 nt, Artificial Sequence
  Description of Artificial Sequence: Synthetic oligonucleotide
caugcaggaagauccugga

SEQ ID NO: 98279 - RNA, 19 nt, Artificial Sequence
  Description of Artificial Sequence: Synthetic oligonucleotide
aauuucucuacucaacgag

SEQ ID NO: 98280 - RNA, 19 nt, Artificial Sequence
  Description of Artificial Sequence: Synthetic oligonucleotide
gcuauaauauggacagauu

SEQ ID NO: 98281 - RNA, 19 nt, Artificial Sequence
  Description of Artificial Sequence: Synthetic oligonucleotide
ucauaaacaaguaggaacu

SEQ ID NO: 98282 - RNA, 19 nt, Artificial Sequence
  Description of Artificial Sequence: Synthetic oligonucleotide
ucccugagggcugggcaug

SEQ ID NO: 98283 - RNA, 19 nt, Artificial Sequence
  Description of Artificial Sequence: Synthetic oligonucleotide
gcugagggauuuugggacu

SEQ ID NO: 98284 - RNA, 19 nt, Artificial Sequence
  Description of Artificial Sequence: Synthetic oligonucleotide
uguucugucucauguuuau

SEQ ID NO: 98285 - RNA, 19 nt, Artificial Sequence
  Description of Artificial Sequence: Synthetic oligonucleotide
ucugagcucuuaucuauga

SEQ ID NO: 98286 - RNA, 19 nt, Artificial Sequence
  Description of Artificial Sequence: Synthetic oligonucleotide
aagacaucuucccagagug

SEQ ID NO: 98287 - RNA, 19 nt, Artificial Sequence
  Description of Artificial Sequence: Synthetic oligonucleotide
guccccagagacaugcaag

SEQ ID NO: 98288 - RNA, 19 nt, Artificial Sequence
  Description of Artificial Sequence: Synthetic oligonucleotide
gucaugggucacaccugac

SEQ ID NO: 98289 - RNA, 19 nt, Artificial Sequence
  Description of Artificial Sequence: Synthetic oligonucleotide
caaauggaaggaguuccuc

SEQ ID NO: 98290 - RNA, 19 nt, Artificial Sequence
  Description of Artificial Sequence: Synthetic oligonucleotide
cuaacauuugcaaaaugga

SEQ ID NO: 98291 - RNA, 19 nt, Artificial Sequence
  Description of Artificial Sequence: Synthetic oligonucleotide
aaauguaauaauaaugaau

SEQ ID NO: 98292 - RNA, 19 nt, Artificial Sequence
  Description of Artificial Sequence: Synthetic oligonucleotide
ugucaugcaccgcugcagc

SEQ ID NO: 98293 - RNA, 19 nt, Artificial Sequence
  Description of Artificial Sequence: Synthetic oligonucleotide
ccagcaguuguaaaauugu

SEQ ID NO: 98294 - RNA, 19 nt, Artificial Sequence
  Description of Artificial Sequence: Synthetic oligonucleotide
uuaguaaacauagguauaa

SEQ ID NO: 98295 - RNA, 19 nt, Artificial Sequence
  Description of Artificial Sequence: Synthetic oligonucleotide
auuaccagauaguuauauu

SEQ ID NO: 98296 - RNA, 19 nt, Artificial Sequence
  Description of Artificial Sequence: Synthetic oligonucleotide
uaaauuuauaucuuauaua

SEQ ID NO: 98297 - RNA, 19 nt, Artificial Sequence
  Description of Artificial Sequence: Synthetic oligonucleotide
auaauaauaugugaugauu

SEQ ID NO: 98298 - RNA, 19 nt, Artificial Sequence
  Description of Artificial Sequence: Synthetic oligonucleotide
uaauacaauauuaauuaua

SEQ ID NO: 98299 - RNA, 19 nt, Artificial Sequence
  Description of Artificial Sequence: Synthetic oligonucleotide
aauaaaggucacauaaacu

SEQ ID NO: 98300 - RNA, 19 nt, Artificial Sequence
  Description of Artificial Sequence: Synthetic oligonucleotide
uuuauaaauucauaacugg

SEQ ID NO: 98301 - RNA, 19 nt, Artificial Sequence
  Description of Artificial Sequence: Synthetic oligonucleotide
guagcuauaacuugagcuu

SEQ ID NO: 98302 - RNA, 19 nt, Artificial Sequence
  Description of Artificial Sequence: Synthetic oligonucleotide
uauucaggaugguuucuuu

SEQ ID NO: 98303 - RNA, 19 nt, Artificial Sequence
  Description of Artificial Sequence: Synthetic oligonucleotide
uaaaaccauaaacuguaca

SEQ ID NO: 98304 - RNA, 19 nt, Artificial Sequence
  Description of Artificial Sequence: Synthetic oligonucleotide
aaaugaaauuuuucaauau

SEQ ID NO: 98305 - RNA, 19 nt, Artificial Sequence
  Description of Artificial Sequence: Synthetic oligonucleotide
uuucaauauuuguuucuua

SEQ ID NO: 98306 - RNA, 19 nt, Artificial Sequence
  Description of Artificial Sequence: Synthetic oligonucleotide
acaauucagaggcugcugc

SEQ ID NO: 98307 - RNA, 19 nt, Artificial Sequence
  Description of Artificial Sequence: Synthetic oligonucleotide
ccugcuuaggagguuguag

SEQ ID NO: 98308 - RNA, 19 nt, Artificial Sequence
  Description of Artificial Sequence: Synthetic oligonucleotide
gaaagcucuguagguucuc

SEQ ID NO: 98309 - RNA, 19 nt, Artificial Sequence
  Description of Artificial Sequence: Synthetic oligonucleotide
cucuguguguccuacagga

SEQ ID NO: 98310 - RNA, 19 nt, Artificial Sequence
  Description of Artificial Sequence: Synthetic oligonucleotide
agucuucaggccagcuccc

SEQ ID NO: 98311 - RNA, 19 nt, Artificial Sequence
  Description of Artificial Sequence: Synthetic oligonucleotide
cugucggauggcuuuuaug

SEQ ID NO: 98312 - RNA, 19 nt, Artificial Sequence
  Description of Artificial Sequence: Synthetic oligonucleotide
gaaaaaauaucuccucccc

SEQ ID NO: 98313 - RNA, 19 nt, Artificial Sequence
  Description of Artificial Sequence: Synthetic oligonucleotide
cauucuggggcucuucaug

SEQ ID NO: 98314 - RNA, 19 nt, Artificial Sequence
  Description of Artificial Sequence: Synthetic oligonucleotide
ggccuacuacuacuauucu

SEQ ID NO: 98315 - RNA, 19 nt, Artificial Sequence
  Description of Artificial Sequence: Synthetic oligonucleotide
ugcaaacgaggaauucaga

SEQ ID NO: 98316 - RNA, 19 nt, Artificial Sequence
  Description of Artificial Sequence: Synthetic oligonucleotide
accagagaugcuccaagga

SEQ ID NO: 98317 - RNA, 19 nt, Artificial Sequence
  Description of Artificial Sequence: Synthetic oligonucleotide
aaagaaagugauugucaca

SEQ ID NO: 98318 - RNA, 19 nt, Artificial Sequence
  Description of Artificial Sequence: Synthetic oligonucleotide
aggggccagcaaagggauc

SEQ ID NO: 98319 - RNA, 19 nt, Artificial Sequence
  Description of Artificial Sequence: Synthetic oligonucleotide
cggaagagagauggcuuau

SEQ ID NO: 98320 - RNA, 19 nt, Artificial Sequence
  Description of Artificial Sequence: Synthetic oligonucleotide
ucaucuggcgaagauggga

SEQ ID NO: 98321 - RNA, 19 nt, Artificial Sequence
  Description of Artificial Sequence: Synthetic oligonucleotide
agcccaugugguggugaca

SEQ ID NO: 98322 - RNA, 19 nt, Artificial Sequence
  Description of Artificial Sequence: Synthetic oligonucleotide
agcgaggucaaaagaaacu

SEQ ID NO: 98323 - RNA, 19 nt, Artificial Sequence
  Description of Artificial Sequence: Synthetic oligonucleotide
ucuacagaaggugguaucc

SEQ ID NO: 98324 - RNA, 19 nt, Artificial Sequence
  Description of Artificial Sequence: Synthetic oligonucleotide
ccacugccuggagcuugga

SEQ ID NO: 98325 - RNA, 19 nt, Artificial Sequence
  Description of Artificial Sequence: Synthetic oligonucleotide
agcagccucagcacacuac

SEQ ID NO: 98326 - RNA, 19 nt, Artificial Sequence
  Description of Artificial Sequence: Synthetic oligonucleotide
cauugcuggcaccauggaa

SEQ ID NO: 98327 - RNA, 19 nt, Artificial Sequence
  Description of Artificial Sequence: Synthetic oligonucleotide
agacaugaccuucgcagag

SEQ ID NO: 98328 - RNA, 19 nt, Artificial Sequence
  Description of Artificial Sequence: Synthetic oligonucleotide
gcaauuuguugcccaagca

SEQ ID NO: 98329 - RNA, 19 nt, Artificial Sequence
  Description of Artificial Sequence: Synthetic oligonucleotide
aggaaagcucaugggagga

SEQ ID NO: 98330 - RNA, 19 nt, Artificial Sequence
  Description of Artificial Sequence: Synthetic oligonucleotide
acuagacaugcucauucuc

SEQ ID NO: 98331 - RNA, 19 nt, Artificial Sequence
  Description of Artificial Sequence: Synthetic oligonucleotide
caaccacaucaccaacacu

SEQ ID NO: 98332 - RNA, 19 nt, Artificial Sequence
  Description of Artificial Sequence: Synthetic oligonucleotide
uucuuugaaucuuuuucau

SEQ ID NO: 98333 - RNA, 19 nt, Artificial Sequence
  Description of Artificial Sequence: Synthetic oligonucleotide
ugaugauauucaccaugug

SEQ ID NO: 98334 - RNA, 19 nt, Artificial Sequence
  Description of Artificial Sequence: Synthetic oligonucleotide
gcgcaaaagcauggaaguc

SEQ ID NO: 98335 - RNA, 19 nt, Artificial Sequence
  Description of Artificial Sequence: Synthetic oligonucleotide
caacuuccucaguuacgug

SEQ ID NO: 98336 - RNA, 19 nt, Artificial Sequence
  Description of Artificial Sequence: Synthetic oligonucleotide
gguccugacuguagcugcc

SEQ ID NO: 98337 - RNA, 19 nt, Artificial Sequence
  Description of Artificial Sequence: Synthetic oligonucleotide
cuugcccaugcugaagcag

SEQ ID NO: 98338 - RNA, 19 nt, Artificial Sequence
  Description of Artificial Sequence: Synthetic oligonucleotide
gagcaauggaagcauuguu

SEQ ID NO: 98339 - RNA, 19 nt, Artificial Sequence
  Description of Artificial Sequence: Synthetic oligonucleotide
ugucgucuccucucuggcu

SEQ ID NO: 98340 - RNA, 19 nt, Artificial Sequence
  Description of Artificial Sequence: Synthetic oligonucleotide
ugggaaaguggcuuaucca

SEQ ID NO: 98341 - RNA, 19 nt, Artificial Sequence
  Description of Artificial Sequence: Synthetic oligonucleotide
aaugguugcugccuauucu

SEQ ID NO: 98342 - RNA, 19 nt, Artificial Sequence
  Description of Artificial Sequence: Synthetic oligonucleotide
ugcaagcaaguuugcuuug

SEQ ID NO: 98343 - RNA, 19 nt, Artificial Sequence
  Description of Artificial Sequence: Synthetic oligonucleotide
ggauggguucuucuccucc

SEQ ID NO: 98344 - RNA, 19 nt, Artificial Sequence
  Description of Artificial Sequence: Synthetic oligonucleotide
caucagaaaggaauauuca

SEQ ID NO: 98345 - RNA, 19 nt, Artificial Sequence
  Description of Artificial Sequence: Synthetic oligonucleotide
aguguccagggucaaugua

SEQ ID NO: 98346 - RNA, 19 nt, Artificial Sequence
  Description of Artificial Sequence: Synthetic oligonucleotide
aucaaucacucucuguguu

SEQ ID NO: 98347 - RNA, 19 nt, Artificial Sequence
  Description of Artificial Sequence: Synthetic oligonucleotide
ucuuggccucauagacaca

SEQ ID NO: 98348 - RNA, 19 nt, Artificial Sequence
  Description of Artificial Sequence: Synthetic oligonucleotide
agaaacagccaugaaggca

SEQ ID NO: 98349 - RNA, 19 nt, Artificial Sequence
  Description of Artificial Sequence: Synthetic oligonucleotide
aguuucugggauaguccau

SEQ ID NO: 98350 - RNA, 19 nt, Artificial Sequence
  Description of Artificial Sequence: Synthetic oligonucleotide
uaugcaagcagcuccaaag

SEQ ID NO: 98351 - RNA, 19 nt, Artificial Sequence
  Description of Artificial Sequence: Synthetic oligonucleotide
ggaggaaugugcccuggag

SEQ ID NO: 98352 - RNA, 19 nt, Artificial Sequence
  Description of Artificial Sequence: Synthetic oligonucleotide
gaucaucaaagggggagcu

SEQ ID NO: 98353 - RNA, 19 nt, Artificial Sequence
  Description of Artificial Sequence: Synthetic oligonucleotide
ucugcgccaagaagaagug

SEQ ID NO: 98354 - RNA, 19 nt, Artificial Sequence
  Description of Artificial Sequence: Synthetic oligonucleotide
guauuaugacagcucacuc

SEQ ID NO: 98355 - RNA, 19 nt, Artificial Sequence
  Description of Artificial Sequence: Synthetic oligonucleotide
cuggaccacucuucugauc

SEQ ID NO: 98356 - RNA, 19 nt, Artificial Sequence
  Description of Artificial Sequence: Synthetic oligonucleotide
cagaaauccaugcaggaag

SEQ ID NO: 98357 - RNA, 19 nt, Artificial Sequence
  Description of Artificial Sequence: Synthetic oligonucleotide
gauccuggaauuucucuac

SEQ ID NO: 98358 - RNA, 19 nt, Artificial Sequence
  Description of Artificial Sequence: Synthetic oligonucleotide
cucaacgagcuauaauaug

SEQ ID NO: 98359 - RNA, 19 nt, Artificial Sequence
  Description of Artificial Sequence: Synthetic oligonucleotide
ggacagauucauaaacaag

SEQ ID NO: 98360 - RNA, 19 nt, Artificial Sequence
  Description of Artificial Sequence: Synthetic oligonucleotide
guaggaacucccugagggc

SEQ ID NO: 98361 - RNA, 19 nt, Artificial Sequence
  Description of Artificial Sequence: Synthetic oligonucleotide
cugggcaugcugagggauu

SEQ ID NO: 98362 - RNA, 19 nt, Artificial Sequence
  Description of Artificial Sequence: Synthetic oligonucleotide
uuugggacuguucugucuc

SEQ ID NO: 98363 - RNA, 19 nt, Artificial Sequence
  Description of Artificial Sequence: Synthetic oligonucleotide
cauguuuaucugagcucuu

SEQ ID NO: 98364 - RNA, 19 nt, Artificial Sequence
  Description of Artificial Sequence: Synthetic oligonucleotide
uaucuaugaagacaucuuc

SEQ ID NO: 98365 - RNA, 19 nt, Artificial Sequence
  Description of Artificial Sequence: Synthetic oligonucleotide
cccagaguguccccagaga

SEQ ID NO: 98366 - RNA, 19 nt, Artificial Sequence
  Description of Artificial Sequence: Synthetic oligonucleotide
acaugcaagucauggguca

SEQ ID NO: 98367 - RNA, 19 nt, Artificial Sequence
  Description of Artificial Sequence: Synthetic oligonucleotide
acaccugacaaauggaagg

SEQ ID NO: 98368 - RNA, 19 nt, Artificial Sequence
  Description of Artificial Sequence: Synthetic oligonucleotide
gaguuccucuaacauuugc

SEQ ID NO: 98369 - RNA, 19 nt, Artificial Sequence
  Description of Artificial Sequence: Synthetic oligonucleotide
caaaauggaaauguaauaa

SEQ ID NO: 98370 - RNA, 19 nt, Artificial Sequence
  Description of Artificial Sequence: Synthetic oligonucleotide
auaaugaaugucaugcacc

SEQ ID NO: 98371 - RNA, 19 nt, Artificial Sequence
  Description of Artificial Sequence: Synthetic oligonucleotide
cgcugcagccagcaguugu

SEQ ID NO: 98372 - RNA, 19 nt, Artificial Sequence
  Description of Artificial Sequence: Synthetic oligonucleotide
uaaaauuguuaguaaacau

SEQ ID NO: 98373 - RNA, 19 nt, Artificial Sequence
  Description of Artificial Sequence: Synthetic oligonucleotide
uagguauaauuaccagaua

SEQ ID NO: 98374 - RNA, 19 nt, Artificial Sequence
  Description of Artificial Sequence: Synthetic oligonucleotide
aguuauauuaaauuuauau

SEQ ID NO: 98375 - RNA, 19 nt, Artificial Sequence
  Description of Artificial Sequence: Synthetic oligonucleotide
ucuuauauauaauaauaug

SEQ ID NO: 98376 - RNA, 19 nt, Artificial Sequence
  Description of Artificial Sequence: Synthetic oligonucleotide
gugaugauuaauacaauau

SEQ ID NO: 98377 - RNA, 19 nt, Artificial Sequence
  Description of Artificial Sequence: Synthetic oligonucleotide
uuaauuauaauaaagguca

SEQ ID NO: 98378 - RNA, 19 nt, Artificial Sequence
  Description of Artificial Sequence: Synthetic oligonucleotide
acauaaacuuuauaaauuc

SEQ ID NO: 98379 - RNA, 19 nt, Artificial Sequence
  Description of Artificial Sequence: Synthetic oligonucleotide
cauaacugguagcuauaac

SEQ ID NO: 98380 - RNA, 19 nt, Artificial Sequence
  Description of Artificial Sequence: Synthetic oligonucleotide
cuugagcuuauucaggaug

SEQ ID NO: 98381 - RNA, 19 nt, Artificial Sequence
  Description of Artificial Sequence: Synthetic oligonucleotide
gguuucuuuaaaaccauaa

SEQ ID NO: 98382 - RNA, 19 nt, Artificial Sequence
  Description of Artificial Sequence: Synthetic oligonucleotide
aacuguacaaaugaaauuu

SEQ ID NO: 98383 - RNA, 25 nt, Artificial Sequence
  Description of Artificial Sequence: Synthetic oligonucleotide
ggaggagggagagagagagaagaga

SEQ ID NO: 98384 - RNA, 25 nt, Artificial Sequence
  Description of Artificial Sequence: Synthetic oligonucleotide
aagaaaaagaaaaaagaacaucaau

SEQ ID NO: 98385 - RNA, 25 nt, Artificial Sequence
  Description of Artificial Sequence: Synthetic oligonucleotide
uaaaaagaagucagauuuguucgaa

SEQ ID NO: 98386 - RNA, 25 nt, Artificial Sequence
  Description of Artificial Sequence: Synthetic oligonucleotide
aaucuugaggagucuucaggccagc

SEQ ID NO: 98387 - RNA, 25 nt, Artificial Sequence
  Description of Artificial Sequence: Synthetic oligonucleotide
cucccugucggauggcuuuuaugaa

SEQ ID NO: 98388 - RNA, 25 nt, Artificial Sequence
  Description of Artificial Sequence: Synthetic oligonucleotide
aaaaauaucuccuccccauucuggg

SEQ ID NO: 98389 - RNA, 25 nt, Artificial Sequence
  Description of Artificial Sequence: Synthetic oligonucleotide
ggcucuucauggccuacuacuacua

SEQ ID NO: 98390 - RNA, 25 nt, Artificial Sequence
  Description of Artificial Sequence: Synthetic oligonucleotide
auucugcaaacgaggaauucagacc

SEQ ID NO: 98391 - RNA, 25 nt, Artificial Sequence
  Description of Artificial Sequence: Synthetic oligonucleotide
cagagaugcuccaaggaaagaaagu

SEQ ID NO: 98392 - RNA, 25 nt, Artificial Sequence
  Description of Artificial Sequence: Synthetic oligonucleotide
ugauugucacaggggccagcaaagg

SEQ ID NO: 98393 - RNA, 25 nt, Artificial Sequence
  Description of Artificial Sequence: Synthetic oligonucleotide
ggaucggaagagagauggcuuauca

SEQ ID NO: 98394 - RNA, 25 nt, Artificial Sequence
  Description of Artificial Sequence: Synthetic oligonucleotide
aucuggcgaagaugggagcccaugu

SEQ ID NO: 98395 - RNA, 25 nt, Artificial Sequence
  Description of Artificial Sequence: Synthetic oligonucleotide
ugguggugacagcgaggucaaaaga

SEQ ID NO: 98396 - RNA, 25 nt, Artificial Sequence
  Description of Artificial Sequence: Synthetic oligonucleotide
aaacucuacagaaggugguauccca

SEQ ID NO: 98397 - RNA, 25 nt, Artificial Sequence
  Description of Artificial Sequence: Synthetic oligonucleotide
acugccuggagcuuggagcagccuc

SEQ ID NO: 98398 - RNA, 25 nt, Artificial Sequence
  Description of Artificial Sequence: Synthetic oligonucleotide
cagcacacuacauugcuggcaccau

SEQ ID NO: 98399 - RNA, 25 nt, Artificial Sequence
  Description of Artificial Sequence: Synthetic oligonucleotide
uggaagacaugaccuucgcagagca

SEQ ID NO: 98400 - RNA, 25 nt, Artificial Sequence
  Description of Artificial Sequence: Synthetic oligonucleotide
aauuuguugcccaagcaggaaagcu

SEQ ID NO: 98401 - RNA, 25 nt, Artificial Sequence
  Description of Artificial Sequence: Synthetic oligonucleotide
ucaugggaggacuagacaugcucau

SEQ ID NO: 98402 - RNA, 25 nt, Artificial Sequence
  Description of Artificial Sequence: Synthetic oligonucleotide
uucucaaccacaucaccaacacuuc

SEQ ID NO: 98403 - RNA, 25 nt, Artificial Sequence
  Description of Artificial Sequence: Synthetic oligonucleotide
cuuugaaucuuuuucaugaugauau

SEQ ID NO: 98404 - RNA, 25 nt, Artificial Sequence
  Description of Artificial Sequence: Synthetic oligonucleotide
uucaccaugugcgcaaaagcaugga

SEQ ID NO: 98405 - RNA, 25 nt, Artificial Sequence
  Description of Artificial Sequence: Synthetic oligonucleotide
aagucaacuuccucaguuacguggu

SEQ ID NO: 98406 - RNA, 25 nt, Artificial Sequence
  Description of Artificial Sequence: Synthetic oligonucleotide
uccugacuguagcugccuugcccau

SEQ ID NO: 98407 - RNA, 25 nt, Artificial Sequence
  Description of Artificial Sequence: Synthetic oligonucleotide
ugcugaagcagagcaauggaagcau

SEQ ID NO: 98408 - RNA, 25 nt, Artificial Sequence
  Description of Artificial Sequence: Synthetic oligonucleotide
uuguugucgucuccucucuggcugg

SEQ ID NO: 98409 - RNA, 25 nt, Artificial Sequence
  Description of Artificial Sequence: Synthetic oligonucleotide
ggaaaguggcuuauccaaugguugc

SEQ ID NO: 98410 - RNA, 25 nt, Artificial Sequence
  Description of Artificial Sequence: Synthetic oligonucleotide
cugccuauucugcaagcaaguuugc

SEQ ID NO: 98411 - RNA, 25 nt, Artificial Sequence
  Description of Artificial Sequence: Synthetic oligonucleotide
cuuuggauggguucuucuccuccau

SEQ ID NO: 98412 - RNA, 25 nt, Artificial Sequence
  Description of Artificial Sequence: Synthetic oligonucleotide
ucagaaaggaauauucaguguccag

SEQ ID NO: 98413 - RNA, 25 nt, Artificial Sequence
  Description of Artificial Sequence: Synthetic oligonucleotide
gggucaauguaucaaucacucucug

SEQ ID NO: 98414 - RNA, 25 nt, Artificial Sequence
  Description of Artificial Sequence: Synthetic oligonucleotide
guguucuuggccucauagacacaga

SEQ ID NO: 98415 - RNA, 25 nt, Artificial Sequence
  Description of Artificial Sequence: Synthetic oligonucleotide
aaacagccaugaaggcaguuucugg

SEQ ID NO: 98416 - RNA, 25 nt, Artificial Sequence
  Description of Artificial Sequence: Synthetic oligonucleotide
ggauaguccauaugcaagcagcucc

SEQ ID NO: 98417 - RNA, 25 nt, Artificial Sequence
  Description of Artificial Sequence: Synthetic oligonucleotide
caaaggaggaaugugcccuggagau

SEQ ID NO: 98418 - RNA, 25 nt, Artificial Sequence
  Description of Artificial Sequence: Synthetic oligonucleotide
ucaucaaagggggagcucugcgcca

SEQ ID NO: 98419 - RNA, 25 nt, Artificial Sequence
  Description of Artificial Sequence: Synthetic oligonucleotide
aagaagaaguguauuaugacagcuc

SEQ ID NO: 98420 - RNA, 25 nt, Artificial Sequence
  Description of Artificial Sequence: Synthetic oligonucleotide
cacucuggaccacucuucugaucag

SEQ ID NO: 98421 - RNA, 25 nt, Artificial Sequence
  Description of Artificial Sequence: Synthetic oligonucleotide
gaaauccaugcaggaagauccugga

SEQ ID NO: 98422 - RNA, 25 nt, Artificial Sequence
  Description of Artificial Sequence: Synthetic oligonucleotide
aauuucucuacucaacgagcuauaa

SEQ ID NO: 98423 - RNA, 25 nt, Artificial Sequence
  Description of Artificial Sequence: Synthetic oligonucleotide
auauggacagauucauaaacaagua

SEQ ID NO: 98424 - RNA, 25 nt, Artificial Sequence
  Description of Artificial Sequence: Synthetic oligonucleotide
aggaacucccugagggcugggcaug

SEQ ID NO: 98425 - RNA, 25 nt, Artificial Sequence
  Description of Artificial Sequence: Synthetic oligonucleotide
gcugagggauuuugggacuguucug

SEQ ID NO: 98426 - RNA, 25 nt, Artificial Sequence
  Description of Artificial Sequence: Synthetic oligonucleotide
gucucauguuuaucugagcucuuau

SEQ ID NO: 98427 - RNA, 25 nt, Artificial Sequence
  Description of Artificial Sequence: Synthetic oligonucleotide
ucuaugaagacaucuucccagagug

SEQ ID NO: 98428 - RNA, 25 nt, Artificial Sequence
  Description of Artificial Sequence: Synthetic oligonucleotide
guccccagagacaugcaagucaugg

SEQ ID NO: 98429 - RNA, 25 nt, Artificial Sequence
  Description of Artificial Sequence: Synthetic oligonucleotide
ggucacaccugacaaauggaaggag

SEQ ID NO: 98430 - RNA, 25 nt, Artificial Sequence
  Description of Artificial Sequence: Synthetic oligonucleotide
guuccucuaacauuugcaaaaugga

SEQ ID NO: 98431 - RNA, 25 nt, Artificial Sequence
  Description of Artificial Sequence: Synthetic oligonucleotide
aaauguaauaauaaugaaugucaug

SEQ ID NO: 98432 - RNA, 25 nt, Artificial Sequence
  Description of Artificial Sequence: Synthetic oligonucleotide
gcaccgcugcagccagcaguuguaa

SEQ ID NO: 98433 - RNA, 25 nt, Artificial Sequence
  Description of Artificial Sequence: Synthetic oligonucleotide
aaauuguuaguaaacauagguauaa

SEQ ID NO: 98434 - RNA, 25 nt, Artificial Sequence
  Description of Artificial Sequence: Synthetic oligonucleotide
auuaccagauaguuauauuaaauuu

SEQ ID NO: 98435 - RNA, 25 nt, Artificial Sequence
  Description of Artificial Sequence: Synthetic oligonucleotide
uauaucuuauauauaauaauaugug

SEQ ID NO: 98436 - RNA, 25 nt, Artificial Sequence
  Description of Artificial Sequence: Synthetic oligonucleotide
gaugauuaauacaauauuaauuaua

SEQ ID NO: 98437 - RNA, 25 nt, Artificial Sequence
  Description of Artificial Sequence: Synthetic oligonucleotide
aauaaaggucacauaaacuuuauaa

SEQ ID NO: 98438 - RNA, 25 nt, Artificial Sequence
  Description of Artificial Sequence: Synthetic oligonucleotide
aauucauaacugguagcuauaacuu

SEQ ID NO: 98439 - RNA, 25 nt, Artificial Sequence
  Description of Artificial Sequence: Synthetic oligonucleotide
ugagcuuauucaggaugguuucuuu

SEQ ID NO: 98440 - RNA, 25 nt, Artificial Sequence
  Description of Artificial Sequence: Synthetic oligonucleotide
uaaaaccauaaacuguacaaaugaa

SEQ ID NO: 98441 - RNA, 25 nt, Artificial Sequence
  Description of Artificial Sequence: Synthetic oligonucleotide
gaaauuuuucaauauuuguuucuua

SEQ ID NO: 98442 - RNA, 25 nt, Artificial Sequence
  Description of Artificial Sequence: Synthetic oligonucleotide
acaauucagaggcugcugccugcuu

SEQ ID NO: 98443 - RNA, 25 nt, Artificial Sequence
  Description of Artificial Sequence: Synthetic oligonucleotide
uaggagguuguagaaagcucuguag

SEQ ID NO: 98444 - RNA, 25 nt, Artificial Sequence
  Description of Artificial Sequence: Synthetic oligonucleotide
gguucucucuguguguccuacagga

SEQ ID NO: 98445 - RNA, 25 nt, Artificial Sequence
  Description of Artificial Sequence: Synthetic oligonucleotide
agucuucaggccagcucccugucgg

SEQ ID NO: 98446 - RNA, 25 nt, Artificial Sequence
  Description of Artificial Sequence: Synthetic oligonucleotide
gauggcuuuuaugaaaaaauaucuc

SEQ ID NO: 98447 - RNA, 25 nt, Artificial Sequence
  Description of Artificial Sequence: Synthetic oligonucleotide
ccuccccauucuggggcucuucaug

SEQ ID NO: 98448 - RNA, 25 nt, Artificial Sequence
  Description of Artificial Sequence: Synthetic oligonucleotide
ggccuacuacuacuauucugcaaac

SEQ ID NO: 98449 - RNA, 25 nt, Artificial Sequence
  Description of Artificial Sequence: Synthetic oligonucleotide
cgaggaauucagaccagagaugcuc

SEQ ID NO: 98450 - RNA, 25 nt, Artificial Sequence
  Description of Artificial Sequence: Synthetic oligonucleotide
ccaaggaaagaaagugauugucaca

SEQ ID NO: 98451 - RNA, 25 nt, Artificial Sequence
  Description of Artificial Sequence: Synthetic oligonucleotide
aggggccagcaaagggaucggaaga

SEQ ID NO: 98452 - RNA, 25 nt, Artificial Sequence
  Description of Artificial Sequence: Synthetic oligonucleotide
agagauggcuuaucaucuggcgaag

SEQ ID NO: 98453 - RNA, 25 nt, Artificial Sequence
  Description of Artificial Sequence: Synthetic oligonucleotide
gaugggagcccaugugguggugaca

SEQ ID NO: 98454 - RNA, 25 nt, Artificial Sequence
  Description of Artificial Sequence: Synthetic oligonucleotide
agcgaggucaaaagaaacucuacag

SEQ ID NO: 98455 - RNA, 25 nt, Artificial Sequence
  Description of Artificial Sequence: Synthetic oligonucleotide
gaaggugguaucccacugccuggag

SEQ ID NO: 98456 - RNA, 25 nt, Artificial Sequence
  Description of Artificial Sequence: Synthetic oligonucleotide
gcuuggagcagccucagcacacuac

SEQ ID NO: 98457 - RNA, 25 nt, Artificial Sequence
  Description of Artificial Sequence: Synthetic oligonucleotide
cauugcuggcaccauggaagacaug

SEQ ID NO: 98458 - RNA, 25 nt, Artificial Sequence
  Description of Artificial Sequence: Synthetic oligonucleotide
gaccuucgcagagcaauuuguugcc

SEQ ID NO: 98459 - RNA, 25 nt, Artificial Sequence
  Description of Artificial Sequence: Synthetic oligonucleotide
ccaagcaggaaagcucaugggagga

SEQ ID NO: 98460 - RNA, 25 nt, Artificial Sequence
  Description of Artificial Sequence: Synthetic oligonucleotide
acuagacaugcucauucucaaccac

SEQ ID NO: 98461 - RNA, 25 nt, Artificial Sequence
  Description of Artificial Sequence: Synthetic oligonucleotide
caucaccaacacuucuuugaaucuu

SEQ ID NO: 98462 - RNA, 25 nt, Artificial Sequence
  Description of Artificial Sequence: Synthetic oligonucleotide
uuuucaugaugauauucaccaugug

SEQ ID NO: 98463 - RNA, 25 nt, Artificial Sequence
  Description of Artificial Sequence: Synthetic oligonucleotide
gcgcaaaagcauggaagucaacuuc

SEQ ID NO: 98464 - RNA, 25 nt, Artificial Sequence
  Description of Artificial Sequence: Synthetic oligonucleotide
ccucaguuacgugguccugacugua

SEQ ID NO: 98465 - RNA, 25 nt, Artificial Sequence
  Description of Artificial Sequence: Synthetic oligonucleotide
agcugccuugcccaugcugaagcag

SEQ ID NO: 98466 - RNA, 25 nt, Artificial Sequence
  Description of Artificial Sequence: Synthetic oligonucleotide
gagcaauggaagcauuguugucguc

SEQ ID NO: 98467 - RNA, 25 nt, Artificial Sequence
  Description of Artificial Sequence: Synthetic oligonucleotide
cuccucucuggcugggaaaguggcu

SEQ ID NO: 98468 - RNA, 25 nt, Artificial Sequence
  Description of Artificial Sequence: Synthetic oligonucleotide
uuauccaaugguugcugccuauucu

SEQ ID NO: 98469 - RNA, 25 nt, Artificial Sequence
  Description of Artificial Sequence: Synthetic oligonucleotide
ugcaagcaaguuugcuuuggauggg

SEQ ID NO: 98470 - RNA, 25 nt, Artificial Sequence
  Description of Artificial Sequence: Synthetic oligonucleotide
guucuucuccuccaucagaaaggaa

SEQ ID NO: 98471 - RNA, 25 nt, Artificial Sequence
  Description of Artificial Sequence: Synthetic oligonucleotide
auauucaguguccagggucaaugua

SEQ ID NO: 98472 - RNA, 25 nt, Artificial Sequence
  Description of Artificial Sequence: Synthetic oligonucleotide
aucaaucacucucuguguucuuggc

SEQ ID NO: 98473 - RNA, 25 nt, Artificial Sequence
  Description of Artificial Sequence: Synthetic oligonucleotide
ccucauagacacagaaacagccaug

SEQ ID NO: 98474 - RNA, 25 nt, Artificial Sequence
  Description of Artificial Sequence: Synthetic oligonucleotide
gaaggcaguuucugggauaguccau

SEQ ID NO: 98475 - RNA, 25 nt, Artificial Sequence
  Description of Artificial Sequence: Synthetic oligonucleotide
uaugcaagcagcuccaaaggaggaa

SEQ ID NO: 98476 - RNA, 25 nt, Artificial Sequence
  Description of Artificial Sequence: Synthetic oligonucleotide
augugcccuggagaucaucaaaggg

SEQ ID NO: 98477 - RNA, 25 nt, Artificial Sequence
  Description of Artificial Sequence: Synthetic oligonucleotide
gggagcucugcgccaagaagaagug

SEQ ID NO: 98478 - RNA, 25 nt, Artificial Sequence
  Description of Artificial Sequence: Synthetic oligonucleotide
guauuaugacagcucacucuggacc

SEQ ID NO: 98479 - RNA, 25 nt, Artificial Sequence
  Description of Artificial Sequence: Synthetic oligonucleotide
cacucuucugaucagaaauccaugc

SEQ ID NO: 98480 - RNA, 25 nt, Artificial Sequence
  Description of Artificial Sequence: Synthetic oligonucleotide
caggaagauccuggaauuucucuac

SEQ ID NO: 98481 - RNA, 25 nt, Artificial Sequence
  Description of Artificial Sequence: Synthetic oligonucleotide
cucaacgagcuauaauauggacaga

SEQ ID NO: 98482 - RNA, 25 nt, Artificial Sequence
  Description of Artificial Sequence: Synthetic oligonucleotide
auucauaaacaaguaggaacucccu

SEQ ID NO: 98483 - RNA, 25 nt, Artificial Sequence
  Description of Artificial Sequence: Synthetic oligonucleotide
ugagggcugggcaugcugagggauu

SEQ ID NO: 98484 - RNA, 25 nt, Artificial Sequence
  Description of Artificial Sequence: Synthetic oligonucleotide
uuugggacuguucugucucauguuu

SEQ ID NO: 98485 - RNA, 25 nt, Artificial Sequence
  Description of Artificial Sequence: Synthetic oligonucleotide
uaucugagcucuuaucuaugaagac

SEQ ID NO: 98486 - RNA, 25 nt, Artificial Sequence
  Description of Artificial Sequence: Synthetic oligonucleotide
caucuucccagaguguccccagaga

SEQ ID NO: 98487 - RNA, 25 nt, Artificial Sequence
  Description of Artificial Sequence: Synthetic oligonucleotide
acaugcaagucaugggucacaccug

SEQ ID NO: 98488 - RNA, 25 nt, Artificial Sequence
  Description of Artificial Sequence: Synthetic oligonucleotide
gacaaauggaaggaguuccucuaac

SEQ ID NO: 98489 - RNA, 25 nt, Artificial Sequence
  Description of Artificial Sequence: Synthetic oligonucleotide
cauuugcaaaauggaaauguaauaa

SEQ ID NO: 98490 - RNA, 25 nt, Artificial Sequence
  Description of Artificial Sequence: Synthetic oligonucleotide
auaaugaaugucaugcaccgcugca

SEQ ID NO: 98491 - RNA, 25 nt, Artificial Sequence
  Description of Artificial Sequence: Synthetic oligonucleotide
agccagcaguuguaaaauuguuagu

SEQ ID NO: 98492 - RNA, 25 nt, Artificial Sequence
  Description of Artificial Sequence: Synthetic oligonucleotide
uaaacauagguauaauuaccagaua

SEQ ID NO: 98493 - RNA, 25 nt, Artificial Sequence
  Description of Artificial Sequence: Synthetic oligonucleotide
aguuauauuaaauuuauaucuuaua

SEQ ID NO: 98494 - RNA, 25 nt, Artificial Sequence
  Description of Artificial Sequence: Synthetic oligonucleotide
auauaauaauaugugaugauuaaua

SEQ ID NO: 98495 - RNA, 25 nt, Artificial Sequence
  Description of Artificial Sequence: Synthetic oligonucleotide
acaauauuaauuauaauaaagguca

SEQ ID NO: 98496 - RNA, 25 nt, Artificial Sequence
  Description of Artificial Sequence: Synthetic oligonucleotide
acauaaacuuuauaaauucauaacu

SEQ ID NO: 98497 - RNA, 25 nt, Artificial Sequence
  Description of Artificial Sequence: Synthetic oligonucleotide
ugguagcuauaacuugagcuuauuc

SEQ ID NO: 98498 - RNA, 25 nt, Artificial Sequence
  Description of Artificial Sequence: Synthetic oligonucleotide
caggaugguuucuuuaaaaccauaa

SEQ ID NO: 98499 - RNA, 25 nt, Artificial Sequence
  Description of Artificial Sequence: Synthetic oligonucleotide
aacuguacaaaugaaauuuuucaau

SEQ ID NO: 98500 - DNA, 21 bp, Artificial Sequence
  Description of Artificial Sequence: Synthetic oligonucleotide
  Description of Combined DNA/RNA Molecule: Synthetic oligonucleotide
cuacacaaaucagcgauuutt

SEQ ID NO: 98501 - DNA, 21 bp, Artificial Sequence
  Description of Artificial Sequence: Synthetic oligonucleotide
  Description of Combined DNA/RNA Molecule: Synthetic oligonucleotide
aaaucgcugauuuguguagtt

SEQ ID NO: 98502 - DNA, 25 bp, Artificial Sequence
  Description of Artificial Sequence: Synthetic oligonucleotide
  Description of Combined DNA/RNA Molecule: Synthetic oligonucleotide
cuacacaaaucagcgauuuccaugt

SEQ ID NO: 98503 - RNA, 27 nt, Artificial Sequence
  Description of Artificial Sequence: Synthetic oligonucleotide
acauggaaaucgcugauuuguguaguc

SEQ ID NO: 98504 - RNA, 13 nt, Artificial Sequence
  Description of Artificial Sequence: Synthetic oligonucleotide
cuacacaaaucag

SEQ ID NO: 98505 - DNA, 11 bp, Artificial Sequence
  Description of Artificial Sequence: Synthetic oligonucleotide
  Description of Combined DNA/RNA Molecule: Synthetic oligonucleotide
gauuuccaugt

SEQ ID NO: 98506 - DNA, 21 bp, Artificial Sequence
  Description of Artificial Sequence: Synthetic oligonucleotide
  Description of Combined DNA/RNA Molecule: Synthetic oligonucleotide
ggaucuuauuucuucggagtt

SEQ ID NO: 98507 - DNA, 21 bp, Artificial Sequence
  Description of Artificial Sequence: Synthetic oligonucleotide
  Description of Combined DNA/RNA Molecule: Synthetic oligonucleotide
cuccgaagaaauaagaucctt

SEQ ID NO: 98508 - RNA, 11 nt, Artificial Sequence
  Description of Artificial Sequence: Synthetic oligonucleotide
ggaucuuauuu

SEQ ID NO: 98509 - DNA, 10 bp, Artificial Sequence
  Description of Artificial Sequence: Synthetic oligonucleotide
  Description of Combined DNA/RNA Molecule: Synthetic oligonucleotide
cuucggagtt

SEQ ID NO: 98510 - RNA, 27 nt, Artificial Sequence
  Description of Artificial Sequence: Synthetic oligonucleotide
cauugucuccgaagaaauaagauccuu

SEQ ID NO: 98511 - RNA, 8 nt, Artificial Sequence
  Description of Artificial Sequence: Synthetic oligonucleotide
  modified_base (2): LNA-G
ggaucuua

SEQ ID NO: 98512 - DNA, 17 bp, Artificial Sequence
  Description of Artificial Sequence: Synthetic oligonucleotide
  Description of Combined DNA/RNA Molecule: Synthetic oligonucleotide
uuucuucggagacaatg

SEQ ID NO: 98513 - DNA, 16 bp, Artificial Sequence
  Description of Artificial Sequence: Synthetic oligonucleotide
  Description of Combined DNA/RNA Molecule: Synthetic oligonucleotide
uucuucggagacaatg

SEQ ID NO: 98514 - DNA, 15 bp, Artificial Sequence
  Description of Artificial Sequence: Synthetic oligonucleotide
  Description of Combined DNA/RNA Molecule: Synthetic oligonucleotide
ucuucggagacaatg

SEQ ID NO: 98515 - DNA, 14 bp, Artificial Sequence
  Description of Artificial Sequence: Synthetic oligonucleotide
  Description of Combined DNA/RNA Molecule: Synthetic oligonucleotide
cuucggagacaatg

SEQ ID NO: 98516 - DNA, 13 bp, Artificial Sequence
  Description of Artificial Sequence: Synthetic oligonucleotide
  Description of Combined DNA/RNA Molecule: Synthetic oligonucleotide
uucggagacaatg

SEQ ID NO: 98517 - DNA, 12 bp, Artificial Sequence
  Description of Artificial Sequence: Synthetic oligonucleotide
  Description of Combined DNA/RNA Molecule: Synthetic oligonucleotide
ucggagacaatg

SEQ ID NO: 98518 - DNA, 11 bp, Artificial Sequence
  Description of Artificial Sequence: Synthetic oligonucleotide
  Description of Combined DNA/RNA Molecule: Synthetic oligonucleotide
cggagacaatg

SEQ ID NO: 98519 - RNA, 9 nt, Artificial Sequence
  Description of Artificial Sequence: Synthetic oligonucleotide
  modified_base (2): LNA-G
ggaucuuau

SEQ ID NO: 98520 - RNA, 10 nt, Artificial Sequence
  Description of Artificial Sequence: Synthetic oligonucleotide
  modified_base (2): LNA-G
ggaucuuauu

SEQ ID NO: 98521 - RNA, 11 nt, Artificial Sequence
  Description of Artificial Sequence: Synthetic oligonucleotide
  modified_base (2): LNA-G
ggaucuuauuu

SEQ ID NO: 98522 - RNA, 12 nt, Artificial Sequence
  Description of Artificial Sequence: Synthetic oligonucleotide
  modified_base (2): LNA-G
ggaucuuauuuc

SEQ ID NO: 98523 - RNA, 8 nt, Artificial Sequence
  Description of Artificial Sequence: Synthetic oligonucleotide
  modified_base (3): LNA-A
cuacacaa

SEQ ID NO: 98524 - DNA, 13 bp, Artificial Sequence
  Description of Artificial Sequence: Synthetic oligonucleotide
  Description of Combined DNA/RNA Molecule: Synthetic oligonucleotide
  modified_base (8): LNA-A
aucagcgauuutt

SEQ ID NO: 98525 - DNA, 12 bp, Artificial Sequence
  Description of Artificial Sequence: Synthetic oligonucleotide
  Description of Combined DNA/RNA Molecule: Synthetic oligonucleotide
  modified_base (7): LNA-A
ucagcgauuutt

SEQ ID NO: 98526 - DNA, 11 bp, Artificial Sequence
  Description of Artificial Sequence: Synthetic oligonucleotide
  Description of Combined DNA/RNA Molecule: Synthetic oligonucleotide
  modified_base (6): LNA-A
cagcgauuutt

SEQ ID NO: 98527 - DNA, 10 bp, Artificial Sequence
  Description of Artificial Sequence: Synthetic oligonucleotide
  Description of Combined DNA/RNA Molecule: Synthetic oligonucleotide
  modified_base (5): LNA-A
agcgauuutt

SEQ ID NO: 98528 - DNA, 9 bp, Artificial Sequence
  Description of Artificial Sequence: Synthetic oligonucleotide
  Description of Combined DNA/RNA Molecule: Synthetic oligonucleotide
  modified_base (4): LNA-A
gcgauuutt

SEQ ID NO: 98529 - DNA, 8 bp, Artificial Sequence
  Description of Artificial Sequence: Synthetic oligonucleotide
  Description of Combined DNA/RNA Molecule: Synthetic oligonucleotide
  modified_base (3): LNA-A
cgauuutt

SEQ ID NO: 98530 - DNA, 7 bp, Artificial Sequence
  Description of Artificial Sequence: Synthetic oligonucleotide
  Description of Combined DNA/RNA Molecule: Synthetic oligonucleotide
  modified_base (2): LNA-A
gauuutt

SEQ ID NO: 98531 - RNA, 9 nt, Artificial Sequence
  Description of Artificial Sequence: Synthetic oligonucleotide
  modified_base (3): LNA-A
cuacacaaa

SEQ ID NO: 98532 - RNA, 10 nt, Artificial Sequence
  Description of Artificial Sequence: Synthetic oligonucleotide
  modified_base (3): LNA-A
cuacacaaau

SEQ ID NO: 98533 - RNA, 11 nt, Artificial Sequence
  Description of Artificial Sequence: Synthetic oligonucleotide
  modified_base (3): LNA-A
cuacacaaauc

SEQ ID NO: 98534 - RNA, 12 nt, Artificial Sequence
  Description of Artificial Sequence: Synthetic oligonucleotide
  modified_base (3): LNA-A
cuacacaaauca

SEQ ID NO: 98535 - RNA, 13 nt, Artificial Sequence
  Description of Artificial Sequence: Synthetic oligonucleotide
  modified_base (3): LNA-A
cuacacaaaucag

SEQ ID NO: 98536 - RNA, 14 nt, Artificial Sequence
  Description of Artificial Sequence: Synthetic oligonucleotide
  modified_base (3): LNA-A
cuacacaaaucagc

SEQ ID NO: 98537 - RNA, 13 nt, Artificial Sequence
  Description of Artificial Sequence: Synthetic oligonucleotide
  modified_base (2): LNA-G
ggaucuuauuucu

SEQ ID NO: 98538 - RNA, 14 nt, Artificial Sequence
  Description of Artificial Sequence: Synthetic oligonucleotide
  modified_base (2): LNA-G
ggaucuuauuucuu

SEQ ID NO: 98539 - RNA, 8 nt, Artificial Sequence
  Description of Artificial Sequence: Synthetic oligonucleotide
  modified_base (2): LNA-G
  modified_base (8): LNA-A
ggaucuua

SEQ ID NO: 98540 - RNA, 9 nt, Artificial Sequence
  Description of Artificial Sequence: Synthetic oligonucleotide
  modified_base (2): LNA-G
  modified_base (9): LNA-U
ggaucuuau

SEQ ID NO: 98541 - RNA, 10 nt, Artificial Sequence
  Description of Artificial Sequence: Synthetic oligonucleotide
  modified_base (2): LNA-G
  modified_base (10): LNA-U
ggaucuuauu

SEQ ID NO: 98542 - RNA, 11 nt, Artificial Sequence
  Description of Artificial Sequence: Synthetic oligonucleotide
  modified_base (2): LNA-G
  modified_base (11): LNA-U
ggaucuuauuu

SEQ ID NO: 98543 - RNA, 12 nt, Artificial Sequence
  Description of Artificial Sequence: Synthetic oligonucleotide
  modified_base (2): LNA-G
  modified_base (12): LNA-C
ggaucuuauuuc

SEQ ID NO: 98544 - RNA, 13 nt, Artificial Sequence
  Description of Artificial Sequence: Synthetic oligonucleotide
  modified_base (2): LNA-G
  modified_base (13): LNA-U
ggaucuuauuucu

SEQ ID NO: 98545 - RNA, 14 nt, Artificial Sequence
  Description of Artificial Sequence: Synthetic oligonucleotide
  modified_base (2): LNA-G
  modified_base (14): LNA-U
ggaucuuauuucuu

SEQ ID NO: 98546 - DNA, 13 bp, Artificial Sequence
  Description of Artificial Sequence: Synthetic oligonucleotide
  Description of Combined DNA/RNA Molecule: Synthetic oligonucleotide
  modified_base (8): LNA-G
uuucuucggagtt

SEQ ID NO: 98547 - DNA, 12 bp, Artificial Sequence
  Description of Artificial Sequence: Synthetic oligonucleotide
  Description of Combined DNA/RNA Molecule: Synthetic oligonucleotide
  modified_base (7): LNA-G
uucuucggagtt

SEQ ID NO: 98548 - DNA, 11 bp, Artificial Sequence
  Description of Artificial Sequence: Synthetic oligonucleotide
  Description of Combined DNA/RNA Molecule: Synthetic oligonucleotide
  modified_base (6): LNA-G
ucuucggagtt

SEQ ID NO: 98549 - DNA, 10 bp, Artificial Sequence
  Description of Artificial Sequence: Synthetic oligonucleotide
  Description of Combined DNA/RNA Molecule: Synthetic oligonucleotide
  modified_base (5): LNA-G
cuucggagtt

SEQ ID NO: 98550 - DNA, 9 bp, Artificial Sequence
  Description of Artificial Sequence: Synthetic oligonucleotide
  Description of Combined DNA/RNA Molecule: Synthetic oligonucleotide
  modified_base (4): LNA-G
uucggagtt

SEQ ID NO: 98551 - DNA, 8 bp, Artificial Sequence
  Description of Artificial Sequence: Synthetic oligonucleotide
  Description of Combined DNA/RNA Molecule: Synthetic oligonucleotide
  modified_base (3): LNA-G
ucggagtt

SEQ ID NO: 98552 - DNA, 7 bp, Artificial Sequence
  Description of Artificial Sequence: Synthetic oligonucleotide
  Description of Combined DNA/RNA Molecule: Synthetic oligonucleotide
  modified_base (2): LNA-G
cggagtt

SEQ ID NO: 98553 - DNA, 13 bp, Artificial Sequence
  Description of Artificial Sequence: Synthetic oligonucleotide
  Description of Combined DNA/RNA Molecule: Synthetic oligonucleotide
  modified_base (1): LNA-U
  modified_base (8): LNA-G
uuucuucggagtt

SEQ ID NO: 98554 - DNA, 12 bp, Artificial Sequence
  Description of Artificial Sequence: Synthetic oligonucleotide
  Description of Combined DNA/RNA Molecule: Synthetic oligonucleotide
  modified_base (1): LNA-U
  modified_base (7): LNA-G
uucuucggagtt

SEQ ID NO: 98555 - DNA, 11 bp, Artificial Sequence
  Description of Artificial Sequence: Synthetic oligonucleotide
  Description of Combined DNA/RNA Molecule: Synthetic oligonucleotide
  modified_base (1): LNA-U
  modified_base (6): LNA-G
ucuucggagtt

SEQ ID NO: 98556 - DNA, 10 bp, Artificial Sequence
  Description of Artificial Sequence: Synthetic oligonucleotide
  Description of Combined DNA/RNA Molecule: Synthetic oligonucleotide
  modified_base (1): LNA-C
  modified_base (5): LNA-G
cuucggagtt

SEQ ID NO: 98557 - DNA, 9 bp, Artificial Sequence
  Description of Artificial Sequence: Synthetic oligonucleotide
  Description of Combined DNA/RNA Molecule: Synthetic oligonucleotide
  modified_base (1): LNA-U
  modified_base (4): LNA-G
uucggagtt

SEQ ID NO: 98558 - DNA, 8 bp, Artificial Sequence
  Description of Artificial Sequence: Synthetic oligonucleotide
  Description of Combined DNA/RNA Molecule: Synthetic oligonucleotide
  modified_base (1): LNA-U
  modified_base (3): LNA-G
ucggagtt

SEQ ID NO: 98559 - DNA, 7 bp, Artificial Sequence
  Description of Artificial Sequence: Synthetic oligonucleotide
  Description of Combined DNA/RNA Molecule: Synthetic oligonucleotide
  modified_base (1): LNA-C
  modified_base (2): LNA-G
cggagtt

SEQ ID NO: 98560 - DNA, 21 bp, Artificial Sequence
  Description of Artificial Sequence: Synthetic oligonucleotide
  Description of Combined DNA/RNA Molecule: Synthetic oligonucleotide
  modified_base (2): LNA-G
  modified_base (16): LNA-G
ggaucuuauuucuucggagtt

SEQ ID NO: 98561 - DNA, 25 bp, Artificial Sequence
  Description of Artificial Sequence: Synthetic oligonucleotide
  Description of Combined DNA/RNA Molecule: Synthetic oligonucleotide
ggaucuuauuucuucggagacaatg

SEQ ID NO: 98562 - RNA, 25 nt, Artificial Sequence
  Description of Artificial Sequence: Synthetic oligonucleotide
uaagcagaguucaaaagcccuucag

SEQ ID NO: 98563 - RNA, 25 nt, Artificial Sequence
  Description of Artificial Sequence: Synthetic oligonucleotide
agcagaguucaaaagcccuucagcg

SEQ ID NO: 98564 - RNA, 25 nt, Artificial Sequence
  Description of Artificial Sequence: Synthetic oligonucleotide
cucagggucugagugaagccgcucg

SEQ ID NO: 98565 - RNA, 25 nt, Artificial Sequence
  Description of Artificial Sequence: Synthetic oligonucleotide
caagcaacuacaucacgccagucaa

SEQ ID NO: 98566 - RNA, 25 nt, Artificial Sequence
  Description of Artificial Sequence: Synthetic oligonucleotide
aucaauggcagcuucuuggugcgug

SEQ ID NO: 98567 - RNA, 25 nt, Artificial Sequence
  Description of Artificial Sequence: Synthetic oligonucleotide
uuccagcccacauuggauucaucag

SEQ ID NO: 98568 - RNA, 25 nt, Artificial Sequence
  Description of Artificial Sequence: Synthetic oligonucleotide
cagcugagaauguggaauaccuaag

SEQ ID NO: 98569 - RNA, 25 nt, Artificial Sequence
  Description of Artificial Sequence: Synthetic oligonucleotide
aacguaucuccuaauuugaggcuca

SEQ ID NO: 98570 - RNA, 25 nt, Artificial Sequence
  Description of Artificial Sequence: Synthetic oligonucleotide
ccuaaaauaauuucucuacaauugg

SEQ ID NO: 98571 - RNA, 25 nt, Artificial Sequence
  Description of Artificial Sequence: Synthetic oligonucleotide
uggaagauucagcuaguuaggagcc

SEQ ID NO: 98572 - RNA, 25 nt, Artificial Sequence
  Description of Artificial Sequence: Synthetic oligonucleotide
uuaaacucuccuagucaauauccac

SEQ ID NO: 98573 - RNA, 25 nt, Artificial Sequence
  Description of Artificial Sequence: Synthetic oligonucleotide
cagccuacaguuauguucagucaca

SEQ ID NO: 98574 - RNA, 25 nt, Artificial Sequence
  Description of Artificial Sequence: Synthetic oligonucleotide
guuauguucagucacacacacauac

SEQ ID NO: 98575 - RNA, 25 nt, Artificial Sequence
  Description of Artificial Sequence: Synthetic oligonucleotide
cacauacaaaauguuccuuuugcuu

SEQ ID NO: 98576 - RNA, 25 nt, Artificial Sequence
  Description of Artificial Sequence: Synthetic oligonucleotide
uccuuuugcuuuuaaaguaauuuuu

SEQ ID NO: 98577 - RNA, 25 nt, Artificial Sequence
  Description of Artificial Sequence: Synthetic oligonucleotide
ugaccugugaagcaacagucaaugg

SEQ ID NO: 98578 - RNA, 25 nt, Artificial Sequence
  Description of Artificial Sequence: Synthetic oligonucleotide
cuaucucacacaucgacaaaccaau

SEQ ID NO: 98579 - RNA, 25 nt, Artificial Sequence
  Description of Artificial Sequence: Synthetic oligonucleotide
uguccucaauuguacugcuaccacu

SEQ ID NO: 98580 - RNA, 25 nt, Artificial Sequence
  Description of Artificial Sequence: Synthetic oligonucleotide
aaaccguagcuggcaagcggucuua

SEQ ID NO: 98581 - RNA, 25 nt, Artificial Sequence
  Description of Artificial Sequence: Synthetic oligonucleotide
uagcuggcaagcggucuuaccggcu

SEQ ID NO: 98582 - RNA, 25 nt, Artificial Sequence
  Description of Artificial Sequence: Synthetic oligonucleotide
uuguaugguuaaaagauggguuacc

SEQ ID NO: 98583 - RNA, 25 nt, Artificial Sequence
  Description of Artificial Sequence: Synthetic oligonucleotide
ugguuaaaagauggguuaccugcga

SEQ ID NO: 98584 - RNA, 25 nt, Artificial Sequence
  Description of Artificial Sequence: Synthetic oligonucleotide
cagggaauuauacaaucuugcugag

SEQ ID NO: 98585 - RNA, 25 nt, Artificial Sequence
  Description of Artificial Sequence: Synthetic oligonucleotide
acaaucuugcugagcauaaaacagu

SEQ ID NO: 98586 - RNA, 25 nt, Artificial Sequence
  Description of Artificial Sequence: Synthetic oligonucleotide
ccaauaaugaagaguccuuuauccu

SEQ ID NO: 98587 - RNA, 25 nt, Artificial Sequence
  Description of Artificial Sequence: Synthetic oligonucleotide
acuuuggauguuccaacgcaaguug

SEQ ID NO: 98588 - RNA, 25 nt, Artificial Sequence
  Description of Artificial Sequence: Synthetic oligonucleotide
aaugcuuccacuaaacugaaaccau

SEQ ID NO: 98589 - RNA, 25 nt, Artificial Sequence
  Description of Artificial Sequence: Synthetic oligonucleotide
gagaaaguuugacuuuguuaaauau

SEQ ID NO: 98590 - RNA, 25 nt, Artificial Sequence
  Description of Artificial Sequence: Synthetic oligonucleotide
aaagaacuacuguauauuaaaaguu

SEQ ID NO: 98591 - RNA, 25 nt, Artificial Sequence
  Description of Artificial Sequence: Synthetic oligonucleotide
uuagaaauacggguuuugacuuaac

SEQ ID NO: 98592 - RNA, 25 nt, Artificial Sequence
  Description of Artificial Sequence: Synthetic oligonucleotide
aacauggguacagcaaacucagcac

SEQ ID NO: 98593 - RNA, 25 nt, Artificial Sequence
  Description of Artificial Sequence: Synthetic oligonucleotide
aaagacacagaagaugcugaccuca

SEQ ID NO: 98594 - RNA, 25 nt, Artificial Sequence
  Description of Artificial Sequence: Synthetic oligonucleotide
uaguagggagguuuauucagaucgc

SEQ ID NO: 98595 - RNA, 25 nt, Artificial Sequence
  Description of Artificial Sequence: Synthetic oligonucleotide
gccuucugcagcaggguucugggau

SEQ ID NO: 98596 - RNA, 25 nt, Artificial Sequence
  Description of Artificial Sequence: Synthetic oligonucleotide
ggucugguacauauuggaaauuaug

SEQ ID NO: 98597 - RNA, 25 nt, Artificial Sequence
  Description of Artificial Sequence: Synthetic oligonucleotide
cuaguccuuccgauggaagcacuag

SEQ ID NO: 98598 - RNA, 25 nt, Artificial Sequence
  Description of Artificial Sequence: Synthetic oligonucleotide
ccagugaauauuguuuuuaugugga

SEQ ID NO: 98599 - RNA, 25 nt, Artificial Sequence
  Description of Artificial Sequence: Synthetic oligonucleotide
augaauucaaguuggaauugguaga

SEQ ID NO: 98600 - RNA, 25 nt, Artificial Sequence
  Description of Artificial Sequence: Synthetic oligonucleotide
caggacacagauuuagacuuggaga

SEQ ID NO: 98601 - RNA, 25 nt, Artificial Sequence
  Description of Artificial Sequence: Synthetic oligonucleotide
cucaaagcacaguuacaguauucca

SEQ ID NO: 98602 - RNA, 25 nt, Artificial Sequence
  Description of Artificial Sequence: Synthetic oligonucleotide
accacugccaccacugaugaauuaa

SEQ ID NO: 98603 - RNA, 25 nt, Artificial Sequence
  Description of Artificial Sequence: Synthetic oligonucleotide
gaaacuacuagugccacaucaucac

SEQ ID NO: 98604 - RNA, 25 nt, Artificial Sequence
  Description of Artificial Sequence: Synthetic oligonucleotide
aagucggacagccucaccaaacaga

SEQ ID NO: 98605 - RNA, 25 nt, Artificial Sequence
  Description of Artificial Sequence: Synthetic oligonucleotide
gaaagcgaaaaauggaacaugaugg

SEQ ID NO: 98606 - RNA, 25 nt, Artificial Sequence
  Description of Artificial Sequence: Synthetic oligonucleotide
cccucugauuuagcauguagacugc

SEQ ID NO: 98607 - RNA, 25 nt, Artificial Sequence
  Description of Artificial Sequence: Synthetic oligonucleotide
ugagcuauuuaaggaucuauuuaug

SEQ ID NO: 98608 - RNA, 25 nt, Artificial Sequence
  Description of Artificial Sequence: Synthetic oligonucleotide
aaaaggugaaaaagcacuauuauca

SEQ ID NO: 98609 - RNA, 25 nt, Artificial Sequence
  Description of Artificial Sequence: Synthetic oligonucleotide
gaaaaagcacuauuaucaguucugc

SEQ ID NO: 98610 - RNA, 25 nt, Artificial Sequence
  Description of Artificial Sequence: Synthetic oligonucleotide
ggcugaaaagaaagauuaaaccuac

SEQ ID NO: 98611 - RNA, 25 nt, Artificial Sequence
  Description of Artificial Sequence: Synthetic oligonucleotide
uaaacccuuauaauaaaauccuucu

SEQ ID NO: 98612 - RNA, 25 nt, Artificial Sequence
  Description of Artificial Sequence: Synthetic oligonucleotide
cauacuauuagccaaugcuguagac

SEQ ID NO: 98613 - RNA, 25 nt, Artificial Sequence
  Description of Artificial Sequence: Synthetic oligonucleotide
gacagaagcauuuugauaggaauag

SEQ ID NO: 98614 - RNA, 25 nt, Artificial Sequence
  Description of Artificial Sequence: Synthetic oligonucleotide
agagcaaauaagauaauggcccuga

SEQ ID NO: 98615 - RNA, 25 nt, Artificial Sequence
  Description of Artificial Sequence: Synthetic oligonucleotide
ccaacauuuuucucuuccucaagca

SEQ ID NO: 98616 - RNA, 25 nt, Artificial Sequence
  Description of Artificial Sequence: Synthetic oligonucleotide
uuaaguaugagaaaaguucagccca

SEQ ID NO: 98617 - RNA, 25 nt, Artificial Sequence
  Description of Artificial Sequence: Synthetic oligonucleotide
caggaauaaagauggcugcugaacc

SEQ ID NO: 98618 - RNA, 25 nt, Artificial Sequence
  Description of Artificial Sequence: Synthetic oligonucleotide
aauuugaaugaccaaguucucuuca

SEQ ID NO: 98619 - RNA, 25 nt, Artificial Sequence
  Description of Artificial Sequence: Synthetic oligonucleotide
auguauaaagauagccagccuagag

SEQ ID NO: 98620 - RNA, 25 nt, Artificial Sequence
  Description of Artificial Sequence: Synthetic oligonucleotide
ggcuguaacuaucucugugaagugu

SEQ ID NO: 98621 - RNA, 25 nt, Artificial Sequence
  Description of Artificial Sequence: Synthetic oligonucleotide
ucugugaagugugagaaaauuucaa

SEQ ID NO: 98622 - RNA, 25 nt, Artificial Sequence
  Description of Artificial Sequence: Synthetic oligonucleotide
ccuuuaaggaaaugaauccuccuga

SEQ ID NO: 98623 - RNA, 25 nt, Artificial Sequence
  Description of Artificial Sequence: Synthetic oligonucleotide
aaggauacaaaaagugacaucauau

SEQ ID NO: 98624 - RNA, 25 nt, Artificial Sequence
  Description of Artificial Sequence: Synthetic oligonucleotide
agaugcaauuugaaucuucaucaua

SEQ ID NO: 98625 - RNA, 25 nt, Artificial Sequence
  Description of Artificial Sequence: Synthetic oligonucleotide
guucaaaacgaagacuagcuauuaa

SEQ ID NO: 98626 - RNA, 25 nt, Artificial Sequence
  Description of Artificial Sequence: Synthetic oligonucleotide
gugaaaccucaucucuacuaaaaau

SEQ ID NO: 98627 - RNA, 25 nt, Artificial Sequence
  Description of Artificial Sequence: Synthetic oligonucleotide
acgaaagagaagcucuaucucgccu

SEQ ID NO: 98628 - RNA, 25 nt, Artificial Sequence
  Description of Artificial Sequence: Synthetic oligonucleotide
cuccacaagcgccuucgguccaguu

SEQ ID NO: 98629 - RNA, 25 nt, Artificial Sequence
  Description of Artificial Sequence: Synthetic oligonucleotide
gagaagauuccaaagauguagccgc

SEQ ID NO: 98630 - RNA, 25 nt, Artificial Sequence
  Description of Artificial Sequence: Synthetic oligonucleotide
aaucuggauucaaugaggagacuug

SEQ ID NO: 98631 - RNA, 25 nt, Artificial Sequence
  Description of Artificial Sequence: Synthetic oligonucleotide
agaacagauuugagaguagugagga

SEQ ID NO: 98632 - RNA, 25 nt, Artificial Sequence
  Description of Artificial Sequence: Synthetic oligonucleotide
ccagagcugugcagaugaguacaaa

SEQ ID NO: 98633 - RNA, 25 nt, Artificial Sequence
  Description of Artificial Sequence: Synthetic oligonucleotide
ccucagauuguuguuguuaaugggc

SEQ ID NO: 98634 - RNA, 25 nt, Artificial Sequence
  Description of Artificial Sequence: Synthetic oligonucleotide
cuauuuuaauuauuuuuaauuuauu

SEQ ID NO: 98635 - RNA, 25 nt, Artificial Sequence
  Description of Artificial Sequence: Synthetic oligonucleotide
uuuaauuuauuaauauuuaaauaug

SEQ ID NO: 98636 - RNA, 25 nt, Artificial Sequence
  Description of Artificial Sequence: Synthetic oligonucleotide
augcaguuugaauauccuuuguuuc

SEQ ID NO: 98637 - RNA, 25 nt, Artificial Sequence
  Description of Artificial Sequence: Synthetic oligonucleotide
caugcugcuggcgucuaaguguuug

SEQ ID NO: 98638 - RNA, 25 nt, Artificial Sequence
  Description of Artificial Sequence: Synthetic oligonucleotide
agaugugcauuucaccugugacaaa

SEQ ID NO: 98639 - RNA, 25 nt, Artificial Sequence
  Description of Artificial Sequence: Synthetic oligonucleotide
ucaaaaccugugccaggcugaauua

SEQ ID NO: 98640 - RNA, 25 nt, Artificial Sequence
  Description of Artificial Sequence: Synthetic oligonucleotide
gaauguggguagucauucuuacaau

SEQ ID NO: 98641 - RNA, 25 nt, Artificial Sequence
  Description of Artificial Sequence: Synthetic oligonucleotide
auguggguagucauucuuacaauug

SEQ ID NO: 98642 - RNA, 25 nt, Artificial Sequence
  Description of Artificial Sequence: Synthetic oligonucleotide
ugaaaaugagcaucagagaguguac

SEQ ID NO: 98643 - RNA, 25 nt, Artificial Sequence
  Description of Artificial Sequence: Synthetic oligonucleotide
uugcuuuucauguagaacucagcag

SEQ ID NO: 98644 - RNA, 25 nt, Artificial Sequence
  Description of Artificial Sequence: Synthetic oligonucleotide
uguauuucuauauuuauuuucagua

SEQ ID NO: 98645 - RNA, 25 nt, Artificial Sequence
  Description of Artificial Sequence: Synthetic oligonucleotide
uuugauuaauguuucuuaaauggaa

SEQ ID NO: 98646 - RNA, 25 nt, Artificial Sequence
  Description of Artificial Sequence: Synthetic oligonucleotide
caacguguauagugccuaaaauugu

SEQ ID NO: 98647 - RNA, 25 nt, Artificial Sequence
  Description of Artificial Sequence: Synthetic oligonucleotide
cauauccuuggcuacuaacaucugg

SEQ ID NO: 98648 - RNA, 25 nt, Artificial Sequence
  Description of Artificial Sequence: Synthetic oligonucleotide
uacuaacaucuggagacugugagcu

SEQ ID NO: 98649 - RNA, 25 nt, Artificial Sequence
  Description of Artificial Sequence: Synthetic oligonucleotide
cauaaguugugugcuuuuuauuaau

SEQ ID NO: 98650 - RNA, 25 nt, Artificial Sequence
  Description of Artificial Sequence: Synthetic oligonucleotide
gcaucauuuuggcucuucuuacauu

SEQ ID NO: 98651 - RNA, 25 nt, Artificial Sequence
  Description of Artificial Sequence: Synthetic oligonucleotide
gcucuucuuacauuuguaaaaaugu

SEQ ID NO: 98652 - RNA, 25 nt, Artificial Sequence
  Description of Artificial Sequence: Synthetic oligonucleotide
agauuaggucaucuuaauucauauu

SEQ ID NO: 98653 - RNA, 25 nt, Artificial Sequence
  Description of Artificial Sequence: Synthetic oligonucleotide
auggaauugaaagaacuaaucauga

SEQ ID NO: 98654 - RNA, 25 nt, Artificial Sequence
  Description of Artificial Sequence: Synthetic oligonucleotide
cacacucauuccuucugcucuuggg

SEQ ID NO: 98655 - RNA, 25 nt, Artificial Sequence
  Description of Artificial Sequence: Synthetic oligonucleotide
uguagagguaaccaguagcuuugag

SEQ ID NO: 98656 - RNA, 25 nt, Artificial Sequence
  Description of Artificial Sequence: Synthetic oligonucleotide
caaccacaugccacguaauauuuca

SEQ ID NO: 98657 - RNA, 25 nt, Artificial Sequence
  Description of Artificial Sequence: Synthetic oligonucleotide
ucggaaacaaguuauucucuucacu

SEQ ID NO: 98658 - RNA, 25 nt, Artificial Sequence
  Description of Artificial Sequence: Synthetic oligonucleotide
acucccaauaacuaaugcuaagaaa

SEQ ID NO: 98659 - RNA, 25 nt, Artificial Sequence
  Description of Artificial Sequence: Synthetic oligonucleotide
aaugcuaagaaaugcugaaaaucaa

SEQ ID NO: 98660 - RNA, 25 nt, Artificial Sequence
  Description of Artificial Sequence: Synthetic oligonucleotide
gucuuucucuaaauaugauuacuuu

SEQ ID NO: 98661 - RNA, 25 nt, Artificial Sequence
  Description of Artificial Sequence: Synthetic oligonucleotide
ugaauuucaggcauuuuguucuaca

SEQ ID NO: 98662 - RNA, 25 nt, Artificial Sequence
  Description of Artificial Sequence: Synthetic oligonucleotide
cgauucccucucacccgggacucuc

SEQ ID NO: 98663 - RNA, 25 nt, Artificial Sequence
  Description of Artificial Sequence: Synthetic oligonucleotide
aggaaagugaaccuuuaaaguaaag

SEQ ID NO: 98664 - RNA, 25 nt, Artificial Sequence
  Description of Artificial Sequence: Synthetic oligonucleotide
gaggcugcaugcucuggaagccugg

SEQ ID NO: 98665 - RNA, 25 nt, Artificial Sequence
  Description of Artificial Sequence: Synthetic oligonucleotide
ucucugaacagaaaacaaaagagag

SEQ ID NO: 98666 - RNA, 25 nt, Artificial Sequence
  Description of Artificial Sequence: Synthetic oligonucleotide
aacuuggcuguaaucaguuaugccg

SEQ ID NO: 98667 - RNA, 25 nt, Artificial Sequence
  Description of Artificial Sequence: Synthetic oligonucleotide
agaagccaaaauuaaaagaagucca

SEQ ID NO: 98668 - RNA, 25 nt, Artificial Sequence
  Description of Artificial Sequence: Synthetic oligonucleotide
auuaaaagaaguccaggugagguua

SEQ ID NO: 98669 - RNA, 25 nt, Artificial Sequence
  Description of Artificial Sequence: Synthetic oligonucleotide
gaauccggauuaucgggaagaggac

SEQ ID NO: 98670 - RNA, 25 nt, Artificial Sequence
  Description of Artificial Sequence: Synthetic oligonucleotide
aaugugacaucaaagcaaguauugu

SEQ ID NO: 98671 - RNA, 25 nt, Artificial Sequence
  Description of Artificial Sequence: Synthetic oligonucleotide
caucaaagcaaguauuguagcacuc

SEQ ID NO: 98672 - RNA, 25 nt, Artificial Sequence
  Description of Artificial Sequence: Synthetic oligonucleotide
agagagagaaaacaaaaccacaaau

SEQ ID NO: 98673 - RNA, 25 nt, Artificial Sequence
  Description of Artificial Sequence: Synthetic oligonucleotide
ucgcuguaguauuuaagcccauaca

SEQ ID NO: 98674 - RNA, 25 nt, Artificial Sequence
  Description of Artificial Sequence: Synthetic oligonucleotide
cgcuguaguauuuaagcccauacag

SEQ ID NO: 98675 - RNA, 25 nt, Artificial Sequence
  Description of Artificial Sequence: Synthetic oligonucleotide
auuuaagcccauacagaaaccuucc

SEQ ID NO: 98676 - RNA, 25 nt, Artificial Sequence
  Description of Artificial Sequence: Synthetic oligonucleotide
auuaaaauaaacaugguauaccuac

SEQ ID NO: 98677 - RNA, 25 nt, Artificial Sequence
  Description of Artificial Sequence: Synthetic oligonucleotide
cuguucugaucggccaguuuucgga

SEQ ID NO: 98678 - RNA, 25 nt, Artificial Sequence
  Description of Artificial Sequence: Synthetic oligonucleotide
aaauaauuugaacuuuggaacaggg

SEQ ID NO: 98679 - RNA, 25 nt, Artificial Sequence
  Description of Artificial Sequence: Synthetic oligonucleotide
ugcgaccuuaauuuaacuuuccagu

SEQ ID NO: 98680 - RNA, 25 nt, Artificial Sequence
  Description of Artificial Sequence: Synthetic oligonucleotide
cugagaaagcuaaaguuugguuuug

SEQ ID NO: 98681 - RNA, 25 nt, Artificial Sequence
  Description of Artificial Sequence: Synthetic oligonucleotide
aguaaagaugcuacuucccacugua

SEQ ID NO: 98682 - RNA, 25 nt, Artificial Sequence
  Description of Artificial Sequence: Synthetic oligonucleotide
cugcuuaauugcugauaccauauga

SEQ ID NO: 98683 - RNA, 25 nt, Artificial Sequence
  Description of Artificial Sequence: Synthetic oligonucleotide
uaccauaugaaugaaacaugggcug

SEQ ID NO: 98684 - RNA, 25 nt, Artificial Sequence
  Description of Artificial Sequence: Synthetic oligonucleotide
aacuuucuuauccaacuuuuucaua

SEQ ID NO: 98685 - RNA, 25 nt, Artificial Sequence
  Description of Artificial Sequence: Synthetic oligonucleotide
ccuugcaugacaucaugaggccgga

SEQ ID NO: 98686 - RNA, 25 nt, Artificial Sequence
  Description of Artificial Sequence: Synthetic oligonucleotide
ugaauuuguauaugacugcauuugu

SEQ ID NO: 98687 - RNA, 25 nt, Artificial Sequence
  Description of Artificial Sequence: Synthetic oligonucleotide
gaauccuaguagaauguuuacuacc

SEQ ID NO: 98688 - RNA, 25 nt, Artificial Sequence
  Description of Artificial Sequence: Synthetic oligonucleotide
gaaagggaagaauuuuuugaugaaa

SEQ ID NO: 98689 - RNA, 25 nt, Artificial Sequence
  Description of Artificial Sequence: Synthetic oligonucleotide
uaucggcaugccagugugugaauuu

SEQ ID NO: 98690 - RNA, 25 nt, Artificial Sequence
  Description of Artificial Sequence: Synthetic oligonucleotide
caccucauaguagagcaauguaugu

SEQ ID NO: 98691 - RNA, 25 nt, Artificial Sequence
  Description of Artificial Sequence: Synthetic oligonucleotide
ccagaauugccaaagcacauauaua

SEQ ID NO: 98692 - RNA, 25 nt, Artificial Sequence
  Description of Artificial Sequence: Synthetic oligonucleotide
uggugaucuggguaauaguuucucc

SEQ ID NO: 98693 - RNA, 25 nt, Artificial Sequence
  Description of Artificial Sequence: Synthetic oligonucleotide
gaucuggguaauaguuucuccaaau

SEQ ID NO: 98694 - RNA, 25 nt, Artificial Sequence
  Description of Artificial Sequence: Synthetic oligonucleotide
ggaugugaugaauacuuccuagaaa

SEQ ID NO: 98695 - RNA, 25 nt, Artificial Sequence
  Description of Artificial Sequence: Synthetic oligonucleotide
cauuuccacagcuacaccauauaug

SEQ ID NO: 98696 - RNA, 25 nt, Artificial Sequence
  Description of Artificial Sequence: Synthetic oligonucleotide
acagcuacaccauauaugaauggag

SEQ ID NO: 98697 - RNA, 25 nt, Artificial Sequence
  Description of Artificial Sequence: Synthetic oligonucleotide
ugcaguucuuacacgagaagaagau

SEQ ID NO: 98698 - RNA, 25 nt, Artificial Sequence
  Description of Artificial Sequence: Synthetic oligonucleotide
acgagaagaagaucauuuacaggga

SEQ ID NO: 98699 - RNA, 25 nt, Artificial Sequence
  Description of Artificial Sequence: Synthetic oligonucleotide
cgagaagaagaucauuuacagggac

SEQ ID NO: 98700 - RNA, 25 nt, Artificial Sequence
  Description of Artificial Sequence: Synthetic oligonucleotide
aagaagaucauuuacagggaccuga

SEQ ID NO: 98701 - RNA, 25 nt, Artificial Sequence
  Description of Artificial Sequence: Synthetic oligonucleotide
agaggaagagguguuugacugcauc

SEQ ID NO: 98702 - RNA, 25 nt, Artificial Sequence
  Description of Artificial Sequence: Synthetic oligonucleotide
gaggaagagguguuugacugcaucg

SEQ ID NO: 98703 - RNA, 25 nt, Artificial Sequence
  Description of Artificial Sequence: Synthetic oligonucleotide
cuacuuugagggcgaguucacaggg

SEQ ID NO: 98704 - RNA, 25 nt, Artificial Sequence
  Description of Artificial Sequence: Synthetic oligonucleotide
agggcaucuccuggcaccucugucc

SEQ ID NO: 98705 - RNA, 25 nt, Artificial Sequence
  Description of Artificial Sequence: Synthetic oligonucleotide
ggagugauaugguuugucuuuuuaa

SEQ ID NO: 98706 - RNA, 25 nt, Artificial Sequence
  Description of Artificial Sequence: Synthetic oligonucleotide
gagugauaugguuugucuuuuuaag

SEQ ID NO: 98707 - RNA, 25 nt, Artificial Sequence
  Description of Artificial Sequence: Synthetic oligonucleotide
ugcaguaaagauccuaaagguuguc

SEQ ID NO: 98708 - RNA, 25 nt, Artificial Sequence
  Description of Artificial Sequence: Synthetic oligonucleotide
aguaaagauccuaaagguugucgac

SEQ ID NO: 98709 - RNA, 25 nt, Artificial Sequence
  Description of Artificial Sequence: Synthetic oligonucleotide
ugacaaaggacaaccuggcaauugu

SEQ ID NO: 98710 - RNA, 25 nt, Artificial Sequence
  Description of Artificial Sequence: Synthetic oligonucleotide
gcaauugugacccaguggugcgagg

SEQ ID NO: 98711 - RNA, 25 nt, Artificial Sequence
  Description of Artificial Sequence: Synthetic oligonucleotide
aacaucauccauagagacaugaaau

SEQ ID NO: 98712 - RNA, 25 nt, Artificial Sequence
  Description of Artificial Sequence: Synthetic oligonucleotide
ugaaauccaacaauauauuucucca

SEQ ID NO: 98713 - RNA, 25 nt, Artificial Sequence
  Description of Artificial Sequence: Synthetic oligonucleotide
aacaauauauuucuccaugaaggcu

SEQ ID NO: 98714 - RNA, 25 nt, Artificial Sequence
  Description of Artificial Sequence: Synthetic oligonucleotide
aacaguaaagucacgcuggaguggu

SEQ ID NO: 98715 - RNA, 25 nt, Artificial Sequence
  Description of Artificial Sequence: Synthetic oligonucleotide
ugugaagaaaguaaaggaagagagg

SEQ ID NO: 98716 - RNA, 25 nt, Artificial Sequence
  Description of Artificial Sequence: Synthetic oligonucleotide
cuuccgagccauccuugcaucgggc

SEQ ID NO: 98717 - RNA, 25 nt, Artificial Sequence
  Description of Artificial Sequence: Synthetic oligonucleotide
aauggagguugaauauccuacugug

SEQ ID NO: 98718 - RNA, 25 nt, Artificial Sequence
  Description of Artificial Sequence: Synthetic oligonucleotide
ggagguugaauauccuacuguguaa

SEQ ID NO: 98719 - RNA, 25 nt, Artificial Sequence
  Description of Artificial Sequence: Synthetic oligonucleotide
auuuugaguuuucccuuguagugua

SEQ ID NO: 98720 - RNA, 25 nt, Artificial Sequence
  Description of Artificial Sequence: Synthetic oligonucleotide
uauccuguuuguucuuuguugauug

SEQ ID NO: 98721 - RNA, 25 nt, Artificial Sequence
  Description of Artificial Sequence: Synthetic oligonucleotide
ccuguuuguucuuuguugauugaaa

SEQ ID NO: 98722 - RNA, 25 nt, Artificial Sequence
  Description of Artificial Sequence: Synthetic oligonucleotide
cucuacagccuucuuuuucuuccau

SEQ ID NO: 98723 - RNA, 25 nt, Artificial Sequence
  Description of Artificial Sequence: Synthetic oligonucleotide
ucuuccauagcuaaucuuccuucua

SEQ ID NO: 98724 - RNA, 25 nt, Artificial Sequence
  Description of Artificial Sequence: Synthetic oligonucleotide
auaaucuuccuguugaaugcuucau

SEQ ID NO: 98725 - RNA, 25 nt, Artificial Sequence
  Description of Artificial Sequence: Synthetic oligonucleotide
uaaucuuccuguugaaugcuucaug

SEQ ID NO: 98726 - RNA, 25 nt, Artificial Sequence
  Description of Artificial Sequence: Synthetic oligonucleotide
cuucaugacuugaauucuacuuuga

SEQ ID NO: 98727 - RNA, 25 nt, Artificial Sequence
  Description of Artificial Sequence: Synthetic oligonucleotide
aagagggagagaagcaacuacagac

SEQ ID NO: 98728 - RNA, 25 nt, Artificial Sequence
  Description of Artificial Sequence: Synthetic oligonucleotide
cgucuccuaccagaccaaggucaac

SEQ ID NO: 98729 - RNA, 25 nt, Artificial Sequence
  Description of Artificial Sequence: Synthetic oligonucleotide
gaucaaucggcccgacuaucucgac

SEQ ID NO: 98730 - RNA, 25 nt, Artificial Sequence
  Description of Artificial Sequence: Synthetic oligonucleotide
ggacgaacauccaaccuucccaaac

SEQ ID NO: 98731 - RNA, 25 nt, Artificial Sequence
  Description of Artificial Sequence: Synthetic oligonucleotide
agggucggaacccaagcuuagaacu

SEQ ID NO: 98732 - RNA, 25 nt, Artificial Sequence
  Description of Artificial Sequence: Synthetic oligonucleotide
ucggaacccaagcuuagaacuuuaa

SEQ ID NO: 98733 - RNA, 25 nt, Artificial Sequence
  Description of Artificial Sequence: Synthetic oligonucleotide
acccaagcuuagaacuuuaagcaac

SEQ ID NO: 98734 - RNA, 25 nt, Artificial Sequence
  Description of Artificial Sequence: Synthetic oligonucleotide
gaacuuuaagcaacaagaccaccac

SEQ ID NO: 98735 - RNA, 25 nt, Artificial Sequence
  Description of Artificial Sequence: Synthetic oligonucleotide
acuauucaguggcgagaaauaaagu

SEQ ID NO: 98736 - RNA, 25 nt, Artificial Sequence
  Description of Artificial Sequence: Synthetic oligonucleotide
cuauucaguggcgagaaauaaaguu

SEQ ID NO: 98737 - RNA, 25 nt, Artificial Sequence
  Description of Artificial Sequence: Synthetic oligonucleotide
aaacacagauaacaggaaaugaucc

SEQ ID NO: 98738 - RNA, 25 nt, Artificial Sequence
  Description of Artificial Sequence: Synthetic oligonucleotide
cuuaagaaaagagaagaaaugaaac

SEQ ID NO: 98739 - RNA, 25 nt, Artificial Sequence
  Description of Artificial Sequence: Synthetic oligonucleotide
cugaaggaguguguuuccauccucc

SEQ ID NO: 98740 - RNA, 25 nt, Artificial Sequence
  Description of Artificial Sequence: Synthetic oligonucleotide
ucaccgcgggacugaaaaucuuuga

SEQ ID NO: 98741 - RNA, 25 nt, Artificial Sequence
  Description of Artificial Sequence: Synthetic oligonucleotide
agcagaaauaagcgugccguucagg

SEQ ID NO: 98742 - RNA, 25 nt, Artificial Sequence
  Description of Artificial Sequence: Synthetic oligonucleotide
aagcgugccguucaggguccagaag

SEQ ID NO: 98743 - RNA, 25 nt, Artificial Sequence
  Description of Artificial Sequence: Synthetic oligonucleotide
agaaacagucacucaagacugcuug

SEQ ID NO: 98744 - RNA, 25 nt, Artificial Sequence
  Description of Artificial Sequence: Synthetic oligonucleotide
agaggaagaagguccaugucuuugg

SEQ ID NO: 98745 - RNA, 25 nt, Artificial Sequence
  Description of Artificial Sequence: Synthetic oligonucleotide
uguauucaaaauaugccugaaacac

SEQ ID NO: 98746 - RNA, 25 nt, Artificial Sequence
  Description of Artificial Sequence: Synthetic oligonucleotide
auuuuccucccuuucucuguaccuc

SEQ ID NO: 98747 - RNA, 25 nt, Artificial Sequence
  Description of Artificial Sequence: Synthetic oligonucleotide
caaagaaagauagagcaagacaaga

SEQ ID NO: 98748 - RNA, 25 nt, Artificial Sequence
  Description of Artificial Sequence: Synthetic oligonucleotide
aagaaagauagagcaagacaagaaa

SEQ ID NO: 98749 - RNA, 25 nt, Artificial Sequence
  Description of Artificial Sequence: Synthetic oligonucleotide
gaaagcauuuguuuguacaagaucc

SEQ ID NO: 98750 - RNA, 25 nt, Artificial Sequence
  Description of Artificial Sequence: Synthetic oligonucleotide
ugaguuaaacgaacguacuugcaga

SEQ ID NO: 98751 - RNA, 25 nt, Artificial Sequence
  Description of Artificial Sequence: Synthetic oligonucleotide
acugauacagaacgaucgauacaga

SEQ ID NO: 98752 - RNA, 25 nt, Artificial Sequence
  Description of Artificial Sequence: Synthetic oligonucleotide
auauuauauauauauaaaaauaaau

SEQ ID NO: 98753 - RNA, 25 nt, Artificial Sequence
  Description of Artificial Sequence: Synthetic oligonucleotide
auuauauauauauaaaaauaaauau

SEQ ID NO: 98754 - RNA, 25 nt, Artificial Sequence
  Description of Artificial Sequence: Synthetic oligonucleotide
ucacuggauguauuugacugcugug

SEQ ID NO: 98755 - RNA, 25 nt, Artificial Sequence
  Description of Artificial Sequence: Synthetic oligonucleotide
cagggaagaggaggagaugagagac

SEQ ID NO: 98756 - RNA, 25 nt, Artificial Sequence
  Description of Artificial Sequence: Synthetic oligonucleotide
augaucuuuuuuuugucccacuugg

SEQ ID NO: 98757 - RNA, 27 nt, Artificial Sequence
  Description of Artificial Sequence: Synthetic oligonucleotide
ggccgugaacuccucaucaaaauaccu

SEQ ID NO: 98758 - RNA, 27 nt, Artificial Sequence
  Description of Artificial Sequence: Synthetic oligonucleotide
uggugugauggugaucaucugggccgu

SEQ ID NO: 98759 - RNA, 27 nt, Artificial Sequence
  Description of Artificial Sequence: Synthetic oligonucleotide
aaacccgcaggauaguuuucuucccua

SEQ ID NO: 98760 - RNA, 27 nt, Artificial Sequence
  Description of Artificial Sequence: Synthetic oligonucleotide
caaacuggaugaaauaaauuaaaaccc

SEQ ID NO: 98761 - RNA, 27 nt, Artificial Sequence
  Description of Artificial Sequence: Synthetic oligonucleotide
agaaguccuuaacauuucccuacguga

SEQ ID NO: 98762 - RNA, 27 nt, Artificial Sequence
  Description of Artificial Sequence: Synthetic oligonucleotide
cucugucccacuggguaaacccuggcc

SEQ ID NO: 98763 - RNA, 27 nt, Artificial Sequence
  Description of Artificial Sequence: Synthetic oligonucleotide
cacaauaacaaauuuaaaccuugcucc

SEQ ID NO: 98764 - RNA, 27 nt, Artificial Sequence
  Description of Artificial Sequence: Synthetic oligonucleotide
aaaugcauuugaacaacauaauacaca

SEQ ID NO: 98765 - RNA, 27 nt, Artificial Sequence
  Description of Artificial Sequence: Synthetic oligonucleotide
ggcuuuccugucacaaagauuaaaaac

SEQ ID NO: 98766 - RNA, 27 nt, Artificial Sequence
  Description of Artificial Sequence: Synthetic oligonucleotide
agggcuuuccugucacaaagauuaaaa

SEQ ID NO: 98767 - RNA, 27 nt, Artificial Sequence
  Description of Artificial Sequence: Synthetic oligonucleotide
ggccaugcugggagacauaagcagcag

SEQ ID NO: 98768 - RNA, 27 nt, Artificial Sequence
  Description of Artificial Sequence: Synthetic oligonucleotide
ucagggagaagcuucugaaacacuucu

SEQ ID NO: 98769 - RNA, 27 nt, Artificial Sequence
  Description of Artificial Sequence: Synthetic oligonucleotide
aagggcuucuuccuuauugauggucag

SEQ ID NO: 98770 - RNA, 27 nt, Artificial Sequence
  Description of Artificial Sequence: Synthetic oligonucleotide
ugaagggcuucuuccuuauugaugguc

SEQ ID NO: 98771 - RNA, 27 nt, Artificial Sequence
  Description of Artificial Sequence: Synthetic oligonucleotide
cgcugaagggcuucuuccuuauugaug

SEQ ID NO: 98772 - RNA, 27 nt, Artificial Sequence
  Description of Artificial Sequence: Synthetic oligonucleotide
gccgcugaagggcuucuuccuuauuga

SEQ ID NO: 98773 - RNA, 27 nt, Artificial Sequence
  Description of Artificial Sequence: Synthetic oligonucleotide
acuggccgcugaagggcuucuuccuua

SEQ ID NO: 98774 - RNA, 27 nt, Artificial Sequence
  Description of Artificial Sequence: Synthetic oligonucleotide
cggagcuuuucaccuuuaguuaugcuu

SEQ ID NO: 98775 - RNA, 27 nt, Artificial Sequence
  Description of Artificial Sequence: Synthetic oligonucleotide
ccggagcuuuucaccuuuaguuaugcu

SEQ ID NO: 98776 - RNA, 27 nt, Artificial Sequence
  Description of Artificial Sequence: Synthetic oligonucleotide
cagacuguugacuggcgugauguaguu

SEQ ID NO: 98777 - RNA, 27 nt, Artificial Sequence
  Description of Artificial Sequence: Synthetic oligonucleotide
cuuuugaacucugcuuaaauccagugg

SEQ ID NO: 98778 - RNA, 27 nt, Artificial Sequence
  Description of Artificial Sequence: Synthetic oligonucleotide
gcuuuugaacucugcuuaaauccagug

SEQ ID NO: 98779 - RNA, 27 nt, Artificial Sequence
  Description of Artificial Sequence: Synthetic oligonucleotide
agggcuuuugaacucugcuuaaaucca

SEQ ID NO: 98780 - RNA, 27 nt, Artificial Sequence
  Description of Artificial Sequence: Synthetic oligonucleotide
aagggcuuuugaacucugcuuaaaucc

SEQ ID NO: 98781 - RNA, 27 nt, Artificial Sequence
  Description of Artificial Sequence: Synthetic oligonucleotide
ugaagggcuuuugaacucugcuuaaau

SEQ ID NO: 98782 - RNA, 27 nt, Artificial Sequence
  Description of Artificial Sequence: Synthetic oligonucleotide
cugaagggcuuuugaacucugcuuaaa

SEQ ID NO: 98783 - RNA, 27 nt, Artificial Sequence
  Description of Artificial Sequence: Synthetic oligonucleotide
cgcugaagggcuuuugaacucugcuua

SEQ ID NO: 98784 - RNA, 27 nt, Artificial Sequence
  Description of Artificial Sequence: Synthetic oligonucleotide
cgagcggcuucacucagacccugaggc

SEQ ID NO: 98785 - RNA, 27 nt, Artificial Sequence
  Description of Artificial Sequence: Synthetic oligonucleotide
uugacuggcgugauguaguugcuuggg

SEQ ID NO: 98786 - RNA, 27 nt, Artificial Sequence
  Description of Artificial Sequence: Synthetic oligonucleotide
cacgcaccaagaagcugccauugaucc

SEQ ID NO: 98787 - RNA, 27 nt, Artificial Sequence
  Description of Artificial Sequence: Synthetic oligonucleotide
cugaugaauccaaugugggcuggaauc

SEQ ID NO: 98788 - RNA, 27 nt, Artificial Sequence
  Description of Artificial Sequence: Synthetic oligonucleotide
cuuagguauuccacauucucagcugug

SEQ ID NO: 98789 - RNA, 27 nt, Artificial Sequence
  Description of Artificial Sequence: Synthetic oligonucleotide
ugagccucaaauuaggagauacguuuu

SEQ ID NO: 98790 - RNA, 27 nt, Artificial Sequence
  Description of Artificial Sequence: Synthetic oligonucleotide
ccaauuguagagaaauuauuuuaggaa

SEQ ID NO: 98791 - RNA, 27 nt, Artificial Sequence
  Description of Artificial Sequence: Synthetic oligonucleotide
ggcuccuaacuagcugaaucuuccaau

SEQ ID NO: 98792 - RNA, 27 nt, Artificial Sequence
  Description of Artificial Sequence: Synthetic oligonucleotide
guggauauugacuaggagaguuuaaaa

SEQ ID NO: 98793 - RNA, 27 nt, Artificial Sequence
  Description of Artificial Sequence: Synthetic oligonucleotide
ugugacugaacauaacuguaggcugaa

SEQ ID NO: 98794 - RNA, 27 nt, Artificial Sequence
  Description of Artificial Sequence: Synthetic oligonucleotide
guaugugugugugacugaacauaacug

SEQ ID NO: 98795 - RNA, 27 nt, Artificial Sequence
  Description of Artificial Sequence: Synthetic oligonucleotide
aagcaaaaggaacauuuuguaugugug

SEQ ID NO: 98796 - RNA, 27 nt, Artificial Sequence
  Description of Artificial Sequence: Synthetic oligonucleotide
aaaaauuacuuuaaaagcaaaaggaac

SEQ ID NO: 98797 - RNA, 27 nt, Artificial Sequence
  Description of Artificial Sequence: Synthetic oligonucleotide
ccauugacuguugcuucacaggucaga

SEQ ID NO: 98798 - RNA, 27 nt, Artificial Sequence
  Description of Artificial Sequence: Synthetic oligonucleotide
auugguuugucgaugugugagauaguu

SEQ ID NO: 98799 - RNA, 27 nt, Artificial Sequence
  Description of Artificial Sequence: Synthetic oligonucleotide
agugguagcaguacaauugaggacaag

SEQ ID NO: 98800 - RNA, 27 nt, Artificial Sequence
  Description of Artificial Sequence: Synthetic oligonucleotide
uaagaccgcuugccagcuacgguuuca

SEQ ID NO: 98801 - RNA, 27 nt, Artificial Sequence
  Description of Artificial Sequence: Synthetic oligonucleotide
agccgguaagaccgcuugccagcuacg

SEQ ID NO: 98802 - RNA, 27 nt, Artificial Sequence
  Description of Artificial Sequence: Synthetic oligonucleotide
gguaacccaucuuuuaaccauacaacu

SEQ ID NO: 98803 - RNA, 27 nt, Artificial Sequence
  Description of Artificial Sequence: Synthetic oligonucleotide
ucgcagguaacccaucuuuuaaccaua

SEQ ID NO: 98804 - RNA, 27 nt, Artificial Sequence
  Description of Artificial Sequence: Synthetic oligonucleotide
cucagcaagauuguauaauucccugca

SEQ ID NO: 98805 - RNA, 27 nt, Artificial Sequence
  Description of Artificial Sequence: Synthetic oligonucleotide
acuguuuuaugcucagcaagauuguau

SEQ ID NO: 98806 - RNA, 27 nt, Artificial Sequence
  Description of Artificial Sequence: Synthetic oligonucleotide
aggauaaaggacucuucauuauuggaa

SEQ ID NO: 98807 - RNA, 27 nt, Artificial Sequence
  Description of Artificial Sequence: Synthetic oligonucleotide
caacuugcguuggaacauccaaagugu

SEQ ID NO: 98808 - RNA, 27 nt, Artificial Sequence
  Description of Artificial Sequence: Synthetic oligonucleotide
augguuucaguuuaguggaagcauuua

SEQ ID NO: 98809 - RNA, 27 nt, Artificial Sequence
  Description of Artificial Sequence: Synthetic oligonucleotide
auauuuaacaaagucaaacuuucucac

SEQ ID NO: 98810 - RNA, 27 nt, Artificial Sequence
  Description of Artificial Sequence: Synthetic oligonucleotide
aacuuuuaauauacaguaguucuuuuc

SEQ ID NO: 98811 - RNA, 27 nt, Artificial Sequence
  Description of Artificial Sequence: Synthetic oligonucleotide
guuaagucaaaacccguauuucuaaag

SEQ ID NO: 98812 - RNA, 27 nt, Artificial Sequence
  Description of Artificial Sequence: Synthetic oligonucleotide
gugcugaguuugcuguacccauguuga

SEQ ID NO: 98813 - RNA, 27 nt, Artificial Sequence
  Description of Artificial Sequence: Synthetic oligonucleotide
ugaggucagcaucuucugugucuuuac

SEQ ID NO: 98814 - RNA, 27 nt, Artificial Sequence
  Description of Artificial Sequence: Synthetic oligonucleotide
gcgaucugaauaaaccucccuacuagc

SEQ ID NO: 98815 - RNA, 27 nt, Artificial Sequence
  Description of Artificial Sequence: Synthetic oligonucleotide
aucccagaacccugcugcagaaggcca

SEQ ID NO: 98816 - RNA, 27 nt, Artificial Sequence
  Description of Artificial Sequence: Synthetic oligonucleotide
cauaauuuccaauauguaccagaccuu

SEQ ID NO: 98817 - RNA, 27 nt, Artificial Sequence
  Description of Artificial Sequence: Synthetic oligonucleotide
cuagugcuuccaucggaaggacuaggu

SEQ ID NO: 98818 - RNA, 27 nt, Artificial Sequence
  Description of Artificial Sequence: Synthetic oligonucleotide
uccacauaaaaacaauauucacuggga

SEQ ID NO: 98819 - RNA, 27 nt, Artificial Sequence
  Description of Artificial Sequence: Synthetic oligonucleotide
ucuaccaauuccaacuugaauucauug

SEQ ID NO: 98820 - RNA, 27 nt, Artificial Sequence
  Description of Artificial Sequence: Synthetic oligonucleotide
ucuccaagucuaaaucuguguccugag

SEQ ID NO: 98821 - RNA, 27 nt, Artificial Sequence
  Description of Artificial Sequence: Synthetic oligonucleotide
uggaauacuguaacugugcuuugagga

SEQ ID NO: 98822 - RNA, 27 nt, Artificial Sequence
  Description of Artificial Sequence: Synthetic oligonucleotide
uuaauucaucagugguggcagugguag

SEQ ID NO: 98823 - RNA, 27 nt, Artificial Sequence
  Description of Artificial Sequence: Synthetic oligonucleotide
gugaugauguggcacuaguaguuucuu

SEQ ID NO: 98824 - RNA, 27 nt, Artificial Sequence
  Description of Artificial Sequence: Synthetic oligonucleotide
ucuguuuggugaggcuguccgacuuug

SEQ ID NO: 98825 - RNA, 27 nt, Artificial Sequence
  Description of Artificial Sequence: Synthetic oligonucleotide
ccaucauguuccauuuuucgcuuucuc

SEQ ID NO: 98826 - RNA, 27 nt, Artificial Sequence
  Description of Artificial Sequence: Synthetic oligonucleotide
gcagucuacaugcuaaaucagagggua

SEQ ID NO: 98827 - RNA, 27 nt, Artificial Sequence
  Description of Artificial Sequence: Synthetic oligonucleotide
cauaaauagauccuuaaauagcucaaa

SEQ ID NO: 98828 - RNA, 27 nt, Artificial Sequence
  Description of Artificial Sequence: Synthetic oligonucleotide
ugauaauagugcuuuuucaccuuuuuc

SEQ ID NO: 98829 - RNA, 27 nt, Artificial Sequence
  Description of Artificial Sequence: Synthetic oligonucleotide
gcagaacugauaauagugcuuuuucac

SEQ ID NO: 98830 - RNA, 27 nt, Artificial Sequence
  Description of Artificial Sequence: Synthetic oligonucleotide
guagguuuaaucuuucuuuucagccau

SEQ ID NO: 98831 - RNA, 27 nt, Artificial Sequence
  Description of Artificial Sequence: Synthetic oligonucleotide
agaaggauuuuauuauaaggguuuaau

SEQ ID NO: 98832 - RNA, 27 nt, Artificial Sequence
  Description of Artificial Sequence: Synthetic oligonucleotide
gucuacagcauuggcuaauaguaugaa

SEQ ID NO: 98833 - RNA, 27 nt, Artificial Sequence
  Description of Artificial Sequence: Synthetic oligonucleotide
cuauuccuaucaaaaugcuucugucua

SEQ ID NO: 98834 - RNA, 27 nt, Artificial Sequence
  Description of Artificial Sequence: Synthetic oligonucleotide
ucagggccauuaucuuauuugcucuau

SEQ ID NO: 98835 - RNA, 27 nt, Artificial Sequence
  Description of Artificial Sequence: Synthetic oligonucleotide
ugcuugaggaagagaaaaauguugguc

SEQ ID NO: 98836 - RNA, 27 nt, Artificial Sequence
  Description of Artificial Sequence: Synthetic oligonucleotide
ugggcugaacuuuucucauacuuaaag

SEQ ID NO: 98837 - RNA, 27 nt, Artificial Sequence
  Description of Artificial Sequence: Synthetic oligonucleotide
gguucagcagccaucuuuauuccugcg

SEQ ID NO: 98838 - RNA, 27 nt, Artificial Sequence
  Description of Artificial Sequence: Synthetic oligonucleotide
ugaagagaacuuggucauucaaauuuc

SEQ ID NO: 98839 - RNA, 27 nt, Artificial Sequence
  Description of Artificial Sequence: Synthetic oligonucleotide
cucuaggcuggcuaucuuuauacauac

SEQ ID NO: 98840 - RNA, 27 nt, Artificial Sequence
  Description of Artificial Sequence: Synthetic oligonucleotide
acacuucacagagauaguuacagccau

SEQ ID NO: 98841 - RNA, 27 nt, Artificial Sequence
  Description of Artificial Sequence: Synthetic oligonucleotide
uugaaauuuucucacacuucacagaga

SEQ ID NO: 98842 - RNA, 27 nt, Artificial Sequence
  Description of Artificial Sequence: Synthetic oligonucleotide
ucaggaggauucauuuccuuaaaggaa

SEQ ID NO: 98843 - RNA, 27 nt, Artificial Sequence
  Description of Artificial Sequence: Synthetic oligonucleotide
auaugaugucacuuuuuguauccuuga

SEQ ID NO: 98844 - RNA, 27 nt, Artificial Sequence
  Description of Artificial Sequence: Synthetic oligonucleotide
uaugaugaagauucaaauugcaucuua

SEQ ID NO: 98845 - RNA, 27 nt, Artificial Sequence
  Description of Artificial Sequence: Synthetic oligonucleotide
uuaauagcuagucuucguuuugaacag

SEQ ID NO: 98846 - RNA, 27 nt, Artificial Sequence
  Description of Artificial Sequence: Synthetic oligonucleotide
auuuuuaguagagaugagguuucacca

SEQ ID NO: 98847 - RNA, 27 nt, Artificial Sequence
  Description of Artificial Sequence: Synthetic oligonucleotide
aggcgagauagagcuucucuuucguuc

SEQ ID NO: 98848 - RNA, 27 nt, Artificial Sequence
  Description of Artificial Sequence: Synthetic oligonucleotide
aacuggaccgaaggcgcuuguggagaa

SEQ ID NO: 98849 - RNA, 27 nt, Artificial Sequence
  Description of Artificial Sequence: Synthetic oligonucleotide
gcggcuacaucuuuggaaucuucuccu

SEQ ID NO: 98850 - RNA, 27 nt, Artificial Sequence
  Description of Artificial Sequence: Synthetic oligonucleotide
caagucuccucauugaauccagauugg

SEQ ID NO: 98851 - RNA, 27 nt, Artificial Sequence
  Description of Artificial Sequence: Synthetic oligonucleotide
uccucacuacucucaaaucuguucugg

SEQ ID NO: 98852 - RNA, 27 nt, Artificial Sequence
  Description of Artificial Sequence: Synthetic oligonucleotide
uuuguacucaucugcacagcucuggcu

SEQ ID NO: 98853 - RNA, 27 nt, Artificial Sequence
  Description of Artificial Sequence: Synthetic oligonucleotide
gcccauuaacaacaacaaucugaggug

SEQ ID NO: 98854 - RNA, 27 nt, Artificial Sequence
  Description of Artificial Sequence: Synthetic oligonucleotide
aauaaauuaaaaauaauuaaaauagug

SEQ ID NO: 98855 - RNA, 27 nt, Artificial Sequence
  Description of Artificial Sequence: Synthetic oligonucleotide
cauauuuaaauauuaauaaauuaaaaa

SEQ ID NO: 98856 - RNA, 27 nt, Artificial Sequence
  Description of Artificial Sequence: Synthetic oligonucleotide
gaaacaaaggauauucaaacugcauag

SEQ ID NO: 98857 - RNA, 27 nt, Artificial Sequence
  Description of Artificial Sequence: Synthetic oligonucleotide
caaacacuuagacgccagcagcauggg

SEQ ID NO: 98858 - RNA, 27 nt, Artificial Sequence
  Description of Artificial Sequence: Synthetic oligonucleotide
uuugucacaggugaaaugcacaucuga

SEQ ID NO: 98859 - RNA, 27 nt, Artificial Sequence
  Description of Artificial Sequence: Synthetic oligonucleotide
uaauucagccuggcacagguuuugauc

SEQ ID NO: 98860 - RNA, 27 nt, Artificial Sequence
  Description of Artificial Sequence: Synthetic oligonucleotide
auuguaagaaugacuacccacauucac

SEQ ID NO: 98861 - RNA, 27 nt, Artificial Sequence
  Description of Artificial Sequence: Synthetic oligonucleotide
caauuguaagaaugacuacccacauuc

SEQ ID NO: 98862 - RNA, 27 nt, Artificial Sequence
  Description of Artificial Sequence: Synthetic oligonucleotide
guacacucucugaugcucauuuucaua

SEQ ID NO: 98863 - RNA, 27 nt, Artificial Sequence
  Description of Artificial Sequence: Synthetic oligonucleotide
cugcugaguucuacaugaaaagcaaau

SEQ ID NO: 98864 - RNA, 27 nt, Artificial Sequence
  Description of Artificial Sequence: Synthetic oligonucleotide
uacugaaaauaaauauagaaauacaac

SEQ ID NO: 98865 - RNA, 27 nt, Artificial Sequence
  Description of Artificial Sequence: Synthetic oligonucleotide
uuccauuuaagaaacauuaaucaaaac

SEQ ID NO: 98866 - RNA, 27 nt, Artificial Sequence
  Description of Artificial Sequence: Synthetic oligonucleotide
acaauuuuaggcacuauacacguuguu

SEQ ID NO: 98867 - RNA, 27 nt, Artificial Sequence
  Description of Artificial Sequence: Synthetic oligonucleotide
ccagauguuaguagccaaggauauggu

SEQ ID NO: 98868 - RNA, 27 nt, Artificial Sequence
  Description of Artificial Sequence: Synthetic oligonucleotide
agcucacagucuccagauguuaguagc

SEQ ID NO: 98869 - RNA, 27 nt, Artificial Sequence
  Description of Artificial Sequence: Synthetic oligonucleotide
auuaauaaaaagcacacaacuuauggc

SEQ ID NO: 98870 - RNA, 27 nt, Artificial Sequence
  Description of Artificial Sequence: Synthetic oligonucleotide
aauguaagaagagccaaaaugaugcau

SEQ ID NO: 98871 - RNA, 27 nt, Artificial Sequence
  Description of Artificial Sequence: Synthetic oligonucleotide
acauuuuuacaaauguaagaagagcca

SEQ ID NO: 98872 - RNA, 27 nt, Artificial Sequence
  Description of Artificial Sequence: Synthetic oligonucleotide
aauaugaauuaagaugaccuaaucugu

SEQ ID NO: 98873 - RNA, 27 nt, Artificial Sequence
  Description of Artificial Sequence: Synthetic oligonucleotide
ucaugauuaguucuuucaauuccaucc

SEQ ID NO: 98874 - RNA, 27 nt, Artificial Sequence
  Description of Artificial Sequence: Synthetic oligonucleotide
cccaagagcagaaggaaugagugugca

SEQ ID NO: 98875 - RNA, 27 nt, Artificial Sequence
  Description of Artificial Sequence: Synthetic oligonucleotide
cucaaagcuacugguuaccucuacacc

SEQ ID NO: 98876 - RNA, 27 nt, Artificial Sequence
  Description of Artificial Sequence: Synthetic oligonucleotide
ugaaauauuacguggcaugugguuggg

SEQ ID NO: 98877 - RNA, 27 nt, Artificial Sequence
  Description of Artificial Sequence: Synthetic oligonucleotide
agugaagagaauaacuuguuuccgaag

SEQ ID NO: 98878 - RNA, 27 nt, Artificial Sequence
  Description of Artificial Sequence: Synthetic oligonucleotide
uuucuuagcauuaguuauugggaguga

SEQ ID NO: 98879 - RNA, 27 nt, Artificial Sequence
  Description of Artificial Sequence: Synthetic oligonucleotide
uugauuuucagcauuucuuagcauuag

SEQ ID NO: 98880 - RNA, 27 nt, Artificial Sequence
  Description of Artificial Sequence: Synthetic oligonucleotide
aaaguaaucauauuuagagaaagacag

SEQ ID NO: 98881 - RNA, 27 nt, Artificial Sequence
  Description of Artificial Sequence: Synthetic oligonucleotide
uguagaacaaaaugccugaaauucagc

SEQ ID NO: 98882 - RNA, 27 nt, Artificial Sequence
  Description of Artificial Sequence: Synthetic oligonucleotide
gagagucccgggugagagggaaucgcc

SEQ ID NO: 98883 - RNA, 27 nt, Artificial Sequence
  Description of Artificial Sequence: Synthetic oligonucleotide
cuuuacuuuaaagguucacuuuccuug

SEQ ID NO: 98884 - RNA, 27 nt, Artificial Sequence
  Description of Artificial Sequence: Synthetic oligonucleotide
ccaggcuuccagagcaugcagccuccu

SEQ ID NO: 98885 - RNA, 27 nt, Artificial Sequence
  Description of Artificial Sequence: Synthetic oligonucleotide
cucucuuuuguuuucuguucagagaaa

SEQ ID NO: 98886 - RNA, 27 nt, Artificial Sequence
  Description of Artificial Sequence: Synthetic oligonucleotide
cggcauaacugauuacagccaaguuca

SEQ ID NO: 98887 - RNA, 27 nt, Artificial Sequence
  Description of Artificial Sequence: Synthetic oligonucleotide
uggacuucuuuuaauuuuggcuucuuc

SEQ ID NO: 98888 - RNA, 27 nt, Artificial Sequence
  Description of Artificial Sequence: Synthetic oligonucleotide
uaaccucaccuggacuucuuuuaauuu

SEQ ID NO: 98889 - RNA, 27 nt, Artificial Sequence
  Description of Artificial Sequence: Synthetic oligonucleotide
guccucuucccgauaauccggauucag

SEQ ID NO: 98890 - RNA, 27 nt, Artificial Sequence
  Description of Artificial Sequence: Synthetic oligonucleotide
acaauacuugcuuugaugucacauuaa

SEQ ID NO: 98891 - RNA, 27 nt, Artificial Sequence
  Description of Artificial Sequence: Synthetic oligonucleotide
gagugcuacaauacuugcuuugauguc

SEQ ID NO: 98892 - RNA, 27 nt, Artificial Sequence
  Description of Artificial Sequence: Synthetic oligonucleotide
auuugugguuuuguuuucucucucucu

SEQ ID NO: 98893 - RNA, 27 nt, Artificial Sequence
  Description of Artificial Sequence: Synthetic oligonucleotide
uguaugggcuuaaauacuacagcgagg

SEQ ID NO: 98894 - RNA, 27 nt, Artificial Sequence
  Description of Artificial Sequence: Synthetic oligonucleotide
cuguaugggcuuaaauacuacagcgag

SEQ ID NO: 98895 - RNA, 27 nt, Artificial Sequence
  Description of Artificial Sequence: Synthetic oligonucleotide
ggaagguuucuguaugggcuuaaauac

SEQ ID NO: 98896 - RNA, 27 nt, Artificial Sequence
  Description of Artificial Sequence: Synthetic oligonucleotide
guagguauaccauguuuauuuuaauac

SEQ ID NO: 98897 - RNA, 27 nt, Artificial Sequence
  Description of Artificial Sequence: Synthetic oligonucleotide
uccgaaaacuggccgaucagaacagcc

SEQ ID NO: 98898 - RNA, 27 nt, Artificial Sequence
  Description of Artificial Sequence: Synthetic oligonucleotide
cccuguuccaaaguucaaauuauuugu

SEQ ID NO: 98899 - RNA, 27 nt, Artificial Sequence
  Description of Artificial Sequence: Synthetic oligonucleotide
acuggaaaguuaaauuaaggucgcaau

SEQ ID NO: 98900 - RNA, 27 nt, Artificial Sequence
  Description of Artificial Sequence: Synthetic oligonucleotide
caaaaccaaacuuuagcuuucucagcc

SEQ ID NO: 98901 - RNA, 27 nt, Artificial Sequence
  Description of Artificial Sequence: Synthetic oligonucleotide
uacagugggaaguagcaucuuuacuuu

SEQ ID NO: 98902 - RNA, 27 nt, Artificial Sequence
  Description of Artificial Sequence: Synthetic oligonucleotide
ucauaugguaucagcaauuaagcagua

SEQ ID NO: 98903 - RNA, 27 nt, Artificial Sequence
  Description of Artificial Sequence: Synthetic oligonucleotide
cagcccauguuucauucauaugguauc

SEQ ID NO: 98904 - RNA, 27 nt, Artificial Sequence
  Description of Artificial Sequence: Synthetic oligonucleotide
uaugaaaaaguuggauaagaaaguugg

SEQ ID NO: 98905 - RNA, 27 nt, Artificial Sequence
  Description of Artificial Sequence: Synthetic oligonucleotide
uccggccucaugaugucaugcaaggcu

SEQ ID NO: 98906 - RNA, 27 nt, Artificial Sequence
  Description of Artificial Sequence: Synthetic oligonucleotide
acaaaugcagucauauacaaauucagg

SEQ ID NO: 98907 - RNA, 27 nt, Artificial Sequence
  Description of Artificial Sequence: Synthetic oligonucleotide
gguaguaaacauucuacuaggauucuu

SEQ ID NO: 98908 - RNA, 27 nt, Artificial Sequence
  Description of Artificial Sequence: Synthetic oligonucleotide
uuucaucaaaaaauucuucccuuucug

SEQ ID NO: 98909 - RNA, 27 nt, Artificial Sequence
  Description of Artificial Sequence: Synthetic oligonucleotide
aaauucacacacuggcaugccgauagc

SEQ ID NO: 98910 - RNA, 27 nt, Artificial Sequence
  Description of Artificial Sequence: Synthetic oligonucleotide
acauacauugcucuacuaugaggugaa

SEQ ID NO: 98911 - RNA, 27 nt, Artificial Sequence
  Description of Artificial Sequence: Synthetic oligonucleotide
uauauaugugcuuuggcaauucuggug

SEQ ID NO: 98912 - RNA, 27 nt, Artificial Sequence
  Description of Artificial Sequence: Synthetic oligonucleotide
ggagaaacuauuacccagaucaccacu

SEQ ID NO: 98913 - RNA, 27 nt, Artificial Sequence
  Description of Artificial Sequence: Synthetic oligonucleotide
auuuggagaaacuauuacccagaucac

SEQ ID NO: 98914 - RNA, 27 nt, Artificial Sequence
  Description of Artificial Sequence: Synthetic oligonucleotide
uuucuaggaaguauucaucacauccac

SEQ ID NO: 98915 - RNA, 27 nt, Artificial Sequence
  Description of Artificial Sequence: Synthetic oligonucleotide
cauauaugguguagcuguggaaaugcg

SEQ ID NO: 98916 - RNA, 27 nt, Artificial Sequence
  Description of Artificial Sequence: Synthetic oligonucleotide
cuccauucauauaugguguagcugugg

SEQ ID NO: 98917 - RNA, 27 nt, Artificial Sequence
  Description of Artificial Sequence: Synthetic oligonucleotide
aucuucuucucguguaagaacugcagc

SEQ ID NO: 98918 - RNA, 27 nt, Artificial Sequence
  Description of Artificial Sequence: Synthetic oligonucleotide
ucccuguaaaugaucuucuucucgugu

SEQ ID NO: 98919 - RNA, 27 nt, Artificial Sequence
  Description of Artificial Sequence: Synthetic oligonucleotide
gucccuguaaaugaucuucuucucgug

SEQ ID NO: 98920 - RNA, 27 nt, Artificial Sequence
  Description of Artificial Sequence: Synthetic oligonucleotide
ucaggucccuguaaaugaucuucuucu

SEQ ID NO: 98921 - RNA, 27 nt, Artificial Sequence
  Description of Artificial Sequence: Synthetic oligonucleotide
gaugcagucaaacaccucuuccucugu

SEQ ID NO: 98922 - RNA, 27 nt, Artificial Sequence
  Description of Artificial Sequence: Synthetic oligonucleotide
cgaugcagucaaacaccucuuccucug

SEQ ID NO: 98923 - RNA, 27 nt, Artificial Sequence
  Description of Artificial Sequence: Synthetic oligonucleotide
cccugugaacucgcccucaaaguagcg

SEQ ID NO: 98924 - RNA, 27 nt, Artificial Sequence
  Description of Artificial Sequence: Synthetic oligonucleotide
ggacagaggugccaggagaugcccuca

SEQ ID NO: 98925 - RNA, 27 nt, Artificial Sequence
  Description of Artificial Sequence: Synthetic oligonucleotide
uuaaaaagacaaaccauaucacuccuu

SEQ ID NO: 98926 - RNA, 27 nt, Artificial Sequence
  Description of Artificial Sequence: Synthetic oligonucleotide
cuuaaaaagacaaaccauaucacuccu

SEQ ID NO: 98927 - RNA, 27 nt, Artificial Sequence
  Description of Artificial Sequence: Synthetic oligonucleotide
gacaaccuuuaggaucuuuacugcaac

SEQ ID NO: 98928 - RNA, 27 nt, Artificial Sequence
  Description of Artificial Sequence: Synthetic oligonucleotide
gucgacaaccuuuaggaucuuuacugc

SEQ ID NO: 98929 - RNA, 27 nt, Artificial Sequence
  Description of Artificial Sequence: Synthetic oligonucleotide
acaauugccagguuguccuuugucaug

SEQ ID NO: 98930 - RNA, 27 nt, Artificial Sequence
  Description of Artificial Sequence: Synthetic oligonucleotide
ccucgcaccacugggucacaauugcca

SEQ ID NO: 98931 - RNA, 27 nt, Artificial Sequence
  Description of Artificial Sequence: Synthetic oligonucleotide
auuucaugucucuauggaugauguucu

SEQ ID NO: 98932 - RNA, 27 nt, Artificial Sequence
  Description of Artificial Sequence: Synthetic oligonucleotide
uggagaaauauauuguuggauuucaug

SEQ ID NO: 98933 - RNA, 27 nt, Artificial Sequence
  Description of Artificial Sequence: Synthetic oligonucleotide
agccuucauggagaaauauauuguugg

SEQ ID NO: 98934 - RNA, 27 nt, Artificial Sequence
  Description of Artificial Sequence: Synthetic oligonucleotide
accacuccagcgugacuuuacuguugc

SEQ ID NO: 98935 - RNA, 27 nt, Artificial Sequence
  Description of Artificial Sequence: Synthetic oligonucleotide
ccucucuuccuuuacuuucuucacaca

SEQ ID NO: 98936 - RNA, 27 nt, Artificial Sequence
  Description of Artificial Sequence: Synthetic oligonucleotide
gcccgaugcaaggauggcucggaagcg

SEQ ID NO: 98937 - RNA, 27 nt, Artificial Sequence
  Description of Artificial Sequence: Synthetic oligonucleotide
cacaguaggauauucaaccuccauuuc

SEQ ID NO: 98938 - RNA, 27 nt, Artificial Sequence
  Description of Artificial Sequence: Synthetic oligonucleotide
uuacacaguaggauauucaaccuccau

SEQ ID NO: 98939 - RNA, 27 nt, Artificial Sequence
  Description of Artificial Sequence: Synthetic oligonucleotide
uacacuacaagggaaaacucaaaaucu

SEQ ID NO: 98940 - RNA, 27 nt, Artificial Sequence
  Description of Artificial Sequence: Synthetic oligonucleotide
caaucaacaaagaacaaacaggauaaa

SEQ ID NO: 98941 - RNA, 27 nt, Artificial Sequence
  Description of Artificial Sequence: Synthetic oligonucleotide
uuucaaucaacaaagaacaaacaggau

SEQ ID NO: 98942 - RNA, 27 nt, Artificial Sequence
  Description of Artificial Sequence: Synthetic oligonucleotide
auggaagaaaaagaaggcuguagagaa

SEQ ID NO: 98943 - RNA, 27 nt, Artificial Sequence
  Description of Artificial Sequence: Synthetic oligonucleotide
uagaaggaagauuagcuauggaagaaa

SEQ ID NO: 98944 - RNA, 27 nt, Artificial Sequence
  Description of Artificial Sequence: Synthetic oligonucleotide
augaagcauucaacaggaagauuauuu

SEQ ID NO: 98945 - RNA, 27 nt, Artificial Sequence
  Description of Artificial Sequence: Synthetic oligonucleotide
caugaagcauucaacaggaagauuauu

SEQ ID NO: 98946 - RNA, 27 nt, Artificial Sequence
  Description of Artificial Sequence: Synthetic oligonucleotide
ucaaaguagaauucaagucaugaagca

SEQ ID NO: 98947 - RNA, 27 nt, Artificial Sequence
  Description of Artificial Sequence: Synthetic oligonucleotide
gucuguaguugcuucucucccucuuag

SEQ ID NO: 98948 - RNA, 27 nt, Artificial Sequence
  Description of Artificial Sequence: Synthetic oligonucleotide
guugaccuuggucugguaggagacggc

SEQ ID NO: 98949 - RNA, 27 nt, Artificial Sequence
  Description of Artificial Sequence: Synthetic oligonucleotide
gucgagauagucgggccgauugaucuc

SEQ ID NO: 98950 - RNA, 27 nt, Artificial Sequence
  Description of Artificial Sequence: Synthetic oligonucleotide
guuugggaagguuggauguucguccuc

SEQ ID NO: 98951 - RNA, 27 nt, Artificial Sequence
  Description of Artificial Sequence: Synthetic oligonucleotide
aguucuaagcuuggguuccgacccuaa

SEQ ID NO: 98952 - RNA, 27 nt, Artificial Sequence
  Description of Artificial Sequence: Synthetic oligonucleotide
uuaaaguucuaagcuuggguuccgacc

SEQ ID NO: 98953 - RNA, 27 nt, Artificial Sequence
  Description of Artificial Sequence: Synthetic oligonucleotide
guugcuuaaaguucuaagcuuggguuc

SEQ ID NO: 98954 - RNA, 27 nt, Artificial Sequence
  Description of Artificial Sequence: Synthetic oligonucleotide
gugguggucuuguugcuuaaaguucua

SEQ ID NO: 98955 - RNA, 27 nt, Artificial Sequence
  Description of Artificial Sequence: Synthetic oligonucleotide
acuuuauuucucgccacugaauaguag

SEQ ID NO: 98956 - RNA, 27 nt, Artificial Sequence
  Description of Artificial Sequence: Synthetic oligonucleotide
aacuuuauuucucgccacugaauagua

SEQ ID NO: 98957 - RNA, 27 nt, Artificial Sequence
  Description of Artificial Sequence: Synthetic oligonucleotide
ggaucauuuccuguuaucuguguuugu

SEQ ID NO: 98958 - RNA, 27 nt, Artificial Sequence
  Description of Artificial Sequence: Synthetic oligonucleotide
guuucauuucuucucuuuucuuaaggc

SEQ ID NO: 98959 - RNA, 27 nt, Artificial Sequence
  Description of Artificial Sequence: Synthetic oligonucleotide
ggaggauggaaacacacuccuucaguu

SEQ ID NO: 98960 - RNA, 27 nt, Artificial Sequence
  Description of Artificial Sequence: Synthetic oligonucleotide
ucaaagauuuucagucccgcggugaca

SEQ ID NO: 98961 - RNA, 27 nt, Artificial Sequence
  Description of Artificial Sequence: Synthetic oligonucleotide
ccugaacggcacgcuuauuucugcugu

SEQ ID NO: 98962 - RNA, 27 nt, Artificial Sequence
  Description of Artificial Sequence: Synthetic oligonucleotide
cuucuggacccugaacggcacgcuuau

SEQ ID NO: 98963 - RNA, 27 nt, Artificial Sequence
  Description of Artificial Sequence: Synthetic oligonucleotide
caagcagucuugagugacuguuucuuc

SEQ ID NO: 98964 - RNA, 27 nt, Artificial Sequence
  Description of Artificial Sequence: Synthetic oligonucleotide
ccaaagacauggaccuucuuccucuga

SEQ ID NO: 98965 - RNA, 27 nt, Artificial Sequence
  Description of Artificial Sequence: Synthetic oligonucleotide
guguuucaggcauauuuugaauacauc

SEQ ID NO: 98966 - RNA, 27 nt, Artificial Sequence
  Description of Artificial Sequence: Synthetic oligonucleotide
gagguacagagaaagggaggaaaauag

SEQ ID NO: 98967 - RNA, 27 nt, Artificial Sequence
  Description of Artificial Sequence: Synthetic oligonucleotide
ucuugucuugcucuaucuuucuuuggu

SEQ ID NO: 98968 - RNA, 27 nt, Artificial Sequence
  Description of Artificial Sequence: Synthetic oligonucleotide
uuucuugucuugcucuaucuuucuuug

SEQ ID NO: 98969 - RNA, 27 nt, Artificial Sequence
  Description of Artificial Sequence: Synthetic oligonucleotide
ggaucuuguacaaacaaaugcuuucuc

SEQ ID NO: 98970 - RNA, 27 nt, Artificial Sequence
  Description of Artificial Sequence: Synthetic oligonucleotide
ucugcaaguacguucguuuaacucaag

SEQ ID NO: 98971 - RNA, 27 nt, Artificial Sequence
  Description of Artificial Sequence: Synthetic oligonucleotide
ucuguaucgaucguucuguaucagucu

SEQ ID NO: 98972 - RNA, 27 nt, Artificial Sequence
  Description of Artificial Sequence: Synthetic oligonucleotide
auuuauuuuuauauauauauaauauau

SEQ ID NO: 98973 - RNA, 27 nt, Artificial Sequence
  Description of Artificial Sequence: Synthetic oligonucleotide
auauuuauuuuuauauauauauaauau

SEQ ID NO: 98974 - RNA, 27 nt, Artificial Sequence
  Description of Artificial Sequence: Synthetic oligonucleotide
cacagcagucaaauacauccagugaag

SEQ ID NO: 98975 - RNA, 27 nt, Artificial Sequence
  Description of Artificial Sequence: Synthetic oligonucleotide
gucucucaucuccuccucuucccuguc

SEQ ID NO: 98976 - RNA, 27 nt, Artificial Sequence
  Description of Artificial Sequence: Synthetic oligonucleotide
ccaagugggacaaaaaaaagaucaugc

SEQ ID NO: 98977 - RNA, 14 nt, Artificial Sequence
  Description of Artificial Sequence: Synthetic oligonucleotide
guauuuugaugagg

SEQ ID NO: 98978 - RNA, 12 nt, Artificial Sequence
  Description of Artificial Sequence: Synthetic oligonucleotide
ggcccagaugau

SEQ ID NO: 98979 - RNA, 14 nt, Artificial Sequence
  Description of Artificial Sequence: Synthetic oligonucleotide
gggaagaaaacuau

SEQ ID NO: 98980 - RNA, 15 nt, Artificial Sequence
  Description of Artificial Sequence: Synthetic oligonucleotide
guuuuaauuuauuuc

SEQ ID NO: 98981 - RNA, 12 nt, Artificial Sequence
  Description of Artificial Sequence: Synthetic oligonucleotide
acguagggaaau

SEQ ID NO: 98982 - RNA, 12 nt, Artificial Sequence
  Description of Artificial Sequence: Synthetic oligonucleotide
ccaggguuuacc

SEQ ID NO: 98983 - RNA, 11 nt, Artificial Sequence
  Description of Artificial Sequence: Synthetic oligonucleotide
agcaagguuua

SEQ ID NO: 98984 - RNA, 12 nt, Artificial Sequence
  Description of Artificial Sequence: Synthetic oligonucleotide
uguauuauguug

SEQ ID NO: 98985 - RNA, 15 nt, Artificial Sequence
  Description of Artificial Sequence: Synthetic oligonucleotide
uuuuaaucuuuguga

SEQ ID NO: 98986 - RNA, 14 nt, Artificial Sequence
  Description of Artificial Sequence: Synthetic oligonucleotide
uuaaucuuugugac

SEQ ID NO: 98987 - RNA, 13 nt, Artificial Sequence
  Description of Artificial Sequence: Synthetic oligonucleotide
gcugcuuaugucu

SEQ ID NO: 98988 - RNA, 14 nt, Artificial Sequence
  Description of Artificial Sequence: Synthetic oligonucleotide
aaguguuucagaag

SEQ ID NO: 98989 - RNA, 13 nt, Artificial Sequence
  Description of Artificial Sequence: Synthetic oligonucleotide
gaccaucaauaag

SEQ ID NO: 98990 - RNA, 13 nt, Artificial Sequence
  Description of Artificial Sequence: Synthetic oligonucleotide
ccaucaauaagga

SEQ ID NO: 98991 - RNA, 14 nt, Artificial Sequence
  Description of Artificial Sequence: Synthetic oligonucleotide
ucaauaaggaagaa

SEQ ID NO: 98992 - RNA, 14 nt, Artificial Sequence
  Description of Artificial Sequence: Synthetic oligonucleotide
aauaaggaagaagc

SEQ ID NO: 98993 - RNA, 13 nt, Artificial Sequence
  Description of Artificial Sequence: Synthetic oligonucleotide
aggaagaagcccu

SEQ ID NO: 98994 - RNA, 13 nt, Artificial Sequence
  Description of Artificial Sequence: Synthetic oligonucleotide
gcauaacuaaagg

SEQ ID NO: 98995 - RNA, 14 nt, Artificial Sequence
  Description of Artificial Sequence: Synthetic oligonucleotide
cauaacuaaaggug

SEQ ID NO: 98996 - RNA, 12 nt, Artificial Sequence
  Description of Artificial Sequence: Synthetic oligonucleotide
cuacaucacgcc

SEQ ID NO: 98997 - RNA, 12 nt, Artificial Sequence
  Description of Artificial Sequence: Synthetic oligonucleotide
acuggauuuaag

SEQ ID NO: 98998 - RNA, 12 nt, Artificial Sequence
  Description of Artificial Sequence: Synthetic oligonucleotide
cuggauuuaagc

SEQ ID NO: 98999 - RNA, 13 nt, Artificial Sequence
  Description of Artificial Sequence: Synthetic oligonucleotide
gauuuaagcagag

SEQ ID NO: 99000 - RNA, 13 nt, Artificial Sequence
  Description of Artificial Sequence: Synthetic oligonucleotide
auuuaagcagagu

SEQ ID NO: 99001 - RNA, 13 nt, Artificial Sequence
  Description of Artificial Sequence: Synthetic oligonucleotide
uuaagcagaguuc

SEQ ID NO: 99002 - RNA, 13 nt, Artificial Sequence
  Description of Artificial Sequence: Synthetic oligonucleotide
uaagcagaguuca

SEQ ID NO: 99003 - RNA, 14 nt, Artificial Sequence
  Description of Artificial Sequence: Synthetic oligonucleotide
agcagaguucaaaa

SEQ ID NO: 99004 - RNA, 12 nt, Artificial Sequence
  Description of Artificial Sequence: Synthetic oligonucleotide
cucagggucuga

SEQ ID NO: 99005 - RNA, 13 nt, Artificial Sequence
  Description of Artificial Sequence: Synthetic oligonucleotide
caagcaacuacau

SEQ ID NO: 99006 - RNA, 12 nt, Artificial Sequence
  Description of Artificial Sequence: Synthetic oligonucleotide
aucaauggcagc

SEQ ID NO: 99007 - RNA, 11 nt, Artificial Sequence
  Description of Artificial Sequence: Synthetic oligonucleotide
uuccagcccac

SEQ ID NO: 99008 - RNA, 12 nt, Artificial Sequence
  Description of Artificial Sequence: Synthetic oligonucleotide
cagcugagaaug

SEQ ID NO: 99009 - RNA, 13 nt, Artificial Sequence
  Description of Artificial Sequence: Synthetic oligonucleotide
aacguaucuccua

SEQ ID NO: 99010 - RNA, 14 nt, Artificial Sequence
  Description of Artificial Sequence: Synthetic oligonucleotide
ccuaaaauaauuuc

SEQ ID NO: 99011 - RNA, 13 nt, Artificial Sequence
  Description of Artificial Sequence: Synthetic oligonucleotide
uggaagauucagc

SEQ ID NO: 99012 - RNA, 12 nt, Artificial Sequence
  Description of Artificial Sequence: Synthetic oligonucleotide
uuaaacucuccu

SEQ ID NO: 99013 - RNA, 12 nt, Artificial Sequence
  Description of Artificial Sequence: Synthetic oligonucleotide
cagccuacaguu

SEQ ID NO: 99014 - RNA, 13 nt, Artificial Sequence
  Description of Artificial Sequence: Synthetic oligonucleotide
guuauguucaguc

SEQ ID NO: 99015 - RNA, 13 nt, Artificial Sequence
  Description of Artificial Sequence: Synthetic oligonucleotide
cacauacaaaaug

SEQ ID NO: 99016 - RNA, 9 nt, Artificial Sequence
  Description of Artificial Sequence: Synthetic oligonucleotide
uccuuuugc

SEQ ID NO: 99017 - RNA, 12 nt, Artificial Sequence
  Description of Artificial Sequence: Synthetic oligonucleotide
ugaccugugaag

SEQ ID NO: 99018 - RNA, 12 nt, Artificial Sequence
  Description of Artificial Sequence: Synthetic oligonucleotide
cuaucucacaca

SEQ ID NO: 99019 - RNA, 13 nt, Artificial Sequence
  Description of Artificial Sequence: Synthetic oligonucleotide
uguccucaauugu

SEQ ID NO: 99020 - RNA, 12 nt, Artificial Sequence
  Description of Artificial Sequence: Synthetic oligonucleotide
aaaccguagcug

SEQ ID NO: 99021 - RNA, 12 nt, Artificial Sequence
  Description of Artificial Sequence: Synthetic oligonucleotide
uagcuggcaagc

SEQ ID NO: 99022 - RNA, 14 nt, Artificial Sequence
  Description of Artificial Sequence: Synthetic oligonucleotide
uuguaugguuaaaa

SEQ ID NO: 99023 - RNA, 14 nt, Artificial Sequence
  Description of Artificial Sequence: Synthetic oligonucleotide
ugguuaaaagaugg

SEQ ID NO: 99024 - RNA, 13 nt, Artificial Sequence
  Description of Artificial Sequence: Synthetic oligonucleotide
cagggaauuauac

SEQ ID NO: 99025 - RNA, 12 nt, Artificial Sequence
  Description of Artificial Sequence: Synthetic oligonucleotide
acaaucuugcug

SEQ ID NO: 99026 - RNA, 13 nt, Artificial Sequence
  Description of Artificial Sequence: Synthetic oligonucleotide
ccaauaaugaaga

SEQ ID NO: 99027 - RNA, 13 nt, Artificial Sequence
  Description of Artificial Sequence: Synthetic oligonucleotide
acuuuggauguuc

SEQ ID NO: 99028 - RNA, 12 nt, Artificial Sequence
  Description of Artificial Sequence: Synthetic oligonucleotide
aaugcuuccacu

SEQ ID NO: 99029 - RNA, 11 nt, Artificial Sequence
  Description of Artificial Sequence: Synthetic oligonucleotide
gagaaaguuug

SEQ ID NO: 99030 - RNA, 11 nt, Artificial Sequence
  Description of Artificial Sequence: Synthetic oligonucleotide
aaagaacuacu

SEQ ID NO: 99031 - RNA, 12 nt, Artificial Sequence
  Description of Artificial Sequence: Synthetic oligonucleotide
uuagaaauacgg

SEQ ID NO: 99032 - RNA, 12 nt, Artificial Sequence
  Description of Artificial Sequence: Synthetic oligonucleotide
aacauggguaca

SEQ ID NO: 99033 - RNA, 14 nt, Artificial Sequence
  Description of Artificial Sequence: Synthetic oligonucleotide
aaagacacagaaga

SEQ ID NO: 99034 - RNA, 11 nt, Artificial Sequence
  Description of Artificial Sequence: Synthetic oligonucleotide
uaguagggagg

SEQ ID NO: 99035 - RNA, 12 nt, Artificial Sequence
  Description of Artificial Sequence: Synthetic oligonucleotide
gccuucugcagc

SEQ ID NO: 99036 - RNA, 10 nt, Artificial Sequence
  Description of Artificial Sequence: Synthetic oligonucleotide
ggucugguac

SEQ ID NO: 99037 - RNA, 12 nt, Artificial Sequence
  Description of Artificial Sequence: Synthetic oligonucleotide
cuaguccuuccg

SEQ ID NO: 99038 - RNA, 12 nt, Artificial Sequence
  Description of Artificial Sequence: Synthetic oligonucleotide
ccagugaauauu

SEQ ID NO: 99039 - RNA, 13 nt, Artificial Sequence
  Description of Artificial Sequence: Synthetic oligonucleotide
augaauucaaguu

SEQ ID NO: 99040 - RNA, 12 nt, Artificial Sequence
  Description of Artificial Sequence: Synthetic oligonucleotide
caggacacagau

SEQ ID NO: 99041 - RNA, 12 nt, Artificial Sequence
  Description of Artificial Sequence: Synthetic oligonucleotide
cucaaagcacag

SEQ ID NO: 99042 - RNA, 10 nt, Artificial Sequence
  Description of Artificial Sequence: Synthetic oligonucleotide
accacugcca

SEQ ID NO: 99043 - RNA, 13 nt, Artificial Sequence
  Description of Artificial Sequence: Synthetic oligonucleotide
gaaacuacuagug

SEQ ID NO: 99044 - RNA, 12 nt, Artificial Sequence
  Description of Artificial Sequence: Synthetic oligonucleotide
aagucggacagc

SEQ ID NO: 99045 - RNA, 13 nt, Artificial Sequence
  Description of Artificial Sequence: Synthetic oligonucleotide
gaaagcgaaaaau

SEQ ID NO: 99046 - RNA, 13 nt, Artificial Sequence
  Description of Artificial Sequence: Synthetic oligonucleotide
cccucugauuuag

SEQ ID NO: 99047 - RNA, 12 nt, Artificial Sequence
  Description of Artificial Sequence: Synthetic oligonucleotide
ugagcuauuuaa

SEQ ID NO: 99048 - RNA, 13 nt, Artificial Sequence
  Description of Artificial Sequence: Synthetic oligonucleotide
aaaaggugaaaaa

SEQ ID NO: 99049 - RNA, 14 nt, Artificial Sequence
  Description of Artificial Sequence: Synthetic oligonucleotide
gaaaaagcacuauu

SEQ ID NO: 99050 - RNA, 12 nt, Artificial Sequence
  Description of Artificial Sequence: Synthetic oligonucleotide
ggcugaaaagaa

SEQ ID NO: 99051 - RNA, 12 nt, Artificial Sequence
  Description of Artificial Sequence: Synthetic oligonucleotide
uaaacccuuaua

SEQ ID NO: 99052 - RNA, 13 nt, Artificial Sequence
  Description of Artificial Sequence: Synthetic oligonucleotide
cauacuauuagcc

SEQ ID NO: 99053 - RNA, 12 nt, Artificial Sequence
  Description of Artificial Sequence: Synthetic oligonucleotide
gacagaagcauu

SEQ ID NO: 99054 - RNA, 14 nt, Artificial Sequence
  Description of Artificial Sequence: Synthetic oligonucleotide
agagcaaauaagau

SEQ ID NO: 99055 - RNA, 14 nt, Artificial Sequence
  Description of Artificial Sequence: Synthetic oligonucleotide
ccaacauuuuucuc

SEQ ID NO: 99056 - RNA, 15 nt, Artificial Sequence
  Description of Artificial Sequence: Synthetic oligonucleotide
uuaaguaugagaaaa

SEQ ID NO: 99057 - RNA, 14 nt, Artificial Sequence
  Description of Artificial Sequence: Synthetic oligonucleotide
caggaauaaagaug

SEQ ID NO: 99058 - RNA, 13 nt, Artificial Sequence
  Description of Artificial Sequence: Synthetic oligonucleotide
aauuugaaugacc

SEQ ID NO: 99059 - RNA, 14 nt, Artificial Sequence
  Description of Artificial Sequence: Synthetic oligonucleotide
auguauaaagauag

SEQ ID NO: 99060 - RNA, 12 nt, Artificial Sequence
  Description of Artificial Sequence: Synthetic oligonucleotide
ggcuguaacuau

SEQ ID NO: 99061 - RNA, 11 nt, Artificial Sequence
  Description of Artificial Sequence: Synthetic oligonucleotide
ucugugaagug

SEQ ID NO: 99062 - RNA, 14 nt, Artificial Sequence
  Description of Artificial Sequence: Synthetic oligonucleotide
ccuuuaaggaaaug

SEQ ID NO: 99063 - RNA, 13 nt, Artificial Sequence
  Description of Artificial Sequence: Synthetic oligonucleotide
aaggauacaaaaa

SEQ ID NO: 99064 - RNA, 12 nt, Artificial Sequence
  Description of Artificial Sequence: Synthetic oligonucleotide
agaugcaauuug

SEQ ID NO: 99065 - RNA, 12 nt, Artificial Sequence
  Description of Artificial Sequence: Synthetic oligonucleotide
guucaaaacgaa

SEQ ID NO: 99066 - RNA, 11 nt, Artificial Sequence
  Description of Artificial Sequence: Synthetic oligonucleotide
gugaaaccuca

SEQ ID NO: 99067 - RNA, 13 nt, Artificial Sequence
  Description of Artificial Sequence: Synthetic oligonucleotide
acgaaagagaagc

SEQ ID NO: 99068 - RNA, 12 nt, Artificial Sequence
  Description of Artificial Sequence: Synthetic oligonucleotide
cuccacaagcgc

SEQ ID NO: 99069 - RNA, 14 nt, Artificial Sequence
  Description of Artificial Sequence: Synthetic oligonucleotide
gagaagauuccaaa

SEQ ID NO: 99070 - RNA, 13 nt, Artificial Sequence
  Description of Artificial Sequence: Synthetic oligonucleotide
aaucuggauucaa

SEQ ID NO: 99071 - RNA, 13 nt, Artificial Sequence
  Description of Artificial Sequence: Synthetic oligonucleotide
agaacagauuuga

SEQ ID NO: 99072 - RNA, 11 nt, Artificial Sequence
  Description of Artificial Sequence: Synthetic oligonucleotide
ccagagcugug

SEQ ID NO: 99073 - RNA, 12 nt, Artificial Sequence
  Description of Artificial Sequence: Synthetic oligonucleotide
ccucagauuguu

SEQ ID NO: 99074 - RNA, 12 nt, Artificial Sequence
  Description of Artificial Sequence: Synthetic oligonucleotide
cuauuuuaauua

SEQ ID NO: 99075 - RNA, 13 nt, Artificial Sequence
  Description of Artificial Sequence: Synthetic oligonucleotide
uuuaauuuauuaa

SEQ ID NO: 99076 - RNA, 12 nt, Artificial Sequence
  Description of Artificial Sequence: Synthetic oligonucleotide
augcaguuugaa

SEQ ID NO: 99077 - RNA, 11 nt, Artificial Sequence
  Description of Artificial Sequence: Synthetic oligonucleotide
caugcugcugg

SEQ ID NO: 99078 - RNA, 13 nt, Artificial Sequence
  Description of Artificial Sequence: Synthetic oligonucleotide
agaugugcauuuc

SEQ ID NO: 99079 - RNA, 12 nt, Artificial Sequence
  Description of Artificial Sequence: Synthetic oligonucleotide
ucaaaaccugug

SEQ ID NO: 99080 - RNA, 11 nt, Artificial Sequence
  Description of Artificial Sequence: Synthetic oligonucleotide
gaaugugggua

SEQ ID NO: 99081 - RNA, 10 nt, Artificial Sequence
  Description of Artificial Sequence: Synthetic oligonucleotide
auguggguag

SEQ ID NO: 99082 - RNA, 13 nt, Artificial Sequence
  Description of Artificial Sequence: Synthetic oligonucleotide
ugaaaaugagcau

SEQ ID NO: 99083 - RNA, 13 nt, Artificial Sequence
  Description of Artificial Sequence: Synthetic oligonucleotide
uugcuuuucaugu

SEQ ID NO: 99084 - RNA, 12 nt, Artificial Sequence
  Description of Artificial Sequence: Synthetic oligonucleotide
uguauuucuaua

SEQ ID NO: 99085 - RNA, 13 nt, Artificial Sequence
  Description of Artificial Sequence: Synthetic oligonucleotide
uuugauuaauguu

SEQ ID NO: 99086 - RNA, 12 nt, Artificial Sequence
  Description of Artificial Sequence: Synthetic oligonucleotide
caacguguauag

SEQ ID NO: 99087 - RNA, 12 nt, Artificial Sequence
  Description of Artificial Sequence: Synthetic oligonucleotide
cauauccuuggc

SEQ ID NO: 99088 - RNA, 13 nt, Artificial Sequence
  Description of Artificial Sequence: Synthetic oligonucleotide
uacuaacaucugg

SEQ ID NO: 99089 - RNA, 11 nt, Artificial Sequence
  Description of Artificial Sequence: Synthetic oligonucleotide
cauaaguugug

SEQ ID NO: 99090 - RNA, 12 nt, Artificial Sequence
  Description of Artificial Sequence: Synthetic oligonucleotide
gcaucauuuugg

SEQ ID NO: 99091 - RNA, 10 nt, Artificial Sequence
  Description of Artificial Sequence: Synthetic oligonucleotide
gcucuucuua

SEQ ID NO: 99092 - RNA, 10 nt, Artificial Sequence
  Description of Artificial Sequence: Synthetic oligonucleotide
agauuagguc

SEQ ID NO: 99093 - RNA, 12 nt, Artificial Sequence
  Description of Artificial Sequence: Synthetic oligonucleotide
auggaauugaaa

SEQ ID NO: 99094 - RNA, 13 nt, Artificial Sequence
  Description of Artificial Sequence: Synthetic oligonucleotide
cacacucauuccu

SEQ ID NO: 99095 - RNA, 12 nt, Artificial Sequence
  Description of Artificial Sequence: Synthetic oligonucleotide
uguagagguaac

SEQ ID NO: 99096 - RNA, 11 nt, Artificial Sequence
  Description of Artificial Sequence: Synthetic oligonucleotide
caaccacaugc

SEQ ID NO: 99097 - RNA, 12 nt, Artificial Sequence
  Description of Artificial Sequence: Synthetic oligonucleotide
ucggaaacaagu

SEQ ID NO: 99098 - RNA, 11 nt, Artificial Sequence
  Description of Artificial Sequence: Synthetic oligonucleotide
acucccaauaa

SEQ ID NO: 99099 - RNA, 13 nt, Artificial Sequence
  Description of Artificial Sequence: Synthetic oligonucleotide
aaugcuaagaaau

SEQ ID NO: 99100 - RNA, 11 nt, Artificial Sequence
  Description of Artificial Sequence: Synthetic oligonucleotide
gucuuucucua

SEQ ID NO: 99101 - RNA, 11 nt, Artificial Sequence
  Description of Artificial Sequence: Synthetic oligonucleotide
ugaauuucagg

SEQ ID NO: 99102 - RNA, 13 nt, Artificial Sequence
  Description of Artificial Sequence: Synthetic oligonucleotide
cgauucccucuca

SEQ ID NO: 99103 - RNA, 11 nt, Artificial Sequence
  Description of Artificial Sequence: Synthetic oligonucleotide
aggaaagugaa

SEQ ID NO: 99104 - RNA, 12 nt, Artificial Sequence
  Description of Artificial Sequence: Synthetic oligonucleotide
gaggcugcaugc

SEQ ID NO: 99105 - RNA, 11 nt, Artificial Sequence
  Description of Artificial Sequence: Synthetic oligonucleotide
ucucugaacag

SEQ ID NO: 99106 - RNA, 12 nt, Artificial Sequence
  Description of Artificial Sequence: Synthetic oligonucleotide
aacuuggcugua

SEQ ID NO: 99107 - RNA, 12 nt, Artificial Sequence
  Description of Artificial Sequence: Synthetic oligonucleotide
agaagccaaaau

SEQ ID NO: 99108 - RNA, 14 nt, Artificial Sequence
  Description of Artificial Sequence: Synthetic oligonucleotide
auuaaaagaagucc

SEQ ID NO: 99109 - RNA, 14 nt, Artificial Sequence
  Description of Artificial Sequence: Synthetic oligonucleotide
gaauccggauuauc

SEQ ID NO: 99110 - RNA, 12 nt, Artificial Sequence
  Description of Artificial Sequence: Synthetic oligonucleotide
aaugugacauca

SEQ ID NO: 99111 - RNA, 13 nt, Artificial Sequence
  Description of Artificial Sequence: Synthetic oligonucleotide
caucaaagcaagu

SEQ ID NO: 99112 - RNA, 11 nt, Artificial Sequence
  Description of Artificial Sequence: Synthetic oligonucleotide
agagagagaaa

SEQ ID NO: 99113 - RNA, 13 nt, Artificial Sequence
  Description of Artificial Sequence: Synthetic oligonucleotide
ucgcuguaguauu

SEQ ID NO: 99114 - RNA, 14 nt, Artificial Sequence
  Description of Artificial Sequence: Synthetic oligonucleotide
cgcuguaguauuua

SEQ ID NO: 99115 - RNA, 13 nt, Artificial Sequence
  Description of Artificial Sequence: Synthetic oligonucleotide
auuuaagcccaua

SEQ ID NO: 99116 - RNA, 15 nt, Artificial Sequence
  Description of Artificial Sequence: Synthetic oligonucleotide
auuaaaauaaacaug

SEQ ID NO: 99117 - RNA, 12 nt, Artificial Sequence
  Description of Artificial Sequence: Synthetic oligonucleotide
cuguucugaucg

SEQ ID NO: 99118 - RNA, 16 nt, Artificial Sequence
  Description of Artificial Sequence: Synthetic oligonucleotide
aaauaauuugaacuuu

SEQ ID NO: 99119 - RNA, 12 nt, Artificial Sequence
  Description of Artificial Sequence: Synthetic oligonucleotide
ugcgaccuuaau

SEQ ID NO: 99120 - RNA, 11 nt, Artificial Sequence
  Description of Artificial Sequence: Synthetic oligonucleotide
cugagaaagcu

SEQ ID NO: 99121 - RNA, 13 nt, Artificial Sequence
  Description of Artificial Sequence: Synthetic oligonucleotide
aguaaagaugcua

SEQ ID NO: 99122 - RNA, 12 nt, Artificial Sequence
  Description of Artificial Sequence: Synthetic oligonucleotide
cugcuuaauugc

SEQ ID NO: 99123 - RNA, 14 nt, Artificial Sequence
  Description of Artificial Sequence: Synthetic oligonucleotide
uaccauaugaauga

SEQ ID NO: 99124 - RNA, 12 nt, Artificial Sequence
  Description of Artificial Sequence: Synthetic oligonucleotide
aacuuucuuauc

SEQ ID NO: 99125 - RNA, 13 nt, Artificial Sequence
  Description of Artificial Sequence: Synthetic oligonucleotide
ccuugcaugacau

SEQ ID NO: 99126 - RNA, 14 nt, Artificial Sequence
  Description of Artificial Sequence: Synthetic oligonucleotide
ugaauuuguauaug

SEQ ID NO: 99127 - RNA, 12 nt, Artificial Sequence
  Description of Artificial Sequence: Synthetic oligonucleotide
gaauccuaguag

SEQ ID NO: 99128 - RNA, 10 nt, Artificial Sequence
  Description of Artificial Sequence: Synthetic oligonucleotide
gaaagggaag

SEQ ID NO: 99129 - RNA, 11 nt, Artificial Sequence
  Description of Artificial Sequence: Synthetic oligonucleotide
uaucggcaugc

SEQ ID NO: 99130 - RNA, 12 nt, Artificial Sequence
  Description of Artificial Sequence: Synthetic oligonucleotide
caccucauagua

SEQ ID NO: 99131 - RNA, 11 nt, Artificial Sequence
  Description of Artificial Sequence: Synthetic oligonucleotide
ccagaauugcc

SEQ ID NO: 99132 - RNA, 11 nt, Artificial Sequence
  Description of Artificial Sequence: Synthetic oligonucleotide
uggugaucugg

SEQ ID NO: 99133 - RNA, 12 nt, Artificial Sequence
  Description of Artificial Sequence: Synthetic oligonucleotide
gaucuggguaau

SEQ ID NO: 99134 - RNA, 12 nt, Artificial Sequence
  Description of Artificial Sequence: Synthetic oligonucleotide
ggaugugaugaa

SEQ ID NO: 99135 - RNA, 12 nt, Artificial Sequence
  Description of Artificial Sequence: Synthetic oligonucleotide
cauuuccacagc

SEQ ID NO: 99136 - RNA, 11 nt, Artificial Sequence
  Description of Artificial Sequence: Synthetic oligonucleotide
acagcuacacc

SEQ ID NO: 99137 - RNA, 12 nt, Artificial Sequence
  Description of Artificial Sequence: Synthetic oligonucleotide
ugcaguucuuac

SEQ ID NO: 99138 - RNA, 12 nt, Artificial Sequence
  Description of Artificial Sequence: Synthetic oligonucleotide
acgagaagaaga

SEQ ID NO: 99139 - RNA, 12 nt, Artificial Sequence
  Description of Artificial Sequence: Synthetic oligonucleotide
cgagaagaagau

SEQ ID NO: 99140 - RNA, 15 nt, Artificial Sequence
  Description of Artificial Sequence: Synthetic oligonucleotide
aagaagaucauuuac

SEQ ID NO: 99141 - RNA, 11 nt, Artificial Sequence
  Description of Artificial Sequence: Synthetic oligonucleotide
agaggaagagg

SEQ ID NO: 99142 - RNA, 12 nt, Artificial Sequence
  Description of Artificial Sequence: Synthetic oligonucleotide
gaggaagaggug

SEQ ID NO: 99143 - RNA, 13 nt, Artificial Sequence
  Description of Artificial Sequence: Synthetic oligonucleotide
cuacuuugagggc

SEQ ID NO: 99144 - RNA, 12 nt, Artificial Sequence
  Description of Artificial Sequence: Synthetic oligonucleotide
agggcaucuccu

SEQ ID NO: 99145 - RNA, 10 nt, Artificial Sequence
  Description of Artificial Sequence: Synthetic oligonucleotide
ggagugauau

SEQ ID NO: 99146 - RNA, 11 nt, Artificial Sequence
  Description of Artificial Sequence: Synthetic oligonucleotide
gagugauaugg

SEQ ID NO: 99147 - RNA, 12 nt, Artificial Sequence
  Description of Artificial Sequence: Synthetic oligonucleotide
ugcaguaaagau

SEQ ID NO: 99148 - RNA, 13 nt, Artificial Sequence
  Description of Artificial Sequence: Synthetic oligonucleotide
aguaaagauccua

SEQ ID NO: 99149 - RNA, 12 nt, Artificial Sequence
  Description of Artificial Sequence: Synthetic oligonucleotide
ugacaaaggaca

SEQ ID NO: 99150 - RNA, 13 nt, Artificial Sequence
  Description of Artificial Sequence: Synthetic oligonucleotide
gcaauugugaccc

SEQ ID NO: 99151 - RNA, 12 nt, Artificial Sequence
  Description of Artificial Sequence: Synthetic oligonucleotide
aacaucauccau

SEQ ID NO: 99152 - RNA, 12 nt, Artificial Sequence
  Description of Artificial Sequence: Synthetic oligonucleotide
ugaaauccaaca

SEQ ID NO: 99153 - RNA, 15 nt, Artificial Sequence
  Description of Artificial Sequence: Synthetic oligonucleotide
aacaauauauuucuc

SEQ ID NO: 99154 - RNA, 14 nt, Artificial Sequence
  Description of Artificial Sequence: Synthetic oligonucleotide
aacaguaaagucac

SEQ ID NO: 99155 - RNA, 14 nt, Artificial Sequence
  Description of Artificial Sequence: Synthetic oligonucleotide
ugugaagaaaguaa

SEQ ID NO: 99156 - RNA, 13 nt, Artificial Sequence
  Description of Artificial Sequence: Synthetic oligonucleotide
cuuccgagccauc

SEQ ID NO: 99157 - RNA, 12 nt, Artificial Sequence
  Description of Artificial Sequence: Synthetic oligonucleotide
aauggagguuga

SEQ ID NO: 99158 - RNA, 12 nt, Artificial Sequence
  Description of Artificial Sequence: Synthetic oligonucleotide
ggagguugaaua

SEQ ID NO: 99159 - RNA, 13 nt, Artificial Sequence
  Description of Artificial Sequence: Synthetic oligonucleotide
auuuugaguuuuc

SEQ ID NO: 99160 - RNA, 12 nt, Artificial Sequence
  Description of Artificial Sequence: Synthetic oligonucleotide
uauccuguuugu

SEQ ID NO: 99161 - RNA, 11 nt, Artificial Sequence
  Description of Artificial Sequence: Synthetic oligonucleotide
ccuguuuguuc

SEQ ID NO: 99162 - RNA, 10 nt, Artificial Sequence
  Description of Artificial Sequence: Synthetic oligonucleotide
cucuacagcc

SEQ ID NO: 99163 - RNA, 12 nt, Artificial Sequence
  Description of Artificial Sequence: Synthetic oligonucleotide
ucuuccauagcu

SEQ ID NO: 99164 - RNA, 12 nt, Artificial Sequence
  Description of Artificial Sequence: Synthetic oligonucleotide
auaaucuuccug

SEQ ID NO: 99165 - RNA, 12 nt, Artificial Sequence
  Description of Artificial Sequence: Synthetic oligonucleotide
uaaucuuccugu

SEQ ID NO: 99166 - RNA, 12 nt, Artificial Sequence
  Description of Artificial Sequence: Synthetic oligonucleotide
cuucaugacuug

SEQ ID NO: 99167 - RNA, 12 nt, Artificial Sequence
  Description of Artificial Sequence: Synthetic oligonucleotide
aagagggagaga

SEQ ID NO: 99168 - RNA, 12 nt, Artificial Sequence
  Description of Artificial Sequence: Synthetic oligonucleotide
cgucuccuacca

SEQ ID NO: 99169 - RNA, 12 nt, Artificial Sequence
  Description of Artificial Sequence: Synthetic oligonucleotide
gaucaaucggcc

SEQ ID NO: 99170 - RNA, 12 nt, Artificial Sequence
  Description of Artificial Sequence: Synthetic oligonucleotide
ggacgaacaucc

SEQ ID NO: 99171 - RNA, 11 nt, Artificial Sequence
  Description of Artificial Sequence: Synthetic oligonucleotide
agggucggaac

SEQ ID NO: 99172 - RNA, 10 nt, Artificial Sequence
  Description of Artificial Sequence: Synthetic oligonucleotide
ucggaaccca

SEQ ID NO: 99173 - RNA, 11 nt, Artificial Sequence
  Description of Artificial Sequence: Synthetic oligonucleotide
acccaagcuua

SEQ ID NO: 99174 - RNA, 14 nt, Artificial Sequence
  Description of Artificial Sequence: Synthetic oligonucleotide
gaacuuuaagcaac

SEQ ID NO: 99175 - RNA, 11 nt, Artificial Sequence
  Description of Artificial Sequence: Synthetic oligonucleotide
acuauucagug

SEQ ID NO: 99176 - RNA, 11 nt, Artificial Sequence
  Description of Artificial Sequence: Synthetic oligonucleotide
cuauucagugg

SEQ ID NO: 99177 - RNA, 13 nt, Artificial Sequence
  Description of Artificial Sequence: Synthetic oligonucleotide
aaacacagauaac

SEQ ID NO: 99178 - RNA, 12 nt, Artificial Sequence
  Description of Artificial Sequence: Synthetic oligonucleotide
cuuaagaaaaga

SEQ ID NO: 99179 - RNA, 12 nt, Artificial Sequence
  Description of Artificial Sequence: Synthetic oligonucleotide
cugaaggagugu

SEQ ID NO: 99180 - RNA, 10 nt, Artificial Sequence
  Description of Artificial Sequence: Synthetic oligonucleotide
ucaccgcggg

SEQ ID NO: 99181 - RNA, 14 nt, Artificial Sequence
  Description of Artificial Sequence: Synthetic oligonucleotide
agcagaaauaagcg

SEQ ID NO: 99182 - RNA, 12 nt, Artificial Sequence
  Description of Artificial Sequence: Synthetic oligonucleotide
aagcgugccguu

SEQ ID NO: 99183 - RNA, 12 nt, Artificial Sequence
  Description of Artificial Sequence: Synthetic oligonucleotide
agaaacagucac

SEQ ID NO: 99184 - RNA, 12 nt, Artificial Sequence
  Description of Artificial Sequence: Synthetic oligonucleotide
agaggaagaagg

SEQ ID NO: 99185 - RNA, 14 nt, Artificial Sequence
  Description of Artificial Sequence: Synthetic oligonucleotide
uguauucaaaauau

SEQ ID NO: 99186 - RNA, 13 nt, Artificial Sequence
  Description of Artificial Sequence: Synthetic oligonucleotide
auuuuccucccuu

SEQ ID NO: 99187 - RNA, 13 nt, Artificial Sequence
  Description of Artificial Sequence: Synthetic oligonucleotide
caaagaaagauag

SEQ ID NO: 99188 - RNA, 12 nt, Artificial Sequence
  Description of Artificial Sequence: Synthetic oligonucleotide
aagaaagauaga

SEQ ID NO: 99189 - RNA, 13 nt, Artificial Sequence
  Description of Artificial Sequence: Synthetic oligonucleotide
gaaagcauuuguu

SEQ ID NO: 99190 - RNA, 13 nt, Artificial Sequence
  Description of Artificial Sequence: Synthetic oligonucleotide
ugaguuaaacgaa

SEQ ID NO: 99191 - RNA, 12 nt, Artificial Sequence
  Description of Artificial Sequence: Synthetic oligonucleotide
acugauacagaa

SEQ ID NO: 99192 - RNA, 12 nt, Artificial Sequence
  Description of Artificial Sequence: Synthetic oligonucleotide
auauuauauaua

SEQ ID NO: 99193 - RNA, 12 nt, Artificial Sequence
  Description of Artificial Sequence: Synthetic oligonucleotide
auuauauauaua

SEQ ID NO: 99194 - RNA, 12 nt, Artificial Sequence
  Description of Artificial Sequence: Synthetic oligonucleotide
ucacuggaugua

SEQ ID NO: 99195 - RNA, 12 nt, Artificial Sequence
  Description of Artificial Sequence: Synthetic oligonucleotide
cagggaagagga

SEQ ID NO: 99196 - RNA, 15 nt, Artificial Sequence
  Description of Artificial Sequence: Synthetic oligonucleotide
augaucuuuuuuuug

SEQ ID NO: 99197 - RNA, 11 nt, Artificial Sequence
  Description of Artificial Sequence: Synthetic oligonucleotide
aguucacggcc

SEQ ID NO: 99198 - RNA, 13 nt, Artificial Sequence
  Description of Artificial Sequence: Synthetic oligonucleotide
caccaucacacca

SEQ ID NO: 99199 - RNA, 11 nt, Artificial Sequence
  Description of Artificial Sequence: Synthetic oligonucleotide
ccugcggguuu

SEQ ID NO: 99200 - RNA, 10 nt, Artificial Sequence
  Description of Artificial Sequence: Synthetic oligonucleotide
auccaguuug

SEQ ID NO: 99201 - RNA, 13 nt, Artificial Sequence
  Description of Artificial Sequence: Synthetic oligonucleotide
guuaaggacuucu

SEQ ID NO: 99202 - RNA, 13 nt, Artificial Sequence
  Description of Artificial Sequence: Synthetic oligonucleotide
cagugggacagag

SEQ ID NO: 99203 - RNA, 14 nt, Artificial Sequence
  Description of Artificial Sequence: Synthetic oligonucleotide
aauuuguuauugug

SEQ ID NO: 99204 - RNA, 13 nt, Artificial Sequence
  Description of Artificial Sequence: Synthetic oligonucleotide
uucaaaugcauuu

SEQ ID NO: 99205 - RNA, 10 nt, Artificial Sequence
  Description of Artificial Sequence: Synthetic oligonucleotide
caggaaagcc

SEQ ID NO: 99206 - RNA, 11 nt, Artificial Sequence
  Description of Artificial Sequence: Synthetic oligonucleotide
aggaaagcccu

SEQ ID NO: 99207 - RNA, 12 nt, Artificial Sequence
  Description of Artificial Sequence: Synthetic oligonucleotide
cccagcauggcc

SEQ ID NO: 99208 - RNA, 11 nt, Artificial Sequence
  Description of Artificial Sequence: Synthetic oligonucleotide
cuucucccuga

SEQ ID NO: 99209 - RNA, 12 nt, Artificial Sequence
  Description of Artificial Sequence: Synthetic oligonucleotide
gaagaagcccuu

SEQ ID NO: 99210 - RNA, 12 nt, Artificial Sequence
  Description of Artificial Sequence: Synthetic oligonucleotide
agaagcccuuca

SEQ ID NO: 99211 - RNA, 11 nt, Artificial Sequence
  Description of Artificial Sequence: Synthetic oligonucleotide
gcccuucagcg

SEQ ID NO: 99212 - RNA, 11 nt, Artificial Sequence
  Description of Artificial Sequence: Synthetic oligonucleotide
ccuucagcggc

SEQ ID NO: 99213 - RNA, 12 nt, Artificial Sequence
  Description of Artificial Sequence: Synthetic oligonucleotide
ucagcggccagu

SEQ ID NO: 99214 - RNA, 12 nt, Artificial Sequence
  Description of Artificial Sequence: Synthetic oligonucleotide
ugaaaagcuccg

SEQ ID NO: 99215 - RNA, 11 nt, Artificial Sequence
  Description of Artificial Sequence: Synthetic oligonucleotide
aaaagcuccgg

SEQ ID NO: 99216 - RNA, 13 nt, Artificial Sequence
  Description of Artificial Sequence: Synthetic oligonucleotide
agucaacagucug

SEQ ID NO: 99217 - RNA, 13 nt, Artificial Sequence
  Description of Artificial Sequence: Synthetic oligonucleotide
cagaguucaaaag

SEQ ID NO: 99218 - RNA, 13 nt, Artificial Sequence
  Description of Artificial Sequence: Synthetic oligonucleotide
agaguucaaaagc

SEQ ID NO: 99219 - RNA, 12 nt, Artificial Sequence
  Description of Artificial Sequence: Synthetic oligonucleotide
uucaaaagcccu

SEQ ID NO: 99220 - RNA, 12 nt, Artificial Sequence
  Description of Artificial Sequence: Synthetic oligonucleotide
ucaaaagcccuu

SEQ ID NO: 99221 - RNA, 12 nt, Artificial Sequence
  Description of Artificial Sequence: Synthetic oligonucleotide
aaaagcccuuca

SEQ ID NO: 99222 - RNA, 12 nt, Artificial Sequence
  Description of Artificial Sequence: Synthetic oligonucleotide
aaagcccuucag

SEQ ID NO: 99223 - RNA, 13 nt, Artificial Sequence
  Description of Artificial Sequence: Synthetic oligonucleotide
gugaagccgcucg

SEQ ID NO: 99224 - RNA, 12 nt, Artificial Sequence
  Description of Artificial Sequence: Synthetic oligonucleotide
cacgccagucaa

SEQ ID NO: 99225 - RNA, 13 nt, Artificial Sequence
  Description of Artificial Sequence: Synthetic oligonucleotide
uucuuggugcgug

SEQ ID NO: 99226 - RNA, 14 nt, Artificial Sequence
  Description of Artificial Sequence: Synthetic oligonucleotide
auuggauucaucag

SEQ ID NO: 99227 - RNA, 13 nt, Artificial Sequence
  Description of Artificial Sequence: Synthetic oligonucleotide
uggaauaccuaag

SEQ ID NO: 99228 - RNA, 12 nt, Artificial Sequence
  Description of Artificial Sequence: Synthetic oligonucleotide
auuugaggcuca

SEQ ID NO: 99229 - RNA, 11 nt, Artificial Sequence
  Description of Artificial Sequence: Synthetic oligonucleotide
ucuacaauugg

SEQ ID NO: 99230 - RNA, 12 nt, Artificial Sequence
  Description of Artificial Sequence: Synthetic oligonucleotide
uaguuaggagcc

SEQ ID NO: 99231 - RNA, 13 nt, Artificial Sequence
  Description of Artificial Sequence: Synthetic oligonucleotide
agucaauauccac

SEQ ID NO: 99232 - RNA, 13 nt, Artificial Sequence
  Description of Artificial Sequence: Synthetic oligonucleotide
auguucagucaca

SEQ ID NO: 99233 - RNA, 12 nt, Artificial Sequence
  Description of Artificial Sequence: Synthetic oligonucleotide
acacacacauac

SEQ ID NO: 99234 - RNA, 12 nt, Artificial Sequence
  Description of Artificial Sequence: Synthetic oligonucleotide
uuccuuuugcuu

SEQ ID NO: 99235 - RNA, 16 nt, Artificial Sequence
  Description of Artificial Sequence: Synthetic oligonucleotide
uuuuaaaguaauuuuu

SEQ ID NO: 99236 - RNA, 13 nt, Artificial Sequence
  Description of Artificial Sequence: Synthetic oligonucleotide
caacagucaaugg

SEQ ID NO: 99237 - RNA, 13 nt, Artificial Sequence
  Description of Artificial Sequence: Synthetic oligonucleotide
ucgacaaaccaau

SEQ ID NO: 99238 - RNA, 12 nt, Artificial Sequence
  Description of Artificial Sequence: Synthetic oligonucleotide
acugcuaccacu

SEQ ID NO: 99239 - RNA, 13 nt, Artificial Sequence
  Description of Artificial Sequence: Synthetic oligonucleotide
gcaagcggucuua

SEQ ID NO: 99240 - RNA, 13 nt, Artificial Sequence
  Description of Artificial Sequence: Synthetic oligonucleotide
ggucuuaccggcu

SEQ ID NO: 99241 - RNA, 11 nt, Artificial Sequence
  Description of Artificial Sequence: Synthetic oligonucleotide
gauggguuacc

SEQ ID NO: 99242 - RNA, 11 nt, Artificial Sequence
  Description of Artificial Sequence: Synthetic oligonucleotide
guuaccugcga

SEQ ID NO: 99243 - RNA, 12 nt, Artificial Sequence
  Description of Artificial Sequence: Synthetic oligonucleotide
aaucuugcugag

SEQ ID NO: 99244 - RNA, 13 nt, Artificial Sequence
  Description of Artificial Sequence: Synthetic oligonucleotide
agcauaaaacagu

SEQ ID NO: 99245 - RNA, 12 nt, Artificial Sequence
  Description of Artificial Sequence: Synthetic oligonucleotide
guccuuuauccu

SEQ ID NO: 99246 - RNA, 12 nt, Artificial Sequence
  Description of Artificial Sequence: Synthetic oligonucleotide
caacgcaaguug

SEQ ID NO: 99247 - RNA, 13 nt, Artificial Sequence
  Description of Artificial Sequence: Synthetic oligonucleotide
aaacugaaaccau

SEQ ID NO: 99248 - RNA, 14 nt, Artificial Sequence
  Description of Artificial Sequence: Synthetic oligonucleotide
acuuuguuaaauau

SEQ ID NO: 99249 - RNA, 14 nt, Artificial Sequence
  Description of Artificial Sequence: Synthetic oligonucleotide
guauauuaaaaguu

SEQ ID NO: 99250 - RNA, 13 nt, Artificial Sequence
  Description of Artificial Sequence: Synthetic oligonucleotide
guuuugacuuaac

SEQ ID NO: 99251 - RNA, 13 nt, Artificial Sequence
  Description of Artificial Sequence: Synthetic oligonucleotide
gcaaacucagcac

SEQ ID NO: 99252 - RNA, 11 nt, Artificial Sequence
  Description of Artificial Sequence: Synthetic oligonucleotide
ugcugaccuca

SEQ ID NO: 99253 - RNA, 14 nt, Artificial Sequence
  Description of Artificial Sequence: Synthetic oligonucleotide
uuuauucagaucgc

SEQ ID NO: 99254 - RNA, 13 nt, Artificial Sequence
  Description of Artificial Sequence: Synthetic oligonucleotide
aggguucugggau

SEQ ID NO: 99255 - RNA, 15 nt, Artificial Sequence
  Description of Artificial Sequence: Synthetic oligonucleotide
auauuggaaauuaug

SEQ ID NO: 99256 - RNA, 13 nt, Artificial Sequence
  Description of Artificial Sequence: Synthetic oligonucleotide
auggaagcacuag

SEQ ID NO: 99257 - RNA, 13 nt, Artificial Sequence
  Description of Artificial Sequence: Synthetic oligonucleotide
guuuuuaugugga

SEQ ID NO: 99258 - RNA, 12 nt, Artificial Sequence
  Description of Artificial Sequence: Synthetic oligonucleotide
ggaauugguaga

SEQ ID NO: 99259 - RNA, 13 nt, Artificial Sequence
  Description of Artificial Sequence: Synthetic oligonucleotide
uuagacuuggaga

SEQ ID NO: 99260 - RNA, 13 nt, Artificial Sequence
  Description of Artificial Sequence: Synthetic oligonucleotide
uuacaguauucca

SEQ ID NO: 99261 - RNA, 15 nt, Artificial Sequence
  Description of Artificial Sequence: Synthetic oligonucleotide
ccacugaugaauuaa

SEQ ID NO: 99262 - RNA, 12 nt, Artificial Sequence
  Description of Artificial Sequence: Synthetic oligonucleotide
ccacaucaucac

SEQ ID NO: 99263 - RNA, 13 nt, Artificial Sequence
  Description of Artificial Sequence: Synthetic oligonucleotide
cucaccaaacaga

SEQ ID NO: 99264 - RNA, 12 nt, Artificial Sequence
  Description of Artificial Sequence: Synthetic oligonucleotide
ggaacaugaugg

SEQ ID NO: 99265 - RNA, 12 nt, Artificial Sequence
  Description of Artificial Sequence: Synthetic oligonucleotide
cauguagacugc

SEQ ID NO: 99266 - RNA, 13 nt, Artificial Sequence
  Description of Artificial Sequence: Synthetic oligonucleotide
ggaucuauuuaug

SEQ ID NO: 99267 - RNA, 12 nt, Artificial Sequence
  Description of Artificial Sequence: Synthetic oligonucleotide
gcacuauuauca

SEQ ID NO: 99268 - RNA, 11 nt, Artificial Sequence
  Description of Artificial Sequence: Synthetic oligonucleotide
aucaguucugc

SEQ ID NO: 99269 - RNA, 13 nt, Artificial Sequence
  Description of Artificial Sequence: Synthetic oligonucleotide
agauuaaaccuac

SEQ ID NO: 99270 - RNA, 13 nt, Artificial Sequence
  Description of Artificial Sequence: Synthetic oligonucleotide
auaaaauccuucu

SEQ ID NO: 99271 - RNA, 12 nt, Artificial Sequence
  Description of Artificial Sequence: Synthetic oligonucleotide
aaugcuguagac

SEQ ID NO: 99272 - RNA, 13 nt, Artificial Sequence
  Description of Artificial Sequence: Synthetic oligonucleotide
uugauaggaauag

SEQ ID NO: 99273 - RNA, 11 nt, Artificial Sequence
  Description of Artificial Sequence: Synthetic oligonucleotide
aauggcccuga

SEQ ID NO: 99274 - RNA, 11 nt, Artificial Sequence
  Description of Artificial Sequence: Synthetic oligonucleotide
uuccucaagca

SEQ ID NO: 99275 - RNA, 10 nt, Artificial Sequence
  Description of Artificial Sequence: Synthetic oligonucleotide
guucagccca

SEQ ID NO: 99276 - RNA, 11 nt, Artificial Sequence
  Description of Artificial Sequence: Synthetic oligonucleotide
gcugcugaacc

SEQ ID NO: 99277 - RNA, 12 nt, Artificial Sequence
  Description of Artificial Sequence: Synthetic oligonucleotide
aaguucucuuca

SEQ ID NO: 99278 - RNA, 11 nt, Artificial Sequence
  Description of Artificial Sequence: Synthetic oligonucleotide
ccagccuagag

SEQ ID NO: 99279 - RNA, 13 nt, Artificial Sequence
  Description of Artificial Sequence: Synthetic oligonucleotide
cucugugaagugu

SEQ ID NO: 99280 - RNA, 14 nt, Artificial Sequence
  Description of Artificial Sequence: Synthetic oligonucleotide
ugagaaaauuucaa

SEQ ID NO: 99281 - RNA, 11 nt, Artificial Sequence
  Description of Artificial Sequence: Synthetic oligonucleotide
aauccuccuga

SEQ ID NO: 99282 - RNA, 12 nt, Artificial Sequence
  Description of Artificial Sequence: Synthetic oligonucleotide
gugacaucauau

SEQ ID NO: 99283 - RNA, 13 nt, Artificial Sequence
  Description of Artificial Sequence: Synthetic oligonucleotide
aaucuucaucaua

SEQ ID NO: 99284 - RNA, 13 nt, Artificial Sequence
  Description of Artificial Sequence: Synthetic oligonucleotide
gacuagcuauuaa

SEQ ID NO: 99285 - RNA, 14 nt, Artificial Sequence
  Description of Artificial Sequence: Synthetic oligonucleotide
ucucuacuaaaaau

SEQ ID NO: 99286 - RNA, 12 nt, Artificial Sequence
  Description of Artificial Sequence: Synthetic oligonucleotide
ucuaucucgccu

SEQ ID NO: 99287 - RNA, 13 nt, Artificial Sequence
  Description of Artificial Sequence: Synthetic oligonucleotide
cuucgguccaguu

SEQ ID NO: 99288 - RNA, 11 nt, Artificial Sequence
  Description of Artificial Sequence: Synthetic oligonucleotide
gauguagccgc

SEQ ID NO: 99289 - RNA, 12 nt, Artificial Sequence
  Description of Artificial Sequence: Synthetic oligonucleotide
ugaggagacuug

SEQ ID NO: 99290 - RNA, 12 nt, Artificial Sequence
  Description of Artificial Sequence: Synthetic oligonucleotide
gaguagugagga

SEQ ID NO: 99291 - RNA, 14 nt, Artificial Sequence
  Description of Artificial Sequence: Synthetic oligonucleotide
cagaugaguacaaa

SEQ ID NO: 99292 - RNA, 13 nt, Artificial Sequence
  Description of Artificial Sequence: Synthetic oligonucleotide
guuguuaaugggc

SEQ ID NO: 99293 - RNA, 13 nt, Artificial Sequence
  Description of Artificial Sequence: Synthetic oligonucleotide
uuuuuaauuuauu

SEQ ID NO: 99294 - RNA, 12 nt, Artificial Sequence
  Description of Artificial Sequence: Synthetic oligonucleotide
uauuuaaauaug

SEQ ID NO: 99295 - RNA, 13 nt, Artificial Sequence
  Description of Artificial Sequence: Synthetic oligonucleotide
uauccuuuguuuc

SEQ ID NO: 99296 - RNA, 14 nt, Artificial Sequence
  Description of Artificial Sequence: Synthetic oligonucleotide
cgucuaaguguuug

SEQ ID NO: 99297 - RNA, 12 nt, Artificial Sequence
  Description of Artificial Sequence: Synthetic oligonucleotide
accugugacaaa

SEQ ID NO: 99298 - RNA, 13 nt, Artificial Sequence
  Description of Artificial Sequence: Synthetic oligonucleotide
ccaggcugaauua

SEQ ID NO: 99299 - RNA, 14 nt, Artificial Sequence
  Description of Artificial Sequence: Synthetic oligonucleotide
gucauucuuacaau

SEQ ID NO: 99300 - RNA, 15 nt, Artificial Sequence
  Description of Artificial Sequence: Synthetic oligonucleotide
ucauucuuacaauug

SEQ ID NO: 99301 - RNA, 12 nt, Artificial Sequence
  Description of Artificial Sequence: Synthetic oligonucleotide
cagagaguguac

SEQ ID NO: 99302 - RNA, 12 nt, Artificial Sequence
  Description of Artificial Sequence: Synthetic oligonucleotide
agaacucagcag

SEQ ID NO: 99303 - RNA, 13 nt, Artificial Sequence
  Description of Artificial Sequence: Synthetic oligonucleotide
uuuauuuucagua

SEQ ID NO: 99304 - RNA, 12 nt, Artificial Sequence
  Description of Artificial Sequence: Synthetic oligonucleotide
ucuuaaauggaa

SEQ ID NO: 99305 - RNA, 13 nt, Artificial Sequence
  Description of Artificial Sequence: Synthetic oligonucleotide
ugccuaaaauugu

SEQ ID NO: 99306 - RNA, 12 nt, Artificial Sequence
  Description of Artificial Sequence: Synthetic oligonucleotide
agacugugagcu

SEQ ID NO: 99307 - RNA, 14 nt, Artificial Sequence
  Description of Artificial Sequence: Synthetic oligonucleotide
ugcuuuuuauuaau

SEQ ID NO: 99308 - RNA, 13 nt, Artificial Sequence
  Description of Artificial Sequence: Synthetic oligonucleotide
cucuucuuacauu

SEQ ID NO: 99309 - RNA, 15 nt, Artificial Sequence
  Description of Artificial Sequence: Synthetic oligonucleotide
cauuuguaaaaaugu

SEQ ID NO: 99310 - RNA, 15 nt, Artificial Sequence
  Description of Artificial Sequence: Synthetic oligonucleotide
aucuuaauucauauu

SEQ ID NO: 99311 - RNA, 13 nt, Artificial Sequence
  Description of Artificial Sequence: Synthetic oligonucleotide
gaacuaaucauga

SEQ ID NO: 99312 - RNA, 12 nt, Artificial Sequence
  Description of Artificial Sequence: Synthetic oligonucleotide
ucugcucuuggg

SEQ ID NO: 99313 - RNA, 13 nt, Artificial Sequence
  Description of Artificial Sequence: Synthetic oligonucleotide
caguagcuuugag

SEQ ID NO: 99314 - RNA, 14 nt, Artificial Sequence
  Description of Artificial Sequence: Synthetic oligonucleotide
cacguaauauuuca

SEQ ID NO: 99315 - RNA, 13 nt, Artificial Sequence
  Description of Artificial Sequence: Synthetic oligonucleotide
uauucucuucacu

SEQ ID NO: 99316 - RNA, 14 nt, Artificial Sequence
  Description of Artificial Sequence: Synthetic oligonucleotide
cuaaugcuaagaaa

SEQ ID NO: 99317 - RNA, 12 nt, Artificial Sequence
  Description of Artificial Sequence: Synthetic oligonucleotide
gcugaaaaucaa

SEQ ID NO: 99318 - RNA, 14 nt, Artificial Sequence
  Description of Artificial Sequence: Synthetic oligonucleotide
aauaugauuacuuu

SEQ ID NO: 99319 - RNA, 14 nt, Artificial Sequence
  Description of Artificial Sequence: Synthetic oligonucleotide
cauuuuguucuaca

SEQ ID NO: 99320 - RNA, 12 nt, Artificial Sequence
  Description of Artificial Sequence: Synthetic oligonucleotide
cccgggacucuc

SEQ ID NO: 99321 - RNA, 14 nt, Artificial Sequence
  Description of Artificial Sequence: Synthetic oligonucleotide
ccuuuaaaguaaag

SEQ ID NO: 99322 - RNA, 13 nt, Artificial Sequence
  Description of Artificial Sequence: Synthetic oligonucleotide
ucuggaagccugg

SEQ ID NO: 99323 - RNA, 14 nt, Artificial Sequence
  Description of Artificial Sequence: Synthetic oligonucleotide
aaaacaaaagagag

SEQ ID NO: 99324 - RNA, 13 nt, Artificial Sequence
  Description of Artificial Sequence: Synthetic oligonucleotide
aucaguuaugccg

SEQ ID NO: 99325 - RNA, 13 nt, Artificial Sequence
  Description of Artificial Sequence: Synthetic oligonucleotide
uaaaagaagucca

SEQ ID NO: 99326 - RNA, 11 nt, Artificial Sequence
  Description of Artificial Sequence: Synthetic oligonucleotide
aggugagguua

SEQ ID NO: 99327 - RNA, 11 nt, Artificial Sequence
  Description of Artificial Sequence: Synthetic oligonucleotide
gggaagaggac

SEQ ID NO: 99328 - RNA, 13 nt, Artificial Sequence
  Description of Artificial Sequence: Synthetic oligonucleotide
aagcaaguauugu

SEQ ID NO: 99329 - RNA, 12 nt, Artificial Sequence
  Description of Artificial Sequence: Synthetic oligonucleotide
auuguagcacuc

SEQ ID NO: 99330 - RNA, 14 nt, Artificial Sequence
  Description of Artificial Sequence: Synthetic oligonucleotide
acaaaaccacaaau

SEQ ID NO: 99331 - RNA, 12 nt, Artificial Sequence
  Description of Artificial Sequence: Synthetic oligonucleotide
uaagcccauaca

SEQ ID NO: 99332 - RNA, 11 nt, Artificial Sequence
  Description of Artificial Sequence: Synthetic oligonucleotide
agcccauacag

SEQ ID NO: 99333 - RNA, 12 nt, Artificial Sequence
  Description of Artificial Sequence: Synthetic oligonucleotide
cagaaaccuucc

SEQ ID NO: 99334 - RNA, 10 nt, Artificial Sequence
  Description of Artificial Sequence: Synthetic oligonucleotide
guauaccuac

SEQ ID NO: 99335 - RNA, 13 nt, Artificial Sequence
  Description of Artificial Sequence: Synthetic oligonucleotide
gccaguuuucgga

SEQ ID NO: 99336 - RNA, 9 nt, Artificial Sequence
  Description of Artificial Sequence: Synthetic oligonucleotide
ggaacaggg

SEQ ID NO: 99337 - RNA, 13 nt, Artificial Sequence
  Description of Artificial Sequence: Synthetic oligonucleotide
uuaacuuuccagu

SEQ ID NO: 99338 - RNA, 14 nt, Artificial Sequence
  Description of Artificial Sequence: Synthetic oligonucleotide
aaaguuugguuuug

SEQ ID NO: 99339 - RNA, 12 nt, Artificial Sequence
  Description of Artificial Sequence: Synthetic oligonucleotide
cuucccacugua

SEQ ID NO: 99340 - RNA, 13 nt, Artificial Sequence
  Description of Artificial Sequence: Synthetic oligonucleotide
ugauaccauauga

SEQ ID NO: 99341 - RNA, 11 nt, Artificial Sequence
  Description of Artificial Sequence: Synthetic oligonucleotide
aacaugggcug

SEQ ID NO: 99342 - RNA, 13 nt, Artificial Sequence
  Description of Artificial Sequence: Synthetic oligonucleotide
caacuuuuucaua

SEQ ID NO: 99343 - RNA, 12 nt, Artificial Sequence
  Description of Artificial Sequence: Synthetic oligonucleotide
caugaggccgga

SEQ ID NO: 99344 - RNA, 11 nt, Artificial Sequence
  Description of Artificial Sequence: Synthetic oligonucleotide
acugcauuugu

SEQ ID NO: 99345 - RNA, 13 nt, Artificial Sequence
  Description of Artificial Sequence: Synthetic oligonucleotide
aauguuuacuacc

SEQ ID NO: 99346 - RNA, 15 nt, Artificial Sequence
  Description of Artificial Sequence: Synthetic oligonucleotide
aauuuuuugaugaaa

SEQ ID NO: 99347 - RNA, 14 nt, Artificial Sequence
  Description of Artificial Sequence: Synthetic oligonucleotide
cagugugugaauuu

SEQ ID NO: 99348 - RNA, 13 nt, Artificial Sequence
  Description of Artificial Sequence: Synthetic oligonucleotide
gagcaauguaugu

SEQ ID NO: 99349 - RNA, 14 nt, Artificial Sequence
  Description of Artificial Sequence: Synthetic oligonucleotide
aaagcacauauaua

SEQ ID NO: 99350 - RNA, 14 nt, Artificial Sequence
  Description of Artificial Sequence: Synthetic oligonucleotide
guaauaguuucucc

SEQ ID NO: 99351 - RNA, 13 nt, Artificial Sequence
  Description of Artificial Sequence: Synthetic oligonucleotide
aguuucuccaaau

SEQ ID NO: 99352 - RNA, 13 nt, Artificial Sequence
  Description of Artificial Sequence: Synthetic oligonucleotide
uacuuccuagaaa

SEQ ID NO: 99353 - RNA, 13 nt, Artificial Sequence
  Description of Artificial Sequence: Synthetic oligonucleotide
uacaccauauaug

SEQ ID NO: 99354 - RNA, 14 nt, Artificial Sequence
  Description of Artificial Sequence: Synthetic oligonucleotide
auauaugaauggag

SEQ ID NO: 99355 - RNA, 13 nt, Artificial Sequence
  Description of Artificial Sequence: Synthetic oligonucleotide
acgagaagaagau

SEQ ID NO: 99356 - RNA, 13 nt, Artificial Sequence
  Description of Artificial Sequence: Synthetic oligonucleotide
ucauuuacaggga

SEQ ID NO: 99357 - RNA, 13 nt, Artificial Sequence
  Description of Artificial Sequence: Synthetic oligonucleotide
cauuuacagggac

SEQ ID NO: 99358 - RNA, 10 nt, Artificial Sequence
  Description of Artificial Sequence: Synthetic oligonucleotide
agggaccuga

SEQ ID NO: 99359 - RNA, 14 nt, Artificial Sequence
  Description of Artificial Sequence: Synthetic oligonucleotide
uguuugacugcauc

SEQ ID NO: 99360 - RNA, 13 nt, Artificial Sequence
  Description of Artificial Sequence: Synthetic oligonucleotide
uuugacugcaucg

SEQ ID NO: 99361 - RNA, 12 nt, Artificial Sequence
  Description of Artificial Sequence: Synthetic oligonucleotide
gaguucacaggg

SEQ ID NO: 99362 - RNA, 13 nt, Artificial Sequence
  Description of Artificial Sequence: Synthetic oligonucleotide
ggcaccucugucc

SEQ ID NO: 99363 - RNA, 15 nt, Artificial Sequence
  Description of Artificial Sequence: Synthetic oligonucleotide
gguuugucuuuuuaa

SEQ ID NO: 99364 - RNA, 14 nt, Artificial Sequence
  Description of Artificial Sequence: Synthetic oligonucleotide
uuugucuuuuuaag

SEQ ID NO: 99365 - RNA, 13 nt, Artificial Sequence
  Description of Artificial Sequence: Synthetic oligonucleotide
ccuaaagguuguc

SEQ ID NO: 99366 - RNA, 12 nt, Artificial Sequence
  Description of Artificial Sequence: Synthetic oligonucleotide
aagguugucgac

SEQ ID NO: 99367 - RNA, 13 nt, Artificial Sequence
  Description of Artificial Sequence: Synthetic oligonucleotide
accuggcaauugu

SEQ ID NO: 99368 - RNA, 12 nt, Artificial Sequence
  Description of Artificial Sequence: Synthetic oligonucleotide
aguggugcgagg

SEQ ID NO: 99369 - RNA, 13 nt, Artificial Sequence
  Description of Artificial Sequence: Synthetic oligonucleotide
agagacaugaaau

SEQ ID NO: 99370 - RNA, 13 nt, Artificial Sequence
  Description of Artificial Sequence: Synthetic oligonucleotide
auauauuucucca

SEQ ID NO: 99371 - RNA, 10 nt, Artificial Sequence
  Description of Artificial Sequence: Synthetic oligonucleotide
caugaaggcu

SEQ ID NO: 99372 - RNA, 11 nt, Artificial Sequence
  Description of Artificial Sequence: Synthetic oligonucleotide
gcuggaguggu

SEQ ID NO: 99373 - RNA, 11 nt, Artificial Sequence
  Description of Artificial Sequence: Synthetic oligonucleotide
aggaagagagg

SEQ ID NO: 99374 - RNA, 12 nt, Artificial Sequence
  Description of Artificial Sequence: Synthetic oligonucleotide
cuugcaucgggc

SEQ ID NO: 99375 - RNA, 13 nt, Artificial Sequence
  Description of Artificial Sequence: Synthetic oligonucleotide
auauccuacugug

SEQ ID NO: 99376 - RNA, 13 nt, Artificial Sequence
  Description of Artificial Sequence: Synthetic oligonucleotide
uccuacuguguaa

SEQ ID NO: 99377 - RNA, 12 nt, Artificial Sequence
  Description of Artificial Sequence: Synthetic oligonucleotide
ccuuguagugua

SEQ ID NO: 99378 - RNA, 13 nt, Artificial Sequence
  Description of Artificial Sequence: Synthetic oligonucleotide
ucuuuguugauug

SEQ ID NO: 99379 - RNA, 14 nt, Artificial Sequence
  Description of Artificial Sequence: Synthetic oligonucleotide
uuuguugauugaaa

SEQ ID NO: 99380 - RNA, 15 nt, Artificial Sequence
  Description of Artificial Sequence: Synthetic oligonucleotide
uucuuuuucuuccau

SEQ ID NO: 99381 - RNA, 13 nt, Artificial Sequence
  Description of Artificial Sequence: Synthetic oligonucleotide
aaucuuccuucua

SEQ ID NO: 99382 - RNA, 13 nt, Artificial Sequence
  Description of Artificial Sequence: Synthetic oligonucleotide
uugaaugcuucau

SEQ ID NO: 99383 - RNA, 13 nt, Artificial Sequence
  Description of Artificial Sequence: Synthetic oligonucleotide
ugaaugcuucaug

SEQ ID NO: 99384 - RNA, 13 nt, Artificial Sequence
  Description of Artificial Sequence: Synthetic oligonucleotide
aauucuacuuuga

SEQ ID NO: 99385 - RNA, 13 nt, Artificial Sequence
  Description of Artificial Sequence: Synthetic oligonucleotide
agcaacuacagac

SEQ ID NO: 99386 - RNA, 13 nt, Artificial Sequence
  Description of Artificial Sequence: Synthetic oligonucleotide
gaccaaggucaac

SEQ ID NO: 99387 - RNA, 13 nt, Artificial Sequence
  Description of Artificial Sequence: Synthetic oligonucleotide
cgacuaucucgac

SEQ ID NO: 99388 - RNA, 13 nt, Artificial Sequence
  Description of Artificial Sequence: Synthetic oligonucleotide
aaccuucccaaac

SEQ ID NO: 99389 - RNA, 14 nt, Artificial Sequence
  Description of Artificial Sequence: Synthetic oligonucleotide
ccaagcuuagaacu

SEQ ID NO: 99390 - RNA, 15 nt, Artificial Sequence
  Description of Artificial Sequence: Synthetic oligonucleotide
agcuuagaacuuuaa

SEQ ID NO: 99391 - RNA, 11 nt, Artificial Sequence
  Description of Artificial Sequence: Synthetic oligonucleotide
aagaccaccac

SEQ ID NO: 99392 - RNA, 14 nt, Artificial Sequence
  Description of Artificial Sequence: Synthetic oligonucleotide
gcgagaaauaaagu

SEQ ID NO: 99393 - RNA, 14 nt, Artificial Sequence
  Description of Artificial Sequence: Synthetic oligonucleotide
cgagaaauaaaguu

SEQ ID NO: 99394 - RNA, 12 nt, Artificial Sequence
  Description of Artificial Sequence: Synthetic oligonucleotide
aggaaaugaucc

SEQ ID NO: 99395 - RNA, 13 nt, Artificial Sequence
  Description of Artificial Sequence: Synthetic oligonucleotide
gaagaaaugaaac

SEQ ID NO: 99396 - RNA, 13 nt, Artificial Sequence
  Description of Artificial Sequence: Synthetic oligonucleotide
guuuccauccucc

SEQ ID NO: 99397 - RNA, 15 nt, Artificial Sequence
  Description of Artificial Sequence: Synthetic oligonucleotide
acugaaaaucuuuga

SEQ ID NO: 99398 - RNA, 11 nt, Artificial Sequence
  Description of Artificial Sequence: Synthetic oligonucleotide
ugccguucagg

SEQ ID NO: 99399 - RNA, 13 nt, Artificial Sequence
  Description of Artificial Sequence: Synthetic oligonucleotide
caggguccagaag

SEQ ID NO: 99400 - RNA, 13 nt, Artificial Sequence
  Description of Artificial Sequence: Synthetic oligonucleotide
ucaagacugcuug

SEQ ID NO: 99401 - RNA, 13 nt, Artificial Sequence
  Description of Artificial Sequence: Synthetic oligonucleotide
uccaugucuuugg

SEQ ID NO: 99402 - RNA, 11 nt, Artificial Sequence
  Description of Artificial Sequence: Synthetic oligonucleotide
gccugaaacac

SEQ ID NO: 99403 - RNA, 12 nt, Artificial Sequence
  Description of Artificial Sequence: Synthetic oligonucleotide
ucucuguaccuc

SEQ ID NO: 99404 - RNA, 12 nt, Artificial Sequence
  Description of Artificial Sequence: Synthetic oligonucleotide
agcaagacaaga

SEQ ID NO: 99405 - RNA, 13 nt, Artificial Sequence
  Description of Artificial Sequence: Synthetic oligonucleotide
gcaagacaagaaa

SEQ ID NO: 99406 - RNA, 12 nt, Artificial Sequence
  Description of Artificial Sequence: Synthetic oligonucleotide
uguacaagaucc

SEQ ID NO: 99407 - RNA, 12 nt, Artificial Sequence
  Description of Artificial Sequence: Synthetic oligonucleotide
cguacuugcaga

SEQ ID NO: 99408 - RNA, 13 nt, Artificial Sequence
  Description of Artificial Sequence: Synthetic oligonucleotide
cgaucgauacaga

SEQ ID NO: 99409 - RNA, 13 nt, Artificial Sequence
  Description of Artificial Sequence: Synthetic oligonucleotide
uauaaaaauaaau

SEQ ID NO: 99410 - RNA, 13 nt, Artificial Sequence
  Description of Artificial Sequence: Synthetic oligonucleotide
uaaaaauaaauau

SEQ ID NO: 99411 - RNA, 13 nt, Artificial Sequence
  Description of Artificial Sequence: Synthetic oligonucleotide
uuugacugcugug

SEQ ID NO: 99412 - RNA, 13 nt, Artificial Sequence
  Description of Artificial Sequence: Synthetic oligonucleotide
ggagaugagagac

SEQ ID NO: 99413 - RNA, 10 nt, Artificial Sequence
  Description of Artificial Sequence: Synthetic oligonucleotide
ucccacuugg

SEQ ID NO: 99414 - RNA, 10 nt, Artificial Sequence
  Description of Artificial Sequence: Synthetic oligonucleotide
guucacggcc

SEQ ID NO: 99415 - RNA, 12 nt, Artificial Sequence
  Description of Artificial Sequence: Synthetic oligonucleotide
accaucacacca

SEQ ID NO: 99416 - RNA, 10 nt, Artificial Sequence
  Description of Artificial Sequence: Synthetic oligonucleotide
cugcggguuu

SEQ ID NO: 99417 - RNA, 9 nt, Artificial Sequence
  Description of Artificial Sequence: Synthetic oligonucleotide
uccaguuug

SEQ ID NO: 99418 - RNA, 12 nt, Artificial Sequence
  Description of Artificial Sequence: Synthetic oligonucleotide
uuaaggacuucu

SEQ ID NO: 99419 - RNA, 12 nt, Artificial Sequence
  Description of Artificial Sequence: Synthetic oligonucleotide
agugggacagag

SEQ ID NO: 99420 - RNA, 13 nt, Artificial Sequence
  Description of Artificial Sequence: Synthetic oligonucleotide
auuuguuauugug

SEQ ID NO: 99421 - RNA, 12 nt, Artificial Sequence
  Description of Artificial Sequence: Synthetic oligonucleotide
ucaaaugcauuu

SEQ ID NO: 99422 - RNA, 9 nt, Artificial Sequence
  Description of Artificial Sequence: Synthetic oligonucleotide
aggaaagcc

SEQ ID NO: 99423 - RNA, 10 nt, Artificial Sequence
  Description of Artificial Sequence: Synthetic oligonucleotide
ggaaagcccu

SEQ ID NO: 99424 - RNA, 11 nt, Artificial Sequence
  Description of Artificial Sequence: Synthetic oligonucleotide
ccagcauggcc

SEQ ID NO: 99425 - RNA, 10 nt, Artificial Sequence
  Description of Artificial Sequence: Synthetic oligonucleotide
uucucccuga

SEQ ID NO: 99426 - RNA, 11 nt, Artificial Sequence
  Description of Artificial Sequence: Synthetic oligonucleotide
aagaagcccuu

SEQ ID NO: 99427 - RNA, 11 nt, Artificial Sequence
  Description of Artificial Sequence: Synthetic oligonucleotide
gaagcccuuca

SEQ ID NO: 99428 - RNA, 10 nt, Artificial Sequence
  Description of Artificial Sequence: Synthetic oligonucleotide
cccuucagcg

SEQ ID NO: 99429 - RNA, 10 nt, Artificial Sequence
  Description of Artificial Sequence: Synthetic oligonucleotide
cuucagcggc

SEQ ID NO: 99430 - RNA, 11 nt, Artificial Sequence
  Description of Artificial Sequence: Synthetic oligonucleotide
cagcggccagu

SEQ ID NO: 99431 - RNA, 11 nt, Artificial Sequence
  Description of Artificial Sequence: Synthetic oligonucleotide
gaaaagcuccg

SEQ ID NO: 99432 - RNA, 10 nt, Artificial Sequence
  Description of Artificial Sequence: Synthetic oligonucleotide
aaagcuccgg

SEQ ID NO: 99433 - RNA, 12 nt, Artificial Sequence
  Description of Artificial Sequence: Synthetic oligonucleotide
gucaacagucug

SEQ ID NO: 99434 - RNA, 12 nt, Artificial Sequence
  Description of Artificial Sequence: Synthetic oligonucleotide
agaguucaaaag

SEQ ID NO: 99435 - RNA, 12 nt, Artificial Sequence
  Description of Artificial Sequence: Synthetic oligonucleotide
gaguucaaaagc

SEQ ID NO: 99436 - RNA, 11 nt, Artificial Sequence
  Description of Artificial Sequence: Synthetic oligonucleotide
ucaaaagcccu

SEQ ID NO: 99437 - RNA, 11 nt, Artificial Sequence
  Description of Artificial Sequence: Synthetic oligonucleotide
caaaagcccuu

SEQ ID NO: 99438 - RNA, 11 nt, Artificial Sequence
  Description of Artificial Sequence: Synthetic oligonucleotide
aaagcccuuca

SEQ ID NO: 99439 - RNA, 11 nt, Artificial Sequence
  Description of Artificial Sequence: Synthetic oligonucleotide
aagcccuucag

SEQ ID NO: 99440 - RNA, 12 nt, Artificial Sequence
  Description of Artificial Sequence: Synthetic oligonucleotide
ugaagccgcucg

SEQ ID NO: 99441 - RNA, 11 nt, Artificial Sequence
  Description of Artificial Sequence: Synthetic oligonucleotide
acgccagucaa

SEQ ID NO: 99442 - RNA, 12 nt, Artificial Sequence
  Description of Artificial Sequence: Synthetic oligonucleotide
ucuuggugcgug

SEQ ID NO: 99443 - RNA, 13 nt, Artificial Sequence
  Description of Artificial Sequence: Synthetic oligonucleotide
uuggauucaucag

SEQ ID NO: 99444 - RNA, 12 nt, Artificial Sequence
  Description of Artificial Sequence: Synthetic oligonucleotide
ggaauaccuaag

SEQ ID NO: 99445 - RNA, 11 nt, Artificial Sequence
  Description of Artificial Sequence: Synthetic oligonucleotide
uuugaggcuca

SEQ ID NO: 99446 - RNA, 10 nt, Artificial Sequence
  Description of Artificial Sequence: Synthetic oligonucleotide
cuacaauugg

SEQ ID NO: 99447 - RNA, 11 nt, Artificial Sequence
  Description of Artificial Sequence: Synthetic oligonucleotide
aguuaggagcc

SEQ ID NO: 99448 - RNA, 12 nt, Artificial Sequence
  Description of Artificial Sequence: Synthetic oligonucleotide
gucaauauccac

SEQ ID NO: 99449 - RNA, 12 nt, Artificial Sequence
  Description of Artificial Sequence: Synthetic oligonucleotide
uguucagucaca

SEQ ID NO: 99450 - RNA, 11 nt, Artificial Sequence
  Description of Artificial Sequence: Synthetic oligonucleotide
cacacacauac

SEQ ID NO: 99451 - RNA, 11 nt, Artificial Sequence
  Description of Artificial Sequence: Synthetic oligonucleotide
uccuuuugcuu

SEQ ID NO: 99452 - RNA, 15 nt, Artificial Sequence
  Description of Artificial Sequence: Synthetic oligonucleotide
uuuaaaguaauuuuu

SEQ ID NO: 99453 - RNA, 12 nt, Artificial Sequence
  Description of Artificial Sequence: Synthetic oligonucleotide
aacagucaaugg

SEQ ID NO: 99454 - RNA, 12 nt, Artificial Sequence
  Description of Artificial Sequence: Synthetic oligonucleotide
cgacaaaccaau

SEQ ID NO: 99455 - RNA, 11 nt, Artificial Sequence
  Description of Artificial Sequence: Synthetic oligonucleotide
cugcuaccacu

SEQ ID NO: 99456 - RNA, 12 nt, Artificial Sequence
  Description of Artificial Sequence: Synthetic oligonucleotide
caagcggucuua

SEQ ID NO: 99457 - RNA, 12 nt, Artificial Sequence
  Description of Artificial Sequence: Synthetic oligonucleotide
gucuuaccggcu

SEQ ID NO: 99458 - RNA, 10 nt, Artificial Sequence
  Description of Artificial Sequence: Synthetic oligonucleotide
auggguuacc

SEQ ID NO: 99459 - RNA, 10 nt, Artificial Sequence
  Description of Artificial Sequence: Synthetic oligonucleotide
uuaccugcga

SEQ ID NO: 99460 - RNA, 11 nt, Artificial Sequence
  Description of Artificial Sequence: Synthetic oligonucleotide
aucuugcugag

SEQ ID NO: 99461 - RNA, 12 nt, Artificial Sequence
  Description of Artificial Sequence: Synthetic oligonucleotide
gcauaaaacagu

SEQ ID NO: 99462 - RNA, 11 nt, Artificial Sequence
  Description of Artificial Sequence: Synthetic oligonucleotide
uccuuuauccu

SEQ ID NO: 99463 - RNA, 11 nt, Artificial Sequence
  Description of Artificial Sequence: Synthetic oligonucleotide
aacgcaaguug

SEQ ID NO: 99464 - RNA, 12 nt, Artificial Sequence
  Description of Artificial Sequence: Synthetic oligonucleotide
aacugaaaccau

SEQ ID NO: 99465 - RNA, 13 nt, Artificial Sequence
  Description of Artificial Sequence: Synthetic oligonucleotide
cuuuguuaaauau

SEQ ID NO: 99466 - RNA, 13 nt, Artificial Sequence
  Description of Artificial Sequence: Synthetic oligonucleotide
uauauuaaaaguu

SEQ ID NO: 99467 - RNA, 12 nt, Artificial Sequence
  Description of Artificial Sequence: Synthetic oligonucleotide
uuuugacuuaac

SEQ ID NO: 99468 - RNA, 12 nt, Artificial Sequence
  Description of Artificial Sequence: Synthetic oligonucleotide
caaacucagcac

SEQ ID NO: 99469 - RNA, 10 nt, Artificial Sequence
  Description of Artificial Sequence: Synthetic oligonucleotide
gcugaccuca

SEQ ID NO: 99470 - RNA, 13 nt, Artificial Sequence
  Description of Artificial Sequence: Synthetic oligonucleotide
uuauucagaucgc

SEQ ID NO: 99471 - RNA, 12 nt, Artificial Sequence
  Description of Artificial Sequence: Synthetic oligonucleotide
ggguucugggau

SEQ ID NO: 99472 - RNA, 14 nt, Artificial Sequence
  Description of Artificial Sequence: Synthetic oligonucleotide
uauuggaaauuaug

SEQ ID NO: 99473 - RNA, 12 nt, Artificial Sequence
  Description of Artificial Sequence: Synthetic oligonucleotide
uggaagcacuag

SEQ ID NO: 99474 - RNA, 12 nt, Artificial Sequence
  Description of Artificial Sequence: Synthetic oligonucleotide
uuuuuaugugga

SEQ ID NO: 99475 - RNA, 11 nt, Artificial Sequence
  Description of Artificial Sequence: Synthetic oligonucleotide
gaauugguaga

SEQ ID NO: 99476 - RNA, 12 nt, Artificial Sequence
  Description of Artificial Sequence: Synthetic oligonucleotide
uagacuuggaga

SEQ ID NO: 99477 - RNA, 12 nt, Artificial Sequence
  Description of Artificial Sequence: Synthetic oligonucleotide
uacaguauucca

SEQ ID NO: 99478 - RNA, 14 nt, Artificial Sequence
  Description of Artificial Sequence: Synthetic oligonucleotide
cacugaugaauuaa

SEQ ID NO: 99479 - RNA, 11 nt, Artificial Sequence
  Description of Artificial Sequence: Synthetic oligonucleotide
cacaucaucac

SEQ ID NO: 99480 - RNA, 12 nt, Artificial Sequence
  Description of Artificial Sequence: Synthetic oligonucleotide
ucaccaaacaga

SEQ ID NO: 99481 - RNA, 11 nt, Artificial Sequence
  Description of Artificial Sequence: Synthetic oligonucleotide
gaacaugaugg

SEQ ID NO: 99482 - RNA, 11 nt, Artificial Sequence
  Description of Artificial Sequence: Synthetic oligonucleotide
auguagacugc

SEQ ID NO: 99483 - RNA, 12 nt, Artificial Sequence
  Description of Artificial Sequence: Synthetic oligonucleotide
gaucuauuuaug

SEQ ID NO: 99484 - RNA, 11 nt, Artificial Sequence
  Description of Artificial Sequence: Synthetic oligonucleotide
cacuauuauca

SEQ ID NO: 99485 - RNA, 10 nt, Artificial Sequence
  Description of Artificial Sequence: Synthetic oligonucleotide
ucaguucugc

SEQ ID NO: 99486 - RNA, 12 nt, Artificial Sequence
  Description of Artificial Sequence: Synthetic oligonucleotide
gauuaaaccuac

SEQ ID NO: 99487 - RNA, 12 nt, Artificial Sequence
  Description of Artificial Sequence: Synthetic oligonucleotide
uaaaauccuucu

SEQ ID NO: 99488 - RNA, 11 nt, Artificial Sequence
  Description of Artificial Sequence: Synthetic oligonucleotide
augcuguagac

SEQ ID NO: 99489 - RNA, 12 nt, Artificial Sequence
  Description of Artificial Sequence: Synthetic oligonucleotide
ugauaggaauag

SEQ ID NO: 99490 - RNA, 10 nt, Artificial Sequence
  Description of Artificial Sequence: Synthetic oligonucleotide
auggcccuga

SEQ ID NO: 99491 - RNA, 10 nt, Artificial Sequence
  Description of Artificial Sequence: Synthetic oligonucleotide
uccucaagca

SEQ ID NO: 99492 - RNA, 9 nt, Artificial Sequence
  Description of Artificial Sequence: Synthetic oligonucleotide
uucagccca

SEQ ID NO: 99493 - RNA, 10 nt, Artificial Sequence
  Description of Artificial Sequence: Synthetic oligonucleotide
cugcugaacc

SEQ ID NO: 99494 - RNA, 11 nt, Artificial Sequence
  Description of Artificial Sequence: Synthetic oligonucleotide
aguucucuuca

SEQ ID NO: 99495 - RNA, 10 nt, Artificial Sequence
  Description of Artificial Sequence: Synthetic oligonucleotide
cagccuagag

SEQ ID NO: 99496 - RNA, 12 nt, Artificial Sequence
  Description of Artificial Sequence: Synthetic oligonucleotide
ucugugaagugu

SEQ ID NO: 99497 - RNA, 13 nt, Artificial Sequence
  Description of Artificial Sequence: Synthetic oligonucleotide
gagaaaauuucaa

SEQ ID NO: 99498 - RNA, 10 nt, Artificial Sequence
  Description of Artificial Sequence: Synthetic oligonucleotide
auccuccuga

SEQ ID NO: 99499 - RNA, 11 nt, Artificial Sequence
  Description of Artificial Sequence: Synthetic oligonucleotide
ugacaucauau

SEQ ID NO: 99500 - RNA, 12 nt, Artificial Sequence
  Description of Artificial Sequence: Synthetic oligonucleotide
aucuucaucaua

SEQ ID NO: 99501 - RNA, 12 nt, Artificial Sequence
  Description of Artificial Sequence: Synthetic oligonucleotide
acuagcuauuaa

SEQ ID NO: 99502 - RNA, 13 nt, Artificial Sequence
  Description of Artificial Sequence: Synthetic oligonucleotide
cucuacuaaaaau

SEQ ID NO: 99503 - RNA, 11 nt, Artificial Sequence
  Description of Artificial Sequence: Synthetic oligonucleotide
cuaucucgccu

SEQ ID NO: 99504 - RNA, 12 nt, Artificial Sequence
  Description of Artificial Sequence: Synthetic oligonucleotide
uucgguccaguu

SEQ ID NO: 99505 - RNA, 10 nt, Artificial Sequence
  Description of Artificial Sequence: Synthetic oligonucleotide
auguagccgc

SEQ ID NO: 99506 - RNA, 11 nt, Artificial Sequence
  Description of Artificial Sequence: Synthetic oligonucleotide
gaggagacuug

SEQ ID NO: 99507 - RNA, 11 nt, Artificial Sequence
  Description of Artificial Sequence: Synthetic oligonucleotide
aguagugagga

SEQ ID NO: 99508 - RNA, 13 nt, Artificial Sequence
  Description of Artificial Sequence: Synthetic oligonucleotide
agaugaguacaaa

SEQ ID NO: 99509 - RNA, 12 nt, Artificial Sequence
  Description of Artificial Sequence: Synthetic oligonucleotide
uuguuaaugggc

SEQ ID NO: 99510 - RNA, 12 nt, Artificial Sequence
  Description of Artificial Sequence: Synthetic oligonucleotide
uuuuaauuuauu

SEQ ID NO: 99511 - RNA, 11 nt, Artificial Sequence
  Description of Artificial Sequence: Synthetic oligonucleotide
auuuaaauaug

SEQ ID NO: 99512 - RNA, 12 nt, Artificial Sequence
  Description of Artificial Sequence: Synthetic oligonucleotide
auccuuuguuuc

SEQ ID NO: 99513 - RNA, 13 nt, Artificial Sequence
  Description of Artificial Sequence: Synthetic oligonucleotide
gucuaaguguuug

SEQ ID NO: 99514 - RNA, 11 nt, Artificial Sequence
  Description of Artificial Sequence: Synthetic oligonucleotide
ccugugacaaa

SEQ ID NO: 99515 - RNA, 12 nt, Artificial Sequence
  Description of Artificial Sequence: Synthetic oligonucleotide
caggcugaauua

SEQ ID NO: 99516 - RNA, 13 nt, Artificial Sequence
  Description of Artificial Sequence: Synthetic oligonucleotide
ucauucuuacaau

SEQ ID NO: 99517 - RNA, 14 nt, Artificial Sequence
  Description of Artificial Sequence: Synthetic oligonucleotide
cauucuuacaauug

SEQ ID NO: 99518 - RNA, 11 nt, Artificial Sequence
  Description of Artificial Sequence: Synthetic oligonucleotide
agagaguguac

SEQ ID NO: 99519 - RNA, 11 nt, Artificial Sequence
  Description of Artificial Sequence: Synthetic oligonucleotide
gaacucagcag

SEQ ID NO: 99520 - RNA, 12 nt, Artificial Sequence
  Description of Artificial Sequence: Synthetic oligonucleotide
uuauuuucagua

SEQ ID NO: 99521 - RNA, 11 nt, Artificial Sequence
  Description of Artificial Sequence: Synthetic oligonucleotide
cuuaaauggaa

SEQ ID NO: 99522 - RNA, 12 nt, Artificial Sequence
  Description of Artificial Sequence: Synthetic oligonucleotide
gccuaaaauugu

SEQ ID NO: 99523 - RNA, 12 nt, Artificial Sequence
  Description of Artificial Sequence: Synthetic oligonucleotide
acuaacaucugg

SEQ ID NO: 99524 - RNA, 11 nt, Artificial Sequence
  Description of Artificial Sequence: Synthetic oligonucleotide
gacugugagcu

SEQ ID NO: 99525 - RNA, 13 nt, Artificial Sequence
  Description of Artificial Sequence: Synthetic oligonucleotide
gcuuuuuauuaau

SEQ ID NO: 99526 - RNA, 12 nt, Artificial Sequence
  Description of Artificial Sequence: Synthetic oligonucleotide
ucuucuuacauu

SEQ ID NO: 99527 - RNA, 14 nt, Artificial Sequence
  Description of Artificial Sequence: Synthetic oligonucleotide
auuuguaaaaaugu

SEQ ID NO: 99528 - RNA, 14 nt, Artificial Sequence
  Description of Artificial Sequence: Synthetic oligonucleotide
ucuuaauucauauu

SEQ ID NO: 99529 - RNA, 12 nt, Artificial Sequence
  Description of Artificial Sequence: Synthetic oligonucleotide
aacuaaucauga

SEQ ID NO: 99530 - RNA, 11 nt, Artificial Sequence
  Description of Artificial Sequence: Synthetic oligonucleotide
cugcucuuggg

SEQ ID NO: 99531 - RNA, 12 nt, Artificial Sequence
  Description of Artificial Sequence: Synthetic oligonucleotide
aguagcuuugag

SEQ ID NO: 99532 - RNA, 13 nt, Artificial Sequence
  Description of Artificial Sequence: Synthetic oligonucleotide
acguaauauuuca

SEQ ID NO: 99533 - RNA, 12 nt, Artificial Sequence
  Description of Artificial Sequence: Synthetic oligonucleotide
auucucuucacu

SEQ ID NO: 99534 - RNA, 13 nt, Artificial Sequence
  Description of Artificial Sequence: Synthetic oligonucleotide
uaaugcuaagaaa

SEQ ID NO: 99535 - RNA, 11 nt, Artificial Sequence
  Description of Artificial Sequence: Synthetic oligonucleotide
cugaaaaucaa

SEQ ID NO: 99536 - RNA, 13 nt, Artificial Sequence
  Description of Artificial Sequence: Synthetic oligonucleotide
auaugauuacuuu

SEQ ID NO: 99537 - RNA, 13 nt, Artificial Sequence
  Description of Artificial Sequence: Synthetic oligonucleotide
auuuuguucuaca

SEQ ID NO: 99538 - RNA, 11 nt, Artificial Sequence
  Description of Artificial Sequence: Synthetic oligonucleotide
ccgggacucuc

SEQ ID NO: 99539 - RNA, 13 nt, Artificial Sequence
  Description of Artificial Sequence: Synthetic oligonucleotide
cuuuaaaguaaag

SEQ ID NO: 99540 - RNA, 12 nt, Artificial Sequence
  Description of Artificial Sequence: Synthetic oligonucleotide
cuggaagccugg

SEQ ID NO: 99541 - RNA, 13 nt, Artificial Sequence
  Description of Artificial Sequence: Synthetic oligonucleotide
aaacaaaagagag

SEQ ID NO: 99542 - RNA, 12 nt, Artificial Sequence
  Description of Artificial Sequence: Synthetic oligonucleotide
ucaguuaugccg

SEQ ID NO: 99543 - RNA, 12 nt, Artificial Sequence
  Description of Artificial Sequence: Synthetic oligonucleotide
aaaagaagucca

SEQ ID NO: 99544 - RNA, 10 nt, Artificial Sequence
  Description of Artificial Sequence: Synthetic oligonucleotide
ggugagguua

SEQ ID NO: 99545 - RNA, 10 nt, Artificial Sequence
  Description of Artificial Sequence: Synthetic oligonucleotide
ggaagaggac

SEQ ID NO: 99546 - RNA, 12 nt, Artificial Sequence
  Description of Artificial Sequence: Synthetic oligonucleotide
agcaaguauugu

SEQ ID NO: 99547 - RNA, 11 nt, Artificial Sequence
  Description of Artificial Sequence: Synthetic oligonucleotide
uuguagcacuc

SEQ ID NO: 99548 - RNA, 13 nt, Artificial Sequence
  Description of Artificial Sequence: Synthetic oligonucleotide
caaaaccacaaau

SEQ ID NO: 99549 - RNA, 11 nt, Artificial Sequence
  Description of Artificial Sequence: Synthetic oligonucleotide
aagcccauaca

SEQ ID NO: 99550 - RNA, 10 nt, Artificial Sequence
  Description of Artificial Sequence: Synthetic oligonucleotide
gcccauacag

SEQ ID NO: 99551 - RNA, 11 nt, Artificial Sequence
  Description of Artificial Sequence: Synthetic oligonucleotide
agaaaccuucc

SEQ ID NO: 99552 - RNA, 9 nt, Artificial Sequence
  Description of Artificial Sequence: Synthetic oligonucleotide
uauaccuac

SEQ ID NO: 99553 - RNA, 12 nt, Artificial Sequence
  Description of Artificial Sequence: Synthetic oligonucleotide
ccaguuuucgga

SEQ ID NO: 99554 - RNA, 8 nt, Artificial Sequence
  Description of Artificial Sequence: Synthetic oligonucleotide
gaacaggg

SEQ ID NO: 99555 - RNA, 12 nt, Artificial Sequence
  Description of Artificial Sequence: Synthetic oligonucleotide
uaacuuuccagu

SEQ ID NO: 99556 - RNA, 13 nt, Artificial Sequence
  Description of Artificial Sequence: Synthetic oligonucleotide
aaguuugguuuug

SEQ ID NO: 99557 - RNA, 11 nt, Artificial Sequence
  Description of Artificial Sequence: Synthetic oligonucleotide
uucccacugua

SEQ ID NO: 99558 - RNA, 12 nt, Artificial Sequence
  Description of Artificial Sequence: Synthetic oligonucleotide
gauaccauauga

SEQ ID NO: 99559 - RNA, 10 nt, Artificial Sequence
  Description of Artificial Sequence: Synthetic oligonucleotide
acaugggcug

SEQ ID NO: 99560 - RNA, 12 nt, Artificial Sequence
  Description of Artificial Sequence: Synthetic oligonucleotide
aacuuuuucaua

SEQ ID NO: 99561 - RNA, 11 nt, Artificial Sequence
  Description of Artificial Sequence: Synthetic oligonucleotide
augaggccgga

SEQ ID NO: 99562 - RNA, 10 nt, Artificial Sequence
  Description of Artificial Sequence: Synthetic oligonucleotide
cugcauuugu

SEQ ID NO: 99563 - RNA, 12 nt, Artificial Sequence
  Description of Artificial Sequence: Synthetic oligonucleotide
auguuuacuacc

SEQ ID NO: 99564 - RNA, 14 nt, Artificial Sequence
  Description of Artificial Sequence: Synthetic oligonucleotide
auuuuuugaugaaa

SEQ ID NO: 99565 - RNA, 13 nt, Artificial Sequence
  Description of Artificial Sequence: Synthetic oligonucleotide
agugugugaauuu

SEQ ID NO: 99566 - RNA, 12 nt, Artificial Sequence
  Description of Artificial Sequence: Synthetic oligonucleotide
agcaauguaugu

SEQ ID NO: 99567 - RNA, 13 nt, Artificial Sequence
  Description of Artificial Sequence: Synthetic oligonucleotide
aagcacauauaua

SEQ ID NO: 99568 - RNA, 13 nt, Artificial Sequence
  Description of Artificial Sequence: Synthetic oligonucleotide
uaauaguuucucc

SEQ ID NO: 99569 - RNA, 12 nt, Artificial Sequence
  Description of Artificial Sequence: Synthetic oligonucleotide
guuucuccaaau

SEQ ID NO: 99570 - RNA, 12 nt, Artificial Sequence
  Description of Artificial Sequence: Synthetic oligonucleotide
acuuccuagaaa

SEQ ID NO: 99571 - RNA, 12 nt, Artificial Sequence
  Description of Artificial Sequence: Synthetic oligonucleotide
acaccauauaug

SEQ ID NO: 99572 - RNA, 13 nt, Artificial Sequence
  Description of Artificial Sequence: Synthetic oligonucleotide
uauaugaauggag

SEQ ID NO: 99573 - RNA, 12 nt, Artificial Sequence
  Description of Artificial Sequence: Synthetic oligonucleotide
cauuuacaggga

SEQ ID NO: 99574 - RNA, 12 nt, Artificial Sequence
  Description of Artificial Sequence: Synthetic oligonucleotide
auuuacagggac

SEQ ID NO: 99575 - RNA, 9 nt, Artificial Sequence
  Description of Artificial Sequence: Synthetic oligonucleotide
gggaccuga

SEQ ID NO: 99576 - RNA, 13 nt, Artificial Sequence
  Description of Artificial Sequence: Synthetic oligonucleotide
guuugacugcauc

SEQ ID NO: 99577 - RNA, 12 nt, Artificial Sequence
  Description of Artificial Sequence: Synthetic oligonucleotide
uugacugcaucg

SEQ ID NO: 99578 - RNA, 11 nt, Artificial Sequence
  Description of Artificial Sequence: Synthetic oligonucleotide
aguucacaggg

SEQ ID NO: 99579 - RNA, 12 nt, Artificial Sequence
  Description of Artificial Sequence: Synthetic oligonucleotide
gcaccucugucc

SEQ ID NO: 99580 - RNA, 14 nt, Artificial Sequence
  Description of Artificial Sequence: Synthetic oligonucleotide
guuugucuuuuuaa

SEQ ID NO: 99581 - RNA, 13 nt, Artificial Sequence
  Description of Artificial Sequence: Synthetic oligonucleotide
uugucuuuuuaag

SEQ ID NO: 99582 - RNA, 12 nt, Artificial Sequence
  Description of Artificial Sequence: Synthetic oligonucleotide
cuaaagguuguc

SEQ ID NO: 99583 - RNA, 11 nt, Artificial Sequence
  Description of Artificial Sequence: Synthetic oligonucleotide
agguugucgac

SEQ ID NO: 99584 - RNA, 12 nt, Artificial Sequence
  Description of Artificial Sequence: Synthetic oligonucleotide
ccuggcaauugu

SEQ ID NO: 99585 - RNA, 11 nt, Artificial Sequence
  Description of Artificial Sequence: Synthetic oligonucleotide
guggugcgagg

SEQ ID NO: 99586 - RNA, 12 nt, Artificial Sequence
  Description of Artificial Sequence: Synthetic oligonucleotide
gagacaugaaau

SEQ ID NO: 99587 - RNA, 12 nt, Artificial Sequence
  Description of Artificial Sequence: Synthetic oligonucleotide
uauauuucucca

SEQ ID NO: 99588 - RNA, 9 nt, Artificial Sequence
  Description of Artificial Sequence: Synthetic oligonucleotide
augaaggcu

SEQ ID NO: 99589 - RNA, 10 nt, Artificial Sequence
  Description of Artificial Sequence: Synthetic oligonucleotide
cuggaguggu

SEQ ID NO: 99590 - RNA, 10 nt, Artificial Sequence
  Description of Artificial Sequence: Synthetic oligonucleotide
ggaagagagg

SEQ ID NO: 99591 - RNA, 11 nt, Artificial Sequence
  Description of Artificial Sequence: Synthetic oligonucleotide
uugcaucgggc

SEQ ID NO: 99592 - RNA, 12 nt, Artificial Sequence
  Description of Artificial Sequence: Synthetic oligonucleotide
uauccuacugug

SEQ ID NO: 99593 - RNA, 12 nt, Artificial Sequence
  Description of Artificial Sequence: Synthetic oligonucleotide
ccuacuguguaa

SEQ ID NO: 99594 - RNA, 11 nt, Artificial Sequence
  Description of Artificial Sequence: Synthetic oligonucleotide
cuuguagugua

SEQ ID NO: 99595 - RNA, 12 nt, Artificial Sequence
  Description of Artificial Sequence: Synthetic oligonucleotide
cuuuguugauug

SEQ ID NO: 99596 - RNA, 13 nt, Artificial Sequence
  Description of Artificial Sequence: Synthetic oligonucleotide
uuguugauugaaa

SEQ ID NO: 99597 - RNA, 14 nt, Artificial Sequence
  Description of Artificial Sequence: Synthetic oligonucleotide
ucuuuuucuuccau

SEQ ID NO: 99598 - RNA, 12 nt, Artificial Sequence
  Description of Artificial Sequence: Synthetic oligonucleotide
aucuuccuucua

SEQ ID NO: 99599 - RNA, 12 nt, Artificial Sequence
  Description of Artificial Sequence: Synthetic oligonucleotide
ugaaugcuucau

SEQ ID NO: 99600 - RNA, 12 nt, Artificial Sequence
  Description of Artificial Sequence: Synthetic oligonucleotide
gaaugcuucaug

SEQ ID NO: 99601 - RNA, 12 nt, Artificial Sequence
  Description of Artificial Sequence: Synthetic oligonucleotide
auucuacuuuga

SEQ ID NO: 99602 - RNA, 12 nt, Artificial Sequence
  Description of Artificial Sequence: Synthetic oligonucleotide
gcaacuacagac

SEQ ID NO: 99603 - RNA, 12 nt, Artificial Sequence
  Description of Artificial Sequence: Synthetic oligonucleotide
accaaggucaac

SEQ ID NO: 99604 - RNA, 12 nt, Artificial Sequence
  Description of Artificial Sequence: Synthetic oligonucleotide
gacuaucucgac

SEQ ID NO: 99605 - RNA, 12 nt, Artificial Sequence
  Description of Artificial Sequence: Synthetic oligonucleotide
accuucccaaac

SEQ ID NO: 99606 - RNA, 13 nt, Artificial Sequence
  Description of Artificial Sequence: Synthetic oligonucleotide
caagcuuagaacu

SEQ ID NO: 99607 - RNA, 14 nt, Artificial Sequence
  Description of Artificial Sequence: Synthetic oligonucleotide
gcuuagaacuuuaa

SEQ ID NO: 99608 - RNA, 13 nt, Artificial Sequence
  Description of Artificial Sequence: Synthetic oligonucleotide
aacuuuaagcaac

SEQ ID NO: 99609 - RNA, 10 nt, Artificial Sequence
  Description of Artificial Sequence: Synthetic oligonucleotide
agaccaccac

SEQ ID NO: 99610 - RNA, 13 nt, Artificial Sequence
  Description of Artificial Sequence: Synthetic oligonucleotide
cgagaaauaaagu

SEQ ID NO: 99611 - RNA, 13 nt, Artificial Sequence
  Description of Artificial Sequence: Synthetic oligonucleotide
gagaaauaaaguu

SEQ ID NO: 99612 - RNA, 11 nt, Artificial Sequence
  Description of Artificial Sequence: Synthetic oligonucleotide
ggaaaugaucc

SEQ ID NO: 99613 - RNA, 12 nt, Artificial Sequence
  Description of Artificial Sequence: Synthetic oligonucleotide
aagaaaugaaac

SEQ ID NO: 99614 - RNA, 12 nt, Artificial Sequence
  Description of Artificial Sequence: Synthetic oligonucleotide
uuuccauccucc

SEQ ID NO: 99615 - RNA, 14 nt, Artificial Sequence
  Description of Artificial Sequence: Synthetic oligonucleotide
cugaaaaucuuuga

SEQ ID NO: 99616 - RNA, 10 nt, Artificial Sequence
  Description of Artificial Sequence: Synthetic oligonucleotide
gccguucagg

SEQ ID NO: 99617 - RNA, 12 nt, Artificial Sequence
  Description of Artificial Sequence: Synthetic oligonucleotide
aggguccagaag

SEQ ID NO: 99618 - RNA, 12 nt, Artificial Sequence
  Description of Artificial Sequence: Synthetic oligonucleotide
caagacugcuug

SEQ ID NO: 99619 - RNA, 12 nt, Artificial Sequence
  Description of Artificial Sequence: Synthetic oligonucleotide
ccaugucuuugg

SEQ ID NO: 99620 - RNA, 10 nt, Artificial Sequence
  Description of Artificial Sequence: Synthetic oligonucleotide
ccugaaacac

SEQ ID NO: 99621 - RNA, 11 nt, Artificial Sequence
  Description of Artificial Sequence: Synthetic oligonucleotide
cucuguaccuc

SEQ ID NO: 99622 - RNA, 11 nt, Artificial Sequence
  Description of Artificial Sequence: Synthetic oligonucleotide
gcaagacaaga

SEQ ID NO: 99623 - RNA, 12 nt, Artificial Sequence
  Description of Artificial Sequence: Synthetic oligonucleotide
caagacaagaaa

SEQ ID NO: 99624 - RNA, 11 nt, Artificial Sequence
  Description of Artificial Sequence: Synthetic oligonucleotide
guacaagaucc

SEQ ID NO: 99625 - RNA, 11 nt, Artificial Sequence
  Description of Artificial Sequence: Synthetic oligonucleotide
guacuugcaga

SEQ ID NO: 99626 - RNA, 12 nt, Artificial Sequence
  Description of Artificial Sequence: Synthetic oligonucleotide
gaucgauacaga

SEQ ID NO: 99627 - RNA, 12 nt, Artificial Sequence
  Description of Artificial Sequence: Synthetic oligonucleotide
auaaaaauaaau

SEQ ID NO: 99628 - RNA, 12 nt, Artificial Sequence
  Description of Artificial Sequence: Synthetic oligonucleotide
aaaaauaaauau

SEQ ID NO: 99629 - RNA, 12 nt, Artificial Sequence
  Description of Artificial Sequence: Synthetic oligonucleotide
uugacugcugug

SEQ ID NO: 99630 - RNA, 12 nt, Artificial Sequence
  Description of Artificial Sequence: Synthetic oligonucleotide
gagaugagagac

SEQ ID NO: 99631 - RNA, 9 nt, Artificial Sequence
  Description of Artificial Sequence: Synthetic oligonucleotide
cccacuugg

SEQ ID NO: 99632 - RNA, 3338 nt, Homo sapiens
gacaucaugggcuauuuuuagggguugacugguagcagauaaguguugagcucgggcuggauaagggcucagaguugcacugaguguggcugaagcagcgaggcgggaguggaggugcgcggagucaggcagacagacagacacagccagccagccaggucggcaguauaguccgaacugcaaaucuuauuuucuuuucaccuucucucuaacugcccagagcuagcgccuguggcucccgggcugguguuucgggaguguccagagagccuggucuccagccgcccccgggaggagagcccugcugcccaggcgcuguugacagcggcggaaagcagcgguacccacgcgcccgccgggggaagucggcgagcggcugcagcagcaaagaacuuucccggcugggaggaccggagacaaguggcagagucccggagcgaacuuuugcaagccuuuccugcgucuuaggcuucuccacggcgguaaagaccagaaggcggcggagagccacgcaagagaagaaggacgugcgcucagcuucgcucgcaccgguuguugaacuugggcgagcgcgagccgcggcugccgggcgcccccucccccuagcagcggaggaggggacaagucgucggaguccgggcggccaagacccgccgccggccggccacugcaggguccgcacugauccgcuccgcggggagagccgcugcucugggaagugaguucgccugcggacuccgaggaaccgcugcgcccgaagagcgcucagugagugaccgcgacuuuucaaagccggguagcgcgcgcgagucgacaaguaagagugcgggaggcaucuuaauuaacccugcgcucccuggagcgagcuggugaggagggcgcagcggggacgacagccagcgggugcgugcgcucuuagagaaacuuucccugucaaaggcuccggggggcgcgggugucccccgcuugccagagcccuguugcggccccgaaacuugugcgcgcagcccaaacuaaccucacgugaagugacggacuguucuaugacugcaaagauggaaacgaccuucuaugacgaugcccucaacgccucguuccucccguccgagagcggaccuuauggcuacaguaaccccaagauccugaaacagagcaugacccugaaccuggccgacccaguggggagccugaagccgcaccuccgcgccaagaacucggaccuccucaccucgcccgacguggggcugcucaagcuggcgucgcccgagcuggagcgccugauaauccaguccagcaacgggcacaucaccaccacgccgacccccacccaguuccugugccccaagaacgugacagaugagcaggagggcuucgccgagggcuucgugcgcgcccuggccgaacugcacagccagaacacgcugcccagcgucacgucggcggcgcagccggucaacggggcaggcaugguggcucccgcgguagccucgguggcagggggcagcggcagcggcggcuucagcgccagccugcacagcgagccgccggucuacgcaaaccucagcaacuucaacccaggcgcgcugagcagcggcggcggggcgcccuccuacggcgcggccggccuggccuuucccgcgcaaccccagcagcagcagcagccgccgcaccaccugccccagcagaugcccgugcagcacccgcggcugcaggcccugaaggaggagccucagacagugcccgagaugcccggcgagacaccgccccugucccccaucgacauggagucccaggagcggaucaaggcggagaggaagcgcaugaggaaccgcaucgcugccuccaagugccgaaaaaggaagcuggagagaaucgcccggcuggaggaaaaagugaaaaccuugaaagcucagaacucggagcuggcguccacggccaacaugcucagggaacagguggcacagcuuaaacagaaagucaugaaccacguuaacagugggugccaacucaugcuaacgcagcaguugcaaacauuuugaagagagaccgucgggggcugaggggcaacgaagaaaaaaaauaacacagagagacagacuugagaacuugacaaguugcgacggagagaaaaaagaaguguccgagaacuaaagccaaggguauccaaguuggacuggguugcguccugacggcgcccccagugugcacgagugggaaggacuuggcgcgcccucccuuggcguggagccagggagcggccgccugcgggcugccccgcuuugcggacgggcuguccccgcgcgaacggaacguuggacuuuucguuaacauugaccaagaacugcauggaccuaacauucgaucucauucaguauuaaaggggggagggggaggggguuacaaacugcaauagagacuguagauugcuucuguaguacuccuuaagaacacaaagcggggggaggguuggggaggggcggcaggagggagguuugugagagcgaggcugagccuacagaugaacucuuucuggccugccuucguuaacuguguauguacauauauauauuuuuuaauuugaugaaagcugauuacugucaauaaacagcuucaugccuuuguaaguuauuucuuguuuguuuguuuggguauccugcccaguguuguuuguaaauaagagauuuggagcacucugaguuuaccauuuguaauaaaguauauaauuuuuuuauguuuuguuucugaaaauuccagaaaggauauuuaagaaaauacaauaaacuauuggaaaguacuccccuaaccucuuuucugcaucaucuguagauacuagcuaucuagguggaguugaaagaguuaagaaugucgauuaaaaucacucucagugcuucuuacuauuaagcaguaaaaacuguucucuauuagacuuuagaaauaaauguaccugauguaccugaugcuauggucagguuauacuccuccucccccagcuaucuauauggaauugcuuaccaaaggauagugcgauguuucaggaggcuggaggaagggggguugcaguggagagggacagcccacugagaagucaaacauuucaaaguuuggauuguaucaaguggcaugugcugugaccauuuauaauguuaguagaaauuuuacaauaggugcuuauucucaaagcaggaauugguggcagauuuuacaaaagauguauccuuccaauuuggaaucuucucuuugacaauuccuagauaaaaagauggccuuugcuuaugaauauuuauaacagcauucuugucacaauaaauguauucaaauaccaaaaaaaaaaaaaaaaa

SEQ ID NO: 99633 - RNA, 19 nt, Artificial Sequence
  Description of Artificial Sequence: Synthetic oligonucleotide
gacaucaugggcuauuuuu

SEQ ID NO: 99634 - RNA, 19 nt, Artificial Sequence
  Description of Artificial Sequence: Synthetic oligonucleotide
uagggguugacugguagca

SEQ ID NO: 99635 - RNA, 19 nt, Artificial Sequence
  Description of Artificial Sequence: Synthetic oligonucleotide
agauaaguguugagcucgg

SEQ ID NO: 99636 - RNA, 19 nt, Artificial Sequence
  Description of Artificial Sequence: Synthetic oligonucleotide
ggcuggauaagggcucaga

SEQ ID NO: 99637 - RNA, 19 nt, Artificial Sequence
  Description of Artificial Sequence: Synthetic oligonucleotide
aguugcacugaguguggcu

SEQ ID NO: 99638 - RNA, 19 nt, Artificial Sequence
  Description of Artificial Sequence: Synthetic oligonucleotide
ugaagcagcgaggcgggag

SEQ ID NO: 99639 - RNA, 19 nt, Artificial Sequence
  Description of Artificial Sequence: Synthetic oligonucleotide
guggaggugcgcggaguca

SEQ ID NO: 99640 - RNA, 19 nt, Artificial Sequence
  Description of Artificial Sequence: Synthetic oligonucleotide
aggcagacagacagacaca

SEQ ID NO: 99641 - RNA, 19 nt, Artificial Sequence
  Description of Artificial Sequence: Synthetic oligonucleotide
agccagccagccaggucgg

SEQ ID NO: 99642 - RNA, 19 nt, Artificial Sequence
  Description of Artificial Sequence: Synthetic oligonucleotide
gcaguauaguccgaacugc

SEQ ID NO: 99643 - RNA, 19 nt, Artificial Sequence
  Description of Artificial Sequence: Synthetic oligonucleotide
caaaucuuauuuucuuuuc

SEQ ID NO: 99644 - RNA, 19 nt, Artificial Sequence
  Description of Artificial Sequence: Synthetic oligonucleotide
caccuucucucuaacugcc

SEQ ID NO: 99645 - RNA, 19 nt, Artificial Sequence
  Description of Artificial Sequence: Synthetic oligonucleotide
ccagagcuagcgccugugg

SEQ ID NO: 99646 - RNA, 19 nt, Artificial Sequence
  Description of Artificial Sequence: Synthetic oligonucleotide
gcucccgggcugguguuuc

SEQ ID NO: 99647 - RNA, 19 nt, Artificial Sequence
  Description of Artificial Sequence: Synthetic oligonucleotide
cgggaguguccagagagcc

SEQ ID NO: 99648 - RNA, 19 nt, Artificial Sequence
  Description of Artificial Sequence: Synthetic oligonucleotide
cuggucuccagccgccccc

SEQ ID NO: 99649 - RNA, 19 nt, Artificial Sequence
  Description of Artificial Sequence: Synthetic oligonucleotide
cgggaggagagcccugcug

SEQ ID NO: 99650 - RNA, 19 nt, Artificial Sequence
  Description of Artificial Sequence: Synthetic oligonucleotide
gcccaggcgcuguugacag

SEQ ID NO: 99651 - RNA, 19 nt, Artificial Sequence
  Description of Artificial Sequence: Synthetic oligonucleotide
gcggcggaaagcagcggua

SEQ ID NO: 99652 - RNA, 19 nt, Artificial Sequence
  Description of Artificial Sequence: Synthetic oligonucleotide
acccacgcgcccgccgggg

SEQ ID NO: 99653 - RNA, 19 nt, Artificial Sequence
  Description of Artificial Sequence: Synthetic oligonucleotide
ggaagucggcgagcggcug

SEQ ID NO: 99654 - RNA, 19 nt, Artificial Sequence
  Description of Artificial Sequence: Synthetic oligonucleotide
gcagcagcaaagaacuuuc

SEQ ID NO: 99655 - RNA, 19 nt, Artificial Sequence
  Description of Artificial Sequence: Synthetic oligonucleotide
cccggcugggaggaccgga

SEQ ID NO: 99656 - RNA, 19 nt, Artificial Sequence
  Description of Artificial Sequence: Synthetic oligonucleotide
agacaaguggcagaguccc

SEQ ID NO: 99657 - RNA, 19 nt, Artificial Sequence
  Description of Artificial Sequence: Synthetic oligonucleotide
cggagcgaacuuuugcaag

SEQ ID NO: 99658 - RNA, 19 nt, Artificial Sequence
  Description of Artificial Sequence: Synthetic oligonucleotide
gccuuuccugcgucuuagg

SEQ ID NO: 99659 - RNA, 19 nt, Artificial Sequence
  Description of Artificial Sequence: Synthetic oligonucleotide
gcuucuccacggcgguaaa

SEQ ID NO: 99660 - RNA, 19 nt, Artificial Sequence
  Description of Artificial Sequence: Synthetic oligonucleotide
agaccagaaggcggcggag

SEQ ID NO: 99661 - RNA, 19 nt, Artificial Sequence
  Description of Artificial Sequence: Synthetic oligonucleotide
gagccacgcaagagaagaa

SEQ ID NO: 99662 - RNA, 19 nt, Artificial Sequence
  Description of Artificial Sequence: Synthetic oligonucleotide
aggacgugcgcucagcuuc

SEQ ID NO: 99663 - RNA, 19 nt, Artificial Sequence
  Description of Artificial Sequence: Synthetic oligonucleotide
cgcucgcaccgguuguuga

SEQ ID NO: 99664 - RNA, 19 nt, Artificial Sequence
  Description of Artificial Sequence: Synthetic oligonucleotide
aacuugggcgagcgcgagc

SEQ ID NO: 99665 - RNA, 19 nt, Artificial Sequence
  Description of Artificial Sequence: Synthetic oligonucleotide
ccgcggcugccgggcgccc

SEQ ID NO: 99666 - RNA, 19 nt, Artificial Sequence
  Description of Artificial Sequence: Synthetic oligonucleotide
cccucccccuagcagcgga

SEQ ID NO: 99667 - RNA, 19 nt, Artificial Sequence
  Description of Artificial Sequence: Synthetic oligonucleotide
aggaggggacaagucgucg

SEQ ID NO: 99668 - RNA, 19 nt, Artificial Sequence
  Description of Artificial Sequence: Synthetic oligonucleotide
ggaguccgggcggccaaga

SEQ ID NO: 99669 - RNA, 19 nt, Artificial Sequence
  Description of Artificial Sequence: Synthetic oligonucleotide
acccgccgccggccggcca

SEQ ID NO: 99670 - RNA, 19 nt, Artificial Sequence
  Description of Artificial Sequence: Synthetic oligonucleotide
acugcaggguccgcacuga

SEQ ID NO: 99671 - RNA, 19 nt, Artificial Sequence
  Description of Artificial Sequence: Synthetic oligonucleotide
auccgcuccgcggggagag

SEQ ID NO: 99672 - RNA, 19 nt, Artificial Sequence
  Description of Artificial Sequence: Synthetic oligonucleotide
gccgcugcucugggaagug

SEQ ID NO: 99673 - RNA, 19 nt, Artificial Sequence
  Description of Artificial Sequence: Synthetic oligonucleotide
gaguucgccugcggacucc

SEQ ID NO: 99674 - RNA, 19 nt, Artificial Sequence
  Description of Artificial Sequence: Synthetic oligonucleotide
cgaggaaccgcugcgcccg

SEQ ID NO: 99675 - RNA, 19 nt, Artificial Sequence
  Description of Artificial Sequence: Synthetic oligonucleotide
gaagagcgcucagugagug

SEQ ID NO: 99676 - RNA, 19 nt, Artificial Sequence
  Description of Artificial Sequence: Synthetic oligonucleotide
gaccgcgacuuuucaaagc

SEQ ID NO: 99677 - RNA, 19 nt, Artificial Sequence
  Description of Artificial Sequence: Synthetic oligonucleotide
ccggguagcgcgcgcgagu

SEQ ID NO: 99678 - RNA, 19 nt, Artificial Sequence
  Description of Artificial Sequence: Synthetic oligonucleotide
ucgacaaguaagagugcgg

SEQ ID NO: 99679 - RNA, 19 nt, Artificial Sequence
  Description of Artificial Sequence: Synthetic oligonucleotide
ggaggcaucuuaauuaacc

SEQ ID NO: 99680 - RNA, 19 nt, Artificial Sequence
  Description of Artificial Sequence: Synthetic oligonucleotide
ccugcgcucccuggagcga

SEQ ID NO: 99681 - RNA, 19 nt, Artificial Sequence
  Description of Artificial Sequence: Synthetic oligonucleotide
agcuggugaggagggcgca

SEQ ID NO: 99682 - RNA, 19 nt, Artificial Sequence
  Description of Artificial Sequence: Synthetic oligonucleotide
agcggggacgacagccagc

SEQ ID NO: 99683 - RNA, 19 nt, Artificial Sequence
  Description of Artificial Sequence: Synthetic oligonucleotide
cgggugcgugcgcucuuag

SEQ ID NO: 99684 - RNA, 19 nt, Artificial Sequence
  Description of Artificial Sequence: Synthetic oligonucleotide
gagaaacuuucccugucaa

SEQ ID NO: 99685 - RNA, 19 nt, Artificial Sequence
  Description of Artificial Sequence: Synthetic oligonucleotide
aaggcuccggggggcgcgg

SEQ ID NO: 99686 - RNA, 19 nt, Artificial Sequence
  Description of Artificial Sequence: Synthetic oligonucleotide
ggugucccccgcuugccag

SEQ ID NO: 99687 - RNA, 19 nt, Artificial Sequence
  Description of Artificial Sequence: Synthetic oligonucleotide
gagcccuguugcggccccg

SEQ ID NO: 99688 - RNA, 19 nt, Artificial Sequence
  Description of Artificial Sequence: Synthetic oligonucleotide
gaaacuugugcgcgcagcc

SEQ ID NO: 99689 - RNA, 19 nt, Artificial Sequence
  Description of Artificial Sequence: Synthetic oligonucleotide
ccaaacuaaccucacguga

SEQ ID NO: 99690 - RNA, 19 nt, Artificial Sequence
  Description of Artificial Sequence: Synthetic oligonucleotide
aagugacggacuguucuau

SEQ ID NO: 99691 - RNA, 19 nt, Artificial Sequence
  Description of Artificial Sequence: Synthetic oligonucleotide
ugacugcaaagauggaaac

SEQ ID NO: 99692 - RNA, 19 nt, Artificial Sequence
  Description of Artificial Sequence: Synthetic oligonucleotide
cgaccuucuaugacgaugc

SEQ ID NO: 99693 - RNA, 19 nt, Artificial Sequence
  Description of Artificial Sequence: Synthetic oligonucleotide
cccucaacgccucguuccu

SEQ ID NO: 99694 - RNA, 19 nt, Artificial Sequence
  Description of Artificial Sequence: Synthetic oligonucleotide
ucccguccgagagcggacc

SEQ ID NO: 99695 - RNA, 19 nt, Artificial Sequence
  Description of Artificial Sequence: Synthetic oligonucleotide
cuuauggcuacaguaaccc

SEQ ID NO: 99696 - RNA, 19 nt, Artificial Sequence
  Description of Artificial Sequence: Synthetic oligonucleotide
ccaagauccugaaacagag

SEQ ID NO: 99697 - RNA, 19 nt, Artificial Sequence
  Description of Artificial Sequence: Synthetic oligonucleotide
gcaugacccugaaccuggc

SEQ ID NO: 99698 - RNA, 19 nt, Artificial Sequence
  Description of Artificial Sequence: Synthetic oligonucleotide
ccgacccaguggggagccu

SEQ ID NO: 99699 - RNA, 19 nt, Artificial Sequence
  Description of Artificial Sequence: Synthetic oligonucleotide
ugaagccgcaccuccgcgc

SEQ ID NO: 99700 - RNA, 19 nt, Artificial Sequence
  Description of Artificial Sequence: Synthetic oligonucleotide
ccaagaacucggaccuccu

SEQ ID NO: 99701 - RNA, 19 nt, Artificial Sequence
  Description of Artificial Sequence: Synthetic oligonucleotide
ucaccucgcccgacguggg

SEQ ID NO: 99702 - RNA, 19 nt, Artificial Sequence
  Description of Artificial Sequence: Synthetic oligonucleotide
ggcugcucaagcuggcguc

SEQ ID NO: 99703 - RNA, 19 nt, Artificial Sequence
  Description of Artificial Sequence: Synthetic oligonucleotide
cgcccgagcuggagcgccu

SEQ ID NO: 99704 - RNA, 19 nt, Artificial Sequence
  Description of Artificial Sequence: Synthetic oligonucleotide
ugauaauccaguccagcaa

SEQ ID NO: 99705 - RNA, 19 nt, Artificial Sequence
  Description of Artificial Sequence: Synthetic oligonucleotide
acgggcacaucaccaccac

SEQ ID NO: 99706 - RNA, 19 nt, Artificial Sequence
  Description of Artificial Sequence: Synthetic oligonucleotide
cgccgacccccacccaguu

SEQ ID NO: 99707 - RNA, 19 nt, Artificial Sequence
  Description of Artificial Sequence: Synthetic oligonucleotide
uccugugccccaagaacgu

SEQ ID NO: 99708 - RNA, 19 nt, Artificial Sequence
  Description of Artificial Sequence: Synthetic oligonucleotide
ugacagaugagcaggaggg

SEQ ID NO: 99709 - RNA, 19 nt, Artificial Sequence
  Description of Artificial Sequence: Synthetic oligonucleotide
gcuucgccgagggcuucgu

SEQ ID NO: 99710 - RNA, 19 nt, Artificial Sequence
  Description of Artificial Sequence: Synthetic oligonucleotide
ugcgcgcccuggccgaacu

SEQ ID NO: 99711 - RNA, 19 nt, Artificial Sequence
  Description of Artificial Sequence: Synthetic oligonucleotide
ugcacagccagaacacgcu

SEQ ID NO: 99712 - RNA, 19 nt, Artificial Sequence
  Description of Artificial Sequence: Synthetic oligonucleotide
ugcccagcgucacgucggc

SEQ ID NO: 99713 - RNA, 19 nt, Artificial Sequence
  Description of Artificial Sequence: Synthetic oligonucleotide
cggcgcagccggucaacgg

SEQ ID NO: 99714 - RNA, 19 nt, Artificial Sequence
  Description of Artificial Sequence: Synthetic oligonucleotide
gggcaggcaugguggcucc

SEQ ID NO: 99715 - RNA, 19 nt, Artificial Sequence
  Description of Artificial Sequence: Synthetic oligonucleotide
ccgcgguagccucgguggc

SEQ ID NO: 99716 - RNA, 19 nt, Artificial Sequence
  Description of Artificial Sequence: Synthetic oligonucleotide
cagggggcagcggcagcgg

SEQ ID NO: 99717 - RNA, 19 nt, Artificial Sequence
  Description of Artificial Sequence: Synthetic oligonucleotide
gcggcuucagcgccagccu

SEQ ID NO: 99718 - RNA, 19 nt, Artificial Sequence
  Description of Artificial Sequence: Synthetic oligonucleotide
ugcacagcgagccgccggu

SEQ ID NO: 99719 - RNA, 19 nt, Artificial Sequence
  Description of Artificial Sequence: Synthetic oligonucleotide
ucuacgcaaaccucagcaa

SEQ ID NO: 99720 - RNA, 19 nt, Artificial Sequence
  Description of Artificial Sequence: Synthetic oligonucleotide
acuucaacccaggcgcgcu

SEQ ID NO: 99721 - RNA, 19 nt, Artificial Sequence
  Description of Artificial Sequence: Synthetic oligonucleotide
ugagcagcggcggcggggc

SEQ ID NO: 99722 - RNA, 19 nt, Artificial Sequence
  Description of Artificial Sequence: Synthetic oligonucleotide
cgcccuccuacggcgcggc

SEQ ID NO: 99723 - RNA, 19 nt, Artificial Sequence
  Description of Artificial Sequence: Synthetic oligonucleotide
ccggccuggccuuucccgc

SEQ ID NO: 99724 - RNA, 19 nt, Artificial Sequence
  Description of Artificial Sequence: Synthetic oligonucleotide
cgcaaccccagcagcagca

SEQ ID NO: 99725 - RNA, 19 nt, Artificial Sequence
  Description of Artificial Sequence: Synthetic oligonucleotide
agcagccgccgcaccaccu

SEQ ID NO: 99726 - RNA, 19 nt, Artificial Sequence
  Description of Artificial Sequence: Synthetic oligonucleotide
ugccccagcagaugcccgu

SEQ ID NO: 99727 - RNA, 19 nt, Artificial Sequence
  Description of Artificial Sequence: Synthetic oligonucleotide
ugcagcacccgcggcugca

SEQ ID NO: 99728 - RNA, 19 nt, Artificial Sequence
  Description of Artificial Sequence: Synthetic oligonucleotide
aggcccugaaggaggagcc

SEQ ID NO: 99729 - RNA, 19 nt, Artificial Sequence
  Description of Artificial Sequence: Synthetic oligonucleotide
cucagacagugcccgagau

SEQ ID NO: 99730 - RNA, 19 nt, Artificial Sequence
  Description of Artificial Sequence: Synthetic oligonucleotide
ugcccggcgagacaccgcc

SEQ ID NO: 99731 - RNA, 19 nt, Artificial Sequence
  Description of Artificial Sequence: Synthetic oligonucleotide
cccugucccccaucgacau

SEQ ID NO: 99732 - RNA, 19 nt, Artificial Sequence
  Description of Artificial Sequence: Synthetic oligonucleotide
uggagucccaggagcggau

SEQ ID NO: 99733 - RNA, 19 nt, Artificial Sequence
  Description of Artificial Sequence: Synthetic oligonucleotide
ucaaggcggagaggaagcg

SEQ ID NO: 99734 - RNA, 19 nt, Artificial Sequence
  Description of Artificial Sequence: Synthetic oligonucleotide
gcaugaggaaccgcaucgc

SEQ ID NO: 99735 - RNA, 19 nt, Artificial Sequence
  Description of Artificial Sequence: Synthetic oligonucleotide
cugccuccaagugccgaaa

SEQ ID NO: 99736 - RNA, 19 nt, Artificial Sequence
  Description of Artificial Sequence: Synthetic oligonucleotide
aaaggaagcuggagagaau

SEQ ID NO: 99737 - RNA, 19 nt, Artificial Sequence
  Description of Artificial Sequence: Synthetic oligonucleotide
ucgcccggcuggaggaaaa

SEQ ID NO: 99738 - RNA, 19 nt, Artificial Sequence
  Description of Artificial Sequence: Synthetic oligonucleotide
aagugaaaaccuugaaagc

SEQ ID NO: 99739 - RNA, 19 nt, Artificial Sequence
  Description of Artificial Sequence: Synthetic oligonucleotide
cucagaacucggagcuggc

SEQ ID NO: 99740 - RNA, 19 nt, Artificial Sequence
  Description of Artificial Sequence: Synthetic oligonucleotide
cguccacggccaacaugcu

SEQ ID NO: 99741 - RNA, 19 nt, Artificial Sequence
  Description of Artificial Sequence: Synthetic oligonucleotide
ucagggaacagguggcaca

SEQ ID NO: 99742 - RNA, 19 nt, Artificial Sequence
  Description of Artificial Sequence: Synthetic oligonucleotide
agcuuaaacagaaagucau

SEQ ID NO: 99743 - RNA, 19 nt, Artificial Sequence
  Description of Artificial Sequence: Synthetic oligonucleotide
ugaaccacguuaacagugg

SEQ ID NO: 99744 - RNA, 19 nt, Artificial Sequence
  Description of Artificial Sequence: Synthetic oligonucleotide
ggugccaacucaugcuaac

SEQ ID NO: 99745 - RNA, 19 nt, Artificial Sequence
  Description of Artificial Sequence: Synthetic oligonucleotide
cgcagcaguugcaaacauu

SEQ ID NO: 99746 - RNA, 19 nt, Artificial Sequence
  Description of Artificial Sequence: Synthetic oligonucleotide
uuugaagagagaccgucgg

SEQ ID NO: 99747 - RNA, 19 nt, Artificial Sequence
  Description of Artificial Sequence: Synthetic oligonucleotide
ggggcugaggggcaacgaa

SEQ ID NO: 99748 - RNA, 19 nt, Artificial Sequence
  Description of Artificial Sequence: Synthetic oligonucleotide
agaaaaaaaauaacacaga

SEQ ID NO: 99749 - RNA, 19 nt, Artificial Sequence
  Description of Artificial Sequence: Synthetic oligonucleotide
agagacagacuugagaacu

SEQ ID NO: 99750 - RNA, 19 nt, Artificial Sequence
  Description of Artificial Sequence: Synthetic oligonucleotide
uugacaaguugcgacggag

SEQ ID NO: 99751 - RNA, 19 nt, Artificial Sequence
  Description of Artificial Sequence: Synthetic oligonucleotide
gagaaaaaagaaguguccg

SEQ ID NO: 99752 - RNA, 19 nt, Artificial Sequence
  Description of Artificial Sequence: Synthetic oligonucleotide
gagaacuaaagccaagggu

SEQ ID NO: 99753 - RNA, 19 nt, Artificial Sequence
  Description of Artificial Sequence: Synthetic oligonucleotide
uauccaaguuggacugggu

SEQ ID NO: 99754 - RNA, 19 nt, Artificial Sequence
  Description of Artificial Sequence: Synthetic oligonucleotide
uugcguccugacggcgccc

SEQ ID NO: 99755 - RNA, 19 nt, Artificial Sequence
  Description of Artificial Sequence: Synthetic oligonucleotide
cccagugugcacgaguggg

SEQ ID NO: 99756 - RNA, 19 nt, Artificial Sequence
  Description of Artificial Sequence: Synthetic oligonucleotide
gaaggacuuggcgcgcccu

SEQ ID NO: 99757 - RNA, 19 nt, Artificial Sequence
  Description of Artificial Sequence: Synthetic oligonucleotide
ucccuuggcguggagccag

SEQ ID NO: 99758 - RNA, 19 nt, Artificial Sequence
  Description of Artificial Sequence: Synthetic oligonucleotide
gggagcggccgccugcggg

SEQ ID NO: 99759 - RNA, 19 nt, Artificial Sequence
  Description of Artificial Sequence: Synthetic oligonucleotide
gcugccccgcuuugcggac

SEQ ID NO: 99760 - RNA, 19 nt, Artificial Sequence
  Description of Artificial Sequence: Synthetic oligonucleotide
cgggcuguccccgcgcgaa

SEQ ID NO: 99761 - RNA, 19 nt, Artificial Sequence
  Description of Artificial Sequence: Synthetic oligonucleotide
acggaacguuggacuuuuc

SEQ ID NO: 99762 - RNA, 19 nt, Artificial Sequence
  Description of Artificial Sequence: Synthetic oligonucleotide
cguuaacauugaccaagaa

SEQ ID NO: 99763 - RNA, 19 nt, Artificial Sequence
  Description of Artificial Sequence: Synthetic oligonucleotide
acugcauggaccuaacauu

SEQ ID NO: 99764 - RNA, 19 nt, Artificial Sequence
  Description of Artificial Sequence: Synthetic oligonucleotide
ucgaucucauucaguauua

SEQ ID NO: 99765 - RNA, 19 nt, Artificial Sequence
  Description of Artificial Sequence: Synthetic oligonucleotide
aaaggggggagggggaggg

SEQ ID NO: 99766 - RNA, 19 nt, Artificial Sequence
  Description of Artificial Sequence: Synthetic oligonucleotide
ggguuacaaacugcaauag

SEQ ID NO: 99767 - RNA, 19 nt, Artificial Sequence
  Description of Artificial Sequence: Synthetic oligonucleotide
gagacuguagauugcuucu

SEQ ID NO: 99768 - RNA, 19 nt, Artificial Sequence
  Description of Artificial Sequence: Synthetic oligonucleotide
uguaguacuccuuaagaac

SEQ ID NO: 99769 - RNA, 19 nt, Artificial Sequence
  Description of Artificial Sequence: Synthetic oligonucleotide
cacaaagcggggggagggu

SEQ ID NO: 99770 - RNA, 19 nt, Artificial Sequence
  Description of Artificial Sequence: Synthetic oligonucleotide
uuggggaggggcggcagga

SEQ ID NO: 99771 - RNA, 19 nt, Artificial Sequence
  Description of Artificial Sequence: Synthetic oligonucleotide
agggagguuugugagagcg

SEQ ID NO: 99772 - RNA, 19 nt, Artificial Sequence
  Description of Artificial Sequence: Synthetic oligonucleotide
gaggcugagccuacagaug

SEQ ID NO: 99773 - RNA, 19 nt, Artificial Sequence
  Description of Artificial Sequence: Synthetic oligonucleotide
gaacucuuucuggccugcc

SEQ ID NO: 99774 - RNA, 19 nt, Artificial Sequence
  Description of Artificial Sequence: Synthetic oligonucleotide
cuucguuaacuguguaugu

SEQ ID NO: 99775 - RNA, 19 nt, Artificial Sequence
  Description of Artificial Sequence: Synthetic oligonucleotide
uacauauauauauuuuuua

SEQ ID NO: 99776 - RNA, 19 nt, Artificial Sequence
  Description of Artificial Sequence: Synthetic oligonucleotide
aauuugaugaaagcugauu

SEQ ID NO: 99777 - RNA, 19 nt, Artificial Sequence
  Description of Artificial Sequence: Synthetic oligonucleotide
uacugucaauaaacagcuu

SEQ ID NO: 99778 - RNA, 19 nt, Artificial Sequence
  Description of Artificial Sequence: Synthetic oligonucleotide
ucaugccuuuguaaguuau

SEQ ID NO: 99779 - RNA, 19 nt, Artificial Sequence
  Description of Artificial Sequence: Synthetic oligonucleotide
uuucuuguuuguuuguuug

SEQ ID NO: 99780 - RNA, 19 nt, Artificial Sequence
  Description of Artificial Sequence: Synthetic oligonucleotide
ggguauccugcccaguguu

SEQ ID NO: 99781 - RNA, 19 nt, Artificial Sequence
  Description of Artificial Sequence: Synthetic oligonucleotide
uguuuguaaauaagagauu

SEQ ID NO: 99782 - RNA, 19 nt, Artificial Sequence
  Description of Artificial Sequence: Synthetic oligonucleotide
uuggagcacucugaguuua

SEQ ID NO: 99783 - RNA, 19 nt, Artificial Sequence
  Description of Artificial Sequence: Synthetic oligonucleotide
accauuuguaauaaaguau

SEQ ID NO: 99784 - RNA, 19 nt, Artificial Sequence
  Description of Artificial Sequence: Synthetic oligonucleotide
uauaauuuuuuuauguuuu

SEQ ID NO: 99785 - RNA, 19 nt, Artificial Sequence
  Description of Artificial Sequence: Synthetic oligonucleotide
uguuucugaaaauuccaga

SEQ ID NO: 99786 - RNA, 19 nt, Artificial Sequence
  Description of Artificial Sequence: Synthetic oligonucleotide
aaaggauauuuaagaaaau

SEQ ID NO: 99787 - RNA, 19 nt, Artificial Sequence
  Description of Artificial Sequence: Synthetic oligonucleotide
uacaauaaacuauuggaaa

SEQ ID NO: 99788 - RNA, 19 nt, Artificial Sequence
  Description of Artificial Sequence: Synthetic oligonucleotide
aguacuccccuaaccucuu

SEQ ID NO: 99789 - RNA, 19 nt, Artificial Sequence
  Description of Artificial Sequence: Synthetic oligonucleotide
uuucugcaucaucuguaga

SEQ ID NO: 99790 - RNA, 19 nt, Artificial Sequence
  Description of Artificial Sequence: Synthetic oligonucleotide
auacuagcuaucuaggugg

SEQ ID NO: 99791 - RNA, 19 nt, Artificial Sequence
  Description of Artificial Sequence: Synthetic oligonucleotide
gaguugaaagaguuaagaa

SEQ ID NO: 99792 - RNA, 19 nt, Artificial Sequence
  Description of Artificial Sequence: Synthetic oligonucleotide
augucgauuaaaaucacuc

SEQ ID NO: 99793 - RNA, 19 nt, Artificial Sequence
  Description of Artificial Sequence: Synthetic oligonucleotide
cucagugcuucuuacuauu

SEQ ID NO: 99794 - RNA, 19 nt, Artificial Sequence
  Description of Artificial Sequence: Synthetic oligonucleotide
uaagcaguaaaaacuguuc

SEQ ID NO: 99795 - RNA, 19 nt, Artificial Sequence
  Description of Artificial Sequence: Synthetic oligonucleotide
cucuauuagacuuuagaaa

SEQ ID NO: 99796 - RNA, 19 nt, Artificial Sequence
  Description of Artificial Sequence: Synthetic oligonucleotide
auaaauguaccugauguac

SEQ ID NO: 99797 - RNA, 19 nt, Artificial Sequence
  Description of Artificial Sequence: Synthetic oligonucleotide
ccugaugcuauggucaggu

SEQ ID NO: 99798 - RNA, 19 nt, Artificial Sequence
  Description of Artificial Sequence: Synthetic oligonucleotide
uuauacuccuccuccccca

SEQ ID NO: 99799 - RNA, 19 nt, Artificial Sequence
  Description of Artificial Sequence: Synthetic oligonucleotide
agcuaucuauauggaauug

SEQ ID NO: 99800 - RNA, 19 nt, Artificial Sequence
  Description of Artificial Sequence: Synthetic oligonucleotide
gcuuaccaaaggauagugc

SEQ ID NO: 99801 - RNA, 19 nt, Artificial Sequence
  Description of Artificial Sequence: Synthetic oligonucleotide
cgauguuucaggaggcugg

SEQ ID NO: 99802 - RNA, 19 nt, Artificial Sequence
  Description of Artificial Sequence: Synthetic oligonucleotide
gaggaagggggguugcagu

SEQ ID NO: 99803 - RNA, 19 nt, Artificial Sequence
  Description of Artificial Sequence: Synthetic oligonucleotide
uggagagggacagcccacu

SEQ ID NO: 99804 - RNA, 19 nt, Artificial Sequence
  Description of Artificial Sequence: Synthetic oligonucleotide
ugagaagucaaacauuuca

SEQ ID NO: 99805 - RNA, 19 nt, Artificial Sequence
  Description of Artificial Sequence: Synthetic oligonucleotide
aaaguuuggauuguaucaa

SEQ ID NO: 99806 - RNA, 19 nt, Artificial Sequence
  Description of Artificial Sequence: Synthetic oligonucleotide
aguggcaugugcugugacc

SEQ ID NO: 99807 - RNA, 19 nt, Artificial Sequence
  Description of Artificial Sequence: Synthetic oligonucleotide
cauuuauaauguuaguaga

SEQ ID NO: 99808 - RNA, 19 nt, Artificial Sequence
  Description of Artificial Sequence: Synthetic oligonucleotide
aaauuuuacaauaggugcu

SEQ ID NO: 99809 - RNA, 19 nt, Artificial Sequence
  Description of Artificial Sequence: Synthetic oligonucleotide
uuauucucaaagcaggaau

SEQ ID NO: 99810 - RNA, 19 nt, Artificial Sequence
  Description of Artificial Sequence: Synthetic oligonucleotide
uugguggcagauuuuacaa

SEQ ID NO: 99811 - RNA, 19 nt, Artificial Sequence
  Description of Artificial Sequence: Synthetic oligonucleotide
aaagauguauccuuccaau

SEQ ID NO: 99812 - RNA, 19 nt, Artificial Sequence
  Description of Artificial Sequence: Synthetic oligonucleotide
uuuggaaucuucucuuuga

SEQ ID NO: 99813 - RNA, 19 nt, Artificial Sequence
  Description of Artificial Sequence: Synthetic oligonucleotide
acaauuccuagauaaaaag

SEQ ID NO: 99814 - RNA, 19 nt, Artificial Sequence
  Description of Artificial Sequence: Synthetic oligonucleotide
gauggccuuugcuuaugaa

SEQ ID NO: 99815 - RNA, 19 nt, Artificial Sequence
  Description of Artificial Sequence: Synthetic oligonucleotide
auauuuauaacagcauucu

SEQ ID NO: 99816 - RNA, 19 nt, Artificial Sequence
  Description of Artificial Sequence: Synthetic oligonucleotide
uugucacaauaaauguauu

SEQ ID NO: 99817 - RNA, 25 nt, Artificial Sequence
  Description of Artificial Sequence: Synthetic oligonucleotide
gacaucaugggcuauuuuuaggggu

SEQ ID NO: 99818 - RNA, 25 nt, Artificial Sequence
  Description of Artificial Sequence: Synthetic oligonucleotide
uugacugguagcagauaaguguuga

SEQ ID NO: 99819 - RNA, 25 nt, Artificial Sequence
  Description of Artificial Sequence: Synthetic oligonucleotide
agcucgggcuggauaagggcucaga

SEQ ID NO: 99820 - RNA, 25 nt, Artificial Sequence
  Description of Artificial Sequence: Synthetic oligonucleotide
aguugcacugaguguggcugaagca

SEQ ID NO: 99821 - RNA, 25 nt, Artificial Sequence
  Description of Artificial Sequence: Synthetic oligonucleotide
agcgaggcgggaguggaggugcgcg

SEQ ID NO: 99822 - RNA, 25 nt, Artificial Sequence
  Description of Artificial Sequence: Synthetic oligonucleotide
ggagucaggcagacagacagacaca

SEQ ID NO: 99823 - RNA, 25 nt, Artificial Sequence
  Description of Artificial Sequence: Synthetic oligonucleotide
agccagccagccaggucggcaguau

SEQ ID NO: 99824 - RNA, 25 nt, Artificial Sequence
  Description of Artificial Sequence: Synthetic oligonucleotide
uaguccgaacugcaaaucuuauuuu

SEQ ID NO: 99825 - RNA, 25 nt, Artificial Sequence
  Description of Artificial Sequence: Synthetic oligonucleotide
ucuuuucaccuucucucuaacugcc

SEQ ID NO: 99826 - RNA, 25 nt, Artificial Sequence
  Description of Artificial Sequence: Synthetic oligonucleotide
ccagagcuagcgccuguggcucccg

SEQ ID NO: 99827 - RNA, 25 nt, Artificial Sequence
  Description of Artificial Sequence: Synthetic oligonucleotide
gggcugguguuucgggaguguccag

SEQ ID NO: 99828 - RNA, 25 nt, Artificial Sequence
  Description of Artificial Sequence: Synthetic oligonucleotide
gagagccuggucuccagccgccccc

SEQ ID NO: 99829 - RNA, 25 nt, Artificial Sequence
  Description of Artificial Sequence: Synthetic oligonucleotide
cgggaggagagcccugcugcccagg

SEQ ID NO: 99830 - RNA, 25 nt, Artificial Sequence
  Description of Artificial Sequence: Synthetic oligonucleotide
gcgcuguugacagcggcggaaagca

SEQ ID NO: 99831 - RNA, 25 nt, Artificial Sequence
  Description of Artificial Sequence: Synthetic oligonucleotide
agcgguacccacgcgcccgccgggg

SEQ ID NO: 99832 - RNA, 25 nt, Artificial Sequence
  Description of Artificial Sequence: Synthetic oligonucleotide
ggaagucggcgagcggcugcagcag

SEQ ID NO: 99833 - RNA, 25 nt, Artificial Sequence
  Description of Artificial Sequence: Synthetic oligonucleotide
gcaaagaacuuucccggcugggagg

SEQ ID NO: 99834 - RNA, 25 nt, Artificial Sequence
  Description of Artificial Sequence: Synthetic oligonucleotide
gaccggagacaaguggcagaguccc

SEQ ID NO: 99835 - RNA, 25 nt, Artificial Sequence
  Description of Artificial Sequence: Synthetic oligonucleotide
cggagcgaacuuuugcaagccuuuc

SEQ ID NO: 99836 - RNA, 25 nt, Artificial Sequence
  Description of Artificial Sequence: Synthetic oligonucleotide
ccugcgucuuaggcuucuccacggc

SEQ ID NO: 99837 - RNA, 25 nt, Artificial Sequence
  Description of Artificial Sequence: Synthetic oligonucleotide
cgguaaagaccagaaggcggcggag

SEQ ID NO: 99838 - RNA, 25 nt, Artificial Sequence
  Description of Artificial Sequence: Synthetic oligonucleotide
gagccacgcaagagaagaaggacgu

SEQ ID NO: 99839 - RNA, 25 nt, Artificial Sequence
  Description of Artificial Sequence: Synthetic oligonucleotide
ugcgcucagcuucgcucgcaccggu

SEQ ID NO: 99840 - RNA, 25 nt, Artificial Sequence
  Description of Artificial Sequence: Synthetic oligonucleotide
uuguugaacuugggcgagcgcgagc

SEQ ID NO: 99841 - RNA, 25 nt, Artificial Sequence
  Description of Artificial Sequence: Synthetic oligonucleotide
ccgcggcugccgggcgcccccuccc

SEQ ID NO: 99842 - RNA, 25 nt, Artificial Sequence
  Description of Artificial Sequence: Synthetic oligonucleotide
cccuagcagcggaggaggggacaag

SEQ ID NO: 99843 - RNA, 25 nt, Artificial Sequence
  Description of Artificial Sequence: Synthetic oligonucleotide
gucgucggaguccgggcggccaaga

SEQ ID NO: 99844 - RNA, 25 nt, Artificial Sequence
  Description of Artificial Sequence: Synthetic oligonucleotide
acccgccgccggccggccacugcag

SEQ ID NO: 99845 - RNA, 25 nt, Artificial Sequence
  Description of Artificial Sequence: Synthetic oligonucleotide
ggguccgcacugauccgcuccgcgg

SEQ ID NO: 99846 - RNA, 25 nt, Artificial Sequence
  Description of Artificial Sequence: Synthetic oligonucleotide
gggagagccgcugcucugggaagug

SEQ ID NO: 99847 - RNA, 25 nt, Artificial Sequence
  Description of Artificial Sequence: Synthetic oligonucleotide
gaguucgccugcggacuccgaggaa

SEQ ID NO: 99848 - RNA, 25 nt, Artificial Sequence
  Description of Artificial Sequence: Synthetic oligonucleotide
accgcugcgcccgaagagcgcucag

SEQ ID NO: 99849 - RNA, 25 nt, Artificial Sequence
  Description of Artificial Sequence: Synthetic oligonucleotide
gugagugaccgcgacuuuucaaagc

SEQ ID NO: 99850 - RNA, 25 nt, Artificial Sequence
  Description of Artificial Sequence: Synthetic oligonucleotide
ccggguagcgcgcgcgagucgacaa

SEQ ID NO: 99851 - RNA, 25 nt, Artificial Sequence
  Description of Artificial Sequence: Synthetic oligonucleotide
aguaagagugcgggaggcaucuuaa

SEQ ID NO: 99852 - RNA, 25 nt, Artificial Sequence
  Description of Artificial Sequence: Synthetic oligonucleotide
auuaacccugcgcucccuggagcga

SEQ ID NO: 99853 - RNA, 25 nt, Artificial Sequence
  Description of Artificial Sequence: Synthetic oligonucleotide
agcuggugaggagggcgcagcgggg

SEQ ID NO: 99854 - RNA, 25 nt, Artificial Sequence
  Description of Artificial Sequence: Synthetic oligonucleotide
gacgacagccagcgggugcgugcgc

SEQ ID NO: 99855 - RNA, 25 nt, Artificial Sequence
  Description of Artificial Sequence: Synthetic oligonucleotide
cucuuagagaaacuuucccugucaa

SEQ ID NO: 99856 - RNA, 25 nt, Artificial Sequence
  Description of Artificial Sequence: Synthetic oligonucleotide
aaggcuccggggggcgcgggugucc

SEQ ID NO: 99857 - RNA, 25 nt, Artificial Sequence
  Description of Artificial Sequence: Synthetic oligonucleotide
ccccgcuugccagagcccuguugcg

SEQ ID NO: 99858 - RNA, 25 nt, Artificial Sequence
  Description of Artificial Sequence: Synthetic oligonucleotide
ggccccgaaacuugugcgcgcagcc

SEQ ID NO: 99859 - RNA, 25 nt, Artificial Sequence
  Description of Artificial Sequence: Synthetic oligonucleotide
ccaaacuaaccucacgugaagugac

SEQ ID NO: 99860 - RNA, 25 nt, Artificial Sequence
  Description of Artificial Sequence: Synthetic oligonucleotide
cggacuguucuaugacugcaaagau

SEQ ID NO: 99861 - RNA, 25 nt, Artificial Sequence
  Description of Artificial Sequence: Synthetic oligonucleotide
uggaaacgaccuucuaugacgaugc

SEQ ID NO: 99862 - RNA, 25 nt, Artificial Sequence
  Description of Artificial Sequence: Synthetic oligonucleotide
cccucaacgccucguuccucccguc

SEQ ID NO: 99863 - RNA, 25 nt, Artificial Sequence
  Description of Artificial Sequence: Synthetic oligonucleotide
ccgagagcggaccuuauggcuacag

SEQ ID NO: 99864 - RNA, 25 nt, Artificial Sequence
  Description of Artificial Sequence: Synthetic oligonucleotide
guaaccccaagauccugaaacagag

SEQ ID NO: 99865 - RNA, 25 nt, Artificial Sequence
  Description of Artificial Sequence: Synthetic oligonucleotide
gcaugacccugaaccuggccgaccc

SEQ ID NO: 99866 - RNA, 25 nt, Artificial Sequence
  Description of Artificial Sequence: Synthetic oligonucleotide
caguggggagccugaagccgcaccu

SEQ ID NO: 99867 - RNA, 25 nt, Artificial Sequence
  Description of Artificial Sequence: Synthetic oligonucleotide
uccgcgccaagaacucggaccuccu

SEQ ID NO: 99868 - RNA, 25 nt, Artificial Sequence
  Description of Artificial Sequence: Synthetic oligonucleotide
ucaccucgcccgacguggggcugcu

SEQ ID NO: 99869 - RNA, 25 nt, Artificial Sequence
  Description of Artificial Sequence: Synthetic oligonucleotide
ucaagcuggcgucgcccgagcugga

SEQ ID NO: 99870 - RNA, 25 nt, Artificial Sequence
  Description of Artificial Sequence: Synthetic oligonucleotide
agcgccugauaauccaguccagcaa

SEQ ID NO: 99871 - RNA, 25 nt, Artificial Sequence
  Description of Artificial Sequence: Synthetic oligonucleotide
acgggcacaucaccaccacgccgac

SEQ ID NO: 99872 - RNA, 25 nt, Artificial Sequence
  Description of Artificial Sequence: Synthetic oligonucleotide
cccccacccaguuccugugccccaa

SEQ ID NO: 99873 - RNA, 25 nt, Artificial Sequence
  Description of Artificial Sequence: Synthetic oligonucleotide
agaacgugacagaugagcaggaggg

SEQ ID NO: 99874 - RNA, 25 nt, Artificial Sequence
  Description of Artificial Sequence: Synthetic oligonucleotide
gcuucgccgagggcuucgugcgcgc

SEQ ID NO: 99875 - RNA, 25 nt, Artificial Sequence
  Description of Artificial Sequence: Synthetic oligonucleotide
cccuggccgaacugcacagccagaa

SEQ ID NO: 99876 - RNA, 25 nt, Artificial Sequence
  Description of Artificial Sequence: Synthetic oligonucleotide
acacgcugcccagcgucacgucggc

SEQ ID NO: 99877 - RNA, 25 nt, Artificial Sequence
  Description of Artificial Sequence: Synthetic oligonucleotide
cggcgcagccggucaacggggcagg

SEQ ID NO: 99878 - RNA, 25 nt, Artificial Sequence
  Description of Artificial Sequence: Synthetic oligonucleotide
gcaugguggcucccgcgguagccuc

SEQ ID NO: 99879 - RNA, 25 nt, Artificial Sequence
  Description of Artificial Sequence: Synthetic oligonucleotide
cgguggcagggggcagcggcagcgg

SEQ ID NO: 99880 - RNA, 25 nt, Artificial Sequence
  Description of Artificial Sequence: Synthetic oligonucleotide
gcggcuucagcgccagccugcacag

SEQ ID NO: 99881 - RNA, 25 nt, Artificial Sequence
  Description of Artificial Sequence: Synthetic oligonucleotide
gcgagccgccggucuacgcaaaccu

SEQ ID NO: 99882 - RNA, 25 nt, Artificial Sequence
  Description of Artificial Sequence: Synthetic oligonucleotide
ucagcaacuucaacccaggcgcgcu

SEQ ID NO: 99883 - RNA, 25 nt, Artificial Sequence
  Description of Artificial Sequence: Synthetic oligonucleotide
ugagcagcggcggcggggcgcccuc

SEQ ID NO: 99884 - RNA, 25 nt, Artificial Sequence
  Description of Artificial Sequence: Synthetic oligonucleotide
ccuacggcgcggccggccuggccuu

SEQ ID NO: 99885 - RNA, 25 nt, Artificial Sequence
  Description of Artificial Sequence: Synthetic oligonucleotide
uucccgcgcaaccccagcagcagca

SEQ ID NO: 99886 - RNA, 25 nt, Artificial Sequence
  Description of Artificial Sequence: Synthetic oligonucleotide
agcagccgccgcaccaccugcccca

SEQ ID NO: 99887 - RNA, 25 nt, Artificial Sequence
  Description of Artificial Sequence: Synthetic oligonucleotide
agcagaugcccgugcagcacccgcg

SEQ ID NO: 99888 - RNA, 25 nt, Artificial Sequence
  Description of Artificial Sequence: Synthetic oligonucleotide
ggcugcaggcccugaaggaggagcc

SEQ ID NO: 99889 - RNA, 25 nt, Artificial Sequence
  Description of Artificial Sequence: Synthetic oligonucleotide
cucagacagugcccgagaugcccgg

SEQ ID NO: 99890 - RNA, 25 nt, Artificial Sequence
  Description of Artificial Sequence: Synthetic oligonucleotide
gcgagacaccgccccugucccccau

SEQ ID NO: 99891 - RNA, 25 nt, Artificial Sequence
  Description of Artificial Sequence: Synthetic oligonucleotide
ucgacauggagucccaggagcggau

SEQ ID NO: 99892 - RNA, 25 nt, Artificial Sequence
  Description of Artificial Sequence: Synthetic oligonucleotide
ucaaggcggagaggaagcgcaugag

SEQ ID NO: 99893 - RNA, 25 nt, Artificial Sequence
  Description of Artificial Sequence: Synthetic oligonucleotide
ggaaccgcaucgcugccuccaagug

SEQ ID NO: 99894 - RNA, 25 nt, Artificial Sequence
  Description of Artificial Sequence: Synthetic oligonucleotide
gccgaaaaaggaagcuggagagaau

SEQ ID NO: 99895 - RNA, 25 nt, Artificial Sequence
  Description of Artificial Sequence: Synthetic oligonucleotide
ucgcccggcuggaggaaaaagugaa

SEQ ID NO: 99896 - RNA, 25 nt, Artificial Sequence
  Description of Artificial Sequence: Synthetic oligonucleotide
aaaccuugaaagcucagaacucgga

SEQ ID NO: 99897 - RNA, 25 nt, Artificial Sequence
  Description of Artificial Sequence: Synthetic oligonucleotide
agcuggcguccacggccaacaugcu

SEQ ID NO: 99898 - RNA, 25 nt, Artificial Sequence
  Description of Artificial Sequence: Synthetic oligonucleotide
ucagggaacagguggcacagcuuaa

SEQ ID NO: 99899 - RNA, 25 nt, Artificial Sequence
  Description of Artificial Sequence: Synthetic oligonucleotide
aacagaaagucaugaaccacguuaa

SEQ ID NO: 99900 - RNA, 25 nt, Artificial Sequence
  Description of Artificial Sequence: Synthetic oligonucleotide
acagugggugccaacucaugcuaac

SEQ ID NO: 99901 - RNA, 25 nt, Artificial Sequence
  Description of Artificial Sequence: Synthetic oligonucleotide
cgcagcaguugcaaacauuuugaag

SEQ ID NO: 99902 - RNA, 25 nt, Artificial Sequence
  Description of Artificial Sequence: Synthetic oligonucleotide
gagagaccgucgggggcugaggggc

SEQ ID NO: 99903 - RNA, 25 nt, Artificial Sequence
  Description of Artificial Sequence: Synthetic oligonucleotide
caacgaagaaaaaaaauaacacaga

SEQ ID NO: 99904 - RNA, 25 nt, Artificial Sequence
  Description of Artificial Sequence: Synthetic oligonucleotide
agagacagacuugagaacuugacaa

SEQ ID NO: 99905 - RNA, 25 nt, Artificial Sequence
  Description of Artificial Sequence: Synthetic oligonucleotide
aguugcgacggagagaaaaaagaag

SEQ ID NO: 99906 - RNA, 25 nt, Artificial Sequence
  Description of Artificial Sequence: Synthetic oligonucleotide
guguccgagaacuaaagccaagggu

SEQ ID NO: 99907 - RNA, 25 nt, Artificial Sequence
  Description of Artificial Sequence: Synthetic oligonucleotide
uauccaaguuggacuggguugcguc

SEQ ID NO: 99908 - RNA, 25 nt, Artificial Sequence
  Description of Artificial Sequence: Synthetic oligonucleotide
ccugacggcgcccccagugugcacg

SEQ ID NO: 99909 - RNA, 25 nt, Artificial Sequence
  Description of Artificial Sequence: Synthetic oligonucleotide
gagugggaaggacuuggcgcgcccu

SEQ ID NO: 99910 - RNA, 25 nt, Artificial Sequence
  Description of Artificial Sequence: Synthetic oligonucleotide
ucccuuggcguggagccagggagcg

SEQ ID NO: 99911 - RNA, 25 nt, Artificial Sequence
  Description of Artificial Sequence: Synthetic oligonucleotide
ggccgccugcgggcugccccgcuuu

SEQ ID NO: 99912 - RNA, 25 nt, Artificial Sequence
  Description of Artificial Sequence: Synthetic oligonucleotide
ugcggacgggcuguccccgcgcgaa

SEQ ID NO: 99913 - RNA, 25 nt, Artificial Sequence
  Description of Artificial Sequence: Synthetic oligonucleotide
acggaacguuggacuuuucguuaac

SEQ ID NO: 99914 - RNA, 25 nt, Artificial Sequence
  Description of Artificial Sequence: Synthetic oligonucleotide
cauugaccaagaacugcauggaccu

SEQ ID NO: 99915 - RNA, 25 nt, Artificial Sequence
  Description of Artificial Sequence: Synthetic oligonucleotide
uaacauucgaucucauucaguauua

SEQ ID NO: 99916 - RNA, 25 nt, Artificial Sequence
  Description of Artificial Sequence: Synthetic oligonucleotide
aaaggggggagggggaggggguuac

SEQ ID NO: 99917 - RNA, 25 nt, Artificial Sequence
  Description of Artificial Sequence: Synthetic oligonucleotide
caaacugcaauagagacuguagauu

SEQ ID NO: 99918 - RNA, 25 nt, Artificial Sequence
  Description of Artificial Sequence: Synthetic oligonucleotide
ugcuucuguaguacuccuuaagaac

SEQ ID NO: 99919 - RNA, 25 nt, Artificial Sequence
  Description of Artificial Sequence: Synthetic oligonucleotide
cacaaagcggggggaggguugggga

SEQ ID NO: 99920 - RNA, 25 nt, Artificial Sequence
  Description of Artificial Sequence: Synthetic oligonucleotide
aggggcggcaggagggagguuugug

SEQ ID NO: 99921 - RNA, 25 nt, Artificial Sequence
  Description of Artificial Sequence: Synthetic oligonucleotide
gagagcgaggcugagccuacagaug

SEQ ID NO: 99922 - RNA, 25 nt, Artificial Sequence
  Description of Artificial Sequence: Synthetic oligonucleotide
gaacucuuucuggccugccuucguu

SEQ ID NO: 99923 - RNA, 25 nt, Artificial Sequence
  Description of Artificial Sequence: Synthetic oligonucleotide
uaacuguguauguacauauauauau

SEQ ID NO: 99924 - RNA, 25 nt, Artificial Sequence
  Description of Artificial Sequence: Synthetic oligonucleotide
uuuuuuaauuugaugaaagcugauu

SEQ ID NO: 99925 - RNA, 25 nt, Artificial Sequence
  Description of Artificial Sequence: Synthetic oligonucleotide
uacugucaauaaacagcuucaugcc

SEQ ID NO: 99926 - RNA, 25 nt, Artificial Sequence
  Description of Artificial Sequence: Synthetic oligonucleotide
cuuuguaaguuauuucuuguuuguu

SEQ ID NO: 99927 - RNA, 25 nt, Artificial Sequence
  Description of Artificial Sequence: Synthetic oligonucleotide
uuguuuggguauccugcccaguguu

SEQ ID NO: 99928 - RNA, 25 nt, Artificial Sequence
  Description of Artificial Sequence: Synthetic oligonucleotide
uguuuguaaauaagagauuuggagc

SEQ ID NO: 99929 - RNA, 25 nt, Artificial Sequence
  Description of Artificial Sequence: Synthetic oligonucleotide
cacucugaguuuaccauuuguaaua

SEQ ID NO: 99930 - RNA, 25 nt, Artificial Sequence
  Description of Artificial Sequence: Synthetic oligonucleotide
aaaguauauaauuuuuuuauguuuu

SEQ ID NO: 99931 - RNA, 25 nt, Artificial Sequence
  Description of Artificial Sequence: Synthetic oligonucleotide
uguuucugaaaauuccagaaaggau

SEQ ID NO: 99932 - RNA, 25 nt, Artificial Sequence
  Description of Artificial Sequence: Synthetic oligonucleotide
uauuuaagaaaauacaauaaacuau

SEQ ID NO: 99933 - RNA, 25 nt, Artificial Sequence
  Description of Artificial Sequence: Synthetic oligonucleotide
uuggaaaguacuccccuaaccucuu

SEQ ID NO: 99934 - RNA, 25 nt, Artificial Sequence
  Description of Artificial Sequence: Synthetic oligonucleotide
uuucugcaucaucuguagauacuag

SEQ ID NO: 99935 - RNA, 25 nt, Artificial Sequence
  Description of Artificial Sequence: Synthetic oligonucleotide
gcuaucuagguggaguugaaagagu

SEQ ID NO: 99936 - RNA, 25 nt, Artificial Sequence
  Description of Artificial Sequence: Synthetic oligonucleotide
uuaagaaugucgauuaaaaucacuc

SEQ ID NO: 99937 - RNA, 25 nt, Artificial Sequence
  Description of Artificial Sequence: Synthetic oligonucleotide
cucagugcuucuuacuauuaagcag

SEQ ID NO: 99938 - RNA, 25 nt, Artificial Sequence
  Description of Artificial Sequence: Synthetic oligonucleotide
guaaaaacuguucucuauuagacuu

SEQ ID NO: 99939 - RNA, 25 nt, Artificial Sequence
  Description of Artificial Sequence: Synthetic oligonucleotide
uuagaaauaaauguaccugauguac

SEQ ID NO: 99940 - RNA, 25 nt, Artificial Sequence
  Description of Artificial Sequence: Synthetic oligonucleotide
ccugaugcuauggucagguuauacu

SEQ ID NO: 99941 - RNA, 25 nt, Artificial Sequence
  Description of Artificial Sequence: Synthetic oligonucleotide
uccuccucccccagcuaucuauaug

SEQ ID NO: 99942 - RNA, 25 nt, Artificial Sequence
  Description of Artificial Sequence: Synthetic oligonucleotide
ggaauugcuuaccaaaggauagugc

SEQ ID NO: 99943 - RNA, 25 nt, Artificial Sequence
  Description of Artificial Sequence: Synthetic oligonucleotide
cgauguuucaggaggcuggaggaag

SEQ ID NO: 99944 - RNA, 25 nt, Artificial Sequence
  Description of Artificial Sequence: Synthetic oligonucleotide
gggggguugcaguggagagggacag

SEQ ID NO: 99945 - RNA, 25 nt, Artificial Sequence
  Description of Artificial Sequence: Synthetic oligonucleotide
gcccacugagaagucaaacauuuca

SEQ ID NO: 99946 - RNA, 25 nt, Artificial Sequence
  Description of Artificial Sequence: Synthetic oligonucleotide
aaaguuuggauuguaucaaguggca

SEQ ID NO: 99947 - RNA, 25 nt, Artificial Sequence
  Description of Artificial Sequence: Synthetic oligonucleotide
augugcugugaccauuuauaauguu

SEQ ID NO: 99948 - RNA, 25 nt, Artificial Sequence
  Description of Artificial Sequence: Synthetic oligonucleotide
uaguagaaauuuuacaauaggugcu

SEQ ID NO: 99949 - RNA, 25 nt, Artificial Sequence
  Description of Artificial Sequence: Synthetic oligonucleotide
uuauucucaaagcaggaauuggugg

SEQ ID NO: 99950 - RNA, 25 nt, Artificial Sequence
  Description of Artificial Sequence: Synthetic oligonucleotide
gcagauuuuacaaaagauguauccu

SEQ ID NO: 99951 - RNA, 25 nt, Artificial Sequence
  Description of Artificial Sequence: Synthetic oligonucleotide
uuccaauuuggaaucuucucuuuga

SEQ ID NO: 99952 - RNA, 25 nt, Artificial Sequence
  Description of Artificial Sequence: Synthetic oligonucleotide
acaauuccuagauaaaaagauggcc

SEQ ID NO: 99953 - RNA, 25 nt, Artificial Sequence
  Description of Artificial Sequence: Synthetic oligonucleotide
cuuugcuuaugaauauuuauaacag

SEQ ID NO: 99954 - RNA, 25 nt, Artificial Sequence
  Description of Artificial Sequence: Synthetic oligonucleotide
gcauucuugucacaauaaauguauu

SEQ ID NO: 99955 - RNA, 1832 nt, Homo sapiens
gagcggccaggccagccucggagccagcagggagcugggagcugggggaaacgacgccaggaaagcuaucgcgccagagagggcgacgggggcucgggaagccugacagggcuuuugcgcacagcugccggcuggcugcuacccgcccgcgccagcccccgagaacgcgcgaccaggcacccaguccggucaccgcagcggagagcucgccgcucgcugcagcgaggcccggagcggccccgcagggacccuccccagaccgccugggccgcccggaugugcacuaaaauggaacagcccuucuaccacgacgacucauacacagcuacgggauacggccgggccccugguggccucucucuacacgacuacaaacuccugaaaccgagccuggcggucaaccuggccgaccccuaccggagucucaaagcgccuggggcucgcggacccggcccagagggcggcgguggcggcagcuacuuuucuggucagggcucggacaccggcgcgucucucaagcucgccucuucggagcuggaacgccugauuguccccaacagcaacggcgugaucacgacgacgccuacacccccgggacaguacuuuuacccccgcggggguggcagcgguggaggugcagggggcgcagggggcggcgucaccgaggagcaggagggcuucgccgacggcuuugucaaagcccuggacgaucugcacaagaugaaccacgugacaccccccaacgugucccugggcgcuaccggggggcccccggcugggcccgggggcgucuacgccggcccggagccaccucccguuuacaccaaccucagcagcuacuccccagccucugcguccucgggaggcgccggggcugccgucgggaccgggagcucguacccgacgaccaccaucagcuaccucccacacgcgccgcccuucgccgguggccacccggcgcagcugggcuugggccgcggcgccuccaccuucaaggaggaaccgcagaccgugccggaggcgcgcagccgggacgccacgccgccggugucccccaucaacauggaagaccaagagcgcaucaaaguggagcgcaagcggcugcggaaccggcuggcggccaccaagugccggaagcggaagcuggagcgcaucgcgcgccuggaggacaaggugaagacgcucaaggccgagaacgcggggcugucgaguaccgccggccuccuccgggagcagguggcccagcucaaacagaaggucaugacccacgucagcaacggcugucagcugcugcuuggggucaagggacacgccuucugaacguccccugccccuuuacggacacccccucgcuuggacggcugggcacacgccucccacugggguccagggagcaggcggugggcacccacccugggaccuaggggcgccgcaaaccacacuggacuccggcccuccuacccugcgcccaguccuuccaccucgacguuuacaagcccccccuuccacuuuuuuuuguauguuuuuuuucugcuggaaacagacucgauucauauugaauauaauauauuuguguauuuaacagggaggggaagagggggcgaucgcggcggagcuggccccgccgccugguacucaagcccgcggggacauugggaaggggacccccgcccccugcccuccccucucugcaccguacuguggaaaagaaacacgcacuuagucucuaaagaguuuauuuuaagacguguuuguguuuguguguguuuguucuuuuuauugaaucuauuuaaguaaaaaaaaaauugguucuuuaaaaaaaaaaaaaaaaa

SEQ ID NO: 99956 - RNA, 19 nt, Artificial Sequence
  Description of Artificial Sequence: Synthetic oligonucleotide
gagcggccaggccagccuc

SEQ ID NO: 99957 - RNA, 19 nt, Artificial Sequence
  Description of Artificial Sequence: Synthetic oligonucleotide
cggagccagcagggagcug

SEQ ID NO: 99958 - RNA, 19 nt, Artificial Sequence
  Description of Artificial Sequence: Synthetic oligonucleotide
gggagcugggggaaacgac

SEQ ID NO: 99959 - RNA, 19 nt, Artificial Sequence
  Description of Artificial Sequence: Synthetic oligonucleotide
cgccaggaaagcuaucgcg

SEQ ID NO: 99960 - RNA, 19 nt, Artificial Sequence
  Description of Artificial Sequence: Synthetic oligonucleotide
gccagagagggcgacgggg

SEQ ID NO: 99961 - RNA, 19 nt, Artificial Sequence
  Description of Artificial Sequence: Synthetic oligonucleotide
ggcucgggaagccugacag

SEQ ID NO: 99962 - RNA, 19 nt, Artificial Sequence
  Description of Artificial Sequence: Synthetic oligonucleotide
gggcuuuugcgcacagcug

SEQ ID NO: 99963 - RNA, 19 nt, Artificial Sequence
  Description of Artificial Sequence: Synthetic oligonucleotide
gccggcuggcugcuacccg

SEQ ID NO: 99964 - RNA, 19 nt, Artificial Sequence
  Description of Artificial Sequence: Synthetic oligonucleotide
gcccgcgccagcccccgag

SEQ ID NO: 99965 - RNA, 19 nt, Artificial Sequence
  Description of Artificial Sequence: Synthetic oligonucleotide
gaacgcgcgaccaggcacc

SEQ ID NO: 99966 - RNA, 19 nt, Artificial Sequence
  Description of Artificial Sequence: Synthetic oligonucleotide
ccaguccggucaccgcagc

SEQ ID NO: 99967 - RNA, 19 nt, Artificial Sequence
  Description of Artificial Sequence: Synthetic oligonucleotide
cggagagcucgccgcucgc

SEQ ID NO: 99968 - RNA, 19 nt, Artificial Sequence
  Description of Artificial Sequence: Synthetic oligonucleotide
cugcagcgaggcccggagc

SEQ ID NO: 99969 - RNA, 19 nt, Artificial Sequence
  Description of Artificial Sequence: Synthetic oligonucleotide
cggccccgcagggacccuc

SEQ ID NO: 99970 - RNA, 19 nt, Artificial Sequence
  Description of Artificial Sequence: Synthetic oligonucleotide
ccccagaccgccugggccg

SEQ ID NO: 99971 - RNA, 19 nt, Artificial Sequence
  Description of Artificial Sequence: Synthetic oligonucleotide
gcccggaugugcacuaaaa

SEQ ID NO: 99972 - RNA, 19 nt, Artificial Sequence
  Description of Artificial Sequence: Synthetic oligonucleotide
auggaacagcccuucuacc

SEQ ID NO: 99973 - RNA, 19 nt, Artificial Sequence
  Description of Artificial Sequence: Synthetic oligonucleotide
cacgacgacucauacacag

SEQ ID NO: 99974 - RNA, 19 nt, Artificial Sequence
  Description of Artificial Sequence: Synthetic oligonucleotide
gcuacgggauacggccggg

SEQ ID NO: 99975 - RNA, 19 nt, Artificial Sequence
  Description of Artificial Sequence: Synthetic oligonucleotide
gccccugguggccucucuc

SEQ ID NO: 99976 - RNA, 19 nt, Artificial Sequence
  Description of Artificial Sequence: Synthetic oligonucleotide
cuacacgacuacaaacucc

SEQ ID NO: 99977 - RNA, 19 nt, Artificial Sequence
  Description of Artificial Sequence: Synthetic oligonucleotide
cugaaaccgagccuggcgg

SEQ ID NO: 99978 - RNA, 19 nt, Artificial Sequence
  Description of Artificial Sequence: Synthetic oligonucleotide
gucaaccuggccgaccccu

SEQ ID NO: 99979 - RNA, 19 nt, Artificial Sequence
  Description of Artificial Sequence: Synthetic oligonucleotide
uaccggagucucaaagcgc

SEQ ID NO: 99980 - RNA, 19 nt, Artificial Sequence
  Description of Artificial Sequence: Synthetic oligonucleotide
ccuggggcucgcggacccg

SEQ ID NO: 99981 - RNA, 19 nt, Artificial Sequence
  Description of Artificial Sequence: Synthetic oligonucleotide
ggcccagagggcggcggug

SEQ ID NO: 99982 - RNA, 19 nt, Artificial Sequence
  Description of Artificial Sequence: Synthetic oligonucleotide
ggcggcagcuacuuuucug

SEQ ID NO: 99983 - RNA, 19 nt, Artificial Sequence
  Description of Artificial Sequence: Synthetic oligonucleotide
ggucagggcucggacaccg

SEQ ID NO: 99984 - RNA, 19 nt, Artificial Sequence
  Description of Artificial Sequence: Synthetic oligonucleotide
ggcgcgucucucaagcucg

SEQ ID NO: 99985 - RNA, 19 nt, Artificial Sequence
  Description of Artificial Sequence: Synthetic oligonucleotide
gccucuucggagcuggaac

SEQ ID NO: 99986 - RNA, 19 nt, Artificial Sequence
  Description of Artificial Sequence: Synthetic oligonucleotide
cgccugauuguccccaaca

SEQ ID NO: 99987 - RNA, 19 nt, Artificial Sequence
  Description of Artificial Sequence: Synthetic oligonucleotide
agcaacggcgugaucacga

SEQ ID NO: 99988 - RNA, 19 nt, Artificial Sequence
  Description of Artificial Sequence: Synthetic oligonucleotide
acgacgccuacacccccgg

SEQ ID NO: 99989 - RNA, 19 nt, Artificial Sequence
  Description of Artificial Sequence: Synthetic oligonucleotide
ggacaguacuuuuaccccc

SEQ ID NO: 99990 - RNA, 19 nt, Artificial Sequence
  Description of Artificial Sequence: Synthetic oligonucleotide
cgcggggguggcagcggug

SEQ ID NO: 99991 - RNA, 19 nt, Artificial Sequence
  Description of Artificial Sequence: Synthetic oligonucleotide
ggaggugcagggggcgcag

SEQ ID NO: 99992 - RNA, 19 nt, Artificial Sequence
  Description of Artificial Sequence: Synthetic oligonucleotide
gggggcggcgucaccgagg

SEQ ID NO: 99993 - RNA, 19 nt, Artificial Sequence
  Description of Artificial Sequence: Synthetic oligonucleotide
gagcaggagggcuucgccg

SEQ ID NO: 99994 - RNA, 19 nt, Artificial Sequence
  Description of Artificial Sequence: Synthetic oligonucleotide
gacggcuuugucaaagccc

SEQ ID NO: 99995 - RNA, 19 nt, Artificial Sequence
  Description of Artificial Sequence: Synthetic oligonucleotide
cuggacgaucugcacaaga

SEQ ID NO: 99996 - RNA, 19 nt, Artificial Sequence
  Description of Artificial Sequence: Synthetic oligonucleotide
augaaccacgugacacccc

SEQ ID NO: 99997 - RNA, 19 nt, Artificial Sequence
  Description of Artificial Sequence: Synthetic oligonucleotide
cccaacgugucccugggcg

SEQ ID NO: 99998 - RNA, 19 nt, Artificial Sequence
  Description of Artificial Sequence: Synthetic oligonucleotide
gcuaccggggggcccccgg

SEQ ID NO: 99999 - RNA, 19 nt, Artificial Sequence
  Description of Artificial Sequence: Synthetic oligonucleotide
gcugggcccgggggcgucu

SEQ ID NO: 100000 - RNA, 19 nt, Artificial Sequence
  Description of Artificial Sequence: Synthetic oligonucleotide
uacgccggcccggagccac

SEQ ID NO: 100001 - RNA, 19 nt, Artificial Sequence
  Description of Artificial Sequence: Synthetic oligonucleotide
ccucccguuuacaccaacc

SEQ ID NO: 100002 - RNA, 19 nt, Artificial Sequence
  Description of Artificial Sequence: Synthetic oligonucleotide
cucagcagcuacuccccag

SEQ ID NO: 100003 - RNA, 19 nt, Artificial Sequence
  Description of Artificial Sequence: Synthetic oligonucleotide
gccucugcguccucgggag

SEQ ID NO: 100004 - RNA, 19 nt, Artificial Sequence
  Description of Artificial Sequence: Synthetic oligonucleotide
ggcgccggggcugccgucg

SEQ ID NO: 100005 - RNA, 19 nt, Artificial Sequence
  Description of Artificial Sequence: Synthetic oligonucleotide
gggaccgggagcucguacc

SEQ ID NO: 100006 - RNA, 19 nt, Artificial Sequence
  Description of Artificial Sequence: Synthetic oligonucleotide
ccgacgaccaccaucagcu

SEQ ID NO: 100007 - RNA, 19 nt, Artificial Sequence
  Description of Artificial Sequence: Synthetic oligonucleotide
uaccucccacacgcgccgc

SEQ ID NO: 100008 - RNA, 19 nt, Artificial Sequence
  Description of Artificial Sequence: Synthetic oligonucleotide
cccuucgccgguggccacc

SEQ ID NO: 100009 - RNA, 19 nt, Artificial Sequence
  Description of Artificial Sequence: Synthetic oligonucleotide
ccggcgcagcugggcuugg

SEQ ID NO: 100010 - RNA, 19 nt, Artificial Sequence
  Description of Artificial Sequence: Synthetic oligonucleotide
ggccgcggcgccuccaccu

SEQ ID NO: 100011 - RNA, 19 nt, Artificial Sequence
  Description of Artificial Sequence: Synthetic oligonucleotide
uucaaggaggaaccgcaga

SEQ ID NO: 100012 - RNA, 19 nt, Artificial Sequence
  Description of Artificial Sequence: Synthetic oligonucleotide
accgugccggaggcgcgca

SEQ ID NO: 100013 - RNA, 19 nt, Artificial Sequence
  Description of Artificial Sequence: Synthetic oligonucleotide
agccgggacgccacgccgc

SEQ ID NO: 100014 - RNA, 19 nt, Artificial Sequence
  Description of Artificial Sequence: Synthetic oligonucleotide
ccggugucccccaucaaca

SEQ ID NO: 100015 - RNA, 19 nt, Artificial Sequence
  Description of Artificial Sequence: Synthetic oligonucleotide
auggaagaccaagagcgca

SEQ ID NO: 100016 - RNA, 19 nt, Artificial Sequence
  Description of Artificial Sequence: Synthetic oligonucleotide
aucaaaguggagcgcaagc

SEQ ID NO: 100017 - RNA, 19 nt, Artificial Sequence
  Description of Artificial Sequence: Synthetic oligonucleotide
cggcugcggaaccggcugg

SEQ ID NO: 100018 - RNA, 19 nt, Artificial Sequence
  Description of Artificial Sequence: Synthetic oligonucleotide
gcggccaccaagugccgga

SEQ ID NO: 100019 - RNA, 19 nt, Artificial Sequence
  Description of Artificial Sequence: Synthetic oligonucleotide
aagcggaagcuggagcgca

SEQ ID NO: 100020 - RNA, 19 nt, Artificial Sequence
  Description of Artificial Sequence: Synthetic oligonucleotide
aucgcgcgccuggaggaca

SEQ ID NO: 100021 - RNA, 19 nt, Artificial Sequence
  Description of Artificial Sequence: Synthetic oligonucleotide
aaggugaagacgcucaagg

SEQ ID NO: 100022 - RNA, 19 nt, Artificial Sequence
  Description of Artificial Sequence: Synthetic oligonucleotide
gccgagaacgcggggcugu

SEQ ID NO: 100023 - RNA, 19 nt, Artificial Sequence
  Description of Artificial Sequence: Synthetic oligonucleotide
ucgaguaccgccggccucc

SEQ ID NO: 100024 - RNA, 19 nt, Artificial Sequence
  Description of Artificial Sequence: Synthetic oligonucleotide
cuccgggagcagguggccc

SEQ ID NO: 100025 - RNA, 19 nt, Artificial Sequence
  Description of Artificial Sequence: Synthetic oligonucleotide
cagcucaaacagaagguca

SEQ ID NO: 100026 - RNA, 19 nt, Artificial Sequence
  Description of Artificial Sequence: Synthetic oligonucleotide
augacccacgucagcaacg

SEQ ID NO: 100027 - RNA, 19 nt, Artificial Sequence
  Description of Artificial Sequence: Synthetic oligonucleotide
ggcugucagcugcugcuug

SEQ ID NO: 100028 - RNA, 19 nt, Artificial Sequence
  Description of Artificial Sequence: Synthetic oligonucleotide
ggggucaagggacacgccu

SEQ ID NO: 100029 - RNA, 19 nt, Artificial Sequence
  Description of Artificial Sequence: Synthetic oligonucleotide
uucugaacguccccugccc

SEQ ID NO: 100030 - RNA, 19 nt, Artificial Sequence
  Description of Artificial Sequence: Synthetic oligonucleotide
ccuuuacggacacccccuc

SEQ ID NO: 100031 - RNA, 19 nt, Artificial Sequence
  Description of Artificial Sequence: Synthetic oligonucleotide
cgcuuggacggcugggcac

SEQ ID NO: 100032 - RNA, 19 nt, Artificial Sequence
  Description of Artificial Sequence: Synthetic oligonucleotide
cacgccucccacugggguc

SEQ ID NO: 100033 - RNA, 19 nt, Artificial Sequence
  Description of Artificial Sequence: Synthetic oligonucleotide
ccagggagcaggcgguggg

SEQ ID NO: 100034 - RNA, 19 nt, Artificial Sequence
  Description of Artificial Sequence: Synthetic oligonucleotide
gcacccacccugggaccua

SEQ ID NO: 100035 - RNA, 19 nt, Artificial Sequence
  Description of Artificial Sequence: Synthetic oligonucleotide
aggggcgccgcaaaccaca

SEQ ID NO: 100036 - RNA, 19 nt, Artificial Sequence
  Description of Artificial Sequence: Synthetic oligonucleotide
acuggacuccggcccuccu

SEQ ID NO: 100037 - RNA, 19 nt, Artificial Sequence
  Description of Artificial Sequence: Synthetic oligonucleotide
uacccugcgcccaguccuu

SEQ ID NO: 100038 - RNA, 19 nt, Artificial Sequence
  Description of Artificial Sequence: Synthetic oligonucleotide
uccaccucgacguuuacaa

SEQ ID NO: 100039 - RNA, 19 nt, Artificial Sequence
  Description of Artificial Sequence: Synthetic oligonucleotide
agcccccccuuccacuuuu

SEQ ID NO: 100040 - RNA, 19 nt, Artificial Sequence
  Description of Artificial Sequence: Synthetic oligonucleotide
uuuuuguauguuuuuuuuc

SEQ ID NO: 100041 - RNA, 19 nt, Artificial Sequence
  Description of Artificial Sequence: Synthetic oligonucleotide
cugcuggaaacagacucga

SEQ ID NO: 100042 - RNA, 19 nt, Artificial Sequence
  Description of Artificial Sequence: Synthetic oligonucleotide
auucauauugaauauaaua

SEQ ID NO: 100043 - RNA, 19 nt, Artificial Sequence
  Description of Artificial Sequence: Synthetic oligonucleotide
auauuuguguauuuaacag

SEQ ID NO: 100044 - RNA, 19 nt, Artificial Sequence
  Description of Artificial Sequence: Synthetic oligonucleotide
gggaggggaagagggggcg

SEQ ID NO: 100045 - RNA, 19 nt, Artificial Sequence
  Description of Artificial Sequence: Synthetic oligonucleotide
gaucgcggcggagcuggcc

SEQ ID NO: 100046 - RNA, 19 nt, Artificial Sequence
  Description of Artificial Sequence: Synthetic oligonucleotide
cccgccgccugguacucaa

SEQ ID NO: 100047 - RNA, 19 nt, Artificial Sequence
  Description of Artificial Sequence: Synthetic oligonucleotide
agcccgcggggacauuggg

SEQ ID NO: 100048 - RNA, 19 nt, Artificial Sequence
  Description of Artificial Sequence: Synthetic oligonucleotide
gaaggggacccccgccccc

SEQ ID NO: 100049 - RNA, 19 nt, Artificial Sequence
  Description of Artificial Sequence: Synthetic oligonucleotide
cugcccuccccucucugca

SEQ ID NO: 100050 - RNA, 19 nt, Artificial Sequence
  Description of Artificial Sequence: Synthetic oligonucleotide
accguacuguggaaaagaa

SEQ ID NO: 100051 - RNA, 19 nt, Artificial Sequence
  Description of Artificial Sequence: Synthetic oligonucleotide
aacacgcacuuagucucua

SEQ ID NO: 100052 - RNA, 19 nt, Artificial Sequence
  Description of Artificial Sequence: Synthetic oligonucleotide
aaagaguuuauuuuaagac

SEQ ID NO: 100053 - RNA, 19 nt, Artificial Sequence
  Description of Artificial Sequence: Synthetic oligonucleotide
cguguuuguguuugugugu

SEQ ID NO: 100054 - RNA, 19 nt, Artificial Sequence
  Description of Artificial Sequence: Synthetic oligonucleotide
uguuuguucuuuuuauuga

SEQ ID NO: 100055 - RNA, 19 nt, Artificial Sequence
  Description of Artificial Sequence: Synthetic oligonucleotide
aaucuauuuaaguaaaaaa

SEQ ID NO: 100056 - RNA, 19 nt, Artificial Sequence
  Description of Artificial Sequence: Synthetic oligonucleotide
aaaaauugguucuuuaaaa

SEQ ID NO: 100057 - RNA, 25 nt, Artificial Sequence
  Description of Artificial Sequence: Synthetic oligonucleotide
gagcggccaggccagccucggagcc

SEQ ID NO: 100058 - RNA, 25 nt, Artificial Sequence
  Description of Artificial Sequence: Synthetic oligonucleotide
cagcagggagcugggagcuggggga

SEQ ID NO: 100059 - RNA, 25 nt, Artificial Sequence
  Description of Artificial Sequence: Synthetic oligonucleotide
aaacgacgccaggaaagcuaucgcg

SEQ ID NO: 100060 - RNA, 25 nt, Artificial Sequence
  Description of Artificial Sequence: Synthetic oligonucleotide
gccagagagggcgacgggggcucgg

SEQ ID NO: 100061 - RNA, 25 nt, Artificial Sequence
  Description of Artificial Sequence: Synthetic oligonucleotide
ggaagccugacagggcuuuugcgca

SEQ ID NO: 100062 - RNA, 25 nt, Artificial Sequence
  Description of Artificial Sequence: Synthetic oligonucleotide
acagcugccggcuggcugcuacccg

SEQ ID NO: 100063 - RNA, 25 nt, Artificial Sequence
  Description of Artificial Sequence: Synthetic oligonucleotide
gcccgcgccagcccccgagaacgcg

SEQ ID NO: 100064 - RNA, 25 nt, Artificial Sequence
  Description of Artificial Sequence: Synthetic oligonucleotide
gcgaccaggcacccaguccggucac

SEQ ID NO: 100065 - RNA, 25 nt, Artificial Sequence
  Description of Artificial Sequence: Synthetic oligonucleotide
ccgcagcggagagcucgccgcucgc

SEQ ID NO: 100066 - RNA, 25 nt, Artificial Sequence
  Description of Artificial Sequence: Synthetic oligonucleotide
cugcagcgaggcccggagcggcccc

SEQ ID NO: 100067 - RNA, 25 nt, Artificial Sequence
  Description of Artificial Sequence: Synthetic oligonucleotide
cgcagggacccuccccagaccgccu

SEQ ID NO: 100068 - RNA, 25 nt, Artificial Sequence
  Description of Artificial Sequence: Synthetic oligonucleotide
ugggccgcccggaugugcacuaaaa

SEQ ID NO: 100069 - RNA, 25 nt, Artificial Sequence
  Description of Artificial Sequence: Synthetic oligonucleotide
auggaacagcccuucuaccacgacg

SEQ ID NO: 100070 - RNA, 25 nt, Artificial Sequence
  Description of Artificial Sequence: Synthetic oligonucleotide
gacucauacacagcuacgggauacg

SEQ ID NO: 100071 - RNA, 25 nt, Artificial Sequence
  Description of Artificial Sequence: Synthetic oligonucleotide
ggccgggccccugguggccucucuc

SEQ ID NO: 100072 - RNA, 25 nt, Artificial Sequence
  Description of Artificial Sequence: Synthetic oligonucleotide
cuacacgacuacaaacuccugaaac

SEQ ID NO: 100073 - RNA, 25 nt, Artificial Sequence
  Description of Artificial Sequence: Synthetic oligonucleotide
ccgagccuggcggucaaccuggccg

SEQ ID NO: 100074 - RNA, 25 nt, Artificial Sequence
  Description of Artificial Sequence: Synthetic oligonucleotide
gaccccuaccggagucucaaagcgc

SEQ ID NO: 100075 - RNA, 25 nt, Artificial Sequence
  Description of Artificial Sequence: Synthetic oligonucleotide
ccuggggcucgcggacccggcccag

SEQ ID NO: 100076 - RNA, 25 nt, Artificial Sequence
  Description of Artificial Sequence: Synthetic oligonucleotide
gagggcggcgguggcggcagcuacu

SEQ ID NO: 100077 - RNA, 25 nt, Artificial Sequence
  Description of Artificial Sequence: Synthetic oligonucleotide
uuuucuggucagggcucggacaccg

SEQ ID NO: 100078 - RNA, 25 nt, Artificial Sequence
  Description of Artificial Sequence: Synthetic oligonucleotide
ggcgcgucucucaagcucgccucuu

SEQ ID NO: 100079 - RNA, 25 nt, Artificial Sequence
  Description of Artificial Sequence: Synthetic oligonucleotide
ucggagcuggaacgccugauugucc

SEQ ID NO: 100080 - RNA, 25 nt, Artificial Sequence
  Description of Artificial Sequence: Synthetic oligonucleotide
cccaacagcaacggcgugaucacga

SEQ ID NO: 100081 - RNA, 25 nt, Artificial Sequence
  Description of Artificial Sequence: Synthetic oligonucleotide
acgacgccuacacccccgggacagu

SEQ ID NO: 100082 - RNA, 25 nt, Artificial Sequence
  Description of Artificial Sequence: Synthetic oligonucleotide
uacuuuuacccccgcggggguggca

SEQ ID NO: 100083 - RNA, 25 nt, Artificial Sequence
  Description of Artificial Sequence: Synthetic oligonucleotide
agcgguggaggugcagggggcgcag

SEQ ID NO: 100084 - RNA, 25 nt, Artificial Sequence
  Description of Artificial Sequence: Synthetic oligonucleotide
gggggcggcgucaccgaggagcagg

SEQ ID NO: 100085 - RNA, 25 nt, Artificial Sequence
  Description of Artificial Sequence: Synthetic oligonucleotide
gagggcuucgccgacggcuuuguca

SEQ ID NO: 100086 - RNA, 25 nt, Artificial Sequence
  Description of Artificial Sequence: Synthetic oligonucleotide
aaagcccuggacgaucugcacaaga

SEQ ID NO: 100087 - RNA, 25 nt, Artificial Sequence
  Description of Artificial Sequence: Synthetic oligonucleotide
augaaccacgugacaccccccaacg

SEQ ID NO: 100088 - RNA, 25 nt, Artificial Sequence
  Description of Artificial Sequence: Synthetic oligonucleotide
gugucccugggcgcuaccggggggc

SEQ ID NO: 100089 - RNA, 25 nt, Artificial Sequence
  Description of Artificial Sequence: Synthetic oligonucleotide
cccccggcugggcccgggggcgucu

SEQ ID NO: 100090 - RNA, 25 nt, Artificial Sequence
  Description of Artificial Sequence: Synthetic oligonucleotide
uacgccggcccggagccaccucccg

SEQ ID NO: 100091 - RNA, 25 nt, Artificial Sequence
  Description of Artificial Sequence: Synthetic oligonucleotide
guuuacaccaaccucagcagcuacu

SEQ ID NO: 100092 - RNA, 25 nt, Artificial Sequence
  Description of Artificial Sequence: Synthetic oligonucleotide
uccccagccucugcguccucgggag

SEQ ID NO: 100093 - RNA, 25 nt, Artificial Sequence
  Description of Artificial Sequence: Synthetic oligonucleotide
ggcgccggggcugccgucgggaccg

SEQ ID NO: 100094 - RNA, 25 nt, Artificial Sequence
  Description of Artificial Sequence: Synthetic oligonucleotide
gggagcucguacccgacgaccacca

SEQ ID NO: 100095 - RNA, 25 nt, Artificial Sequence
  Description of Artificial Sequence: Synthetic oligonucleotide
aucagcuaccucccacacgcgccgc

SEQ ID NO: 100096 - RNA, 25 nt, Artificial Sequence
  Description of Artificial Sequence: Synthetic oligonucleotide
cccuucgccgguggccacccggcgc

SEQ ID NO: 100097 - RNA, 25 nt, Artificial Sequence
  Description of Artificial Sequence: Synthetic oligonucleotide
cagcugggcuugggccgcggcgccu

SEQ ID NO: 100098 - RNA, 25 nt, Artificial Sequence
  Description of Artificial Sequence: Synthetic oligonucleotide
uccaccuucaaggaggaaccgcaga

SEQ ID NO: 100099 - RNA, 25 nt, Artificial Sequence
  Description of Artificial Sequence: Synthetic oligonucleotide
accgugccggaggcgcgcagccggg

SEQ ID NO: 100100 - RNA, 25 nt, Artificial Sequence
  Description of Artificial Sequence: Synthetic oligonucleotide
gacgccacgccgccgguguccccca

SEQ ID NO: 100101 - RNA, 25 nt, Artificial Sequence
  Description of Artificial Sequence: Synthetic oligonucleotide
aucaacauggaagaccaagagcgca

SEQ ID NO: 100102 - RNA, 25 nt, Artificial Sequence
  Description of Artificial Sequence: Synthetic oligonucleotide
aucaaaguggagcgcaagcggcugc

SEQ ID NO: 100103 - RNA, 25 nt, Artificial Sequence
  Description of Artificial Sequence: Synthetic oligonucleotide
cggaaccggcuggcggccaccaagu

SEQ ID NO: 100104 - RNA, 25 nt, Artificial Sequence
  Description of Artificial Sequence: Synthetic oligonucleotide
ugccggaagcggaagcuggagcgca

SEQ ID NO: 100105 - RNA, 25 nt, Artificial Sequence
  Description of Artificial Sequence: Synthetic oligonucleotide
aucgcgcgccuggaggacaagguga

SEQ ID NO: 100106 - RNA, 25 nt, Artificial Sequence
  Description of Artificial Sequence: Synthetic oligonucleotide
aagacgcucaaggccgagaacgcgg

SEQ ID NO: 100107 - RNA, 25 nt, Artificial Sequence
  Description of Artificial Sequence: Synthetic oligonucleotide
gggcugucgaguaccgccggccucc

SEQ ID NO: 100108 - RNA, 25 nt, Artificial Sequence
  Description of Artificial Sequence: Synthetic oligonucleotide
cuccgggagcagguggcccagcuca

SEQ ID NO: 100109 - RNA, 25 nt, Artificial Sequence
  Description of Artificial Sequence: Synthetic oligonucleotide
aaacagaaggucaugacccacguca

SEQ ID NO: 100110 - RNA, 25 nt, Artificial Sequence
  Description of Artificial Sequence: Synthetic oligonucleotide
agcaacggcugucagcugcugcuug

SEQ ID NO: 100111 - RNA, 25 nt, Artificial Sequence
  Description of Artificial Sequence: Synthetic oligonucleotide
ggggucaagggacacgccuucugaa

SEQ ID NO: 100112 - RNA, 25 nt, Artificial Sequence
  Description of Artificial Sequence: Synthetic oligonucleotide
acguccccugccccuuuacggacac

SEQ ID NO: 100113 - RNA, 25 nt, Artificial Sequence
  Description of Artificial Sequence: Synthetic oligonucleotide
cccccucgcuuggacggcugggcac

SEQ ID NO: 100114 - RNA, 25 nt, Artificial Sequence
  Description of Artificial Sequence: Synthetic oligonucleotide
cacgccucccacugggguccaggga

SEQ ID NO: 100115 - RNA, 25 nt, Artificial Sequence
  Description of Artificial Sequence: Synthetic oligonucleotide
agcaggcggugggcacccacccugg

SEQ ID NO: 100116 - RNA, 25 nt, Artificial Sequence
  Description of Artificial Sequence: Synthetic oligonucleotide
ggaccuaggggcgccgcaaaccaca

SEQ ID NO: 100117 - RNA, 25 nt, Artificial Sequence
  Description of Artificial Sequence: Synthetic oligonucleotide
acuggacuccggcccuccuacccug

SEQ ID NO: 100118 - RNA, 25 nt, Artificial Sequence
  Description of Artificial Sequence: Synthetic oligonucleotide
gcgcccaguccuuccaccucgacgu

SEQ ID NO: 100119 - RNA, 25 nt, Artificial Sequence
  Description of Artificial Sequence: Synthetic oligonucleotide
uuuacaagcccccccuuccacuuuu

SEQ ID NO: 100120 - RNA, 25 nt, Artificial Sequence
  Description of Artificial Sequence: Synthetic oligonucleotide
uuuuuguauguuuuuuuucugcugg

SEQ ID NO: 100121 - RNA, 25 nt, Artificial Sequence
  Description of Artificial Sequence: Synthetic oligonucleotide
gaaacagacucgauucauauugaau

SEQ ID NO: 100122 - RNA, 25 nt, Artificial Sequence
  Description of Artificial Sequence: Synthetic oligonucleotide
uauaauauauuuguguauuuaacag

SEQ ID NO: 100123 - RNA, 25 nt, Artificial Sequence
  Description of Artificial Sequence: Synthetic oligonucleotide
gggaggggaagagggggcgaucgcg

SEQ ID NO: 100124 - RNA, 25 nt, Artificial Sequence
  Description of Artificial Sequence: Synthetic oligonucleotide
ggcggagcuggccccgccgccuggu

SEQ ID NO: 100125 - RNA, 25 nt, Artificial Sequence
  Description of Artificial Sequence: Synthetic oligonucleotide
uacucaagcccgcggggacauuggg

SEQ ID NO: 100126 - RNA, 25 nt, Artificial Sequence
  Description of Artificial Sequence: Synthetic oligonucleotide
gaaggggacccccgcccccugcccu

SEQ ID NO: 100127 - RNA, 25 nt, Artificial Sequence
  Description of Artificial Sequence: Synthetic oligonucleotide
uccccucucugcaccguacugugga

SEQ ID NO: 100128 - RNA, 25 nt, Artificial Sequence
  Description of Artificial Sequence: Synthetic oligonucleotide
aaaagaaacacgcacuuagucucua

SEQ ID NO: 100129 - RNA, 25 nt, Artificial Sequence
  Description of Artificial Sequence: Synthetic oligonucleotide
aaagaguuuauuuuaagacguguuu

SEQ ID NO: 100130 - RNA, 25 nt, Artificial Sequence
  Description of Artificial Sequence: Synthetic oligonucleotide
uguguuuguguguguuuguucuuuu

SEQ ID NO: 100131 - RNA, 25 nt, Artificial Sequence
  Description of Artificial Sequence: Synthetic oligonucleotide
uuauugaaucuauuuaaguaaaaaa

SEQ ID NO: 100132 - RNA, 1863 nt, Homo sapiens
aggagccgccgccaguggagggccgggcgcugcggccgcggccggggcgggcgcagggccgagcggacgggggggcgcgggccccccgggaggccgcggccacucccccccgggccggcgcggcgggggaggcggaggauggaaacacccuucuacggcgaugaggcgcugagcggccugggcggcggcgccaguggcagcggcggcagcuucgcguccccgggccgcuuguuccccggggcgcccccgacggccgcggccggcagcaugaugaagaaggacgcgcugacgcugagccugagugagcagguggcggcagcgcucaagccugcggccgcgccgccuccuaccccccugcgcgccgacggcgcccccagcgcggcaccccccgacggccugcucgccucucccgaccuggggcugcugaagcuggccucccccgagcucgagcgccucaucauccaguccaacgggcuggucaccaccacgccgacgagcucacaguuccucuaccccaagguggcggccagcgaggagcaggaguucgccgagggcuucgucaaggcccuggaggauuuacacaagcagaaccagcucggcgcgggcgcggccgcugccgccgccgccgccgccgccggggggcccucgggcacggccacgggcuccgcgccccccggcgagcuggccccggcggcggccgcgcccgaagcgccugucuacgcgaaccugagcagcuacgcgggcggcgccgggggcgcggggggcgccgcgacggucgccuucgcugccgaaccugugcccuucccgccgccgccacccccaggcgcguuggggccgccgcgccuggcugcgcucaaggacgagccacagacggugcccgacgugccgagcuucggcgagagcccgccguugucgcccaucgacauggacacgcaggagcgcaucaaggcggagcgcaagcggcugcgcaaccgcaucgccgccuccaagugccgcaagcgcaagcuggagcgcaucucgcgccuggaagagaaagugaagacccucaagagucagaacacggagcuggcguccacggcgagccugcugcgcgagcagguggcgcagcucaagcagaaaguccucagccacgucaacagcggcugccagcugcugccccagcaccaggugcccgcguacugaguccgcgcgcggggcgcaugcgcggccacccuccccaaggggcgggcucgcgggggggugucgugggcgccccggacuuggagagggugcggcccuggggacccccccuccccgagugugcccaggaacucagagagggcgcggcccccggggauuccccccccccgagggugcccaggacucgacaagcuggacccccugcucccgggggggcgagcgcaugacccccccgcccucgcgcugccucuuucccccgcgcggccgccccguguugcacaaacccgcgcgucucggcugccccuuuguacaccgcgccgcggaagggggcuccgagggggcgcagccucaaacccugccuuuccuuuacuuuuacuuuuuuuuuuuuuucuuuggaagagagaagaacagaguguucgauucugcccuauuuauguuucuacucgggaacaaacguugguuguguguguguguguuuucuuguguugguuuuuuaaagaaaugggaagaagaaaaaaaaauucuccgccccuuuccucgaucucgcuccccccuucgguucuuucgaccgguccccccucccuuuuuuguucuguuuuguuuuguuuugcuacgaguccacauuccuguuuguaauccuugguucgcccgguuuucuguuuucaguaaagucucguuacgcca

SEQ ID NO: 100133 - RNA, 19 nt, Artificial Sequence
  Description of Artificial Sequence: Synthetic oligonucleotide
aggagccgccgccagugga

SEQ ID NO: 100134 - RNA, 19 nt, Artificial Sequence
  Description of Artificial Sequence: Synthetic oligonucleotide
agggccgggcgcugcggcc

SEQ ID NO: 100135 - RNA, 19 nt, Artificial Sequence
  Description of Artificial Sequence: Synthetic oligonucleotide
cgcggccggggcgggcgca

SEQ ID NO: 100136 - RNA, 19 nt, Artificial Sequence
  Description of Artificial Sequence: Synthetic oligonucleotide
agggccgagcggacggggg

SEQ ID NO: 100137 - RNA, 19 nt, Artificial Sequence
  Description of Artificial Sequence: Synthetic oligonucleotide
gggcgcgggccccccggga

SEQ ID NO: 100138 - RNA, 19 nt, Artificial Sequence
  Description of Artificial Sequence: Synthetic oligonucleotide
aggccgcggccacuccccc

SEQ ID NO: 100139 - RNA, 19 nt, Artificial Sequence
  Description of Artificial Sequence: Synthetic oligonucleotide
cccgggccggcgcggcggg

SEQ ID NO: 100140 - RNA, 19 nt, Artificial Sequence
  Description of Artificial Sequence: Synthetic oligonucleotide
gggaggcggaggauggaaa

SEQ ID NO: 100141 - RNA, 19 nt, Artificial Sequence
  Description of Artificial Sequence: Synthetic oligonucleotide
acacccuucuacggcgaug

SEQ ID NO: 100142 - RNA, 19 nt, Artificial Sequence
  Description of Artificial Sequence: Synthetic oligonucleotide
gaggcgcugagcggccugg

SEQ ID NO: 100143 - RNA, 19 nt, Artificial Sequence
  Description of Artificial Sequence: Synthetic oligonucleotide
ggcggcggcgccaguggca

SEQ ID NO: 100144 - RNA, 19 nt, Artificial Sequence
  Description of Artificial Sequence: Synthetic oligonucleotide
agcggcggcagcuucgcgu

SEQ ID NO: 100145 - RNA, 19 nt, Artificial Sequence
  Description of Artificial Sequence: Synthetic oligonucleotide
uccccgggccgcuuguucc

SEQ ID NO: 100146 - RNA, 19 nt, Artificial Sequence
  Description of Artificial Sequence: Synthetic oligonucleotide
cccggggcgcccccgacgg

SEQ ID NO: 100147 - RNA, 19 nt, Artificial Sequence
  Description of Artificial Sequence: Synthetic oligonucleotide
gccgcggccggcagcauga

SEQ ID NO: 100148 - RNA, 19 nt, Artificial Sequence
  Description of Artificial Sequence: Synthetic oligonucleotide
augaagaaggacgcgcuga

SEQ ID NO: 100149 - RNA, 19 nt, Artificial Sequence
  Description of Artificial Sequence: Synthetic oligonucleotide
acgcugagccugagugagc

SEQ ID NO: 100150 - RNA, 19 nt, Artificial Sequence
  Description of Artificial Sequence: Synthetic oligonucleotide
cagguggcggcagcgcuca

SEQ ID NO: 100151 - RNA, 19 nt, Artificial Sequence
  Description of Artificial Sequence: Synthetic oligonucleotide
aagccugcggccgcgccgc

SEQ ID NO: 100152 - RNA, 19 nt, Artificial Sequence
  Description of Artificial Sequence: Synthetic oligonucleotide
ccuccuaccccccugcgcg

SEQ ID NO: 100153 - RNA, 19 nt, Artificial Sequence
  Description of Artificial Sequence: Synthetic oligonucleotide
gccgacggcgcccccagcg

SEQ ID NO: 100154 - RNA, 19 nt, Artificial Sequence
  Description of Artificial Sequence: Synthetic oligonucleotide
gcggcaccccccgacggcc

SEQ ID NO: 100155 - RNA, 19 nt, Artificial Sequence
  Description of Artificial Sequence: Synthetic oligonucleotide
cugcucgccucucccgacc

SEQ ID NO: 100156 - RNA, 19 nt, Artificial Sequence
  Description of Artificial Sequence: Synthetic oligonucleotide
cuggggcugcugaagcugg

SEQ ID NO: 100157 - RNA, 19 nt, Artificial Sequence
  Description of Artificial Sequence: Synthetic oligonucleotide
gccucccccgagcucgagc

SEQ ID NO: 100158 - RNA, 19 nt, Artificial Sequence
  Description of Artificial Sequence: Synthetic oligonucleotide
cgccucaucauccagucca

SEQ ID NO: 100159 - RNA, 19 nt, Artificial Sequence
  Description of Artificial Sequence: Synthetic oligonucleotide
aacgggcuggucaccacca

SEQ ID NO: 100160 - RNA, 19 nt, Artificial Sequence
  Description of Artificial Sequence: Synthetic oligonucleotide
acgccgacgagcucacagu

SEQ ID NO: 100161 - RNA, 19 nt, Artificial Sequence
  Description of Artificial Sequence: Synthetic oligonucleotide
uuccucuaccccaaggugg

SEQ ID NO: 100162 - RNA, 19 nt, Artificial Sequence
  Description of Artificial Sequence: Synthetic oligonucleotide
gcggccagcgaggagcagg

SEQ ID NO: 100163 - RNA, 19 nt, Artificial Sequence
  Description of Artificial Sequence: Synthetic oligonucleotide
gaguucgccgagggcuucg

SEQ ID NO: 100164 - RNA, 19 nt, Artificial Sequence
  Description of Artificial Sequence: Synthetic oligonucleotide
gucaaggcccuggaggauu

SEQ ID NO: 100165 - RNA, 19 nt, Artificial Sequence
  Description of Artificial Sequence: Synthetic oligonucleotide
uuacacaagcagaaccagc

SEQ ID NO: 100166 - RNA, 19 nt, Artificial Sequence
  Description of Artificial Sequence: Synthetic oligonucleotide
cucggcgcgggcgcggccg

SEQ ID NO: 100167 - RNA, 19 nt, Artificial Sequence
  Description of Artificial Sequence: Synthetic oligonucleotide
gcugccgccgccgccgccg

SEQ ID NO: 100168 - RNA, 19 nt, Artificial Sequence
  Description of Artificial Sequence: Synthetic oligonucleotide
gccgccggggggcccucgg

SEQ ID NO: 100169 - RNA, 19 nt, Artificial Sequence
  Description of Artificial Sequence: Synthetic oligonucleotide
ggcacggccacgggcuccg

SEQ ID NO: 100170 - RNA, 19 nt, Artificial Sequence
  Description of Artificial Sequence: Synthetic oligonucleotide
gcgccccccggcgagcugg

SEQ ID NO: 100171 - RNA, 19 nt, Artificial Sequence
  Description of Artificial Sequence: Synthetic oligonucleotide
gccccggcggcggccgcgc

SEQ ID NO: 100172 - RNA, 19 nt, Artificial Sequence
  Description of Artificial Sequence: Synthetic oligonucleotide
cccgaagcgccugucuacg

SEQ ID NO: 100173 - RNA, 19 nt, Artificial Sequence
  Description of Artificial Sequence: Synthetic oligonucleotide
gcgaaccugagcagcuacg

SEQ ID NO: 100174 - RNA, 19 nt, Artificial Sequence
  Description of Artificial Sequence: Synthetic oligonucleotide
gcgggcggcgccgggggcg

SEQ ID NO: 100175 - RNA, 19 nt, Artificial Sequence
  Description of Artificial Sequence: Synthetic oligonucleotide
gcggggggcgccgcgacgg

SEQ ID NO: 100176 - RNA, 19 nt, Artificial Sequence
  Description of Artificial Sequence: Synthetic oligonucleotide
gucgccuucgcugccgaac

SEQ ID NO: 100177 - RNA, 19 nt, Artificial Sequence
  Description of Artificial Sequence: Synthetic oligonucleotide
ccugugcccuucccgccgc

SEQ ID NO: 100178 - RNA, 19 nt, Artificial Sequence
  Description of Artificial Sequence: Synthetic oligonucleotide
ccgccacccccaggcgcgu

SEQ ID NO: 100179 - RNA, 19 nt, Artificial Sequence
  Description of Artificial Sequence: Synthetic oligonucleotide
uuggggccgccgcgccugg

SEQ ID NO: 100180 - RNA, 19 nt, Artificial Sequence
  Description of Artificial Sequence: Synthetic oligonucleotide
gcugcgcucaaggacgagc

SEQ ID NO: 100181 - RNA, 19 nt, Artificial Sequence
  Description of Artificial Sequence: Synthetic oligonucleotide
ccacagacggugcccgacg

SEQ ID NO: 100182 - RNA, 19 nt, Artificial Sequence
  Description of Artificial Sequence: Synthetic oligonucleotide
gugccgagcuucggcgaga

SEQ ID NO: 100183 - RNA, 19 nt, Artificial Sequence
  Description of Artificial Sequence: Synthetic oligonucleotide
agcccgccguugucgccca

SEQ ID NO: 100184 - RNA, 19 nt, Artificial Sequence
  Description of Artificial Sequence: Synthetic oligonucleotide
aucgacauggacacgcagg

SEQ ID NO: 100185 - RNA, 19 nt, Artificial Sequence
  Description of Artificial Sequence: Synthetic oligonucleotide
gagcgcaucaaggcggagc

SEQ ID NO: 100186 - RNA, 19 nt, Artificial Sequence
  Description of Artificial Sequence: Synthetic oligonucleotide
cgcaagcggcugcgcaacc

SEQ ID NO: 100187 - RNA, 19 nt, Artificial Sequence
  Description of Artificial Sequence: Synthetic oligonucleotide
cgcaucgccgccuccaagu

SEQ ID NO: 100188 - RNA, 19 nt, Artificial Sequence
  Description of Artificial Sequence: Synthetic oligonucleotide
ugccgcaagcgcaagcugg

SEQ ID NO: 100189 - RNA, 19 nt, Artificial Sequence
  Description of Artificial Sequence: Synthetic oligonucleotide
gagcgcaucucgcgccugg

SEQ ID NO: 100190 - RNA, 19 nt, Artificial Sequence
  Description of Artificial Sequence: Synthetic oligonucleotide
gaagagaaagugaagaccc

SEQ ID NO: 100191 - RNA, 19 nt, Artificial Sequence
  Description of Artificial Sequence: Synthetic oligonucleotide
cucaagagucagaacacgg

SEQ ID NO: 100192 - RNA, 19 nt, Artificial Sequence
  Description of Artificial Sequence: Synthetic oligonucleotide
gagcuggcguccacggcga

SEQ ID NO: 100193 - RNA, 19 nt, Artificial Sequence
  Description of Artificial Sequence: Synthetic oligonucleotide
agccugcugcgcgagcagg

SEQ ID NO: 100194 - RNA, 19 nt, Artificial Sequence
  Description of Artificial Sequence: Synthetic oligonucleotide
guggcgcagcucaagcaga

SEQ ID NO: 100195 - RNA, 19 nt, Artificial Sequence
  Description of Artificial Sequence: Synthetic oligonucleotide
aaaguccucagccacguca

SEQ ID NO: 100196 - RNA, 19 nt, Artificial Sequence
  Description of Artificial Sequence: Synthetic oligonucleotide
aacagcggcugccagcugc

SEQ ID NO: 100197 - RNA, 19 nt, Artificial Sequence
  Description of Artificial Sequence: Synthetic oligonucleotide
cugccccagcaccaggugc

SEQ ID NO: 100198 - RNA, 19 nt, Artificial Sequence
  Description of Artificial Sequence: Synthetic oligonucleotide
cccgcguacugaguccgcg

SEQ ID NO: 100199 - RNA, 19 nt, Artificial Sequence
  Description of Artificial Sequence: Synthetic oligonucleotide
gcgcggggcgcaugcgcgg

SEQ ID NO: 100200 - RNA, 19 nt, Artificial Sequence
  Description of Artificial Sequence: Synthetic oligonucleotide
gccacccuccccaaggggc

SEQ ID NO: 100201 - RNA, 19 nt, Artificial Sequence
  Description of Artificial Sequence: Synthetic oligonucleotide
cgggcucgcgggggggugu

SEQ ID NO: 100202 - RNA, 19 nt, Artificial Sequence
  Description of Artificial Sequence: Synthetic oligonucleotide
ucgugggcgccccggacuu

SEQ ID NO: 100203 - RNA, 19 nt, Artificial Sequence
  Description of Artificial Sequence: Synthetic oligonucleotide
uggagagggugcggcccug

SEQ ID NO: 100204 - RNA, 19 nt, Artificial Sequence
  Description of Artificial Sequence: Synthetic oligonucleotide
ggggacccccccuccccga

SEQ ID NO: 100205 - RNA, 19 nt, Artificial Sequence
  Description of Artificial Sequence: Synthetic oligonucleotide
agugugcccaggaacucag

SEQ ID NO: 100206 - RNA, 19 nt, Artificial Sequence
  Description of Artificial Sequence: Synthetic oligonucleotide
gagagggcgcggcccccgg

SEQ ID NO: 100207 - RNA, 19 nt, Artificial Sequence
  Description of Artificial Sequence: Synthetic oligonucleotide
gggugcccaggacucgaca

SEQ ID NO: 100208 - RNA, 19 nt, Artificial Sequence
  Description of Artificial Sequence: Synthetic oligonucleotide
aagcuggacccccugcucc

SEQ ID NO: 100209 - RNA, 19 nt, Artificial Sequence
  Description of Artificial Sequence: Synthetic oligonucleotide
ccgggggggcgagcgcaug

SEQ ID NO: 100210 - RNA, 19 nt, Artificial Sequence
  Description of Artificial Sequence: Synthetic oligonucleotide
gacccccccgcccucgcgc

SEQ ID NO: 100211 - RNA, 19 nt, Artificial Sequence
  Description of Artificial Sequence: Synthetic oligonucleotide
cugccucuuucccccgcgc

SEQ ID NO: 100212 - RNA, 19 nt, Artificial Sequence
  Description of Artificial Sequence: Synthetic oligonucleotide
cggccgccccguguugcac

SEQ ID NO: 100213 - RNA, 19 nt, Artificial Sequence
  Description of Artificial Sequence: Synthetic oligonucleotide
caaacccgcgcgucucggc

SEQ ID NO: 100214 - RNA, 19 nt, Artificial Sequence
  Description of Artificial Sequence: Synthetic oligonucleotide
cugccccuuuguacaccgc

SEQ ID NO: 100215 - RNA, 19 nt, Artificial Sequence
  Description of Artificial Sequence: Synthetic oligonucleotide
cgccgcggaagggggcucc

SEQ ID NO: 100216 - RNA, 19 nt, Artificial Sequence
  Description of Artificial Sequence: Synthetic oligonucleotide
cgagggggcgcagccucaa

SEQ ID NO: 100217 - RNA, 19 nt, Artificial Sequence
  Description of Artificial Sequence: Synthetic oligonucleotide
aacccugccuuuccuuuac

SEQ ID NO: 100218 - RNA, 19 nt, Artificial Sequence
  Description of Artificial Sequence: Synthetic oligonucleotide
uuucuuuggaagagagaag

SEQ ID NO: 100219 - RNA, 19 nt, Artificial Sequence
  Description of Artificial Sequence: Synthetic oligonucleotide
gaacagaguguucgauucu

SEQ ID NO: 100220 - RNA, 19 nt, Artificial Sequence
  Description of Artificial Sequence: Synthetic oligonucleotide
ugcccuauuuauguuucua

SEQ ID NO: 100221 - RNA, 19 nt, Artificial Sequence
  Description of Artificial Sequence: Synthetic oligonucleotide
acucgggaacaaacguugg

SEQ ID NO: 100222 - RNA, 19 nt, Artificial Sequence
  Description of Artificial Sequence: Synthetic oligonucleotide
guuguguguguguguguuu

SEQ ID NO: 100223 - RNA, 19 nt, Artificial Sequence
  Description of Artificial Sequence: Synthetic oligonucleotide
uucuuguguugguuuuuua

SEQ ID NO: 100224 - RNA, 19 nt, Artificial Sequence
  Description of Artificial Sequence: Synthetic oligonucleotide
aaagaaaugggaagaagaa

SEQ ID NO: 100225 - RNA, 19 nt, Artificial Sequence
  Description of Artificial Sequence: Synthetic oligonucleotide
aaaaaaaauucuccgcccc

SEQ ID NO: 100226 - RNA, 19 nt, Artificial Sequence
  Description of Artificial Sequence: Synthetic oligonucleotide
cuuuccucgaucucgcucc

SEQ ID NO: 100227 - RNA, 19 nt, Artificial Sequence
  Description of Artificial Sequence: Synthetic oligonucleotide
cccccuucgguucuuucga

SEQ ID NO: 100228 - RNA, 19 nt, Artificial Sequence
  Description of Artificial Sequence: Synthetic oligonucleotide
accgguccccccucccuuu

SEQ ID NO: 100229 - RNA, 19 nt, Artificial Sequence
  Description of Artificial Sequence: Synthetic oligonucleotide
uuuuguucuguuuuguuuu

SEQ ID NO: 100230 - RNA, 19 nt, Artificial Sequence
  Description of Artificial Sequence: Synthetic oligonucleotide
uguuuugcuacgaguccac

SEQ ID NO: 100231 - RNA, 19 nt, Artificial Sequence
  Description of Artificial Sequence: Synthetic oligonucleotide
cauuccuguuuguaauccu

SEQ ID NO: 100232 - RNA, 19 nt, Artificial Sequence
  Description of Artificial Sequence: Synthetic oligonucleotide
uugguucgcccgguuuucu

SEQ ID NO: 100233 - RNA, 19 nt, Artificial Sequence
  Description of Artificial Sequence: Synthetic oligonucleotide
uguuuucaguaaagucucg

SEQ ID NO: 100234 - RNA, 19 nt, Artificial Sequence
  Description of Artificial Sequence: Synthetic oligonucleotide
guaaagucucguuacgcca

SEQ ID NO: 100235 - RNA, 25 nt, Artificial Sequence
  Description of Artificial Sequence: Synthetic oligonucleotide
aggagccgccgccaguggagggccg

SEQ ID NO: 100236 - RNA, 25 nt, Artificial Sequence
  Description of Artificial Sequence: Synthetic oligonucleotide
gggcgcugcggccgcggccggggcg

SEQ ID NO: 100237 - RNA, 25 nt, Artificial Sequence
  Description of Artificial Sequence: Synthetic oligonucleotide
gggcgcagggccgagcggacggggg

SEQ ID NO: 100238 - RNA, 25 nt, Artificial Sequence
  Description of Artificial Sequence: Synthetic oligonucleotide
gggcgcgggccccccgggaggccgc

SEQ ID NO: 100239 - RNA, 25 nt, Artificial Sequence
  Description of Artificial Sequence: Synthetic oligonucleotide
cggccacucccccccgggccggcgc

SEQ ID NO: 100240 - RNA, 25 nt, Artificial Sequence
  Description of Artificial Sequence: Synthetic oligonucleotide
cggcgggggaggcggaggauggaaa

SEQ ID NO: 100241 - RNA, 25 nt, Artificial Sequence
  Description of Artificial Sequence: Synthetic oligonucleotide
acacccuucuacggcgaugaggcgc

SEQ ID NO: 100242 - RNA, 25 nt, Artificial Sequence
  Description of Artificial Sequence: Synthetic oligonucleotide
cugagcggccugggcggcggcgcca

SEQ ID NO: 100243 - RNA, 25 nt, Artificial Sequence
  Description of Artificial Sequence: Synthetic oligonucleotide
aguggcagcggcggcagcuucgcgu

SEQ ID NO: 100244 - RNA, 25 nt, Artificial Sequence
  Description of Artificial Sequence: Synthetic oligonucleotide
uccccgggccgcuuguuccccgggg

SEQ ID NO: 100245 - RNA, 25 nt, Artificial Sequence
  Description of Artificial Sequence: Synthetic oligonucleotide
gcgcccccgacggccgcggccggca

SEQ ID NO: 100246 - RNA, 25 nt, Artificial Sequence
  Description of Artificial Sequence: Synthetic oligonucleotide
agcaugaugaagaaggacgcgcuga

SEQ ID NO: 100247 - RNA, 25 nt, Artificial Sequence
  Description of Artificial Sequence: Synthetic oligonucleotide
acgcugagccugagugagcaggugg

SEQ ID NO: 100248 - RNA, 25 nt, Artificial Sequence
  Description of Artificial Sequence: Synthetic oligonucleotide
gcggcagcgcucaagccugcggccg

SEQ ID NO: 100249 - RNA, 25 nt, Artificial Sequence
  Description of Artificial Sequence: Synthetic oligonucleotide
gcgccgccuccuaccccccugcgcg

SEQ ID NO: 100250 - RNA, 25 nt, Artificial Sequence
  Description of Artificial Sequence: Synthetic oligonucleotide
gccgacggcgcccccagcgcggcac

SEQ ID NO: 100251 - RNA, 25 nt, Artificial Sequence
  Description of Artificial Sequence: Synthetic oligonucleotide
ccccccgacggccugcucgccucuc

SEQ ID NO: 100252 - RNA, 25 nt, Artificial Sequence
  Description of Artificial Sequence: Synthetic oligonucleotide
cccgaccuggggcugcugaagcugg

SEQ ID NO: 100253 - RNA, 25 nt, Artificial Sequence
  Description of Artificial Sequence: Synthetic oligonucleotide
gccucccccgagcucgagcgccuca

SEQ ID NO: 100254 - RNA, 25 nt, Artificial Sequence
  Description of Artificial Sequence: Synthetic oligonucleotide
aucauccaguccaacgggcugguca

SEQ ID NO: 100255 - RNA, 25 nt, Artificial Sequence
  Description of Artificial Sequence: Synthetic oligonucleotide
accaccacgccgacgagcucacagu

SEQ ID NO: 100256 - RNA, 25 nt, Artificial Sequence
  Description of Artificial Sequence: Synthetic oligonucleotide
uuccucuaccccaagguggcggcca

SEQ ID NO: 100257 - RNA, 25 nt, Artificial Sequence
  Description of Artificial Sequence: Synthetic oligonucleotide
agcgaggagcaggaguucgccgagg

SEQ ID NO: 100258 - RNA, 25 nt, Artificial Sequence
  Description of Artificial Sequence: Synthetic oligonucleotide
ggcuucgucaaggcccuggaggauu

SEQ ID NO: 100259 - RNA, 25 nt, Artificial Sequence
  Description of Artificial Sequence: Synthetic oligonucleotide
uuacacaagcagaaccagcucggcg

SEQ ID NO: 100260 - RNA, 25 nt, Artificial Sequence
  Description of Artificial Sequence: Synthetic oligonucleotide
gcgggcgcggccgcugccgccgccg

SEQ ID NO: 100261 - RNA, 25 nt, Artificial Sequence
  Description of Artificial Sequence: Synthetic oligonucleotide
gccgccgccgccggggggcccucgg

SEQ ID NO: 100262 - RNA, 25 nt, Artificial Sequence
  Description of Artificial Sequence: Synthetic oligonucleotide
ggcacggccacgggcuccgcgcccc

SEQ ID NO: 100263 - RNA, 25 nt, Artificial Sequence
  Description of Artificial Sequence: Synthetic oligonucleotide
cccggcgagcuggccccggcggcgg

SEQ ID NO: 100264 - RNA, 25 nt, Artificial Sequence
  Description of Artificial Sequence: Synthetic oligonucleotide
gccgcgcccgaagcgccugucuacg

SEQ ID NO: 100265 - RNA, 25 nt, Artificial Sequence
  Description of Artificial Sequence: Synthetic oligonucleotide
gcgaaccugagcagcuacgcgggcg

SEQ ID NO: 100266 - RNA, 25 nt, Artificial Sequence
  Description of Artificial Sequence: Synthetic oligonucleotide
ggcgccgggggcgcggggggcgccg

SEQ ID NO: 100267 - RNA, 25 nt, Artificial Sequence
  Description of Artificial Sequence: Synthetic oligonucleotide
gcgacggucgccuucgcugccgaac

SEQ ID NO: 100268 - RNA, 25 nt, Artificial Sequence
  Description of Artificial Sequence: Synthetic oligonucleotide
ccugugcccuucccgccgccgccac

SEQ ID NO: 100269 - RNA, 25 nt, Artificial Sequence
  Description of Artificial Sequence: Synthetic oligonucleotide
cccccaggcgcguuggggccgccgc

SEQ ID NO: 100270 - RNA, 25 nt, Artificial Sequence
  Description of Artificial Sequence: Synthetic oligonucleotide
cgccuggcugcgcucaaggacgagc

SEQ ID NO: 100271 - RNA, 25 nt, Artificial Sequence
  Description of Artificial Sequence: Synthetic oligonucleotide
ccacagacggugcccgacgugccga

SEQ ID NO: 100272 - RNA, 25 nt, Artificial Sequence
  Description of Artificial Sequence: Synthetic oligonucleotide
agcuucggcgagagcccgccguugu

SEQ ID NO: 100273 - RNA, 25 nt, Artificial Sequence
  Description of Artificial Sequence: Synthetic oligonucleotide
ucgcccaucgacauggacacgcagg

SEQ ID NO: 100274 - RNA, 25 nt, Artificial Sequence
  Description of Artificial Sequence: Synthetic oligonucleotide
gagcgcaucaaggcggagcgcaagc

SEQ ID NO: 100275 - RNA, 25 nt, Artificial Sequence
  Description of Artificial Sequence: Synthetic oligonucleotide
cggcugcgcaaccgcaucgccgccu

SEQ ID NO: 100276 - RNA, 25 nt, Artificial Sequence
  Description of Artificial Sequence: Synthetic oligonucleotide
uccaagugccgcaagcgcaagcugg

SEQ ID NO: 100277 - RNA, 25 nt, Artificial Sequence
  Description of Artificial Sequence: Synthetic oligonucleotide
gagcgcaucucgcgccuggaagaga

SEQ ID NO: 100278 - RNA, 25 nt, Artificial Sequence
  Description of Artificial Sequence: Synthetic oligonucleotide
aaagugaagacccucaagagucaga

SEQ ID NO: 100279 - RNA, 25 nt, Artificial Sequence
  Description of Artificial Sequence: Synthetic oligonucleotide
aacacggagcuggcguccacggcga

SEQ ID NO: 100280 - RNA, 25 nt, Artificial Sequence
  Description of Artificial Sequence: Synthetic oligonucleotide
agccugcugcgcgagcagguggcgc

SEQ ID NO: 100281 - RNA, 25 nt, Artificial Sequence
  Description of Artificial Sequence: Synthetic oligonucleotide
cagcucaagcagaaaguccucagcc

SEQ ID NO: 100282 - RNA, 25 nt, Artificial Sequence
  Description of Artificial Sequence: Synthetic oligonucleotide
cacgucaacagcggcugccagcugc

SEQ ID NO: 100283 - RNA, 25 nt, Artificial Sequence
  Description of Artificial Sequence: Synthetic oligonucleotide
cugccccagcaccaggugcccgcgu

SEQ ID NO: 100284 - RNA, 25 nt, Artificial Sequence
  Description of Artificial Sequence: Synthetic oligonucleotide
uacugaguccgcgcgcggggcgcau

SEQ ID NO: 100285 - RNA, 25 nt, Artificial Sequence
  Description of Artificial Sequence: Synthetic oligonucleotide
ugcgcggccacccuccccaaggggc

SEQ ID NO: 100286 - RNA, 25 nt, Artificial Sequence
  Description of Artificial Sequence: Synthetic oligonucleotide
cgggcucgcgggggggugucguggg

SEQ ID NO: 100287 - RNA, 25 nt, Artificial Sequence
  Description of Artificial Sequence: Synthetic oligonucleotide
gcgccccggacuuggagagggugcg

SEQ ID NO: 100288 - RNA, 25 nt, Artificial Sequence
  Description of Artificial Sequence: Synthetic oligonucleotide
ggcccuggggacccccccuccccga

SEQ ID NO: 100289 - RNA, 25 nt, Artificial Sequence
  Description of Artificial Sequence: Synthetic oligonucleotide
agugugcccaggaacucagagaggg

SEQ ID NO: 100290 - RNA, 25 nt, Artificial Sequence
  Description of Artificial Sequence: Synthetic oligonucleotide
gcgcggcccccggggauuccccccc

SEQ ID NO: 100291 - RNA, 25 nt, Artificial Sequence
  Description of Artificial Sequence: Synthetic oligonucleotide
ccccgagggugcccaggacucgaca

SEQ ID NO: 100292 - RNA, 25 nt, Artificial Sequence
  Description of Artificial Sequence: Synthetic oligonucleotide
aagcuggacccccugcucccggggg

SEQ ID NO: 100293 - RNA, 25 nt, Artificial Sequence
  Description of Artificial Sequence: Synthetic oligonucleotide
gggcgagcgcaugacccccccgccc

SEQ ID NO: 100294 - RNA, 25 nt, Artificial Sequence
  Description of Artificial Sequence: Synthetic oligonucleotide
cucgcgcugccucuuucccccgcgc

SEQ ID NO: 100295 - RNA, 25 nt, Artificial Sequence
  Description of Artificial Sequence: Synthetic oligonucleotide
cggccgccccguguugcacaaaccc

SEQ ID NO: 100296 - RNA, 25 nt, Artificial Sequence
  Description of Artificial Sequence: Synthetic oligonucleotide
cgcgcgucucggcugccccuuugua

SEQ ID NO: 100297 - RNA, 25 nt, Artificial Sequence
  Description of Artificial Sequence: Synthetic oligonucleotide
acaccgcgccgcggaagggggcucc

SEQ ID NO: 100298 - RNA, 25 nt, Artificial Sequence
  Description of Artificial Sequence: Synthetic oligonucleotide
cgagggggcgcagccucaaacccug

SEQ ID NO: 100299 - RNA, 25 nt, Artificial Sequence
  Description of Artificial Sequence: Synthetic oligonucleotide
gccuuuccuuuacuuuuacuuuuuu

SEQ ID NO: 100300 - RNA, 25 nt, Artificial Sequence
  Description of Artificial Sequence: Synthetic oligonucleotide
uuuuuuuuucuuuggaagagagaag

SEQ ID NO: 100301 - RNA, 25 nt, Artificial Sequence
  Description of Artificial Sequence: Synthetic oligonucleotide
gaacagaguguucgauucugcccua

SEQ ID NO: 100302 - RNA, 25 nt, Artificial Sequence
  Description of Artificial Sequence: Synthetic oligonucleotide
auuuauguuucuacucgggaacaaa

SEQ ID NO: 100303 - RNA, 25 nt, Artificial Sequence
  Description of Artificial Sequence: Synthetic oligonucleotide
acguugguuguguguguguguguuu

SEQ ID NO: 100304 - RNA, 25 nt, Artificial Sequence
  Description of Artificial Sequence: Synthetic oligonucleotide
uucuuguguugguuuuuuaaagaaa

SEQ ID NO: 100305 - RNA, 25 nt, Artificial Sequence
  Description of Artificial Sequence: Synthetic oligonucleotide
augggaagaagaaaaaaaaauucuc

SEQ ID NO: 100306 - RNA, 25 nt, Artificial Sequence
  Description of Artificial Sequence: Synthetic oligonucleotide
ccgccccuuuccucgaucucgcucc

SEQ ID NO: 100307 - RNA, 25 nt, Artificial Sequence
  Description of Artificial Sequence: Synthetic oligonucleotide
cccccuucgguucuuucgaccgguc

SEQ ID NO: 100308 - RNA, 25 nt, Artificial Sequence
  Description of Artificial Sequence: Synthetic oligonucleotide
ccccccucccuuuuuuguucuguuu

SEQ ID NO: 100309 - RNA, 25 nt, Artificial Sequence
  Description of Artificial Sequence: Synthetic oligonucleotide
uuguuuuguuuugcuacgaguccac

SEQ ID NO: 100310 - RNA, 25 nt, Artificial Sequence
  Description of Artificial Sequence: Synthetic oligonucleotide
cauuccuguuuguaauccuugguuc

SEQ ID NO: 100311 - RNA, 25 nt, Artificial Sequence
  Description of Artificial Sequence: Synthetic oligonucleotide
cgcccgguuuucuguuuucaguaaa

SEQ ID NO: 100312 - RNA, 25 nt, Artificial Sequence
  Description of Artificial Sequence: Synthetic oligonucleotide
uuuucaguaaagucucguuacgcca

SEQ ID NO: 100313 - DNA, 21 bp, Artificial Sequence
  Description of Artificial Sequence: Synthetic oligonucleotide
  Description of Combined DNA/RNA Molecule: Synthetic oligonucleotide
cuacacaaaucagcgauuutt

SEQ ID NO: 100314 - DNA, 21 bp, Artificial Sequence
  Description of Artificial Sequence: Synthetic oligonucleotide
  Description of Combined DNA/RNA Molecule: Synthetic oligonucleotide
aaaucgcugauuuguguagtt

SEQ ID NO: 100315 - DNA, 25 bp, Artificial Sequence
  Description of Artificial Sequence: Synthetic oligonucleotide
  Description of Combined DNA/RNA Molecule: Synthetic oligonucleotide
cuacacaaaucagcgauuuccaugt

SEQ ID NO: 100316 - RNA, 27 nt, Artificial Sequence
  Description of Artificial Sequence: Synthetic oligonucleotide
acauggaaaucgcugauuuguguaguc

SEQ ID NO: 100317 - RNA, 13 nt, Artificial Sequence
  Description of Artificial Sequence: Synthetic oligonucleotide
cuacacaaaucag

SEQ ID NO: 100318 - DNA, 11 bp, Artificial Sequence
  Description of Artificial Sequence: Synthetic oligonucleotide
  Description of Combined DNA/RNA Molecule: Synthetic oligonucleotide
gauuuccaugt

SEQ ID NO: 100319 - DNA, 21 bp, Artificial Sequence
  Description of Artificial Sequence: Synthetic oligonucleotide
  Description of Combined DNA/RNA Molecule: Synthetic oligonucleotide
ggaucuuauuucuucggagtt

SEQ ID NO: 100320 - DNA, 21 bp, Artificial Sequence
  Description of Artificial Sequence: Synthetic oligonucleotide
  Description of Combined DNA/RNA Molecule: Synthetic oligonucleotide
cuccgaagaaauaagaucctt

SEQ ID NO: 100321 - RNA, 11 nt, Artificial Sequence
  Description of Artificial Sequence: Synthetic oligonucleotide
ggaucuuauuu

SEQ ID NO: 100322 - DNA, 10 bp, Artificial Sequence
  Description of Artificial Sequence: Synthetic oligonucleotide
  Description of Combined DNA/RNA Molecule: Synthetic oligonucleotide
cuucggagtt

SEQ ID NO: 100323 - RNA, 27 nt, Artificial Sequence
  Description of Artificial Sequence: Synthetic oligonucleotide
cauugucuccgaagaaauaagauccuu

SEQ ID NO: 100324 - RNA, 8 nt, Artificial Sequence
  Description of Artificial Sequence: Synthetic oligonucleotide
  modified_base (2): LNA-G
ggaucuua

SEQ ID NO: 100325 - DNA, 17 bp, Artificial Sequence
  Description of Artificial Sequence: Synthetic oligonucleotide
  Description of Combined DNA/RNA Molecule: Synthetic oligonucleotide
uuucuucggagacaatg

SEQ ID NO: 100326 - DNA, 16 bp, Artificial Sequence
  Description of Artificial Sequence: Synthetic oligonucleotide
  Description of Combined DNA/RNA Molecule: Synthetic oligonucleotide
uucuucggagacaatg

SEQ ID NO: 100327 - DNA, 15 bp, Artificial Sequence
  Description of Artificial Sequence: Synthetic oligonucleotide
  Description of Combined DNA/RNA Molecule: Synthetic oligonucleotide
ucuucggagacaatg

SEQ ID NO: 100328 - DNA, 14 bp, Artificial Sequence
  Description of Artificial Sequence: Synthetic oligonucleotide
  Description of Combined DNA/RNA Molecule: Synthetic oligonucleotide
cuucggagacaatg

SEQ ID NO: 100329 - DNA, 13 bp, Artificial Sequence
  Description of Artificial Sequence: Synthetic oligonucleotide
  Description of Combined DNA/RNA Molecule: Synthetic oligonucleotide
uucggagacaatg

SEQ ID NO: 100330 - DNA, 12 bp, Artificial Sequence
  Description of Artificial Sequence: Synthetic oligonucleotide
  Description of Combined DNA/RNA Molecule: Synthetic oligonucleotide
ucggagacaatg

SEQ ID NO: 100331 - DNA, 11 bp, Artificial Sequence
  Description of Artificial Sequence: Synthetic oligonucleotide
  Description of Combined DNA/RNA Molecule: Synthetic oligonucleotide
cggagacaatg

SEQ ID NO: 100332 - RNA, 9 nt, Artificial Sequence
  Description of Artificial Sequence: Synthetic oligonucleotide
  modified_base (2): LNA-G
ggaucuuau

SEQ ID NO: 100333 - RNA, 10 nt, Artificial Sequence
  Description of Artificial Sequence: Synthetic oligonucleotide
  modified_base (2): LNA-G
ggaucuuauu

SEQ ID NO: 100334 - RNA, 11 nt, Artificial Sequence
  Description of Artificial Sequence: Synthetic oligonucleotide
  modified_base (2): LNA-G
ggaucuuauuu

SEQ ID NO: 100335 - RNA, 12 nt, Artificial Sequence
  Description of Artificial Sequence: Synthetic oligonucleotide
  modified_base (2): LNA-G
ggaucuuauuuc

SEQ ID NO: 100336 - RNA, 8 nt, Artificial Sequence
  Description of Artificial Sequence: Synthetic oligonucleotide
  modified_base (3): LNA-A
cuacacaa

SEQ ID NO: 100337 - DNA, 13 bp, Artificial Sequence
  Description of Artificial Sequence: Synthetic oligonucleotide
  Description of Combined DNA/RNA Molecule: Synthetic oligonucleotide
  modified_base (8): LNA-A
aucagcgauuutt

SEQ ID NO: 100338 - DNA, 12 bp, Artificial Sequence
  Description of Artificial Sequence: Synthetic oligonucleotide
  Description of Combined DNA/RNA Molecule: Synthetic oligonucleotide
  modified_base (7): LNA-A
ucagcgauuutt

SEQ ID NO: 100339 - DNA, 11 bp, Artificial Sequence
  Description of Artificial Sequence: Synthetic oligonucleotide
  Description of Combined DNA/RNA Molecule: Synthetic oligonucleotide
  modified_base (6): LNA-A
cagcgauuutt

SEQ ID NO: 100340 - DNA, 10 bp, Artificial Sequence
  Description of Artificial Sequence: Synthetic oligonucleotide
  Description of Combined DNA/RNA Molecule: Synthetic oligonucleotide
  modified_base (5): LNA-A
agcgauuutt

SEQ ID NO: 100341 - DNA, 9 bp, Artificial Sequence
  Description of Artificial Sequence: Synthetic oligonucleotide
  Description of Combined DNA/RNA Molecule: Synthetic oligonucleotide
  modified_base (4): LNA-A
gcgauuutt

SEQ ID NO: 100342 - DNA, 8 bp, Artificial Sequence
  Description of Artificial Sequence: Synthetic oligonucleotide
  Description of Combined DNA/RNA Molecule: Synthetic oligonucleotide
  modified_base (3): LNA-A
cgauuutt

SEQ ID NO: 100343 - DNA, 7 bp, Artificial Sequence
  Description of Artificial Sequence: Synthetic oligonucleotide
  Description of Combined DNA/RNA Molecule: Synthetic oligonucleotide
  modified_base (2): LNA-A
gauuutt

SEQ ID NO: 100344 - RNA, 9 nt, Artificial Sequence
  Description of Artificial Sequence: Synthetic oligonucleotide
  modified_base (3): LNA-A
cuacacaaa

SEQ ID NO: 100345 - RNA, 10 nt, Artificial Sequence
  Description of Artificial Sequence: Synthetic oligonucleotide
  modified_base (3): LNA-A
cuacacaaau

SEQ ID NO: 100346 - RNA, 11 nt, Artificial Sequence
  Description of Artificial Sequence: Synthetic oligonucleotide
  modified_base (3): LNA-A
cuacacaaauc

SEQ ID NO: 100347 - RNA, 12 nt, Artificial Sequence
  Description of Artificial Sequence: Synthetic oligonucleotide
  modified_base (3): LNA-A
cuacacaaauca

SEQ ID NO: 100348 - RNA, 13 nt, Artificial Sequence
  Description of Artificial Sequence: Synthetic oligonucleotide
  modified_base (3): LNA-A
cuacacaaaucag

SEQ ID NO: 100349 - RNA, 14 nt, Artificial Sequence
  Description of Artificial Sequence: Synthetic oligonucleotide
  modified_base (3): LNA-A
cuacacaaaucagc

SEQ ID NO: 100350 - RNA, 13 nt, Artificial Sequence
  Description of Artificial Sequence: Synthetic oligonucleotide
  modified_base (2): LNA-G
ggaucuuauuucu

SEQ ID NO: 100351 - RNA, 14 nt, Artificial Sequence
  Description of Artificial Sequence: Synthetic oligonucleotide
  modified_base (2): LNA-G
ggaucuuauuucuu

SEQ ID NO: 100352 - RNA, 8 nt, Artificial Sequence
  Description of Artificial Sequence: Synthetic oligonucleotide
  modified_base (2): LNA-G
  modified_base (8): LNA-A
ggaucuua

SEQ ID NO: 100353 - RNA, 9 nt, Artificial Sequence
  Description of Artificial Sequence: Synthetic oligonucleotide
  modified_base (2): LNA-G
  modified_base (9): LNA-U
ggaucuuau

SEQ ID NO: 100354 - RNA, 10 nt, Artificial Sequence
  Description of Artificial Sequence: Synthetic oligonucleotide
  modified_base (2): LNA-G
  modified_base (10): LNA-U
ggaucuuauu

SEQ ID NO: 100355 - RNA, 11 nt, Artificial Sequence
  Description of Artificial Sequence: Synthetic oligonucleotide
  modified_base (2): LNA-G
  modified_base (11): LNA-U
ggaucuuauuu

SEQ ID NO: 100356 - RNA, 12 nt, Artificial Sequence
  Description of Artificial Sequence: Synthetic oligonucleotide
  modified_base (2): LNA-G
  modified_base (12): LNA-C
ggaucuuauuuc

SEQ ID NO: 100357 - RNA, 13 nt, Artificial Sequence
  Description of Artificial Sequence: Synthetic oligonucleotide
  modified_base (2): LNA-G
  modified_base (13): LNA-U
ggaucuuauuucu

SEQ ID NO: 100358 - RNA, 14 nt, Artificial Sequence
  Description of Artificial Sequence: Synthetic oligonucleotide
  modified_base (2): LNA-G
  modified_base (14): LNA-U
ggaucuuauuucuu

SEQ ID NO: 100359 - DNA, 13 bp, Artificial Sequence
  Description of Artificial Sequence: Synthetic oligonucleotide
  Description of Combined DNA/RNA Molecule: Synthetic oligonucleotide
  modified_base (8): LNA-G
uuucuucggagtt

SEQ ID NO: 100360 - DNA, 12 bp, Artificial Sequence
  Description of Artificial Sequence: Synthetic oligonucleotide
  Description of Combined DNA/RNA Molecule: Synthetic oligonucleotide
  modified_base (7): LNA-G
uucuucggagtt

SEQ ID NO: 100361 - DNA, 11 bp, Artificial Sequence
  Description of Artificial Sequence: Synthetic oligonucleotide
  Description of Combined DNA/RNA Molecule: Synthetic oligonucleotide
  modified_base (6): LNA-G
ucuucggagtt

SEQ ID NO: 100362 - DNA, 10 bp, Artificial Sequence
  Description of Artificial Sequence: Synthetic oligonucleotide
  Description of Combined DNA/RNA Molecule: Synthetic oligonucleotide
  modified_base (5): LNA-G
cuucggagtt

SEQ ID NO: 100363 - DNA, 9 bp, Artificial Sequence
  Description of Artificial Sequence: Synthetic oligonucleotide
  Description of Combined DNA/RNA Molecule: Synthetic oligonucleotide
  modified_base (4): LNA-G
uucggagtt

SEQ ID NO: 100364 - DNA, 8 bp, Artificial Sequence
  Description of Artificial Sequence: Synthetic oligonucleotide
  Description of Combined DNA/RNA Molecule: Synthetic oligonucleotide
  modified_base (3): LNA-G
ucggagtt

SEQ ID NO: 100365 - DNA, 7 bp, Artificial Sequence
  Description of Artificial Sequence: Synthetic oligonucleotide
  Description of Combined DNA/RNA Molecule: Synthetic oligonucleotide
  modified_base (2): LNA-G
cggagtt

SEQ ID NO: 100366 - DNA, 13 bp, Artificial Sequence
  Description of Artificial Sequence: Synthetic oligonucleotide
  Description of Combined DNA/RNA Molecule: Synthetic oligonucleotide
  modified_base (1): LNA-U
  modified_base (8): LNA-G
uuucuucggagtt

SEQ ID NO: 100367 - DNA, 12 bp, Artificial Sequence
  Description of Artificial Sequence: Synthetic oligonucleotide
  Description of Combined DNA/RNA Molecule: Synthetic oligonucleotide
  modified_base (1): LNA-U
  modified_base (7): LNA-G
uucuucggagtt

SEQ ID NO: 100368 - DNA, 11 bp, Artificial Sequence
  Description of Artificial Sequence: Synthetic oligonucleotide
  Description of Combined DNA/RNA Molecule: Synthetic oligonucleotide
  modified_base (1): LNA-U
  modified_base (6): LNA-G
ucuucggagtt

SEQ ID NO: 100369 - DNA, 10 bp, Artificial Sequence
  Description of Artificial Sequence: Synthetic oligonucleotide
  Description of Combined DNA/RNA Molecule: Synthetic oligonucleotide
  modified_base (1): LNA-C
  modified_base (5): LNA-G
cuucggagtt

SEQ ID NO: 100370 - DNA, 9 bp, Artificial Sequence
  Description of Artificial Sequence: Synthetic oligonucleotide
  Description of Combined DNA/RNA Molecule: Synthetic oligonucleotide
  modified_base (1): LNA-U
  modified_base (4): LNA-G
uucggagtt

SEQ ID NO: 100371 - DNA, 8 bp, Artificial Sequence
  Description of Artificial Sequence: Synthetic oligonucleotide
  Description of Combined DNA/RNA Molecule: Synthetic oligonucleotide
  modified_base (1): LNA-U
  modified_base (3): LNA-G
ucggagtt

SEQ ID NO: 100372 - DNA, 7 bp, Artificial Sequence
  Description of Artificial Sequence: Synthetic oligonucleotide
  Description of Combined DNA/RNA Molecule: Synthetic oligonucleotide
  modified_base (1): LNA-C
  modified_base (2): LNA-G
cggagtt

SEQ ID NO: 100373 - DNA, 21 bp, Artificial Sequence
  Description of Artificial Sequence: Synthetic oligonucleotide
  Description of Combined DNA/RNA Molecule: Synthetic oligonucleotide
  modified_base (2): LNA-G
  modified_base (16): LNA-G
ggaucuuauuucuucggagtt

SEQ ID NO: 100374 - DNA, 25 bp, Artificial Sequence
  Description of Artificial Sequence: Synthetic oligonucleotide
  Description of Combined DNA/RNA Molecule: Synthetic oligonucleotide
ggaucuuauuucuucggagacaatg

SEQ ID NO: 100375 - RNA, 25 nt, Artificial Sequence
  Description of Artificial Sequence: Synthetic oligonucleotide
guauuuugaugaggaguucacggcc

SEQ ID NO: 100376 - RNA, 25 nt, Artificial Sequence
  Description of Artificial Sequence: Synthetic oligonucleotide
ggcccagaugaucaccaucacacca

SEQ ID NO: 100377 - RNA, 25 nt, Artificial Sequence
  Description of Artificial Sequence: Synthetic oligonucleotide
gggaagaaaacuauccugcggguuu

SEQ ID NO: 100378 - RNA, 25 nt, Artificial Sequence
  Description of Artificial Sequence: Synthetic oligonucleotide
guuuuaauuuauuucauccaguuug

SEQ ID NO: 100379 - RNA, 25 nt, Artificial Sequence
  Description of Artificial Sequence: Synthetic oligonucleotide
acguagggaaauguuaaggacuucu

SEQ ID NO: 100380 - RNA, 25 nt, Artificial Sequence
  Description of Artificial Sequence: Synthetic oligonucleotide
ccaggguuuacccagugggacagag

SEQ ID NO: 100381 - RNA, 25 nt, Artificial Sequence
  Description of Artificial Sequence: Synthetic oligonucleotide
agcaagguuuaaauuuguuauugug

SEQ ID NO: 100382 - RNA, 25 nt, Artificial Sequence
  Description of Artificial Sequence: Synthetic oligonucleotide
uguauuauguuguucaaaugcauuu

SEQ ID NO: 100383 - RNA, 25 nt, Artificial Sequence
  Description of Artificial Sequence: Synthetic oligonucleotide
uuuuaaucuuugugacaggaaagcc

SEQ ID NO: 100384 - RNA, 25 nt, Artificial Sequence
  Description of Artificial Sequence: Synthetic oligonucleotide
uuaaucuuugugacaggaaagcccu

SEQ ID NO: 100385 - RNA, 25 nt, Artificial Sequence
  Description of Artificial Sequence: Synthetic oligonucleotide
gcugcuuaugucucccagcauggcc

SEQ ID NO: 100386 - RNA, 25 nt, Artificial Sequence
  Description of Artificial Sequence: Synthetic oligonucleotide
aaguguuucagaagcuucucccuga

SEQ ID NO: 100387 - RNA, 25 nt, Artificial Sequence
  Description of Artificial Sequence: Synthetic oligonucleotide
gaccaucaauaaggaagaagcccuu

SEQ ID NO: 100388 - RNA, 25 nt, Artificial Sequence
  Description of Artificial Sequence: Synthetic oligonucleotide
ccaucaauaaggaagaagcccuuca

SEQ ID NO: 100389 - RNA, 25 nt, Artificial Sequence
  Description of Artificial Sequence: Synthetic oligonucleotide
ucaauaaggaagaagcccuucagcg

SEQ ID NO: 100390 - RNA, 25 nt, Artificial Sequence
  Description of Artificial Sequence: Synthetic oligonucleotide
aauaaggaagaagcccuucagcggc

SEQ ID NO: 100391 - RNA, 25 nt, Artificial Sequence
  Description of Artificial Sequence: Synthetic oligonucleotide
aggaagaagcccuucagcggccagu

SEQ ID NO: 100392 - RNA, 25 nt, Artificial Sequence
  Description of Artificial Sequence: Synthetic oligonucleotide
gcauaacuaaaggugaaaagcuccg

SEQ ID NO: 100393 - RNA, 25 nt, Artificial Sequence
  Description of Artificial Sequence: Synthetic oligonucleotide
cauaacuaaaggugaaaagcuccgg

SEQ ID NO: 100394 - RNA, 25 nt, Artificial Sequence
  Description of Artificial Sequence: Synthetic oligonucleotide
cuacaucacgccagucaacagucug

SEQ ID NO: 100395 - RNA, 25 nt, Artificial Sequence
  Description of Artificial Sequence: Synthetic oligonucleotide
acuggauuuaagcagaguucaaaag

SEQ ID NO: 100396 - RNA, 25 nt, Artificial Sequence
  Description of Artificial Sequence: Synthetic oligonucleotide
cuggauuuaagcagaguucaaaagc

SEQ ID NO: 100397 - RNA, 25 nt, Artificial Sequence
  Description of Artificial Sequence: Synthetic oligonucleotide
gauuuaagcagaguucaaaagcccu

SEQ ID NO: 100398 - RNA, 25 nt, Artificial Sequence
  Description of Artificial Sequence: Synthetic oligonucleotide
auuuaagcagaguucaaaagcccuu

SEQ ID NO: 100399 - RNA, 25 nt, Artificial Sequence
  Description of Artificial Sequence: Synthetic oligonucleotide
uuaagcagaguucaaaagcccuuca

SEQ ID NO: 100400 - RNA, 25 nt, Artificial Sequence
  Description of Artificial Sequence: Synthetic oligonucleotide
uaagcagaguucaaaagcccuucag

SEQ ID NO: 100401 - RNA, 25 nt, Artificial Sequence
  Description of Artificial Sequence: Synthetic oligonucleotide
agcagaguucaaaagcccuucagcg

SEQ ID NO: 100402 - RNA, 25 nt, Artificial Sequence
  Description of Artificial Sequence: Synthetic oligonucleotide
cucagggucugagugaagccgcucg

SEQ ID NO: 100403 - RNA, 25 nt, Artificial Sequence
  Description of Artificial Sequence: Synthetic oligonucleotide
caagcaacuacaucacgccagucaa

SEQ ID NO: 100404 - RNA, 25 nt, Artificial Sequence
  Description of Artificial Sequence: Synthetic oligonucleotide
aucaauggcagcuucuuggugcgug

SEQ ID NO: 100405 - RNA, 25 nt, Artificial Sequence
  Description of Artificial Sequence: Synthetic oligonucleotide
uuccagcccacauuggauucaucag

SEQ ID NO: 100406 - RNA, 25 nt, Artificial Sequence
  Description of Artificial Sequence: Synthetic oligonucleotide
cagcugagaauguggaauaccuaag

SEQ ID NO: 100407 - RNA, 25 nt, Artificial Sequence
  Description of Artificial Sequence: Synthetic oligonucleotide
aacguaucuccuaauuugaggcuca

SEQ ID NO: 100408 - RNA, 25 nt, Artificial Sequence
  Description of Artificial Sequence: Synthetic oligonucleotide
ccuaaaauaauuucucuacaauugg

SEQ ID NO: 100409 - RNA, 25 nt, Artificial Sequence
  Description of Artificial Sequence: Synthetic oligonucleotide
uggaagauucagcuaguuaggagcc

SEQ ID NO: 100410 - RNA, 25 nt, Artificial Sequence
  Description of Artificial Sequence: Synthetic oligonucleotide
uuaaacucuccuagucaauauccac

SEQ ID NO: 100411 - RNA, 25 nt, Artificial Sequence
  Description of Artificial Sequence: Synthetic oligonucleotide
cagccuacaguuauguucagucaca

SEQ ID NO: 100412 - RNA, 25 nt, Artificial Sequence
  Description of Artificial Sequence: Synthetic oligonucleotide
guuauguucagucacacacacauac

SEQ ID NO: 100413 - RNA, 25 nt, Artificial Sequence
  Description of Artificial Sequence: Synthetic oligonucleotide
cacauacaaaauguuccuuuugcuu

SEQ ID NO: 100414 - RNA, 25 nt, Artificial Sequence
  Description of Artificial Sequence: Synthetic oligonucleotide
uccuuuugcuuuuaaaguaauuuuu

SEQ ID NO: 100415 - RNA, 25 nt, Artificial Sequence
  Description of Artificial Sequence: Synthetic oligonucleotide
ugaccugugaagcaacagucaaugg

SEQ ID NO: 100416 - RNA, 25 nt, Artificial Sequence
  Description of Artificial Sequence: Synthetic oligonucleotide
cuaucucacacaucgacaaaccaau

SEQ ID NO: 100417 - RNA, 25 nt, Artificial Sequence
  Description of Artificial Sequence: Synthetic oligonucleotide
uguccucaauuguacugcuaccacu

SEQ ID NO: 100418 - RNA, 25 nt, Artificial Sequence
  Description of Artificial Sequence: Synthetic oligonucleotide
aaaccguagcuggcaagcggucuua

SEQ ID NO: 100419 - RNA, 25 nt, Artificial Sequence
  Description of Artificial Sequence: Synthetic oligonucleotide
uagcuggcaagcggucuuaccggcu

SEQ ID NO: 100420 - RNA, 25 nt, Artificial Sequence
  Description of Artificial Sequence: Synthetic oligonucleotide
uuguaugguuaaaagauggguuacc

SEQ ID NO: 100421 - RNA, 25 nt, Artificial Sequence
  Description of Artificial Sequence: Synthetic oligonucleotide
ugguuaaaagauggguuaccugcga

SEQ ID NO: 100422 - RNA, 25 nt, Artificial Sequence
  Description of Artificial Sequence: Synthetic oligonucleotide
cagggaauuauacaaucuugcugag

SEQ ID NO: 100423 - RNA, 25 nt, Artificial Sequence
  Description of Artificial Sequence: Synthetic oligonucleotide
acaaucuugcugagcauaaaacagu

SEQ ID NO: 100424 - RNA, 25 nt, Artificial Sequence
  Description of Artificial Sequence: Synthetic oligonucleotide
ccaauaaugaagaguccuuuauccu

SEQ ID NO: 100425 - RNA, 25 nt, Artificial Sequence
  Description of Artificial Sequence: Synthetic oligonucleotide
acuuuggauguuccaacgcaaguug

SEQ ID NO: 100426 - RNA, 25 nt, Artificial Sequence
  Description of Artificial Sequence: Synthetic oligonucleotide
aaugcuuccacuaaacugaaaccau

SEQ ID NO: 100427 - RNA, 25 nt, Artificial Sequence
  Description of Artificial Sequence: Synthetic oligonucleotide
gagaaaguuugacuuuguuaaauau

SEQ ID NO: 100428 - RNA, 25 nt, Artificial Sequence
  Description of Artificial Sequence: Synthetic oligonucleotide
aaagaacuacuguauauuaaaaguu

SEQ ID NO: 100429 - RNA, 25 nt, Artificial Sequence
  Description of Artificial Sequence: Synthetic oligonucleotide
uuagaaauacggguuuugacuuaac

SEQ ID NO: 100430 - RNA, 25 nt, Artificial Sequence
  Description of Artificial Sequence: Synthetic oligonucleotide
aacauggguacagcaaacucagcac

SEQ ID NO: 100431 - RNA, 25 nt, Artificial Sequence
  Description of Artificial Sequence: Synthetic oligonucleotide
aaagacacagaagaugcugaccuca

SEQ ID NO: 100432 - RNA, 25 nt, Artificial Sequence
  Description of Artificial Sequence: Synthetic oligonucleotide
uaguagggagguuuauucagaucgc

SEQ ID NO: 100433 - RNA, 25 nt, Artificial Sequence
  Description of Artificial Sequence: Synthetic oligonucleotide
gccuucugcagcaggguucugggau

SEQ ID NO: 100434 - RNA, 25 nt, Artificial Sequence
  Description of Artificial Sequence: Synthetic oligonucleotide
ggucugguacauauuggaaauuaug

SEQ ID NO: 100435 - RNA, 25 nt, Artificial Sequence
  Description of Artificial Sequence: Synthetic oligonucleotide
cuaguccuuccgauggaagcacuag

SEQ ID NO: 100436 - RNA, 25 nt, Artificial Sequence
  Description of Artificial Sequence: Synthetic oligonucleotide
ccagugaauauuguuuuuaugugga

SEQ ID NO: 100437 - RNA, 25 nt, Artificial Sequence
  Description of Artificial Sequence: Synthetic oligonucleotide
augaauucaaguuggaauugguaga

SEQ ID NO: 100438 - RNA, 25 nt, Artificial Sequence
  Description of Artificial Sequence: Synthetic oligonucleotide
caggacacagauuuagacuuggaga

SEQ ID NO: 100439 - RNA, 25 nt, Artificial Sequence
  Description of Artificial Sequence: Synthetic oligonucleotide
cucaaagcacaguuacaguauucca

SEQ ID NO: 100440 - RNA, 25 nt, Artificial Sequence
  Description of Artificial Sequence: Synthetic oligonucleotide
accacugccaccacugaugaauuaa

SEQ ID NO: 100441 - RNA, 25 nt, Artificial Sequence
  Description of Artificial Sequence: Synthetic oligonucleotide
gaaacuacuagugccacaucaucac

SEQ ID NO: 100442 - RNA, 25 nt, Artificial Sequence
  Description of Artificial Sequence: Synthetic oligonucleotide
aagucggacagccucaccaaacaga

SEQ ID NO: 100443 - RNA, 25 nt, Artificial Sequence
  Description of Artificial Sequence: Synthetic oligonucleotide
gaaagcgaaaaauggaacaugaugg

SEQ ID NO: 100444 - RNA, 25 nt, Artificial Sequence
  Description of Artificial Sequence: Synthetic oligonucleotide
cccucugauuuagcauguagacugc

SEQ ID NO: 100445 - RNA, 25 nt, Artificial Sequence
  Description of Artificial Sequence: Synthetic oligonucleotide
ugagcuauuuaaggaucuauuuaug

SEQ ID NO: 100446 - RNA, 25 nt, Artificial Sequence
  Description of Artificial Sequence: Synthetic oligonucleotide
aaaaggugaaaaagcacuauuauca

SEQ ID NO: 100447 - RNA, 25 nt, Artificial Sequence
  Description of Artificial Sequence: Synthetic oligonucleotide
gaaaaagcacuauuaucaguucugc

SEQ ID NO: 100448 - RNA, 25 nt, Artificial Sequence
  Description of Artificial Sequence: Synthetic oligonucleotide
ggcugaaaagaaagauuaaaccuac

SEQ ID NO: 100449 - RNA, 25 nt, Artificial Sequence
  Description of Artificial Sequence: Synthetic oligonucleotide
uaaacccuuauaauaaaauccuucu

SEQ ID NO: 100450 - RNA, 25 nt, Artificial Sequence
  Description of Artificial Sequence: Synthetic oligonucleotide
cauacuauuagccaaugcuguagac

SEQ ID NO: 100451 - RNA, 25 nt, Artificial Sequence
  Description of Artificial Sequence: Synthetic oligonucleotide
gacagaagcauuuugauaggaauag

SEQ ID NO: 100452 - RNA, 25 nt, Artificial Sequence
  Description of Artificial Sequence: Synthetic oligonucleotide
agagcaaauaagauaauggcccuga

SEQ ID NO: 100453 - RNA, 25 nt, Artificial Sequence
  Description of Artificial Sequence: Synthetic oligonucleotide
ccaacauuuuucucuuccucaagca

SEQ ID NO: 100454 - RNA, 25 nt, Artificial Sequence
  Description of Artificial Sequence: Synthetic oligonucleotide
uuaaguaugagaaaaguucagccca

SEQ ID NO: 100455 - RNA, 25 nt, Artificial Sequence
  Description of Artificial Sequence: Synthetic oligonucleotide
caggaauaaagauggcugcugaacc

SEQ ID NO: 100456 - RNA, 25 nt, Artificial Sequence
  Description of Artificial Sequence: Synthetic oligonucleotide
aauuugaaugaccaaguucucuuca

SEQ ID NO: 100457 - RNA, 25 nt, Artificial Sequence
  Description of Artificial Sequence: Synthetic oligonucleotide
auguauaaagauagccagccuagag

SEQ ID NO: 100458 - RNA, 25 nt, Artificial Sequence
  Description of Artificial Sequence: Synthetic oligonucleotide
ggcuguaacuaucucugugaagugu

SEQ ID NO: 100459 - RNA, 25 nt, Artificial Sequence
  Description of Artificial Sequence: Synthetic oligonucleotide
ucugugaagugugagaaaauuucaa

SEQ ID NO: 100460 - RNA, 25 nt, Artificial Sequence
  Description of Artificial Sequence: Synthetic oligonucleotide
ccuuuaaggaaaugaauccuccuga

SEQ ID NO: 100461 - RNA, 25 nt, Artificial Sequence
  Description of Artificial Sequence: Synthetic oligonucleotide
aaggauacaaaaagugacaucauau

SEQ ID NO: 100462 - RNA, 25 nt, Artificial Sequence
  Description of Artificial Sequence: Synthetic oligonucleotide
agaugcaauuugaaucuucaucaua

SEQ ID NO: 100463 - RNA, 25 nt, Artificial Sequence
  Description of Artificial Sequence: Synthetic oligonucleotide
guucaaaacgaagacuagcuauuaa

SEQ ID NO: 100464 - RNA, 25 nt, Artificial Sequence
  Description of Artificial Sequence: Synthetic oligonucleotide
gugaaaccucaucucuacuaaaaau

SEQ ID NO: 100465 - RNA, 25 nt, Artificial Sequence
  Description of Artificial Sequence: Synthetic oligonucleotide
acgaaagagaagcucuaucucgccu

SEQ ID NO: 100466 - RNA, 25 nt, Artificial Sequence
  Description of Artificial Sequence: Synthetic oligonucleotide
cuccacaagcgccuucgguccaguu

SEQ ID NO: 100467 - RNA, 25 nt, Artificial Sequence
  Description of Artificial Sequence: Synthetic oligonucleotide
gagaagauuccaaagauguagccgc

SEQ ID NO: 100468 - RNA, 25 nt, Artificial Sequence
  Description of Artificial Sequence: Synthetic oligonucleotide
aaucuggauucaaugaggagacuug

SEQ ID NO: 100469 - RNA, 25 nt, Artificial Sequence
  Description of Artificial Sequence: Synthetic oligonucleotide
agaacagauuugagaguagugagga

SEQ ID NO: 100470 - RNA, 25 nt, Artificial Sequence
  Description of Artificial Sequence: Synthetic oligonucleotide
ccagagcugugcagaugaguacaaa

SEQ ID NO: 100471 - RNA, 25 nt, Artificial Sequence
  Description of Artificial Sequence: Synthetic oligonucleotide
ccucagauuguuguuguuaaugggc

SEQ ID NO: 100472 - RNA, 25 nt, Artificial Sequence
  Description of Artificial Sequence: Synthetic oligonucleotide
cuauuuuaauuauuuuuaauuuauu

SEQ ID NO: 100473 - RNA, 25 nt, Artificial Sequence
  Description of Artificial Sequence: Synthetic oligonucleotide
uuuaauuuauuaauauuuaaauaug

SEQ ID NO: 100474 - RNA, 25 nt, Artificial Sequence
  Description of Artificial Sequence: Synthetic oligonucleotide
augcaguuugaauauccuuuguuuc

SEQ ID NO: 100475 - RNA, 25 nt, Artificial Sequence
  Description of Artificial Sequence: Synthetic oligonucleotide
caugcugcuggcgucuaaguguuug

SEQ ID NO: 100476 - RNA, 25 nt, Artificial Sequence
  Description of Artificial Sequence: Synthetic oligonucleotide
agaugugcauuucaccugugacaaa

SEQ ID NO: 100477 - RNA, 25 nt, Artificial Sequence
  Description of Artificial Sequence: Synthetic oligonucleotide
ucaaaaccugugccaggcugaauua

SEQ ID NO: 100478 - RNA, 25 nt, Artificial Sequence
  Description of Artificial Sequence: Synthetic oligonucleotide
gaauguggguagucauucuuacaau

SEQ ID NO: 100479 - RNA, 25 nt, Artificial Sequence
  Description of Artificial Sequence: Synthetic oligonucleotide
auguggguagucauucuuacaauug

SEQ ID NO: 100480 - RNA, 25 nt, Artificial Sequence
  Description of Artificial Sequence: Synthetic oligonucleotide
ugaaaaugagcaucagagaguguac

SEQ ID NO: 100481 - RNA, 25 nt, Artificial Sequence
  Description of Artificial Sequence: Synthetic oligonucleotide
uugcuuuucauguagaacucagcag

SEQ ID NO: 100482 - RNA, 25 nt, Artificial Sequence
  Description of Artificial Sequence: Synthetic oligonucleotide
uguauuucuauauuuauuuucagua

SEQ ID NO: 100483 - RNA, 25 nt, Artificial Sequence
  Description of Artificial Sequence: Synthetic oligonucleotide
uuugauuaauguuucuuaaauggaa

SEQ ID NO: 100484 - RNA, 25 nt, Artificial Sequence
  Description of Artificial Sequence: Synthetic oligonucleotide
caacguguauagugccuaaaauugu

SEQ ID NO: 100485 - RNA, 25 nt, Artificial Sequence
  Description of Artificial Sequence: Synthetic oligonucleotide
cauauccuuggcuacuaacaucugg

SEQ ID NO: 100486 - RNA, 25 nt, Artificial Sequence
  Description of Artificial Sequence: Synthetic oligonucleotide
uacuaacaucuggagacugugagcu

SEQ ID NO: 100487 - RNA, 25 nt, Artificial Sequence
  Description of Artificial Sequence: Synthetic oligonucleotide
cauaaguugugugcuuuuuauuaau

SEQ ID NO: 100488 - RNA, 25 nt, Artificial Sequence
  Description of Artificial Sequence: Synthetic oligonucleotide
gcaucauuuuggcucuucuuacauu

SEQ ID NO: 100489 - RNA, 25 nt, Artificial Sequence
  Description of Artificial Sequence: Synthetic oligonucleotide
gcucuucuuacauuuguaaaaaugu

SEQ ID NO: 100490 - RNA, 25 nt, Artificial Sequence
  Description of Artificial Sequence: Synthetic oligonucleotide
agauuaggucaucuuaauucauauu

SEQ ID NO: 100491 - RNA, 25 nt, Artificial Sequence
  Description of Artificial Sequence: Synthetic oligonucleotide
auggaauugaaagaacuaaucauga

SEQ ID NO: 100492 - RNA, 25 nt, Artificial Sequence
  Description of Artificial Sequence: Synthetic oligonucleotide
cacacucauuccuucugcucuuggg

SEQ ID NO: 100493 - RNA, 25 nt, Artificial Sequence
  Description of Artificial Sequence: Synthetic oligonucleotide
uguagagguaaccaguagcuuugag

SEQ ID NO: 100494 - RNA, 25 nt, Artificial Sequence
  Description of Artificial Sequence: Synthetic oligonucleotide
caaccacaugccacguaauauuuca

SEQ ID NO: 100495 - RNA, 25 nt, Artificial Sequence
  Description of Artificial Sequence: Synthetic oligonucleotide
ucggaaacaaguuauucucuucacu

SEQ ID NO: 100496 - RNA, 25 nt, Artificial Sequence
  Description of Artificial Sequence: Synthetic oligonucleotide
acucccaauaacuaaugcuaagaaa

SEQ ID NO: 100497 - RNA, 25 nt, Artificial Sequence
  Description of Artificial Sequence: Synthetic oligonucleotide
aaugcuaagaaaugcugaaaaucaa

SEQ ID NO: 100498 - RNA, 25 nt, Artificial Sequence
  Description of Artificial Sequence: Synthetic oligonucleotide
gucuuucucuaaauaugauuacuuu

SEQ ID NO: 100499 - RNA, 25 nt, Artificial Sequence
  Description of Artificial Sequence: Synthetic oligonucleotide
ugaauuucaggcauuuuguucuaca

SEQ ID NO: 100500 - RNA, 25 nt, Artificial Sequence
  Description of Artificial Sequence: Synthetic oligonucleotide
cgauucccucucacccgggacucuc

SEQ ID NO: 100501 - RNA, 25 nt, Artificial Sequence
  Description of Artificial Sequence: Synthetic oligonucleotide
aggaaagugaaccuuuaaaguaaag

SEQ ID NO: 100502 - RNA, 25 nt, Artificial Sequence
  Description of Artificial Sequence: Synthetic oligonucleotide
gaggcugcaugcucuggaagccugg

SEQ ID NO: 100503 - RNA, 25 nt, Artificial Sequence
  Description of Artificial Sequence: Synthetic oligonucleotide
ucucugaacagaaaacaaaagagag

SEQ ID NO: 100504 - RNA, 25 nt, Artificial Sequence
  Description of Artificial Sequence: Synthetic oligonucleotide
aacuuggcuguaaucaguuaugccg

SEQ ID NO: 100505 - RNA, 25 nt, Artificial Sequence
  Description of Artificial Sequence: Synthetic oligonucleotide
agaagccaaaauuaaaagaagucca

SEQ ID NO: 100506 - RNA, 25 nt, Artificial Sequence
  Description of Artificial Sequence: Synthetic oligonucleotide
auuaaaagaaguccaggugagguua

SEQ ID NO: 100507 - RNA, 25 nt, Artificial Sequence
  Description of Artificial Sequence: Synthetic oligonucleotide
gaauccggauuaucgggaagaggac

SEQ ID NO: 100508 - RNA, 25 nt, Artificial Sequence
  Description of Artificial Sequence: Synthetic oligonucleotide
aaugugacaucaaagcaaguauugu

SEQ ID NO: 100509 - RNA, 25 nt, Artificial Sequence
  Description of Artificial Sequence: Synthetic oligonucleotide
caucaaagcaaguauuguagcacuc

SEQ ID NO: 100510 - RNA, 25 nt, Artificial Sequence
  Description of Artificial Sequence: Synthetic oligonucleotide
agagagagaaaacaaaaccacaaau

SEQ ID NO: 100511 - RNA, 25 nt, Artificial Sequence
  Description of Artificial Sequence: Synthetic oligonucleotide
ucgcuguaguauuuaagcccauaca

SEQ ID NO: 100512 - RNA, 25 nt, Artificial Sequence
  Description of Artificial Sequence: Synthetic oligonucleotide
cgcuguaguauuuaagcccauacag

SEQ ID NO: 100513 - RNA, 25 nt, Artificial Sequence
  Description of Artificial Sequence: Synthetic oligonucleotide
auuuaagcccauacagaaaccuucc

SEQ ID NO: 100514 - RNA, 25 nt, Artificial Sequence
  Description of Artificial Sequence: Synthetic oligonucleotide
auuaaaauaaacaugguauaccuac

SEQ ID NO: 100515 - RNA, 25 nt, Artificial Sequence
  Description of Artificial Sequence: Synthetic oligonucleotide
cuguucugaucggccaguuuucgga

SEQ ID NO: 100516 - RNA, 25 nt, Artificial Sequence
  Description of Artificial Sequence: Synthetic oligonucleotide
aaauaauuugaacuuuggaacaggg

SEQ ID NO: 100517 - RNA, 25 nt, Artificial Sequence
  Description of Artificial Sequence: Synthetic oligonucleotide
ugcgaccuuaauuuaacuuuccagu

SEQ ID NO: 100518 - RNA, 25 nt, Artificial Sequence
  Description of Artificial Sequence: Synthetic oligonucleotide
cugagaaagcuaaaguuugguuuug

SEQ ID NO: 100519 - RNA, 25 nt, Artificial Sequence
  Description of Artificial Sequence: Synthetic oligonucleotide
aguaaagaugcuacuucccacugua

SEQ ID NO: 100520 - RNA, 25 nt, Artificial Sequence
  Description of Artificial Sequence: Synthetic oligonucleotide
cugcuuaauugcugauaccauauga

SEQ ID NO: 100521 - RNA, 25 nt, Artificial Sequence
  Description of Artificial Sequence: Synthetic oligonucleotide
uaccauaugaaugaaacaugggcug

SEQ ID NO: 100522 - RNA, 25 nt, Artificial Sequence
  Description of Artificial Sequence: Synthetic oligonucleotide
aacuuucuuauccaacuuuuucaua

SEQ ID NO: 100523 - RNA, 25 nt, Artificial Sequence
  Description of Artificial Sequence: Synthetic oligonucleotide
ccuugcaugacaucaugaggccgga

SEQ ID NO: 100524 - RNA, 25 nt, Artificial Sequence
  Description of Artificial Sequence: Synthetic oligonucleotide
ugaauuuguauaugacugcauuugu

SEQ ID NO: 100525 - RNA, 25 nt, Artificial Sequence
  Description of Artificial Sequence: Synthetic oligonucleotide
gaauccuaguagaauguuuacuacc

SEQ ID NO: 100526 - RNA, 25 nt, Artificial Sequence
  Description of Artificial Sequence: Synthetic oligonucleotide
gaaagggaagaauuuuuugaugaaa

SEQ ID NO: 100527 - RNA, 25 nt, Artificial Sequence
  Description of Artificial Sequence: Synthetic oligonucleotide
uaucggcaugccagugugugaauuu

SEQ ID NO: 100528 - RNA, 25 nt, Artificial Sequence
  Description of Artificial Sequence: Synthetic oligonucleotide
caccucauaguagagcaauguaugu

SEQ ID NO: 100529 - RNA, 25 nt, Artificial Sequence
  Description of Artificial Sequence: Synthetic oligonucleotide
ccagaauugccaaagcacauauaua

SEQ ID NO: 100530 - RNA, 25 nt, Artificial Sequence
  Description of Artificial Sequence: Synthetic oligonucleotide
uggugaucuggguaauaguuucucc

SEQ ID NO: 100531 - RNA, 25 nt, Artificial Sequence
  Description of Artificial Sequence: Synthetic oligonucleotide
gaucuggguaauaguuucuccaaau

SEQ ID NO: 100532 - RNA, 25 nt, Artificial Sequence
  Description of Artificial Sequence: Synthetic oligonucleotide
ggaugugaugaauacuuccuagaaa

SEQ ID NO: 100533 - RNA, 25 nt, Artificial Sequence
  Description of Artificial Sequence: Synthetic oligonucleotide
cauuuccacagcuacaccauauaug

SEQ ID NO: 100534 - RNA, 25 nt, Artificial Sequence
  Description of Artificial Sequence: Synthetic oligonucleotide
acagcuacaccauauaugaauggag

SEQ ID NO: 100535 - RNA, 25 nt, Artificial Sequence
  Description of Artificial Sequence: Synthetic oligonucleotide
ugcaguucuuacacgagaagaagau

SEQ ID NO: 100536 - RNA, 25 nt, Artificial Sequence
  Description of Artificial Sequence: Synthetic oligonucleotide
acgagaagaagaucauuuacaggga

SEQ ID NO: 100537 - RNA, 25 nt, Artificial Sequence
  Description of Artificial Sequence: Synthetic oligonucleotide
cgagaagaagaucauuuacagggac

SEQ ID NO: 100538 - RNA, 25 nt, Artificial Sequence
  Description of Artificial Sequence: Synthetic oligonucleotide
aagaagaucauuuacagggaccuga

SEQ ID NO: 100539 - RNA, 25 nt, Artificial Sequence
  Description of Artificial Sequence: Synthetic oligonucleotide
agaggaagagguguuugacugcauc

SEQ ID NO: 100540 - RNA, 25 nt, Artificial Sequence
  Description of Artificial Sequence: Synthetic oligonucleotide
gaggaagagguguuugacugcaucg

SEQ ID NO: 100541 - RNA, 25 nt, Artificial Sequence
  Description of Artificial Sequence: Synthetic oligonucleotide
cuacuuugagggcgaguucacaggg

SEQ ID NO: 100542 - RNA, 25 nt, Artificial Sequence
  Description of Artificial Sequence: Synthetic oligonucleotide
agggcaucuccuggcaccucugucc

SEQ ID NO: 100543 - RNA, 25 nt, Artificial Sequence
  Description of Artificial Sequence: Synthetic oligonucleotide
ggagugauaugguuugucuuuuuaa

SEQ ID NO: 100544 - RNA, 25 nt, Artificial Sequence
  Description of Artificial Sequence: Synthetic oligonucleotide
gagugauaugguuugucuuuuuaag

SEQ ID NO: 100545 - RNA, 25 nt, Artificial Sequence
  Description of Artificial Sequence: Synthetic oligonucleotide
ugcaguaaagauccuaaagguuguc

SEQ ID NO: 100546 - RNA, 25 nt, Artificial Sequence
  Description of Artificial Sequence: Synthetic oligonucleotide
aguaaagauccuaaagguugucgac

SEQ ID NO: 100547 - RNA, 25 nt, Artificial Sequence
  Description of Artificial Sequence: Synthetic oligonucleotide
ugacaaaggacaaccuggcaauugu

SEQ ID NO: 100548 - RNA, 25 nt, Artificial Sequence
  Description of Artificial Sequence: Synthetic oligonucleotide
gcaauugugacccaguggugcgagg

SEQ ID NO: 100549 - RNA, 25 nt, Artificial Sequence
  Description of Artificial Sequence: Synthetic oligonucleotide
aacaucauccauagagacaugaaau

SEQ ID NO: 100550 - RNA, 25 nt, Artificial Sequence
  Description of Artificial Sequence: Synthetic oligonucleotide
ugaaauccaacaauauauuucucca

SEQ ID NO: 100551 - RNA, 25 nt, Artificial Sequence
  Description of Artificial Sequence: Synthetic oligonucleotide
aacaauauauuucuccaugaaggcu

SEQ ID NO: 100552 - RNA, 25 nt, Artificial Sequence
  Description of Artificial Sequence: Synthetic oligonucleotide
aacaguaaagucacgcuggaguggu

SEQ ID NO: 100553 - RNA, 25 nt, Artificial Sequence
  Description of Artificial Sequence: Synthetic oligonucleotide
ugugaagaaaguaaaggaagagagg

SEQ ID NO: 100554 - RNA, 25 nt, Artificial Sequence
  Description of Artificial Sequence: Synthetic oligonucleotide
cuuccgagccauccuugcaucgggc

SEQ ID NO: 100555 - RNA, 25 nt, Artificial Sequence
  Description of Artificial Sequence: Synthetic oligonucleotide
aauggagguugaauauccuacugug

SEQ ID NO: 100556 - RNA, 25 nt, Artificial Sequence
  Description of Artificial Sequence: Synthetic oligonucleotide
ggagguugaauauccuacuguguaa

SEQ ID NO: 100557 - RNA, 25 nt, Artificial Sequence
  Description of Artificial Sequence: Synthetic oligonucleotide
auuuugaguuuucccuuguagugua

SEQ ID NO: 100558 - RNA, 25 nt, Artificial Sequence
  Description of Artificial Sequence: Synthetic oligonucleotide
uauccuguuuguucuuuguugauug

SEQ ID NO: 100559 - RNA, 25 nt, Artificial Sequence
  Description of Artificial Sequence: Synthetic oligonucleotide
ccuguuuguucuuuguugauugaaa

SEQ ID NO: 100560 - RNA, 25 nt, Artificial Sequence
  Description of Artificial Sequence: Synthetic oligonucleotide
cucuacagccuucuuuuucuuccau

SEQ ID NO: 100561 - RNA, 25 nt, Artificial Sequence
  Description of Artificial Sequence: Synthetic oligonucleotide
ucuuccauagcuaaucuuccuucua

SEQ ID NO: 100562 - RNA, 25 nt, Artificial Sequence
  Description of Artificial Sequence: Synthetic oligonucleotide
auaaucuuccuguugaaugcuucau

SEQ ID NO: 100563 - RNA, 25 nt, Artificial Sequence
  Description of Artificial Sequence: Synthetic oligonucleotide
uaaucuuccuguugaaugcuucaug

SEQ ID NO: 100564 - RNA, 25 nt, Artificial Sequence
  Description of Artificial Sequence: Synthetic oligonucleotide
cuucaugacuugaauucuacuuuga

SEQ ID NO: 100565 - RNA, 25 nt, Artificial Sequence
  Description of Artificial Sequence: Synthetic oligonucleotide
aagagggagagaagcaacuacagac

SEQ ID NO: 100566 - RNA, 25 nt, Artificial Sequence
  Description of Artificial Sequence: Synthetic oligonucleotide
cgucuccuaccagaccaaggucaac

SEQ ID NO: 100567 - RNA, 25 nt, Artificial Sequence
  Description of Artificial Sequence: Synthetic oligonucleotide
gaucaaucggcccgacuaucucgac

SEQ ID NO: 100568 - RNA, 25 nt, Artificial Sequence
  Description of Artificial Sequence: Synthetic oligonucleotide
ggacgaacauccaaccuucccaaac

SEQ ID NO: 100569 - RNA, 25 nt, Artificial Sequence
  Description of Artificial Sequence: Synthetic oligonucleotide
agggucggaacccaagcuuagaacu

SEQ ID NO: 100570 - RNA, 25 nt, Artificial Sequence
  Description of Artificial Sequence: Synthetic oligonucleotide
ucggaacccaagcuuagaacuuuaa

SEQ ID NO: 100571 - RNA, 25 nt, Artificial Sequence
  Description of Artificial Sequence: Synthetic oligonucleotide
acccaagcuuagaacuuuaagcaac

SEQ ID NO: 100572 - RNA, 25 nt, Artificial Sequence
  Description of Artificial Sequence: Synthetic oligonucleotide
gaacuuuaagcaacaagaccaccac

SEQ ID NO: 100573 - RNA, 25 nt, Artificial Sequence
  Description of Artificial Sequence: Synthetic oligonucleotide
acuauucaguggcgagaaauaaagu

SEQ ID NO: 100574 - RNA, 25 nt, Artificial Sequence
  Description of Artificial Sequence: Synthetic oligonucleotide
cuauucaguggcgagaaauaaaguu

SEQ ID NO: 100575 - RNA, 25 nt, Artificial Sequence
  Description of Artificial Sequence: Synthetic oligonucleotide
aaacacagauaacaggaaaugaucc

SEQ ID NO: 100576 - RNA, 25 nt, Artificial Sequence
  Description of Artificial Sequence: Synthetic oligonucleotide
cuuaagaaaagagaagaaaugaaac

SEQ ID NO: 100577 - RNA, 25 nt, Artificial Sequence
  Description of Artificial Sequence: Synthetic oligonucleotide
cugaaggaguguguuuccauccucc

SEQ ID NO: 100578 - RNA, 25 nt, Artificial Sequence
  Description of Artificial Sequence: Synthetic oligonucleotide
ucaccgcgggacugaaaaucuuuga

SEQ ID NO: 100579 - RNA, 25 nt, Artificial Sequence
  Description of Artificial Sequence: Synthetic oligonucleotide
agcagaaauaagcgugccguucagg

SEQ ID NO: 100580 - RNA, 25 nt, Artificial Sequence
  Description of Artificial Sequence: Synthetic oligonucleotide
aagcgugccguucaggguccagaag

SEQ ID NO: 100581 - RNA, 25 nt, Artificial Sequence
  Description of Artificial Sequence: Synthetic oligonucleotide
agaaacagucacucaagacugcuug

SEQ ID NO: 100582 - RNA, 25 nt, Artificial Sequence
  Description of Artificial Sequence: Synthetic oligonucleotide
agaggaagaagguccaugucuuugg

SEQ ID NO: 100583 - RNA, 25 nt, Artificial Sequence
  Description of Artificial Sequence: Synthetic oligonucleotide
uguauucaaaauaugccugaaacac

SEQ ID NO: 100584 - RNA, 25 nt, Artificial Sequence
  Description of Artificial Sequence: Synthetic oligonucleotide
auuuuccucccuuucucuguaccuc

SEQ ID NO: 100585 - RNA, 25 nt, Artificial Sequence
  Description of Artificial Sequence: Synthetic oligonucleotide
caaagaaagauagagcaagacaaga

SEQ ID NO: 100586 - RNA, 25 nt, Artificial Sequence
  Description of Artificial Sequence: Synthetic oligonucleotide
aagaaagauagagcaagacaagaaa

SEQ ID NO: 100587 - RNA, 25 nt, Artificial Sequence
  Description of Artificial Sequence: Synthetic oligonucleotide
gaaagcauuuguuuguacaagaucc

SEQ ID NO: 100588 - RNA, 25 nt, Artificial Sequence
  Description of Artificial Sequence: Synthetic oligonucleotide
ugaguuaaacgaacguacuugcaga

SEQ ID NO: 100589 - RNA, 25 nt, Artificial Sequence
  Description of Artificial Sequence: Synthetic oligonucleotide
acugauacagaacgaucgauacaga

SEQ ID NO: 100590 - RNA, 25 nt, Artificial Sequence
  Description of Artificial Sequence: Synthetic oligonucleotide
auauuauauauauauaaaaauaaau

SEQ ID NO: 100591 - RNA, 25 nt, Artificial Sequence
  Description of Artificial Sequence: Synthetic oligonucleotide
auuauauauauauaaaaauaaauau

SEQ ID NO: 100592 - RNA, 25 nt, Artificial Sequence
  Description of Artificial Sequence: Synthetic oligonucleotide
ucacuggauguauuugacugcugug

SEQ ID NO: 100593 - RNA, 25 nt, Artificial Sequence
  Description of Artificial Sequence: Synthetic oligonucleotide
cagggaagaggaggagaugagagac

SEQ ID NO: 100594 - RNA, 25 nt, Artificial Sequence
  Description of Artificial Sequence: Synthetic oligonucleotide
augaucuuuuuuuugucccacuugg

SEQ ID NO: 100595 - RNA, 27 nt, Artificial Sequence
  Description of Artificial Sequence: Synthetic oligonucleotide
ggccgugaacuccucaucaaaauaccu

SEQ ID NO: 100596 - RNA, 27 nt, Artificial Sequence
  Description of Artificial Sequence: Synthetic oligonucleotide
uggugugauggugaucaucugggccgu

SEQ ID NO: 100597 - RNA, 27 nt, Artificial Sequence
  Description of Artificial Sequence: Synthetic oligonucleotide
aaacccgcaggauaguuuucuucccua

SEQ ID NO: 100598 - RNA, 27 nt, Artificial Sequence
  Description of Artificial Sequence: Synthetic oligonucleotide
caaacuggaugaaauaaauuaaaaccc

SEQ ID NO: 100599 - RNA, 27 nt, Artificial Sequence
  Description of Artificial Sequence: Synthetic oligonucleotide
agaaguccuuaacauuucccuacguga

SEQ ID NO: 100600 - RNA, 27 nt, Artificial Sequence
  Description of Artificial Sequence: Synthetic oligonucleotide
cucugucccacuggguaaacccuggcc

SEQ ID NO: 100601 - RNA, 27 nt, Artificial Sequence
  Description of Artificial Sequence: Synthetic oligonucleotide
cacaauaacaaauuuaaaccuugcucc

SEQ ID NO: 100602 - RNA, 27 nt, Artificial Sequence
  Description of Artificial Sequence: Synthetic oligonucleotide
aaaugcauuugaacaacauaauacaca

SEQ ID NO: 100603 - RNA, 27 nt, Artificial Sequence
  Description of Artificial Sequence: Synthetic oligonucleotide
ggcuuuccugucacaaagauuaaaaac

SEQ ID NO: 100604 - RNA, 27 nt, Artificial Sequence
  Description of Artificial Sequence: Synthetic oligonucleotide
agggcuuuccugucacaaagauuaaaa

SEQ ID NO: 100605 - RNA, 27 nt, Artificial Sequence
  Description of Artificial Sequence: Synthetic oligonucleotide
ggccaugcugggagacauaagcagcag

SEQ ID NO: 100606 - RNA, 27 nt, Artificial Sequence
  Description of Artificial Sequence: Synthetic oligonucleotide
ucagggagaagcuucugaaacacuucu

SEQ ID NO: 100607 - RNA, 27 nt, Artificial Sequence
  Description of Artificial Sequence: Synthetic oligonucleotide
aagggcuucuuccuuauugauggucag

SEQ ID NO: 100608 - RNA, 27 nt, Artificial Sequence
  Description of Artificial Sequence: Synthetic oligonucleotide
ugaagggcuucuuccuuauugaugguc

SEQ ID NO: 100609 - RNA, 27 nt, Artificial Sequence
  Description of Artificial Sequence: Synthetic oligonucleotide
cgcugaagggcuucuuccuuauugaug

SEQ ID NO: 100610 - RNA, 27 nt, Artificial Sequence
  Description of Artificial Sequence: Synthetic oligonucleotide
gccgcugaagggcuucuuccuuauuga

SEQ ID NO: 100611 - RNA, 27 nt, Artificial Sequence
  Description of Artificial Sequence: Synthetic oligonucleotide
acuggccgcugaagggcuucuuccuua

SEQ ID NO: 100612 - RNA, 27 nt, Artificial Sequence
  Description of Artificial Sequence: Synthetic oligonucleotide
cggagcuuuucaccuuuaguuaugcuu

SEQ ID NO: 100613 - RNA, 27 nt, Artificial Sequence
  Description of Artificial Sequence: Synthetic oligonucleotide
ccggagcuuuucaccuuuaguuaugcu

SEQ ID NO: 100614 - RNA, 27 nt, Artificial Sequence
  Description of Artificial Sequence: Synthetic oligonucleotide
cagacuguugacuggcgugauguaguu

SEQ ID NO: 100615 - RNA, 27 nt, Artificial Sequence
  Description of Artificial Sequence: Synthetic oligonucleotide
cuuuugaacucugcuuaaauccagugg

SEQ ID NO: 100616 - RNA, 27 nt, Artificial Sequence
  Description of Artificial Sequence: Synthetic oligonucleotide
gcuuuugaacucugcuuaaauccagug

SEQ ID NO: 100617 - RNA, 27 nt, Artificial Sequence
  Description of Artificial Sequence: Synthetic oligonucleotide
agggcuuuugaacucugcuuaaaucca

SEQ ID NO: 100618 - RNA, 27 nt, Artificial Sequence
  Description of Artificial Sequence: Synthetic oligonucleotide
aagggcuuuugaacucugcuuaaaucc

SEQ ID NO: 100619 - RNA, 27 nt, Artificial Sequence
  Description of Artificial Sequence: Synthetic oligonucleotide
ugaagggcuuuugaacucugcuuaaau

SEQ ID NO: 100620 - RNA, 27 nt, Artificial Sequence
  Description of Artificial Sequence: Synthetic oligonucleotide
cugaagggcuuuugaacucugcuuaaa

SEQ ID NO: 100621 - RNA, 27 nt, Artificial Sequence
  Description of Artificial Sequence: Synthetic oligonucleotide
cgcugaagggcuuuugaacucugcuua

SEQ ID NO: 100622 - RNA, 27 nt, Artificial Sequence
  Description of Artificial Sequence: Synthetic oligonucleotide
cgagcggcuucacucagacccugaggc

SEQ ID NO: 100623 - RNA, 27 nt, Artificial Sequence
  Description of Artificial Sequence: Synthetic oligonucleotide
uugacuggcgugauguaguugcuuggg

SEQ ID NO: 100624 - RNA, 27 nt, Artificial Sequence
  Description of Artificial Sequence: Synthetic oligonucleotide
cacgcaccaagaagcugccauugaucc

SEQ ID NO: 100625 - RNA, 27 nt, Artificial Sequence
  Description of Artificial Sequence: Synthetic oligonucleotide
cugaugaauccaaugugggcuggaauc

SEQ ID NO: 100626 - RNA, 27 nt, Artificial Sequence
  Description of Artificial Sequence: Synthetic oligonucleotide
cuuagguauuccacauucucagcugug

SEQ ID NO: 100627 - RNA, 27 nt, Artificial Sequence
  Description of Artificial Sequence: Synthetic oligonucleotide
ugagccucaaauuaggagauacguuuu

SEQ ID NO: 100628 - RNA, 27 nt, Artificial Sequence
  Description of Artificial Sequence: Synthetic oligonucleotide
ccaauuguagagaaauuauuuuaggaa

SEQ ID NO: 100629 - RNA, 27 nt, Artificial Sequence
  Description of Artificial Sequence: Synthetic oligonucleotide
ggcuccuaacuagcugaaucuuccaau

SEQ ID NO: 100630 - RNA, 27 nt, Artificial Sequence
  Description of Artificial Sequence: Synthetic oligonucleotide
guggauauugacuaggagaguuuaaaa

SEQ ID NO: 100631 - RNA, 27 nt, Artificial Sequence
  Description of Artificial Sequence: Synthetic oligonucleotide
ugugacugaacauaacuguaggcugaa

SEQ ID NO: 100632 - RNA, 27 nt, Artificial Sequence
  Description of Artificial Sequence: Synthetic oligonucleotide
guaugugugugugacugaacauaacug

SEQ ID NO: 100633 - RNA, 27 nt, Artificial Sequence
  Description of Artificial Sequence: Synthetic oligonucleotide
aagcaaaaggaacauuuuguaugugug

SEQ ID NO: 100634 - RNA, 27 nt, Artificial Sequence
  Description of Artificial Sequence: Synthetic oligonucleotide
aaaaauuacuuuaaaagcaaaaggaac

SEQ ID NO: 100635 - RNA, 27 nt, Artificial Sequence
  Description of Artificial Sequence: Synthetic oligonucleotide
ccauugacuguugcuucacaggucaga

SEQ ID NO: 100636 - RNA, 27 nt, Artificial Sequence
  Description of Artificial Sequence: Synthetic oligonucleotide
auugguuugucgaugugugagauaguu

SEQ ID NO: 100637 - RNA, 27 nt, Artificial Sequence
  Description of Artificial Sequence: Synthetic oligonucleotide
agugguagcaguacaauugaggacaag

SEQ ID NO: 100638 - RNA, 27 nt, Artificial Sequence
  Description of Artificial Sequence: Synthetic oligonucleotide
uaagaccgcuugccagcuacgguuuca

SEQ ID NO: 100639 - RNA, 27 nt, Artificial Sequence
  Description of Artificial Sequence: Synthetic oligonucleotide
agccgguaagaccgcuugccagcuacg

SEQ ID NO: 100640 - RNA, 27 nt, Artificial Sequence
  Description of Artificial Sequence: Synthetic oligonucleotide
gguaacccaucuuuuaaccauacaacu

SEQ ID NO: 100641 - RNA, 27 nt, Artificial Sequence
  Description of Artificial Sequence: Synthetic oligonucleotide
ucgcagguaacccaucuuuuaaccaua

SEQ ID NO: 100642 - RNA, 27 nt, Artificial Sequence
  Description of Artificial Sequence: Synthetic oligonucleotide
cucagcaagauuguauaauucccugca

SEQ ID NO: 100643 - RNA, 27 nt, Artificial Sequence
  Description of Artificial Sequence: Synthetic oligonucleotide
acuguuuuaugcucagcaagauuguau

SEQ ID NO: 100644 - RNA, 27 nt, Artificial Sequence
  Description of Artificial Sequence: Synthetic oligonucleotide
aggauaaaggacucuucauuauuggaa

SEQ ID NO: 100645 - RNA, 27 nt, Artificial Sequence
  Description of Artificial Sequence: Synthetic oligonucleotide
caacuugcguuggaacauccaaagugu

SEQ ID NO: 100646 - RNA, 27 nt, Artificial Sequence
  Description of Artificial Sequence: Synthetic oligonucleotide
augguuucaguuuaguggaagcauuua

SEQ ID NO: 100647 - RNA, 27 nt, Artificial Sequence
  Description of Artificial Sequence: Synthetic oligonucleotide
auauuuaacaaagucaaacuuucucac

SEQ ID NO: 100648 - RNA, 27 nt, Artificial Sequence
  Description of Artificial Sequence: Synthetic oligonucleotide
aacuuuuaauauacaguaguucuuuuc

SEQ ID NO: 100649 - RNA, 27 nt, Artificial Sequence
  Description of Artificial Sequence: Synthetic oligonucleotide
guuaagucaaaacccguauuucuaaag

SEQ ID NO: 100650 - RNA, 27 nt, Artificial Sequence
  Description of Artificial Sequence: Synthetic oligonucleotide
gugcugaguuugcuguacccauguuga

SEQ ID NO: 100651 - RNA, 27 nt, Artificial Sequence
  Description of Artificial Sequence: Synthetic oligonucleotide
ugaggucagcaucuucugugucuuuac

SEQ ID NO: 100652 - RNA, 27 nt, Artificial Sequence
  Description of Artificial Sequence: Synthetic oligonucleotide
gcgaucugaauaaaccucccuacuagc

SEQ ID NO: 100653 - RNA, 27 nt, Artificial Sequence
  Description of Artificial Sequence: Synthetic oligonucleotide
aucccagaacccugcugcagaaggcca

SEQ ID NO: 100654 - RNA, 27 nt, Artificial Sequence
  Description of Artificial Sequence: Synthetic oligonucleotide
cauaauuuccaauauguaccagaccuu

SEQ ID NO: 100655 - RNA, 27 nt, Artificial Sequence
  Description of Artificial Sequence: Synthetic oligonucleotide
cuagugcuuccaucggaaggacuaggu

SEQ ID NO: 100656 - RNA, 27 nt, Artificial Sequence
  Description of Artificial Sequence: Synthetic oligonucleotide
uccacauaaaaacaauauucacuggga

SEQ ID NO: 100657 - RNA, 27 nt, Artificial Sequence
  Description of Artificial Sequence: Synthetic oligonucleotide
ucuaccaauuccaacuugaauucauug

SEQ ID NO: 100658 - RNA, 27 nt, Artificial Sequence
  Description of Artificial Sequence: Synthetic oligonucleotide
ucuccaagucuaaaucuguguccugag

SEQ ID NO: 100659 - RNA, 27 nt, Artificial Sequence
  Description of Artificial Sequence: Synthetic oligonucleotide
uggaauacuguaacugugcuuugagga

SEQ ID NO: 100660 - RNA, 27 nt, Artificial Sequence
  Description of Artificial Sequence: Synthetic oligonucleotide
uuaauucaucagugguggcagugguag

SEQ ID NO: 100661 - RNA, 27 nt, Artificial Sequence
  Description of Artificial Sequence: Synthetic oligonucleotide
gugaugauguggcacuaguaguuucuu

SEQ ID NO: 100662 - RNA, 27 nt, Artificial Sequence
  Description of Artificial Sequence: Synthetic oligonucleotide
ucuguuuggugaggcuguccgacuuug

SEQ ID NO: 100663 - RNA, 27 nt, Artificial Sequence
  Description of Artificial Sequence: Synthetic oligonucleotide
ccaucauguuccauuuuucgcuuucuc

SEQ ID NO: 100664 - RNA, 27 nt, Artificial Sequence
  Description of Artificial Sequence: Synthetic oligonucleotide
gcagucuacaugcuaaaucagagggua

SEQ ID NO: 100665 - RNA, 27 nt, Artificial Sequence
  Description of Artificial Sequence: Synthetic oligonucleotide
cauaaauagauccuuaaauagcucaaa

SEQ ID NO: 100666 - RNA, 27 nt, Artificial Sequence
  Description of Artificial Sequence: Synthetic oligonucleotide
ugauaauagugcuuuuucaccuuuuuc

SEQ ID NO: 100667 - RNA, 27 nt, Artificial Sequence
  Description of Artificial Sequence: Synthetic oligonucleotide
gcagaacugauaauagugcuuuuucac

SEQ ID NO: 100668 - RNA, 27 nt, Artificial Sequence
  Description of Artificial Sequence: Synthetic oligonucleotide
guagguuuaaucuuucuuuucagccau

SEQ ID NO: 100669 - RNA, 27 nt, Artificial Sequence
  Description of Artificial Sequence: Synthetic oligonucleotide
agaaggauuuuauuauaaggguuuaau

SEQ ID NO: 100670 - RNA, 27 nt, Artificial Sequence
  Description of Artificial Sequence: Synthetic oligonucleotide
gucuacagcauuggcuaauaguaugaa

SEQ ID NO: 100671 - RNA, 27 nt, Artificial Sequence
  Description of Artificial Sequence: Synthetic oligonucleotide
cuauuccuaucaaaaugcuucugucua

SEQ ID NO: 100672 - RNA, 27 nt, Artificial Sequence
  Description of Artificial Sequence: Synthetic oligonucleotide
ucagggccauuaucuuauuugcucuau

SEQ ID NO: 100673 - RNA, 27 nt, Artificial Sequence
  Description of Artificial Sequence: Synthetic oligonucleotide
ugcuugaggaagagaaaaauguugguc

SEQ ID NO: 100674 - RNA, 27 nt, Artificial Sequence
  Description of Artificial Sequence: Synthetic oligonucleotide
ugggcugaacuuuucucauacuuaaag

SEQ ID NO: 100675 - RNA, 27 nt, Artificial Sequence
  Description of Artificial Sequence: Synthetic oligonucleotide
gguucagcagccaucuuuauuccugcg

SEQ ID NO: 100676 - RNA, 27 nt, Artificial Sequence
  Description of Artificial Sequence: Synthetic oligonucleotide
ugaagagaacuuggucauucaaauuuc

SEQ ID NO: 100677 - RNA, 27 nt, Artificial Sequence
  Description of Artificial Sequence: Synthetic oligonucleotide
cucuaggcuggcuaucuuuauacauac

SEQ ID NO: 100678 - RNA, 27 nt, Artificial Sequence
  Description of Artificial Sequence: Synthetic oligonucleotide
acacuucacagagauaguuacagccau

SEQ ID NO: 100679 - RNA, 27 nt, Artificial Sequence
  Description of Artificial Sequence: Synthetic oligonucleotide
uugaaauuuucucacacuucacagaga

SEQ ID NO: 100680 - RNA, 27 nt, Artificial Sequence
  Description of Artificial Sequence: Synthetic oligonucleotide
ucaggaggauucauuuccuuaaaggaa

SEQ ID NO: 100681 - RNA, 27 nt, Artificial Sequence
  Description of Artificial Sequence: Synthetic oligonucleotide
auaugaugucacuuuuuguauccuuga

SEQ ID NO: 100682 - RNA, 27 nt, Artificial Sequence
  Description of Artificial Sequence: Synthetic oligonucleotide
uaugaugaagauucaaauugcaucuua

SEQ ID NO: 100683 - RNA, 27 nt, Artificial Sequence
  Description of Artificial Sequence: Synthetic oligonucleotide
uuaauagcuagucuucguuuugaacag

SEQ ID NO: 100684 - RNA, 27 nt, Artificial Sequence
  Description of Artificial Sequence: Synthetic oligonucleotide
auuuuuaguagagaugagguuucacca

SEQ ID NO: 100685 - RNA, 27 nt, Artificial Sequence
  Description of Artificial Sequence: Synthetic oligonucleotide
aggcgagauagagcuucucuuucguuc

SEQ ID NO: 100686 - RNA, 27 nt, Artificial Sequence
  Description of Artificial Sequence: Synthetic oligonucleotide
aacuggaccgaaggcgcuuguggagaa

SEQ ID NO: 100687 - RNA, 27 nt, Artificial Sequence
  Description of Artificial Sequence: Synthetic oligonucleotide
gcggcuacaucuuuggaaucuucuccu

SEQ ID NO: 100688 - RNA, 27 nt, Artificial Sequence
  Description of Artificial Sequence: Synthetic oligonucleotide
caagucuccucauugaauccagauugg

SEQ ID NO: 100689 - RNA, 27 nt, Artificial Sequence
  Description of Artificial Sequence: Synthetic oligonucleotide
uccucacuacucucaaaucuguucugg

SEQ ID NO: 100690 - RNA, 27 nt, Artificial Sequence
  Description of Artificial Sequence: Synthetic oligonucleotide
uuuguacucaucugcacagcucuggcu

SEQ ID NO: 100691 - RNA, 27 nt, Artificial Sequence
  Description of Artificial Sequence: Synthetic oligonucleotide
gcccauuaacaacaacaaucugaggug

SEQ ID NO: 100692 - RNA, 27 nt, Artificial Sequence
  Description of Artificial Sequence: Synthetic oligonucleotide
aauaaauuaaaaauaauuaaaauagug

SEQ ID NO: 100693 - RNA, 27 nt, Artificial Sequence
  Description of Artificial Sequence: Synthetic oligonucleotide
cauauuuaaauauuaauaaauuaaaaa

SEQ ID NO: 100694 - RNA, 27 nt, Artificial Sequence
  Description of Artificial Sequence: Synthetic oligonucleotide
gaaacaaaggauauucaaacugcauag

SEQ ID NO: 100695 - RNA, 27 nt, Artificial Sequence
  Description of Artificial Sequence: Synthetic oligonucleotide
caaacacuuagacgccagcagcauggg

SEQ ID NO: 100696 - RNA, 27 nt, Artificial Sequence
  Description of Artificial Sequence: Synthetic oligonucleotide
uuugucacaggugaaaugcacaucuga

SEQ ID NO: 100697 - RNA, 27 nt, Artificial Sequence
  Description of Artificial Sequence: Synthetic oligonucleotide
uaauucagccuggcacagguuuugauc

SEQ ID NO: 100698 - RNA, 27 nt, Artificial Sequence
  Description of Artificial Sequence: Synthetic oligonucleotide
auuguaagaaugacuacccacauucac

SEQ ID NO: 100699 - RNA, 27 nt, Artificial Sequence
  Description of Artificial Sequence: Synthetic oligonucleotide
caauuguaagaaugacuacccacauuc

SEQ ID NO: 100700 - RNA, 27 nt, Artificial Sequence
  Description of Artificial Sequence: Synthetic oligonucleotide
guacacucucugaugcucauuuucaua

SEQ ID NO: 100701 - RNA, 27 nt, Artificial Sequence
  Description of Artificial Sequence: Synthetic oligonucleotide
cugcugaguucuacaugaaaagcaaau

SEQ ID NO: 100702 - RNA, 27 nt, Artificial Sequence
  Description of Artificial Sequence: Synthetic oligonucleotide
uacugaaaauaaauauagaaauacaac

SEQ ID NO: 100703 - RNA, 27 nt, Artificial Sequence
  Description of Artificial Sequence: Synthetic oligonucleotide
uuccauuuaagaaacauuaaucaaaac

SEQ ID NO: 100704 - RNA, 27 nt, Artificial Sequence
  Description of Artificial Sequence: Synthetic oligonucleotide
acaauuuuaggcacuauacacguuguu

SEQ ID NO: 100705 - RNA, 27 nt, Artificial Sequence
  Description of Artificial Sequence: Synthetic oligonucleotide
ccagauguuaguagccaaggauauggu

SEQ ID NO: 100706 - RNA, 27 nt, Artificial Sequence
  Description of Artificial Sequence: Synthetic oligonucleotide
agcucacagucuccagauguuaguagc

SEQ ID NO: 100707 - RNA, 27 nt, Artificial Sequence
  Description of Artificial Sequence: Synthetic oligonucleotide
auuaauaaaaagcacacaacuuauggc

SEQ ID NO: 100708 - RNA, 27 nt, Artificial Sequence
  Description of Artificial Sequence: Synthetic oligonucleotide
aauguaagaagagccaaaaugaugcau

SEQ ID NO: 100709 - RNA, 27 nt, Artificial Sequence
  Description of Artificial Sequence: Synthetic oligonucleotide
acauuuuuacaaauguaagaagagcca

SEQ ID NO: 100710 - RNA, 27 nt, Artificial Sequence
  Description of Artificial Sequence: Synthetic oligonucleotide
aauaugaauuaagaugaccuaaucugu

SEQ ID NO: 100711 - RNA, 27 nt, Artificial Sequence
  Description of Artificial Sequence: Synthetic oligonucleotide
ucaugauuaguucuuucaauuccaucc

SEQ ID NO: 100712 - RNA, 27 nt, Artificial Sequence
  Description of Artificial Sequence: Synthetic oligonucleotide
cccaagagcagaaggaaugagugugca

SEQ ID NO: 100713 - RNA, 27 nt, Artificial Sequence
  Description of Artificial Sequence: Synthetic oligonucleotide
cucaaagcuacugguuaccucuacacc

SEQ ID NO: 100714 - RNA, 27 nt, Artificial Sequence
  Description of Artificial Sequence: Synthetic oligonucleotide
ugaaauauuacguggcaugugguuggg

SEQ ID NO: 100715 - RNA, 27 nt, Artificial Sequence
  Description of Artificial Sequence: Synthetic oligonucleotide
agugaagagaauaacuuguuuccgaag

SEQ ID NO: 100716 - RNA, 27 nt, Artificial Sequence
  Description of Artificial Sequence: Synthetic oligonucleotide
uuucuuagcauuaguuauugggaguga

SEQ ID NO: 100717 - RNA, 27 nt, Artificial Sequence
  Description of Artificial Sequence: Synthetic oligonucleotide
uugauuuucagcauuucuuagcauuag

SEQ ID NO: 100718 - RNA, 27 nt, Artificial Sequence
  Description of Artificial Sequence: Synthetic oligonucleotide
aaaguaaucauauuuagagaaagacag

SEQ ID NO: 100719 - RNA, 27 nt, Artificial Sequence
  Description of Artificial Sequence: Synthetic oligonucleotide
uguagaacaaaaugccugaaauucagc

SEQ ID NO: 100720 - RNA, 27 nt, Artificial Sequence
  Description of Artificial Sequence: Synthetic oligonucleotide
gagagucccgggugagagggaaucgcc

SEQ ID NO: 100721 - RNA, 27 nt, Artificial Sequence
  Description of Artificial Sequence: Synthetic oligonucleotide
cuuuacuuuaaagguucacuuuccuug

SEQ ID NO: 100722 - RNA, 27 nt, Artificial Sequence
  Description of Artificial Sequence: Synthetic oligonucleotide
ccaggcuuccagagcaugcagccuccu

SEQ ID NO: 100723 - RNA, 27 nt, Artificial Sequence
  Description of Artificial Sequence: Synthetic oligonucleotide
cucucuuuuguuuucuguucagagaaa

SEQ ID NO: 100724 - RNA, 27 nt, Artificial Sequence
  Description of Artificial Sequence: Synthetic oligonucleotide
cggcauaacugauuacagccaaguuca

SEQ ID NO: 100725 - RNA, 27 nt, Artificial Sequence
  Description of Artificial Sequence: Synthetic oligonucleotide
uggacuucuuuuaauuuuggcuucuuc

SEQ ID NO: 100726 - RNA, 27 nt, Artificial Sequence
  Description of Artificial Sequence: Synthetic oligonucleotide
uaaccucaccuggacuucuuuuaauuu

SEQ ID NO: 100727 - RNA, 27 nt, Artificial Sequence
  Description of Artificial Sequence: Synthetic oligonucleotide
guccucuucccgauaauccggauucag

SEQ ID NO: 100728 - RNA, 27 nt, Artificial Sequence
  Description of Artificial Sequence: Synthetic oligonucleotide
acaauacuugcuuugaugucacauuaa

SEQ ID NO: 100729 - RNA, 27 nt, Artificial Sequence
  Description of Artificial Sequence: Synthetic oligonucleotide
gagugcuacaauacuugcuuugauguc

SEQ ID NO: 100730 - RNA, 27 nt, Artificial Sequence
  Description of Artificial Sequence: Synthetic oligonucleotide
auuugugguuuuguuuucucucucucu

SEQ ID NO: 100731 - RNA, 27 nt, Artificial Sequence
  Description of Artificial Sequence: Synthetic oligonucleotide
uguaugggcuuaaauacuacagcgagg

SEQ ID NO: 100732 - RNA, 27 nt, Artificial Sequence
  Description of Artificial Sequence: Synthetic oligonucleotide
cuguaugggcuuaaauacuacagcgag

SEQ ID NO: 100733 - RNA, 27 nt, Artificial Sequence
  Description of Artificial Sequence: Synthetic oligonucleotide
ggaagguuucuguaugggcuuaaauac

SEQ ID NO: 100734 - RNA, 27 nt, Artificial Sequence
  Description of Artificial Sequence: Synthetic oligonucleotide
guagguauaccauguuuauuuuaauac

SEQ ID NO: 100735 - RNA, 27 nt, Artificial Sequence
  Description of Artificial Sequence: Synthetic oligonucleotide
uccgaaaacuggccgaucagaacagcc

SEQ ID NO: 100736 - RNA, 27 nt, Artificial Sequence
  Description of Artificial Sequence: Synthetic oligonucleotide
cccuguuccaaaguucaaauuauuugu

SEQ ID NO: 100737 - RNA, 27 nt, Artificial Sequence
  Description of Artificial Sequence: Synthetic oligonucleotide
acuggaaaguuaaauuaaggucgcaau

SEQ ID NO: 100738 - RNA, 27 nt, Artificial Sequence
  Description of Artificial Sequence: Synthetic oligonucleotide
caaaaccaaacuuuagcuuucucagcc

SEQ ID NO: 100739 - RNA, 27 nt, Artificial Sequence
  Description of Artificial Sequence: Synthetic oligonucleotide
uacagugggaaguagcaucuuuacuuu

SEQ ID NO: 100740 - RNA, 27 nt, Artificial Sequence
  Description of Artificial Sequence: Synthetic oligonucleotide
ucauaugguaucagcaauuaagcagua

SEQ ID NO: 100741 - RNA, 27 nt, Artificial Sequence
  Description of Artificial Sequence: Synthetic oligonucleotide
cagcccauguuucauucauaugguauc

SEQ ID NO: 100742 - RNA, 27 nt, Artificial Sequence
  Description of Artificial Sequence: Synthetic oligonucleotide
uaugaaaaaguuggauaagaaaguugg

SEQ ID NO: 100743 - RNA, 27 nt, Artificial Sequence
  Description of Artificial Sequence: Synthetic oligonucleotide
uccggccucaugaugucaugcaaggcu

SEQ ID NO: 100744 - RNA, 27 nt, Artificial Sequence
  Description of Artificial Sequence: Synthetic oligonucleotide
acaaaugcagucauauacaaauucagg

SEQ ID NO: 100745 - RNA, 27 nt, Artificial Sequence
  Description of Artificial Sequence: Synthetic oligonucleotide
gguaguaaacauucuacuaggauucuu

SEQ ID NO: 100746 - RNA, 27 nt, Artificial Sequence
  Description of Artificial Sequence: Synthetic oligonucleotide
uuucaucaaaaaauucuucccuuucug

SEQ ID NO: 100747 - RNA, 27 nt, Artificial Sequence
  Description of Artificial Sequence: Synthetic oligonucleotide
aaauucacacacuggcaugccgauagc

SEQ ID NO: 100748 - RNA, 27 nt, Artificial Sequence
  Description of Artificial Sequence: Synthetic oligonucleotide
acauacauugcucuacuaugaggugaa

SEQ ID NO: 100749 - RNA, 27 nt, Artificial Sequence
  Description of Artificial Sequence: Synthetic oligonucleotide
uauauaugugcuuuggcaauucuggug

SEQ ID NO: 100750 - RNA, 27 nt, Artificial Sequence
  Description of Artificial Sequence: Synthetic oligonucleotide
ggagaaacuauuacccagaucaccacu

SEQ ID NO: 100751 - RNA, 27 nt, Artificial Sequence
  Description of Artificial Sequence: Synthetic oligonucleotide
auuuggagaaacuauuacccagaucac

SEQ ID NO: 100752 - RNA, 27 nt, Artificial Sequence
  Description of Artificial Sequence: Synthetic oligonucleotide
uuucuaggaaguauucaucacauccac

SEQ ID NO: 100753 - RNA, 27 nt, Artificial Sequence
  Description of Artificial Sequence: Synthetic oligonucleotide
cauauaugguguagcuguggaaaugcg

SEQ ID NO: 100754 - RNA, 27 nt, Artificial Sequence
  Description of Artificial Sequence: Synthetic oligonucleotide
cuccauucauauaugguguagcugugg

SEQ ID NO: 100755 - RNA, 27 nt, Artificial Sequence
  Description of Artificial Sequence: Synthetic oligonucleotide
aucuucuucucguguaagaacugcagc

SEQ ID NO: 100756 - RNA, 27 nt, Artificial Sequence
  Description of Artificial Sequence: Synthetic oligonucleotide
ucccuguaaaugaucuucuucucgugu

SEQ ID NO: 100757 - RNA, 27 nt, Artificial Sequence
  Description of Artificial Sequence: Synthetic oligonucleotide
gucccuguaaaugaucuucuucucgug

SEQ ID NO: 100758 - RNA, 27 nt, Artificial Sequence
  Description of Artificial Sequence: Synthetic oligonucleotide
ucaggucccuguaaaugaucuucuucu

SEQ ID NO: 100759 - RNA, 27 nt, Artificial Sequence
  Description of Artificial Sequence: Synthetic oligonucleotide
gaugcagucaaacaccucuuccucugu

SEQ ID NO: 100760 - RNA, 27 nt, Artificial Sequence
  Description of Artificial Sequence: Synthetic oligonucleotide
cgaugcagucaaacaccucuuccucug

SEQ ID NO: 100761 - RNA, 27 nt, Artificial Sequence
  Description of Artificial Sequence: Synthetic oligonucleotide
cccugugaacucgcccucaaaguagcg

SEQ ID NO: 100762 - RNA, 27 nt, Artificial Sequence
  Description of Artificial Sequence: Synthetic oligonucleotide
ggacagaggugccaggagaugcccuca

SEQ ID NO: 100763 - RNA, 27 nt, Artificial Sequence
  Description of Artificial Sequence: Synthetic oligonucleotide
uuaaaaagacaaaccauaucacuccuu

SEQ ID NO: 100764 - RNA, 27 nt, Artificial Sequence
  Description of Artificial Sequence: Synthetic oligonucleotide
cuuaaaaagacaaaccauaucacuccu

SEQ ID NO: 100765 - RNA, 27 nt, Artificial Sequence
  Description of Artificial Sequence: Synthetic oligonucleotide
gacaaccuuuaggaucuuuacugcaac

SEQ ID NO: 100766 - RNA, 27 nt, Artificial Sequence
  Description of Artificial Sequence: Synthetic oligonucleotide
gucgacaaccuuuaggaucuuuacugc

SEQ ID NO: 100767 - RNA, 27 nt, Artificial Sequence
  Description of Artificial Sequence: Synthetic oligonucleotide
acaauugccagguuguccuuugucaug

SEQ ID NO: 100768 - RNA, 27 nt, Artificial Sequence
  Description of Artificial Sequence: Synthetic oligonucleotide
ccucgcaccacugggucacaauugcca

SEQ ID NO: 100769 - RNA, 27 nt, Artificial Sequence
  Description of Artificial Sequence: Synthetic oligonucleotide
auuucaugucucuauggaugauguucu

SEQ ID NO: 100770 - RNA, 27 nt, Artificial Sequence
  Description of Artificial Sequence: Synthetic oligonucleotide
uggagaaauauauuguuggauuucaug

SEQ ID NO: 100771 - RNA, 27 nt, Artificial Sequence
  Description of Artificial Sequence: Synthetic oligonucleotide
agccuucauggagaaauauauuguugg

SEQ ID NO: 100772 - RNA, 27 nt, Artificial Sequence
  Description of Artificial Sequence: Synthetic oligonucleotide
accacuccagcgugacuuuacuguugc

SEQ ID NO: 100773 - RNA, 27 nt, Artificial Sequence
  Description of Artificial Sequence: Synthetic oligonucleotide
ccucucuuccuuuacuuucuucacaca

SEQ ID NO: 100774 - RNA, 27 nt, Artificial Sequence
  Description of Artificial Sequence: Synthetic oligonucleotide
gcccgaugcaaggauggcucggaagcg

SEQ ID NO: 100775 - RNA, 27 nt, Artificial Sequence
  Description of Artificial Sequence: Synthetic oligonucleotide
cacaguaggauauucaaccuccauuuc

SEQ ID NO: 100776 - RNA, 27 nt, Artificial Sequence
  Description of Artificial Sequence: Synthetic oligonucleotide
uuacacaguaggauauucaaccuccau

SEQ ID NO: 100777 - RNA, 27 nt, Artificial Sequence
  Description of Artificial Sequence: Synthetic oligonucleotide
uacacuacaagggaaaacucaaaaucu

SEQ ID NO: 100778 - RNA, 27 nt, Artificial Sequence
  Description of Artificial Sequence: Synthetic oligonucleotide
caaucaacaaagaacaaacaggauaaa

SEQ ID NO: 100779 - RNA, 27 nt, Artificial Sequence
  Description of Artificial Sequence: Synthetic oligonucleotide
uuucaaucaacaaagaacaaacaggau

SEQ ID NO: 100780 - RNA, 27 nt, Artificial Sequence
  Description of Artificial Sequence: Synthetic oligonucleotide
auggaagaaaaagaaggcuguagagaa

SEQ ID NO: 100781 - RNA, 27 nt, Artificial Sequence
  Description of Artificial Sequence: Synthetic oligonucleotide
uagaaggaagauuagcuauggaagaaa

SEQ ID NO: 100782 - RNA, 27 nt, Artificial Sequence
  Description of Artificial Sequence: Synthetic oligonucleotide
augaagcauucaacaggaagauuauuu

SEQ ID NO: 100783 - RNA, 27 nt, Artificial Sequence
  Description of Artificial Sequence: Synthetic oligonucleotide
caugaagcauucaacaggaagauuauu

SEQ ID NO: 100784 - RNA, 27 nt, Artificial Sequence
  Description of Artificial Sequence: Synthetic oligonucleotide
ucaaaguagaauucaagucaugaagca

SEQ ID NO: 100785 - RNA, 27 nt, Artificial Sequence
  Description of Artificial Sequence: Synthetic oligonucleotide
gucuguaguugcuucucucccucuuag

SEQ ID NO: 100786 - RNA, 27 nt, Artificial Sequence
  Description of Artificial Sequence: Synthetic oligonucleotide
guugaccuuggucugguaggagacggc

SEQ ID NO: 100787 - RNA, 27 nt, Artificial Sequence
  Description of Artificial Sequence: Synthetic oligonucleotide
gucgagauagucgggccgauugaucuc

SEQ ID NO: 100788 - RNA, 27 nt, Artificial Sequence
  Description of Artificial Sequence: Synthetic oligonucleotide
guuugggaagguuggauguucguccuc

SEQ ID NO: 100789 - RNA, 27 nt, Artificial Sequence
  Description of Artificial Sequence: Synthetic oligonucleotide
aguucuaagcuuggguuccgacccuaa

SEQ ID NO: 100790 - RNA, 27 nt, Artificial Sequence
  Description of Artificial Sequence: Synthetic oligonucleotide
uuaaaguucuaagcuuggguuccgacc

SEQ ID NO: 100791 - RNA, 27 nt, Artificial Sequence
  Description of Artificial Sequence: Synthetic oligonucleotide
guugcuuaaaguucuaagcuuggguuc

SEQ ID NO: 100792 - RNA, 27 nt, Artificial Sequence
  Description of Artificial Sequence: Synthetic oligonucleotide
gugguggucuuguugcuuaaaguucua

SEQ ID NO: 100793 - RNA, 27 nt, Artificial Sequence
  Description of Artificial Sequence: Synthetic oligonucleotide
acuuuauuucucgccacugaauaguag

SEQ ID NO: 100794 - RNA, 27 nt, Artificial Sequence
  Description of Artificial Sequence: Synthetic oligonucleotide
aacuuuauuucucgccacugaauagua

SEQ ID NO: 100795 - RNA, 27 nt, Artificial Sequence
  Description of Artificial Sequence: Synthetic oligonucleotide
ggaucauuuccuguuaucuguguuugu

SEQ ID NO: 100796 - RNA, 27 nt, Artificial Sequence
  Description of Artificial Sequence: Synthetic oligonucleotide
guuucauuucuucucuuuucuuaaggc

SEQ ID NO: 100797 - RNA, 27 nt, Artificial Sequence
  Description of Artificial Sequence: Synthetic oligonucleotide
ggaggauggaaacacacuccuucaguu

SEQ ID NO: 100798 - RNA, 27 nt, Artificial Sequence
  Description of Artificial Sequence: Synthetic oligonucleotide
ucaaagauuuucagucccgcggugaca

SEQ ID NO: 100799 - RNA, 27 nt, Artificial Sequence
  Description of Artificial Sequence: Synthetic oligonucleotide
ccugaacggcacgcuuauuucugcugu

SEQ ID NO: 100800 - RNA, 27 nt, Artificial Sequence
  Description of Artificial Sequence: Synthetic oligonucleotide
cuucuggacccugaacggcacgcuuau

SEQ ID NO: 100801 - RNA, 27 nt, Artificial Sequence
  Description of Artificial Sequence: Synthetic oligonucleotide
caagcagucuugagugacuguuucuuc

SEQ ID NO: 100802 - RNA, 27 nt, Artificial Sequence
  Description of Artificial Sequence: Synthetic oligonucleotide
ccaaagacauggaccuucuuccucuga

SEQ ID NO: 100803 - RNA, 27 nt, Artificial Sequence
  Description of Artificial Sequence: Synthetic oligonucleotide
guguuucaggcauauuuugaauacauc

SEQ ID NO: 100804 - RNA, 27 nt, Artificial Sequence
  Description of Artificial Sequence: Synthetic oligonucleotide
gagguacagagaaagggaggaaaauag

SEQ ID NO: 100805 - RNA, 27 nt, Artificial Sequence
  Description of Artificial Sequence: Synthetic oligonucleotide
ucuugucuugcucuaucuuucuuuggu

SEQ ID NO: 100806 - RNA, 27 nt, Artificial Sequence
  Description of Artificial Sequence: Synthetic oligonucleotide
uuucuugucuugcucuaucuuucuuug

SEQ ID NO: 100807 - RNA, 27 nt, Artificial Sequence
  Description of Artificial Sequence: Synthetic oligonucleotide
ggaucuuguacaaacaaaugcuuucuc

SEQ ID NO: 100808 - RNA, 27 nt, Artificial Sequence
  Description of Artificial Sequence: Synthetic oligonucleotide
ucugcaaguacguucguuuaacucaag

SEQ ID NO: 100809 - RNA, 27 nt, Artificial Sequence
  Description of Artificial Sequence: Synthetic oligonucleotide
ucuguaucgaucguucuguaucagucu

SEQ ID NO: 100810 - RNA, 27 nt, Artificial Sequence
  Description of Artificial Sequence: Synthetic oligonucleotide
auuuauuuuuauauauauauaauauau

SEQ ID NO: 100811 - RNA, 27 nt, Artificial Sequence
  Description of Artificial Sequence: Synthetic oligonucleotide
auauuuauuuuuauauauauauaauau

SEQ ID NO: 100812 - RNA, 27 nt, Artificial Sequence
  Description of Artificial Sequence: Synthetic oligonucleotide
cacagcagucaaauacauccagugaag

SEQ ID NO: 100813 - RNA, 27 nt, Artificial Sequence
  Description of Artificial Sequence: Synthetic oligonucleotide
gucucucaucuccuccucuucccuguc

SEQ ID NO: 100814 - RNA, 27 nt, Artificial Sequence
  Description of Artificial Sequence: Synthetic oligonucleotide
ccaagugggacaaaaaaaagaucaugc

SEQ ID NO: 100815 - RNA, 14 nt, Artificial Sequence
  Description of Artificial Sequence: Synthetic oligonucleotide
guauuuugaugagg

SEQ ID NO: 100816 - RNA, 12 nt, Artificial Sequence
  Description of Artificial Sequence: Synthetic oligonucleotide
ggcccagaugau

SEQ ID NO: 100817 - RNA, 14 nt, Artificial Sequence
  Description of Artificial Sequence: Synthetic oligonucleotide
gggaagaaaacuau

SEQ ID NO: 100818 - RNA, 15 nt, Artificial Sequence
  Description of Artificial Sequence: Synthetic oligonucleotide
guuuuaauuuauuuc

SEQ ID NO: 100819 - RNA, 12 nt, Artificial Sequence
  Description of Artificial Sequence: Synthetic oligonucleotide
acguagggaaau

SEQ ID NO: 100820 - RNA, 12 nt, Artificial Sequence
  Description of Artificial Sequence: Synthetic oligonucleotide
ccaggguuuacc

SEQ ID NO: 100821 - RNA, 11 nt, Artificial Sequence
  Description of Artificial Sequence: Synthetic oligonucleotide
agcaagguuua

SEQ ID NO: 100822 - RNA, 12 nt, Artificial Sequence
  Description of Artificial Sequence: Synthetic oligonucleotide
uguauuauguug

SEQ ID NO: 100823 - RNA, 15 nt, Artificial Sequence
  Description of Artificial Sequence: Synthetic oligonucleotide
uuuuaaucuuuguga

SEQ ID NO: 100824 - RNA, 14 nt, Artificial Sequence
  Description of Artificial Sequence: Synthetic oligonucleotide
uuaaucuuugugac

SEQ ID NO: 100825 - RNA, 13 nt, Artificial Sequence
  Description of Artificial Sequence: Synthetic oligonucleotide
gcugcuuaugucu

SEQ ID NO: 100826 - RNA, 14 nt, Artificial Sequence
  Description of Artificial Sequence: Synthetic oligonucleotide
aaguguuucagaag

SEQ ID NO: 100827 - RNA, 13 nt, Artificial Sequence
  Description of Artificial Sequence: Synthetic oligonucleotide
gaccaucaauaag

SEQ ID NO: 100828 - RNA, 13 nt, Artificial Sequence
  Description of Artificial Sequence: Synthetic oligonucleotide
ccaucaauaagga

SEQ ID NO: 100829 - RNA, 14 nt, Artificial Sequence
  Description of Artificial Sequence: Synthetic oligonucleotide
ucaauaaggaagaa

SEQ ID NO: 100830 - RNA, 14 nt, Artificial Sequence
  Description of Artificial Sequence: Synthetic oligonucleotide
aauaaggaagaagc

SEQ ID NO: 100831 - RNA, 13 nt, Artificial Sequence
  Description of Artificial Sequence: Synthetic oligonucleotide
aggaagaagcccu

SEQ ID NO: 100832 - RNA, 13 nt, Artificial Sequence
  Description of Artificial Sequence: Synthetic oligonucleotide
gcauaacuaaagg

SEQ ID NO: 100833 - RNA, 14 nt, Artificial Sequence
  Description of Artificial Sequence: Synthetic oligonucleotide
cauaacuaaaggug

SEQ ID NO: 100834 - RNA, 12 nt, Artificial Sequence
  Description of Artificial Sequence: Synthetic oligonucleotide
cuacaucacgcc

SEQ ID NO: 100835 - RNA, 12 nt, Artificial Sequence
  Description of Artificial Sequence: Synthetic oligonucleotide
acuggauuuaag

SEQ ID NO: 100836 - RNA, 12 nt, Artificial Sequence
  Description of Artificial Sequence: Synthetic oligonucleotide
cuggauuuaagc

SEQ ID NO: 100837 - RNA, 13 nt, Artificial Sequence
  Description of Artificial Sequence: Synthetic oligonucleotide
gauuuaagcagag

SEQ ID NO: 100838 - RNA, 13 nt, Artificial Sequence
  Description of Artificial Sequence: Synthetic oligonucleotide
auuuaagcagagu

SEQ ID NO: 100839 - RNA, 13 nt, Artificial Sequence
  Description of Artificial Sequence: Synthetic oligonucleotide
uuaagcagaguuc

SEQ ID NO: 100840 - RNA, 13 nt, Artificial Sequence
  Description of Artificial Sequence: Synthetic oligonucleotide
uaagcagaguuca

SEQ ID NO: 100841 - RNA, 14 nt, Artificial Sequence
  Description of Artificial Sequence: Synthetic oligonucleotide
agcagaguucaaaa

SEQ ID NO: 100842 - RNA, 12 nt, Artificial Sequence
  Description of Artificial Sequence: Synthetic oligonucleotide
cucagggucuga

SEQ ID NO: 100843 - RNA, 13 nt, Artificial Sequence
  Description of Artificial Sequence: Synthetic oligonucleotide
caagcaacuacau

SEQ ID NO: 100844 - RNA, 12 nt, Artificial Sequence
  Description of Artificial Sequence: Synthetic oligonucleotide
aucaauggcagc

SEQ ID NO: 100845 - RNA, 11 nt, Artificial Sequence
  Description of Artificial Sequence: Synthetic oligonucleotide
uuccagcccac

SEQ ID NO: 100846 - RNA, 12 nt, Artificial Sequence
  Description of Artificial Sequence: Synthetic oligonucleotide
cagcugagaaug

SEQ ID NO: 100847 - RNA, 13 nt, Artificial Sequence
  Description of Artificial Sequence: Synthetic oligonucleotide
aacguaucuccua

SEQ ID NO: 100848 - RNA, 14 nt, Artificial Sequence
  Description of Artificial Sequence: Synthetic oligonucleotide
ccuaaaauaauuuc

SEQ ID NO: 100849 - RNA, 13 nt, Artificial Sequence
  Description of Artificial Sequence: Synthetic oligonucleotide
uggaagauucagc

SEQ ID NO: 100850 - RNA, 12 nt, Artificial Sequence
  Description of Artificial Sequence: Synthetic oligonucleotide
uuaaacucuccu

SEQ ID NO: 100851 - RNA, 12 nt, Artificial Sequence
  Description of Artificial Sequence: Synthetic oligonucleotide
cagccuacaguu

SEQ ID NO: 100852 - RNA, 13 nt, Artificial Sequence
  Description of Artificial Sequence: Synthetic oligonucleotide
guuauguucaguc

SEQ ID NO: 100853 - RNA, 13 nt, Artificial Sequence
  Description of Artificial Sequence: Synthetic oligonucleotide
cacauacaaaaug

SEQ ID NO: 100854 - RNA, 9 nt, Artificial Sequence
  Description of Artificial Sequence: Synthetic oligonucleotide
uccuuuugc

SEQ ID NO: 100855 - RNA, 12 nt, Artificial Sequence
  Description of Artificial Sequence: Synthetic oligonucleotide
ugaccugugaag

SEQ ID NO: 100856 - RNA, 12 nt, Artificial Sequence
  Description of Artificial Sequence: Synthetic oligonucleotide
cuaucucacaca

SEQ ID NO: 100857 - RNA, 13 nt, Artificial Sequence
  Description of Artificial Sequence: Synthetic oligonucleotide
uguccucaauugu

SEQ ID NO: 100858 - RNA, 12 nt, Artificial Sequence
  Description of Artificial Sequence: Synthetic oligonucleotide
aaaccguagcug

SEQ ID NO: 100859 - RNA, 12 nt, Artificial Sequence
  Description of Artificial Sequence: Synthetic oligonucleotide
uagcuggcaagc

SEQ ID NO: 100860 - RNA, 14 nt, Artificial Sequence
  Description of Artificial Sequence: Synthetic oligonucleotide
uuguaugguuaaaa

SEQ ID NO: 100861 - RNA, 14 nt, Artificial Sequence
  Description of Artificial Sequence: Synthetic oligonucleotide
ugguuaaaagaugg

SEQ ID NO: 100862 - RNA, 13 nt, Artificial Sequence
  Description of Artificial Sequence: Synthetic oligonucleotide
cagggaauuauac

SEQ ID NO: 100863 - RNA, 12 nt, Artificial Sequence
  Description of Artificial Sequence: Synthetic oligonucleotide
acaaucuugcug

SEQ ID NO: 100864 - RNA, 13 nt, Artificial Sequence
  Description of Artificial Sequence: Synthetic oligonucleotide
ccaauaaugaaga

SEQ ID NO: 100865 - RNA, 13 nt, Artificial Sequence
  Description of Artificial Sequence: Synthetic oligonucleotide
acuuuggauguuc

SEQ ID NO: 100866 - RNA, 12 nt, Artificial Sequence
  Description of Artificial Sequence: Synthetic oligonucleotide
aaugcuuccacu

SEQ ID NO: 100867 - RNA, 11 nt, Artificial Sequence
  Description of Artificial Sequence: Synthetic oligonucleotide
gagaaaguuug

SEQ ID NO: 100868 - RNA, 11 nt, Artificial Sequence
  Description of Artificial Sequence: Synthetic oligonucleotide
aaagaacuacu

SEQ ID NO: 100869 - RNA, 12 nt, Artificial Sequence
  Description of Artificial Sequence: Synthetic oligonucleotide
uuagaaauacgg

SEQ ID NO: 100870 - RNA, 12 nt, Artificial Sequence
  Description of Artificial Sequence: Synthetic oligonucleotide
aacauggguaca

SEQ ID NO: 100871 - RNA, 14 nt, Artificial Sequence
  Description of Artificial Sequence: Synthetic oligonucleotide
aaagacacagaaga

SEQ ID NO: 100872 - RNA, 11 nt, Artificial Sequence
  Description of Artificial Sequence: Synthetic oligonucleotide
uaguagggagg

SEQ ID NO: 100873 - RNA, 12 nt, Artificial Sequence
  Description of Artificial Sequence: Synthetic oligonucleotide
gccuucugcagc

SEQ ID NO: 100874 - RNA, 10 nt, Artificial Sequence
  Description of Artificial Sequence: Synthetic oligonucleotide
ggucugguac

SEQ ID NO: 100875 - RNA, 12 nt, Artificial Sequence
  Description of Artificial Sequence: Synthetic oligonucleotide
cuaguccuuccg

SEQ ID NO: 100876 - RNA, 12 nt, Artificial Sequence
  Description of Artificial Sequence: Synthetic oligonucleotide
ccagugaauauu

SEQ ID NO: 100877 - RNA, 13 nt, Artificial Sequence
  Description of Artificial Sequence: Synthetic oligonucleotide
augaauucaaguu

SEQ ID NO: 100878 - RNA, 12 nt, Artificial Sequence
  Description of Artificial Sequence: Synthetic oligonucleotide
caggacacagau

SEQ ID NO: 100879 - RNA, 12 nt, Artificial Sequence
  Description of Artificial Sequence: Synthetic oligonucleotide
cucaaagcacag

SEQ ID NO: 100880 - RNA, 10 nt, Artificial Sequence
  Description of Artificial Sequence: Synthetic oligonucleotide
accacugcca

SEQ ID NO: 100881 - RNA, 13 nt, Artificial Sequence
  Description of Artificial Sequence: Synthetic oligonucleotide
gaaacuacuagug

SEQ ID NO: 100882 - RNA, 12 nt, Artificial Sequence
  Description of Artificial Sequence: Synthetic oligonucleotide
aagucggacagc

SEQ ID NO: 100883 - RNA, 13 nt, Artificial Sequence
  Description of Artificial Sequence: Synthetic oligonucleotide
gaaagcgaaaaau

SEQ ID NO: 100884 - RNA, 13 nt, Artificial Sequence
  Description of Artificial Sequence: Synthetic oligonucleotide
cccucugauuuag

SEQ ID NO: 100885 - RNA, 12 nt, Artificial Sequence
  Description of Artificial Sequence: Synthetic oligonucleotide
ugagcuauuuaa

SEQ ID NO: 100886 - RNA, 13 nt, Artificial Sequence
  Description of Artificial Sequence: Synthetic oligonucleotide
aaaaggugaaaaa

SEQ ID NO: 100887 - RNA, 14 nt, Artificial Sequence
  Description of Artificial Sequence: Synthetic oligonucleotide
gaaaaagcacuauu

SEQ ID NO: 100888 - RNA, 12 nt, Artificial Sequence
  Description of Artificial Sequence: Synthetic oligonucleotide
ggcugaaaagaa

SEQ ID NO: 100889 - RNA, 12 nt, Artificial Sequence
  Description of Artificial Sequence: Synthetic oligonucleotide
uaaacccuuaua

SEQ ID NO: 100890 - RNA, 13 nt, Artificial Sequence
  Description of Artificial Sequence: Synthetic oligonucleotide
cauacuauuagcc

SEQ ID NO: 100891 - RNA, 12 nt, Artificial Sequence
  Description of Artificial Sequence: Synthetic oligonucleotide
gacagaagcauu

SEQ ID NO: 100892 - RNA, 14 nt, Artificial Sequence
  Description of Artificial Sequence: Synthetic oligonucleotide
agagcaaauaagau

SEQ ID NO: 100893 - RNA, 14 nt, Artificial Sequence
  Description of Artificial Sequence: Synthetic oligonucleotide
ccaacauuuuucuc

SEQ ID NO: 100894 - RNA, 15 nt, Artificial Sequence
  Description of Artificial Sequence: Synthetic oligonucleotide
uuaaguaugagaaaa

SEQ ID NO: 100895 - RNA, 14 nt, Artificial Sequence
  Description of Artificial Sequence: Synthetic oligonucleotide
caggaauaaagaug

SEQ ID NO: 100896 - RNA, 13 nt, Artificial Sequence
  Description of Artificial Sequence: Synthetic oligonucleotide
aauuugaaugacc

SEQ ID NO: 100897 - RNA, 14 nt, Artificial Sequence
  Description of Artificial Sequence: Synthetic oligonucleotide
auguauaaagauag

SEQ ID NO: 100898 - RNA, 12 nt, Artificial Sequence
  Description of Artificial Sequence: Synthetic oligonucleotide
ggcuguaacuau

SEQ ID NO: 100899 - RNA, 11 nt, Artificial Sequence
  Description of Artificial Sequence: Synthetic oligonucleotide
ucugugaagug

SEQ ID NO: 100900 - RNA, 14 nt, Artificial Sequence
  Description of Artificial Sequence: Synthetic oligonucleotide
ccuuuaaggaaaug

SEQ ID NO: 100901 - RNA, 13 nt, Artificial Sequence
  Description of Artificial Sequence: Synthetic oligonucleotide
aaggauacaaaaa

SEQ ID NO: 100902 - RNA, 12 nt, Artificial Sequence
  Description of Artificial Sequence: Synthetic oligonucleotide
agaugcaauuug

SEQ ID NO: 100903 - RNA, 12 nt, Artificial Sequence
  Description of Artificial Sequence: Synthetic oligonucleotide
guucaaaacgaa

SEQ ID NO: 100904 - RNA, 11 nt, Artificial Sequence
  Description of Artificial Sequence: Synthetic oligonucleotide
gugaaaccuca

SEQ ID NO: 100905 - RNA, 13 nt, Artificial Sequence
  Description of Artificial Sequence: Synthetic oligonucleotide
acgaaagagaagc

SEQ ID NO: 100906 - RNA, 12 nt, Artificial Sequence
  Description of Artificial Sequence: Synthetic oligonucleotide
cuccacaagcgc

SEQ ID NO: 100907 - RNA, 14 nt, Artificial Sequence
  Description of Artificial Sequence: Synthetic oligonucleotide
gagaagauuccaaa

SEQ ID NO: 100908 - RNA, 13 nt, Artificial Sequence
  Description of Artificial Sequence: Synthetic oligonucleotide
aaucuggauucaa

SEQ ID NO: 100909 - RNA, 13 nt, Artificial Sequence
  Description of Artificial Sequence: Synthetic oligonucleotide
agaacagauuuga

SEQ ID NO: 100910 - RNA, 11 nt, Artificial Sequence
  Description of Artificial Sequence: Synthetic oligonucleotide
ccagagcugug

SEQ ID NO: 100911 - RNA, 12 nt, Artificial Sequence
  Description of Artificial Sequence: Synthetic oligonucleotide
ccucagauuguu

SEQ ID NO: 100912 - RNA, 12 nt, Artificial Sequence
  Description of Artificial Sequence: Synthetic oligonucleotide
cuauuuuaauua

SEQ ID NO: 100913 - RNA, 13 nt, Artificial Sequence
  Description of Artificial Sequence: Synthetic oligonucleotide
uuuaauuuauuaa

SEQ ID NO: 100914 - RNA, 12 nt, Artificial Sequence
  Description of Artificial Sequence: Synthetic oligonucleotide
augcaguuugaa

SEQ ID NO: 100915 - RNA, 11 nt, Artificial Sequence
  Description of Artificial Sequence: Synthetic oligonucleotide
caugcugcugg

SEQ ID NO: 100916 - RNA, 13 nt, Artificial Sequence
  Description of Artificial Sequence: Synthetic oligonucleotide
agaugugcauuuc

SEQ ID NO: 100917 - RNA, 12 nt, Artificial Sequence
  Description of Artificial Sequence: Synthetic oligonucleotide
ucaaaaccugug

SEQ ID NO: 100918 - RNA, 11 nt, Artificial Sequence
  Description of Artificial Sequence: Synthetic oligonucleotide
gaaugugggua

SEQ ID NO: 100919 - RNA, 10 nt, Artificial Sequence
  Description of Artificial Sequence: Synthetic oligonucleotide
auguggguag

SEQ ID NO: 100920 - RNA, 13 nt, Artificial Sequence
  Description of Artificial Sequence: Synthetic oligonucleotide
ugaaaaugagcau

SEQ ID NO: 100921 - RNA, 13 nt, Artificial Sequence
  Description of Artificial Sequence: Synthetic oligonucleotide
uugcuuuucaugu

SEQ ID NO: 100922 - RNA, 12 nt, Artificial Sequence
  Description of Artificial Sequence: Synthetic oligonucleotide
uguauuucuaua

SEQ ID NO: 100923 - RNA, 13 nt, Artificial Sequence
  Description of Artificial Sequence: Synthetic oligonucleotide
uuugauuaauguu

SEQ ID NO: 100924 - RNA, 12 nt, Artificial Sequence
  Description of Artificial Sequence: Synthetic oligonucleotide
caacguguauag

SEQ ID NO: 100925 - RNA, 12 nt, Artificial Sequence
  Description of Artificial Sequence: Synthetic oligonucleotide
cauauccuuggc

SEQ ID NO: 100926 - RNA, 13 nt, Artificial Sequence
  Description of Artificial Sequence: Synthetic oligonucleotide
uacuaacaucugg

SEQ ID NO: 100927 - RNA, 11 nt, Artificial Sequence
  Description of Artificial Sequence: Synthetic oligonucleotide
cauaaguugug

SEQ ID NO: 100928 - RNA, 12 nt, Artificial Sequence
  Description of Artificial Sequence: Synthetic oligonucleotide
gcaucauuuugg

SEQ ID NO: 100929 - RNA, 10 nt, Artificial Sequence
  Description of Artificial Sequence: Synthetic oligonucleotide
gcucuucuua

SEQ ID NO: 100930 - RNA, 10 nt, Artificial Sequence
  Description of Artificial Sequence: Synthetic oligonucleotide
agauuagguc

SEQ ID NO: 100931 - RNA, 12 nt, Artificial Sequence
  Description of Artificial Sequence: Synthetic oligonucleotide
auggaauugaaa

SEQ ID NO: 100932 - RNA, 13 nt, Artificial Sequence
  Description of Artificial Sequence: Synthetic oligonucleotide
cacacucauuccu

SEQ ID NO: 100933 - RNA, 12 nt, Artificial Sequence
  Description of Artificial Sequence: Synthetic oligonucleotide
uguagagguaac

SEQ ID NO: 100934 - RNA, 11 nt, Artificial Sequence
  Description of Artificial Sequence: Synthetic oligonucleotide
caaccacaugc

SEQ ID NO: 100935 - RNA, 12 nt, Artificial Sequence
  Description of Artificial Sequence: Synthetic oligonucleotide
ucggaaacaagu

SEQ ID NO: 100936 - RNA, 11 nt, Artificial Sequence
  Description of Artificial Sequence: Synthetic oligonucleotide
acucccaauaa

SEQ ID NO: 100937 - RNA, 13 nt, Artificial Sequence
  Description of Artificial Sequence: Synthetic oligonucleotide
aaugcuaagaaau

SEQ ID NO: 100938 - RNA, 11 nt, Artificial Sequence
  Description of Artificial Sequence: Synthetic oligonucleotide
gucuuucucua

SEQ ID NO: 100939 - RNA, 11 nt, Artificial Sequence
  Description of Artificial Sequence: Synthetic oligonucleotide
ugaauuucagg

SEQ ID NO: 100940 - RNA, 13 nt, Artificial Sequence
  Description of Artificial Sequence: Synthetic oligonucleotide
cgauucccucuca

SEQ ID NO: 100941 - RNA, 11 nt, Artificial Sequence
  Description of Artificial Sequence: Synthetic oligonucleotide
aggaaagugaa

SEQ ID NO: 100942 - RNA, 12 nt, Artificial Sequence
  Description of Artificial Sequence: Synthetic oligonucleotide
gaggcugcaugc

SEQ ID NO: 100943 - RNA, 11 nt, Artificial Sequence
  Description of Artificial Sequence: Synthetic oligonucleotide
ucucugaacag

SEQ ID NO: 100944 - RNA, 12 nt, Artificial Sequence
  Description of Artificial Sequence: Synthetic oligonucleotide
aacuuggcugua

SEQ ID NO: 100945 - RNA, 12 nt, Artificial Sequence
  Description of Artificial Sequence: Synthetic oligonucleotide
agaagccaaaau

SEQ ID NO: 100946 - RNA, 14 nt, Artificial Sequence
  Description of Artificial Sequence: Synthetic oligonucleotide
auuaaaagaagucc

SEQ ID NO: 100947 - RNA, 14 nt, Artificial Sequence
  Description of Artificial Sequence: Synthetic oligonucleotide
gaauccggauuauc

SEQ ID NO: 100948 - RNA, 12 nt, Artificial Sequence
  Description of Artificial Sequence: Synthetic oligonucleotide
aaugugacauca

SEQ ID NO: 100949 - RNA, 13 nt, Artificial Sequence
  Description of Artificial Sequence: Synthetic oligonucleotide
caucaaagcaagu

SEQ ID NO: 100950 - RNA, 11 nt, Artificial Sequence
  Description of Artificial Sequence: Synthetic oligonucleotide
agagagagaaa

SEQ ID NO: 100951 - RNA, 13 nt, Artificial Sequence
  Description of Artificial Sequence: Synthetic oligonucleotide
ucgcuguaguauu

SEQ ID NO: 100952 - RNA, 14 nt, Artificial Sequence
  Description of Artificial Sequence: Synthetic oligonucleotide
cgcuguaguauuua

SEQ ID NO: 100953 - RNA, 13 nt, Artificial Sequence
  Description of Artificial Sequence: Synthetic oligonucleotide
auuuaagcccaua

SEQ ID NO: 100954 - RNA, 15 nt, Artificial Sequence
  Description of Artificial Sequence: Synthetic oligonucleotide
auuaaaauaaacaug

SEQ ID NO: 100955 - RNA, 12 nt, Artificial Sequence
  Description of Artificial Sequence: Synthetic oligonucleotide
cuguucugaucg

SEQ ID NO: 100956 - RNA, 16 nt, Artificial Sequence
  Description of Artificial Sequence: Synthetic oligonucleotide
aaauaauuugaacuuu

SEQ ID NO: 100957 - RNA, 12 nt, Artificial Sequence
  Description of Artificial Sequence: Synthetic oligonucleotide
ugcgaccuuaau

SEQ ID NO: 100958 - RNA, 11 nt, Artificial Sequence
  Description of Artificial Sequence: Synthetic oligonucleotide
cugagaaagcu

SEQ ID NO: 100959 - RNA, 13 nt, Artificial Sequence
  Description of Artificial Sequence: Synthetic oligonucleotide
aguaaagaugcua

SEQ ID NO: 100960 - RNA, 12 nt, Artificial Sequence
  Description of Artificial Sequence: Synthetic oligonucleotide
cugcuuaauugc

SEQ ID NO: 100961 - RNA, 14 nt, Artificial Sequence
  Description of Artificial Sequence: Synthetic oligonucleotide
uaccauaugaauga

SEQ ID NO: 100962 - RNA, 12 nt, Artificial Sequence
  Description of Artificial Sequence: Synthetic oligonucleotide
aacuuucuuauc

SEQ ID NO: 100963 - RNA, 13 nt, Artificial Sequence
  Description of Artificial Sequence: Synthetic oligonucleotide
ccuugcaugacau

SEQ ID NO: 100964 - RNA, 14 nt, Artificial Sequence
  Description of Artificial Sequence: Synthetic oligonucleotide
ugaauuuguauaug

SEQ ID NO: 100965 - RNA, 12 nt, Artificial Sequence
  Description of Artificial Sequence: Synthetic oligonucleotide
gaauccuaguag

SEQ ID NO: 100966 - RNA, 10 nt, Artificial Sequence
  Description of Artificial Sequence: Synthetic oligonucleotide
gaaagggaag

SEQ ID NO: 100967 - RNA, 11 nt, Artificial Sequence
  Description of Artificial Sequence: Synthetic oligonucleotide
uaucggcaugc

SEQ ID NO: 100968 - RNA, 12 nt, Artificial Sequence
  Description of Artificial Sequence: Synthetic oligonucleotide
caccucauagua

SEQ ID NO: 100969 - RNA, 11 nt, Artificial Sequence
  Description of Artificial Sequence: Synthetic oligonucleotide
ccagaauugcc

SEQ ID NO: 100970 - RNA, 11 nt, Artificial Sequence
  Description of Artificial Sequence: Synthetic oligonucleotide
uggugaucugg

SEQ ID NO: 100971 - RNA, 12 nt, Artificial Sequence
  Description of Artificial Sequence: Synthetic oligonucleotide
gaucuggguaau

SEQ ID NO: 100972 - RNA, 12 nt, Artificial Sequence
  Description of Artificial Sequence: Synthetic oligonucleotide
ggaugugaugaa

SEQ ID NO: 100973 - RNA, 12 nt, Artificial Sequence
  Description of Artificial Sequence: Synthetic oligonucleotide
cauuuccacagc

SEQ ID NO: 100974 - RNA, 11 nt, Artificial Sequence
  Description of Artificial Sequence: Synthetic oligonucleotide
acagcuacacc

SEQ ID NO: 100975 - RNA, 12 nt, Artificial Sequence
  Description of Artificial Sequence: Synthetic oligonucleotide
ugcaguucuuac

SEQ ID NO: 100976 - RNA, 12 nt, Artificial Sequence
  Description of Artificial Sequence: Synthetic oligonucleotide
acgagaagaaga

SEQ ID NO: 100977 - RNA, 12 nt, Artificial Sequence
  Description of Artificial Sequence: Synthetic oligonucleotide
cgagaagaagau

SEQ ID NO: 100978 - RNA, 15 nt, Artificial Sequence
  Description of Artificial Sequence: Synthetic oligonucleotide
aagaagaucauuuac

SEQ ID NO: 100979 - RNA, 11 nt, Artificial Sequence
  Description of Artificial Sequence: Synthetic oligonucleotide
agaggaagagg

SEQ ID NO: 100980 - RNA, 12 nt, Artificial Sequence
  Description of Artificial Sequence: Synthetic oligonucleotide
gaggaagaggug

SEQ ID NO: 100981 - RNA, 13 nt, Artificial Sequence
  Description of Artificial Sequence: Synthetic oligonucleotide
cuacuuugagggc

SEQ ID NO: 100982 - RNA, 12 nt, Artificial Sequence
  Description of Artificial Sequence: Synthetic oligonucleotide
agggcaucuccu

SEQ ID NO: 100983 - RNA, 10 nt, Artificial Sequence
  Description of Artificial Sequence: Synthetic oligonucleotide
ggagugauau

SEQ ID NO: 100984 - RNA, 11 nt, Artificial Sequence
  Description of Artificial Sequence: Synthetic oligonucleotide
gagugauaugg

SEQ ID NO: 100985 - RNA, 12 nt, Artificial Sequence
  Description of Artificial Sequence: Synthetic oligonucleotide
ugcaguaaagau

SEQ ID NO: 100986 - RNA, 13 nt, Artificial Sequence
  Description of Artificial Sequence: Synthetic oligonucleotide
aguaaagauccua

SEQ ID NO: 100987 - RNA, 12 nt, Artificial Sequence
  Description of Artificial Sequence: Synthetic oligonucleotide
ugacaaaggaca

SEQ ID NO: 100988 - RNA, 13 nt, Artificial Sequence
  Description of Artificial Sequence: Synthetic oligonucleotide
gcaauugugaccc

SEQ ID NO: 100989 - RNA, 12 nt, Artificial Sequence
  Description of Artificial Sequence: Synthetic oligonucleotide
aacaucauccau

SEQ ID NO: 100990 - RNA, 12 nt, Artificial Sequence
  Description of Artificial Sequence: Synthetic oligonucleotide
ugaaauccaaca

SEQ ID NO: 100991 - RNA, 15 nt, Artificial Sequence
  Description of Artificial Sequence: Synthetic oligonucleotide
aacaauauauuucuc

SEQ ID NO: 100992 - RNA, 14 nt, Artificial Sequence
  Description of Artificial Sequence: Synthetic oligonucleotide
aacaguaaagucac

SEQ ID NO: 100993 - RNA, 14 nt, Artificial Sequence
  Description of Artificial Sequence: Synthetic oligonucleotide
ugugaagaaaguaa

SEQ ID NO: 100994 - RNA, 13 nt, Artificial Sequence
  Description of Artificial Sequence: Synthetic oligonucleotide
cuuccgagccauc

SEQ ID NO: 100995 - RNA, 12 nt, Artificial Sequence
  Description of Artificial Sequence: Synthetic oligonucleotide
aauggagguuga

SEQ ID NO: 100996 - RNA, 12 nt, Artificial Sequence
  Description of Artificial Sequence: Synthetic oligonucleotide
ggagguugaaua

SEQ ID NO: 100997 - RNA, 13 nt, Artificial Sequence
  Description of Artificial Sequence: Synthetic oligonucleotide
auuuugaguuuuc

SEQ ID NO: 100998 - RNA, 12 nt, Artificial Sequence
  Description of Artificial Sequence: Synthetic oligonucleotide
uauccuguuugu

SEQ ID NO: 100999 - RNA, 11 nt, Artificial Sequence
  Description of Artificial Sequence: Synthetic oligonucleotide
ccuguuuguuc

SEQ ID NO: 101000 - RNA, 10 nt, Artificial Sequence
  Description of Artificial Sequence: Synthetic oligonucleotide
cucuacagcc

SEQ ID NO: 101001 - RNA, 12 nt, Artificial Sequence
  Description of Artificial Sequence: Synthetic oligonucleotide
ucuuccauagcu

SEQ ID NO: 101002 - RNA, 12 nt, Artificial Sequence
  Description of Artificial Sequence: Synthetic oligonucleotide
auaaucuuccug

SEQ ID NO: 101003 - RNA, 12 nt, Artificial Sequence
  Description of Artificial Sequence: Synthetic oligonucleotide
uaaucuuccugu

SEQ ID NO: 101004 - RNA, 12 nt, Artificial Sequence
  Description of Artificial Sequence: Synthetic oligonucleotide
cuucaugacuug

SEQ ID NO: 101005 - RNA, 12 nt, Artificial Sequence
  Description of Artificial Sequence: Synthetic oligonucleotide
aagagggagaga

SEQ ID NO: 101006 - RNA, 12 nt, Artificial Sequence
  Description of Artificial Sequence: Synthetic oligonucleotide
cgucuccuacca

SEQ ID NO: 101007 - RNA, 12 nt, Artificial Sequence
  Description of Artificial Sequence: Synthetic oligonucleotide
gaucaaucggcc

SEQ ID NO: 101008 - RNA, 12 nt, Artificial Sequence
  Description of Artificial Sequence: Synthetic oligonucleotide
ggacgaacaucc

SEQ ID NO: 101009 - RNA, 11 nt, Artificial Sequence
  Description of Artificial Sequence: Synthetic oligonucleotide
agggucggaac

SEQ ID NO: 101010 - RNA, 10 nt, Artificial Sequence
  Description of Artificial Sequence: Synthetic oligonucleotide
ucggaaccca

SEQ ID NO: 101011 - RNA, 11 nt, Artificial Sequence
  Description of Artificial Sequence: Synthetic oligonucleotide
acccaagcuua

SEQ ID NO: 101012 - RNA, 14 nt, Artificial Sequence
  Description of Artificial Sequence: Synthetic oligonucleotide
gaacuuuaagcaac

SEQ ID NO: 101013 - RNA, 11 nt, Artificial Sequence
  Description of Artificial Sequence: Synthetic oligonucleotide
acuauucagug

SEQ ID NO: 101014 - RNA, 11 nt, Artificial Sequence
  Description of Artificial Sequence: Synthetic oligonucleotide
cuauucagugg

SEQ ID NO: 101015 - RNA, 13 nt, Artificial Sequence
  Description of Artificial Sequence: Synthetic oligonucleotide
aaacacagauaac

SEQ ID NO: 101016 - RNA, 12 nt, Artificial Sequence
  Description of Artificial Sequence: Synthetic oligonucleotide
cuuaagaaaaga

SEQ ID NO: 101017 - RNA, 12 nt, Artificial Sequence
  Description of Artificial Sequence: Synthetic oligonucleotide
cugaaggagugu

SEQ ID NO: 101018 - RNA, 10 nt, Artificial Sequence
  Description of Artificial Sequence: Synthetic oligonucleotide
ucaccgcggg

SEQ ID NO: 101019 - RNA, 14 nt, Artificial Sequence
  Description of Artificial Sequence: Synthetic oligonucleotide
agcagaaauaagcg

SEQ ID NO: 101020 - RNA, 12 nt, Artificial Sequence
  Description of Artificial Sequence: Synthetic oligonucleotide
aagcgugccguu

SEQ ID NO: 101021 - RNA, 12 nt, Artificial Sequence
  Description of Artificial Sequence: Synthetic oligonucleotide
agaaacagucac

SEQ ID NO: 101022 - RNA, 12 nt, Artificial Sequence
  Description of Artificial Sequence: Synthetic oligonucleotide
agaggaagaagg

SEQ ID NO: 101023 - RNA, 14 nt, Artificial Sequence
  Description of Artificial Sequence: Synthetic oligonucleotide
uguauucaaaauau

SEQ ID NO: 101024 - RNA, 13 nt, Artificial Sequence
  Description of Artificial Sequence: Synthetic oligonucleotide
auuuuccucccuu

SEQ ID NO: 101025 - RNA, 13 nt, Artificial Sequence
  Description of Artificial Sequence: Synthetic oligonucleotide
caaagaaagauag

SEQ ID NO: 101026 - RNA, 12 nt, Artificial Sequence
  Description of Artificial Sequence: Synthetic oligonucleotide
aagaaagauaga

SEQ ID NO: 101027 - RNA, 13 nt, Artificial Sequence
  Description of Artificial Sequence: Synthetic oligonucleotide
gaaagcauuuguu

SEQ ID NO: 101028 - RNA, 13 nt, Artificial Sequence
  Description of Artificial Sequence: Synthetic oligonucleotide
ugaguuaaacgaa

SEQ ID NO: 101029 - RNA, 12 nt, Artificial Sequence
  Description of Artificial Sequence: Synthetic oligonucleotide
acugauacagaa

SEQ ID NO: 101030 - RNA, 12 nt, Artificial Sequence
  Description of Artificial Sequence: Synthetic oligonucleotide
auauuauauaua

SEQ ID NO: 101031 - RNA, 12 nt, Artificial Sequence
  Description of Artificial Sequence: Synthetic oligonucleotide
auuauauauaua

SEQ ID NO: 101032 - RNA, 12 nt, Artificial Sequence
  Description of Artificial Sequence: Synthetic oligonucleotide
ucacuggaugua

SEQ ID NO: 101033 - RNA, 12 nt, Artificial Sequence
  Description of Artificial Sequence: Synthetic oligonucleotide
cagggaagagga

SEQ ID NO: 101034 - RNA, 15 nt, Artificial Sequence
  Description of Artificial Sequence: Synthetic oligonucleotide
augaucuuuuuuuug

SEQ ID NO: 101035 - RNA, 11 nt, Artificial Sequence
  Description of Artificial Sequence: Synthetic oligonucleotide
aguucacggcc

SEQ ID NO: 101036 - RNA, 13 nt, Artificial Sequence
  Description of Artificial Sequence: Synthetic oligonucleotide
caccaucacacca

SEQ ID NO: 101037 - RNA, 11 nt, Artificial Sequence
  Description of Artificial Sequence: Synthetic oligonucleotide
ccugcggguuu

SEQ ID NO: 101038 - RNA, 10 nt, Artificial Sequence
  Description of Artificial Sequence: Synthetic oligonucleotide
auccaguuug

SEQ ID NO: 101039 - RNA, 13 nt, Artificial Sequence
  Description of Artificial Sequence: Synthetic oligonucleotide
guuaaggacuucu

SEQ ID NO: 101040 - RNA, 13 nt, Artificial Sequence
  Description of Artificial Sequence: Synthetic oligonucleotide
cagugggacagag

SEQ ID NO: 101041 - RNA, 14 nt, Artificial Sequence
  Description of Artificial Sequence: Synthetic oligonucleotide
aauuuguuauugug

SEQ ID NO: 101042 - RNA, 13 nt, Artificial Sequence
  Description of Artificial Sequence: Synthetic oligonucleotide
uucaaaugcauuu

SEQ ID NO: 101043 - RNA, 10 nt, Artificial Sequence
  Description of Artificial Sequence: Synthetic oligonucleotide
caggaaagcc

SEQ ID NO: 101044 - RNA, 11 nt, Artificial Sequence
  Description of Artificial Sequence: Synthetic oligonucleotide
aggaaagcccu

SEQ ID NO: 101045 - RNA, 12 nt, Artificial Sequence
  Description of Artificial Sequence: Synthetic oligonucleotide
cccagcauggcc

SEQ ID NO: 101046 - RNA, 11 nt, Artificial Sequence
  Description of Artificial Sequence: Synthetic oligonucleotide
cuucucccuga

SEQ ID NO: 101047 - RNA, 12 nt, Artificial Sequence
  Description of Artificial Sequence: Synthetic oligonucleotide
gaagaagcccuu

SEQ ID NO: 101048 - RNA, 12 nt, Artificial Sequence
  Description of Artificial Sequence: Synthetic oligonucleotide
agaagcccuuca

SEQ ID NO: 101049 - RNA, 11 nt, Artificial Sequence
  Description of Artificial Sequence: Synthetic oligonucleotide
gcccuucagcg

SEQ ID NO: 101050 - RNA, 11 nt, Artificial Sequence
  Description of Artificial Sequence: Synthetic oligonucleotide
ccuucagcggc

SEQ ID NO: 101051 - RNA, 12 nt, Artificial Sequence
  Description of Artificial Sequence: Synthetic oligonucleotide
ucagcggccagu

SEQ ID NO: 101052 - RNA, 12 nt, Artificial Sequence
  Description of Artificial Sequence: Synthetic oligonucleotide
ugaaaagcuccg

SEQ ID NO: 101053 - RNA, 11 nt, Artificial Sequence
  Description of Artificial Sequence: Synthetic oligonucleotide
aaaagcuccgg

SEQ ID NO: 101054 - RNA, 13 nt, Artificial Sequence
  Description of Artificial Sequence: Synthetic oligonucleotide
agucaacagucug

SEQ ID NO: 101055 - RNA, 13 nt, Artificial Sequence
  Description of Artificial Sequence: Synthetic oligonucleotide
cagaguucaaaag

SEQ ID NO: 101056 - RNA, 13 nt, Artificial Sequence
  Description of Artificial Sequence: Synthetic oligonucleotide
agaguucaaaagc

SEQ ID NO: 101057 - RNA, 12 nt, Artificial Sequence
  Description of Artificial Sequence: Synthetic oligonucleotide
uucaaaagcccu

SEQ ID NO: 101058 - RNA, 12 nt, Artificial Sequence
  Description of Artificial Sequence: Synthetic oligonucleotide
ucaaaagcccuu

SEQ ID NO: 101059 - RNA, 12 nt, Artificial Sequence
  Description of Artificial Sequence: Synthetic oligonucleotide
aaaagcccuuca

SEQ ID NO: 101060 - RNA, 12 nt, Artificial Sequence
  Description of Artificial Sequence: Synthetic oligonucleotide
aaagcccuucag

SEQ ID NO: 101061 - RNA, 13 nt, Artificial Sequence
  Description of Artificial Sequence: Synthetic oligonucleotide
gugaagccgcucg

SEQ ID NO: 101062 - RNA, 12 nt, Artificial Sequence
  Description of Artificial Sequence: Synthetic oligonucleotide
cacgccagucaa

SEQ ID NO: 101063 - RNA, 13 nt, Artificial Sequence
  Description of Artificial Sequence: Synthetic oligonucleotide
uucuuggugcgug

SEQ ID NO: 101064 - RNA, 14 nt, Artificial Sequence
  Description of Artificial Sequence: Synthetic oligonucleotide
auuggauucaucag

SEQ ID NO: 101065 - RNA, 13 nt, Artificial Sequence
  Description of Artificial Sequence: Synthetic oligonucleotide
uggaauaccuaag

SEQ ID NO: 101066 - RNA, 12 nt, Artificial Sequence
  Description of Artificial Sequence: Synthetic oligonucleotide
auuugaggcuca

SEQ ID NO: 101067 - RNA, 11 nt, Artificial Sequence
  Description of Artificial Sequence: Synthetic oligonucleotide
ucuacaauugg

SEQ ID NO: 101068 - RNA, 12 nt, Artificial Sequence
  Description of Artificial Sequence: Synthetic oligonucleotide
uaguuaggagcc

SEQ ID NO: 101069 - RNA, 13 nt, Artificial Sequence
  Description of Artificial Sequence: Synthetic oligonucleotide
agucaauauccac

SEQ ID NO: 101070 - RNA, 13 nt, Artificial Sequence
  Description of Artificial Sequence: Synthetic oligonucleotide
auguucagucaca

SEQ ID NO: 101071 - RNA, 12 nt, Artificial Sequence
  Description of Artificial Sequence: Synthetic oligonucleotide
acacacacauac

SEQ ID NO: 101072 - RNA, 12 nt, Artificial Sequence
  Description of Artificial Sequence: Synthetic oligonucleotide
uuccuuuugcuu

SEQ ID NO: 101073 - RNA, 16 nt, Artificial Sequence
  Description of Artificial Sequence: Synthetic oligonucleotide
uuuuaaaguaauuuuu

SEQ ID NO: 101074 - RNA, 13 nt, Artificial Sequence
  Description of Artificial Sequence: Synthetic oligonucleotide
caacagucaaugg

SEQ ID NO: 101075 - RNA, 13 nt, Artificial Sequence
  Description of Artificial Sequence: Synthetic oligonucleotide
ucgacaaaccaau

SEQ ID NO: 101076 - RNA, 12 nt, Artificial Sequence
  Description of Artificial Sequence: Synthetic oligonucleotide
acugcuaccacu

SEQ ID NO: 101077 - RNA, 13 nt, Artificial Sequence
  Description of Artificial Sequence: Synthetic oligonucleotide
gcaagcggucuua

SEQ ID NO: 101078 - RNA, 13 nt, Artificial Sequence
  Description of Artificial Sequence: Synthetic oligonucleotide
ggucuuaccggcu

SEQ ID NO: 101079 - RNA, 11 nt, Artificial Sequence
  Description of Artificial Sequence: Synthetic oligonucleotide
gauggguuacc

SEQ ID NO: 101080 - RNA, 11 nt, Artificial Sequence
  Description of Artificial Sequence: Synthetic oligonucleotide
guuaccugcga

SEQ ID NO: 101081 - RNA, 12 nt, Artificial Sequence
  Description of Artificial Sequence: Synthetic oligonucleotide
aaucuugcugag

SEQ ID NO: 101082 - RNA, 13 nt, Artificial Sequence
  Description of Artificial Sequence: Synthetic oligonucleotide
agcauaaaacagu

SEQ ID NO: 101083 - RNA, 12 nt, Artificial Sequence
  Description of Artificial Sequence: Synthetic oligonucleotide
guccuuuauccu

SEQ ID NO: 101084 - RNA, 12 nt, Artificial Sequence
  Description of Artificial Sequence: Synthetic oligonucleotide
caacgcaaguug

SEQ ID NO: 101085 - RNA, 13 nt, Artificial Sequence
  Description of Artificial Sequence: Synthetic oligonucleotide
aaacugaaaccau

SEQ ID NO: 101086 - RNA, 14 nt, Artificial Sequence
  Description of Artificial Sequence: Synthetic oligonucleotide
acuuuguuaaauau

SEQ ID NO: 101087 - RNA, 14 nt, Artificial Sequence
  Description of Artificial Sequence: Synthetic oligonucleotide
guauauuaaaaguu

SEQ ID NO: 101088 - RNA, 13 nt, Artificial Sequence
  Description of Artificial Sequence: Synthetic oligonucleotide
guuuugacuuaac

SEQ ID NO: 101089 - RNA, 13 nt, Artificial Sequence
  Description of Artificial Sequence: Synthetic oligonucleotide
gcaaacucagcac

SEQ ID NO: 101090 - RNA, 11 nt, Artificial Sequence
  Description of Artificial Sequence: Synthetic oligonucleotide
ugcugaccuca

SEQ ID NO: 101091 - RNA, 14 nt, Artificial Sequence
  Description of Artificial Sequence: Synthetic oligonucleotide
uuuauucagaucgc

SEQ ID NO: 101092 - RNA, 13 nt, Artificial Sequence
  Description of Artificial Sequence: Synthetic oligonucleotide
aggguucugggau

SEQ ID NO: 101093 - RNA, 15 nt, Artificial Sequence
  Description of Artificial Sequence: Synthetic oligonucleotide
auauuggaaauuaug

SEQ ID NO: 101094 - RNA, 13 nt, Artificial Sequence
  Description of Artificial Sequence: Synthetic oligonucleotide
auggaagcacuag

SEQ ID NO: 101095 - RNA, 13 nt, Artificial Sequence
  Description of Artificial Sequence: Synthetic oligonucleotide
guuuuuaugugga

SEQ ID NO: 101096 - RNA, 12 nt, Artificial Sequence
  Description of Artificial Sequence: Synthetic oligonucleotide
ggaauugguaga

SEQ ID NO: 101097 - RNA, 13 nt, Artificial Sequence
  Description of Artificial Sequence: Synthetic oligonucleotide
uuagacuuggaga

SEQ ID NO: 101098 - RNA, 13 nt, Artificial Sequence
  Description of Artificial Sequence: Synthetic oligonucleotide
uuacaguauucca

SEQ ID NO: 101099 - RNA, 15 nt, Artificial Sequence
  Description of Artificial Sequence: Synthetic oligonucleotide
ccacugaugaauuaa

SEQ ID NO: 101100 - RNA, 12 nt, Artificial Sequence
  Description of Artificial Sequence: Synthetic oligonucleotide
ccacaucaucac

SEQ ID NO: 101101 - RNA, 13 nt, Artificial Sequence
  Description of Artificial Sequence: Synthetic oligonucleotide
cucaccaaacaga

SEQ ID NO: 101102 - RNA, 12 nt, Artificial Sequence
  Description of Artificial Sequence: Synthetic oligonucleotide
ggaacaugaugg

SEQ ID NO: 101103 - RNA, 12 nt, Artificial Sequence
  Description of Artificial Sequence: Synthetic oligonucleotide
cauguagacugc

SEQ ID NO: 101104 - RNA, 13 nt, Artificial Sequence
  Description of Artificial Sequence: Synthetic oligonucleotide
ggaucuauuuaug

SEQ ID NO: 101105 - RNA, 12 nt, Artificial Sequence
  Description of Artificial Sequence: Synthetic oligonucleotide
gcacuauuauca

SEQ ID NO: 101106 - RNA, 11 nt, Artificial Sequence
  Description of Artificial Sequence: Synthetic oligonucleotide
aucaguucugc

SEQ ID NO: 101107 - RNA, 13 nt, Artificial Sequence
  Description of Artificial Sequence: Synthetic oligonucleotide
agauuaaaccuac

SEQ ID NO: 101108 - RNA, 13 nt, Artificial Sequence
  Description of Artificial Sequence: Synthetic oligonucleotide
auaaaauccuucu

SEQ ID NO: 101109 - RNA, 12 nt, Artificial Sequence
  Description of Artificial Sequence: Synthetic oligonucleotide
aaugcuguagac

SEQ ID NO: 101110 - RNA, 13 nt, Artificial Sequence
  Description of Artificial Sequence: Synthetic oligonucleotide
uugauaggaauag

SEQ ID NO: 101111 - RNA, 11 nt, Artificial Sequence
  Description of Artificial Sequence: Synthetic oligonucleotide
aauggcccuga

SEQ ID NO: 101112 - RNA, 11 nt, Artificial Sequence
  Description of Artificial Sequence: Synthetic oligonucleotide
uuccucaagca

SEQ ID NO: 101113 - RNA, 10 nt, Artificial Sequence
  Description of Artificial Sequence: Synthetic oligonucleotide
guucagccca

SEQ ID NO: 101114 - RNA, 11 nt, Artificial Sequence
  Description of Artificial Sequence: Synthetic oligonucleotide
gcugcugaacc

SEQ ID NO: 101115 - RNA, 12 nt, Artificial Sequence
  Description of Artificial Sequence: Synthetic oligonucleotide
aaguucucuuca

SEQ ID NO: 101116 - RNA, 11 nt, Artificial Sequence
  Description of Artificial Sequence: Synthetic oligonucleotide
ccagccuagag

SEQ ID NO: 101117 - RNA, 13 nt, Artificial Sequence
  Description of Artificial Sequence: Synthetic oligonucleotide
cucugugaagugu

SEQ ID NO: 101118 - RNA, 14 nt, Artificial Sequence
  Description of Artificial Sequence: Synthetic oligonucleotide
ugagaaaauuucaa

SEQ ID NO: 101119 - RNA, 11 nt, Artificial Sequence
  Description of Artificial Sequence: Synthetic oligonucleotide
aauccuccuga

SEQ ID NO: 101120 - RNA, 12 nt, Artificial Sequence
  Description of Artificial Sequence: Synthetic oligonucleotide
gugacaucauau

SEQ ID NO: 101121 - RNA, 13 nt, Artificial Sequence
  Description of Artificial Sequence: Synthetic oligonucleotide
aaucuucaucaua

SEQ ID NO: 101122 - RNA, 13 nt, Artificial Sequence
  Description of Artificial Sequence: Synthetic oligonucleotide
gacuagcuauuaa

SEQ ID NO: 101123 - RNA, 14 nt, Artificial Sequence
  Description of Artificial Sequence: Synthetic oligonucleotide
ucucuacuaaaaau

SEQ ID NO: 101124 - RNA, 12 nt, Artificial Sequence
  Description of Artificial Sequence: Synthetic oligonucleotide
ucuaucucgccu

SEQ ID NO: 101125 - RNA, 13 nt, Artificial Sequence
  Description of Artificial Sequence: Synthetic oligonucleotide
cuucgguccaguu

SEQ ID NO: 101126 - RNA, 11 nt, Artificial Sequence
  Description of Artificial Sequence: Synthetic oligonucleotide
gauguagccgc

SEQ ID NO: 101127 - RNA, 12 nt, Artificial Sequence
  Description of Artificial Sequence: Synthetic oligonucleotide
ugaggagacuug

SEQ ID NO: 101128 - RNA, 12 nt, Artificial Sequence
  Description of Artificial Sequence: Synthetic oligonucleotide
gaguagugagga

SEQ ID NO: 101129 - RNA, 14 nt, Artificial Sequence
  Description of Artificial Sequence: Synthetic oligonucleotide
cagaugaguacaaa

SEQ ID NO: 101130 - RNA, 13 nt, Artificial Sequence
  Description of Artificial Sequence: Synthetic oligonucleotide
guuguuaaugggc

SEQ ID NO: 101131 - RNA, 13 nt, Artificial Sequence
  Description of Artificial Sequence: Synthetic oligonucleotide
uuuuuaauuuauu

SEQ ID NO: 101132 - RNA, 12 nt, Artificial Sequence
  Description of Artificial Sequence: Synthetic oligonucleotide
uauuuaaauaug

SEQ ID NO: 101133 - RNA, 13 nt, Artificial Sequence
  Description of Artificial Sequence: Synthetic oligonucleotide
uauccuuuguuuc

SEQ ID NO: 101134 - RNA, 14 nt, Artificial Sequence
  Description of Artificial Sequence: Synthetic oligonucleotide
cgucuaaguguuug

SEQ ID NO: 101135 - RNA, 12 nt, Artificial Sequence
  Description of Artificial Sequence: Synthetic oligonucleotide
accugugacaaa

SEQ ID NO: 101136 - RNA, 13 nt, Artificial Sequence
  Description of Artificial Sequence: Synthetic oligonucleotide
ccaggcugaauua

SEQ ID NO: 101137 - RNA, 14 nt, Artificial Sequence
  Description of Artificial Sequence: Synthetic oligonucleotide
gucauucuuacaau

SEQ ID NO: 101138 - RNA, 15 nt, Artificial Sequence
  Description of Artificial Sequence: Synthetic oligonucleotide
ucauucuuacaauug

SEQ ID NO: 101139 - RNA, 12 nt, Artificial Sequence
  Description of Artificial Sequence: Synthetic oligonucleotide
cagagaguguac

SEQ ID NO: 101140 - RNA, 12 nt, Artificial Sequence
  Description of Artificial Sequence: Synthetic oligonucleotide
agaacucagcag

SEQ ID NO: 101141 - RNA, 13 nt, Artificial Sequence
  Description of Artificial Sequence: Synthetic oligonucleotide
uuuauuuucagua

SEQ ID NO: 101142 - RNA, 12 nt, Artificial Sequence
  Description of Artificial Sequence: Synthetic oligonucleotide
ucuuaaauggaa

SEQ ID NO: 101143 - RNA, 13 nt, Artificial Sequence
  Description of Artificial Sequence: Synthetic oligonucleotide
ugccuaaaauugu

SEQ ID NO: 101144 - RNA, 12 nt, Artificial Sequence
  Description of Artificial Sequence: Synthetic oligonucleotide
agacugugagcu

SEQ ID NO: 101145 - RNA, 14 nt, Artificial Sequence
  Description of Artificial Sequence: Synthetic oligonucleotide
ugcuuuuuauuaau

SEQ ID NO: 101146 - RNA, 13 nt, Artificial Sequence
  Description of Artificial Sequence: Synthetic oligonucleotide
cucuucuuacauu

SEQ ID NO: 101147 - RNA, 15 nt, Artificial Sequence
  Description of Artificial Sequence: Synthetic oligonucleotide
cauuuguaaaaaugu

SEQ ID NO: 101148 - RNA, 15 nt, Artificial Sequence
  Description of Artificial Sequence: Synthetic oligonucleotide
aucuuaauucauauu

SEQ ID NO: 101149 - RNA, 13 nt, Artificial Sequence
  Description of Artificial Sequence: Synthetic oligonucleotide
gaacuaaucauga

SEQ ID NO: 101150 - RNA, 12 nt, Artificial Sequence
  Description of Artificial Sequence: Synthetic oligonucleotide
ucugcucuuggg

SEQ ID NO: 101151 - RNA, 13 nt, Artificial Sequence
  Description of Artificial Sequence: Synthetic oligonucleotide
caguagcuuugag

SEQ ID NO: 101152 - RNA, 14 nt, Artificial Sequence
  Description of Artificial Sequence: Synthetic oligonucleotide
cacguaauauuuca

SEQ ID NO: 101153 - RNA, 13 nt, Artificial Sequence
  Description of Artificial Sequence: Synthetic oligonucleotide
uauucucuucacu

SEQ ID NO: 101154 - RNA, 14 nt, Artificial Sequence
  Description of Artificial Sequence: Synthetic oligonucleotide
cuaaugcuaagaaa

SEQ ID NO: 101155 - RNA, 12 nt, Artificial Sequence
  Description of Artificial Sequence: Synthetic oligonucleotide
gcugaaaaucaa

SEQ ID NO: 101156 - RNA, 14 nt, Artificial Sequence
  Description of Artificial Sequence: Synthetic oligonucleotide
aauaugauuacuuu

SEQ ID NO: 101157 - RNA, 14 nt, Artificial Sequence
  Description of Artificial Sequence: Synthetic oligonucleotide
cauuuuguucuaca

SEQ ID NO: 101158 - RNA, 12 nt, Artificial Sequence
  Description of Artificial Sequence: Synthetic oligonucleotide
cccgggacucuc

SEQ ID NO: 101159 - RNA, 14 nt, Artificial Sequence
  Description of Artificial Sequence: Synthetic oligonucleotide
ccuuuaaaguaaag

SEQ ID NO: 101160 - RNA, 13 nt, Artificial Sequence
  Description of Artificial Sequence: Synthetic oligonucleotide
ucuggaagccugg

SEQ ID NO: 101161 - RNA, 14 nt, Artificial Sequence
  Description of Artificial Sequence: Synthetic oligonucleotide
aaaacaaaagagag

SEQ ID NO: 101162 - RNA, 13 nt, Artificial Sequence
  Description of Artificial Sequence: Synthetic oligonucleotide
aucaguuaugccg

SEQ ID NO: 101163 - RNA, 13 nt, Artificial Sequence
  Description of Artificial Sequence: Synthetic oligonucleotide
uaaaagaagucca

SEQ ID NO: 101164 - RNA, 11 nt, Artificial Sequence
  Description of Artificial Sequence: Synthetic oligonucleotide
aggugagguua

SEQ ID NO: 101165 - RNA, 11 nt, Artificial Sequence
  Description of Artificial Sequence: Synthetic oligonucleotide
gggaagaggac

SEQ ID NO: 101166 - RNA, 13 nt, Artificial Sequence
  Description of Artificial Sequence: Synthetic oligonucleotide
aagcaaguauugu

SEQ ID NO: 101167 - RNA, 12 nt, Artificial Sequence
  Description of Artificial Sequence: Synthetic oligonucleotide
auuguagcacuc

SEQ ID NO: 101168 - RNA, 14 nt, Artificial Sequence
  Description of Artificial Sequence: Synthetic oligonucleotide
acaaaaccacaaau

SEQ ID NO: 101169 - RNA, 12 nt, Artificial Sequence
  Description of Artificial Sequence: Synthetic oligonucleotide
uaagcccauaca

SEQ ID NO: 101170 - RNA, 11 nt, Artificial Sequence
  Description of Artificial Sequence: Synthetic oligonucleotide
agcccauacag

SEQ ID NO: 101171 - RNA, 12 nt, Artificial Sequence
  Description of Artificial Sequence: Synthetic oligonucleotide
cagaaaccuucc

SEQ ID NO: 101172 - RNA, 10 nt, Artificial Sequence
  Description of Artificial Sequence: Synthetic oligonucleotide
guauaccuac

SEQ ID NO: 101173 - RNA, 13 nt, Artificial Sequence
  Description of Artificial Sequence: Synthetic oligonucleotide
gccaguuuucgga

SEQ ID NO: 101174 - RNA, 9 nt, Artificial Sequence
  Description of Artificial Sequence: Synthetic oligonucleotide
ggaacaggg

SEQ ID NO: 101175 - RNA, 13 nt, Artificial Sequence
  Description of Artificial Sequence: Synthetic oligonucleotide
uuaacuuuccagu

SEQ ID NO: 101176 - RNA, 14 nt, Artificial Sequence
  Description of Artificial Sequence: Synthetic oligonucleotide
aaaguuugguuuug

SEQ ID NO: 101177 - RNA, 12 nt, Artificial Sequence
  Description of Artificial Sequence: Synthetic oligonucleotide
cuucccacugua

SEQ ID NO: 101178 - RNA, 13 nt, Artificial Sequence
  Description of Artificial Sequence: Synthetic oligonucleotide
ugauaccauauga

SEQ ID NO: 101179 - RNA, 11 nt, Artificial Sequence
  Description of Artificial Sequence: Synthetic oligonucleotide
aacaugggcug

SEQ ID NO: 101180 - RNA, 13 nt, Artificial Sequence
  Description of Artificial Sequence: Synthetic oligonucleotide
caacuuuuucaua

SEQ ID NO: 101181 - RNA, 12 nt, Artificial Sequence
  Description of Artificial Sequence: Synthetic oligonucleotide
caugaggccgga

SEQ ID NO: 101182 - RNA, 11 nt, Artificial Sequence
  Description of Artificial Sequence: Synthetic oligonucleotide
acugcauuugu

SEQ ID NO: 101183 - RNA, 13 nt, Artificial Sequence
  Description of Artificial Sequence: Synthetic oligonucleotide
aauguuuacuacc

SEQ ID NO: 101184 - RNA, 15 nt, Artificial Sequence
  Description of Artificial Sequence: Synthetic oligonucleotide
aauuuuuugaugaaa

SEQ ID NO: 101185 - RNA, 14 nt, Artificial Sequence
  Description of Artificial Sequence: Synthetic oligonucleotide
cagugugugaauuu

SEQ ID NO: 101186 - RNA, 13 nt, Artificial Sequence
  Description of Artificial Sequence: Synthetic oligonucleotide
gagcaauguaugu

SEQ ID NO: 101187 - RNA, 14 nt, Artificial Sequence
  Description of Artificial Sequence: Synthetic oligonucleotide
aaagcacauauaua

SEQ ID NO: 101188 - RNA, 14 nt, Artificial Sequence
  Description of Artificial Sequence: Synthetic oligonucleotide
guaauaguuucucc

SEQ ID NO: 101189 - RNA, 13 nt, Artificial Sequence
  Description of Artificial Sequence: Synthetic oligonucleotide
aguuucuccaaau

SEQ ID NO: 101190 - RNA, 13 nt, Artificial Sequence
  Description of Artificial Sequence: Synthetic oligonucleotide
uacuuccuagaaa

SEQ ID NO: 101191 - RNA, 13 nt, Artificial Sequence
  Description of Artificial Sequence: Synthetic oligonucleotide
uacaccauauaug

SEQ ID NO: 101192 - RNA, 14 nt, Artificial Sequence
  Description of Artificial Sequence: Synthetic oligonucleotide
auauaugaauggag

SEQ ID NO: 101193 - RNA, 13 nt, Artificial Sequence
  Description of Artificial Sequence: Synthetic oligonucleotide
acgagaagaagau

SEQ ID NO: 101194 - RNA, 13 nt, Artificial Sequence
  Description of Artificial Sequence: Synthetic oligonucleotide
ucauuuacaggga

SEQ ID NO: 101195 - RNA, 13 nt, Artificial Sequence
  Description of Artificial Sequence: Synthetic oligonucleotide
cauuuacagggac

SEQ ID NO: 101196 - RNA, 10 nt, Artificial Sequence
  Description of Artificial Sequence: Synthetic oligonucleotide
agggaccuga

SEQ ID NO: 101197 - RNA, 14 nt, Artificial Sequence
  Description of Artificial Sequence: Synthetic oligonucleotide
uguuugacugcauc

SEQ ID NO: 101198 - RNA, 13 nt, Artificial Sequence
  Description of Artificial Sequence: Synthetic oligonucleotide
uuugacugcaucg

SEQ ID NO: 101199 - RNA, 12 nt, Artificial Sequence
  Description of Artificial Sequence: Synthetic oligonucleotide
gaguucacaggg

SEQ ID NO: 101200 - RNA, 13 nt, Artificial Sequence
  Description of Artificial Sequence: Synthetic oligonucleotide
ggcaccucugucc

SEQ ID NO: 101201 - RNA, 15 nt, Artificial Sequence
  Description of Artificial Sequence: Synthetic oligonucleotide
gguuugucuuuuuaa

SEQ ID NO: 101202 - RNA, 14 nt, Artificial Sequence
  Description of Artificial Sequence: Synthetic oligonucleotide
uuugucuuuuuaag

SEQ ID NO: 101203 - RNA, 13 nt, Artificial Sequence
  Description of Artificial Sequence: Synthetic oligonucleotide
ccuaaagguuguc

SEQ ID NO: 101204 - RNA, 12 nt, Artificial Sequence
  Description of Artificial Sequence: Synthetic oligonucleotide
aagguugucgac

SEQ ID NO: 101205 - RNA, 13 nt, Artificial Sequence
  Description of Artificial Sequence: Synthetic oligonucleotide
accuggcaauugu

SEQ ID NO: 101206 - RNA, 12 nt, Artificial Sequence
  Description of Artificial Sequence: Synthetic oligonucleotide
aguggugcgagg

SEQ ID NO: 101207 - RNA, 13 nt, Artificial Sequence
  Description of Artificial Sequence: Synthetic oligonucleotide
agagacaugaaau

SEQ ID NO: 101208 - RNA, 13 nt, Artificial Sequence
  Description of Artificial Sequence: Synthetic oligonucleotide
auauauuucucca

SEQ ID NO: 101209 - RNA, 10 nt, Artificial Sequence
  Description of Artificial Sequence: Synthetic oligonucleotide
caugaaggcu

SEQ ID NO: 101210 - RNA, 11 nt, Artificial Sequence
  Description of Artificial Sequence: Synthetic oligonucleotide
gcuggaguggu

SEQ ID NO: 101211 - RNA, 11 nt, Artificial Sequence
  Description of Artificial Sequence: Synthetic oligonucleotide
aggaagagagg

SEQ ID NO: 101212 - RNA, 12 nt, Artificial Sequence
  Description of Artificial Sequence: Synthetic oligonucleotide
cuugcaucgggc

SEQ ID NO: 101213 - RNA, 13 nt, Artificial Sequence
  Description of Artificial Sequence: Synthetic oligonucleotide
auauccuacugug

SEQ ID NO: 101214 - RNA, 13 nt, Artificial Sequence
  Description of Artificial Sequence: Synthetic oligonucleotide
uccuacuguguaa

SEQ ID NO: 101215 - RNA, 12 nt, Artificial Sequence
  Description of Artificial Sequence: Synthetic oligonucleotide
ccuuguagugua

SEQ ID NO: 101216 - RNA, 13 nt, Artificial Sequence
  Description of Artificial Sequence: Synthetic oligonucleotide
ucuuuguugauug

SEQ ID NO: 101217 - RNA, 14 nt, Artificial Sequence
  Description of Artificial Sequence: Synthetic oligonucleotide
uuuguugauugaaa

SEQ ID NO: 101218 - RNA, 15 nt, Artificial Sequence
  Description of Artificial Sequence: Synthetic oligonucleotide
uucuuuuucuuccau

SEQ ID NO: 101219 - RNA, 13 nt, Artificial Sequence
  Description of Artificial Sequence: Synthetic oligonucleotide
aaucuuccuucua

SEQ ID NO: 101220 - RNA, 13 nt, Artificial Sequence
  Description of Artificial Sequence: Synthetic oligonucleotide
uugaaugcuucau

SEQ ID NO: 101221 - RNA, 13 nt, Artificial Sequence
  Description of Artificial Sequence: Synthetic oligonucleotide
ugaaugcuucaug

SEQ ID NO: 101222 - RNA, 13 nt, Artificial Sequence
  Description of Artificial Sequence: Synthetic oligonucleotide
aauucuacuuuga

SEQ ID NO: 101223 - RNA, 13 nt, Artificial Sequence
  Description of Artificial Sequence: Synthetic oligonucleotide
agcaacuacagac

SEQ ID NO: 101224 - RNA, 13 nt, Artificial Sequence
  Description of Artificial Sequence: Synthetic oligonucleotide
gaccaaggucaac

SEQ ID NO: 101225 - RNA, 13 nt, Artificial Sequence
  Description of Artificial Sequence: Synthetic oligonucleotide
cgacuaucucgac

SEQ ID NO: 101226 - RNA, 13 nt, Artificial Sequence
  Description of Artificial Sequence: Synthetic oligonucleotide
aaccuucccaaac

SEQ ID NO: 101227 - RNA, 14 nt, Artificial Sequence
  Description of Artificial Sequence: Synthetic oligonucleotide
ccaagcuuagaacu

SEQ ID NO: 101228 - RNA, 15 nt, Artificial Sequence
  Description of Artificial Sequence: Synthetic oligonucleotide
agcuuagaacuuuaa

SEQ ID NO: 101229 - RNA, 11 nt, Artificial Sequence
  Description of Artificial Sequence: Synthetic oligonucleotide
aagaccaccac

SEQ ID NO: 101230 - RNA, 14 nt, Artificial Sequence
  Description of Artificial Sequence: Synthetic oligonucleotide
gcgagaaauaaagu

SEQ ID NO: 101231 - RNA, 14 nt, Artificial Sequence
  Description of Artificial Sequence: Synthetic oligonucleotide
cgagaaauaaaguu

SEQ ID NO: 101232 - RNA, 12 nt, Artificial Sequence
  Description of Artificial Sequence: Synthetic oligonucleotide
aggaaaugaucc

SEQ ID NO: 101233 - RNA, 13 nt, Artificial Sequence
  Description of Artificial Sequence: Synthetic oligonucleotide
gaagaaaugaaac

SEQ ID NO: 101234 - RNA, 13 nt, Artificial Sequence
  Description of Artificial Sequence: Synthetic oligonucleotide
guuuccauccucc

SEQ ID NO: 101235 - RNA, 15 nt, Artificial Sequence
  Description of Artificial Sequence: Synthetic oligonucleotide
acugaaaaucuuuga

SEQ ID NO: 101236 - RNA, 11 nt, Artificial Sequence
  Description of Artificial Sequence: Synthetic oligonucleotide
ugccguucagg

SEQ ID NO: 101237 - RNA, 13 nt, Artificial Sequence
  Description of Artificial Sequence: Synthetic oligonucleotide
caggguccagaag

SEQ ID NO: 101238 - RNA, 13 nt, Artificial Sequence
  Description of Artificial Sequence: Synthetic oligonucleotide
ucaagacugcuug

SEQ ID NO: 101239 - RNA, 13 nt, Artificial Sequence
  Description of Artificial Sequence: Synthetic oligonucleotide
uccaugucuuugg

SEQ ID NO: 101240 - RNA, 11 nt, Artificial Sequence
  Description of Artificial Sequence: Synthetic oligonucleotide
gccugaaacac

SEQ ID NO: 101241 - RNA, 12 nt, Artificial Sequence
  Description of Artificial Sequence: Synthetic oligonucleotide
ucucuguaccuc

SEQ ID NO: 101242 - RNA, 12 nt, Artificial Sequence
  Description of Artificial Sequence: Synthetic oligonucleotide
agcaagacaaga

SEQ ID NO: 101243 - RNA, 13 nt, Artificial Sequence
  Description of Artificial Sequence: Synthetic oligonucleotide
gcaagacaagaaa

SEQ ID NO: 101244 - RNA, 12 nt, Artificial Sequence
  Description of Artificial Sequence: Synthetic oligonucleotide
uguacaagaucc

SEQ ID NO: 101245 - RNA, 12 nt, Artificial Sequence
  Description of Artificial Sequence: Synthetic oligonucleotide
cguacuugcaga

SEQ ID NO: 101246 - RNA, 13 nt, Artificial Sequence
  Description of Artificial Sequence: Synthetic oligonucleotide
cgaucgauacaga

SEQ ID NO: 101247 - RNA, 13 nt, Artificial Sequence
  Description of Artificial Sequence: Synthetic oligonucleotide
uauaaaaauaaau

SEQ ID NO: 101248 - RNA, 13 nt, Artificial Sequence
  Description of Artificial Sequence: Synthetic oligonucleotide
uaaaaauaaauau

SEQ ID NO: 101249 - RNA, 13 nt, Artificial Sequence
  Description of Artificial Sequence: Synthetic oligonucleotide
uuugacugcugug

SEQ ID NO: 101250 - RNA, 13 nt, Artificial Sequence
  Description of Artificial Sequence: Synthetic oligonucleotide
ggagaugagagac

SEQ ID NO: 101251 - RNA, 10 nt, Artificial Sequence
  Description of Artificial Sequence: Synthetic oligonucleotide
ucccacuugg

SEQ ID NO: 101252 - RNA, 10 nt, Artificial Sequence
  Description of Artificial Sequence: Synthetic oligonucleotide
guucacggcc

SEQ ID NO: 101253 - RNA, 12 nt, Artificial Sequence
  Description of Artificial Sequence: Synthetic oligonucleotide
accaucacacca

SEQ ID NO: 101254 - RNA, 10 nt, Artificial Sequence
  Description of Artificial Sequence: Synthetic oligonucleotide
cugcggguuu

SEQ ID NO: 101255 - RNA, 9 nt, Artificial Sequence
  Description of Artificial Sequence: Synthetic oligonucleotide
uccaguuug

SEQ ID NO: 101256 - RNA, 12 nt, Artificial Sequence
  Description of Artificial Sequence: Synthetic oligonucleotide
uuaaggacuucu

SEQ ID NO: 101257 - RNA, 12 nt, Artificial Sequence
  Description of Artificial Sequence: Synthetic oligonucleotide
agugggacagag

SEQ ID NO: 101258 - RNA, 13 nt, Artificial Sequence
  Description of Artificial Sequence: Synthetic oligonucleotide
auuuguuauugug

SEQ ID NO: 101259 - RNA, 12 nt, Artificial Sequence
  Description of Artificial Sequence: Synthetic oligonucleotide
ucaaaugcauuu

SEQ ID NO: 101260 - RNA, 9 nt, Artificial Sequence
  Description of Artificial Sequence: Synthetic oligonucleotide
aggaaagcc

SEQ ID NO: 101261 - RNA, 10 nt, Artificial Sequence
  Description of Artificial Sequence: Synthetic oligonucleotide
ggaaagcccu

SEQ ID NO: 101262 - RNA, 11 nt, Artificial Sequence
  Description of Artificial Sequence: Synthetic oligonucleotide
ccagcauggcc

SEQ ID NO: 101263 - RNA, 10 nt, Artificial Sequence
  Description of Artificial Sequence: Synthetic oligonucleotide
uucucccuga

SEQ ID NO: 101264 - RNA, 11 nt, Artificial Sequence
  Description of Artificial Sequence: Synthetic oligonucleotide
aagaagcccuu

SEQ ID NO: 101265 - RNA, 11 nt, Artificial Sequence
  Description of Artificial Sequence: Synthetic oligonucleotide
gaagcccuuca

SEQ ID NO: 101266 - RNA, 10 nt, Artificial Sequence
  Description of Artificial Sequence: Synthetic oligonucleotide
cccuucagcg

SEQ ID NO: 101267 - RNA, 10 nt, Artificial Sequence
  Description of Artificial Sequence: Synthetic oligonucleotide
cuucagcggc

SEQ ID NO: 101268 - RNA, 11 nt, Artificial Sequence
  Description of Artificial Sequence: Synthetic oligonucleotide
cagcggccagu

SEQ ID NO: 101269 - RNA, 11 nt, Artificial Sequence
  Description of Artificial Sequence: Synthetic oligonucleotide
gaaaagcuccg

SEQ ID NO: 101270 - RNA, 10 nt, Artificial Sequence
  Description of Artificial Sequence: Synthetic oligonucleotide
aaagcuccgg

SEQ ID NO: 101271 - RNA, 12 nt, Artificial Sequence
  Description of Artificial Sequence: Synthetic oligonucleotide
gucaacagucug

SEQ ID NO: 101272 - RNA, 12 nt, Artificial Sequence
  Description of Artificial Sequence: Synthetic oligonucleotide
agaguucaaaag

SEQ ID NO: 101273 - RNA, 12 nt, Artificial Sequence
  Description of Artificial Sequence: Synthetic oligonucleotide
gaguucaaaagc

SEQ ID NO: 101274 - RNA, 11 nt, Artificial Sequence
  Description of Artificial Sequence: Synthetic oligonucleotide
ucaaaagcccu

SEQ ID NO: 101275 - RNA, 11 nt, Artificial Sequence
  Description of Artificial Sequence: Synthetic oligonucleotide
caaaagcccuu

SEQ ID NO: 101276 - RNA, 11 nt, Artificial Sequence
  Description of Artificial Sequence: Synthetic oligonucleotide
aaagcccuuca

SEQ ID NO: 101277 - RNA, 11 nt, Artificial Sequence
  Description of Artificial Sequence: Synthetic oligonucleotide
aagcccuucag

SEQ ID NO: 101278 - RNA, 12 nt, Artificial Sequence
  Description of Artificial Sequence: Synthetic oligonucleotide
ugaagccgcucg

SEQ ID NO: 101279 - RNA, 11 nt, Artificial Sequence
  Description of Artificial Sequence: Synthetic oligonucleotide
acgccagucaa

SEQ ID NO: 101280 - RNA, 12 nt, Artificial Sequence
  Description of Artificial Sequence: Synthetic oligonucleotide
ucuuggugcgug

SEQ ID NO: 101281 - RNA, 13 nt, Artificial Sequence
  Description of Artificial Sequence: Synthetic oligonucleotide
uuggauucaucag

SEQ ID NO: 101282 - RNA, 12 nt, Artificial Sequence
  Description of Artificial Sequence: Synthetic oligonucleotide
ggaauaccuaag

SEQ ID NO: 101283 - RNA, 11 nt, Artificial Sequence
  Description of Artificial Sequence: Synthetic oligonucleotide
uuugaggcuca

SEQ ID NO: 101284 - RNA, 10 nt, Artificial Sequence
  Description of Artificial Sequence: Synthetic oligonucleotide
cuacaauugg

SEQ ID NO: 101285 - RNA, 11 nt, Artificial Sequence
  Description of Artificial Sequence: Synthetic oligonucleotide
aguuaggagcc

SEQ ID NO: 101286 - RNA, 12 nt, Artificial Sequence
  Description of Artificial Sequence: Synthetic oligonucleotide
gucaauauccac

SEQ ID NO: 101287 - RNA, 12 nt, Artificial Sequence
  Description of Artificial Sequence: Synthetic oligonucleotide
uguucagucaca

SEQ ID NO: 101288 - RNA, 11 nt, Artificial Sequence
  Description of Artificial Sequence: Synthetic oligonucleotide
cacacacauac

SEQ ID NO: 101289 - RNA, 11 nt, Artificial Sequence
  Description of Artificial Sequence: Synthetic oligonucleotide
uccuuuugcuu

SEQ ID NO: 101290 - RNA, 15 nt, Artificial Sequence
  Description of Artificial Sequence: Synthetic oligonucleotide
uuuaaaguaauuuuu

SEQ ID NO: 101291 - RNA, 12 nt, Artificial Sequence
  Description of Artificial Sequence: Synthetic oligonucleotide
aacagucaaugg

SEQ ID NO: 101292 - RNA, 12 nt, Artificial Sequence
  Description of Artificial Sequence: Synthetic oligonucleotide
cgacaaaccaau

SEQ ID NO: 101293 - RNA, 11 nt, Artificial Sequence
  Description of Artificial Sequence: Synthetic oligonucleotide
cugcuaccacu

SEQ ID NO: 101294 - RNA, 12 nt, Artificial Sequence
  Description of Artificial Sequence: Synthetic oligonucleotide
caagcggucuua

SEQ ID NO: 101295 - RNA, 12 nt, Artificial Sequence
  Description of Artificial Sequence: Synthetic oligonucleotide
gucuuaccggcu

SEQ ID NO: 101296 - RNA, 10 nt, Artificial Sequence
  Description of Artificial Sequence: Synthetic oligonucleotide
auggguuacc

SEQ ID NO: 101297 - RNA, 10 nt, Artificial Sequence
  Description of Artificial Sequence: Synthetic oligonucleotide
uuaccugcga

SEQ ID NO: 101298 - RNA, 11 nt, Artificial Sequence
  Description of Artificial Sequence: Synthetic oligonucleotide
aucuugcugag

SEQ ID NO: 101299 - RNA, 12 nt, Artificial Sequence
  Description of Artificial Sequence: Synthetic oligonucleotide
gcauaaaacagu

SEQ ID NO: 101300 - RNA, 11 nt, Artificial Sequence
  Description of Artificial Sequence: Synthetic oligonucleotide
uccuuuauccu

SEQ ID NO: 101301 - RNA, 11 nt, Artificial Sequence
  Description of Artificial Sequence: Synthetic oligonucleotide
aacgcaaguug

SEQ ID NO: 101302 - RNA, 12 nt, Artificial Sequence
  Description of Artificial Sequence: Synthetic oligonucleotide
aacugaaaccau

SEQ ID NO: 101303 - RNA, 13 nt, Artificial Sequence
  Description of Artificial Sequence: Synthetic oligonucleotide
cuuuguuaaauau

SEQ ID NO: 101304 - RNA, 13 nt, Artificial Sequence
  Description of Artificial Sequence: Synthetic oligonucleotide
uauauuaaaaguu

SEQ ID NO: 101305 - RNA, 12 nt, Artificial Sequence
  Description of Artificial Sequence: Synthetic oligonucleotide
uuuugacuuaac

SEQ ID NO: 101306 - RNA, 12 nt, Artificial Sequence
  Description of Artificial Sequence: Synthetic oligonucleotide
caaacucagcac

SEQ ID NO: 101307 - RNA, 10 nt, Artificial Sequence
  Description of Artificial Sequence: Synthetic oligonucleotide
gcugaccuca

SEQ ID NO: 101308 - RNA, 13 nt, Artificial Sequence
  Description of Artificial Sequence: Synthetic oligonucleotide
uuauucagaucgc

SEQ ID NO: 101309 - RNA, 12 nt, Artificial Sequence
  Description of Artificial Sequence: Synthetic oligonucleotide
ggguucugggau

SEQ ID NO: 101310 - RNA, 14 nt, Artificial Sequence
  Description of Artificial Sequence: Synthetic oligonucleotide
uauuggaaauuaug

SEQ ID NO: 101311 - RNA, 12 nt, Artificial Sequence
  Description of Artificial Sequence: Synthetic oligonucleotide
uggaagcacuag

SEQ ID NO: 101312 - RNA, 12 nt, Artificial Sequence
  Description of Artificial Sequence: Synthetic oligonucleotide
uuuuuaugugga

SEQ ID NO: 101313 - RNA, 11 nt, Artificial Sequence
  Description of Artificial Sequence: Synthetic oligonucleotide
gaauugguaga

SEQ ID NO: 101314 - RNA, 12 nt, Artificial Sequence
  Description of Artificial Sequence: Synthetic oligonucleotide
uagacuuggaga

SEQ ID NO: 101315 - RNA, 12 nt, Artificial Sequence
  Description of Artificial Sequence: Synthetic oligonucleotide
uacaguauucca

SEQ ID NO: 101316 - RNA, 14 nt, Artificial Sequence
  Description of Artificial Sequence: Synthetic oligonucleotide
cacugaugaauuaa

SEQ ID NO: 101317 - RNA, 11 nt, Artificial Sequence
  Description of Artificial Sequence: Synthetic oligonucleotide
cacaucaucac

SEQ ID NO: 101318 - RNA, 12 nt, Artificial Sequence
  Description of Artificial Sequence: Synthetic oligonucleotide
ucaccaaacaga

SEQ ID NO: 101319 - RNA, 11 nt, Artificial Sequence
  Description of Artificial Sequence: Synthetic oligonucleotide
gaacaugaugg

SEQ ID NO: 101320 - RNA, 11 nt, Artificial Sequence
  Description of Artificial Sequence: Synthetic oligonucleotide
auguagacugc

SEQ ID NO: 101321 - RNA, 12 nt, Artificial Sequence
  Description of Artificial Sequence: Synthetic oligonucleotide
gaucuauuuaug

SEQ ID NO: 101322 - RNA, 11 nt, Artificial Sequence
  Description of Artificial Sequence: Synthetic oligonucleotide
cacuauuauca

SEQ ID NO: 101323 - RNA, 10 nt, Artificial Sequence
  Description of Artificial Sequence: Synthetic oligonucleotide
ucaguucugc

SEQ ID NO: 101324 - RNA, 12 nt, Artificial Sequence
  Description of Artificial Sequence: Synthetic oligonucleotide
gauuaaaccuac

SEQ ID NO: 101325 - RNA, 12 nt, Artificial Sequence
  Description of Artificial Sequence: Synthetic oligonucleotide
uaaaauccuucu

SEQ ID NO: 101326 - RNA, 11 nt, Artificial Sequence
  Description of Artificial Sequence: Synthetic oligonucleotide
augcuguagac

SEQ ID NO: 101327 - RNA, 12 nt, Artificial Sequence
  Description of Artificial Sequence: Synthetic oligonucleotide
ugauaggaauag

SEQ ID NO: 101328 - RNA, 10 nt, Artificial Sequence
  Description of Artificial Sequence: Synthetic oligonucleotide
auggcccuga

SEQ ID NO: 101329 - RNA, 10 nt, Artificial Sequence
  Description of Artificial Sequence: Synthetic oligonucleotide
uccucaagca

SEQ ID NO: 101330 - RNA, 9 nt, Artificial Sequence
  Description of Artificial Sequence: Synthetic oligonucleotide
uucagccca

SEQ ID NO: 101331 - RNA, 10 nt, Artificial Sequence
  Description of Artificial Sequence: Synthetic oligonucleotide
cugcugaacc

SEQ ID NO: 101332 - RNA, 11 nt, Artificial Sequence
  Description of Artificial Sequence: Synthetic oligonucleotide
aguucucuuca

SEQ ID NO: 101333 - RNA, 10 nt, Artificial Sequence
  Description of Artificial Sequence: Synthetic oligonucleotide
cagccuagag

SEQ ID NO: 101334 - RNA, 12 nt, Artificial Sequence
  Description of Artificial Sequence: Synthetic oligonucleotide
ucugugaagugu

SEQ ID NO: 101335 - RNA, 13 nt, Artificial Sequence
  Description of Artificial Sequence: Synthetic oligonucleotide
gagaaaauuucaa

SEQ ID NO: 101336 - RNA, 10 nt, Artificial Sequence
  Description of Artificial Sequence: Synthetic oligonucleotide
auccuccuga

SEQ ID NO: 101337 - RNA, 11 nt, Artificial Sequence
  Description of Artificial Sequence: Synthetic oligonucleotide
ugacaucauau

SEQ ID NO: 101338 - RNA, 12 nt, Artificial Sequence
  Description of Artificial Sequence: Synthetic oligonucleotide
aucuucaucaua

SEQ ID NO: 101339 - RNA, 12 nt, Artificial Sequence
  Description of Artificial Sequence: Synthetic oligonucleotide
acuagcuauuaa

SEQ ID NO: 101340 - RNA, 13 nt, Artificial Sequence
  Description of Artificial Sequence: Synthetic oligonucleotide
cucuacuaaaaau

SEQ ID NO: 101341 - RNA, 11 nt, Artificial Sequence
  Description of Artificial Sequence: Synthetic oligonucleotide
cuaucucgccu

SEQ ID NO: 101342 - RNA, 12 nt, Artificial Sequence
  Description of Artificial Sequence: Synthetic oligonucleotide
uucgguccaguu

SEQ ID NO: 101343 - RNA, 10 nt, Artificial Sequence
  Description of Artificial Sequence: Synthetic oligonucleotide
auguagccgc

SEQ ID NO: 101344 - RNA, 11 nt, Artificial Sequence
  Description of Artificial Sequence: Synthetic oligonucleotide
gaggagacuug

SEQ ID NO: 101345 - RNA, 11 nt, Artificial Sequence
  Description of Artificial Sequence: Synthetic oligonucleotide
aguagugagga

SEQ ID NO: 101346 - RNA, 13 nt, Artificial Sequence
  Description of Artificial Sequence: Synthetic oligonucleotide
agaugaguacaaa

SEQ ID NO: 101347 - RNA, 12 nt, Artificial Sequence
  Description of Artificial Sequence: Synthetic oligonucleotide
uuguuaaugggc

SEQ ID NO: 101348 - RNA, 12 nt, Artificial Sequence
  Description of Artificial Sequence: Synthetic oligonucleotide
uuuuaauuuauu

SEQ ID NO: 101349 - RNA, 11 nt, Artificial Sequence
  Description of Artificial Sequence: Synthetic oligonucleotide
auuuaaauaug

SEQ ID NO: 101350 - RNA, 12 nt, Artificial Sequence
  Description of Artificial Sequence: Synthetic oligonucleotide
auccuuuguuuc

SEQ ID NO: 101351 - RNA, 13 nt, Artificial Sequence
  Description of Artificial Sequence: Synthetic oligonucleotide
gucuaaguguuug

SEQ ID NO: 101352 - RNA, 11 nt, Artificial Sequence
  Description of Artificial Sequence: Synthetic oligonucleotide
ccugugacaaa

SEQ ID NO: 101353 - RNA, 12 nt, Artificial Sequence
  Description of Artificial Sequence: Synthetic oligonucleotide
caggcugaauua

SEQ ID NO: 101354 - RNA, 13 nt, Artificial Sequence
  Description of Artificial Sequence: Synthetic oligonucleotide
ucauucuuacaau

SEQ ID NO: 101355 - RNA, 14 nt, Artificial Sequence
  Description of Artificial Sequence: Synthetic oligonucleotide
cauucuuacaauug

SEQ ID NO: 101356 - RNA, 11 nt, Artificial Sequence
  Description of Artificial Sequence: Synthetic oligonucleotide
agagaguguac

SEQ ID NO: 101357 - RNA, 11 nt, Artificial Sequence
  Description of Artificial Sequence: Synthetic oligonucleotide
gaacucagcag

SEQ ID NO: 101358 - RNA, 12 nt, Artificial Sequence
  Description of Artificial Sequence: Synthetic oligonucleotide
uuauuuucagua

SEQ ID NO: 101359 - RNA, 11 nt, Artificial Sequence
  Description of Artificial Sequence: Synthetic oligonucleotide
cuuaaauggaa

SEQ ID NO: 101360 - RNA, 12 nt, Artificial Sequence
  Description of Artificial Sequence: Synthetic oligonucleotide
gccuaaaauugu

SEQ ID NO: 101361 - RNA, 12 nt, Artificial Sequence
  Description of Artificial Sequence: Synthetic oligonucleotide
acuaacaucugg

SEQ ID NO: 101362 - RNA, 11 nt, Artificial Sequence
  Description of Artificial Sequence: Synthetic oligonucleotide
gacugugagcu

SEQ ID NO: 101363 - RNA, 13 nt, Artificial Sequence
  Description of Artificial Sequence: Synthetic oligonucleotide
gcuuuuuauuaau

SEQ ID NO: 101364 - RNA, 12 nt, Artificial Sequence
  Description of Artificial Sequence: Synthetic oligonucleotide
ucuucuuacauu

SEQ ID NO: 101365 - RNA, 14 nt, Artificial Sequence
  Description of Artificial Sequence: Synthetic oligonucleotide
auuuguaaaaaugu

SEQ ID NO: 101366 - RNA, 14 nt, Artificial Sequence
  Description of Artificial Sequence: Synthetic oligonucleotide
ucuuaauucauauu

SEQ ID NO: 101367 - RNA, 12 nt, Artificial Sequence
  Description of Artificial Sequence: Synthetic oligonucleotide
aacuaaucauga

SEQ ID NO: 101368 - RNA, 11 nt, Artificial Sequence
  Description of Artificial Sequence: Synthetic oligonucleotide
cugcucuuggg

SEQ ID NO: 101369 - RNA, 12 nt, Artificial Sequence
  Description of Artificial Sequence: Synthetic oligonucleotide
aguagcuuugag

SEQ ID NO: 101370 - RNA, 13 nt, Artificial Sequence
  Description of Artificial Sequence: Synthetic oligonucleotide
acguaauauuuca

SEQ ID NO: 101371 - RNA, 12 nt, Artificial Sequence
  Description of Artificial Sequence: Synthetic oligonucleotide
auucucuucacu

SEQ ID NO: 101372 - RNA, 13 nt, Artificial Sequence
  Description of Artificial Sequence: Synthetic oligonucleotide
uaaugcuaagaaa

SEQ ID NO: 101373 - RNA, 11 nt, Artificial Sequence
  Description of Artificial Sequence: Synthetic oligonucleotide
cugaaaaucaa

SEQ ID NO: 101374 - RNA, 13 nt, Artificial Sequence
  Description of Artificial Sequence: Synthetic oligonucleotide
auaugauuacuuu

SEQ ID NO: 101375 - RNA, 13 nt, Artificial Sequence
  Description of Artificial Sequence: Synthetic oligonucleotide
auuuuguucuaca

SEQ ID NO: 101376 - RNA, 11 nt, Artificial Sequence
  Description of Artificial Sequence: Synthetic oligonucleotide
ccgggacucuc

SEQ ID NO: 101377 - RNA, 13 nt, Artificial Sequence
  Description of Artificial Sequence: Synthetic oligonucleotide
cuuuaaaguaaag

SEQ ID NO: 101378 - RNA, 12 nt, Artificial Sequence
  Description of Artificial Sequence: Synthetic oligonucleotide
cuggaagccugg

SEQ ID NO: 101379 - RNA, 13 nt, Artificial Sequence
  Description of Artificial Sequence: Synthetic oligonucleotide
aaacaaaagagag

SEQ ID NO: 101380 - RNA, 12 nt, Artificial Sequence
  Description of Artificial Sequence: Synthetic oligonucleotide
ucaguuaugccg

SEQ ID NO: 101381 - RNA, 12 nt, Artificial Sequence
  Description of Artificial Sequence: Synthetic oligonucleotide
aaaagaagucca

SEQ ID NO: 101382 - RNA, 10 nt, Artificial Sequence
  Description of Artificial Sequence: Synthetic oligonucleotide
ggugagguua

SEQ ID NO: 101383 - RNA, 10 nt, Artificial Sequence
  Description of Artificial Sequence: Synthetic oligonucleotide
ggaagaggac

SEQ ID NO: 101384 - RNA, 12 nt, Artificial Sequence
  Description of Artificial Sequence: Synthetic oligonucleotide
agcaaguauugu

SEQ ID NO: 101385 - RNA, 11 nt, Artificial Sequence
  Description of Artificial Sequence: Synthetic oligonucleotide
uuguagcacuc

SEQ ID NO: 101386 - RNA, 13 nt, Artificial Sequence
  Description of Artificial Sequence: Synthetic oligonucleotide
caaaaccacaaau

SEQ ID NO: 101387 - RNA, 11 nt, Artificial Sequence
  Description of Artificial Sequence: Synthetic oligonucleotide
aagcccauaca

SEQ ID NO: 101388 - RNA, 10 nt, Artificial Sequence
  Description of Artificial Sequence: Synthetic oligonucleotide
gcccauacag

SEQ ID NO: 101389 - RNA, 11 nt, Artificial Sequence
  Description of Artificial Sequence: Synthetic oligonucleotide
agaaaccuucc

SEQ ID NO: 101390 - RNA, 9 nt, Artificial Sequence
  Description of Artificial Sequence: Synthetic oligonucleotide
uauaccuac

SEQ ID NO: 101391 - RNA, 12 nt, Artificial Sequence
  Description of Artificial Sequence: Synthetic oligonucleotide
ccaguuuucgga

SEQ ID NO: 101392 - RNA, 8 nt, Artificial Sequence
  Description of Artificial Sequence: Synthetic oligonucleotide
gaacaggg

SEQ ID NO: 101393 - RNA, 12 nt, Artificial Sequence
  Description of Artificial Sequence: Synthetic oligonucleotide
uaacuuuccagu

SEQ ID NO: 101394 - RNA, 13 nt, Artificial Sequence
  Description of Artificial Sequence: Synthetic oligonucleotide
aaguuugguuuug

SEQ ID NO: 101395 - RNA, 11 nt, Artificial Sequence
  Description of Artificial Sequence: Synthetic oligonucleotide
uucccacugua

SEQ ID NO: 101396 - RNA, 12 nt, Artificial Sequence
  Description of Artificial Sequence: Synthetic oligonucleotide
gauaccauauga

SEQ ID NO: 101397 - RNA, 10 nt, Artificial Sequence
  Description of Artificial Sequence: Synthetic oligonucleotide
acaugggcug

SEQ ID NO: 101398 - RNA, 12 nt, Artificial Sequence
  Description of Artificial Sequence: Synthetic oligonucleotide
aacuuuuucaua

SEQ ID NO: 101399 - RNA, 11 nt, Artificial Sequence
  Description of Artificial Sequence: Synthetic oligonucleotide
augaggccgga

SEQ ID NO: 101400 - RNA, 10 nt, Artificial Sequence
  Description of Artificial Sequence: Synthetic oligonucleotide
cugcauuugu

SEQ ID NO: 101401 - RNA, 12 nt, Artificial Sequence
  Description of Artificial Sequence: Synthetic oligonucleotide
auguuuacuacc

SEQ ID NO: 101402 - RNA, 14 nt, Artificial Sequence
  Description of Artificial Sequence: Synthetic oligonucleotide
auuuuuugaugaaa

SEQ ID NO: 101403 - RNA, 13 nt, Artificial Sequence
  Description of Artificial Sequence: Synthetic oligonucleotide
agugugugaauuu

SEQ ID NO: 101404 - RNA, 12 nt, Artificial Sequence
  Description of Artificial Sequence: Synthetic oligonucleotide
agcaauguaugu

SEQ ID NO: 101405 - RNA, 13 nt, Artificial Sequence
  Description of Artificial Sequence: Synthetic oligonucleotide
aagcacauauaua

SEQ ID NO: 101406 - RNA, 13 nt, Artificial Sequence
  Description of Artificial Sequence: Synthetic oligonucleotide
uaauaguuucucc

SEQ ID NO: 101407 - RNA, 12 nt, Artificial Sequence
  Description of Artificial Sequence: Synthetic oligonucleotide
guuucuccaaau

SEQ ID NO: 101408 - RNA, 12 nt, Artificial Sequence
  Description of Artificial Sequence: Synthetic oligonucleotide
acuuccuagaaa

SEQ ID NO: 101409 - RNA, 12 nt, Artificial Sequence
  Description of Artificial Sequence: Synthetic oligonucleotide
acaccauauaug

SEQ ID NO: 101410 - RNA, 13 nt, Artificial Sequence
  Description of Artificial Sequence: Synthetic oligonucleotide
uauaugaauggag

SEQ ID NO: 101411 - RNA, 12 nt, Artificial Sequence
  Description of Artificial Sequence: Synthetic oligonucleotide
cauuuacaggga

SEQ ID NO: 101412 - RNA, 12 nt, Artificial Sequence
  Description of Artificial Sequence: Synthetic oligonucleotide
auuuacagggac

SEQ ID NO: 101413 - RNA, 9 nt, Artificial Sequence
  Description of Artificial Sequence: Synthetic oligonucleotide
gggaccuga

SEQ ID NO: 101414 - RNA, 13 nt, Artificial Sequence
  Description of Artificial Sequence: Synthetic oligonucleotide
guuugacugcauc

SEQ ID NO: 101415 - RNA, 12 nt, Artificial Sequence
  Description of Artificial Sequence: Synthetic oligonucleotide
uugacugcaucg

SEQ ID NO: 101416 - RNA, 11 nt, Artificial Sequence
  Description of Artificial Sequence: Synthetic oligonucleotide
aguucacaggg

SEQ ID NO: 101417 - RNA, 12 nt, Artificial Sequence
  Description of Artificial Sequence: Synthetic oligonucleotide
gcaccucugucc

SEQ ID NO: 101418 - RNA, 14 nt, Artificial Sequence
  Description of Artificial Sequence: Synthetic oligonucleotide
guuugucuuuuuaa

SEQ ID NO: 101419 - RNA, 13 nt, Artificial Sequence
  Description of Artificial Sequence: Synthetic oligonucleotide
uugucuuuuuaag

SEQ ID NO: 101420 - RNA, 12 nt, Artificial Sequence
  Description of Artificial Sequence: Synthetic oligonucleotide
cuaaagguuguc

SEQ ID NO: 101421 - RNA, 11 nt, Artificial Sequence
  Description of Artificial Sequence: Synthetic oligonucleotide
agguugucgac

SEQ ID NO: 101422 - RNA, 12 nt, Artificial Sequence
  Description of Artificial Sequence: Synthetic oligonucleotide
ccuggcaauugu

SEQ ID NO: 101423 - RNA, 11 nt, Artificial Sequence
  Description of Artificial Sequence: Synthetic oligonucleotide
guggugcgagg

SEQ ID NO: 101424 - RNA, 12 nt, Artificial Sequence
  Description of Artificial Sequence: Synthetic oligonucleotide
gagacaugaaau

SEQ ID NO: 101425 - RNA, 12 nt, Artificial Sequence
  Description of Artificial Sequence: Synthetic oligonucleotide
uauauuucucca

SEQ ID NO: 101426 - RNA, 9 nt, Artificial Sequence
  Description of Artificial Sequence: Synthetic oligonucleotide
augaaggcu

SEQ ID NO: 101427 - RNA, 10 nt, Artificial Sequence
  Description of Artificial Sequence: Synthetic oligonucleotide
cuggaguggu

SEQ ID NO: 101428 - RNA, 10 nt, Artificial Sequence
  Description of Artificial Sequence: Synthetic oligonucleotide
ggaagagagg

SEQ ID NO: 101429 - RNA, 11 nt, Artificial Sequence
  Description of Artificial Sequence: Synthetic oligonucleotide
uugcaucgggc

SEQ ID NO: 101430 - RNA, 12 nt, Artificial Sequence
  Description of Artificial Sequence: Synthetic oligonucleotide
uauccuacugug

SEQ ID NO: 101431 - RNA, 12 nt, Artificial Sequence
  Description of Artificial Sequence: Synthetic oligonucleotide
ccuacuguguaa

SEQ ID NO: 101432 - RNA, 11 nt, Artificial Sequence
  Description of Artificial Sequence: Synthetic oligonucleotide
cuuguagugua

SEQ ID NO: 101433 - RNA, 12 nt, Artificial Sequence
  Description of Artificial Sequence: Synthetic oligonucleotide
cuuuguugauug

SEQ ID NO: 101434 - RNA, 13 nt, Artificial Sequence
  Description of Artificial Sequence: Synthetic oligonucleotide
uuguugauugaaa

SEQ ID NO: 101435 - RNA, 14 nt, Artificial Sequence
  Description of Artificial Sequence: Synthetic oligonucleotide
ucuuuuucuuccau

SEQ ID NO: 101436 - RNA, 12 nt, Artificial Sequence
  Description of Artificial Sequence: Synthetic oligonucleotide
aucuuccuucua

SEQ ID NO: 101437 - RNA, 12 nt, Artificial Sequence
  Description of Artificial Sequence: Synthetic oligonucleotide
ugaaugcuucau

SEQ ID NO: 101438 - RNA, 12 nt, Artificial Sequence
  Description of Artificial Sequence: Synthetic oligonucleotide
gaaugcuucaug

SEQ ID NO: 101439 - RNA, 12 nt, Artificial Sequence
  Description of Artificial Sequence: Synthetic oligonucleotide
auucuacuuuga

SEQ ID NO: 101440 - RNA, 12 nt, Artificial Sequence
  Description of Artificial Sequence: Synthetic oligonucleotide
gcaacuacagac

SEQ ID NO: 101441 - RNA, 12 nt, Artificial Sequence
  Description of Artificial Sequence: Synthetic oligonucleotide
accaaggucaac

SEQ ID NO: 101442 - RNA, 12 nt, Artificial Sequence
  Description of Artificial Sequence: Synthetic oligonucleotide
gacuaucucgac

SEQ ID NO: 101443 - RNA, 12 nt, Artificial Sequence
  Description of Artificial Sequence: Synthetic oligonucleotide
accuucccaaac

SEQ ID NO: 101444 - RNA, 13 nt, Artificial Sequence
  Description of Artificial Sequence: Synthetic oligonucleotide
caagcuuagaacu

SEQ ID NO: 101445 - RNA, 14 nt, Artificial Sequence
  Description of Artificial Sequence: Synthetic oligonucleotide
gcuuagaacuuuaa

SEQ ID NO: 101446 - RNA, 13 nt, Artificial Sequence
  Description of Artificial Sequence: Synthetic oligonucleotide
aacuuuaagcaac

SEQ ID NO: 101447 - RNA, 10 nt, Artificial Sequence
  Description of Artificial Sequence: Synthetic oligonucleotide
agaccaccac

SEQ ID NO: 101448 - RNA, 13 nt, Artificial Sequence
  Description of Artificial Sequence: Synthetic oligonucleotide
cgagaaauaaagu

SEQ ID NO: 101449 - RNA, 13 nt, Artificial Sequence
  Description of Artificial Sequence: Synthetic oligonucleotide
gagaaauaaaguu

SEQ ID NO: 101450 - RNA, 11 nt, Artificial Sequence
  Description of Artificial Sequence: Synthetic oligonucleotide
ggaaaugaucc

SEQ ID NO: 101451 - RNA, 12 nt, Artificial Sequence
  Description of Artificial Sequence: Synthetic oligonucleotide
aagaaaugaaac

SEQ ID NO: 101452 - RNA, 12 nt, Artificial Sequence
  Description of Artificial Sequence: Synthetic oligonucleotide
uuuccauccucc

SEQ ID NO: 101453 - RNA, 14 nt, Artificial Sequence
  Description of Artificial Sequence: Synthetic oligonucleotide
cugaaaaucuuuga

SEQ ID NO: 101454 - RNA, 10 nt, Artificial Sequence
  Description of Artificial Sequence: Synthetic oligonucleotide
gccguucagg

SEQ ID NO: 101455 - RNA, 12 nt, Artificial Sequence
  Description of Artificial Sequence: Synthetic oligonucleotide
aggguccagaag

SEQ ID NO: 101456 - RNA, 12 nt, Artificial Sequence
  Description of Artificial Sequence: Synthetic oligonucleotide
caagacugcuug

SEQ ID NO: 101457 - RNA, 12 nt, Artificial Sequence
  Description of Artificial Sequence: Synthetic oligonucleotide
ccaugucuuugg

SEQ ID NO: 101458 - RNA, 10 nt, Artificial Sequence
  Description of Artificial Sequence: Synthetic oligonucleotide
ccugaaacac

SEQ ID NO: 101459 - RNA, 11 nt, Artificial Sequence
  Description of Artificial Sequence: Synthetic oligonucleotide
cucuguaccuc

SEQ ID NO: 101460 - RNA, 11 nt, Artificial Sequence
  Description of Artificial Sequence: Synthetic oligonucleotide
gcaagacaaga

SEQ ID NO: 101461 - RNA, 12 nt, Artificial Sequence
  Description of Artificial Sequence: Synthetic oligonucleotide
caagacaagaaa

SEQ ID NO: 101462 - RNA, 11 nt, Artificial Sequence
  Description of Artificial Sequence: Synthetic oligonucleotide
guacaagaucc

SEQ ID NO: 101463 - RNA, 11 nt, Artificial Sequence
  Description of Artificial Sequence: Synthetic oligonucleotide
guacuugcaga

SEQ ID NO: 101464 - RNA, 12 nt, Artificial Sequence
  Description of Artificial Sequence: Synthetic oligonucleotide
gaucgauacaga

SEQ ID NO: 101465 - RNA, 12 nt, Artificial Sequence
  Description of Artificial Sequence: Synthetic oligonucleotide
auaaaaauaaau

SEQ ID NO: 101466 - RNA, 12 nt, Artificial Sequence
  Description of Artificial Sequence: Synthetic oligonucleotide
aaaaauaaauau

SEQ ID NO: 101467 - RNA, 12 nt, Artificial Sequence
  Description of Artificial Sequence: Synthetic oligonucleotide
uugacugcugug

SEQ ID NO: 101468 - RNA, 12 nt, Artificial Sequence
  Description of Artificial Sequence: Synthetic oligonucleotide
gagaugagagac

SEQ ID NO: 101469 - RNA, 9 nt, Artificial Sequence
  Description of Artificial Sequence: Synthetic oligonucleotide
cccacuugg

SEQ ID NO: 101470 - RNA, 1600 nt, Homo sapiens
gccccgccgccggcaguggaccgcugugcgcgaacccugaacccuacggucccgacccgcgggcgaggccggguaccugggcugggauccggagcaagcgggcgagggcagcgcccuaagcaggcccggagcgauggcagccuugaugaccccgggaaccggggccccacccgcgccuggugacuucuccggggaagggagccagggacuucccgacccuucgccagagcccaagcagcucccggagcugauccgcaugaagcgagacggaggccgccugagcgaagcggacaucaggggcuucguggccgcuguggugaaugggagcgcgcagggcgcacagaucggggccaugcugauggccauccgacuucggggcauggaucuggaggagaccucggugcugacccaggcccuggcucagucgggacagcagcuggaguggccagaggccuggcgccagcagcuuguggacaagcauuccacagggggugugggugacaaggucagccugguccucgcaccugcccuggcggcauguggcugcaaggugccaaugaucagcggacguggucuggggcacacaggaggcaccuuggauaagcuggagucuauuccuggauucaaugucauccagagcccagagcagaugcaagugcugcuggaccaggcgggcugcuguaucgugggucagagugagcagcugguuccugcggacggaauccuauaugcagccagagaugugacagccaccguggacagccugccacucaucacagccuccauucucaguaagaaacucguggaggggcuguccgcucuggugguggacguuaaguucggaggggccgccgucuuccccaaccaggagcaggcccgggagcuggcaaagacgcugguuggcgugggagccagccuagggcuucgggucgcggcagcgcugaccgccauggacaagccccugggucgcugcgugggccacgcccuggagguggaggaggcgcugcucugcauggacggcgcaggcccgccagacuuaagggaccuggucaccacgcucgggggcgcccugcucuggcucagcggacacgcggggacucaggcucagggcgcugcccggguggccgcggcgcuggacgacggcucggcccuuggccgcuucgagcggaugcuggcggcgcagggcguggaucccggucuggcccgagcccugugcucgggaagucccgcagaacgccggcagcugcugccucgcgcccgggagcaggaggagcugcuggcgcccgcagauggcaccguggagcugguccgggcgcugccgcuggcgcuggugcugcacgagcucggggccgggcgcagccgcgcuggggagccgcuccgccugggggugggcgcagagcugcuggucgacgugggucagaggcugcgccgugggacccccuggcuccgcgugcaccgggacggccccgcgcucagcggcccgcagagccgcgcccugcaggaggcgcucguacucuccgaccgcgcgccauucgccgcccccucgcccuucgcagagcucguucugccgccgcagcaauaaagcuccuuugccgcgaaa

SEQ ID NO: 101471 - RNA, 19 nt, Artificial Sequence
  Description of Artificial Sequence: Synthetic oligonucleotide
gccccgccgccggcagugg

SEQ ID NO: 101472 - RNA, 19 nt, Artificial Sequence
  Description of Artificial Sequence: Synthetic oligonucleotide
gaccgcugugcgcgaaccc

SEQ ID NO: 101473 - RNA, 19 nt, Artificial Sequence
  Description of Artificial Sequence: Synthetic oligonucleotide
cugaacccuacggucccga

SEQ ID NO: 101474 - RNA, 19 nt, Artificial Sequence
  Description of Artificial Sequence: Synthetic oligonucleotide
acccgcgggcgaggccggg

SEQ ID NO: 101475 - RNA, 19 nt, Artificial Sequence
  Description of Artificial Sequence: Synthetic oligonucleotide
guaccugggcugggauccg

SEQ ID NO: 101476 - RNA, 19 nt, Artificial Sequence
  Description of Artificial Sequence: Synthetic oligonucleotide
ggagcaagcgggcgagggc

SEQ ID NO: 101477 - RNA, 19 nt, Artificial Sequence
  Description of Artificial Sequence: Synthetic oligonucleotide
cagcgcccuaagcaggccc

SEQ ID NO: 101478 - RNA, 19 nt, Artificial Sequence
  Description of Artificial Sequence: Synthetic oligonucleotide
cggagcgauggcagccuug

SEQ ID NO: 101479 - RNA, 19 nt, Artificial Sequence
  Description of Artificial Sequence: Synthetic oligonucleotide
gaugaccccgggaaccggg

SEQ ID NO: 101480 - RNA, 19 nt, Artificial Sequence
  Description of Artificial Sequence: Synthetic oligonucleotide
ggccccacccgcgccuggu

SEQ ID NO: 101481 - RNA, 19 nt, Artificial Sequence
  Description of Artificial Sequence: Synthetic oligonucleotide
ugacuucuccggggaaggg

SEQ ID NO: 101482 - RNA, 19 nt, Artificial Sequence
  Description of Artificial Sequence: Synthetic oligonucleotide
gagccagggacuucccgac

SEQ ID NO: 101483 - RNA, 19 nt, Artificial Sequence
  Description of Artificial Sequence: Synthetic oligonucleotide
cccuucgccagagcccaag

SEQ ID NO: 101484 - RNA, 19 nt, Artificial Sequence
  Description of Artificial Sequence: Synthetic oligonucleotide
gcagcucccggagcugauc

SEQ ID NO: 101485 - RNA, 19 nt, Artificial Sequence
  Description of Artificial Sequence: Synthetic oligonucleotide
ccgcaugaagcgagacgga

SEQ ID NO: 101486 - RNA, 19 nt, Artificial Sequence
  Description of Artificial Sequence: Synthetic oligonucleotide
aggccgccugagcgaagcg

SEQ ID NO: 101487 - RNA, 19 nt, Artificial Sequence
  Description of Artificial Sequence: Synthetic oligonucleotide
ggacaucaggggcuucgug

SEQ ID NO: 101488 - RNA, 19 nt, Artificial Sequence
  Description of Artificial Sequence: Synthetic oligonucleotide
ggccgcuguggugaauggg

SEQ ID NO: 101489 - RNA, 19 nt, Artificial Sequence
  Description of Artificial Sequence: Synthetic oligonucleotide
gagcgcgcagggcgcacag

SEQ ID NO: 101490 - RNA, 19 nt, Artificial Sequence
  Description of Artificial Sequence: Synthetic oligonucleotide
gaucggggccaugcugaug

SEQ ID NO: 101491 - RNA, 19 nt, Artificial Sequence
  Description of Artificial Sequence: Synthetic oligonucleotide
ggccauccgacuucggggc

SEQ ID NO: 101492 - RNA, 19 nt, Artificial Sequence
  Description of Artificial Sequence: Synthetic oligonucleotide
cauggaucuggaggagacc

SEQ ID NO: 101493 - RNA, 19 nt, Artificial Sequence
  Description of Artificial Sequence: Synthetic oligonucleotide
cucggugcugacccaggcc

SEQ ID NO: 101494 - RNA, 19 nt, Artificial Sequence
  Description of Artificial Sequence: Synthetic oligonucleotide
ccuggcucagucgggacag

SEQ ID NO: 101495 - RNA, 19 nt, Artificial Sequence
  Description of Artificial Sequence: Synthetic oligonucleotide
gcagcuggaguggccagag

SEQ ID NO: 101496 - RNA, 19 nt, Artificial Sequence
  Description of Artificial Sequence: Synthetic oligonucleotide
ggccuggcgccagcagcuu

SEQ ID NO: 101497 - RNA, 19 nt, Artificial Sequence
  Description of Artificial Sequence: Synthetic oligonucleotide
uguggacaagcauuccaca

SEQ ID NO: 101498 - RNA, 19 nt, Artificial Sequence
  Description of Artificial Sequence: Synthetic oligonucleotide
agggggugugggugacaag

SEQ ID NO: 101499 - RNA, 19 nt, Artificial Sequence
  Description of Artificial Sequence: Synthetic oligonucleotide
ggucagccugguccucgca

SEQ ID NO: 101500 - RNA, 19 nt, Artificial Sequence
  Description of Artificial Sequence: Synthetic oligonucleotide
accugcccuggcggcaugu

SEQ ID NO: 101501 - RNA, 19 nt, Artificial Sequence
  Description of Artificial Sequence: Synthetic oligonucleotide
uggcugcaaggugccaaug

SEQ ID NO: 101502 - RNA, 19 nt, Artificial Sequence
  Description of Artificial Sequence: Synthetic oligonucleotide
gaucagcggacguggucug

SEQ ID NO: 101503 - RNA, 19 nt, Artificial Sequence
  Description of Artificial Sequence: Synthetic oligonucleotide
ggggcacacaggaggcacc

SEQ ID NO: 101504 - RNA, 19 nt, Artificial Sequence
  Description of Artificial Sequence: Synthetic oligonucleotide
cuuggauaagcuggagucu

SEQ ID NO: 101505 - RNA, 19 nt, Artificial Sequence
  Description of Artificial Sequence: Synthetic oligonucleotide
uauuccuggauucaauguc

SEQ ID NO: 101506 - RNA, 19 nt, Artificial Sequence
  Description of Artificial Sequence: Synthetic oligonucleotide
cauccagagcccagagcag

SEQ ID NO: 101507 - RNA, 19 nt, Artificial Sequence
  Description of Artificial Sequence: Synthetic oligonucleotide
gaugcaagugcugcuggac

SEQ ID NO: 101508 - RNA, 19 nt, Artificial Sequence
  Description of Artificial Sequence: Synthetic oligonucleotide
ccaggcgggcugcuguauc

SEQ ID NO: 101509 - RNA, 19 nt, Artificial Sequence
  Description of Artificial Sequence: Synthetic oligonucleotide
cgugggucagagugagcag

SEQ ID NO: 101510 - RNA, 19 nt, Artificial Sequence
  Description of Artificial Sequence: Synthetic oligonucleotide
gcugguuccugcggacgga

SEQ ID NO: 101511 - RNA, 19 nt, Artificial Sequence
  Description of Artificial Sequence: Synthetic oligonucleotide
aauccuauaugcagccaga

SEQ ID NO: 101512 - RNA, 19 nt, Artificial Sequence
  Description of Artificial Sequence: Synthetic oligonucleotide
agaugugacagccaccgug

SEQ ID NO: 101513 - RNA, 19 nt, Artificial Sequence
  Description of Artificial Sequence: Synthetic oligonucleotide
ggacagccugccacucauc

SEQ ID NO: 101514 - RNA, 19 nt, Artificial Sequence
  Description of Artificial Sequence: Synthetic oligonucleotide
cacagccuccauucucagu

SEQ ID NO: 101515 - RNA, 19 nt, Artificial Sequence
  Description of Artificial Sequence: Synthetic oligonucleotide
uaagaaacucguggagggg

SEQ ID NO: 101516 - RNA, 19 nt, Artificial Sequence
  Description of Artificial Sequence: Synthetic oligonucleotide
gcuguccgcucugguggug

SEQ ID NO: 101517 - RNA, 19 nt, Artificial Sequence
  Description of Artificial Sequence: Synthetic oligonucleotide
ggacguuaaguucggaggg

SEQ ID NO: 101518 - RNA, 19 nt, Artificial Sequence
  Description of Artificial Sequence: Synthetic oligonucleotide
ggccgccgucuuccccaac

SEQ ID NO: 101519 - RNA, 19 nt, Artificial Sequence
  Description of Artificial Sequence: Synthetic oligonucleotide
ccaggagcaggcccgggag

SEQ ID NO: 101520 - RNA, 19 nt, Artificial Sequence
  Description of Artificial Sequence: Synthetic oligonucleotide
gcuggcaaagacgcugguu

SEQ ID NO: 101521 - RNA, 19 nt, Artificial Sequence
  Description of Artificial Sequence: Synthetic oligonucleotide
uggcgugggagccagccua

SEQ ID NO: 101522 - RNA, 19 nt, Artificial Sequence
  Description of Artificial Sequence: Synthetic oligonucleotide
agggcuucgggucgcggca

SEQ ID NO: 101523 - RNA, 19 nt, Artificial Sequence
  Description of Artificial Sequence: Synthetic oligonucleotide
agcgcugaccgccauggac

SEQ ID NO: 101524 - RNA, 19 nt, Artificial Sequence
  Description of Artificial Sequence: Synthetic oligonucleotide
caagccccugggucgcugc

SEQ ID NO: 101525 - RNA, 19 nt, Artificial Sequence
  Description of Artificial Sequence: Synthetic oligonucleotide
cgugggccacgcccuggag

SEQ ID NO: 101526 - RNA, 19 nt, Artificial Sequence
  Description of Artificial Sequence: Synthetic oligonucleotide
gguggaggaggcgcugcuc

SEQ ID NO: 101527 - RNA, 19 nt, Artificial Sequence
  Description of Artificial Sequence: Synthetic oligonucleotide
cugcauggacggcgcaggc

SEQ ID NO: 101528 - RNA, 19 nt, Artificial Sequence
  Description of Artificial Sequence: Synthetic oligonucleotide
cccgccagacuuaagggac

SEQ ID NO: 101529 - RNA, 19 nt, Artificial Sequence
  Description of Artificial Sequence: Synthetic oligonucleotide
ccuggucaccacgcucggg

SEQ ID NO: 101530 - RNA, 19 nt, Artificial Sequence
  Description of Artificial Sequence: Synthetic oligonucleotide
gggcgcccugcucuggcuc

SEQ ID NO: 101531 - RNA, 19 nt, Artificial Sequence
  Description of Artificial Sequence: Synthetic oligonucleotide
cagcggacacgcggggacu

SEQ ID NO: 101532 - RNA, 19 nt, Artificial Sequence
  Description of Artificial Sequence: Synthetic oligonucleotide
ucaggcucagggcgcugcc

SEQ ID NO: 101533 - RNA, 19 nt, Artificial Sequence
  Description of Artificial Sequence: Synthetic oligonucleotide
ccggguggccgcggcgcug

SEQ ID NO: 101534 - RNA, 19 nt, Artificial Sequence
  Description of Artificial Sequence: Synthetic oligonucleotide
ggacgacggcucggcccuu

SEQ ID NO: 101535 - RNA, 19 nt, Artificial Sequence
  Description of Artificial Sequence: Synthetic oligonucleotide
uggccgcuucgagcggaug

SEQ ID NO: 101536 - RNA, 19 nt, Artificial Sequence
  Description of Artificial Sequence: Synthetic oligonucleotide
gcuggcggcgcagggcgug

SEQ ID NO: 101537 - RNA, 19 nt, Artificial Sequence
  Description of Artificial Sequence: Synthetic oligonucleotide
ggaucccggucuggcccga

SEQ ID NO: 101538 - RNA, 19 nt, Artificial Sequence
  Description of Artificial Sequence: Synthetic oligonucleotide
agcccugugcucgggaagu

SEQ ID NO: 101539 - RNA, 19 nt, Artificial Sequence
  Description of Artificial Sequence: Synthetic oligonucleotide
ucccgcagaacgccggcag

SEQ ID NO: 101540 - RNA, 19 nt, Artificial Sequence
  Description of Artificial Sequence: Synthetic oligonucleotide
gcugcugccucgcgcccgg

SEQ ID NO: 101541 - RNA, 19 nt, Artificial Sequence
  Description of Artificial Sequence: Synthetic oligonucleotide
ggagcaggaggagcugcug

SEQ ID NO: 101542 - RNA, 19 nt, Artificial Sequence
  Description of Artificial Sequence: Synthetic oligonucleotide
ggcgcccgcagauggcacc

SEQ ID NO: 101543 - RNA, 19 nt, Artificial Sequence
  Description of Artificial Sequence: Synthetic oligonucleotide
cguggagcugguccgggcg

SEQ ID NO: 101544 - RNA, 19 nt, Artificial Sequence
  Description of Artificial Sequence: Synthetic oligonucleotide
gcugccgcuggcgcuggug

SEQ ID NO: 101545 - RNA, 19 nt, Artificial Sequence
  Description of Artificial Sequence: Synthetic oligonucleotide
gcugcacgagcucggggcc

SEQ ID NO: 101546 - RNA, 19 nt, Artificial Sequence
  Description of Artificial Sequence: Synthetic oligonucleotide
cgggcgcagccgcgcuggg

SEQ ID NO: 101547 - RNA, 19 nt, Artificial Sequence
  Description of Artificial Sequence: Synthetic oligonucleotide
ggagccgcuccgccugggg

SEQ ID NO: 101548 - RNA, 19 nt, Artificial Sequence
  Description of Artificial Sequence: Synthetic oligonucleotide
ggugggcgcagagcugcug

SEQ ID NO: 101549 - RNA, 19 nt, Artificial Sequence
  Description of Artificial Sequence: Synthetic oligonucleotide
ggucgacgugggucagagg

SEQ ID NO: 101550 - RNA, 19 nt, Artificial Sequence
  Description of Artificial Sequence: Synthetic oligonucleotide
gcugcgccgugggaccccc

SEQ ID NO: 101551 - RNA, 19 nt, Artificial Sequence
  Description of Artificial Sequence: Synthetic oligonucleotide
cuggcuccgcgugcaccgg

SEQ ID NO: 101552 - RNA, 19 nt, Artificial Sequence
  Description of Artificial Sequence: Synthetic oligonucleotide
ggacggccccgcgcucagc

SEQ ID NO: 101553 - RNA, 19 nt, Artificial Sequence
  Description of Artificial Sequence: Synthetic oligonucleotide
cggcccgcagagccgcgcc

SEQ ID NO: 101554 - RNA, 19 nt, Artificial Sequence
  Description of Artificial Sequence: Synthetic oligonucleotide
ccugcaggaggcgcucgua

SEQ ID NO: 101555 - RNA, 19 nt, Artificial Sequence
  Description of Artificial Sequence: Synthetic oligonucleotide
acucuccgaccgcgcgcca

SEQ ID NO: 101556 - RNA, 19 nt, Artificial Sequence
  Description of Artificial Sequence: Synthetic oligonucleotide
auucgccgcccccucgccc

SEQ ID NO: 101557 - RNA, 19 nt, Artificial Sequence
  Description of Artificial Sequence: Synthetic oligonucleotide
cuucgcagagcucguucug

SEQ ID NO: 101558 - RNA, 19 nt, Artificial Sequence
  Description of Artificial Sequence: Synthetic oligonucleotide
gccgccgcagcaauaaagc

SEQ ID NO: 101559 - RNA, 19 nt, Artificial Sequence
  Description of Artificial Sequence: Synthetic oligonucleotide
aagcuccuuugccgcgaaa

SEQ ID NO: 101560 - RNA, 25 nt, Artificial Sequence
  Description of Artificial Sequence: Synthetic oligonucleotide
gccccgccgccggcaguggaccgcu

SEQ ID NO: 101561 - RNA, 25 nt, Artificial Sequence
  Description of Artificial Sequence: Synthetic oligonucleotide
ugugcgcgaacccugaacccuacgg

SEQ ID NO: 101562 - RNA, 25 nt, Artificial Sequence
  Description of Artificial Sequence: Synthetic oligonucleotide
gucccgacccgcgggcgaggccggg

SEQ ID NO: 101563 - RNA, 25 nt, Artificial Sequence
  Description of Artificial Sequence: Synthetic oligonucleotide
guaccugggcugggauccggagcaa

SEQ ID NO: 101564 - RNA, 25 nt, Artificial Sequence
  Description of Artificial Sequence: Synthetic oligonucleotide
agcgggcgagggcagcgcccuaagc

SEQ ID NO: 101565 - RNA, 25 nt, Artificial Sequence
  Description of Artificial Sequence: Synthetic oligonucleotide
caggcccggagcgauggcagccuug

SEQ ID NO: 101566 - RNA, 25 nt, Artificial Sequence
  Description of Artificial Sequence: Synthetic oligonucleotide
gaugaccccgggaaccggggcccca

SEQ ID NO: 101567 - RNA, 25 nt, Artificial Sequence
  Description of Artificial Sequence: Synthetic oligonucleotide
acccgcgccuggugacuucuccggg

SEQ ID NO: 101568 - RNA, 25 nt, Artificial Sequence
  Description of Artificial Sequence: Synthetic oligonucleotide
ggaagggagccagggacuucccgac

SEQ ID NO: 101569 - RNA, 25 nt, Artificial Sequence
  Description of Artificial Sequence: Synthetic oligonucleotide
cccuucgccagagcccaagcagcuc

SEQ ID NO: 101570 - RNA, 25 nt, Artificial Sequence
  Description of Artificial Sequence: Synthetic oligonucleotide
cccggagcugauccgcaugaagcga

SEQ ID NO: 101571 - RNA, 25 nt, Artificial Sequence
  Description of Artificial Sequence: Synthetic oligonucleotide
agacggaggccgccugagcgaagcg

SEQ ID NO: 101572 - RNA, 25 nt, Artificial Sequence
  Description of Artificial Sequence: Synthetic oligonucleotide
ggacaucaggggcuucguggccgcu

SEQ ID NO: 101573 - RNA, 25 nt, Artificial Sequence
  Description of Artificial Sequence: Synthetic oligonucleotide
uguggugaaugggagcgcgcagggc

SEQ ID NO: 101574 - RNA, 25 nt, Artificial Sequence
  Description of Artificial Sequence: Synthetic oligonucleotide
cgcacagaucggggccaugcugaug

SEQ ID NO: 101575 - RNA, 25 nt, Artificial Sequence
  Description of Artificial Sequence: Synthetic oligonucleotide
ggccauccgacuucggggcauggau

SEQ ID NO: 101576 - RNA, 25 nt, Artificial Sequence
  Description of Artificial Sequence: Synthetic oligonucleotide
ucuggaggagaccucggugcugacc

SEQ ID NO: 101577 - RNA, 25 nt, Artificial Sequence
  Description of Artificial Sequence: Synthetic oligonucleotide
ccaggcccuggcucagucgggacag

SEQ ID NO: 101578 - RNA, 25 nt, Artificial Sequence
  Description of Artificial Sequence: Synthetic oligonucleotide
gcagcuggaguggccagaggccugg

SEQ ID NO: 101579 - RNA, 25 nt, Artificial Sequence
  Description of Artificial Sequence: Synthetic oligonucleotide
gcgccagcagcuuguggacaagcau

SEQ ID NO: 101580 - RNA, 25 nt, Artificial Sequence
  Description of Artificial Sequence: Synthetic oligonucleotide
uuccacagggggugugggugacaag

SEQ ID NO: 101581 - RNA, 25 nt, Artificial Sequence
  Description of Artificial Sequence: Synthetic oligonucleotide
ggucagccugguccucgcaccugcc

SEQ ID NO: 101582 - RNA, 25 nt, Artificial Sequence
  Description of Artificial Sequence: Synthetic oligonucleotide
ccuggcggcauguggcugcaaggug

SEQ ID NO: 101583 - RNA, 25 nt, Artificial Sequence
  Description of Artificial Sequence: Synthetic oligonucleotide
gccaaugaucagcggacguggucug

SEQ ID NO: 101584 - RNA, 25 nt, Artificial Sequence
  Description of Artificial Sequence: Synthetic oligonucleotide
ggggcacacaggaggcaccuuggau

SEQ ID NO: 101585 - RNA, 25 nt, Artificial Sequence
  Description of Artificial Sequence: Synthetic oligonucleotide
uaagcuggagucuauuccuggauuc

SEQ ID NO: 101586 - RNA, 25 nt, Artificial Sequence
  Description of Artificial Sequence: Synthetic oligonucleotide
caaugucauccagagcccagagcag

SEQ ID NO: 101587 - RNA, 25 nt, Artificial Sequence
  Description of Artificial Sequence: Synthetic oligonucleotide
gaugcaagugcugcuggaccaggcg

SEQ ID NO: 101588 - RNA, 25 nt, Artificial Sequence
  Description of Artificial Sequence: Synthetic oligonucleotide
gggcugcuguaucgugggucagagu

SEQ ID NO: 101589 - RNA, 25 nt, Artificial Sequence
  Description of Artificial Sequence: Synthetic oligonucleotide
ugagcagcugguuccugcggacgga

SEQ ID NO: 101590 - RNA, 25 nt, Artificial Sequence
  Description of Artificial Sequence: Synthetic oligonucleotide
aauccuauaugcagccagagaugug

SEQ ID NO: 101591 - RNA, 25 nt, Artificial Sequence
  Description of Artificial Sequence: Synthetic oligonucleotide
gacagccaccguggacagccugcca

SEQ ID NO: 101592 - RNA, 25 nt, Artificial Sequence
  Description of Artificial Sequence: Synthetic oligonucleotide
acucaucacagccuccauucucagu

SEQ ID NO: 101593 - RNA, 25 nt, Artificial Sequence
  Description of Artificial Sequence: Synthetic oligonucleotide
uaagaaacucguggaggggcugucc

SEQ ID NO: 101594 - RNA, 25 nt, Artificial Sequence
  Description of Artificial Sequence: Synthetic oligonucleotide
cgcucuggugguggacguuaaguuc

SEQ ID NO: 101595 - RNA, 25 nt, Artificial Sequence
  Description of Artificial Sequence: Synthetic oligonucleotide
cggaggggccgccgucuuccccaac

SEQ ID NO: 101596 - RNA, 25 nt, Artificial Sequence
  Description of Artificial Sequence: Synthetic oligonucleotide
ccaggagcaggcccgggagcuggca

SEQ ID NO: 101597 - RNA, 25 nt, Artificial Sequence
  Description of Artificial Sequence: Synthetic oligonucleotide
aaagacgcugguuggcgugggagcc

SEQ ID NO: 101598 - RNA, 25 nt, Artificial Sequence
  Description of Artificial Sequence: Synthetic oligonucleotide
cagccuagggcuucgggucgcggca

SEQ ID NO: 101599 - RNA, 25 nt, Artificial Sequence
  Description of Artificial Sequence: Synthetic oligonucleotide
agcgcugaccgccauggacaagccc

SEQ ID NO: 101600 - RNA, 25 nt, Artificial Sequence
  Description of Artificial Sequence: Synthetic oligonucleotide
ccugggucgcugcgugggccacgcc

SEQ ID NO: 101601 - RNA, 25 nt, Artificial Sequence
  Description of Artificial Sequence: Synthetic oligonucleotide
ccuggagguggaggaggcgcugcuc

SEQ ID NO: 101602 - RNA, 25 nt, Artificial Sequence
  Description of Artificial Sequence: Synthetic oligonucleotide
cugcauggacggcgcaggcccgcca

SEQ ID NO: 101603 - RNA, 25 nt, Artificial Sequence
  Description of Artificial Sequence: Synthetic oligonucleotide
agacuuaagggaccuggucaccacg

SEQ ID NO: 101604 - RNA, 25 nt, Artificial Sequence
  Description of Artificial Sequence: Synthetic oligonucleotide
gcucgggggcgcccugcucuggcuc

SEQ ID NO: 101605 - RNA, 25 nt, Artificial Sequence
  Description of Artificial Sequence: Synthetic oligonucleotide
cagcggacacgcggggacucaggcu

SEQ ID NO: 101606 - RNA, 25 nt, Artificial Sequence
  Description of Artificial Sequence: Synthetic oligonucleotide
ucagggcgcugcccggguggccgcg

SEQ ID NO: 101607 - RNA, 25 nt, Artificial Sequence
  Description of Artificial Sequence: Synthetic oligonucleotide
ggcgcuggacgacggcucggcccuu

SEQ ID NO: 101608 - RNA, 25 nt, Artificial Sequence
  Description of Artificial Sequence: Synthetic oligonucleotide
uggccgcuucgagcggaugcuggcg

SEQ ID NO: 101609 - RNA, 25 nt, Artificial Sequence
  Description of Artificial Sequence: Synthetic oligonucleotide
ggcgcagggcguggaucccggucug

SEQ ID NO: 101610 - RNA, 25 nt, Artificial Sequence
  Description of Artificial Sequence: Synthetic oligonucleotide
ggcccgagcccugugcucgggaagu

SEQ ID NO: 101611 - RNA, 25 nt, Artificial Sequence
  Description of Artificial Sequence: Synthetic oligonucleotide
ucccgcagaacgccggcagcugcug

SEQ ID NO: 101612 - RNA, 25 nt, Artificial Sequence
  Description of Artificial Sequence: Synthetic oligonucleotide
gccucgcgcccgggagcaggaggag

SEQ ID NO: 101613 - RNA, 25 nt, Artificial Sequence
  Description of Artificial Sequence: Synthetic oligonucleotide
gcugcuggcgcccgcagauggcacc

SEQ ID NO: 101614 - RNA, 25 nt, Artificial Sequence
  Description of Artificial Sequence: Synthetic oligonucleotide
cguggagcugguccgggcgcugccg

SEQ ID NO: 101615 - RNA, 25 nt, Artificial Sequence
  Description of Artificial Sequence: Synthetic oligonucleotide
gcuggcgcuggugcugcacgagcuc

SEQ ID NO: 101616 - RNA, 25 nt, Artificial Sequence
  Description of Artificial Sequence: Synthetic oligonucleotide
cggggccgggcgcagccgcgcuggg

SEQ ID NO: 101617 - RNA, 25 nt, Artificial Sequence
  Description of Artificial Sequence: Synthetic oligonucleotide
ggagccgcuccgccugggggugggc

SEQ ID NO: 101618 - RNA, 25 nt, Artificial Sequence
  Description of Artificial Sequence: Synthetic oligonucleotide
cgcagagcugcuggucgacgugggu

SEQ ID NO: 101619 - RNA, 25 nt, Artificial Sequence
  Description of Artificial Sequence: Synthetic oligonucleotide
ucagaggcugcgccgugggaccccc

SEQ ID NO: 101620 - RNA, 25 nt, Artificial Sequence
  Description of Artificial Sequence: Synthetic oligonucleotide
cuggcuccgcgugcaccgggacggc

SEQ ID NO: 101621 - RNA, 25 nt, Artificial Sequence
  Description of Artificial Sequence: Synthetic oligonucleotide
ccccgcgcucagcggcccgcagagc

SEQ ID NO: 101622 - RNA, 25 nt, Artificial Sequence
  Description of Artificial Sequence: Synthetic oligonucleotide
ccgcgcccugcaggaggcgcucgua

SEQ ID NO: 101623 - RNA, 25 nt, Artificial Sequence
  Description of Artificial Sequence: Synthetic oligonucleotide
acucuccgaccgcgcgccauucgcc

SEQ ID NO: 101624 - RNA, 25 nt, Artificial Sequence
  Description of Artificial Sequence: Synthetic oligonucleotide
cgcccccucgcccuucgcagagcuc

SEQ ID NO: 101625 - RNA, 25 nt, Artificial Sequence
  Description of Artificial Sequence: Synthetic oligonucleotide
cguucugccgccgcagcaauaaagc

SEQ ID NO: 101626 - RNA, 25 nt, Artificial Sequence
  Description of Artificial Sequence: Synthetic oligonucleotide
gcaauaaagcuccuuugccgcgaaa

SEQ ID NO: 101627 - RNA, 1659 nt, Homo sapiens
cgacugccgagcuccgcccuccaggcggccccacccgccugccguccuggggcgccgccgccccgccgccggcaguggaccgcugugcgcgaacccugaacccuacggucccgacccgcgggcgaggccggguaccugggcugggauccggagcaagcgggcgagggcagcgcccuaagcaggcccggagcgauggcagccuugaugaccccgggaaccggggccccacccgcgccuggugacuucuccggggaagggagccagggacuucccgacccuucgccagagcccaagcagcucccggagcugauccgcaugaagcgagacggaggccgccugagcgaagcggacaucaggggcuucguggccgcuguggugaaugggagcgcgcagggcgcacagaucggggccaugcugauggccauccgacuucggggcauggaucuggaggagaccucggugcugacccaggcccuggcucagucgggacagcagcuggaguggccagaggccuggcgccagcagcuuguggacaagcauuccacagggggugugggugacaaggucagccugguccucgcaccugcccuggcggcauguggcugcaaggugccaaugaucagcggacguggucuggggcacacaggaggcaccuuggauaagcuggagucuauuccuggauucaaugucauccagagcccagagcagaugcaagugcugcuggaccaggcgggcugcuguaucgugggucagagugagcagcugguuccugcggacggaauccuauaugcagccagagaugugacagccaccguggacagccugccacucaucacagccuccauucucaguaagaaacucguggaggggcuguccgcucuggugguggacguuaaguucggaggggccgccgucuuccccaaccaggagcaggcccgggagcuggcaaagacgcugguuggcgugggagccagccuagggcuucgggucgcggcagcgcugaccgccauggacaagccccugggucgcugcgugggccacgcccuggagguggaggaggcgcugcucugcauggacggcgcaggcccgccagacuuaagggaccuggucaccacgcucgggggcgcccugcucuggcucagcggacacgcggggacucaggcccagggcgcugcccggguggccgcggcgcuggacgacggcucggcccuuggccgcuucgagcggaugcuggcggcgcagggcguggaucccggucuggcccgagcccugugcucgggaagucccgcagaacgccggcagcugcugccucgcgcccgggagcaggaggagcugcuggcgcccgcagauggcaccguggagcugguccgggcgcugccgcuggcgcuggugcugcacgagcucggggccgggcgcagccgcgcuggggagccgcuccgccugggggugggcgcagagcugcuggucgacgugggucagaggcugcgccgugggacccccuggcuccgcgugcaccgggacggccccgcgcucagcggcccgcagagccgcgcccugcaggaggcgcucguacucuccgaccgcgcgccauucgccgcccccucgcccuucgcagagcucguucugccgccgcagcaauaaagcuccuuugccgcgaaa

SEQ ID NO: 101628 - RNA, 19 nt, Artificial Sequence
  Description of Artificial Sequence: Synthetic oligonucleotide
cgacugccgagcuccgccc

SEQ ID NO: 101629 - RNA, 19 nt, Artificial Sequence
  Description of Artificial Sequence: Synthetic oligonucleotide
cuccaggcggccccacccg

SEQ ID NO: 101630 - RNA, 19 nt, Artificial Sequence
  Description of Artificial Sequence: Synthetic oligonucleotide
gccugccguccuggggcgc

SEQ ID NO: 101631 - RNA, 19 nt, Artificial Sequence
  Description of Artificial Sequence: Synthetic oligonucleotide
ccgccgccccgccgccggc

SEQ ID NO: 101632 - RNA, 19 nt, Artificial Sequence
  Description of Artificial Sequence: Synthetic oligonucleotide
caguggaccgcugugcgcg

SEQ ID NO: 101633 - RNA, 19 nt, Artificial Sequence
  Description of Artificial Sequence: Synthetic oligonucleotide
gaacccugaacccuacggu

SEQ ID NO: 101634 - RNA, 19 nt, Artificial Sequence
  Description of Artificial Sequence: Synthetic oligonucleotide
ucccgacccgcgggcgagg

SEQ ID NO: 101635 - RNA, 19 nt, Artificial Sequence
  Description of Artificial Sequence: Synthetic oligonucleotide
gccggguaccugggcuggg

SEQ ID NO: 101636 - RNA, 19 nt, Artificial Sequence
  Description of Artificial Sequence: Synthetic oligonucleotide
gauccggagcaagcgggcg

SEQ ID NO: 101637 - RNA, 19 nt, Artificial Sequence
  Description of Artificial Sequence: Synthetic oligonucleotide
gagggcagcgcccuaagca

SEQ ID NO: 101638 - RNA, 19 nt, Artificial Sequence
  Description of Artificial Sequence: Synthetic oligonucleotide
aggcccggagcgauggcag

SEQ ID NO: 101639 - RNA, 19 nt, Artificial Sequence
  Description of Artificial Sequence: Synthetic oligonucleotide
gccuugaugaccccgggaa

SEQ ID NO: 101640 - RNA, 19 nt, Artificial Sequence
  Description of Artificial Sequence: Synthetic oligonucleotide
accggggccccacccgcgc

SEQ ID NO: 101641 - RNA, 19 nt, Artificial Sequence
  Description of Artificial Sequence: Synthetic oligonucleotide
ccuggugacuucuccgggg

SEQ ID NO: 101642 - RNA, 19 nt, Artificial Sequence
  Description of Artificial Sequence: Synthetic oligonucleotide
gaagggagccagggacuuc

SEQ ID NO: 101643 - RNA, 19 nt, Artificial Sequence
  Description of Artificial Sequence: Synthetic oligonucleotide
cccgacccuucgccagagc

SEQ ID NO: 101644 - RNA, 19 nt, Artificial Sequence
  Description of Artificial Sequence: Synthetic oligonucleotide
cccaagcagcucccggagc

SEQ ID NO: 101645 - RNA, 19 nt, Artificial Sequence
  Description of Artificial Sequence: Synthetic oligonucleotide
cugauccgcaugaagcgag

SEQ ID NO: 101646 - RNA, 19 nt, Artificial Sequence
  Description of Artificial Sequence: Synthetic oligonucleotide
gacggaggccgccugagcg

SEQ ID NO: 101647 - RNA, 19 nt, Artificial Sequence
  Description of Artificial Sequence: Synthetic oligonucleotide
gaagcggacaucaggggcu

SEQ ID NO: 101648 - RNA, 19 nt, Artificial Sequence
  Description of Artificial Sequence: Synthetic oligonucleotide
uucguggccgcugugguga

SEQ ID NO: 101649 - RNA, 19 nt, Artificial Sequence
  Description of Artificial Sequence: Synthetic oligonucleotide
aaugggagcgcgcagggcg

SEQ ID NO: 101650 - RNA, 19 nt, Artificial Sequence
  Description of Artificial Sequence: Synthetic oligonucleotide
gcacagaucggggccaugc

SEQ ID NO: 101651 - RNA, 19 nt, Artificial Sequence
  Description of Artificial Sequence: Synthetic oligonucleotide
cugauggccauccgacuuc

SEQ ID NO: 101652 - RNA, 19 nt, Artificial Sequence
  Description of Artificial Sequence: Synthetic oligonucleotide
cggggcauggaucuggagg

SEQ ID NO: 101653 - RNA, 19 nt, Artificial Sequence
  Description of Artificial Sequence: Synthetic oligonucleotide
gagaccucggugcugaccc

SEQ ID NO: 101654 - RNA, 19 nt, Artificial Sequence
  Description of Artificial Sequence: Synthetic oligonucleotide
caggcccuggcucagucgg

SEQ ID NO: 101655 - RNA, 19 nt, Artificial Sequence
  Description of Artificial Sequence: Synthetic oligonucleotide
ggacagcagcuggaguggc

SEQ ID NO: 101656 - RNA, 19 nt, Artificial Sequence
  Description of Artificial Sequence: Synthetic oligonucleotide
ccagaggccuggcgccagc

SEQ ID NO: 101657 - RNA, 19 nt, Artificial Sequence
  Description of Artificial Sequence: Synthetic oligonucleotide
cagcuuguggacaagcauu

SEQ ID NO: 101658 - RNA, 19 nt, Artificial Sequence
  Description of Artificial Sequence: Synthetic oligonucleotide
uccacagggggugugggug

SEQ ID NO: 101659 - RNA, 19 nt, Artificial Sequence
  Description of Artificial Sequence: Synthetic oligonucleotide
gacaaggucagccuggucc

SEQ ID NO: 101660 - RNA, 19 nt, Artificial Sequence
  Description of Artificial Sequence: Synthetic oligonucleotide
cucgcaccugcccuggcgg

SEQ ID NO: 101661 - RNA, 19 nt, Artificial Sequence
  Description of Artificial Sequence: Synthetic oligonucleotide
gcauguggcugcaaggugc

SEQ ID NO: 101662 - RNA, 19 nt, Artificial Sequence
  Description of Artificial Sequence: Synthetic oligonucleotide
ccaaugaucagcggacgug

SEQ ID NO: 101663 - RNA, 19 nt, Artificial Sequence
  Description of Artificial Sequence: Synthetic oligonucleotide
ggucuggggcacacaggag

SEQ ID NO: 101664 - RNA, 19 nt, Artificial Sequence
  Description of Artificial Sequence: Synthetic oligonucleotide
ggcaccuuggauaagcugg

SEQ ID NO: 101665 - RNA, 19 nt, Artificial Sequence
  Description of Artificial Sequence: Synthetic oligonucleotide
gagucuauuccuggauuca

SEQ ID NO: 101666 - RNA, 19 nt, Artificial Sequence
  Description of Artificial Sequence: Synthetic oligonucleotide
aaugucauccagagcccag

SEQ ID NO: 101667 - RNA, 19 nt, Artificial Sequence
  Description of Artificial Sequence: Synthetic oligonucleotide
gagcagaugcaagugcugc

SEQ ID NO: 101668 - RNA, 19 nt, Artificial Sequence
  Description of Artificial Sequence: Synthetic oligonucleotide
cuggaccaggcgggcugcu

SEQ ID NO: 101669 - RNA, 19 nt, Artificial Sequence
  Description of Artificial Sequence: Synthetic oligonucleotide
uguaucgugggucagagug

SEQ ID NO: 101670 - RNA, 19 nt, Artificial Sequence
  Description of Artificial Sequence: Synthetic oligonucleotide
gagcagcugguuccugcgg

SEQ ID NO: 101671 - RNA, 19 nt, Artificial Sequence
  Description of Artificial Sequence: Synthetic oligonucleotide
gacggaauccuauaugcag

SEQ ID NO: 101672 - RNA, 19 nt, Artificial Sequence
  Description of Artificial Sequence: Synthetic oligonucleotide
gccagagaugugacagcca

SEQ ID NO: 101673 - RNA, 19 nt, Artificial Sequence
  Description of Artificial Sequence: Synthetic oligonucleotide
accguggacagccugccac

SEQ ID NO: 101674 - RNA, 19 nt, Artificial Sequence
  Description of Artificial Sequence: Synthetic oligonucleotide
cucaucacagccuccauuc

SEQ ID NO: 101675 - RNA, 19 nt, Artificial Sequence
  Description of Artificial Sequence: Synthetic oligonucleotide
cucaguaagaaacucgugg

SEQ ID NO: 101676 - RNA, 19 nt, Artificial Sequence
  Description of Artificial Sequence: Synthetic oligonucleotide
gaggggcuguccgcucugg

SEQ ID NO: 101677 - RNA, 19 nt, Artificial Sequence
  Description of Artificial Sequence: Synthetic oligonucleotide
gugguggacguuaaguucg

SEQ ID NO: 101678 - RNA, 19 nt, Artificial Sequence
  Description of Artificial Sequence: Synthetic oligonucleotide
ggaggggccgccgucuucc

SEQ ID NO: 101679 - RNA, 19 nt, Artificial Sequence
  Description of Artificial Sequence: Synthetic oligonucleotide
cccaaccaggagcaggccc

SEQ ID NO: 101680 - RNA, 19 nt, Artificial Sequence
  Description of Artificial Sequence: Synthetic oligonucleotide
cgggagcuggcaaagacgc

SEQ ID NO: 101681 - RNA, 19 nt, Artificial Sequence
  Description of Artificial Sequence: Synthetic oligonucleotide
cugguuggcgugggagcca

SEQ ID NO: 101682 - RNA, 19 nt, Artificial Sequence
  Description of Artificial Sequence: Synthetic oligonucleotide
agccuagggcuucgggucg

SEQ ID NO: 101683 - RNA, 19 nt, Artificial Sequence
  Description of Artificial Sequence: Synthetic oligonucleotide
gcggcagcgcugaccgcca

SEQ ID NO: 101684 - RNA, 19 nt, Artificial Sequence
  Description of Artificial Sequence: Synthetic oligonucleotide
auggacaagccccuggguc

SEQ ID NO: 101685 - RNA, 19 nt, Artificial Sequence
  Description of Artificial Sequence: Synthetic oligonucleotide
cgcugcgugggccacgccc

SEQ ID NO: 101686 - RNA, 19 nt, Artificial Sequence
  Description of Artificial Sequence: Synthetic oligonucleotide
cuggagguggaggaggcgc

SEQ ID NO: 101687 - RNA, 19 nt, Artificial Sequence
  Description of Artificial Sequence: Synthetic oligonucleotide
cugcucugcauggacggcg

SEQ ID NO: 101688 - RNA, 19 nt, Artificial Sequence
  Description of Artificial Sequence: Synthetic oligonucleotide
gcaggcccgccagacuuaa

SEQ ID NO: 101689 - RNA, 19 nt, Artificial Sequence
  Description of Artificial Sequence: Synthetic oligonucleotide
agggaccuggucaccacgc

SEQ ID NO: 101690 - RNA, 19 nt, Artificial Sequence
  Description of Artificial Sequence: Synthetic oligonucleotide
cucgggggcgcccugcucu

SEQ ID NO: 101691 - RNA, 19 nt, Artificial Sequence
  Description of Artificial Sequence: Synthetic oligonucleotide
uggcucagcggacacgcgg

SEQ ID NO: 101692 - RNA, 19 nt, Artificial Sequence
  Description of Artificial Sequence: Synthetic oligonucleotide
gggacucaggcccagggcg

SEQ ID NO: 101693 - RNA, 19 nt, Artificial Sequence
  Description of Artificial Sequence: Synthetic oligonucleotide
ucaggcccagggcgcugcc

SEQ ID NO: 101694 - RNA, 19 nt, Artificial Sequence
  Description of Artificial Sequence: Synthetic oligonucleotide
gcugcccggguggccgcgg

SEQ ID NO: 101695 - RNA, 19 nt, Artificial Sequence
  Description of Artificial Sequence: Synthetic oligonucleotide
gcgcuggacgacggcucgg

SEQ ID NO: 101696 - RNA, 19 nt, Artificial Sequence
  Description of Artificial Sequence: Synthetic oligonucleotide
gcccuuggccgcuucgagc

SEQ ID NO: 101697 - RNA, 19 nt, Artificial Sequence
  Description of Artificial Sequence: Synthetic oligonucleotide
cggaugcuggcggcgcagg

SEQ ID NO: 101698 - RNA, 19 nt, Artificial Sequence
  Description of Artificial Sequence: Synthetic oligonucleotide
ggcguggaucccggucugg

SEQ ID NO: 101699 - RNA, 19 nt, Artificial Sequence
  Description of Artificial Sequence: Synthetic oligonucleotide
gcccgagcccugugcucgg

SEQ ID NO: 101700 - RNA, 19 nt, Artificial Sequence
  Description of Artificial Sequence: Synthetic oligonucleotide
ggaagucccgcagaacgcc

SEQ ID NO: 101701 - RNA, 19 nt, Artificial Sequence
  Description of Artificial Sequence: Synthetic oligonucleotide
cggcagcugcugccucgcg

SEQ ID NO: 101702 - RNA, 19 nt, Artificial Sequence
  Description of Artificial Sequence: Synthetic oligonucleotide
gcccgggagcaggaggagc

SEQ ID NO: 101703 - RNA, 19 nt, Artificial Sequence
  Description of Artificial Sequence: Synthetic oligonucleotide
cugcuggcgcccgcagaug

SEQ ID NO: 101704 - RNA, 19 nt, Artificial Sequence
  Description of Artificial Sequence: Synthetic oligonucleotide
ggcaccguggagcuggucc

SEQ ID NO: 101705 - RNA, 19 nt, Artificial Sequence
  Description of Artificial Sequence: Synthetic oligonucleotide
cgggcgcugccgcuggcgc

SEQ ID NO: 101706 - RNA, 19 nt, Artificial Sequence
  Description of Artificial Sequence: Synthetic oligonucleotide
cuggugcugcacgagcucg

SEQ ID NO: 101707 - RNA, 19 nt, Artificial Sequence
  Description of Artificial Sequence: Synthetic oligonucleotide
ggggccgggcgcagccgcg

SEQ ID NO: 101708 - RNA, 19 nt, Artificial Sequence
  Description of Artificial Sequence: Synthetic oligonucleotide
gcuggggagccgcuccgcc

SEQ ID NO: 101709 - RNA, 19 nt, Artificial Sequence
  Description of Artificial Sequence: Synthetic oligonucleotide
cugggggugggcgcagagc

SEQ ID NO: 101710 - RNA, 19 nt, Artificial Sequence
  Description of Artificial Sequence: Synthetic oligonucleotide
cugcuggucgacguggguc

SEQ ID NO: 101711 - RNA, 19 nt, Artificial Sequence
  Description of Artificial Sequence: Synthetic oligonucleotide
cagaggcugcgccguggga

SEQ ID NO: 101712 - RNA, 19 nt, Artificial Sequence
  Description of Artificial Sequence: Synthetic oligonucleotide
acccccuggcuccgcgugc

SEQ ID NO: 101713 - RNA, 19 nt, Artificial Sequence
  Description of Artificial Sequence: Synthetic oligonucleotide
caccgggacggccccgcgc

SEQ ID NO: 101714 - RNA, 19 nt, Artificial Sequence
  Description of Artificial Sequence: Synthetic oligonucleotide
cucagcggcccgcagagcc

SEQ ID NO: 101715 - RNA, 19 nt, Artificial Sequence
  Description of Artificial Sequence: Synthetic oligonucleotide
cgcgcccugcaggaggcgc

SEQ ID NO: 101716 - RNA, 19 nt, Artificial Sequence
  Description of Artificial Sequence: Synthetic oligonucleotide
cucguacucuccgaccgcg

SEQ ID NO: 101717 - RNA, 19 nt, Artificial Sequence
  Description of Artificial Sequence: Synthetic oligonucleotide
gcgccauucgccgcccccu

SEQ ID NO: 101718 - RNA, 19 nt, Artificial Sequence
  Description of Artificial Sequence: Synthetic oligonucleotide
ucgcccuucgcagagcucg

SEQ ID NO: 101719 - RNA, 19 nt, Artificial Sequence
  Description of Artificial Sequence: Synthetic oligonucleotide
guucugccgccgcagcaau

SEQ ID NO: 101720 - RNA, 19 nt, Artificial Sequence
  Description of Artificial Sequence: Synthetic oligonucleotide
uaaagcuccuuugccgcga

SEQ ID NO: 101721 - RNA, 25 nt, Artificial Sequence
  Description of Artificial Sequence: Synthetic oligonucleotide
cgacugccgagcuccgcccuccagg

SEQ ID NO: 101722 - RNA, 25 nt, Artificial Sequence
  Description of Artificial Sequence: Synthetic oligonucleotide
gcggccccacccgccugccguccug

SEQ ID NO: 101723 - RNA, 25 nt, Artificial Sequence
  Description of Artificial Sequence: Synthetic oligonucleotide
ggggcgccgccgccccgccgccggc

SEQ ID NO: 101724 - RNA, 25 nt, Artificial Sequence
  Description of Artificial Sequence: Synthetic oligonucleotide
caguggaccgcugugcgcgaacccu

SEQ ID NO: 101725 - RNA, 25 nt, Artificial Sequence
  Description of Artificial Sequence: Synthetic oligonucleotide
ugaacccuacggucccgacccgcgg

SEQ ID NO: 101726 - RNA, 25 nt, Artificial Sequence
  Description of Artificial Sequence: Synthetic oligonucleotide
ggcgaggccggguaccugggcuggg

SEQ ID NO: 101727 - RNA, 25 nt, Artificial Sequence
  Description of Artificial Sequence: Synthetic oligonucleotide
gauccggagcaagcgggcgagggca

SEQ ID NO: 101728 - RNA, 25 nt, Artificial Sequence
  Description of Artificial Sequence: Synthetic oligonucleotide
agcgcccuaagcaggcccggagcga

SEQ ID NO: 101729 - RNA, 25 nt, Artificial Sequence
  Description of Artificial Sequence: Synthetic oligonucleotide
auggcagccuugaugaccccgggaa

SEQ ID NO: 101730 - RNA, 25 nt, Artificial Sequence
  Description of Artificial Sequence: Synthetic oligonucleotide
accggggccccacccgcgccuggug

SEQ ID NO: 101731 - RNA, 25 nt, Artificial Sequence
  Description of Artificial Sequence: Synthetic oligonucleotide
gacuucuccggggaagggagccagg

SEQ ID NO: 101732 - RNA, 25 nt, Artificial Sequence
  Description of Artificial Sequence: Synthetic oligonucleotide
ggacuucccgacccuucgccagagc

SEQ ID NO: 101733 - RNA, 25 nt, Artificial Sequence
  Description of Artificial Sequence: Synthetic oligonucleotide
cccaagcagcucccggagcugaucc

SEQ ID NO: 101734 - RNA, 25 nt, Artificial Sequence
  Description of Artificial Sequence: Synthetic oligonucleotide
cgcaugaagcgagacggaggccgcc

SEQ ID NO: 101735 - RNA, 25 nt, Artificial Sequence
  Description of Artificial Sequence: Synthetic oligonucleotide
cugagcgaagcggacaucaggggcu

SEQ ID NO: 101736 - RNA, 25 nt, Artificial Sequence
  Description of Artificial Sequence: Synthetic oligonucleotide
uucguggccgcuguggugaauggga

SEQ ID NO: 101737 - RNA, 25 nt, Artificial Sequence
  Description of Artificial Sequence: Synthetic oligonucleotide
agcgcgcagggcgcacagaucgggg

SEQ ID NO: 101738 - RNA, 25 nt, Artificial Sequence
  Description of Artificial Sequence: Synthetic oligonucleotide
gccaugcugauggccauccgacuuc

SEQ ID NO: 101739 - RNA, 25 nt, Artificial Sequence
  Description of Artificial Sequence: Synthetic oligonucleotide
cggggcauggaucuggaggagaccu

SEQ ID NO: 101740 - RNA, 25 nt, Artificial Sequence
  Description of Artificial Sequence: Synthetic oligonucleotide
ucggugcugacccaggcccuggcuc

SEQ ID NO: 101741 - RNA, 25 nt, Artificial Sequence
  Description of Artificial Sequence: Synthetic oligonucleotide
cagucgggacagcagcuggaguggc

SEQ ID NO: 101742 - RNA, 25 nt, Artificial Sequence
  Description of Artificial Sequence: Synthetic oligonucleotide
ccagaggccuggcgccagcagcuug

SEQ ID NO: 101743 - RNA, 25 nt, Artificial Sequence
  Description of Artificial Sequence: Synthetic oligonucleotide
guggacaagcauuccacagggggug

SEQ ID NO: 101744 - RNA, 25 nt, Artificial Sequence
  Description of Artificial Sequence: Synthetic oligonucleotide
gugggugacaaggucagccuggucc

SEQ ID NO: 101745 - RNA, 25 nt, Artificial Sequence
  Description of Artificial Sequence: Synthetic oligonucleotide
cucgcaccugcccuggcggcaugug

SEQ ID NO: 101746 - RNA, 25 nt, Artificial Sequence
  Description of Artificial Sequence: Synthetic oligonucleotide
ggcugcaaggugccaaugaucagcg

SEQ ID NO: 101747 - RNA, 25 nt, Artificial Sequence
  Description of Artificial Sequence: Synthetic oligonucleotide
ggacguggucuggggcacacaggag

SEQ ID NO: 101748 - RNA, 25 nt, Artificial Sequence
  Description of Artificial Sequence: Synthetic oligonucleotide
ggcaccuuggauaagcuggagucua

SEQ ID NO: 101749 - RNA, 25 nt, Artificial Sequence
  Description of Artificial Sequence: Synthetic oligonucleotide
auuccuggauucaaugucauccaga

SEQ ID NO: 101750 - RNA, 25 nt, Artificial Sequence
  Description of Artificial Sequence: Synthetic oligonucleotide
agcccagagcagaugcaagugcugc

SEQ ID NO: 101751 - RNA, 25 nt, Artificial Sequence
  Description of Artificial Sequence: Synthetic oligonucleotide
cuggaccaggcgggcugcuguaucg

SEQ ID NO: 101752 - RNA, 25 nt, Artificial Sequence
  Description of Artificial Sequence: Synthetic oligonucleotide
gugggucagagugagcagcugguuc

SEQ ID NO: 101753 - RNA, 25 nt, Artificial Sequence
  Description of Artificial Sequence: Synthetic oligonucleotide
ccugcggacggaauccuauaugcag

SEQ ID NO: 101754 - RNA, 25 nt, Artificial Sequence
  Description of Artificial Sequence: Synthetic oligonucleotide
gccagagaugugacagccaccgugg

SEQ ID NO: 101755 - RNA, 25 nt, Artificial Sequence
  Description of Artificial Sequence: Synthetic oligonucleotide
gacagccugccacucaucacagccu

SEQ ID NO: 101756 - RNA, 25 nt, Artificial Sequence
  Description of Artificial Sequence: Synthetic oligonucleotide
uccauucucaguaagaaacucgugg

SEQ ID NO: 101757 - RNA, 25 nt, Artificial Sequence
  Description of Artificial Sequence: Synthetic oligonucleotide
gaggggcuguccgcucugguggugg

SEQ ID NO: 101758 - RNA, 25 nt, Artificial Sequence
  Description of Artificial Sequence: Synthetic oligonucleotide
gacguuaaguucggaggggccgccg

SEQ ID NO: 101759 - RNA, 25 nt, Artificial Sequence
  Description of Artificial Sequence: Synthetic oligonucleotide
gucuuccccaaccaggagcaggccc

SEQ ID NO: 101760 - RNA, 25 nt, Artificial Sequence
  Description of Artificial Sequence: Synthetic oligonucleotide
cgggagcuggcaaagacgcugguug

SEQ ID NO: 101761 - RNA, 25 nt, Artificial Sequence
  Description of Artificial Sequence: Synthetic oligonucleotide
ggcgugggagccagccuagggcuuc

SEQ ID NO: 101762 - RNA, 25 nt, Artificial Sequence
  Description of Artificial Sequence: Synthetic oligonucleotide
cgggucgcggcagcgcugaccgcca

SEQ ID NO: 101763 - RNA, 25 nt, Artificial Sequence
  Description of Artificial Sequence: Synthetic oligonucleotide
auggacaagccccugggucgcugcg

SEQ ID NO: 101764 - RNA, 25 nt, Artificial Sequence
  Description of Artificial Sequence: Synthetic oligonucleotide
gugggccacgcccuggagguggagg

SEQ ID NO: 101765 - RNA, 25 nt, Artificial Sequence
  Description of Artificial Sequence: Synthetic oligonucleotide
gaggcgcugcucugcauggacggcg

SEQ ID NO: 101766 - RNA, 25 nt, Artificial Sequence
  Description of Artificial Sequence: Synthetic oligonucleotide
gcaggcccgccagacuuaagggacc

SEQ ID NO: 101767 - RNA, 25 nt, Artificial Sequence
  Description of Artificial Sequence: Synthetic oligonucleotide
cuggucaccacgcucgggggcgccc

SEQ ID NO: 101768 - RNA, 25 nt, Artificial Sequence
  Description of Artificial Sequence: Synthetic oligonucleotide
cugcucuggcucagcggacacgcgg

SEQ ID NO: 101769 - RNA, 25 nt, Artificial Sequence
  Description of Artificial Sequence: Synthetic oligonucleotide
cagcggacacgcggggacucaggcc

SEQ ID NO: 101770 - RNA, 25 nt, Artificial Sequence
  Description of Artificial Sequence: Synthetic oligonucleotide
gggacucaggcccagggcgcugccc

SEQ ID NO: 101771 - RNA, 25 nt, Artificial Sequence
  Description of Artificial Sequence: Synthetic oligonucleotide
ccagggcgcugcccggguggccgcg

SEQ ID NO: 101772 - RNA, 25 nt, Artificial Sequence
  Description of Artificial Sequence: Synthetic oligonucleotide
cggguggccgcggcgcuggacgacg

SEQ ID NO: 101773 - RNA, 25 nt, Artificial Sequence
  Description of Artificial Sequence: Synthetic oligonucleotide
ggcucggcccuuggccgcuucgagc

SEQ ID NO: 101774 - RNA, 25 nt, Artificial Sequence
  Description of Artificial Sequence: Synthetic oligonucleotide
cggaugcuggcggcgcagggcgugg

SEQ ID NO: 101775 - RNA, 25 nt, Artificial Sequence
  Description of Artificial Sequence: Synthetic oligonucleotide
gaucccggucuggcccgagcccugu

SEQ ID NO: 101776 - RNA, 25 nt, Artificial Sequence
  Description of Artificial Sequence: Synthetic oligonucleotide
ugcucgggaagucccgcagaacgcc

SEQ ID NO: 101777 - RNA, 25 nt, Artificial Sequence
  Description of Artificial Sequence: Synthetic oligonucleotide
cggcagcugcugccucgcgcccggg

SEQ ID NO: 101778 - RNA, 25 nt, Artificial Sequence
  Description of Artificial Sequence: Synthetic oligonucleotide
gagcaggaggagcugcuggcgcccg

SEQ ID NO: 101779 - RNA, 25 nt, Artificial Sequence
  Description of Artificial Sequence: Synthetic oligonucleotide
gcagauggcaccguggagcuggucc

SEQ ID NO: 101780 - RNA, 25 nt, Artificial Sequence
  Description of Artificial Sequence: Synthetic oligonucleotide
cgggcgcugccgcuggcgcuggugc

SEQ ID NO: 101781 - RNA, 25 nt, Artificial Sequence
  Description of Artificial Sequence: Synthetic oligonucleotide
cugcacgagcucggggccgggcgca

SEQ ID NO: 101782 - RNA, 25 nt, Artificial Sequence
  Description of Artificial Sequence: Synthetic oligonucleotide
agccgcgcuggggagccgcuccgcc

SEQ ID NO: 101783 - RNA, 25 nt, Artificial Sequence
  Description of Artificial Sequence: Synthetic oligonucleotide
cugggggugggcgcagagcugcugg

SEQ ID NO: 101784 - RNA, 25 nt, Artificial Sequence
  Description of Artificial Sequence: Synthetic oligonucleotide
gucgacgugggucagaggcugcgcc

SEQ ID NO: 101785 - RNA, 25 nt, Artificial Sequence
  Description of Artificial Sequence: Synthetic oligonucleotide
cgugggacccccuggcuccgcgugc

SEQ ID NO: 101786 - RNA, 25 nt, Artificial Sequence
  Description of Artificial Sequence: Synthetic oligonucleotide
caccgggacggccccgcgcucagcg

SEQ ID NO: 101787 - RNA, 25 nt, Artificial Sequence
  Description of Artificial Sequence: Synthetic oligonucleotide
ggcccgcagagccgcgcccugcagg

SEQ ID NO: 101788 - RNA, 25 nt, Artificial Sequence
  Description of Artificial Sequence: Synthetic oligonucleotide
gaggcgcucguacucuccgaccgcg

SEQ ID NO: 101789 - RNA, 25 nt, Artificial Sequence
  Description of Artificial Sequence: Synthetic oligonucleotide
gcgccauucgccgcccccucgcccu

SEQ ID NO: 101790 - RNA, 25 nt, Artificial Sequence
  Description of Artificial Sequence: Synthetic oligonucleotide
uucgcagagcucguucugccgccgc

SEQ ID NO: 101791 - RNA, 25 nt, Artificial Sequence
  Description of Artificial Sequence: Synthetic oligonucleotide
cagcaauaaagcuccuuugccgcga

SEQ ID NO: 101792 - DNA, 21 bp, Artificial Sequence
  Description of Artificial Sequence: Synthetic oligonucleotide
  Description of Combined DNA/RNA Molecule: Synthetic oligonucleotide
cuacacaaaucagcgauuutt

SEQ ID NO: 101793 - DNA, 21 bp, Artificial Sequence
  Description of Artificial Sequence: Synthetic oligonucleotide
  Description of Combined DNA/RNA Molecule: Synthetic oligonucleotide
aaaucgcugauuuguguagtt

SEQ ID NO: 101794 - DNA, 25 bp, Artificial Sequence
  Description of Artificial Sequence: Synthetic oligonucleotide
  Description of Combined DNA/RNA Molecule: Synthetic oligonucleotide
cuacacaaaucagcgauuuccaugt

SEQ ID NO: 101795 - RNA, 27 nt, Artificial Sequence
  Description of Artificial Sequence: Synthetic oligonucleotide
acauggaaaucgcugauuuguguaguc

SEQ ID NO: 101796 - RNA, 13 nt, Artificial Sequence
  Description of Artificial Sequence: Synthetic oligonucleotide
cuacacaaaucag

SEQ ID NO: 101797 - DNA, 11 bp, Artificial Sequence
  Description of Artificial Sequence: Synthetic oligonucleotide
  Description of Combined DNA/RNA Molecule: Synthetic oligonucleotide
gauuuccaugt

SEQ ID NO: 101798 - DNA, 21 bp, Artificial Sequence
  Description of Artificial Sequence: Synthetic oligonucleotide
  Description of Combined DNA/RNA Molecule: Synthetic oligonucleotide
ggaucuuauuucuucggagtt

SEQ ID NO: 101799 - DNA, 21 bp, Artificial Sequence
  Description of Artificial Sequence: Synthetic oligonucleotide
  Description of Combined DNA/RNA Molecule: Synthetic oligonucleotide
cuccgaagaaauaagaucctt

SEQ ID NO: 101800 - RNA, 11 nt, Artificial Sequence
  Description of Artificial Sequence: Synthetic oligonucleotide
ggaucuuauuu

SEQ ID NO: 101801 - DNA, 10 bp, Artificial Sequence
  Description of Artificial Sequence: Synthetic oligonucleotide
  Description of Combined DNA/RNA Molecule: Synthetic oligonucleotide
cuucggagtt

SEQ ID NO: 101802 - RNA, 27 nt, Artificial Sequence
  Description of Artificial Sequence: Synthetic oligonucleotide
cauugucuccgaagaaauaagauccuu

SEQ ID NO: 101803 - RNA, 8 nt, Artificial Sequence
  Description of Artificial Sequence: Synthetic oligonucleotide
  modified_base (2): LNA-G
ggaucuua

SEQ ID NO: 101804 - DNA, 17 bp, Artificial Sequence
  Description of Artificial Sequence: Synthetic oligonucleotide
  Description of Combined DNA/RNA Molecule: Synthetic oligonucleotide
uuucuucggagacaatg

SEQ ID NO: 101805 - DNA, 16 bp, Artificial Sequence
  Description of Artificial Sequence: Synthetic oligonucleotide
  Description of Combined DNA/RNA Molecule: Synthetic oligonucleotide
uucuucggagacaatg

SEQ ID NO: 101806 - DNA, 15 bp, Artificial Sequence
  Description of Artificial Sequence: Synthetic oligonucleotide
  Description of Combined DNA/RNA Molecule: Synthetic oligonucleotide
ucuucggagacaatg

SEQ ID NO: 101807 - DNA, 14 bp, Artificial Sequence
  Description of Artificial Sequence: Synthetic oligonucleotide
  Description of Combined DNA/RNA Molecule: Synthetic oligonucleotide
cuucggagacaatg

SEQ ID NO: 101808 - DNA, 13 bp, Artificial Sequence
  Description of Artificial Sequence: Synthetic oligonucleotide
  Description of Combined DNA/RNA Molecule: Synthetic oligonucleotide
uucggagacaatg

SEQ ID NO: 101809 - DNA, 12 bp, Artificial Sequence
  Description of Artificial Sequence: Synthetic oligonucleotide
  Description of Combined DNA/RNA Molecule: Synthetic oligonucleotide
ucggagacaatg

SEQ ID NO: 101810 - DNA, 11 bp, Artificial Sequence
  Description of Artificial Sequence: Synthetic oligonucleotide
  Description of Combined DNA/RNA Molecule: Synthetic oligonucleotide
cggagacaatg

SEQ ID NO: 101811 - RNA, 9 nt, Artificial Sequence
  Description of Artificial Sequence: Synthetic oligonucleotide
  modified_base (2): LNA-G
ggaucuuau

SEQ ID NO: 101812 - RNA, 10 nt, Artificial Sequence
  Description of Artificial Sequence: Synthetic oligonucleotide
  modified_base (2): LNA-G
ggaucuuauu

SEQ ID NO: 101813 - RNA, 11 nt, Artificial Sequence
  Description of Artificial Sequence: Synthetic oligonucleotide
  modified_base (2): LNA-G
ggaucuuauuu

SEQ ID NO: 101814 - RNA, 12 nt, Artificial Sequence
  Description of Artificial Sequence: Synthetic oligonucleotide
  modified_base (2): LNA-G
ggaucuuauuuc

SEQ ID NO: 101815 - RNA, 8 nt, Artificial Sequence
  Description of Artificial Sequence: Synthetic oligonucleotide
  modified_base (3): LNA-A
cuacacaa

SEQ ID NO: 101816 - DNA, 13 bp, Artificial Sequence
  Description of Artificial Sequence: Synthetic oligonucleotide
  Description of Combined DNA/RNA Molecule: Synthetic oligonucleotide
  modified_base (8): LNA-A
aucagcgauuutt

SEQ ID NO: 101817 - DNA, 12 bp, Artificial Sequence
  Description of Artificial Sequence: Synthetic oligonucleotide
  Description of Combined DNA/RNA Molecule: Synthetic oligonucleotide
  modified_base (7): LNA-A
ucagcgauuutt

SEQ ID NO: 101818 - DNA, 11 bp, Artificial Sequence
  Description of Artificial Sequence: Synthetic oligonucleotide
  Description of Combined DNA/RNA Molecule: Synthetic oligonucleotide
  modified_base (6): LNA-A
cagcgauuutt

SEQ ID NO: 101819 - DNA, 10 bp, Artificial Sequence
  Description of Artificial Sequence: Synthetic oligonucleotide
  Description of Combined DNA/RNA Molecule: Synthetic oligonucleotide
  modified_base (5): LNA-A
agcgauuutt

SEQ ID NO: 101820 - DNA, 9 bp, Artificial Sequence
  Description of Artificial Sequence: Synthetic oligonucleotide
  Description of Combined DNA/RNA Molecule: Synthetic oligonucleotide
  modified_base (4): LNA-A
gcgauuutt

SEQ ID NO: 101821 - DNA, 8 bp, Artificial Sequence
  Description of Artificial Sequence: Synthetic oligonucleotide
  Description of Combined DNA/RNA Molecule: Synthetic oligonucleotide
  modified_base (3): LNA-A
cgauuutt

SEQ ID NO: 101822 - DNA, 7 bp, Artificial Sequence
  Description of Artificial Sequence: Synthetic oligonucleotide
  Description of Combined DNA/RNA Molecule: Synthetic oligonucleotide
  modified_base (2): LNA-A
gauuutt

SEQ ID NO: 101823 - RNA, 9 nt, Artificial Sequence
  Description of Artificial Sequence: Synthetic oligonucleotide
  modified_base (3): LNA-A
cuacacaaa

SEQ ID NO: 101824 - RNA, 10 nt, Artificial Sequence
  Description of Artificial Sequence: Synthetic oligonucleotide
  modified_base (3): LNA-A
cuacacaaau

SEQ ID NO: 101825 - RNA, 11 nt, Artificial Sequence
  Description of Artificial Sequence: Synthetic oligonucleotide
  modified_base (3): LNA-A
cuacacaaauc

SEQ ID NO: 101826 - RNA, 12 nt, Artificial Sequence
  Description of Artificial Sequence: Synthetic oligonucleotide
  modified_base (3): LNA-A
cuacacaaauca

SEQ ID NO: 101827 - RNA, 13 nt, Artificial Sequence
  Description of Artificial Sequence: Synthetic oligonucleotide
  modified_base (3): LNA-A
cuacacaaaucag

SEQ ID NO: 101828 - RNA, 14 nt, Artificial Sequence
  Description of Artificial Sequence: Synthetic oligonucleotide
  modified_base (3): LNA-A
cuacacaaaucagc

SEQ ID NO: 101829 - RNA, 13 nt, Artificial Sequence
  Description of Artificial Sequence: Synthetic oligonucleotide
  modified_base (2): LNA-G
ggaucuuauuucu

SEQ ID NO: 101830 - RNA, 14 nt, Artificial Sequence
  Description of Artificial Sequence: Synthetic oligonucleotide
  modified_base (2): LNA-G
ggaucuuauuucuu

SEQ ID NO: 101831 - RNA, 8 nt, Artificial Sequence
  Description of Artificial Sequence: Synthetic oligonucleotide
  modified_base (2): LNA-G
  modified_base (8): LNA-A
ggaucuua

SEQ ID NO: 101832 - RNA, 9 nt, Artificial Sequence
  Description of Artificial Sequence: Synthetic oligonucleotide
  modified_base (2): LNA-G
  modified_base (9): LNA-U
ggaucuuau

SEQ ID NO: 101833 - RNA, 10 nt, Artificial Sequence
  Description of Artificial Sequence: Synthetic oligonucleotide
  modified_base (2): LNA-G
  modified_base (10): LNA-U
ggaucuuauu

SEQ ID NO: 101834 - RNA, 11 nt, Artificial Sequence
  Description of Artificial Sequence: Synthetic oligonucleotide
  modified_base (2): LNA-G
  modified_base (11): LNA-U
ggaucuuauuu

SEQ ID NO: 101835 - RNA, 12 nt, Artificial Sequence
  Description of Artificial Sequence: Synthetic oligonucleotide
  modified_base (2): LNA-G
  modified_base (12): LNA-C
ggaucuuauuuc

SEQ ID NO: 101836 - RNA, 13 nt, Artificial Sequence
  Description of Artificial Sequence: Synthetic oligonucleotide
  modified_base (2): LNA-G
  modified_base (13): LNA-U
ggaucuuauuucu

SEQ ID NO: 101837 - RNA, 14 nt, Artificial Sequence
  Description of Artificial Sequence: Synthetic oligonucleotide
  modified_base (2): LNA-G
  modified_base (14): LNA-U
ggaucuuauuucuu

SEQ ID NO: 101838 - DNA, 13 bp, Artificial Sequence
  Description of Artificial Sequence: Synthetic oligonucleotide
  Description of Combined DNA/RNA Molecule: Synthetic oligonucleotide
  modified_base (8): LNA-G
uuucuucggagtt

SEQ ID NO: 101839 - DNA, 12 bp, Artificial Sequence
  Description of Artificial Sequence: Synthetic oligonucleotide
  Description of Combined DNA/RNA Molecule: Synthetic oligonucleotide
  modified_base (7): LNA-G
uucuucggagtt

SEQ ID NO: 101840 - DNA, 11 bp, Artificial Sequence
  Description of Artificial Sequence: Synthetic oligonucleotide
  Description of Combined DNA/RNA Molecule: Synthetic oligonucleotide
  modified_base (6): LNA-G
ucuucggagtt

SEQ ID NO: 101841 - DNA, 10 bp, Artificial Sequence
  Description of Artificial Sequence: Synthetic oligonucleotide
  Description of Combined DNA/RNA Molecule: Synthetic oligonucleotide
  modified_base (5): LNA-G
cuucggagtt

SEQ ID NO: 101842 - DNA, 9 bp, Artificial Sequence
  Description of Artificial Sequence: Synthetic oligonucleotide
  Description of Combined DNA/RNA Molecule: Synthetic oligonucleotide
  modified_base (4): LNA-G
uucggagtt

SEQ ID NO: 101843 - DNA, 8 bp, Artificial Sequence
  Description of Artificial Sequence: Synthetic oligonucleotide
  Description of Combined DNA/RNA Molecule: Synthetic oligonucleotide
  modified_base (3): LNA-G
ucggagtt

SEQ ID NO: 101844 - DNA, 7 bp, Artificial Sequence
  Description of Artificial Sequence: Synthetic oligonucleotide
  Description of Combined DNA/RNA Molecule: Synthetic oligonucleotide
  modified_base (2): LNA-G
cggagtt

SEQ ID NO: 101845 - DNA, 13 bp, Artificial Sequence
  Description of Artificial Sequence: Synthetic oligonucleotide
  Description of Combined DNA/RNA Molecule: Synthetic oligonucleotide
  modified_base (1): LNA-U
  modified_base (8): LNA-G
uuucuucggagtt

SEQ ID NO: 101846 - DNA, 12 bp, Artificial Sequence
  Description of Artificial Sequence: Synthetic oligonucleotide
  Description of Combined DNA/RNA Molecule: Synthetic oligonucleotide
  modified_base (1): LNA-U
  modified_base (7): LNA-G
uucuucggagtt

SEQ ID NO: 101847 - DNA, 11 bp, Artificial Sequence
  Description of Artificial Sequence: Synthetic oligonucleotide
  Description of Combined DNA/RNA Molecule: Synthetic oligonucleotide
  modified_base (1): LNA-U
  modified_base (6): LNA-G
ucuucggagtt

SEQ ID NO: 101848 - DNA, 10 bp, Artificial Sequence
  Description of Artificial Sequence: Synthetic oligonucleotide
  Description of Combined DNA/RNA Molecule: Synthetic oligonucleotide
  modified_base (1): LNA-C
  modified_base (5): LNA-G
cuucggagtt

SEQ ID NO: 101849 - DNA, 9 bp, Artificial Sequence
  Description of Artificial Sequence: Synthetic oligonucleotide
  Description of Combined DNA/RNA Molecule: Synthetic oligonucleotide
  modified_base (1): LNA-U
  modified_base (4): LNA-G
uucggagtt

SEQ ID NO: 101850 - DNA, 8 bp, Artificial Sequence
  Description of Artificial Sequence: Synthetic oligonucleotide
  Description of Combined DNA/RNA Molecule: Synthetic oligonucleotide
  modified_base (1): LNA-U
  modified_base (3): LNA-G
ucggagtt

SEQ ID NO: 101851 - DNA, 7 bp, Artificial Sequence
  Description of Artificial Sequence: Synthetic oligonucleotide
  Description of Combined DNA/RNA Molecule: Synthetic oligonucleotide
  modified_base (1): LNA-C
  modified_base (2): LNA-G
cggagtt

SEQ ID NO: 101852 - DNA, 21 bp, Artificial Sequence
  Description of Artificial Sequence: Synthetic oligonucleotide
  Description of Combined DNA/RNA Molecule: Synthetic oligonucleotide
  modified_base (2): LNA-G
  modified_base (16): LNA-G
ggaucuuauuucuucggagtt

SEQ ID NO: 101853 - DNA, 25 bp, Artificial Sequence
  Description of Artificial Sequence: Synthetic oligonucleotide
  Description of Combined DNA/RNA Molecule: Synthetic oligonucleotide
ggaucuuauuucuucggagacaatg

SEQ ID NO: 101854 - RNA, 25 nt, Artificial Sequence
  Description of Artificial Sequence: Synthetic oligonucleotide
guauuuugaugaggaguucacggcc

SEQ ID NO: 101855 - RNA, 25 nt, Artificial Sequence
  Description of Artificial Sequence: Synthetic oligonucleotide
ggcccagaugaucaccaucacacca

SEQ ID NO: 101856 - RNA, 25 nt, Artificial Sequence
  Description of Artificial Sequence: Synthetic oligonucleotide
gggaagaaaacuauccugcggguuu

SEQ ID NO: 101857 - RNA, 25 nt, Artificial Sequence
  Description of Artificial Sequence: Synthetic oligonucleotide
guuuuaauuuauuucauccaguuug

SEQ ID NO: 101858 - RNA, 25 nt, Artificial Sequence
  Description of Artificial Sequence: Synthetic oligonucleotide
acguagggaaauguuaaggacuucu

SEQ ID NO: 101859 - RNA, 25 nt, Artificial Sequence
  Description of Artificial Sequence: Synthetic oligonucleotide
ccaggguuuacccagugggacagag

SEQ ID NO: 101860 - RNA, 25 nt, Artificial Sequence
  Description of Artificial Sequence: Synthetic oligonucleotide
agcaagguuuaaauuuguuauugug

SEQ ID NO: 101861 - RNA, 25 nt, Artificial Sequence
  Description of Artificial Sequence: Synthetic oligonucleotide
uguauuauguuguucaaaugcauuu

SEQ ID NO: 101862 - RNA, 25 nt, Artificial Sequence
  Description of Artificial Sequence: Synthetic oligonucleotide
uuuuaaucuuugugacaggaaagcc

SEQ ID NO: 101863 - RNA, 25 nt, Artificial Sequence
  Description of Artificial Sequence: Synthetic oligonucleotide
uuaaucuuugugacaggaaagcccu

SEQ ID NO: 101864 - RNA, 25 nt, Artificial Sequence
  Description of Artificial Sequence: Synthetic oligonucleotide
gcugcuuaugucucccagcauggcc

SEQ ID NO: 101865 - RNA, 25 nt, Artificial Sequence
  Description of Artificial Sequence: Synthetic oligonucleotide
aaguguuucagaagcuucucccuga

SEQ ID NO: 101866 - RNA, 25 nt, Artificial Sequence
  Description of Artificial Sequence: Synthetic oligonucleotide
gaccaucaauaaggaagaagcccuu

SEQ ID NO: 101867 - RNA, 25 nt, Artificial Sequence
  Description of Artificial Sequence: Synthetic oligonucleotide
ccaucaauaaggaagaagcccuuca

SEQ ID NO: 101868 - RNA, 25 nt, Artificial Sequence
  Description of Artificial Sequence: Synthetic oligonucleotide
ucaauaaggaagaagcccuucagcg

SEQ ID NO: 101869 - RNA, 25 nt, Artificial Sequence
  Description of Artificial Sequence: Synthetic oligonucleotide
aauaaggaagaagcccuucagcggc

SEQ ID NO: 101870 - RNA, 25 nt, Artificial Sequence
  Description of Artificial Sequence: Synthetic oligonucleotide
aggaagaagcccuucagcggccagu

SEQ ID NO: 101871 - RNA, 25 nt, Artificial Sequence
  Description of Artificial Sequence: Synthetic oligonucleotide
gcauaacuaaaggugaaaagcuccg

SEQ ID NO: 101872 - RNA, 25 nt, Artificial Sequence
  Description of Artificial Sequence: Synthetic oligonucleotide
cauaacuaaaggugaaaagcuccgg

SEQ ID NO: 101873 - RNA, 25 nt, Artificial Sequence
  Description of Artificial Sequence: Synthetic oligonucleotide
cuacaucacgccagucaacagucug

SEQ ID NO: 101874 - RNA, 25 nt, Artificial Sequence
  Description of Artificial Sequence: Synthetic oligonucleotide
acuggauuuaagcagaguucaaaag

SEQ ID NO: 101875 - RNA, 25 nt, Artificial Sequence
  Description of Artificial Sequence: Synthetic oligonucleotide
cuggauuuaagcagaguucaaaagc

SEQ ID NO: 101876 - RNA, 25 nt, Artificial Sequence
  Description of Artificial Sequence: Synthetic oligonucleotide
gauuuaagcagaguucaaaagcccu

SEQ ID NO: 101877 - RNA, 25 nt, Artificial Sequence
  Description of Artificial Sequence: Synthetic oligonucleotide
auuuaagcagaguucaaaagcccuu

SEQ ID NO: 101878 - RNA, 25 nt, Artificial Sequence
  Description of Artificial Sequence: Synthetic oligonucleotide
uuaagcagaguucaaaagcccuuca

SEQ ID NO: 101879 - RNA, 25 nt, Artificial Sequence
  Description of Artificial Sequence: Synthetic oligonucleotide
uaagcagaguucaaaagcccuucag

SEQ ID NO: 101880 - RNA, 25 nt, Artificial Sequence
  Description of Artificial Sequence: Synthetic oligonucleotide
agcagaguucaaaagcccuucagcg

SEQ ID NO: 101881 - RNA, 25 nt, Artificial Sequence
  Description of Artificial Sequence: Synthetic oligonucleotide
cucagggucugagugaagccgcucg

SEQ ID NO: 101882 - RNA, 25 nt, Artificial Sequence
  Description of Artificial Sequence: Synthetic oligonucleotide
caagcaacuacaucacgccagucaa

SEQ ID NO: 101883 - RNA, 25 nt, Artificial Sequence
  Description of Artificial Sequence: Synthetic oligonucleotide
aucaauggcagcuucuuggugcgug

SEQ ID NO: 101884 - RNA, 25 nt, Artificial Sequence
  Description of Artificial Sequence: Synthetic oligonucleotide
uuccagcccacauuggauucaucag

SEQ ID NO: 101885 - RNA, 25 nt, Artificial Sequence
  Description of Artificial Sequence: Synthetic oligonucleotide
cagcugagaauguggaauaccuaag

SEQ ID NO: 101886 - RNA, 25 nt, Artificial Sequence
  Description of Artificial Sequence: Synthetic oligonucleotide
aacguaucuccuaauuugaggcuca

SEQ ID NO: 101887 - RNA, 25 nt, Artificial Sequence
  Description of Artificial Sequence: Synthetic oligonucleotide
ccuaaaauaauuucucuacaauugg

SEQ ID NO: 101888 - RNA, 25 nt, Artificial Sequence
  Description of Artificial Sequence: Synthetic oligonucleotide
uggaagauucagcuaguuaggagcc

SEQ ID NO: 101889 - RNA, 25 nt, Artificial Sequence
  Description of Artificial Sequence: Synthetic oligonucleotide
uuaaacucuccuagucaauauccac

SEQ ID NO: 101890 - RNA, 25 nt, Artificial Sequence
  Description of Artificial Sequence: Synthetic oligonucleotide
cagccuacaguuauguucagucaca

SEQ ID NO: 101891 - RNA, 25 nt, Artificial Sequence
  Description of Artificial Sequence: Synthetic oligonucleotide
guuauguucagucacacacacauac

SEQ ID NO: 101892 - RNA, 25 nt, Artificial Sequence
  Description of Artificial Sequence: Synthetic oligonucleotide
cacauacaaaauguuccuuuugcuu

SEQ ID NO: 101893 - RNA, 25 nt, Artificial Sequence
  Description of Artificial Sequence: Synthetic oligonucleotide
uccuuuugcuuuuaaaguaauuuuu

SEQ ID NO: 101894 - RNA, 25 nt, Artificial Sequence
  Description of Artificial Sequence: Synthetic oligonucleotide
ugaccugugaagcaacagucaaugg

SEQ ID NO: 101895 - RNA, 25 nt, Artificial Sequence
  Description of Artificial Sequence: Synthetic oligonucleotide
cuaucucacacaucgacaaaccaau

SEQ ID NO: 101896 - RNA, 25 nt, Artificial Sequence
  Description of Artificial Sequence: Synthetic oligonucleotide
uguccucaauuguacugcuaccacu

SEQ ID NO: 101897 - RNA, 25 nt, Artificial Sequence
  Description of Artificial Sequence: Synthetic oligonucleotide
aaaccguagcuggcaagcggucuua

SEQ ID NO: 101898 - RNA, 25 nt, Artificial Sequence
  Description of Artificial Sequence: Synthetic oligonucleotide
uagcuggcaagcggucuuaccggcu

SEQ ID NO: 101899 - RNA, 25 nt, Artificial Sequence
  Description of Artificial Sequence: Synthetic oligonucleotide
uuguaugguuaaaagauggguuacc

SEQ ID NO: 101900 - RNA, 25 nt, Artificial Sequence
  Description of Artificial Sequence: Synthetic oligonucleotide
ugguuaaaagauggguuaccugcga

SEQ ID NO: 101901 - RNA, 25 nt, Artificial Sequence
  Description of Artificial Sequence: Synthetic oligonucleotide
cagggaauuauacaaucuugcugag

SEQ ID NO: 101902 - RNA, 25 nt, Artificial Sequence
  Description of Artificial Sequence: Synthetic oligonucleotide
acaaucuugcugagcauaaaacagu

SEQ ID NO: 101903 - RNA, 25 nt, Artificial Sequence
  Description of Artificial Sequence: Synthetic oligonucleotide
ccaauaaugaagaguccuuuauccu

SEQ ID NO: 101904 - RNA, 25 nt, Artificial Sequence
  Description of Artificial Sequence: Synthetic oligonucleotide
acuuuggauguuccaacgcaaguug

SEQ ID NO: 101905 - RNA, 25 nt, Artificial Sequence
  Description of Artificial Sequence: Synthetic oligonucleotide
aaugcuuccacuaaacugaaaccau

SEQ ID NO: 101906 - RNA, 25 nt, Artificial Sequence
  Description of Artificial Sequence: Synthetic oligonucleotide
gagaaaguuugacuuuguuaaauau

SEQ ID NO: 101907 - RNA, 25 nt, Artificial Sequence
  Description of Artificial Sequence: Synthetic oligonucleotide
aaagaacuacuguauauuaaaaguu

SEQ ID NO: 101908 - RNA, 25 nt, Artificial Sequence
  Description of Artificial Sequence: Synthetic oligonucleotide
uuagaaauacggguuuugacuuaac

SEQ ID NO: 101909 - RNA, 25 nt, Artificial Sequence
  Description of Artificial Sequence: Synthetic oligonucleotide
aacauggguacagcaaacucagcac

SEQ ID NO: 101910 - RNA, 25 nt, Artificial Sequence
  Description of Artificial Sequence: Synthetic oligonucleotide
aaagacacagaagaugcugaccuca

SEQ ID NO: 101911 - RNA, 25 nt, Artificial Sequence
  Description of Artificial Sequence: Synthetic oligonucleotide
uaguagggagguuuauucagaucgc

SEQ ID NO: 101912 - RNA, 25 nt, Artificial Sequence
  Description of Artificial Sequence: Synthetic oligonucleotide
gccuucugcagcaggguucugggau

SEQ ID NO: 101913 - RNA, 25 nt, Artificial Sequence
  Description of Artificial Sequence: Synthetic oligonucleotide
ggucugguacauauuggaaauuaug

SEQ ID NO: 101914 - RNA, 25 nt, Artificial Sequence
  Description of Artificial Sequence: Synthetic oligonucleotide
cuaguccuuccgauggaagcacuag

SEQ ID NO: 101915 - RNA, 25 nt, Artificial Sequence
  Description of Artificial Sequence: Synthetic oligonucleotide
ccagugaauauuguuuuuaugugga

SEQ ID NO: 101916 - RNA, 25 nt, Artificial Sequence
  Description of Artificial Sequence: Synthetic oligonucleotide
augaauucaaguuggaauugguaga

SEQ ID NO: 101917 - RNA, 25 nt, Artificial Sequence
  Description of Artificial Sequence: Synthetic oligonucleotide
caggacacagauuuagacuuggaga

SEQ ID NO: 101918 - RNA, 25 nt, Artificial Sequence
  Description of Artificial Sequence: Synthetic oligonucleotide
cucaaagcacaguuacaguauucca

SEQ ID NO: 101919 - RNA, 25 nt, Artificial Sequence
  Description of Artificial Sequence: Synthetic oligonucleotide
accacugccaccacugaugaauuaa

SEQ ID NO: 101920 - RNA, 25 nt, Artificial Sequence
  Description of Artificial Sequence: Synthetic oligonucleotide
gaaacuacuagugccacaucaucac

SEQ ID NO: 101921 - RNA, 25 nt, Artificial Sequence
  Description of Artificial Sequence: Synthetic oligonucleotide
aagucggacagccucaccaaacaga

SEQ ID NO: 101922 - RNA, 25 nt, Artificial Sequence
  Description of Artificial Sequence: Synthetic oligonucleotide
gaaagcgaaaaauggaacaugaugg

SEQ ID NO: 101923 - RNA, 25 nt, Artificial Sequence
  Description of Artificial Sequence: Synthetic oligonucleotide
cccucugauuuagcauguagacugc

SEQ ID NO: 101924 - RNA, 25 nt, Artificial Sequence
  Description of Artificial Sequence: Synthetic oligonucleotide
ugagcuauuuaaggaucuauuuaug

SEQ ID NO: 101925 - RNA, 25 nt, Artificial Sequence
  Description of Artificial Sequence: Synthetic oligonucleotide
aaaaggugaaaaagcacuauuauca

SEQ ID NO: 101926 - RNA, 25 nt, Artificial Sequence
  Description of Artificial Sequence: Synthetic oligonucleotide
gaaaaagcacuauuaucaguucugc

SEQ ID NO: 101927 - RNA, 25 nt, Artificial Sequence
  Description of Artificial Sequence: Synthetic oligonucleotide
ggcugaaaagaaagauuaaaccuac

SEQ ID NO: 101928 - RNA, 25 nt, Artificial Sequence
  Description of Artificial Sequence: Synthetic oligonucleotide
uaaacccuuauaauaaaauccuucu

SEQ ID NO: 101929 - RNA, 25 nt, Artificial Sequence
  Description of Artificial Sequence: Synthetic oligonucleotide
cauacuauuagccaaugcuguagac

SEQ ID NO: 101930 - RNA, 25 nt, Artificial Sequence
  Description of Artificial Sequence: Synthetic oligonucleotide
gacagaagcauuuugauaggaauag

SEQ ID NO: 101931 - RNA, 25 nt, Artificial Sequence
  Description of Artificial Sequence: Synthetic oligonucleotide
agagcaaauaagauaauggcccuga

SEQ ID NO: 101932 - RNA, 25 nt, Artificial Sequence
  Description of Artificial Sequence: Synthetic oligonucleotide
ccaacauuuuucucuuccucaagca

SEQ ID NO: 101933 - RNA, 25 nt, Artificial Sequence
  Description of Artificial Sequence: Synthetic oligonucleotide
uuaaguaugagaaaaguucagccca

SEQ ID NO: 101934 - RNA, 25 nt, Artificial Sequence
  Description of Artificial Sequence: Synthetic oligonucleotide
caggaauaaagauggcugcugaacc

SEQ ID NO: 101935 - RNA, 25 nt, Artificial Sequence
  Description of Artificial Sequence: Synthetic oligonucleotide
aauuugaaugaccaaguucucuuca

SEQ ID NO: 101936 - RNA, 25 nt, Artificial Sequence
  Description of Artificial Sequence: Synthetic oligonucleotide
auguauaaagauagccagccuagag

SEQ ID NO: 101937 - RNA, 25 nt, Artificial Sequence
  Description of Artificial Sequence: Synthetic oligonucleotide
ggcuguaacuaucucugugaagugu

SEQ ID NO: 101938 - RNA, 25 nt, Artificial Sequence
  Description of Artificial Sequence: Synthetic oligonucleotide
ucugugaagugugagaaaauuucaa

SEQ ID NO: 101939 - RNA, 25 nt, Artificial Sequence
  Description of Artificial Sequence: Synthetic oligonucleotide
ccuuuaaggaaaugaauccuccuga

SEQ ID NO: 101940 - RNA, 25 nt, Artificial Sequence
  Description of Artificial Sequence: Synthetic oligonucleotide
aaggauacaaaaagugacaucauau

SEQ ID NO: 101941 - RNA, 25 nt, Artificial Sequence
  Description of Artificial Sequence: Synthetic oligonucleotide
agaugcaauuugaaucuucaucaua

SEQ ID NO: 101942 - RNA, 25 nt, Artificial Sequence
  Description of Artificial Sequence: Synthetic oligonucleotide
guucaaaacgaagacuagcuauuaa

SEQ ID NO: 101943 - RNA, 25 nt, Artificial Sequence
  Description of Artificial Sequence: Synthetic oligonucleotide
gugaaaccucaucucuacuaaaaau

SEQ ID NO: 101944 - RNA, 25 nt, Artificial Sequence
  Description of Artificial Sequence: Synthetic oligonucleotide
acgaaagagaagcucuaucucgccu

SEQ ID NO: 101945 - RNA, 25 nt, Artificial Sequence
  Description of Artificial Sequence: Synthetic oligonucleotide
cuccacaagcgccuucgguccaguu

SEQ ID NO: 101946 - RNA, 25 nt, Artificial Sequence
  Description of Artificial Sequence: Synthetic oligonucleotide
gagaagauuccaaagauguagccgc

SEQ ID NO: 101947 - RNA, 25 nt, Artificial Sequence
  Description of Artificial Sequence: Synthetic oligonucleotide
aaucuggauucaaugaggagacuug

SEQ ID NO: 101948 - RNA, 25 nt, Artificial Sequence
  Description of Artificial Sequence: Synthetic oligonucleotide
agaacagauuugagaguagugagga

SEQ ID NO: 101949 - RNA, 25 nt, Artificial Sequence
  Description of Artificial Sequence: Synthetic oligonucleotide
ccagagcugugcagaugaguacaaa

SEQ ID NO: 101950 - RNA, 25 nt, Artificial Sequence
  Description of Artificial Sequence: Synthetic oligonucleotide
ccucagauuguuguuguuaaugggc

SEQ ID NO: 101951 - RNA, 25 nt, Artificial Sequence
  Description of Artificial Sequence: Synthetic oligonucleotide
cuauuuuaauuauuuuuaauuuauu

SEQ ID NO: 101952 - RNA, 25 nt, Artificial Sequence
  Description of Artificial Sequence: Synthetic oligonucleotide
uuuaauuuauuaauauuuaaauaug

SEQ ID NO: 101953 - RNA, 25 nt, Artificial Sequence
  Description of Artificial Sequence: Synthetic oligonucleotide
augcaguuugaauauccuuuguuuc

SEQ ID NO: 101954 - RNA, 25 nt, Artificial Sequence
  Description of Artificial Sequence: Synthetic oligonucleotide
caugcugcuggcgucuaaguguuug

SEQ ID NO: 101955 - RNA, 25 nt, Artificial Sequence
  Description of Artificial Sequence: Synthetic oligonucleotide
agaugugcauuucaccugugacaaa

SEQ ID NO: 101956 - RNA, 25 nt, Artificial Sequence
  Description of Artificial Sequence: Synthetic oligonucleotide
ucaaaaccugugccaggcugaauua

SEQ ID NO: 101957 - RNA, 25 nt, Artificial Sequence
  Description of Artificial Sequence: Synthetic oligonucleotide
gaauguggguagucauucuuacaau

SEQ ID NO: 101958 - RNA, 25 nt, Artificial Sequence
  Description of Artificial Sequence: Synthetic oligonucleotide
auguggguagucauucuuacaauug

SEQ ID NO: 101959 - RNA, 25 nt, Artificial Sequence
  Description of Artificial Sequence: Synthetic oligonucleotide
ugaaaaugagcaucagagaguguac

SEQ ID NO: 101960 - RNA, 25 nt, Artificial Sequence
  Description of Artificial Sequence: Synthetic oligonucleotide
uugcuuuucauguagaacucagcag

SEQ ID NO: 101961 - RNA, 25 nt, Artificial Sequence
  Description of Artificial Sequence: Synthetic oligonucleotide
uguauuucuauauuuauuuucagua

SEQ ID NO: 101962 - RNA, 25 nt, Artificial Sequence
  Description of Artificial Sequence: Synthetic oligonucleotide
uuugauuaauguuucuuaaauggaa

SEQ ID NO: 101963 - RNA, 25 nt, Artificial Sequence
  Description of Artificial Sequence: Synthetic oligonucleotide
caacguguauagugccuaaaauugu

SEQ ID NO: 101964 - RNA, 25 nt, Artificial Sequence
  Description of Artificial Sequence: Synthetic oligonucleotide
cauauccuuggcuacuaacaucugg

SEQ ID NO: 101965 - RNA, 25 nt, Artificial Sequence
  Description of Artificial Sequence: Synthetic oligonucleotide
uacuaacaucuggagacugugagcu

SEQ ID NO: 101966 - RNA, 25 nt, Artificial Sequence
  Description of Artificial Sequence: Synthetic oligonucleotide
cauaaguugugugcuuuuuauuaau

SEQ ID NO: 101967 - RNA, 25 nt, Artificial Sequence
  Description of Artificial Sequence: Synthetic oligonucleotide
gcaucauuuuggcucuucuuacauu

SEQ ID NO: 101968 - RNA, 25 nt, Artificial Sequence
  Description of Artificial Sequence: Synthetic oligonucleotide
gcucuucuuacauuuguaaaaaugu

SEQ ID NO: 101969 - RNA, 25 nt, Artificial Sequence
  Description of Artificial Sequence: Synthetic oligonucleotide
agauuaggucaucuuaauucauauu

SEQ ID NO: 101970 - RNA, 25 nt, Artificial Sequence
  Description of Artificial Sequence: Synthetic oligonucleotide
auggaauugaaagaacuaaucauga

SEQ ID NO: 101971 - RNA, 25 nt, Artificial Sequence
  Description of Artificial Sequence: Synthetic oligonucleotide
cacacucauuccuucugcucuuggg

SEQ ID NO: 101972 - RNA, 25 nt, Artificial Sequence
  Description of Artificial Sequence: Synthetic oligonucleotide
uguagagguaaccaguagcuuugag

SEQ ID NO: 101973 - RNA, 25 nt, Artificial Sequence
  Description of Artificial Sequence: Synthetic oligonucleotide
caaccacaugccacguaauauuuca

SEQ ID NO: 101974 - RNA, 25 nt, Artificial Sequence
  Description of Artificial Sequence: Synthetic oligonucleotide
ucggaaacaaguuauucucuucacu

SEQ ID NO: 101975 - RNA, 25 nt, Artificial Sequence
  Description of Artificial Sequence: Synthetic oligonucleotide
acucccaauaacuaaugcuaagaaa

SEQ ID NO: 101976 - RNA, 25 nt, Artificial Sequence
  Description of Artificial Sequence: Synthetic oligonucleotide
aaugcuaagaaaugcugaaaaucaa

SEQ ID NO: 101977 - RNA, 25 nt, Artificial Sequence
  Description of Artificial Sequence: Synthetic oligonucleotide
gucuuucucuaaauaugauuacuuu

SEQ ID NO: 101978 - RNA, 25 nt, Artificial Sequence
  Description of Artificial Sequence: Synthetic oligonucleotide
ugaauuucaggcauuuuguucuaca

SEQ ID NO: 101979 - RNA, 25 nt, Artificial Sequence
  Description of Artificial Sequence: Synthetic oligonucleotide
cgauucccucucacccgggacucuc

SEQ ID NO: 101980 - RNA, 25 nt, Artificial Sequence
  Description of Artificial Sequence: Synthetic oligonucleotide
aggaaagugaaccuuuaaaguaaag

SEQ ID NO: 101981 - RNA, 25 nt, Artificial Sequence
  Description of Artificial Sequence: Synthetic oligonucleotide
gaggcugcaugcucuggaagccugg

SEQ ID NO: 101982 - RNA, 25 nt, Artificial Sequence
  Description of Artificial Sequence: Synthetic oligonucleotide
ucucugaacagaaaacaaaagagag

SEQ ID NO: 101983 - RNA, 25 nt, Artificial Sequence
  Description of Artificial Sequence: Synthetic oligonucleotide
aacuuggcuguaaucaguuaugccg

SEQ ID NO: 101984 - RNA, 25 nt, Artificial Sequence
  Description of Artificial Sequence: Synthetic oligonucleotide
agaagccaaaauuaaaagaagucca

SEQ ID NO: 101985 - RNA, 25 nt, Artificial Sequence
  Description of Artificial Sequence: Synthetic oligonucleotide
auuaaaagaaguccaggugagguua

SEQ ID NO: 101986 - RNA, 25 nt, Artificial Sequence
  Description of Artificial Sequence: Synthetic oligonucleotide
gaauccggauuaucgggaagaggac

SEQ ID NO: 101987 - RNA, 25 nt, Artificial Sequence
  Description of Artificial Sequence: Synthetic oligonucleotide
aaugugacaucaaagcaaguauugu

SEQ ID NO: 101988 - RNA, 25 nt, Artificial Sequence
  Description of Artificial Sequence: Synthetic oligonucleotide
caucaaagcaaguauuguagcacuc

SEQ ID NO: 101989 - RNA, 25 nt, Artificial Sequence
  Description of Artificial Sequence: Synthetic oligonucleotide
agagagagaaaacaaaaccacaaau

SEQ ID NO: 101990 - RNA, 25 nt, Artificial Sequence
  Description of Artificial Sequence: Synthetic oligonucleotide
ucgcuguaguauuuaagcccauaca

SEQ ID NO: 101991 - RNA, 25 nt, Artificial Sequence
  Description of Artificial Sequence: Synthetic oligonucleotide
cgcuguaguauuuaagcccauacag

SEQ ID NO: 101992 - RNA, 25 nt, Artificial Sequence
  Description of Artificial Sequence: Synthetic oligonucleotide
auuuaagcccauacagaaaccuucc

SEQ ID NO: 101993 - RNA, 25 nt, Artificial Sequence
  Description of Artificial Sequence: Synthetic oligonucleotide
auuaaaauaaacaugguauaccuac

SEQ ID NO: 101994 - RNA, 25 nt, Artificial Sequence
  Description of Artificial Sequence: Synthetic oligonucleotide
cuguucugaucggccaguuuucgga

SEQ ID NO: 101995 - RNA, 25 nt, Artificial Sequence
  Description of Artificial Sequence: Synthetic oligonucleotide
aaauaauuugaacuuuggaacaggg

SEQ ID NO: 101996 - RNA, 25 nt, Artificial Sequence
  Description of Artificial Sequence: Synthetic oligonucleotide
ugcgaccuuaauuuaacuuuccagu

SEQ ID NO: 101997 - RNA, 25 nt, Artificial Sequence
  Description of Artificial Sequence: Synthetic oligonucleotide
cugagaaagcuaaaguuugguuuug

SEQ ID NO: 101998 - RNA, 25 nt, Artificial Sequence
  Description of Artificial Sequence: Synthetic oligonucleotide
aguaaagaugcuacuucccacugua

SEQ ID NO: 101999 - RNA, 25 nt, Artificial Sequence
  Description of Artificial Sequence: Synthetic oligonucleotide
cugcuuaauugcugauaccauauga

SEQ ID NO: 102000 - RNA, 25 nt, Artificial Sequence
  Description of Artificial Sequence: Synthetic oligonucleotide
uaccauaugaaugaaacaugggcug

SEQ ID NO: 102001 - RNA, 25 nt, Artificial Sequence
  Description of Artificial Sequence: Synthetic oligonucleotide
aacuuucuuauccaacuuuuucaua

SEQ ID NO: 102002 - RNA, 25 nt, Artificial Sequence
  Description of Artificial Sequence: Synthetic oligonucleotide
ccuugcaugacaucaugaggccgga

SEQ ID NO: 102003 - RNA, 25 nt, Artificial Sequence
  Description of Artificial Sequence: Synthetic oligonucleotide
ugaauuuguauaugacugcauuugu

SEQ ID NO: 102004 - RNA, 25 nt, Artificial Sequence
  Description of Artificial Sequence: Synthetic oligonucleotide
gaauccuaguagaauguuuacuacc

SEQ ID NO: 102005 - RNA, 25 nt, Artificial Sequence
  Description of Artificial Sequence: Synthetic oligonucleotide
gaaagggaagaauuuuuugaugaaa

SEQ ID NO: 102006 - RNA, 25 nt, Artificial Sequence
  Description of Artificial Sequence: Synthetic oligonucleotide
uaucggcaugccagugugugaauuu

SEQ ID NO: 102007 - RNA, 25 nt, Artificial Sequence
  Description of Artificial Sequence: Synthetic oligonucleotide
caccucauaguagagcaauguaugu

SEQ ID NO: 102008 - RNA, 25 nt, Artificial Sequence
  Description of Artificial Sequence: Synthetic oligonucleotide
ccagaauugccaaagcacauauaua

SEQ ID NO: 102009 - RNA, 25 nt, Artificial Sequence
  Description of Artificial Sequence: Synthetic oligonucleotide
uggugaucuggguaauaguuucucc

SEQ ID NO: 102010 - RNA, 25 nt, Artificial Sequence
  Description of Artificial Sequence: Synthetic oligonucleotide
gaucuggguaauaguuucuccaaau

SEQ ID NO: 102011 - RNA, 25 nt, Artificial Sequence
  Description of Artificial Sequence: Synthetic oligonucleotide
ggaugugaugaauacuuccuagaaa

SEQ ID NO: 102012 - RNA, 25 nt, Artificial Sequence
  Description of Artificial Sequence: Synthetic oligonucleotide
cauuuccacagcuacaccauauaug

SEQ ID NO: 102013 - RNA, 25 nt, Artificial Sequence
  Description of Artificial Sequence: Synthetic oligonucleotide
acagcuacaccauauaugaauggag

SEQ ID NO: 102014 - RNA, 25 nt, Artificial Sequence
  Description of Artificial Sequence: Synthetic oligonucleotide
ugcaguucuuacacgagaagaagau

SEQ ID NO: 102015 - RNA, 25 nt, Artificial Sequence
  Description of Artificial Sequence: Synthetic oligonucleotide
acgagaagaagaucauuuacaggga

SEQ ID NO: 102016 - RNA, 25 nt, Artificial Sequence
  Description of Artificial Sequence: Synthetic oligonucleotide
cgagaagaagaucauuuacagggac

SEQ ID NO: 102017 - RNA, 25 nt, Artificial Sequence
  Description of Artificial Sequence: Synthetic oligonucleotide
aagaagaucauuuacagggaccuga

SEQ ID NO: 102018 - RNA, 25 nt, Artificial Sequence
  Description of Artificial Sequence: Synthetic oligonucleotide
agaggaagagguguuugacugcauc

SEQ ID NO: 102019 - RNA, 25 nt, Artificial Sequence
  Description of Artificial Sequence: Synthetic oligonucleotide
gaggaagagguguuugacugcaucg

SEQ ID NO: 102020 - RNA, 25 nt, Artificial Sequence
  Description of Artificial Sequence: Synthetic oligonucleotide
cuacuuugagggcgaguucacaggg

SEQ ID NO: 102021 - RNA, 25 nt, Artificial Sequence
  Description of Artificial Sequence: Synthetic oligonucleotide
agggcaucuccuggcaccucugucc

SEQ ID NO: 102022 - RNA, 25 nt, Artificial Sequence
  Description of Artificial Sequence: Synthetic oligonucleotide
ggagugauaugguuugucuuuuuaa

SEQ ID NO: 102023 - RNA, 25 nt, Artificial Sequence
  Description of Artificial Sequence: Synthetic oligonucleotide
gagugauaugguuugucuuuuuaag

SEQ ID NO: 102024 - RNA, 25 nt, Artificial Sequence
  Description of Artificial Sequence: Synthetic oligonucleotide
ugcaguaaagauccuaaagguuguc

SEQ ID NO: 102025 - RNA, 25 nt, Artificial Sequence
  Description of Artificial Sequence: Synthetic oligonucleotide
aguaaagauccuaaagguugucgac

SEQ ID NO: 102026 - RNA, 25 nt, Artificial Sequence
  Description of Artificial Sequence: Synthetic oligonucleotide
ugacaaaggacaaccuggcaauugu

SEQ ID NO: 102027 - RNA, 25 nt, Artificial Sequence
  Description of Artificial Sequence: Synthetic oligonucleotide
gcaauugugacccaguggugcgagg

SEQ ID NO: 102028 - RNA, 25 nt, Artificial Sequence
  Description of Artificial Sequence: Synthetic oligonucleotide
aacaucauccauagagacaugaaau

SEQ ID NO: 102029 - RNA, 25 nt, Artificial Sequence
  Description of Artificial Sequence: Synthetic oligonucleotide
ugaaauccaacaauauauuucucca

SEQ ID NO: 102030 - RNA, 25 nt, Artificial Sequence
  Description of Artificial Sequence: Synthetic oligonucleotide
aacaauauauuucuccaugaaggcu

SEQ ID NO: 102031 - RNA, 25 nt, Artificial Sequence
  Description of Artificial Sequence: Synthetic oligonucleotide
aacaguaaagucacgcuggaguggu

SEQ ID NO: 102032 - RNA, 25 nt, Artificial Sequence
  Description of Artificial Sequence: Synthetic oligonucleotide
ugugaagaaaguaaaggaagagagg

SEQ ID NO: 102033 - RNA, 25 nt, Artificial Sequence
  Description of Artificial Sequence: Synthetic oligonucleotide
cuuccgagccauccuugcaucgggc

SEQ ID NO: 102034 - RNA, 25 nt, Artificial Sequence
  Description of Artificial Sequence: Synthetic oligonucleotide
aauggagguugaauauccuacugug

SEQ ID NO: 102035 - RNA, 25 nt, Artificial Sequence
  Description of Artificial Sequence: Synthetic oligonucleotide
ggagguugaauauccuacuguguaa

SEQ ID NO: 102036 - RNA, 25 nt, Artificial Sequence
  Description of Artificial Sequence: Synthetic oligonucleotide
auuuugaguuuucccuuguagugua

SEQ ID NO: 102037 - RNA, 25 nt, Artificial Sequence
  Description of Artificial Sequence: Synthetic oligonucleotide
uauccuguuuguucuuuguugauug

SEQ ID NO: 102038 - RNA, 25 nt, Artificial Sequence
  Description of Artificial Sequence: Synthetic oligonucleotide
ccuguuuguucuuuguugauugaaa

SEQ ID NO: 102039 - RNA, 25 nt, Artificial Sequence
  Description of Artificial Sequence: Synthetic oligonucleotide
cucuacagccuucuuuuucuuccau

SEQ ID NO: 102040 - RNA, 25 nt, Artificial Sequence
  Description of Artificial Sequence: Synthetic oligonucleotide
ucuuccauagcuaaucuuccuucua

SEQ ID NO: 102041 - RNA, 25 nt, Artificial Sequence
  Description of Artificial Sequence: Synthetic oligonucleotide
auaaucuuccuguugaaugcuucau

SEQ ID NO: 102042 - RNA, 25 nt, Artificial Sequence
  Description of Artificial Sequence: Synthetic oligonucleotide
uaaucuuccuguugaaugcuucaug

SEQ ID NO: 102043 - RNA, 25 nt, Artificial Sequence
  Description of Artificial Sequence: Synthetic oligonucleotide
cuucaugacuugaauucuacuuuga

SEQ ID NO: 102044 - RNA, 25 nt, Artificial Sequence
  Description of Artificial Sequence: Synthetic oligonucleotide
aagagggagagaagcaacuacagac

SEQ ID NO: 102045 - RNA, 25 nt, Artificial Sequence
  Description of Artificial Sequence: Synthetic oligonucleotide
cgucuccuaccagaccaaggucaac

SEQ ID NO: 102046 - RNA, 25 nt, Artificial Sequence
  Description of Artificial Sequence: Synthetic oligonucleotide
gaucaaucggcccgacuaucucgac

SEQ ID NO: 102047 - RNA, 25 nt, Artificial Sequence
  Description of Artificial Sequence: Synthetic oligonucleotide
ggacgaacauccaaccuucccaaac

SEQ ID NO: 102048 - RNA, 25 nt, Artificial Sequence
  Description of Artificial Sequence: Synthetic oligonucleotide
agggucggaacccaagcuuagaacu

SEQ ID NO: 102049 - RNA, 25 nt, Artificial Sequence
  Description of Artificial Sequence: Synthetic oligonucleotide
ucggaacccaagcuuagaacuuuaa

SEQ ID NO: 102050 - RNA, 25 nt, Artificial Sequence
  Description of Artificial Sequence: Synthetic oligonucleotide
acccaagcuuagaacuuuaagcaac

SEQ ID NO: 102051 - RNA, 25 nt, Artificial Sequence
  Description of Artificial Sequence: Synthetic oligonucleotide
gaacuuuaagcaacaagaccaccac

SEQ ID NO: 102052 - RNA, 25 nt, Artificial Sequence
  Description of Artificial Sequence: Synthetic oligonucleotide
acuauucaguggcgagaaauaaagu

SEQ ID NO: 102053 - RNA, 25 nt, Artificial Sequence
  Description of Artificial Sequence: Synthetic oligonucleotide
cuauucaguggcgagaaauaaaguu

SEQ ID NO: 102054 - RNA, 25 nt, Artificial Sequence
  Description of Artificial Sequence: Synthetic oligonucleotide
aaacacagauaacaggaaaugaucc

SEQ ID NO: 102055 - RNA, 25 nt, Artificial Sequence
  Description of Artificial Sequence: Synthetic oligonucleotide
cuuaagaaaagagaagaaaugaaac

SEQ ID NO: 102056 - RNA, 25 nt, Artificial Sequence
  Description of Artificial Sequence: Synthetic oligonucleotide
cugaaggaguguguuuccauccucc

SEQ ID NO: 102057 - RNA, 25 nt, Artificial Sequence
  Description of Artificial Sequence: Synthetic oligonucleotide
ucaccgcgggacugaaaaucuuuga

SEQ ID NO: 102058 - RNA, 25 nt, Artificial Sequence
  Description of Artificial Sequence: Synthetic oligonucleotide
agcagaaauaagcgugccguucagg

SEQ ID NO: 102059 - RNA, 25 nt, Artificial Sequence
  Description of Artificial Sequence: Synthetic oligonucleotide
aagcgugccguucaggguccagaag

SEQ ID NO: 102060 - RNA, 25 nt, Artificial Sequence
  Description of Artificial Sequence: Synthetic oligonucleotide
agaaacagucacucaagacugcuug

SEQ ID NO: 102061 - RNA, 25 nt, Artificial Sequence
  Description of Artificial Sequence: Synthetic oligonucleotide
agaggaagaagguccaugucuuugg

SEQ ID NO: 102062 - RNA, 25 nt, Artificial Sequence
  Description of Artificial Sequence: Synthetic oligonucleotide
uguauucaaaauaugccugaaacac

SEQ ID NO: 102063 - RNA, 25 nt, Artificial Sequence
  Description of Artificial Sequence: Synthetic oligonucleotide
auuuuccucccuuucucuguaccuc

SEQ ID NO: 102064 - RNA, 25 nt, Artificial Sequence
  Description of Artificial Sequence: Synthetic oligonucleotide
caaagaaagauagagcaagacaaga

SEQ ID NO: 102065 - RNA, 25 nt, Artificial Sequence
  Description of Artificial Sequence: Synthetic oligonucleotide
aagaaagauagagcaagacaagaaa

SEQ ID NO: 102066 - RNA, 25 nt, Artificial Sequence
  Description of Artificial Sequence: Synthetic oligonucleotide
gaaagcauuuguuuguacaagaucc

SEQ ID NO: 102067 - RNA, 25 nt, Artificial Sequence
  Description of Artificial Sequence: Synthetic oligonucleotide
ugaguuaaacgaacguacuugcaga

SEQ ID NO: 102068 - RNA, 25 nt, Artificial Sequence
  Description of Artificial Sequence: Synthetic oligonucleotide
acugauacagaacgaucgauacaga

SEQ ID NO: 102069 - RNA, 25 nt, Artificial Sequence
  Description of Artificial Sequence: Synthetic oligonucleotide
auauuauauauauauaaaaauaaau

SEQ ID NO: 102070 - RNA, 25 nt, Artificial Sequence
  Description of Artificial Sequence: Synthetic oligonucleotide
auuauauauauauaaaaauaaauau

SEQ ID NO: 102071 - RNA, 25 nt, Artificial Sequence
  Description of Artificial Sequence: Synthetic oligonucleotide
ucacuggauguauuugacugcugug

SEQ ID NO: 102072 - RNA, 25 nt, Artificial Sequence
  Description of Artificial Sequence: Synthetic oligonucleotide
cagggaagaggaggagaugagagac

SEQ ID NO: 102073 - RNA, 25 nt, Artificial Sequence
  Description of Artificial Sequence: Synthetic oligonucleotide
augaucuuuuuuuugucccacuugg

SEQ ID NO: 102074 - RNA, 27 nt, Artificial Sequence
  Description of Artificial Sequence: Synthetic oligonucleotide
ggccgugaacuccucaucaaaauaccu

SEQ ID NO: 102075 - RNA, 27 nt, Artificial Sequence
  Description of Artificial Sequence: Synthetic oligonucleotide
uggugugauggugaucaucugggccgu

SEQ ID NO: 102076 - RNA, 27 nt, Artificial Sequence
  Description of Artificial Sequence: Synthetic oligonucleotide
aaacccgcaggauaguuuucuucccua

SEQ ID NO: 102077 - RNA, 27 nt, Artificial Sequence
  Description of Artificial Sequence: Synthetic oligonucleotide
caaacuggaugaaauaaauuaaaaccc

SEQ ID NO: 102078 - RNA, 27 nt, Artificial Sequence
  Description of Artificial Sequence: Synthetic oligonucleotide
agaaguccuuaacauuucccuacguga

SEQ ID NO: 102079 - RNA, 27 nt, Artificial Sequence
  Description of Artificial Sequence: Synthetic oligonucleotide
cucugucccacuggguaaacccuggcc

SEQ ID NO: 102080 - RNA, 27 nt, Artificial Sequence
  Description of Artificial Sequence: Synthetic oligonucleotide
cacaauaacaaauuuaaaccuugcucc

SEQ ID NO: 102081 - RNA, 27 nt, Artificial Sequence
  Description of Artificial Sequence: Synthetic oligonucleotide
aaaugcauuugaacaacauaauacaca

SEQ ID NO: 102082 - RNA, 27 nt, Artificial Sequence
  Description of Artificial Sequence: Synthetic oligonucleotide
ggcuuuccugucacaaagauuaaaaac

SEQ ID NO: 102083 - RNA, 27 nt, Artificial Sequence
  Description of Artificial Sequence: Synthetic oligonucleotide
agggcuuuccugucacaaagauuaaaa

SEQ ID NO: 102084 - RNA, 27 nt, Artificial Sequence
  Description of Artificial Sequence: Synthetic oligonucleotide
ggccaugcugggagacauaagcagcag

SEQ ID NO: 102085 - RNA, 27 nt, Artificial Sequence
  Description of Artificial Sequence: Synthetic oligonucleotide
ucagggagaagcuucugaaacacuucu

SEQ ID NO: 102086 - RNA, 27 nt, Artificial Sequence
  Description of Artificial Sequence: Synthetic oligonucleotide
aagggcuucuuccuuauugauggucag

SEQ ID NO: 102087 - RNA, 27 nt, Artificial Sequence
  Description of Artificial Sequence: Synthetic oligonucleotide
ugaagggcuucuuccuuauugaugguc

SEQ ID NO: 102088 - RNA, 27 nt, Artificial Sequence
  Description of Artificial Sequence: Synthetic oligonucleotide
cgcugaagggcuucuuccuuauugaug

SEQ ID NO: 102089 - RNA, 27 nt, Artificial Sequence
  Description of Artificial Sequence: Synthetic oligonucleotide
gccgcugaagggcuucuuccuuauuga

SEQ ID NO: 102090 - RNA, 27 nt, Artificial Sequence
  Description of Artificial Sequence: Synthetic oligonucleotide
acuggccgcugaagggcuucuuccuua

SEQ ID NO: 102091 - RNA, 27 nt, Artificial Sequence
  Description of Artificial Sequence: Synthetic oligonucleotide
cggagcuuuucaccuuuaguuaugcuu

SEQ ID NO: 102092 - RNA, 27 nt, Artificial Sequence
  Description of Artificial Sequence: Synthetic oligonucleotide
ccggagcuuuucaccuuuaguuaugcu

SEQ ID NO: 102093 - RNA, 27 nt, Artificial Sequence
  Description of Artificial Sequence: Synthetic oligonucleotide
cagacuguugacuggcgugauguaguu

SEQ ID NO: 102094 - RNA, 27 nt, Artificial Sequence
  Description of Artificial Sequence: Synthetic oligonucleotide
cuuuugaacucugcuuaaauccagugg

SEQ ID NO: 102095 - RNA, 27 nt, Artificial Sequence
  Description of Artificial Sequence: Synthetic oligonucleotide
gcuuuugaacucugcuuaaauccagug

SEQ ID NO: 102096 - RNA, 27 nt, Artificial Sequence
  Description of Artificial Sequence: Synthetic oligonucleotide
agggcuuuugaacucugcuuaaaucca

SEQ ID NO: 102097 - RNA, 27 nt, Artificial Sequence
  Description of Artificial Sequence: Synthetic oligonucleotide
aagggcuuuugaacucugcuuaaaucc

SEQ ID NO: 102098 - RNA, 27 nt, Artificial Sequence
  Description of Artificial Sequence: Synthetic oligonucleotide
ugaagggcuuuugaacucugcuuaaau

SEQ ID NO: 102099 - RNA, 27 nt, Artificial Sequence
  Description of Artificial Sequence: Synthetic oligonucleotide
cugaagggcuuuugaacucugcuuaaa

SEQ ID NO: 102100 - RNA, 27 nt, Artificial Sequence
  Description of Artificial Sequence: Synthetic oligonucleotide
cgcugaagggcuuuugaacucugcuua

SEQ ID NO: 102101 - RNA, 27 nt, Artificial Sequence
  Description of Artificial Sequence: Synthetic oligonucleotide
cgagcggcuucacucagacccugaggc

SEQ ID NO: 102102 - RNA, 27 nt, Artificial Sequence
  Description of Artificial Sequence: Synthetic oligonucleotide
uugacuggcgugauguaguugcuuggg

SEQ ID NO: 102103 - RNA, 27 nt, Artificial Sequence
  Description of Artificial Sequence: Synthetic oligonucleotide
cacgcaccaagaagcugccauugaucc

SEQ ID NO: 102104 - RNA, 27 nt, Artificial Sequence
  Description of Artificial Sequence: Synthetic oligonucleotide
cugaugaauccaaugugggcuggaauc

SEQ ID NO: 102105 - RNA, 27 nt, Artificial Sequence
  Description of Artificial Sequence: Synthetic oligonucleotide
cuuagguauuccacauucucagcugug

SEQ ID NO: 102106 - RNA, 27 nt, Artificial Sequence
  Description of Artificial Sequence: Synthetic oligonucleotide
ugagccucaaauuaggagauacguuuu

SEQ ID NO: 102107 - RNA, 27 nt, Artificial Sequence
  Description of Artificial Sequence: Synthetic oligonucleotide
ccaauuguagagaaauuauuuuaggaa

SEQ ID NO: 102108 - RNA, 27 nt, Artificial Sequence
  Description of Artificial Sequence: Synthetic oligonucleotide
ggcuccuaacuagcugaaucuuccaau

SEQ ID NO: 102109 - RNA, 27 nt, Artificial Sequence
  Description of Artificial Sequence: Synthetic oligonucleotide
guggauauugacuaggagaguuuaaaa

SEQ ID NO: 102110 - RNA, 27 nt, Artificial Sequence
  Description of Artificial Sequence: Synthetic oligonucleotide
ugugacugaacauaacuguaggcugaa

SEQ ID NO: 102111 - RNA, 27 nt, Artificial Sequence
  Description of Artificial Sequence: Synthetic oligonucleotide
guaugugugugugacugaacauaacug

SEQ ID NO: 102112 - RNA, 27 nt, Artificial Sequence
  Description of Artificial Sequence: Synthetic oligonucleotide
aagcaaaaggaacauuuuguaugugug

SEQ ID NO: 102113 - RNA, 27 nt, Artificial Sequence
  Description of Artificial Sequence: Synthetic oligonucleotide
aaaaauuacuuuaaaagcaaaaggaac

SEQ ID NO: 102114 - RNA, 27 nt, Artificial Sequence
  Description of Artificial Sequence: Synthetic oligonucleotide
ccauugacuguugcuucacaggucaga

SEQ ID NO: 102115 - RNA, 27 nt, Artificial Sequence
  Description of Artificial Sequence: Synthetic oligonucleotide
auugguuugucgaugugugagauaguu

SEQ ID NO: 102116 - RNA, 27 nt, Artificial Sequence
  Description of Artificial Sequence: Synthetic oligonucleotide
agugguagcaguacaauugaggacaag

SEQ ID NO: 102117 - RNA, 27 nt, Artificial Sequence
  Description of Artificial Sequence: Synthetic oligonucleotide
uaagaccgcuugccagcuacgguuuca

SEQ ID NO: 102118 - RNA, 27 nt, Artificial Sequence
  Description of Artificial Sequence: Synthetic oligonucleotide
agccgguaagaccgcuugccagcuacg

SEQ ID NO: 102119 - RNA, 27 nt, Artificial Sequence
  Description of Artificial Sequence: Synthetic oligonucleotide
gguaacccaucuuuuaaccauacaacu

SEQ ID NO: 102120 - RNA, 27 nt, Artificial Sequence
  Description of Artificial Sequence: Synthetic oligonucleotide
ucgcagguaacccaucuuuuaaccaua

SEQ ID NO: 102121 - RNA, 27 nt, Artificial Sequence
  Description of Artificial Sequence: Synthetic oligonucleotide
cucagcaagauuguauaauucccugca

SEQ ID NO: 102122 - RNA, 27 nt, Artificial Sequence
  Description of Artificial Sequence: Synthetic oligonucleotide
acuguuuuaugcucagcaagauuguau

SEQ ID NO: 102123 - RNA, 27 nt, Artificial Sequence
  Description of Artificial Sequence: Synthetic oligonucleotide
aggauaaaggacucuucauuauuggaa

SEQ ID NO: 102124 - RNA, 27 nt, Artificial Sequence
  Description of Artificial Sequence: Synthetic oligonucleotide
caacuugcguuggaacauccaaagugu

SEQ ID NO: 102125 - RNA, 27 nt, Artificial Sequence
  Description of Artificial Sequence: Synthetic oligonucleotide
augguuucaguuuaguggaagcauuua

SEQ ID NO: 102126 - RNA, 27 nt, Artificial Sequence
  Description of Artificial Sequence: Synthetic oligonucleotide
auauuuaacaaagucaaacuuucucac

SEQ ID NO: 102127 - RNA, 27 nt, Artificial Sequence
  Description of Artificial Sequence: Synthetic oligonucleotide
aacuuuuaauauacaguaguucuuuuc

SEQ ID NO: 102128 - RNA, 27 nt, Artificial Sequence
  Description of Artificial Sequence: Synthetic oligonucleotide
guuaagucaaaacccguauuucuaaag

SEQ ID NO: 102129 - RNA, 27 nt, Artificial Sequence
  Description of Artificial Sequence: Synthetic oligonucleotide
gugcugaguuugcuguacccauguuga

SEQ ID NO: 102130 - RNA, 27 nt, Artificial Sequence
  Description of Artificial Sequence: Synthetic oligonucleotide
ugaggucagcaucuucugugucuuuac

SEQ ID NO: 102131 - RNA, 27 nt, Artificial Sequence
  Description of Artificial Sequence: Synthetic oligonucleotide
gcgaucugaauaaaccucccuacuagc

SEQ ID NO: 102132 - RNA, 27 nt, Artificial Sequence
  Description of Artificial Sequence: Synthetic oligonucleotide
aucccagaacccugcugcagaaggcca

SEQ ID NO: 102133 - RNA, 27 nt, Artificial Sequence
  Description of Artificial Sequence: Synthetic oligonucleotide
cauaauuuccaauauguaccagaccuu

SEQ ID NO: 102134 - RNA, 27 nt, Artificial Sequence
  Description of Artificial Sequence: Synthetic oligonucleotide
cuagugcuuccaucggaaggacuaggu

SEQ ID NO: 102135 - RNA, 27 nt, Artificial Sequence
  Description of Artificial Sequence: Synthetic oligonucleotide
uccacauaaaaacaauauucacuggga

SEQ ID NO: 102136 - RNA, 27 nt, Artificial Sequence
  Description of Artificial Sequence: Synthetic oligonucleotide
ucuaccaauuccaacuugaauucauug

SEQ ID NO: 102137 - RNA, 27 nt, Artificial Sequence
  Description of Artificial Sequence: Synthetic oligonucleotide
ucuccaagucuaaaucuguguccugag

SEQ ID NO: 102138 - RNA, 27 nt, Artificial Sequence
  Description of Artificial Sequence: Synthetic oligonucleotide
uggaauacuguaacugugcuuugagga

SEQ ID NO: 102139 - RNA, 27 nt, Artificial Sequence
  Description of Artificial Sequence: Synthetic oligonucleotide
uuaauucaucagugguggcagugguag

SEQ ID NO: 102140 - RNA, 27 nt, Artificial Sequence
  Description of Artificial Sequence: Synthetic oligonucleotide
gugaugauguggcacuaguaguuucuu

SEQ ID NO: 102141 - RNA, 27 nt, Artificial Sequence
  Description of Artificial Sequence: Synthetic oligonucleotide
ucuguuuggugaggcuguccgacuuug

SEQ ID NO: 102142 - RNA, 27 nt, Artificial Sequence
  Description of Artificial Sequence: Synthetic oligonucleotide
ccaucauguuccauuuuucgcuuucuc

SEQ ID NO: 102143 - RNA, 27 nt, Artificial Sequence
  Description of Artificial Sequence: Synthetic oligonucleotide
gcagucuacaugcuaaaucagagggua

SEQ ID NO: 102144 - RNA, 27 nt, Artificial Sequence
  Description of Artificial Sequence: Synthetic oligonucleotide
cauaaauagauccuuaaauagcucaaa

SEQ ID NO: 102145 - RNA, 27 nt, Artificial Sequence
  Description of Artificial Sequence: Synthetic oligonucleotide
ugauaauagugcuuuuucaccuuuuuc

SEQ ID NO: 102146 - RNA, 27 nt, Artificial Sequence
  Description of Artificial Sequence: Synthetic oligonucleotide
gcagaacugauaauagugcuuuuucac

SEQ ID NO: 102147 - RNA, 27 nt, Artificial Sequence
  Description of Artificial Sequence: Synthetic oligonucleotide
guagguuuaaucuuucuuuucagccau

SEQ ID NO: 102148 - RNA, 27 nt, Artificial Sequence
  Description of Artificial Sequence: Synthetic oligonucleotide
agaaggauuuuauuauaaggguuuaau

SEQ ID NO: 102149 - RNA, 27 nt, Artificial Sequence
  Description of Artificial Sequence: Synthetic oligonucleotide
gucuacagcauuggcuaauaguaugaa

SEQ ID NO: 102150 - RNA, 27 nt, Artificial Sequence
  Description of Artificial Sequence: Synthetic oligonucleotide
cuauuccuaucaaaaugcuucugucua

SEQ ID NO: 102151 - RNA, 27 nt, Artificial Sequence
  Description of Artificial Sequence: Synthetic oligonucleotide
ucagggccauuaucuuauuugcucuau

SEQ ID NO: 102152 - RNA, 27 nt, Artificial Sequence
  Description of Artificial Sequence: Synthetic oligonucleotide
ugcuugaggaagagaaaaauguugguc

SEQ ID NO: 102153 - RNA, 27 nt, Artificial Sequence
  Description of Artificial Sequence: Synthetic oligonucleotide
ugggcugaacuuuucucauacuuaaag

SEQ ID NO: 102154 - RNA, 27 nt, Artificial Sequence
  Description of Artificial Sequence: Synthetic oligonucleotide
gguucagcagccaucuuuauuccugcg

SEQ ID NO: 102155 - RNA, 27 nt, Artificial Sequence
  Description of Artificial Sequence: Synthetic oligonucleotide
ugaagagaacuuggucauucaaauuuc

SEQ ID NO: 102156 - RNA, 27 nt, Artificial Sequence
  Description of Artificial Sequence: Synthetic oligonucleotide
cucuaggcuggcuaucuuuauacauac

SEQ ID NO: 102157 - RNA, 27 nt, Artificial Sequence
  Description of Artificial Sequence: Synthetic oligonucleotide
acacuucacagagauaguuacagccau

SEQ ID NO: 102158 - RNA, 27 nt, Artificial Sequence
  Description of Artificial Sequence: Synthetic oligonucleotide
uugaaauuuucucacacuucacagaga

SEQ ID NO: 102159 - RNA, 27 nt, Artificial Sequence
  Description of Artificial Sequence: Synthetic oligonucleotide
ucaggaggauucauuuccuuaaaggaa

SEQ ID NO: 102160 - RNA, 27 nt, Artificial Sequence
  Description of Artificial Sequence: Synthetic oligonucleotide
auaugaugucacuuuuuguauccuuga

SEQ ID NO: 102161 - RNA, 27 nt, Artificial Sequence
  Description of Artificial Sequence: Synthetic oligonucleotide
uaugaugaagauucaaauugcaucuua

SEQ ID NO: 102162 - RNA, 27 nt, Artificial Sequence
  Description of Artificial Sequence: Synthetic oligonucleotide
uuaauagcuagucuucguuuugaacag

SEQ ID NO: 102163 - RNA, 27 nt, Artificial Sequence
  Description of Artificial Sequence: Synthetic oligonucleotide
auuuuuaguagagaugagguuucacca

SEQ ID NO: 102164 - RNA, 27 nt, Artificial Sequence
  Description of Artificial Sequence: Synthetic oligonucleotide
aggcgagauagagcuucucuuucguuc

SEQ ID NO: 102165 - RNA, 27 nt, Artificial Sequence
  Description of Artificial Sequence: Synthetic oligonucleotide
aacuggaccgaaggcgcuuguggagaa

SEQ ID NO: 102166 - RNA, 27 nt, Artificial Sequence
  Description of Artificial Sequence: Synthetic oligonucleotide
gcggcuacaucuuuggaaucuucuccu

SEQ ID NO: 102167 - RNA, 27 nt, Artificial Sequence
  Description of Artificial Sequence: Synthetic oligonucleotide
caagucuccucauugaauccagauugg

SEQ ID NO: 102168 - RNA, 27 nt, Artificial Sequence
  Description of Artificial Sequence: Synthetic oligonucleotide
uccucacuacucucaaaucuguucugg

SEQ ID NO: 102169 - RNA, 27 nt, Artificial Sequence
  Description of Artificial Sequence: Synthetic oligonucleotide
uuuguacucaucugcacagcucuggcu

SEQ ID NO: 102170 - RNA, 27 nt, Artificial Sequence
  Description of Artificial Sequence: Synthetic oligonucleotide
gcccauuaacaacaacaaucugaggug

SEQ ID NO: 102171 - RNA, 27 nt, Artificial Sequence
  Description of Artificial Sequence: Synthetic oligonucleotide
aauaaauuaaaaauaauuaaaauagug

SEQ ID NO: 102172 - RNA, 27 nt, Artificial Sequence
  Description of Artificial Sequence: Synthetic oligonucleotide
cauauuuaaauauuaauaaauuaaaaa

SEQ ID NO: 102173 - RNA, 27 nt, Artificial Sequence
  Description of Artificial Sequence: Synthetic oligonucleotide
gaaacaaaggauauucaaacugcauag

SEQ ID NO: 102174 - RNA, 27 nt, Artificial Sequence
  Description of Artificial Sequence: Synthetic oligonucleotide
caaacacuuagacgccagcagcauggg

SEQ ID NO: 102175 - RNA, 27 nt, Artificial Sequence
  Description of Artificial Sequence: Synthetic oligonucleotide
uuugucacaggugaaaugcacaucuga

SEQ ID NO: 102176 - RNA, 27 nt, Artificial Sequence
  Description of Artificial Sequence: Synthetic oligonucleotide
uaauucagccuggcacagguuuugauc

SEQ ID NO: 102177 - RNA, 27 nt, Artificial Sequence
  Description of Artificial Sequence: Synthetic oligonucleotide
auuguaagaaugacuacccacauucac

SEQ ID NO: 102178 - RNA, 27 nt, Artificial Sequence
  Description of Artificial Sequence: Synthetic oligonucleotide
caauuguaagaaugacuacccacauuc

SEQ ID NO: 102179 - RNA, 27 nt, Artificial Sequence
  Description of Artificial Sequence: Synthetic oligonucleotide
guacacucucugaugcucauuuucaua

SEQ ID NO: 102180 - RNA, 27 nt, Artificial Sequence
  Description of Artificial Sequence: Synthetic oligonucleotide
cugcugaguucuacaugaaaagcaaau

SEQ ID NO: 102181 - RNA, 27 nt, Artificial Sequence
  Description of Artificial Sequence: Synthetic oligonucleotide
uacugaaaauaaauauagaaauacaac

SEQ ID NO: 102182 - RNA, 27 nt, Artificial Sequence
  Description of Artificial Sequence: Synthetic oligonucleotide
uuccauuuaagaaacauuaaucaaaac

SEQ ID NO: 102183 - RNA, 27 nt, Artificial Sequence
  Description of Artificial Sequence: Synthetic oligonucleotide
acaauuuuaggcacuauacacguuguu

SEQ ID NO: 102184 - RNA, 27 nt, Artificial Sequence
  Description of Artificial Sequence: Synthetic oligonucleotide
ccagauguuaguagccaaggauauggu

SEQ ID NO: 102185 - RNA, 27 nt, Artificial Sequence
  Description of Artificial Sequence: Synthetic oligonucleotide
agcucacagucuccagauguuaguagc

SEQ ID NO: 102186 - RNA, 27 nt, Artificial Sequence
  Description of Artificial Sequence: Synthetic oligonucleotide
auuaauaaaaagcacacaacuuauggc

SEQ ID NO: 102187 - RNA, 27 nt, Artificial Sequence
  Description of Artificial Sequence: Synthetic oligonucleotide
aauguaagaagagccaaaaugaugcau

SEQ ID NO: 102188 - RNA, 27 nt, Artificial Sequence
  Description of Artificial Sequence: Synthetic oligonucleotide
acauuuuuacaaauguaagaagagcca

SEQ ID NO: 102189 - RNA, 27 nt, Artificial Sequence
  Description of Artificial Sequence: Synthetic oligonucleotide
aauaugaauuaagaugaccuaaucugu

SEQ ID NO: 102190 - RNA, 27 nt, Artificial Sequence
  Description of Artificial Sequence: Synthetic oligonucleotide
ucaugauuaguucuuucaauuccaucc

SEQ ID NO: 102191 - RNA, 27 nt, Artificial Sequence
  Description of Artificial Sequence: Synthetic oligonucleotide
cccaagagcagaaggaaugagugugca

SEQ ID NO: 102192 - RNA, 27 nt, Artificial Sequence
  Description of Artificial Sequence: Synthetic oligonucleotide
cucaaagcuacugguuaccucuacacc

SEQ ID NO: 102193 - RNA, 27 nt, Artificial Sequence
  Description of Artificial Sequence: Synthetic oligonucleotide
ugaaauauuacguggcaugugguuggg

SEQ ID NO: 102194 - RNA, 27 nt, Artificial Sequence
  Description of Artificial Sequence: Synthetic oligonucleotide
agugaagagaauaacuuguuuccgaag

SEQ ID NO: 102195 - RNA, 27 nt, Artificial Sequence
  Description of Artificial Sequence: Synthetic oligonucleotide
uuucuuagcauuaguuauugggaguga

SEQ ID NO: 102196 - RNA, 27 nt, Artificial Sequence
  Description of Artificial Sequence: Synthetic oligonucleotide
uugauuuucagcauuucuuagcauuag

SEQ ID NO: 102197 - RNA, 27 nt, Artificial Sequence
  Description of Artificial Sequence: Synthetic oligonucleotide
aaaguaaucauauuuagagaaagacag

SEQ ID NO: 102198 - RNA, 27 nt, Artificial Sequence
  Description of Artificial Sequence: Synthetic oligonucleotide
uguagaacaaaaugccugaaauucagc

SEQ ID NO: 102199 - RNA, 27 nt, Artificial Sequence
  Description of Artificial Sequence: Synthetic oligonucleotide
gagagucccgggugagagggaaucgcc

SEQ ID NO: 102200 - RNA, 27 nt, Artificial Sequence
  Description of Artificial Sequence: Synthetic oligonucleotide
cuuuacuuuaaagguucacuuuccuug

SEQ ID NO: 102201 - RNA, 27 nt, Artificial Sequence
  Description of Artificial Sequence: Synthetic oligonucleotide
ccaggcuuccagagcaugcagccuccu

SEQ ID NO: 102202 - RNA, 27 nt, Artificial Sequence
  Description of Artificial Sequence: Synthetic oligonucleotide
cucucuuuuguuuucuguucagagaaa

SEQ ID NO: 102203 - RNA, 27 nt, Artificial Sequence
  Description of Artificial Sequence: Synthetic oligonucleotide
cggcauaacugauuacagccaaguuca

SEQ ID NO: 102204 - RNA, 27 nt, Artificial Sequence
  Description of Artificial Sequence: Synthetic oligonucleotide
uggacuucuuuuaauuuuggcuucuuc

SEQ ID NO: 102205 - RNA, 27 nt, Artificial Sequence
  Description of Artificial Sequence: Synthetic oligonucleotide
uaaccucaccuggacuucuuuuaauuu

SEQ ID NO: 102206 - RNA, 27 nt, Artificial Sequence
  Description of Artificial Sequence: Synthetic oligonucleotide
guccucuucccgauaauccggauucag

SEQ ID NO: 102207 - RNA, 27 nt, Artificial Sequence
  Description of Artificial Sequence: Synthetic oligonucleotide
acaauacuugcuuugaugucacauuaa

SEQ ID NO: 102208 - RNA, 27 nt, Artificial Sequence
  Description of Artificial Sequence: Synthetic oligonucleotide
gagugcuacaauacuugcuuugauguc

SEQ ID NO: 102209 - RNA, 27 nt, Artificial Sequence
  Description of Artificial Sequence: Synthetic oligonucleotide
auuugugguuuuguuuucucucucucu

SEQ ID NO: 102210 - RNA, 27 nt, Artificial Sequence
  Description of Artificial Sequence: Synthetic oligonucleotide
uguaugggcuuaaauacuacagcgagg

SEQ ID NO: 102211 - RNA, 27 nt, Artificial Sequence
  Description of Artificial Sequence: Synthetic oligonucleotide
cuguaugggcuuaaauacuacagcgag

SEQ ID NO: 102212 - RNA, 27 nt, Artificial Sequence
  Description of Artificial Sequence: Synthetic oligonucleotide
ggaagguuucuguaugggcuuaaauac

SEQ ID NO: 102213 - RNA, 27 nt, Artificial Sequence
  Description of Artificial Sequence: Synthetic oligonucleotide
guagguauaccauguuuauuuuaauac

SEQ ID NO: 102214 - RNA, 27 nt, Artificial Sequence
  Description of Artificial Sequence: Synthetic oligonucleotide
uccgaaaacuggccgaucagaacagcc

SEQ ID NO: 102215 - RNA, 27 nt, Artificial Sequence
  Description of Artificial Sequence: Synthetic oligonucleotide
cccuguuccaaaguucaaauuauuugu

SEQ ID NO: 102216 - RNA, 27 nt, Artificial Sequence
  Description of Artificial Sequence: Synthetic oligonucleotide
acuggaaaguuaaauuaaggucgcaau

SEQ ID NO: 102217 - RNA, 27 nt, Artificial Sequence
  Description of Artificial Sequence: Synthetic oligonucleotide
caaaaccaaacuuuagcuuucucagcc

SEQ ID NO: 102218 - RNA, 27 nt, Artificial Sequence
  Description of Artificial Sequence: Synthetic oligonucleotide
uacagugggaaguagcaucuuuacuuu

SEQ ID NO: 102219 - RNA, 27 nt, Artificial Sequence
  Description of Artificial Sequence: Synthetic oligonucleotide
ucauaugguaucagcaauuaagcagua

SEQ ID NO: 102220 - RNA, 27 nt, Artificial Sequence
  Description of Artificial Sequence: Synthetic oligonucleotide
cagcccauguuucauucauaugguauc

SEQ ID NO: 102221 - RNA, 27 nt, Artificial Sequence
  Description of Artificial Sequence: Synthetic oligonucleotide
uaugaaaaaguuggauaagaaaguugg

SEQ ID NO: 102222 - RNA, 27 nt, Artificial Sequence
  Description of Artificial Sequence: Synthetic oligonucleotide
uccggccucaugaugucaugcaaggcu

SEQ ID NO: 102223 - RNA, 27 nt, Artificial Sequence
  Description of Artificial Sequence: Synthetic oligonucleotide
acaaaugcagucauauacaaauucagg

SEQ ID NO: 102224 - RNA, 27 nt, Artificial Sequence
  Description of Artificial Sequence: Synthetic oligonucleotide
gguaguaaacauucuacuaggauucuu

SEQ ID NO: 102225 - RNA, 27 nt, Artificial Sequence
  Description of Artificial Sequence: Synthetic oligonucleotide
uuucaucaaaaaauucuucccuuucug

SEQ ID NO: 102226 - RNA, 27 nt, Artificial Sequence
  Description of Artificial Sequence: Synthetic oligonucleotide
aaauucacacacuggcaugccgauagc

SEQ ID NO: 102227 - RNA, 27 nt, Artificial Sequence
  Description of Artificial Sequence: Synthetic oligonucleotide
acauacauugcucuacuaugaggugaa

SEQ ID NO: 102228 - RNA, 27 nt, Artificial Sequence
  Description of Artificial Sequence: Synthetic oligonucleotide
uauauaugugcuuuggcaauucuggug

SEQ ID NO: 102229 - RNA, 27 nt, Artificial Sequence
  Description of Artificial Sequence: Synthetic oligonucleotide
ggagaaacuauuacccagaucaccacu

SEQ ID NO: 102230 - RNA, 27 nt, Artificial Sequence
  Description of Artificial Sequence: Synthetic oligonucleotide
auuuggagaaacuauuacccagaucac

SEQ ID NO: 102231 - RNA, 27 nt, Artificial Sequence
  Description of Artificial Sequence: Synthetic oligonucleotide
uuucuaggaaguauucaucacauccac

SEQ ID NO: 102232 - RNA, 27 nt, Artificial Sequence
  Description of Artificial Sequence: Synthetic oligonucleotide
cauauaugguguagcuguggaaaugcg

SEQ ID NO: 102233 - RNA, 27 nt, Artificial Sequence
  Description of Artificial Sequence: Synthetic oligonucleotide
cuccauucauauaugguguagcugugg

SEQ ID NO: 102234 - RNA, 27 nt, Artificial Sequence
  Description of Artificial Sequence: Synthetic oligonucleotide
aucuucuucucguguaagaacugcagc

SEQ ID NO: 102235 - RNA, 27 nt, Artificial Sequence
  Description of Artificial Sequence: Synthetic oligonucleotide
ucccuguaaaugaucuucuucucgugu

SEQ ID NO: 102236 - RNA, 27 nt, Artificial Sequence
  Description of Artificial Sequence: Synthetic oligonucleotide
gucccuguaaaugaucuucuucucgug

SEQ ID NO: 102237 - RNA, 27 nt, Artificial Sequence
  Description of Artificial Sequence: Synthetic oligonucleotide
ucaggucccuguaaaugaucuucuucu

SEQ ID NO: 102238 - RNA, 27 nt, Artificial Sequence
  Description of Artificial Sequence: Synthetic oligonucleotide
gaugcagucaaacaccucuuccucugu

SEQ ID NO: 102239 - RNA, 27 nt, Artificial Sequence
  Description of Artificial Sequence: Synthetic oligonucleotide
cgaugcagucaaacaccucuuccucug

SEQ ID NO: 102240 - RNA, 27 nt, Artificial Sequence
  Description of Artificial Sequence: Synthetic oligonucleotide
cccugugaacucgcccucaaaguagcg

SEQ ID NO: 102241 - RNA, 27 nt, Artificial Sequence
  Description of Artificial Sequence: Synthetic oligonucleotide
ggacagaggugccaggagaugcccuca

SEQ ID NO: 102242 - RNA, 27 nt, Artificial Sequence
  Description of Artificial Sequence: Synthetic oligonucleotide
uuaaaaagacaaaccauaucacuccuu

SEQ ID NO: 102243 - RNA, 27 nt, Artificial Sequence
  Description of Artificial Sequence: Synthetic oligonucleotide
cuuaaaaagacaaaccauaucacuccu

SEQ ID NO: 102244 - RNA, 27 nt, Artificial Sequence
  Description of Artificial Sequence: Synthetic oligonucleotide
gacaaccuuuaggaucuuuacugcaac

SEQ ID NO: 102245 - RNA, 27 nt, Artificial Sequence
  Description of Artificial Sequence: Synthetic oligonucleotide
gucgacaaccuuuaggaucuuuacugc

SEQ ID NO: 102246 - RNA, 27 nt, Artificial Sequence
  Description of Artificial Sequence: Synthetic oligonucleotide
acaauugccagguuguccuuugucaug

SEQ ID NO: 102247 - RNA, 27 nt, Artificial Sequence
  Description of Artificial Sequence: Synthetic oligonucleotide
ccucgcaccacugggucacaauugcca

SEQ ID NO: 102248 - RNA, 27 nt, Artificial Sequence
  Description of Artificial Sequence: Synthetic oligonucleotide
auuucaugucucuauggaugauguucu

SEQ ID NO: 102249 - RNA, 27 nt, Artificial Sequence
  Description of Artificial Sequence: Synthetic oligonucleotide
uggagaaauauauuguuggauuucaug

SEQ ID NO: 102250 - RNA, 27 nt, Artificial Sequence
  Description of Artificial Sequence: Synthetic oligonucleotide
agccuucauggagaaauauauuguugg

SEQ ID NO: 102251 - RNA, 27 nt, Artificial Sequence
  Description of Artificial Sequence: Synthetic oligonucleotide
accacuccagcgugacuuuacuguugc

SEQ ID NO: 102252 - RNA, 27 nt, Artificial Sequence
  Description of Artificial Sequence: Synthetic oligonucleotide
ccucucuuccuuuacuuucuucacaca

SEQ ID NO: 102253 - RNA, 27 nt, Artificial Sequence
  Description of Artificial Sequence: Synthetic oligonucleotide
gcccgaugcaaggauggcucggaagcg

SEQ ID NO: 102254 - RNA, 27 nt, Artificial Sequence
  Description of Artificial Sequence: Synthetic oligonucleotide
cacaguaggauauucaaccuccauuuc

SEQ ID NO: 102255 - RNA, 27 nt, Artificial Sequence
  Description of Artificial Sequence: Synthetic oligonucleotide
uuacacaguaggauauucaaccuccau

SEQ ID NO: 102256 - RNA, 27 nt, Artificial Sequence
  Description of Artificial Sequence: Synthetic oligonucleotide
uacacuacaagggaaaacucaaaaucu

SEQ ID NO: 102257 - RNA, 27 nt, Artificial Sequence
  Description of Artificial Sequence: Synthetic oligonucleotide
caaucaacaaagaacaaacaggauaaa

SEQ ID NO: 102258 - RNA, 27 nt, Artificial Sequence
  Description of Artificial Sequence: Synthetic oligonucleotide
uuucaaucaacaaagaacaaacaggau

SEQ ID NO: 102259 - RNA, 27 nt, Artificial Sequence
  Description of Artificial Sequence: Synthetic oligonucleotide
auggaagaaaaagaaggcuguagagaa

SEQ ID NO: 102260 - RNA, 27 nt, Artificial Sequence
  Description of Artificial Sequence: Synthetic oligonucleotide
uagaaggaagauuagcuauggaagaaa

SEQ ID NO: 102261 - RNA, 27 nt, Artificial Sequence
  Description of Artificial Sequence: Synthetic oligonucleotide
augaagcauucaacaggaagauuauuu

SEQ ID NO: 102262 - RNA, 27 nt, Artificial Sequence
  Description of Artificial Sequence: Synthetic oligonucleotide
caugaagcauucaacaggaagauuauu

SEQ ID NO: 102263 - RNA, 27 nt, Artificial Sequence
  Description of Artificial Sequence: Synthetic oligonucleotide
ucaaaguagaauucaagucaugaagca

SEQ ID NO: 102264 - RNA, 27 nt, Artificial Sequence
  Description of Artificial Sequence: Synthetic oligonucleotide
gucuguaguugcuucucucccucuuag

SEQ ID NO: 102265 - RNA, 27 nt, Artificial Sequence
  Description of Artificial Sequence: Synthetic oligonucleotide
guugaccuuggucugguaggagacggc

SEQ ID NO: 102266 - RNA, 27 nt, Artificial Sequence
  Description of Artificial Sequence: Synthetic oligonucleotide
gucgagauagucgggccgauugaucuc

SEQ ID NO: 102267 - RNA, 27 nt, Artificial Sequence
  Description of Artificial Sequence: Synthetic oligonucleotide
guuugggaagguuggauguucguccuc

SEQ ID NO: 102268 - RNA, 27 nt, Artificial Sequence
  Description of Artificial Sequence: Synthetic oligonucleotide
aguucuaagcuuggguuccgacccuaa

SEQ ID NO: 102269 - RNA, 27 nt, Artificial Sequence
  Description of Artificial Sequence: Synthetic oligonucleotide
uuaaaguucuaagcuuggguuccgacc

SEQ ID NO: 102270 - RNA, 27 nt, Artificial Sequence
  Description of Artificial Sequence: Synthetic oligonucleotide
guugcuuaaaguucuaagcuuggguuc

SEQ ID NO: 102271 - RNA, 27 nt, Artificial Sequence
  Description of Artificial Sequence: Synthetic oligonucleotide
gugguggucuuguugcuuaaaguucua

SEQ ID NO: 102272 - RNA, 27 nt, Artificial Sequence
  Description of Artificial Sequence: Synthetic oligonucleotide
acuuuauuucucgccacugaauaguag

SEQ ID NO: 102273 - RNA, 27 nt, Artificial Sequence
  Description of Artificial Sequence: Synthetic oligonucleotide
aacuuuauuucucgccacugaauagua

SEQ ID NO: 102274 - RNA, 27 nt, Artificial Sequence
  Description of Artificial Sequence: Synthetic oligonucleotide
ggaucauuuccuguuaucuguguuugu

SEQ ID NO: 102275 - RNA, 27 nt, Artificial Sequence
  Description of Artificial Sequence: Synthetic oligonucleotide
guuucauuucuucucuuuucuuaaggc

SEQ ID NO: 102276 - RNA, 27 nt, Artificial Sequence
  Description of Artificial Sequence: Synthetic oligonucleotide
ggaggauggaaacacacuccuucaguu

SEQ ID NO: 102277 - RNA, 27 nt, Artificial Sequence
  Description of Artificial Sequence: Synthetic oligonucleotide
ucaaagauuuucagucccgcggugaca

SEQ ID NO: 102278 - RNA, 27 nt, Artificial Sequence
  Description of Artificial Sequence: Synthetic oligonucleotide
ccugaacggcacgcuuauuucugcugu

SEQ ID NO: 102279 - RNA, 27 nt, Artificial Sequence
  Description of Artificial Sequence: Synthetic oligonucleotide
cuucuggacccugaacggcacgcuuau

SEQ ID NO: 102280 - RNA, 27 nt, Artificial Sequence
  Description of Artificial Sequence: Synthetic oligonucleotide
caagcagucuugagugacuguuucuuc

SEQ ID NO: 102281 - RNA, 27 nt, Artificial Sequence
  Description of Artificial Sequence: Synthetic oligonucleotide
ccaaagacauggaccuucuuccucuga

SEQ ID NO: 102282 - RNA, 27 nt, Artificial Sequence
  Description of Artificial Sequence: Synthetic oligonucleotide
guguuucaggcauauuuugaauacauc

SEQ ID NO: 102283 - RNA, 27 nt, Artificial Sequence
  Description of Artificial Sequence: Synthetic oligonucleotide
gagguacagagaaagggaggaaaauag

SEQ ID NO: 102284 - RNA, 27 nt, Artificial Sequence
  Description of Artificial Sequence: Synthetic oligonucleotide
ucuugucuugcucuaucuuucuuuggu

SEQ ID NO: 102285 - RNA, 27 nt, Artificial Sequence
  Description of Artificial Sequence: Synthetic oligonucleotide
uuucuugucuugcucuaucuuucuuug

SEQ ID NO: 102286 - RNA, 27 nt, Artificial Sequence
  Description of Artificial Sequence: Synthetic oligonucleotide
ggaucuuguacaaacaaaugcuuucuc

SEQ ID NO: 102287 - RNA, 27 nt, Artificial Sequence
  Description of Artificial Sequence: Synthetic oligonucleotide
ucugcaaguacguucguuuaacucaag

SEQ ID NO: 102288 - RNA, 27 nt, Artificial Sequence
  Description of Artificial Sequence: Synthetic oligonucleotide
ucuguaucgaucguucuguaucagucu

SEQ ID NO: 102289 - RNA, 27 nt, Artificial Sequence
  Description of Artificial Sequence: Synthetic oligonucleotide
auuuauuuuuauauauauauaauauau

SEQ ID NO: 102290 - RNA, 27 nt, Artificial Sequence
  Description of Artificial Sequence: Synthetic oligonucleotide
auauuuauuuuuauauauauauaauau

SEQ ID NO: 102291 - RNA, 27 nt, Artificial Sequence
  Description of Artificial Sequence: Synthetic oligonucleotide
cacagcagucaaauacauccagugaag

SEQ ID NO: 102292 - RNA, 27 nt, Artificial Sequence
  Description of Artificial Sequence: Synthetic oligonucleotide
gucucucaucuccuccucuucccuguc

SEQ ID NO: 102293 - RNA, 27 nt, Artificial Sequence
  Description of Artificial Sequence: Synthetic oligonucleotide
ccaagugggacaaaaaaaagaucaugc

SEQ ID NO: 102294 - RNA, 14 nt, Artificial Sequence
  Description of Artificial Sequence: Synthetic oligonucleotide
guauuuugaugagg

SEQ ID NO: 102295 - RNA, 12 nt, Artificial Sequence
  Description of Artificial Sequence: Synthetic oligonucleotide
ggcccagaugau

SEQ ID NO: 102296 - RNA, 14 nt, Artificial Sequence
  Description of Artificial Sequence: Synthetic oligonucleotide
gggaagaaaacuau

SEQ ID NO: 102297 - RNA, 15 nt, Artificial Sequence
  Description of Artificial Sequence: Synthetic oligonucleotide
guuuuaauuuauuuc

SEQ ID NO: 102298 - RNA, 12 nt, Artificial Sequence
  Description of Artificial Sequence: Synthetic oligonucleotide
acguagggaaau

SEQ ID NO: 102299 - RNA, 12 nt, Artificial Sequence
  Description of Artificial Sequence: Synthetic oligonucleotide
ccaggguuuacc

SEQ ID NO: 102300 - RNA, 11 nt, Artificial Sequence
  Description of Artificial Sequence: Synthetic oligonucleotide
agcaagguuua

SEQ ID NO: 102301 - RNA, 12 nt, Artificial Sequence
  Description of Artificial Sequence: Synthetic oligonucleotide
uguauuauguug

SEQ ID NO: 102302 - RNA, 15 nt, Artificial Sequence
  Description of Artificial Sequence: Synthetic oligonucleotide
uuuuaaucuuuguga

SEQ ID NO: 102303 - RNA, 14 nt, Artificial Sequence
  Description of Artificial Sequence: Synthetic oligonucleotide
uuaaucuuugugac

SEQ ID NO: 102304 - RNA, 13 nt, Artificial Sequence
  Description of Artificial Sequence: Synthetic oligonucleotide
gcugcuuaugucu

SEQ ID NO: 102305 - RNA, 14 nt, Artificial Sequence
  Description of Artificial Sequence: Synthetic oligonucleotide
aaguguuucagaag

SEQ ID NO: 102306 - RNA, 13 nt, Artificial Sequence
  Description of Artificial Sequence: Synthetic oligonucleotide
gaccaucaauaag

SEQ ID NO: 102307 - RNA, 13 nt, Artificial Sequence
  Description of Artificial Sequence: Synthetic oligonucleotide
ccaucaauaagga

SEQ ID NO: 102308 - RNA, 14 nt, Artificial Sequence
  Description of Artificial Sequence: Synthetic oligonucleotide
ucaauaaggaagaa

SEQ ID NO: 102309 - RNA, 14 nt, Artificial Sequence
  Description of Artificial Sequence: Synthetic oligonucleotide
aauaaggaagaagc

SEQ ID NO: 102310 - RNA, 13 nt, Artificial Sequence
  Description of Artificial Sequence: Synthetic oligonucleotide
aggaagaagcccu

SEQ ID NO: 102311 - RNA, 13 nt, Artificial Sequence
  Description of Artificial Sequence: Synthetic oligonucleotide
gcauaacuaaagg

SEQ ID NO: 102312 - RNA, 14 nt, Artificial Sequence
  Description of Artificial Sequence: Synthetic oligonucleotide
cauaacuaaaggug

SEQ ID NO: 102313 - RNA, 12 nt, Artificial Sequence
  Description of Artificial Sequence: Synthetic oligonucleotide
cuacaucacgcc

SEQ ID NO: 102314 - RNA, 12 nt, Artificial Sequence
  Description of Artificial Sequence: Synthetic oligonucleotide
acuggauuuaag

SEQ ID NO: 102315 - RNA, 12 nt, Artificial Sequence
  Description of Artificial Sequence: Synthetic oligonucleotide
cuggauuuaagc

SEQ ID NO: 102316 - RNA, 13 nt, Artificial Sequence
  Description of Artificial Sequence: Synthetic oligonucleotide
gauuuaagcagag

SEQ ID NO: 102317 - RNA, 13 nt, Artificial Sequence
  Description of Artificial Sequence: Synthetic oligonucleotide
auuuaagcagagu

SEQ ID NO: 102318 - RNA, 13 nt, Artificial Sequence
  Description of Artificial Sequence: Synthetic oligonucleotide
uuaagcagaguuc

SEQ ID NO: 102319 - RNA, 13 nt, Artificial Sequence
  Description of Artificial Sequence: Synthetic oligonucleotide
uaagcagaguuca

SEQ ID NO: 102320 - RNA, 14 nt, Artificial Sequence
  Description of Artificial Sequence: Synthetic oligonucleotide
agcagaguucaaaa

SEQ ID NO: 102321 - RNA, 12 nt, Artificial Sequence
  Description of Artificial Sequence: Synthetic oligonucleotide
cucagggucuga

SEQ ID NO: 102322 - RNA, 13 nt, Artificial Sequence
  Description of Artificial Sequence: Synthetic oligonucleotide
caagcaacuacau

SEQ ID NO: 102323 - RNA, 12 nt, Artificial Sequence
  Description of Artificial Sequence: Synthetic oligonucleotide
aucaauggcagc

SEQ ID NO: 102324 - RNA, 11 nt, Artificial Sequence
  Description of Artificial Sequence: Synthetic oligonucleotide
uuccagcccac

SEQ ID NO: 102325 - RNA, 12 nt, Artificial Sequence
  Description of Artificial Sequence: Synthetic oligonucleotide
cagcugagaaug

SEQ ID NO: 102326 - RNA, 13 nt, Artificial Sequence
  Description of Artificial Sequence: Synthetic oligonucleotide
aacguaucuccua

SEQ ID NO: 102327 - RNA, 14 nt, Artificial Sequence
  Description of Artificial Sequence: Synthetic oligonucleotide
ccuaaaauaauuuc

SEQ ID NO: 102328 - RNA, 13 nt, Artificial Sequence
  Description of Artificial Sequence: Synthetic oligonucleotide
uggaagauucagc

SEQ ID NO: 102329 - RNA, 12 nt, Artificial Sequence
  Description of Artificial Sequence: Synthetic oligonucleotide
uuaaacucuccu

SEQ ID NO: 102330 - RNA, 12 nt, Artificial Sequence
  Description of Artificial Sequence: Synthetic oligonucleotide
cagccuacaguu

SEQ ID NO: 102331 - RNA, 13 nt, Artificial Sequence
  Description of Artificial Sequence: Synthetic oligonucleotide
guuauguucaguc

SEQ ID NO: 102332 - RNA, 13 nt, Artificial Sequence
  Description of Artificial Sequence: Synthetic oligonucleotide
cacauacaaaaug

SEQ ID NO: 102333 - RNA, 9 nt, Artificial Sequence
  Description of Artificial Sequence: Synthetic oligonucleotide
uccuuuugc

SEQ ID NO: 102334 - RNA, 12 nt, Artificial Sequence
  Description of Artificial Sequence: Synthetic oligonucleotide
ugaccugugaag

SEQ ID NO: 102335 - RNA, 12 nt, Artificial Sequence
  Description of Artificial Sequence: Synthetic oligonucleotide
cuaucucacaca

SEQ ID NO: 102336 - RNA, 13 nt, Artificial Sequence
  Description of Artificial Sequence: Synthetic oligonucleotide
uguccucaauugu

SEQ ID NO: 102337 - RNA, 12 nt, Artificial Sequence
  Description of Artificial Sequence: Synthetic oligonucleotide
aaaccguagcug

SEQ ID NO: 102338 - RNA, 12 nt, Artificial Sequence
  Description of Artificial Sequence: Synthetic oligonucleotide
uagcuggcaagc

SEQ ID NO: 102339 - RNA, 14 nt, Artificial Sequence
  Description of Artificial Sequence: Synthetic oligonucleotide
uuguaugguuaaaa

SEQ ID NO: 102340 - RNA, 14 nt, Artificial Sequence
  Description of Artificial Sequence: Synthetic oligonucleotide
ugguuaaaagaugg

SEQ ID NO: 102341 - RNA, 13 nt, Artificial Sequence
  Description of Artificial Sequence: Synthetic oligonucleotide
cagggaauuauac

SEQ ID NO: 102342 - RNA, 12 nt, Artificial Sequence
  Description of Artificial Sequence: Synthetic oligonucleotide
acaaucuugcug

SEQ ID NO: 102343 - RNA, 13 nt, Artificial Sequence
  Description of Artificial Sequence: Synthetic oligonucleotide
ccaauaaugaaga

SEQ ID NO: 102344 - RNA, 13 nt, Artificial Sequence
  Description of Artificial Sequence: Synthetic oligonucleotide
acuuuggauguuc

SEQ ID NO: 102345 - RNA, 12 nt, Artificial Sequence
  Description of Artificial Sequence: Synthetic oligonucleotide
aaugcuuccacu

SEQ ID NO: 102346 - RNA, 11 nt, Artificial Sequence
  Description of Artificial Sequence: Synthetic oligonucleotide
gagaaaguuug

SEQ ID NO: 102347 - RNA, 11 nt, Artificial Sequence
  Description of Artificial Sequence: Synthetic oligonucleotide
aaagaacuacu

SEQ ID NO: 102348 - RNA, 12 nt, Artificial Sequence
  Description of Artificial Sequence: Synthetic oligonucleotide
uuagaaauacgg

SEQ ID NO: 102349 - RNA, 12 nt, Artificial Sequence
  Description of Artificial Sequence: Synthetic oligonucleotide
aacauggguaca

SEQ ID NO: 102350 - RNA, 14 nt, Artificial Sequence
  Description of Artificial Sequence: Synthetic oligonucleotide
aaagacacagaaga

SEQ ID NO: 102351 - RNA, 11 nt, Artificial Sequence
  Description of Artificial Sequence: Synthetic oligonucleotide
uaguagggagg

SEQ ID NO: 102352 - RNA, 12 nt, Artificial Sequence
  Description of Artificial Sequence: Synthetic oligonucleotide
gccuucugcagc

SEQ ID NO: 102353 - RNA, 10 nt, Artificial Sequence
  Description of Artificial Sequence: Synthetic oligonucleotide
ggucugguac

SEQ ID NO: 102354 - RNA, 12 nt, Artificial Sequence
  Description of Artificial Sequence: Synthetic oligonucleotide
cuaguccuuccg

SEQ ID NO: 102355 - RNA, 12 nt, Artificial Sequence
  Description of Artificial Sequence: Synthetic oligonucleotide
ccagugaauauu

SEQ ID NO: 102356 - RNA, 13 nt, Artificial Sequence
  Description of Artificial Sequence: Synthetic oligonucleotide
augaauucaaguu

SEQ ID NO: 102357 - RNA, 12 nt, Artificial Sequence
  Description of Artificial Sequence: Synthetic oligonucleotide
caggacacagau

SEQ ID NO: 102358 - RNA, 12 nt, Artificial Sequence
  Description of Artificial Sequence: Synthetic oligonucleotide
cucaaagcacag

SEQ ID NO: 102359 - RNA, 10 nt, Artificial Sequence
  Description of Artificial Sequence: Synthetic oligonucleotide
accacugcca

SEQ ID NO: 102360 - RNA, 13 nt, Artificial Sequence
  Description of Artificial Sequence: Synthetic oligonucleotide
gaaacuacuagug

SEQ ID NO: 102361 - RNA, 12 nt, Artificial Sequence
  Description of Artificial Sequence: Synthetic oligonucleotide
aagucggacagc

SEQ ID NO: 102362 - RNA, 13 nt, Artificial Sequence
  Description of Artificial Sequence: Synthetic oligonucleotide
gaaagcgaaaaau

SEQ ID NO: 102363 - RNA, 13 nt, Artificial Sequence
  Description of Artificial Sequence: Synthetic oligonucleotide
cccucugauuuag

SEQ ID NO: 102364 - RNA, 12 nt, Artificial Sequence
  Description of Artificial Sequence: Synthetic oligonucleotide
ugagcuauuuaa

SEQ ID NO: 102365 - RNA, 13 nt, Artificial Sequence
  Description of Artificial Sequence: Synthetic oligonucleotide
aaaaggugaaaaa

SEQ ID NO: 102366 - RNA, 14 nt, Artificial Sequence
  Description of Artificial Sequence: Synthetic oligonucleotide
gaaaaagcacuauu

SEQ ID NO: 102367 - RNA, 12 nt, Artificial Sequence
  Description of Artificial Sequence: Synthetic oligonucleotide
ggcugaaaagaa

SEQ ID NO: 102368 - RNA, 12 nt, Artificial Sequence
  Description of Artificial Sequence: Synthetic oligonucleotide
uaaacccuuaua

SEQ ID NO: 102369 - RNA, 13 nt, Artificial Sequence
  Description of Artificial Sequence: Synthetic oligonucleotide
cauacuauuagcc

SEQ ID NO: 102370 - RNA, 12 nt, Artificial Sequence
  Description of Artificial Sequence: Synthetic oligonucleotide
gacagaagcauu

SEQ ID NO: 102371 - RNA, 14 nt, Artificial Sequence
  Description of Artificial Sequence: Synthetic oligonucleotide
agagcaaauaagau

SEQ ID NO: 102372 - RNA, 14 nt, Artificial Sequence
  Description of Artificial Sequence: Synthetic oligonucleotide
ccaacauuuuucuc

SEQ ID NO: 102373 - RNA, 15 nt, Artificial Sequence
  Description of Artificial Sequence: Synthetic oligonucleotide
uuaaguaugagaaaa

SEQ ID NO: 102374 - RNA, 14 nt, Artificial Sequence
  Description of Artificial Sequence: Synthetic oligonucleotide
caggaauaaagaug

SEQ ID NO: 102375 - RNA, 13 nt, Artificial Sequence
  Description of Artificial Sequence: Synthetic oligonucleotide
aauuugaaugacc

SEQ ID NO: 102376 - RNA, 14 nt, Artificial Sequence
  Description of Artificial Sequence: Synthetic oligonucleotide
auguauaaagauag

SEQ ID NO: 102377 - RNA, 12 nt, Artificial Sequence
  Description of Artificial Sequence: Synthetic oligonucleotide
ggcuguaacuau

SEQ ID NO: 102378 - RNA, 11 nt, Artificial Sequence
  Description of Artificial Sequence: Synthetic oligonucleotide
ucugugaagug

SEQ ID NO: 102379 - RNA, 14 nt, Artificial Sequence
  Description of Artificial Sequence: Synthetic oligonucleotide
ccuuuaaggaaaug

SEQ ID NO: 102380 - RNA, 13 nt, Artificial Sequence
  Description of Artificial Sequence: Synthetic oligonucleotide
aaggauacaaaaa

SEQ ID NO: 102381 - RNA, 12 nt, Artificial Sequence
  Description of Artificial Sequence: Synthetic oligonucleotide
agaugcaauuug

SEQ ID NO: 102382 - RNA, 12 nt, Artificial Sequence
  Description of Artificial Sequence: Synthetic oligonucleotide
guucaaaacgaa

SEQ ID NO: 102383 - RNA, 11 nt, Artificial Sequence
  Description of Artificial Sequence: Synthetic oligonucleotide
gugaaaccuca

SEQ ID NO: 102384 - RNA, 13 nt, Artificial Sequence
  Description of Artificial Sequence: Synthetic oligonucleotide
acgaaagagaagc

SEQ ID NO: 102385 - RNA, 12 nt, Artificial Sequence
  Description of Artificial Sequence: Synthetic oligonucleotide
cuccacaagcgc

SEQ ID NO: 102386 - RNA, 14 nt, Artificial Sequence
  Description of Artificial Sequence: Synthetic oligonucleotide
gagaagauuccaaa

SEQ ID NO: 102387 - RNA, 13 nt, Artificial Sequence
  Description of Artificial Sequence: Synthetic oligonucleotide
aaucuggauucaa

SEQ ID NO: 102388 - RNA, 13 nt, Artificial Sequence
  Description of Artificial Sequence: Synthetic oligonucleotide
agaacagauuuga

SEQ ID NO: 102389 - RNA, 11 nt, Artificial Sequence
  Description of Artificial Sequence: Synthetic oligonucleotide
ccagagcugug

SEQ ID NO: 102390 - RNA, 12 nt, Artificial Sequence
  Description of Artificial Sequence: Synthetic oligonucleotide
ccucagauuguu

SEQ ID NO: 102391 - RNA, 12 nt, Artificial Sequence
  Description of Artificial Sequence: Synthetic oligonucleotide
cuauuuuaauua

SEQ ID NO: 102392 - RNA, 13 nt, Artificial Sequence
  Description of Artificial Sequence: Synthetic oligonucleotide
uuuaauuuauuaa

SEQ ID NO: 102393 - RNA, 12 nt, Artificial Sequence
  Description of Artificial Sequence: Synthetic oligonucleotide
augcaguuugaa

SEQ ID NO: 102394 - RNA, 11 nt, Artificial Sequence
  Description of Artificial Sequence: Synthetic oligonucleotide
caugcugcugg

SEQ ID NO: 102395 - RNA, 13 nt, Artificial Sequence
  Description of Artificial Sequence: Synthetic oligonucleotide
agaugugcauuuc

SEQ ID NO: 102396 - RNA, 12 nt, Artificial Sequence
  Description of Artificial Sequence: Synthetic oligonucleotide
ucaaaaccugug

SEQ ID NO: 102397 - RNA, 11 nt, Artificial Sequence
  Description of Artificial Sequence: Synthetic oligonucleotide
gaaugugggua

SEQ ID NO: 102398 - RNA, 10 nt, Artificial Sequence
  Description of Artificial Sequence: Synthetic oligonucleotide
auguggguag

SEQ ID NO: 102399 - RNA, 13 nt, Artificial Sequence
  Description of Artificial Sequence: Synthetic oligonucleotide
ugaaaaugagcau

SEQ ID NO: 102400 - RNA, 13 nt, Artificial Sequence
  Description of Artificial Sequence: Synthetic oligonucleotide
uugcuuuucaugu

SEQ ID NO: 102401 - RNA, 12 nt, Artificial Sequence
  Description of Artificial Sequence: Synthetic oligonucleotide
uguauuucuaua

SEQ ID NO: 102402 - RNA, 13 nt, Artificial Sequence
  Description of Artificial Sequence: Synthetic oligonucleotide
uuugauuaauguu

SEQ ID NO: 102403 - RNA, 12 nt, Artificial Sequence
  Description of Artificial Sequence: Synthetic oligonucleotide
caacguguauag

SEQ ID NO: 102404 - RNA, 12 nt, Artificial Sequence
  Description of Artificial Sequence: Synthetic oligonucleotide
cauauccuuggc

SEQ ID NO: 102405 - RNA, 13 nt, Artificial Sequence
  Description of Artificial Sequence: Synthetic oligonucleotide
uacuaacaucugg

SEQ ID NO: 102406 - RNA, 11 nt, Artificial Sequence
  Description of Artificial Sequence: Synthetic oligonucleotide
cauaaguugug

SEQ ID NO: 102407 - RNA, 12 nt, Artificial Sequence
  Description of Artificial Sequence: Synthetic oligonucleotide
gcaucauuuugg

SEQ ID NO: 102408 - RNA, 10 nt, Artificial Sequence
  Description of Artificial Sequence: Synthetic oligonucleotide
gcucuucuua

SEQ ID NO: 102409 - RNA, 10 nt, Artificial Sequence
  Description of Artificial Sequence: Synthetic oligonucleotide
agauuagguc

SEQ ID NO: 102410 - RNA, 12 nt, Artificial Sequence
  Description of Artificial Sequence: Synthetic oligonucleotide
auggaauugaaa

SEQ ID NO: 102411 - RNA, 13 nt, Artificial Sequence
  Description of Artificial Sequence: Synthetic oligonucleotide
cacacucauuccu

SEQ ID NO: 102412 - RNA, 12 nt, Artificial Sequence
  Description of Artificial Sequence: Synthetic oligonucleotide
uguagagguaac

SEQ ID NO: 102413 - RNA, 11 nt, Artificial Sequence
  Description of Artificial Sequence: Synthetic oligonucleotide
caaccacaugc

SEQ ID NO: 102414 - RNA, 12 nt, Artificial Sequence
  Description of Artificial Sequence: Synthetic oligonucleotide
ucggaaacaagu

SEQ ID NO: 102415 - RNA, 11 nt, Artificial Sequence
  Description of Artificial Sequence: Synthetic oligonucleotide
acucccaauaa

SEQ ID NO: 102416 - RNA, 13 nt, Artificial Sequence
  Description of Artificial Sequence: Synthetic oligonucleotide
aaugcuaagaaau

SEQ ID NO: 102417 - RNA, 11 nt, Artificial Sequence
  Description of Artificial Sequence: Synthetic oligonucleotide
gucuuucucua

SEQ ID NO: 102418 - RNA, 11 nt, Artificial Sequence
  Description of Artificial Sequence: Synthetic oligonucleotide
ugaauuucagg

SEQ ID NO: 102419 - RNA, 13 nt, Artificial Sequence
  Description of Artificial Sequence: Synthetic oligonucleotide
cgauucccucuca

SEQ ID NO: 102420 - RNA, 11 nt, Artificial Sequence
  Description of Artificial Sequence: Synthetic oligonucleotide
aggaaagugaa

SEQ ID NO: 102421 - RNA, 12 nt, Artificial Sequence
  Description of Artificial Sequence: Synthetic oligonucleotide
gaggcugcaugc

SEQ ID NO: 102422 - RNA, 11 nt, Artificial Sequence
  Description of Artificial Sequence: Synthetic oligonucleotide
ucucugaacag

SEQ ID NO: 102423 - RNA, 12 nt, Artificial Sequence
  Description of Artificial Sequence: Synthetic oligonucleotide
aacuuggcugua

SEQ ID NO: 102424 - RNA, 12 nt, Artificial Sequence
  Description of Artificial Sequence: Synthetic oligonucleotide
agaagccaaaau

SEQ ID NO: 102425 - RNA, 14 nt, Artificial Sequence
  Description of Artificial Sequence: Synthetic oligonucleotide
auuaaaagaagucc

SEQ ID NO: 102426 - RNA, 14 nt, Artificial Sequence
  Description of Artificial Sequence: Synthetic oligonucleotide
gaauccggauuauc

SEQ ID NO: 102427 - RNA, 12 nt, Artificial Sequence
  Description of Artificial Sequence: Synthetic oligonucleotide
aaugugacauca

SEQ ID NO: 102428 - RNA, 13 nt, Artificial Sequence
  Description of Artificial Sequence: Synthetic oligonucleotide
caucaaagcaagu

SEQ ID NO: 102429 - RNA, 11 nt, Artificial Sequence
  Description of Artificial Sequence: Synthetic oligonucleotide
agagagagaaa

SEQ ID NO: 102430 - RNA, 13 nt, Artificial Sequence
  Description of Artificial Sequence: Synthetic oligonucleotide
ucgcuguaguauu

SEQ ID NO: 102431 - RNA, 14 nt, Artificial Sequence
  Description of Artificial Sequence: Synthetic oligonucleotide
cgcuguaguauuua

SEQ ID NO: 102432 - RNA, 13 nt, Artificial Sequence
  Description of Artificial Sequence: Synthetic oligonucleotide
auuuaagcccaua

SEQ ID NO: 102433 - RNA, 15 nt, Artificial Sequence
  Description of Artificial Sequence: Synthetic oligonucleotide
auuaaaauaaacaug

SEQ ID NO: 102434 - RNA, 12 nt, Artificial Sequence
  Description of Artificial Sequence: Synthetic oligonucleotide
cuguucugaucg

SEQ ID NO: 102435 - RNA, 16 nt, Artificial Sequence
  Description of Artificial Sequence: Synthetic oligonucleotide
aaauaauuugaacuuu

SEQ ID NO: 102436 - RNA, 12 nt, Artificial Sequence
  Description of Artificial Sequence: Synthetic oligonucleotide
ugcgaccuuaau

SEQ ID NO: 102437 - RNA, 11 nt, Artificial Sequence
  Description of Artificial Sequence: Synthetic oligonucleotide
cugagaaagcu

SEQ ID NO: 102438 - RNA, 13 nt, Artificial Sequence
  Description of Artificial Sequence: Synthetic oligonucleotide
aguaaagaugcua

SEQ ID NO: 102439 - RNA, 12 nt, Artificial Sequence
  Description of Artificial Sequence: Synthetic oligonucleotide
cugcuuaauugc

SEQ ID NO: 102440 - RNA, 14 nt, Artificial Sequence
  Description of Artificial Sequence: Synthetic oligonucleotide
uaccauaugaauga

SEQ ID NO: 102441 - RNA, 12 nt, Artificial Sequence
  Description of Artificial Sequence: Synthetic oligonucleotide
aacuuucuuauc

SEQ ID NO: 102442 - RNA, 13 nt, Artificial Sequence
  Description of Artificial Sequence: Synthetic oligonucleotide
ccuugcaugacau

SEQ ID NO: 102443 - RNA, 14 nt, Artificial Sequence
  Description of Artificial Sequence: Synthetic oligonucleotide
ugaauuuguauaug

SEQ ID NO: 102444 - RNA, 12 nt, Artificial Sequence
  Description of Artificial Sequence: Synthetic oligonucleotide
gaauccuaguag

SEQ ID NO: 102445 - RNA, 10 nt, Artificial Sequence
  Description of Artificial Sequence: Synthetic oligonucleotide
gaaagggaag

SEQ ID NO: 102446 - RNA, 11 nt, Artificial Sequence
  Description of Artificial Sequence: Synthetic oligonucleotide
uaucggcaugc

SEQ ID NO: 102447 - RNA, 12 nt, Artificial Sequence
  Description of Artificial Sequence: Synthetic oligonucleotide
caccucauagua

SEQ ID NO: 102448 - RNA, 11 nt, Artificial Sequence
  Description of Artificial Sequence: Synthetic oligonucleotide
ccagaauugcc

SEQ ID NO: 102449 - RNA, 11 nt, Artificial Sequence
  Description of Artificial Sequence: Synthetic oligonucleotide
uggugaucugg

SEQ ID NO: 102450 - RNA, 12 nt, Artificial Sequence
  Description of Artificial Sequence: Synthetic oligonucleotide
gaucuggguaau

SEQ ID NO: 102451 - RNA, 12 nt, Artificial Sequence
  Description of Artificial Sequence: Synthetic oligonucleotide
ggaugugaugaa

SEQ ID NO: 102452 - RNA, 12 nt, Artificial Sequence
  Description of Artificial Sequence: Synthetic oligonucleotide
cauuuccacagc

SEQ ID NO: 102453 - RNA, 11 nt, Artificial Sequence
  Description of Artificial Sequence: Synthetic oligonucleotide
acagcuacacc

SEQ ID NO: 102454 - RNA, 12 nt, Artificial Sequence
  Description of Artificial Sequence: Synthetic oligonucleotide
ugcaguucuuac

SEQ ID NO: 102455 - RNA, 12 nt, Artificial Sequence
  Description of Artificial Sequence: Synthetic oligonucleotide
acgagaagaaga

SEQ ID NO: 102456 - RNA, 12 nt, Artificial Sequence
  Description of Artificial Sequence: Synthetic oligonucleotide
cgagaagaagau

SEQ ID NO: 102457 - RNA, 15 nt, Artificial Sequence
  Description of Artificial Sequence: Synthetic oligonucleotide
aagaagaucauuuac

SEQ ID NO: 102458 - RNA, 11 nt, Artificial Sequence
  Description of Artificial Sequence: Synthetic oligonucleotide
agaggaagagg

SEQ ID NO: 102459 - RNA, 12 nt, Artificial Sequence
  Description of Artificial Sequence: Synthetic oligonucleotide
gaggaagaggug

SEQ ID NO: 102460 - RNA, 13 nt, Artificial Sequence
  Description of Artificial Sequence: Synthetic oligonucleotide
cuacuuugagggc

SEQ ID NO: 102461 - RNA, 12 nt, Artificial Sequence
  Description of Artificial Sequence: Synthetic oligonucleotide
agggcaucuccu

SEQ ID NO: 102462 - RNA, 10 nt, Artificial Sequence
  Description of Artificial Sequence: Synthetic oligonucleotide
ggagugauau

SEQ ID NO: 102463 - RNA, 11 nt, Artificial Sequence
  Description of Artificial Sequence: Synthetic oligonucleotide
gagugauaugg

SEQ ID NO: 102464 - RNA, 12 nt, Artificial Sequence
  Description of Artificial Sequence: Synthetic oligonucleotide
ugcaguaaagau

SEQ ID NO: 102465 - RNA, 13 nt, Artificial Sequence
  Description of Artificial Sequence: Synthetic oligonucleotide
aguaaagauccua

SEQ ID NO: 102466 - RNA, 12 nt, Artificial Sequence
  Description of Artificial Sequence: Synthetic oligonucleotide
ugacaaaggaca

SEQ ID NO: 102467 - RNA, 13 nt, Artificial Sequence
  Description of Artificial Sequence: Synthetic oligonucleotide
gcaauugugaccc

SEQ ID NO: 102468 - RNA, 12 nt, Artificial Sequence
  Description of Artificial Sequence: Synthetic oligonucleotide
aacaucauccau

SEQ ID NO: 102469 - RNA, 12 nt, Artificial Sequence
  Description of Artificial Sequence: Synthetic oligonucleotide
ugaaauccaaca

SEQ ID NO: 102470 - RNA, 15 nt, Artificial Sequence
  Description of Artificial Sequence: Synthetic oligonucleotide
aacaauauauuucuc

SEQ ID NO: 102471 - RNA, 14 nt, Artificial Sequence
  Description of Artificial Sequence: Synthetic oligonucleotide
aacaguaaagucac

SEQ ID NO: 102472 - RNA, 14 nt, Artificial Sequence
  Description of Artificial Sequence: Synthetic oligonucleotide
ugugaagaaaguaa

SEQ ID NO: 102473 - RNA, 13 nt, Artificial Sequence
  Description of Artificial Sequence: Synthetic oligonucleotide
cuuccgagccauc

SEQ ID NO: 102474 - RNA, 12 nt, Artificial Sequence
  Description of Artificial Sequence: Synthetic oligonucleotide
aauggagguuga

SEQ ID NO: 102475 - RNA, 12 nt, Artificial Sequence
  Description of Artificial Sequence: Synthetic oligonucleotide
ggagguugaaua

SEQ ID NO: 102476 - RNA, 13 nt, Artificial Sequence
  Description of Artificial Sequence: Synthetic oligonucleotide
auuuugaguuuuc

SEQ ID NO: 102477 - RNA, 12 nt, Artificial Sequence
  Description of Artificial Sequence: Synthetic oligonucleotide
uauccuguuugu

SEQ ID NO: 102478 - RNA, 11 nt, Artificial Sequence
  Description of Artificial Sequence: Synthetic oligonucleotide
ccuguuuguuc

SEQ ID NO: 102479 - RNA, 10 nt, Artificial Sequence
  Description of Artificial Sequence: Synthetic oligonucleotide
cucuacagcc

SEQ ID NO: 102480 - RNA, 12 nt, Artificial Sequence
  Description of Artificial Sequence: Synthetic oligonucleotide
ucuuccauagcu

SEQ ID NO: 102481 - RNA, 12 nt, Artificial Sequence
  Description of Artificial Sequence: Synthetic oligonucleotide
auaaucuuccug

SEQ ID NO: 102482 - RNA, 12 nt, Artificial Sequence
  Description of Artificial Sequence: Synthetic oligonucleotide
uaaucuuccugu

SEQ ID NO: 102483 - RNA, 12 nt, Artificial Sequence
  Description of Artificial Sequence: Synthetic oligonucleotide
cuucaugacuug

SEQ ID NO: 102484 - RNA, 12 nt, Artificial Sequence
  Description of Artificial Sequence: Synthetic oligonucleotide
aagagggagaga

SEQ ID NO: 102485 - RNA, 12 nt, Artificial Sequence
  Description of Artificial Sequence: Synthetic oligonucleotide
cgucuccuacca

SEQ ID NO: 102486 - RNA, 12 nt, Artificial Sequence
  Description of Artificial Sequence: Synthetic oligonucleotide
gaucaaucggcc

SEQ ID NO: 102487 - RNA, 12 nt, Artificial Sequence
  Description of Artificial Sequence: Synthetic oligonucleotide
ggacgaacaucc

SEQ ID NO: 102488 - RNA, 11 nt, Artificial Sequence
  Description of Artificial Sequence: Synthetic oligonucleotide
agggucggaac

SEQ ID NO: 102489 - RNA, 10 nt, Artificial Sequence
  Description of Artificial Sequence: Synthetic oligonucleotide
ucggaaccca

SEQ ID NO: 102490 - RNA, 11 nt, Artificial Sequence
  Description of Artificial Sequence: Synthetic oligonucleotide
acccaagcuua

SEQ ID NO: 102491 - RNA, 14 nt, Artificial Sequence
  Description of Artificial Sequence: Synthetic oligonucleotide
gaacuuuaagcaac

SEQ ID NO: 102492 - RNA, 11 nt, Artificial Sequence
  Description of Artificial Sequence: Synthetic oligonucleotide
acuauucagug

SEQ ID NO: 102493 - RNA, 11 nt, Artificial Sequence
  Description of Artificial Sequence: Synthetic oligonucleotide
cuauucagugg

SEQ ID NO: 102494 - RNA, 13 nt, Artificial Sequence
  Description of Artificial Sequence: Synthetic oligonucleotide
aaacacagauaac

SEQ ID NO: 102495 - RNA, 12 nt, Artificial Sequence
  Description of Artificial Sequence: Synthetic oligonucleotide
cuuaagaaaaga

SEQ ID NO: 102496 - RNA, 12 nt, Artificial Sequence
  Description of Artificial Sequence: Synthetic oligonucleotide
cugaaggagugu

SEQ ID NO: 102497 - RNA, 10 nt, Artificial Sequence
  Description of Artificial Sequence: Synthetic oligonucleotide
ucaccgcggg

SEQ ID NO: 102498 - RNA, 14 nt, Artificial Sequence
  Description of Artificial Sequence: Synthetic oligonucleotide
agcagaaauaagcg

SEQ ID NO: 102499 - RNA, 12 nt, Artificial Sequence
  Description of Artificial Sequence: Synthetic oligonucleotide
aagcgugccguu

SEQ ID NO: 102500 - RNA, 12 nt, Artificial Sequence
  Description of Artificial Sequence: Synthetic oligonucleotide
agaaacagucac

SEQ ID NO: 102501 - RNA, 12 nt, Artificial Sequence
  Description of Artificial Sequence: Synthetic oligonucleotide
agaggaagaagg

SEQ ID NO: 102502 - RNA, 14 nt, Artificial Sequence
  Description of Artificial Sequence: Synthetic oligonucleotide
uguauucaaaauau

SEQ ID NO: 102503 - RNA, 13 nt, Artificial Sequence
  Description of Artificial Sequence: Synthetic oligonucleotide
auuuuccucccuu

SEQ ID NO: 102504 - RNA, 13 nt, Artificial Sequence
  Description of Artificial Sequence: Synthetic oligonucleotide
caaagaaagauag

SEQ ID NO: 102505 - RNA, 12 nt, Artificial Sequence
  Description of Artificial Sequence: Synthetic oligonucleotide
aagaaagauaga

SEQ ID NO: 102506 - RNA, 13 nt, Artificial Sequence
  Description of Artificial Sequence: Synthetic oligonucleotide
gaaagcauuuguu

SEQ ID NO: 102507 - RNA, 13 nt, Artificial Sequence
  Description of Artificial Sequence: Synthetic oligonucleotide
ugaguuaaacgaa

SEQ ID NO: 102508 - RNA, 12 nt, Artificial Sequence
  Description of Artificial Sequence: Synthetic oligonucleotide
acugauacagaa

SEQ ID NO: 102509 - RNA, 12 nt, Artificial Sequence
  Description of Artificial Sequence: Synthetic oligonucleotide
auauuauauaua

SEQ ID NO: 102510 - RNA, 12 nt, Artificial Sequence
  Description of Artificial Sequence: Synthetic oligonucleotide
auuauauauaua

SEQ ID NO: 102511 - RNA, 12 nt, Artificial Sequence
  Description of Artificial Sequence: Synthetic oligonucleotide
ucacuggaugua

SEQ ID NO: 102512 - RNA, 12 nt, Artificial Sequence
  Description of Artificial Sequence: Synthetic oligonucleotide
cagggaagagga

SEQ ID NO: 102513 - RNA, 15 nt, Artificial Sequence
  Description of Artificial Sequence: Synthetic oligonucleotide
augaucuuuuuuuug

SEQ ID NO: 102514 - RNA, 11 nt, Artificial Sequence
  Description of Artificial Sequence: Synthetic oligonucleotide
aguucacggcc

SEQ ID NO: 102515 - RNA, 13 nt, Artificial Sequence
  Description of Artificial Sequence: Synthetic oligonucleotide
caccaucacacca

SEQ ID NO: 102516 - RNA, 11 nt, Artificial Sequence
  Description of Artificial Sequence: Synthetic oligonucleotide
ccugcggguuu

SEQ ID NO: 102517 - RNA, 10 nt, Artificial Sequence
  Description of Artificial Sequence: Synthetic oligonucleotide
auccaguuug

SEQ ID NO: 102518 - RNA, 13 nt, Artificial Sequence
  Description of Artificial Sequence: Synthetic oligonucleotide
guuaaggacuucu

SEQ ID NO: 102519 - RNA, 13 nt, Artificial Sequence
  Description of Artificial Sequence: Synthetic oligonucleotide
cagugggacagag

SEQ ID NO: 102520 - RNA, 14 nt, Artificial Sequence
  Description of Artificial Sequence: Synthetic oligonucleotide
aauuuguuauugug

SEQ ID NO: 102521 - RNA, 13 nt, Artificial Sequence
  Description of Artificial Sequence: Synthetic oligonucleotide
uucaaaugcauuu

SEQ ID NO: 102522 - RNA, 10 nt, Artificial Sequence
  Description of Artificial Sequence: Synthetic oligonucleotide
caggaaagcc

SEQ ID NO: 102523 - RNA, 11 nt, Artificial Sequence
  Description of Artificial Sequence: Synthetic oligonucleotide
aggaaagcccu

SEQ ID NO: 102524 - RNA, 12 nt, Artificial Sequence
  Description of Artificial Sequence: Synthetic oligonucleotide
cccagcauggcc

SEQ ID NO: 102525 - RNA, 11 nt, Artificial Sequence
  Description of Artificial Sequence: Synthetic oligonucleotide
cuucucccuga

SEQ ID NO: 102526 - RNA, 12 nt, Artificial Sequence
  Description of Artificial Sequence: Synthetic oligonucleotide
gaagaagcccuu

SEQ ID NO: 102527 - RNA, 12 nt, Artificial Sequence
  Description of Artificial Sequence: Synthetic oligonucleotide
agaagcccuuca

SEQ ID NO: 102528 - RNA, 11 nt, Artificial Sequence
  Description of Artificial Sequence: Synthetic oligonucleotide
gcccuucagcg

SEQ ID NO: 102529 - RNA, 11 nt, Artificial Sequence
  Description of Artificial Sequence: Synthetic oligonucleotide
ccuucagcggc

SEQ ID NO: 102530 - RNA, 12 nt, Artificial Sequence
  Description of Artificial Sequence: Synthetic oligonucleotide
ucagcggccagu

SEQ ID NO: 102531 - RNA, 12 nt, Artificial Sequence
  Description of Artificial Sequence: Synthetic oligonucleotide
ugaaaagcuccg

SEQ ID NO: 102532 - RNA, 11 nt, Artificial Sequence
  Description of Artificial Sequence: Synthetic oligonucleotide
aaaagcuccgg

SEQ ID NO: 102533 - RNA, 13 nt, Artificial Sequence
  Description of Artificial Sequence: Synthetic oligonucleotide
agucaacagucug

SEQ ID NO: 102534 - RNA, 13 nt, Artificial Sequence
  Description of Artificial Sequence: Synthetic oligonucleotide
cagaguucaaaag

SEQ ID NO: 102535 - RNA, 13 nt, Artificial Sequence
  Description of Artificial Sequence: Synthetic oligonucleotide
agaguucaaaagc

SEQ ID NO: 102536 - RNA, 12 nt, Artificial Sequence
  Description of Artificial Sequence: Synthetic oligonucleotide
uucaaaagcccu

SEQ ID NO: 102537 - RNA, 12 nt, Artificial Sequence
  Description of Artificial Sequence: Synthetic oligonucleotide
ucaaaagcccuu

SEQ ID NO: 102538 - RNA, 12 nt, Artificial Sequence
  Description of Artificial Sequence: Synthetic oligonucleotide
aaaagcccuuca

SEQ ID NO: 102539 - RNA, 12 nt, Artificial Sequence
  Description of Artificial Sequence: Synthetic oligonucleotide
aaagcccuucag

SEQ ID NO: 102540 - RNA, 13 nt, Artificial Sequence
  Description of Artificial Sequence: Synthetic oligonucleotide
gugaagccgcucg

SEQ ID NO: 102541 - RNA, 12 nt, Artificial Sequence
  Description of Artificial Sequence: Synthetic oligonucleotide
cacgccagucaa

SEQ ID NO: 102542 - RNA, 13 nt, Artificial Sequence
  Description of Artificial Sequence: Synthetic oligonucleotide
uucuuggugcgug

SEQ ID NO: 102543 - RNA, 14 nt, Artificial Sequence
  Description of Artificial Sequence: Synthetic oligonucleotide
auuggauucaucag

SEQ ID NO: 102544 - RNA, 13 nt, Artificial Sequence
  Description of Artificial Sequence: Synthetic oligonucleotide
uggaauaccuaag

SEQ ID NO: 102545 - RNA, 12 nt, Artificial Sequence
  Description of Artificial Sequence: Synthetic oligonucleotide
auuugaggcuca

SEQ ID NO: 102546 - RNA, 11 nt, Artificial Sequence
  Description of Artificial Sequence: Synthetic oligonucleotide
ucuacaauugg

SEQ ID NO: 102547 - RNA, 12 nt, Artificial Sequence
  Description of Artificial Sequence: Synthetic oligonucleotide
uaguuaggagcc

SEQ ID NO: 102548 - RNA, 13 nt, Artificial Sequence
  Description of Artificial Sequence: Synthetic oligonucleotide
agucaauauccac

SEQ ID NO: 102549 - RNA, 13 nt, Artificial Sequence
  Description of Artificial Sequence: Synthetic oligonucleotide
auguucagucaca

SEQ ID NO: 102550 - RNA, 12 nt, Artificial Sequence
  Description of Artificial Sequence: Synthetic oligonucleotide
acacacacauac

SEQ ID NO: 102551 - RNA, 12 nt, Artificial Sequence
  Description of Artificial Sequence: Synthetic oligonucleotide
uuccuuuugcuu

SEQ ID NO: 102552 - RNA, 16 nt, Artificial Sequence
  Description of Artificial Sequence: Synthetic oligonucleotide
uuuuaaaguaauuuuu

SEQ ID NO: 102553 - RNA, 13 nt, Artificial Sequence
  Description of Artificial Sequence: Synthetic oligonucleotide
caacagucaaugg

SEQ ID NO: 102554 - RNA, 13 nt, Artificial Sequence
  Description of Artificial Sequence: Synthetic oligonucleotide
ucgacaaaccaau

SEQ ID NO: 102555 - RNA, 12 nt, Artificial Sequence
  Description of Artificial Sequence: Synthetic oligonucleotide
acugcuaccacu

SEQ ID NO: 102556 - RNA, 13 nt, Artificial Sequence
  Description of Artificial Sequence: Synthetic oligonucleotide
gcaagcggucuua

SEQ ID NO: 102557 - RNA, 13 nt, Artificial Sequence
  Description of Artificial Sequence: Synthetic oligonucleotide
ggucuuaccggcu

SEQ ID NO: 102558 - RNA, 11 nt, Artificial Sequence
  Description of Artificial Sequence: Synthetic oligonucleotide
gauggguuacc

SEQ ID NO: 102559 - RNA, 11 nt, Artificial Sequence
  Description of Artificial Sequence: Synthetic oligonucleotide
guuaccugcga

SEQ ID NO: 102560 - RNA, 12 nt, Artificial Sequence
  Description of Artificial Sequence: Synthetic oligonucleotide
aaucuugcugag

SEQ ID NO: 102561 - RNA, 13 nt, Artificial Sequence
  Description of Artificial Sequence: Synthetic oligonucleotide
agcauaaaacagu

SEQ ID NO: 102562 - RNA, 12 nt, Artificial Sequence
  Description of Artificial Sequence: Synthetic oligonucleotide
guccuuuauccu

SEQ ID NO: 102563 - RNA, 12 nt, Artificial Sequence
  Description of Artificial Sequence: Synthetic oligonucleotide
caacgcaaguug

SEQ ID NO: 102564 - RNA, 13 nt, Artificial Sequence
  Description of Artificial Sequence: Synthetic oligonucleotide
aaacugaaaccau

SEQ ID NO: 102565 - RNA, 14 nt, Artificial Sequence
  Description of Artificial Sequence: Synthetic oligonucleotide
acuuuguuaaauau

SEQ ID NO: 102566 - RNA, 14 nt, Artificial Sequence
  Description of Artificial Sequence: Synthetic oligonucleotide
guauauuaaaaguu

SEQ ID NO: 102567 - RNA, 13 nt, Artificial Sequence
  Description of Artificial Sequence: Synthetic oligonucleotide
guuuugacuuaac

SEQ ID NO: 102568 - RNA, 13 nt, Artificial Sequence
  Description of Artificial Sequence: Synthetic oligonucleotide
gcaaacucagcac

SEQ ID NO: 102569 - RNA, 11 nt, Artificial Sequence
  Description of Artificial Sequence: Synthetic oligonucleotide
ugcugaccuca

SEQ ID NO: 102570 - RNA, 14 nt, Artificial Sequence
  Description of Artificial Sequence: Synthetic oligonucleotide
uuuauucagaucgc

SEQ ID NO: 102571 - RNA, 13 nt, Artificial Sequence
  Description of Artificial Sequence: Synthetic oligonucleotide
aggguucugggau

SEQ ID NO: 102572 - RNA, 15 nt, Artificial Sequence
  Description of Artificial Sequence: Synthetic oligonucleotide
auauuggaaauuaug

SEQ ID NO: 102573 - RNA, 13 nt, Artificial Sequence
  Description of Artificial Sequence: Synthetic oligonucleotide
auggaagcacuag

SEQ ID NO: 102574 - RNA, 13 nt, Artificial Sequence
  Description of Artificial Sequence: Synthetic oligonucleotide
guuuuuaugugga

SEQ ID NO: 102575 - RNA, 12 nt, Artificial Sequence
  Description of Artificial Sequence: Synthetic oligonucleotide
ggaauugguaga

SEQ ID NO: 102576 - RNA, 13 nt, Artificial Sequence
  Description of Artificial Sequence: Synthetic oligonucleotide
uuagacuuggaga

SEQ ID NO: 102577 - RNA, 13 nt, Artificial Sequence
  Description of Artificial Sequence: Synthetic oligonucleotide
uuacaguauucca

SEQ ID NO: 102578 - RNA, 15 nt, Artificial Sequence
  Description of Artificial Sequence: Synthetic oligonucleotide
ccacugaugaauuaa

SEQ ID NO: 102579 - RNA, 12 nt, Artificial Sequence
  Description of Artificial Sequence: Synthetic oligonucleotide
ccacaucaucac

SEQ ID NO: 102580 - RNA, 13 nt, Artificial Sequence
  Description of Artificial Sequence: Synthetic oligonucleotide
cucaccaaacaga

SEQ ID NO: 102581 - RNA, 12 nt, Artificial Sequence
  Description of Artificial Sequence: Synthetic oligonucleotide
ggaacaugaugg

SEQ ID NO: 102582 - RNA, 12 nt, Artificial Sequence
  Description of Artificial Sequence: Synthetic oligonucleotide
cauguagacugc

SEQ ID NO: 102583 - RNA, 13 nt, Artificial Sequence
  Description of Artificial Sequence: Synthetic oligonucleotide
ggaucuauuuaug

SEQ ID NO: 102584 - RNA, 12 nt, Artificial Sequence
  Description of Artificial Sequence: Synthetic oligonucleotide
gcacuauuauca

SEQ ID NO: 102585 - RNA, 11 nt, Artificial Sequence
  Description of Artificial Sequence: Synthetic oligonucleotide
aucaguucugc

SEQ ID NO: 102586 - RNA, 13 nt, Artificial Sequence
  Description of Artificial Sequence: Synthetic oligonucleotide
agauuaaaccuac

SEQ ID NO: 102587 - RNA, 13 nt, Artificial Sequence
  Description of Artificial Sequence: Synthetic oligonucleotide
auaaaauccuucu

SEQ ID NO: 102588 - RNA, 12 nt, Artificial Sequence
  Description of Artificial Sequence: Synthetic oligonucleotide
aaugcuguagac

SEQ ID NO: 102589 - RNA, 13 nt, Artificial Sequence
  Description of Artificial Sequence: Synthetic oligonucleotide
uugauaggaauag

SEQ ID NO: 102590 - RNA, 11 nt, Artificial Sequence
  Description of Artificial Sequence: Synthetic oligonucleotide
aauggcccuga

SEQ ID NO: 102591 - RNA, 11 nt, Artificial Sequence
  Description of Artificial Sequence: Synthetic oligonucleotide
uuccucaagca

SEQ ID NO: 102592 - RNA, 10 nt, Artificial Sequence
  Description of Artificial Sequence: Synthetic oligonucleotide
guucagccca

SEQ ID NO: 102593 - RNA, 11 nt, Artificial Sequence
  Description of Artificial Sequence: Synthetic oligonucleotide
gcugcugaacc

SEQ ID NO: 102594 - RNA, 12 nt, Artificial Sequence
  Description of Artificial Sequence: Synthetic oligonucleotide
aaguucucuuca

SEQ ID NO: 102595 - RNA, 11 nt, Artificial Sequence
  Description of Artificial Sequence: Synthetic oligonucleotide
ccagccuagag

SEQ ID NO: 102596 - RNA, 13 nt, Artificial Sequence
  Description of Artificial Sequence: Synthetic oligonucleotide
cucugugaagugu

SEQ ID NO: 102597 - RNA, 14 nt, Artificial Sequence
  Description of Artificial Sequence: Synthetic oligonucleotide
ugagaaaauuucaa

SEQ ID NO: 102598 - RNA, 11 nt, Artificial Sequence
  Description of Artificial Sequence: Synthetic oligonucleotide
aauccuccuga

SEQ ID NO: 102599 - RNA, 12 nt, Artificial Sequence
  Description of Artificial Sequence: Synthetic oligonucleotide
gugacaucauau

SEQ ID NO: 102600 - RNA, 13 nt, Artificial Sequence
  Description of Artificial Sequence: Synthetic oligonucleotide
aaucuucaucaua

SEQ ID NO: 102601 - RNA, 13 nt, Artificial Sequence
  Description of Artificial Sequence: Synthetic oligonucleotide
gacuagcuauuaa

SEQ ID NO: 102602 - RNA, 14 nt, Artificial Sequence
  Description of Artificial Sequence: Synthetic oligonucleotide
ucucuacuaaaaau

SEQ ID NO: 102603 - RNA, 12 nt, Artificial Sequence
  Description of Artificial Sequence: Synthetic oligonucleotide
ucuaucucgccu

SEQ ID NO: 102604 - RNA, 13 nt, Artificial Sequence
  Description of Artificial Sequence: Synthetic oligonucleotide
cuucgguccaguu

SEQ ID NO: 102605 - RNA, 11 nt, Artificial Sequence
  Description of Artificial Sequence: Synthetic oligonucleotide
gauguagccgc

SEQ ID NO: 102606 - RNA, 12 nt, Artificial Sequence
  Description of Artificial Sequence: Synthetic oligonucleotide
ugaggagacuug

SEQ ID NO: 102607 - RNA, 12 nt, Artificial Sequence
  Description of Artificial Sequence: Synthetic oligonucleotide
gaguagugagga

SEQ ID NO: 102608 - RNA, 14 nt, Artificial Sequence
  Description of Artificial Sequence: Synthetic oligonucleotide
cagaugaguacaaa

SEQ ID NO: 102609 - RNA, 13 nt, Artificial Sequence
  Description of Artificial Sequence: Synthetic oligonucleotide
guuguuaaugggc

SEQ ID NO: 102610 - RNA, 13 nt, Artificial Sequence
  Description of Artificial Sequence: Synthetic oligonucleotide
uuuuuaauuuauu

SEQ ID NO: 102611 - RNA, 12 nt, Artificial Sequence
  Description of Artificial Sequence: Synthetic oligonucleotide
uauuuaaauaug

SEQ ID NO: 102612 - RNA, 13 nt, Artificial Sequence
  Description of Artificial Sequence: Synthetic oligonucleotide
uauccuuuguuuc

SEQ ID NO: 102613 - RNA, 14 nt, Artificial Sequence
  Description of Artificial Sequence: Synthetic oligonucleotide
cgucuaaguguuug

SEQ ID NO: 102614 - RNA, 12 nt, Artificial Sequence
  Description of Artificial Sequence: Synthetic oligonucleotide
accugugacaaa

SEQ ID NO: 102615 - RNA, 13 nt, Artificial Sequence
  Description of Artificial Sequence: Synthetic oligonucleotide
ccaggcugaauua

SEQ ID NO: 102616 - RNA, 14 nt, Artificial Sequence
  Description of Artificial Sequence: Synthetic oligonucleotide
gucauucuuacaau

SEQ ID NO: 102617 - RNA, 15 nt, Artificial Sequence
  Description of Artificial Sequence: Synthetic oligonucleotide
ucauucuuacaauug

SEQ ID NO: 102618 - RNA, 12 nt, Artificial Sequence
  Description of Artificial Sequence: Synthetic oligonucleotide
cagagaguguac

SEQ ID NO: 102619 - RNA, 12 nt, Artificial Sequence
  Description of Artificial Sequence: Synthetic oligonucleotide
agaacucagcag

SEQ ID NO: 102620 - RNA, 13 nt, Artificial Sequence
  Description of Artificial Sequence: Synthetic oligonucleotide
uuuauuuucagua

SEQ ID NO: 102621 - RNA, 12 nt, Artificial Sequence
  Description of Artificial Sequence: Synthetic oligonucleotide
ucuuaaauggaa

SEQ ID NO: 102622 - RNA, 13 nt, Artificial Sequence
  Description of Artificial Sequence: Synthetic oligonucleotide
ugccuaaaauugu

SEQ ID NO: 102623 - RNA, 12 nt, Artificial Sequence
  Description of Artificial Sequence: Synthetic oligonucleotide
agacugugagcu

SEQ ID NO: 102624 - RNA, 14 nt, Artificial Sequence
  Description of Artificial Sequence: Synthetic oligonucleotide
ugcuuuuuauuaau

SEQ ID NO: 102625 - RNA, 13 nt, Artificial Sequence
  Description of Artificial Sequence: Synthetic oligonucleotide
cucuucuuacauu

SEQ ID NO: 102626 - RNA, 15 nt, Artificial Sequence
  Description of Artificial Sequence: Synthetic oligonucleotide
cauuuguaaaaaugu

SEQ ID NO: 102627 - RNA, 15 nt, Artificial Sequence
  Description of Artificial Sequence: Synthetic oligonucleotide
aucuuaauucauauu

SEQ ID NO: 102628 - RNA, 13 nt, Artificial Sequence
  Description of Artificial Sequence: Synthetic oligonucleotide
gaacuaaucauga

SEQ ID NO: 102629 - RNA, 12 nt, Artificial Sequence
  Description of Artificial Sequence: Synthetic oligonucleotide
ucugcucuuggg

SEQ ID NO: 102630 - RNA, 13 nt, Artificial Sequence
  Description of Artificial Sequence: Synthetic oligonucleotide
caguagcuuugag

SEQ ID NO: 102631 - RNA, 14 nt, Artificial Sequence
  Description of Artificial Sequence: Synthetic oligonucleotide
cacguaauauuuca

SEQ ID NO: 102632 - RNA, 13 nt, Artificial Sequence
  Description of Artificial Sequence: Synthetic oligonucleotide
uauucucuucacu

SEQ ID NO: 102633 - RNA, 14 nt, Artificial Sequence
  Description of Artificial Sequence: Synthetic oligonucleotide
cuaaugcuaagaaa

SEQ ID NO: 102634 - RNA, 12 nt, Artificial Sequence
  Description of Artificial Sequence: Synthetic oligonucleotide
gcugaaaaucaa

SEQ ID NO: 102635 - RNA, 14 nt, Artificial Sequence
  Description of Artificial Sequence: Synthetic oligonucleotide
aauaugauuacuuu

SEQ ID NO: 102636 - RNA, 14 nt, Artificial Sequence
  Description of Artificial Sequence: Synthetic oligonucleotide
cauuuuguucuaca

SEQ ID NO: 102637 - RNA, 12 nt, Artificial Sequence
  Description of Artificial Sequence: Synthetic oligonucleotide
cccgggacucuc

SEQ ID NO: 102638 - RNA, 14 nt, Artificial Sequence
  Description of Artificial Sequence: Synthetic oligonucleotide
ccuuuaaaguaaag

SEQ ID NO: 102639 - RNA, 13 nt, Artificial Sequence
  Description of Artificial Sequence: Synthetic oligonucleotide
ucuggaagccugg

SEQ ID NO: 102640 - RNA, 14 nt, Artificial Sequence
  Description of Artificial Sequence: Synthetic oligonucleotide
aaaacaaaagagag

SEQ ID NO: 102641 - RNA, 13 nt, Artificial Sequence
  Description of Artificial Sequence: Synthetic oligonucleotide
aucaguuaugccg

SEQ ID NO: 102642 - RNA, 13 nt, Artificial Sequence
  Description of Artificial Sequence: Synthetic oligonucleotide
uaaaagaagucca

SEQ ID NO: 102643 - RNA, 11 nt, Artificial Sequence
  Description of Artificial Sequence: Synthetic oligonucleotide
aggugagguua

SEQ ID NO: 102644 - RNA, 11 nt, Artificial Sequence
  Description of Artificial Sequence: Synthetic oligonucleotide
gggaagaggac

SEQ ID NO: 102645 - RNA, 13 nt, Artificial Sequence
  Description of Artificial Sequence: Synthetic oligonucleotide
aagcaaguauugu

SEQ ID NO: 102646 - RNA, 12 nt, Artificial Sequence
  Description of Artificial Sequence: Synthetic oligonucleotide
auuguagcacuc

SEQ ID NO: 102647 - RNA, 14 nt, Artificial Sequence
  Description of Artificial Sequence: Synthetic oligonucleotide
acaaaaccacaaau

SEQ ID NO: 102648 - RNA, 12 nt, Artificial Sequence
  Description of Artificial Sequence: Synthetic oligonucleotide
uaagcccauaca

SEQ ID NO: 102649 - RNA, 11 nt, Artificial Sequence
  Description of Artificial Sequence: Synthetic oligonucleotide
agcccauacag

SEQ ID NO: 102650 - RNA, 12 nt, Artificial Sequence
  Description of Artificial Sequence: Synthetic oligonucleotide
cagaaaccuucc

SEQ ID NO: 102651 - RNA, 10 nt, Artificial Sequence
  Description of Artificial Sequence: Synthetic oligonucleotide
guauaccuac

SEQ ID NO: 102652 - RNA, 13 nt, Artificial Sequence
  Description of Artificial Sequence: Synthetic oligonucleotide
gccaguuuucgga

SEQ ID NO: 102653 - RNA, 9 nt, Artificial Sequence
  Description of Artificial Sequence: Synthetic oligonucleotide
ggaacaggg

SEQ ID NO: 102654 - RNA, 13 nt, Artificial Sequence
  Description of Artificial Sequence: Synthetic oligonucleotide
uuaacuuuccagu

SEQ ID NO: 102655 - RNA, 14 nt, Artificial Sequence
  Description of Artificial Sequence: Synthetic oligonucleotide
aaaguuugguuuug

SEQ ID NO: 102656 - RNA, 12 nt, Artificial Sequence
  Description of Artificial Sequence: Synthetic oligonucleotide
cuucccacugua

SEQ ID NO: 102657 - RNA, 13 nt, Artificial Sequence
  Description of Artificial Sequence: Synthetic oligonucleotide
ugauaccauauga

SEQ ID NO: 102658 - RNA, 11 nt, Artificial Sequence
  Description of Artificial Sequence: Synthetic oligonucleotide
aacaugggcug

SEQ ID NO: 102659 - RNA, 13 nt, Artificial Sequence
  Description of Artificial Sequence: Synthetic oligonucleotide
caacuuuuucaua

SEQ ID NO: 102660 - RNA, 12 nt, Artificial Sequence
  Description of Artificial Sequence: Synthetic oligonucleotide
caugaggccgga

SEQ ID NO: 102661 - RNA, 11 nt, Artificial Sequence
  Description of Artificial Sequence: Synthetic oligonucleotide
acugcauuugu

SEQ ID NO: 102662 - RNA, 13 nt, Artificial Sequence
  Description of Artificial Sequence: Synthetic oligonucleotide
aauguuuacuacc

SEQ ID NO: 102663 - RNA, 15 nt, Artificial Sequence
  Description of Artificial Sequence: Synthetic oligonucleotide
aauuuuuugaugaaa

SEQ ID NO: 102664 - RNA, 14 nt, Artificial Sequence
  Description of Artificial Sequence: Synthetic oligonucleotide
cagugugugaauuu

SEQ ID NO: 102665 - RNA, 13 nt, Artificial Sequence
  Description of Artificial Sequence: Synthetic oligonucleotide
gagcaauguaugu

SEQ ID NO: 102666 - RNA, 14 nt, Artificial Sequence
  Description of Artificial Sequence: Synthetic oligonucleotide
aaagcacauauaua

SEQ ID NO: 102667 - RNA, 14 nt, Artificial Sequence
  Description of Artificial Sequence: Synthetic oligonucleotide
guaauaguuucucc

SEQ ID NO: 102668 - RNA, 13 nt, Artificial Sequence
  Description of Artificial Sequence: Synthetic oligonucleotide
aguuucuccaaau

SEQ ID NO: 102669 - RNA, 13 nt, Artificial Sequence
  Description of Artificial Sequence: Synthetic oligonucleotide
uacuuccuagaaa

SEQ ID NO: 102670 - RNA, 13 nt, Artificial Sequence
  Description of Artificial Sequence: Synthetic oligonucleotide
uacaccauauaug

SEQ ID NO: 102671 - RNA, 14 nt, Artificial Sequence
  Description of Artificial Sequence: Synthetic oligonucleotide
auauaugaauggag

SEQ ID NO: 102672 - RNA, 13 nt, Artificial Sequence
  Description of Artificial Sequence: Synthetic oligonucleotide
acgagaagaagau

SEQ ID NO: 102673 - RNA, 13 nt, Artificial Sequence
  Description of Artificial Sequence: Synthetic oligonucleotide
ucauuuacaggga

SEQ ID NO: 102674 - RNA, 13 nt, Artificial Sequence
  Description of Artificial Sequence: Synthetic oligonucleotide
cauuuacagggac

SEQ ID NO: 102675 - RNA, 10 nt, Artificial Sequence
  Description of Artificial Sequence: Synthetic oligonucleotide
agggaccuga

SEQ ID NO: 102676 - RNA, 14 nt, Artificial Sequence
  Description of Artificial Sequence: Synthetic oligonucleotide
uguuugacugcauc

SEQ ID NO: 102677 - RNA, 13 nt, Artificial Sequence
  Description of Artificial Sequence: Synthetic oligonucleotide
uuugacugcaucg

SEQ ID NO: 102678 - RNA, 12 nt, Artificial Sequence
  Description of Artificial Sequence: Synthetic oligonucleotide
gaguucacaggg

SEQ ID NO: 102679 - RNA, 13 nt, Artificial Sequence
  Description of Artificial Sequence: Synthetic oligonucleotide
ggcaccucugucc

SEQ ID NO: 102680 - RNA, 15 nt, Artificial Sequence
  Description of Artificial Sequence: Synthetic oligonucleotide
gguuugucuuuuuaa

SEQ ID NO: 102681 - RNA, 14 nt, Artificial Sequence
  Description of Artificial Sequence: Synthetic oligonucleotide
uuugucuuuuuaag

SEQ ID NO: 102682 - RNA, 13 nt, Artificial Sequence
  Description of Artificial Sequence: Synthetic oligonucleotide
ccuaaagguuguc

SEQ ID NO: 102683 - RNA, 12 nt, Artificial Sequence
  Description of Artificial Sequence: Synthetic oligonucleotide
aagguugucgac

SEQ ID NO: 102684 - RNA, 13 nt, Artificial Sequence
  Description of Artificial Sequence: Synthetic oligonucleotide
accuggcaauugu

SEQ ID NO: 102685 - RNA, 12 nt, Artificial Sequence
  Description of Artificial Sequence: Synthetic oligonucleotide
aguggugcgagg

SEQ ID NO: 102686 - RNA, 13 nt, Artificial Sequence
  Description of Artificial Sequence: Synthetic oligonucleotide
agagacaugaaau

SEQ ID NO: 102687 - RNA, 13 nt, Artificial Sequence
  Description of Artificial Sequence: Synthetic oligonucleotide
auauauuucucca

SEQ ID NO: 102688 - RNA, 10 nt, Artificial Sequence
  Description of Artificial Sequence: Synthetic oligonucleotide
caugaaggcu

SEQ ID NO: 102689 - RNA, 11 nt, Artificial Sequence
  Description of Artificial Sequence: Synthetic oligonucleotide
gcuggaguggu

SEQ ID NO: 102690 - RNA, 11 nt, Artificial Sequence
  Description of Artificial Sequence: Synthetic oligonucleotide
aggaagagagg

SEQ ID NO: 102691 - RNA, 12 nt, Artificial Sequence
  Description of Artificial Sequence: Synthetic oligonucleotide
cuugcaucgggc

SEQ ID NO: 102692 - RNA, 13 nt, Artificial Sequence
  Description of Artificial Sequence: Synthetic oligonucleotide
auauccuacugug

SEQ ID NO: 102693 - RNA, 13 nt, Artificial Sequence
  Description of Artificial Sequence: Synthetic oligonucleotide
uccuacuguguaa

SEQ ID NO: 102694 - RNA, 12 nt, Artificial Sequence
  Description of Artificial Sequence: Synthetic oligonucleotide
ccuuguagugua

SEQ ID NO: 102695 - RNA, 13 nt, Artificial Sequence
  Description of Artificial Sequence: Synthetic oligonucleotide
ucuuuguugauug

SEQ ID NO: 102696 - RNA, 14 nt, Artificial Sequence
  Description of Artificial Sequence: Synthetic oligonucleotide
uuuguugauugaaa

SEQ ID NO: 102697 - RNA, 15 nt, Artificial Sequence
  Description of Artificial Sequence: Synthetic oligonucleotide
uucuuuuucuuccau

SEQ ID NO: 102698 - RNA, 13 nt, Artificial Sequence
  Description of Artificial Sequence: Synthetic oligonucleotide
aaucuuccuucua

SEQ ID NO: 102699 - RNA, 13 nt, Artificial Sequence
  Description of Artificial Sequence: Synthetic oligonucleotide
uugaaugcuucau

SEQ ID NO: 102700 - RNA, 13 nt, Artificial Sequence
  Description of Artificial Sequence: Synthetic oligonucleotide
ugaaugcuucaug

SEQ ID NO: 102701 - RNA, 13 nt, Artificial Sequence
  Description of Artificial Sequence: Synthetic oligonucleotide
aauucuacuuuga

SEQ ID NO: 102702 - RNA, 13 nt, Artificial Sequence
  Description of Artificial Sequence: Synthetic oligonucleotide
agcaacuacagac

SEQ ID NO: 102703 - RNA, 13 nt, Artificial Sequence
  Description of Artificial Sequence: Synthetic oligonucleotide
gaccaaggucaac

SEQ ID NO: 102704 - RNA, 13 nt, Artificial Sequence
  Description of Artificial Sequence: Synthetic oligonucleotide
cgacuaucucgac

SEQ ID NO: 102705 - RNA, 13 nt, Artificial Sequence
  Description of Artificial Sequence: Synthetic oligonucleotide
aaccuucccaaac

SEQ ID NO: 102706 - RNA, 14 nt, Artificial Sequence
  Description of Artificial Sequence: Synthetic oligonucleotide
ccaagcuuagaacu

SEQ ID NO: 102707 - RNA, 15 nt, Artificial Sequence
  Description of Artificial Sequence: Synthetic oligonucleotide
agcuuagaacuuuaa

SEQ ID NO: 102708 - RNA, 11 nt, Artificial Sequence
  Description of Artificial Sequence: Synthetic oligonucleotide
aagaccaccac

SEQ ID NO: 102709 - RNA, 14 nt, Artificial Sequence
  Description of Artificial Sequence: Synthetic oligonucleotide
gcgagaaauaaagu

SEQ ID NO: 102710 - RNA, 14 nt, Artificial Sequence
  Description of Artificial Sequence: Synthetic oligonucleotide
cgagaaauaaaguu

SEQ ID NO: 102711 - RNA, 12 nt, Artificial Sequence
  Description of Artificial Sequence: Synthetic oligonucleotide
aggaaaugaucc

SEQ ID NO: 102712 - RNA, 13 nt, Artificial Sequence
  Description of Artificial Sequence: Synthetic oligonucleotide
gaagaaaugaaac

SEQ ID NO: 102713 - RNA, 13 nt, Artificial Sequence
  Description of Artificial Sequence: Synthetic oligonucleotide
guuuccauccucc

SEQ ID NO: 102714 - RNA, 15 nt, Artificial Sequence
  Description of Artificial Sequence: Synthetic oligonucleotide
acugaaaaucuuuga

SEQ ID NO: 102715 - RNA, 11 nt, Artificial Sequence
  Description of Artificial Sequence: Synthetic oligonucleotide
ugccguucagg

SEQ ID NO: 102716 - RNA, 13 nt, Artificial Sequence
  Description of Artificial Sequence: Synthetic oligonucleotide
caggguccagaag

SEQ ID NO: 102717 - RNA, 13 nt, Artificial Sequence
  Description of Artificial Sequence: Synthetic oligonucleotide
ucaagacugcuug

SEQ ID NO: 102718 - RNA, 13 nt, Artificial Sequence
  Description of Artificial Sequence: Synthetic oligonucleotide
uccaugucuuugg

SEQ ID NO: 102719 - RNA, 11 nt, Artificial Sequence
  Description of Artificial Sequence: Synthetic oligonucleotide
gccugaaacac

SEQ ID NO: 102720 - RNA, 12 nt, Artificial Sequence
  Description of Artificial Sequence: Synthetic oligonucleotide
ucucuguaccuc

SEQ ID NO: 102721 - RNA, 12 nt, Artificial Sequence
  Description of Artificial Sequence: Synthetic oligonucleotide
agcaagacaaga

SEQ ID NO: 102722 - RNA, 13 nt, Artificial Sequence
  Description of Artificial Sequence: Synthetic oligonucleotide
gcaagacaagaaa

SEQ ID NO: 102723 - RNA, 12 nt, Artificial Sequence
  Description of Artificial Sequence: Synthetic oligonucleotide
uguacaagaucc

SEQ ID NO: 102724 - RNA, 12 nt, Artificial Sequence
  Description of Artificial Sequence: Synthetic oligonucleotide
cguacuugcaga

SEQ ID NO: 102725 - RNA, 13 nt, Artificial Sequence
  Description of Artificial Sequence: Synthetic oligonucleotide
cgaucgauacaga

SEQ ID NO: 102726 - RNA, 13 nt, Artificial Sequence
  Description of Artificial Sequence: Synthetic oligonucleotide
uauaaaaauaaau

SEQ ID NO: 102727 - RNA, 13 nt, Artificial Sequence
  Description of Artificial Sequence: Synthetic oligonucleotide
uaaaaauaaauau

SEQ ID NO: 102728 - RNA, 13 nt, Artificial Sequence
  Description of Artificial Sequence: Synthetic oligonucleotide
uuugacugcugug

SEQ ID NO: 102729 - RNA, 13 nt, Artificial Sequence
  Description of Artificial Sequence: Synthetic oligonucleotide
ggagaugagagac

SEQ ID NO: 102730 - RNA, 10 nt, Artificial Sequence
  Description of Artificial Sequence: Synthetic oligonucleotide
ucccacuugg

SEQ ID NO: 102731 - RNA, 10 nt, Artificial Sequence
  Description of Artificial Sequence: Synthetic oligonucleotide
guucacggcc

SEQ ID NO: 102732 - RNA, 12 nt, Artificial Sequence
  Description of Artificial Sequence: Synthetic oligonucleotide
accaucacacca

SEQ ID NO: 102733 - RNA, 10 nt, Artificial Sequence
  Description of Artificial Sequence: Synthetic oligonucleotide
cugcggguuu

SEQ ID NO: 102734 - RNA, 9 nt, Artificial Sequence
  Description of Artificial Sequence: Synthetic oligonucleotide
uccaguuug

SEQ ID NO: 102735 - RNA, 12 nt, Artificial Sequence
  Description of Artificial Sequence: Synthetic oligonucleotide
uuaaggacuucu

SEQ ID NO: 102736 - RNA, 12 nt, Artificial Sequence
  Description of Artificial Sequence: Synthetic oligonucleotide
agugggacagag

SEQ ID NO: 102737 - RNA, 13 nt, Artificial Sequence
  Description of Artificial Sequence: Synthetic oligonucleotide
auuuguuauugug

SEQ ID NO: 102738 - RNA, 12 nt, Artificial Sequence
  Description of Artificial Sequence: Synthetic oligonucleotide
ucaaaugcauuu

SEQ ID NO: 102739 - RNA, 9 nt, Artificial Sequence
  Description of Artificial Sequence: Synthetic oligonucleotide
aggaaagcc

SEQ ID NO: 102740 - RNA, 10 nt, Artificial Sequence
  Description of Artificial Sequence: Synthetic oligonucleotide
ggaaagcccu

SEQ ID NO: 102741 - RNA, 11 nt, Artificial Sequence
  Description of Artificial Sequence: Synthetic oligonucleotide
ccagcauggcc

SEQ ID NO: 102742 - RNA, 10 nt, Artificial Sequence
  Description of Artificial Sequence: Synthetic oligonucleotide
uucucccuga

SEQ ID NO: 102743 - RNA, 11 nt, Artificial Sequence
  Description of Artificial Sequence: Synthetic oligonucleotide
aagaagcccuu

SEQ ID NO: 102744 - RNA, 11 nt, Artificial Sequence
  Description of Artificial Sequence: Synthetic oligonucleotide
gaagcccuuca

SEQ ID NO: 102745 - RNA, 10 nt, Artificial Sequence
  Description of Artificial Sequence: Synthetic oligonucleotide
cccuucagcg

SEQ ID NO: 102746 - RNA, 10 nt, Artificial Sequence
  Description of Artificial Sequence: Synthetic oligonucleotide
cuucagcggc

SEQ ID NO: 102747 - RNA, 11 nt, Artificial Sequence
  Description of Artificial Sequence: Synthetic oligonucleotide
cagcggccagu

SEQ ID NO: 102748 - RNA, 11 nt, Artificial Sequence
  Description of Artificial Sequence: Synthetic oligonucleotide
gaaaagcuccg

SEQ ID NO: 102749 - RNA, 10 nt, Artificial Sequence
  Description of Artificial Sequence: Synthetic oligonucleotide
aaagcuccgg

SEQ ID NO: 102750 - RNA, 12 nt, Artificial Sequence
  Description of Artificial Sequence: Synthetic oligonucleotide
gucaacagucug

SEQ ID NO: 102751 - RNA, 12 nt, Artificial Sequence
  Description of Artificial Sequence: Synthetic oligonucleotide
agaguucaaaag

SEQ ID NO: 102752 - RNA, 12 nt, Artificial Sequence
  Description of Artificial Sequence: Synthetic oligonucleotide
gaguucaaaagc

SEQ ID NO: 102753 - RNA, 11 nt, Artificial Sequence
  Description of Artificial Sequence: Synthetic oligonucleotide
ucaaaagcccu

SEQ ID NO: 102754 - RNA, 11 nt, Artificial Sequence
  Description of Artificial Sequence: Synthetic oligonucleotide
caaaagcccuu

SEQ ID NO: 102755 - RNA, 11 nt, Artificial Sequence
  Description of Artificial Sequence: Synthetic oligonucleotide
aaagcccuuca

SEQ ID NO: 102756 - RNA, 11 nt, Artificial Sequence
  Description of Artificial Sequence: Synthetic oligonucleotide
aagcccuucag

SEQ ID NO: 102757 - RNA, 12 nt, Artificial Sequence
  Description of Artificial Sequence: Synthetic oligonucleotide
ugaagccgcucg

SEQ ID NO: 102758 - RNA, 11 nt, Artificial Sequence
  Description of Artificial Sequence: Synthetic oligonucleotide
acgccagucaa

SEQ ID NO: 102759 - RNA, 12 nt, Artificial Sequence
  Description of Artificial Sequence: Synthetic oligonucleotide
ucuuggugcgug

SEQ ID NO: 102760 - RNA, 13 nt, Artificial Sequence
  Description of Artificial Sequence: Synthetic oligonucleotide
uuggauucaucag

SEQ ID NO: 102761 - RNA, 12 nt, Artificial Sequence
  Description of Artificial Sequence: Synthetic oligonucleotide
ggaauaccuaag

SEQ ID NO: 102762 - RNA, 11 nt, Artificial Sequence
  Description of Artificial Sequence: Synthetic oligonucleotide
uuugaggcuca

SEQ ID NO: 102763 - RNA, 10 nt, Artificial Sequence
  Description of Artificial Sequence: Synthetic oligonucleotide
cuacaauugg

SEQ ID NO: 102764 - RNA, 11 nt, Artificial Sequence
  Description of Artificial Sequence: Synthetic oligonucleotide
aguuaggagcc

SEQ ID NO: 102765 - RNA, 12 nt, Artificial Sequence
  Description of Artificial Sequence: Synthetic oligonucleotide
gucaauauccac

SEQ ID NO: 102766 - RNA, 12 nt, Artificial Sequence
  Description of Artificial Sequence: Synthetic oligonucleotide
uguucagucaca

SEQ ID NO: 102767 - RNA, 11 nt, Artificial Sequence
  Description of Artificial Sequence: Synthetic oligonucleotide
cacacacauac

SEQ ID NO: 102768 - RNA, 11 nt, Artificial Sequence
  Description of Artificial Sequence: Synthetic oligonucleotide
uccuuuugcuu

SEQ ID NO: 102769 - RNA, 15 nt, Artificial Sequence
  Description of Artificial Sequence: Synthetic oligonucleotide
uuuaaaguaauuuuu

SEQ ID NO: 102770 - RNA, 12 nt, Artificial Sequence
  Description of Artificial Sequence: Synthetic oligonucleotide
aacagucaaugg

SEQ ID NO: 102771 - RNA, 12 nt, Artificial Sequence
  Description of Artificial Sequence: Synthetic oligonucleotide
cgacaaaccaau

SEQ ID NO: 102772 - RNA, 11 nt, Artificial Sequence
  Description of Artificial Sequence: Synthetic oligonucleotide
cugcuaccacu

SEQ ID NO: 102773 - RNA, 12 nt, Artificial Sequence
  Description of Artificial Sequence: Synthetic oligonucleotide
caagcggucuua

SEQ ID NO: 102774 - RNA, 12 nt, Artificial Sequence
  Description of Artificial Sequence: Synthetic oligonucleotide
gucuuaccggcu

SEQ ID NO: 102775 - RNA, 10 nt, Artificial Sequence
  Description of Artificial Sequence: Synthetic oligonucleotide
auggguuacc

SEQ ID NO: 102776 - RNA, 10 nt, Artificial Sequence
  Description of Artificial Sequence: Synthetic oligonucleotide
uuaccugcga

SEQ ID NO: 102777 - RNA, 11 nt, Artificial Sequence
  Description of Artificial Sequence: Synthetic oligonucleotide
aucuugcugag

SEQ ID NO: 102778 - RNA, 12 nt, Artificial Sequence
  Description of Artificial Sequence: Synthetic oligonucleotide
gcauaaaacagu

SEQ ID NO: 102779 - RNA, 11 nt, Artificial Sequence
  Description of Artificial Sequence: Synthetic oligonucleotide
uccuuuauccu

SEQ ID NO: 102780 - RNA, 11 nt, Artificial Sequence
  Description of Artificial Sequence: Synthetic oligonucleotide
aacgcaaguug

SEQ ID NO: 102781 - RNA, 12 nt, Artificial Sequence
  Description of Artificial Sequence: Synthetic oligonucleotide
aacugaaaccau

SEQ ID NO: 102782 - RNA, 13 nt, Artificial Sequence
  Description of Artificial Sequence: Synthetic oligonucleotide
cuuuguuaaauau

SEQ ID NO: 102783 - RNA, 13 nt, Artificial Sequence
  Description of Artificial Sequence: Synthetic oligonucleotide
uauauuaaaaguu

SEQ ID NO: 102784 - RNA, 12 nt, Artificial Sequence
  Description of Artificial Sequence: Synthetic oligonucleotide
uuuugacuuaac

SEQ ID NO: 102785 - RNA, 12 nt, Artificial Sequence
  Description of Artificial Sequence: Synthetic oligonucleotide
caaacucagcac

SEQ ID NO: 102786 - RNA, 10 nt, Artificial Sequence
  Description of Artificial Sequence: Synthetic oligonucleotide
gcugaccuca

SEQ ID NO: 102787 - RNA, 13 nt, Artificial Sequence
  Description of Artificial Sequence: Synthetic oligonucleotide
uuauucagaucgc

SEQ ID NO: 102788 - RNA, 12 nt, Artificial Sequence
  Description of Artificial Sequence: Synthetic oligonucleotide
ggguucugggau

SEQ ID NO: 102789 - RNA, 14 nt, Artificial Sequence
  Description of Artificial Sequence: Synthetic oligonucleotide
uauuggaaauuaug

SEQ ID NO: 102790 - RNA, 12 nt, Artificial Sequence
  Description of Artificial Sequence: Synthetic oligonucleotide
uggaagcacuag

SEQ ID NO: 102791 - RNA, 12 nt, Artificial Sequence
  Description of Artificial Sequence: Synthetic oligonucleotide
uuuuuaugugga

SEQ ID NO: 102792 - RNA, 11 nt, Artificial Sequence
  Description of Artificial Sequence: Synthetic oligonucleotide
gaauugguaga

SEQ ID NO: 102793 - RNA, 12 nt, Artificial Sequence
  Description of Artificial Sequence: Synthetic oligonucleotide
uagacuuggaga

SEQ ID NO: 102794 - RNA, 12 nt, Artificial Sequence
  Description of Artificial Sequence: Synthetic oligonucleotide
uacaguauucca

SEQ ID NO: 102795 - RNA, 14 nt, Artificial Sequence
  Description of Artificial Sequence: Synthetic oligonucleotide
cacugaugaauuaa

SEQ ID NO: 102796 - RNA, 11 nt, Artificial Sequence
  Description of Artificial Sequence: Synthetic oligonucleotide
cacaucaucac

SEQ ID NO: 102797 - RNA, 12 nt, Artificial Sequence
  Description of Artificial Sequence: Synthetic oligonucleotide
ucaccaaacaga

SEQ ID NO: 102798 - RNA, 11 nt, Artificial Sequence
  Description of Artificial Sequence: Synthetic oligonucleotide
gaacaugaugg

SEQ ID NO: 102799 - RNA, 11 nt, Artificial Sequence
  Description of Artificial Sequence: Synthetic oligonucleotide
auguagacugc

SEQ ID NO: 102800 - RNA, 12 nt, Artificial Sequence
  Description of Artificial Sequence: Synthetic oligonucleotide
gaucuauuuaug

SEQ ID NO: 102801 - RNA, 11 nt, Artificial Sequence
  Description of Artificial Sequence: Synthetic oligonucleotide
cacuauuauca

SEQ ID NO: 102802 - RNA, 10 nt, Artificial Sequence
  Description of Artificial Sequence: Synthetic oligonucleotide
ucaguucugc

SEQ ID NO: 102803 - RNA, 12 nt, Artificial Sequence
  Description of Artificial Sequence: Synthetic oligonucleotide
gauuaaaccuac

SEQ ID NO: 102804 - RNA, 12 nt, Artificial Sequence
  Description of Artificial Sequence: Synthetic oligonucleotide
uaaaauccuucu

SEQ ID NO: 102805 - RNA, 11 nt, Artificial Sequence
  Description of Artificial Sequence: Synthetic oligonucleotide
augcuguagac

SEQ ID NO: 102806 - RNA, 12 nt, Artificial Sequence
  Description of Artificial Sequence: Synthetic oligonucleotide
ugauaggaauag

SEQ ID NO: 102807 - RNA, 10 nt, Artificial Sequence
  Description of Artificial Sequence: Synthetic oligonucleotide
auggcccuga

SEQ ID NO: 102808 - RNA, 10 nt, Artificial Sequence
  Description of Artificial Sequence: Synthetic oligonucleotide
uccucaagca

SEQ ID NO: 102809 - RNA, 9 nt, Artificial Sequence
  Description of Artificial Sequence: Synthetic oligonucleotide
uucagccca

SEQ ID NO: 102810 - RNA, 10 nt, Artificial Sequence
  Description of Artificial Sequence: Synthetic oligonucleotide
cugcugaacc

SEQ ID NO: 102811 - RNA, 11 nt, Artificial Sequence
  Description of Artificial Sequence: Synthetic oligonucleotide
aguucucuuca

SEQ ID NO: 102812 - RNA, 10 nt, Artificial Sequence
  Description of Artificial Sequence: Synthetic oligonucleotide
cagccuagag

SEQ ID NO: 102813 - RNA, 12 nt, Artificial Sequence
  Description of Artificial Sequence: Synthetic oligonucleotide
ucugugaagugu

SEQ ID NO: 102814 - RNA, 13 nt, Artificial Sequence
  Description of Artificial Sequence: Synthetic oligonucleotide
gagaaaauuucaa

SEQ ID NO: 102815 - RNA, 10 nt, Artificial Sequence
  Description of Artificial Sequence: Synthetic oligonucleotide
auccuccuga

SEQ ID NO: 102816 - RNA, 11 nt, Artificial Sequence
  Description of Artificial Sequence: Synthetic oligonucleotide
ugacaucauau

SEQ ID NO: 102817 - RNA, 12 nt, Artificial Sequence
  Description of Artificial Sequence: Synthetic oligonucleotide
aucuucaucaua

SEQ ID NO: 102818 - RNA, 12 nt, Artificial Sequence
  Description of Artificial Sequence: Synthetic oligonucleotide
acuagcuauuaa

SEQ ID NO: 102819 - RNA, 13 nt, Artificial Sequence
  Description of Artificial Sequence: Synthetic oligonucleotide
cucuacuaaaaau

SEQ ID NO: 102820 - RNA, 11 nt, Artificial Sequence
  Description of Artificial Sequence: Synthetic oligonucleotide
cuaucucgccu

SEQ ID NO: 102821 - RNA, 12 nt, Artificial Sequence
  Description of Artificial Sequence: Synthetic oligonucleotide
uucgguccaguu

SEQ ID NO: 102822 - RNA, 10 nt, Artificial Sequence
  Description of Artificial Sequence: Synthetic oligonucleotide
auguagccgc

SEQ ID NO: 102823 - RNA, 11 nt, Artificial Sequence
  Description of Artificial Sequence: Synthetic oligonucleotide
gaggagacuug

SEQ ID NO: 102824 - RNA, 11 nt, Artificial Sequence
  Description of Artificial Sequence: Synthetic oligonucleotide
aguagugagga

SEQ ID NO: 102825 - RNA, 13 nt, Artificial Sequence
  Description of Artificial Sequence: Synthetic oligonucleotide
agaugaguacaaa

SEQ ID NO: 102826 - RNA, 12 nt, Artificial Sequence
  Description of Artificial Sequence: Synthetic oligonucleotide
uuguuaaugggc

SEQ ID NO: 102827 - RNA, 12 nt, Artificial Sequence
  Description of Artificial Sequence: Synthetic oligonucleotide
uuuuaauuuauu

SEQ ID NO: 102828 - RNA, 11 nt, Artificial Sequence
  Description of Artificial Sequence: Synthetic oligonucleotide
auuuaaauaug

SEQ ID NO: 102829 - RNA, 12 nt, Artificial Sequence
  Description of Artificial Sequence: Synthetic oligonucleotide
auccuuuguuuc

SEQ ID NO: 102830 - RNA, 13 nt, Artificial Sequence
  Description of Artificial Sequence: Synthetic oligonucleotide
gucuaaguguuug

SEQ ID NO: 102831 - RNA, 11 nt, Artificial Sequence
  Description of Artificial Sequence: Synthetic oligonucleotide
ccugugacaaa

SEQ ID NO: 102832 - RNA, 12 nt, Artificial Sequence
  Description of Artificial Sequence: Synthetic oligonucleotide
caggcugaauua

SEQ ID NO: 102833 - RNA, 13 nt, Artificial Sequence
  Description of Artificial Sequence: Synthetic oligonucleotide
ucauucuuacaau

SEQ ID NO: 102834 - RNA, 14 nt, Artificial Sequence
  Description of Artificial Sequence: Synthetic oligonucleotide
cauucuuacaauug

SEQ ID NO: 102835 - RNA, 11 nt, Artificial Sequence
  Description of Artificial Sequence: Synthetic oligonucleotide
agagaguguac

SEQ ID NO: 102836 - RNA, 11 nt, Artificial Sequence
  Description of Artificial Sequence: Synthetic oligonucleotide
gaacucagcag

SEQ ID NO: 102837 - RNA, 12 nt, Artificial Sequence
  Description of Artificial Sequence: Synthetic oligonucleotide
uuauuuucagua

SEQ ID NO: 102838 - RNA, 11 nt, Artificial Sequence
  Description of Artificial Sequence: Synthetic oligonucleotide
cuuaaauggaa

SEQ ID NO: 102839 - RNA, 12 nt, Artificial Sequence
  Description of Artificial Sequence: Synthetic oligonucleotide
gccuaaaauugu

SEQ ID NO: 102840 - RNA, 12 nt, Artificial Sequence
  Description of Artificial Sequence: Synthetic oligonucleotide
acuaacaucugg

SEQ ID NO: 102841 - RNA, 11 nt, Artificial Sequence
  Description of Artificial Sequence: Synthetic oligonucleotide
gacugugagcu

SEQ ID NO: 102842 - RNA, 13 nt, Artificial Sequence
  Description of Artificial Sequence: Synthetic oligonucleotide
gcuuuuuauuaau

SEQ ID NO: 102843 - RNA, 12 nt, Artificial Sequence
  Description of Artificial Sequence: Synthetic oligonucleotide
ucuucuuacauu

SEQ ID NO: 102844 - RNA, 14 nt, Artificial Sequence
  Description of Artificial Sequence: Synthetic oligonucleotide
auuuguaaaaaugu

SEQ ID NO: 102845 - RNA, 14 nt, Artificial Sequence
  Description of Artificial Sequence: Synthetic oligonucleotide
ucuuaauucauauu

SEQ ID NO: 102846 - RNA, 12 nt, Artificial Sequence
  Description of Artificial Sequence: Synthetic oligonucleotide
aacuaaucauga

SEQ ID NO: 102847 - RNA, 11 nt, Artificial Sequence
  Description of Artificial Sequence: Synthetic oligonucleotide
cugcucuuggg

SEQ ID NO: 102848 - RNA, 12 nt, Artificial Sequence
  Description of Artificial Sequence: Synthetic oligonucleotide
aguagcuuugag

SEQ ID NO: 102849 - RNA, 13 nt, Artificial Sequence
  Description of Artificial Sequence: Synthetic oligonucleotide
acguaauauuuca

SEQ ID NO: 102850 - RNA, 12 nt, Artificial Sequence
  Description of Artificial Sequence: Synthetic oligonucleotide
auucucuucacu

SEQ ID NO: 102851 - RNA, 13 nt, Artificial Sequence
  Description of Artificial Sequence: Synthetic oligonucleotide
uaaugcuaagaaa

SEQ ID NO: 102852 - RNA, 11 nt, Artificial Sequence
  Description of Artificial Sequence: Synthetic oligonucleotide
cugaaaaucaa

SEQ ID NO: 102853 - RNA, 13 nt, Artificial Sequence
  Description of Artificial Sequence: Synthetic oligonucleotide
auaugauuacuuu

SEQ ID NO: 102854 - RNA, 13 nt, Artificial Sequence
  Description of Artificial Sequence: Synthetic oligonucleotide
auuuuguucuaca

SEQ ID NO: 102855 - RNA, 11 nt, Artificial Sequence
  Description of Artificial Sequence: Synthetic oligonucleotide
ccgggacucuc

SEQ ID NO: 102856 - RNA, 13 nt, Artificial Sequence
  Description of Artificial Sequence: Synthetic oligonucleotide
cuuuaaaguaaag

SEQ ID NO: 102857 - RNA, 12 nt, Artificial Sequence
  Description of Artificial Sequence: Synthetic oligonucleotide
cuggaagccugg

SEQ ID NO: 102858 - RNA, 13 nt, Artificial Sequence
  Description of Artificial Sequence: Synthetic oligonucleotide
aaacaaaagagag

SEQ ID NO: 102859 - RNA, 12 nt, Artificial Sequence
  Description of Artificial Sequence: Synthetic oligonucleotide
ucaguuaugccg

SEQ ID NO: 102860 - RNA, 12 nt, Artificial Sequence
  Description of Artificial Sequence: Synthetic oligonucleotide
aaaagaagucca

SEQ ID NO: 102861 - RNA, 10 nt, Artificial Sequence
  Description of Artificial Sequence: Synthetic oligonucleotide
ggugagguua

SEQ ID NO: 102862 - RNA, 10 nt, Artificial Sequence
  Description of Artificial Sequence: Synthetic oligonucleotide
ggaagaggac

SEQ ID NO: 102863 - RNA, 12 nt, Artificial Sequence
  Description of Artificial Sequence: Synthetic oligonucleotide
agcaaguauugu

SEQ ID NO: 102864 - RNA, 11 nt, Artificial Sequence
  Description of Artificial Sequence: Synthetic oligonucleotide
uuguagcacuc

SEQ ID NO: 102865 - RNA, 13 nt, Artificial Sequence
  Description of Artificial Sequence: Synthetic oligonucleotide
caaaaccacaaau

SEQ ID NO: 102866 - RNA, 11 nt, Artificial Sequence
  Description of Artificial Sequence: Synthetic oligonucleotide
aagcccauaca

SEQ ID NO: 102867 - RNA, 10 nt, Artificial Sequence
  Description of Artificial Sequence: Synthetic oligonucleotide
gcccauacag

SEQ ID NO: 102868 - RNA, 11 nt, Artificial Sequence
  Description of Artificial Sequence: Synthetic oligonucleotide
agaaaccuucc

SEQ ID NO: 102869 - RNA, 9 nt, Artificial Sequence
  Description of Artificial Sequence: Synthetic oligonucleotide
uauaccuac

SEQ ID NO: 102870 - RNA, 12 nt, Artificial Sequence
  Description of Artificial Sequence: Synthetic oligonucleotide
ccaguuuucgga

SEQ ID NO: 102871 - RNA, 8 nt, Artificial Sequence
  Description of Artificial Sequence: Synthetic oligonucleotide
gaacaggg

SEQ ID NO: 102872 - RNA, 12 nt, Artificial Sequence
  Description of Artificial Sequence: Synthetic oligonucleotide
uaacuuuccagu

SEQ ID NO: 102873 - RNA, 13 nt, Artificial Sequence
  Description of Artificial Sequence: Synthetic oligonucleotide
aaguuugguuuug

SEQ ID NO: 102874 - RNA, 11 nt, Artificial Sequence
  Description of Artificial Sequence: Synthetic oligonucleotide
uucccacugua

SEQ ID NO: 102875 - RNA, 12 nt, Artificial Sequence
  Description of Artificial Sequence: Synthetic oligonucleotide
gauaccauauga

SEQ ID NO: 102876 - RNA, 10 nt, Artificial Sequence
  Description of Artificial Sequence: Synthetic oligonucleotide
acaugggcug

SEQ ID NO: 102877 - RNA, 12 nt, Artificial Sequence
  Description of Artificial Sequence: Synthetic oligonucleotide
aacuuuuucaua

SEQ ID NO: 102878 - RNA, 11 nt, Artificial Sequence
  Description of Artificial Sequence: Synthetic oligonucleotide
augaggccgga

SEQ ID NO: 102879 - RNA, 10 nt, Artificial Sequence
  Description of Artificial Sequence: Synthetic oligonucleotide
cugcauuugu

SEQ ID NO: 102880 - RNA, 12 nt, Artificial Sequence
  Description of Artificial Sequence: Synthetic oligonucleotide
auguuuacuacc

SEQ ID NO: 102881 - RNA, 14 nt, Artificial Sequence
  Description of Artificial Sequence: Synthetic oligonucleotide
auuuuuugaugaaa

SEQ ID NO: 102882 - RNA, 13 nt, Artificial Sequence
  Description of Artificial Sequence: Synthetic oligonucleotide
agugugugaauuu

SEQ ID NO: 102883 - RNA, 12 nt, Artificial Sequence
  Description of Artificial Sequence: Synthetic oligonucleotide
agcaauguaugu

SEQ ID NO: 102884 - RNA, 13 nt, Artificial Sequence
  Description of Artificial Sequence: Synthetic oligonucleotide
aagcacauauaua

SEQ ID NO: 102885 - RNA, 13 nt, Artificial Sequence
  Description of Artificial Sequence: Synthetic oligonucleotide
uaauaguuucucc

SEQ ID NO: 102886 - RNA, 12 nt, Artificial Sequence
  Description of Artificial Sequence: Synthetic oligonucleotide
guuucuccaaau

SEQ ID NO: 102887 - RNA, 12 nt, Artificial Sequence
  Description of Artificial Sequence: Synthetic oligonucleotide
acuuccuagaaa

SEQ ID NO: 102888 - RNA, 12 nt, Artificial Sequence
  Description of Artificial Sequence: Synthetic oligonucleotide
acaccauauaug

SEQ ID NO: 102889 - RNA, 13 nt, Artificial Sequence
  Description of Artificial Sequence: Synthetic oligonucleotide
uauaugaauggag

SEQ ID NO: 102890 - RNA, 12 nt, Artificial Sequence
  Description of Artificial Sequence: Synthetic oligonucleotide
cauuuacaggga

SEQ ID NO: 102891 - RNA, 12 nt, Artificial Sequence
  Description of Artificial Sequence: Synthetic oligonucleotide
auuuacagggac

SEQ ID NO: 102892 - RNA, 9 nt, Artificial Sequence
  Description of Artificial Sequence: Synthetic oligonucleotide
gggaccuga

SEQ ID NO: 102893 - RNA, 13 nt, Artificial Sequence
  Description of Artificial Sequence: Synthetic oligonucleotide
guuugacugcauc

SEQ ID NO: 102894 - RNA, 12 nt, Artificial Sequence
  Description of Artificial Sequence: Synthetic oligonucleotide
uugacugcaucg

SEQ ID NO: 102895 - RNA, 11 nt, Artificial Sequence
  Description of Artificial Sequence: Synthetic oligonucleotide
aguucacaggg

SEQ ID NO: 102896 - RNA, 12 nt, Artificial Sequence
  Description of Artificial Sequence: Synthetic oligonucleotide
gcaccucugucc

SEQ ID NO: 102897 - RNA, 14 nt, Artificial Sequence
  Description of Artificial Sequence: Synthetic oligonucleotide
guuugucuuuuuaa

SEQ ID NO: 102898 - RNA, 13 nt, Artificial Sequence
  Description of Artificial Sequence: Synthetic oligonucleotide
uugucuuuuuaag

SEQ ID NO: 102899 - RNA, 12 nt, Artificial Sequence
  Description of Artificial Sequence: Synthetic oligonucleotide
cuaaagguuguc

SEQ ID NO: 102900 - RNA, 11 nt, Artificial Sequence
  Description of Artificial Sequence: Synthetic oligonucleotide
agguugucgac

SEQ ID NO: 102901 - RNA, 12 nt, Artificial Sequence
  Description of Artificial Sequence: Synthetic oligonucleotide
ccuggcaauugu

SEQ ID NO: 102902 - RNA, 11 nt, Artificial Sequence
  Description of Artificial Sequence: Synthetic oligonucleotide
guggugcgagg

SEQ ID NO: 102903 - RNA, 12 nt, Artificial Sequence
  Description of Artificial Sequence: Synthetic oligonucleotide
gagacaugaaau

SEQ ID NO: 102904 - RNA, 12 nt, Artificial Sequence
  Description of Artificial Sequence: Synthetic oligonucleotide
uauauuucucca

SEQ ID NO: 102905 - RNA, 9 nt, Artificial Sequence
  Description of Artificial Sequence: Synthetic oligonucleotide
augaaggcu

SEQ ID NO: 102906 - RNA, 10 nt, Artificial Sequence
  Description of Artificial Sequence: Synthetic oligonucleotide
cuggaguggu

SEQ ID NO: 102907 - RNA, 10 nt, Artificial Sequence
  Description of Artificial Sequence: Synthetic oligonucleotide
ggaagagagg

SEQ ID NO: 102908 - RNA, 11 nt, Artificial Sequence
  Description of Artificial Sequence: Synthetic oligonucleotide
uugcaucgggc

SEQ ID NO: 102909 - RNA, 12 nt, Artificial Sequence
  Description of Artificial Sequence: Synthetic oligonucleotide
uauccuacugug

SEQ ID NO: 102910 - RNA, 12 nt, Artificial Sequence
  Description of Artificial Sequence: Synthetic oligonucleotide
ccuacuguguaa

SEQ ID NO: 102911 - RNA, 11 nt, Artificial Sequence
  Description of Artificial Sequence: Synthetic oligonucleotide
cuuguagugua

SEQ ID NO: 102912 - RNA, 12 nt, Artificial Sequence
  Description of Artificial Sequence: Synthetic oligonucleotide
cuuuguugauug

SEQ ID NO: 102913 - RNA, 13 nt, Artificial Sequence
  Description of Artificial Sequence: Synthetic oligonucleotide
uuguugauugaaa

SEQ ID NO: 102914 - RNA, 14 nt, Artificial Sequence
  Description of Artificial Sequence: Synthetic oligonucleotide
ucuuuuucuuccau

SEQ ID NO: 102915 - RNA, 12 nt, Artificial Sequence
  Description of Artificial Sequence: Synthetic oligonucleotide
aucuuccuucua

SEQ ID NO: 102916 - RNA, 12 nt, Artificial Sequence
  Description of Artificial Sequence: Synthetic oligonucleotide
ugaaugcuucau

SEQ ID NO: 102917 - RNA, 12 nt, Artificial Sequence
  Description of Artificial Sequence: Synthetic oligonucleotide
gaaugcuucaug

SEQ ID NO: 102918 - RNA, 12 nt, Artificial Sequence
  Description of Artificial Sequence: Synthetic oligonucleotide
auucuacuuuga

SEQ ID NO: 102919 - RNA, 12 nt, Artificial Sequence
  Description of Artificial Sequence: Synthetic oligonucleotide
gcaacuacagac

SEQ ID NO: 102920 - RNA, 12 nt, Artificial Sequence
  Description of Artificial Sequence: Synthetic oligonucleotide
accaaggucaac

SEQ ID NO: 102921 - RNA, 12 nt, Artificial Sequence
  Description of Artificial Sequence: Synthetic oligonucleotide
gacuaucucgac

SEQ ID NO: 102922 - RNA, 12 nt, Artificial Sequence
  Description of Artificial Sequence: Synthetic oligonucleotide
accuucccaaac

SEQ ID NO: 102923 - RNA, 13 nt, Artificial Sequence
  Description of Artificial Sequence: Synthetic oligonucleotide
caagcuuagaacu

SEQ ID NO: 102924 - RNA, 14 nt, Artificial Sequence
  Description of Artificial Sequence: Synthetic oligonucleotide
gcuuagaacuuuaa

SEQ ID NO: 102925 - RNA, 13 nt, Artificial Sequence
  Description of Artificial Sequence: Synthetic oligonucleotide
aacuuuaagcaac

SEQ ID NO: 102926 - RNA, 10 nt, Artificial Sequence
  Description of Artificial Sequence: Synthetic oligonucleotide
agaccaccac

SEQ ID NO: 102927 - RNA, 13 nt, Artificial Sequence
  Description of Artificial Sequence: Synthetic oligonucleotide
cgagaaauaaagu

SEQ ID NO: 102928 - RNA, 13 nt, Artificial Sequence
  Description of Artificial Sequence: Synthetic oligonucleotide
gagaaauaaaguu

SEQ ID NO: 102929 - RNA, 11 nt, Artificial Sequence
  Description of Artificial Sequence: Synthetic oligonucleotide
ggaaaugaucc

SEQ ID NO: 102930 - RNA, 12 nt, Artificial Sequence
  Description of Artificial Sequence: Synthetic oligonucleotide
aagaaaugaaac

SEQ ID NO: 102931 - RNA, 12 nt, Artificial Sequence
  Description of Artificial Sequence: Synthetic oligonucleotide
uuuccauccucc

SEQ ID NO: 102932 - RNA, 14 nt, Artificial Sequence
  Description of Artificial Sequence: Synthetic oligonucleotide
cugaaaaucuuuga

SEQ ID NO: 102933 - RNA, 10 nt, Artificial Sequence
  Description of Artificial Sequence: Synthetic oligonucleotide
gccguucagg

SEQ ID NO: 102934 - RNA, 12 nt, Artificial Sequence
  Description of Artificial Sequence: Synthetic oligonucleotide
aggguccagaag

SEQ ID NO: 102935 - RNA, 12 nt, Artificial Sequence
  Description of Artificial Sequence: Synthetic oligonucleotide
caagacugcuug

SEQ ID NO: 102936 - RNA, 12 nt, Artificial Sequence
  Description of Artificial Sequence: Synthetic oligonucleotide
ccaugucuuugg

SEQ ID NO: 102937 - RNA, 10 nt, Artificial Sequence
  Description of Artificial Sequence: Synthetic oligonucleotide
ccugaaacac

SEQ ID NO: 102938 - RNA, 11 nt, Artificial Sequence
  Description of Artificial Sequence: Synthetic oligonucleotide
cucuguaccuc

SEQ ID NO: 102939 - RNA, 11 nt, Artificial Sequence
  Description of Artificial Sequence: Synthetic oligonucleotide
gcaagacaaga

SEQ ID NO: 102940 - RNA, 12 nt, Artificial Sequence
  Description of Artificial Sequence: Synthetic oligonucleotide
caagacaagaaa

SEQ ID NO: 102941 - RNA, 11 nt, Artificial Sequence
  Description of Artificial Sequence: Synthetic oligonucleotide
guacaagaucc

SEQ ID NO: 102942 - RNA, 11 nt, Artificial Sequence
  Description of Artificial Sequence: Synthetic oligonucleotide
guacuugcaga

SEQ ID NO: 102943 - RNA, 12 nt, Artificial Sequence
  Description of Artificial Sequence: Synthetic oligonucleotide
gaucgauacaga

SEQ ID NO: 102944 - RNA, 12 nt, Artificial Sequence
  Description of Artificial Sequence: Synthetic oligonucleotide
auaaaaauaaau

SEQ ID NO: 102945 - RNA, 12 nt, Artificial Sequence
  Description of Artificial Sequence: Synthetic oligonucleotide
aaaaauaaauau

SEQ ID NO: 102946 - RNA, 12 nt, Artificial Sequence
  Description of Artificial Sequence: Synthetic oligonucleotide
uugacugcugug

SEQ ID NO: 102947 - RNA, 12 nt, Artificial Sequence
  Description of Artificial Sequence: Synthetic oligonucleotide
gagaugagagac

SEQ ID NO: 102948 - RNA, 9 nt, Artificial Sequence
  Description of Artificial Sequence: Synthetic oligonucleotide
cccacuugg

SEQ ID NO: 102949 - RNA, 3136 nt, Homo sapiens
gcgcagaacuuggggagccgccgccgccauccgccgccgcagccagcuuccgccgccgcaggaccggccccugccccagccuccgcagccgcggcgcguccacgcccgcccgcgcccagggcgagucggggucgccgccugcacgcuucucaguguuccccgcgccccgcauguaacccggccaggcccccgcaacuguguccccugcagcuccagccccgggcugcacccccccgccccgacaccagcucuccagccugcucguccaggauggccgcggccaaggccgagaugcagcugauguccccgcugcagaucucugacccguucggauccuuuccucacucgcccaccauggacaacuacccuaagcuggaggagaugaugcugcugagcaacggggcuccccaguuccucggcgccgccggggccccagagggcagcggcagcaacagcagcagcagcagcagcgggggcgguggaggcggcgggggcggcagcaacagcagcagcagcagcagcaccuucaacccucaggcggacacgggcgagcagcccuacgagcaccugaccgcagagucuuuuccugacaucucucugaacaacgagaaggugcugguggagaccaguuaccccagccaaaccacucgacugccccccaucaccuauacuggccgcuuuucccuggagccugcacccaacaguggcaacaccuuguggcccgagccccucuucagcuuggucaguggccuagugagcaugaccaacccaccggccuccucguccucagcaccaucuccagcggccuccuccgccuccgccucccagagcccaccccugagcugcgcagugccauccaacgacagcagucccauuuacucagcggcacccaccuuccccacgccgaacacugacauuuucccugagccacaaagccaggccuucccgggcucggcagggacagcgcuccaguacccgccuccugccuacccugccgccaaggguggcuuccagguucccaugauccccgacuaccuguuuccacagcagcagggggaucugggccugggcaccccagaccagaagcccuuccagggccuggagagccgcacccagcagccuucgcuaaccccucugucuacuauuaaggccuuugccacucagucgggcucccaggaccugaaggcccucaauaccagcuaccagucccagcucaucaaacccagccgcaugcgcaaguaccccaaccggcccagcaagacgcccccccacgaacgcccuuacgcuugcccaguggaguccugugaucgccgcuucucccgcuccgacgagcucacccgccacauccgcauccacacaggccagaagcccuuccagugccgcaucugcaugcgcaacuucagccgcagcgaccaccucaccacccacauccgcacccacacaggcgaaaagcccuucgccugcgacaucuguggaagaaaguuugccaggagcgaugaacgcaagaggcauaccaagauccacuugcggcagaaggacaagaaagcagacaaaaguguuguggccucuucggccaccuccucucucucuuccuacccguccccgguugcuaccucuuacccguccccgguuacuaccucuuauccauccccggccaccaccucauacccauccccugugcccaccuccuucuccucucccggcuccucgaccuacccauccccugugcacaguggcuuccccuccccgucgguggccaccacguacuccucuguucccccugcuuucccggcccaggucagcagcuucccuuccucagcugucaccaacuccuucagcgccuccacagggcuuucggacaugacagcaaccuuuucucccaggacaauugaaauuugcuaaagggaaaggggaaagaaagggaaaagggagaaaaagaaacacaagagacuuaaaggacaggaggaggagauggccauaggagaggaggguuccucuuaggucagauggagguucucagagccaaguccucccucucuacuggaguggaaggucuauuggccaacaauccuuucugcccacuuccccuuccccaauuacuauucccuuugacuucagcugccugaaacagccauguccaaguucuucaccucuauccaaagaacuugauuugcauggauuuuggauaaaucauuucaguaucaucuccaucauaugccugaccccuugcucccuucaaugcuagaaaaucgaguuggcaaaaugggguuugggccccucagagcccugcccugcacccuuguacagugucugugccauggauuucguuuuucuugggguacucuugaugugaagauaauuugcauauucuauuguauuauuuggaguuagguccucacuugggggaaaaaaaaaaaagaaaagccaagcaaaccaauggugauccucuauuuugugaugaugcugugacaauaaguuugaaccuuuuuuuuugaaacagcagucccaguauucucagagcaugugucagaguguuguuccguuaaccuuuuuguaaauacugcuugaccguacucucacauguggcaaaauaugguuugguuuuucuuuuuuuuuuuuuuugaaaguguuuuuucuucguccuuuugguuuaaaaaguuucacgucuuggugccuuuugugugaugcgccuugcugauggcuugacaugugcaauugugagggacaugcucaccucuagccuuaaggggggcagggagugaugauuugggggaggcuuugggagcaaaauaaggaagagggcugagcugagcuucgguucuccagaauguaagaaaacaaaaucuaaaacaaaaucugaacucucaaaagucuauuuuuuuaacugaaaauguaaauuuauaaauauauucaggaguuggaauguuguaguuaccuacugaguaggcggcgauuuuuguauguuaugaacaugcaguucauuauuuugugguucuauuuuacuuuguacuuguguuugcuuaaacaaagugacuguuuggcuuauaaacacauugaaugcgcuuuauugcccaugggauaugugguguauauccuuccaaaaaauuaaaacgaaaauaaaguagcugcgauuggg

SEQ ID NO: 102950 - RNA, 19 nt, Artificial Sequence
  Description of Artificial Sequence: Synthetic oligonucleotide
gcgcagaacuuggggagcc

SEQ ID NO: 102951 - RNA, 19 nt, Artificial Sequence
  Description of Artificial Sequence: Synthetic oligonucleotide
cgccgccgccauccgccgc

SEQ ID NO: 102952 - RNA, 19 nt, Artificial Sequence
  Description of Artificial Sequence: Synthetic oligonucleotide
ccgcagccagcuuccgccg

SEQ ID NO: 102953 - RNA, 19 nt, Artificial Sequence
  Description of Artificial Sequence: Synthetic oligonucleotide
gccgcaggaccggccccug

SEQ ID NO: 102954 - RNA, 19 nt, Artificial Sequence
  Description of Artificial Sequence: Synthetic oligonucleotide
gccccagccuccgcagccg

SEQ ID NO: 102955 - RNA, 19 nt, Artificial Sequence
  Description of Artificial Sequence: Synthetic oligonucleotide
gcggcgcguccacgcccgc

SEQ ID NO: 102956 - RNA, 19 nt, Artificial Sequence
  Description of Artificial Sequence: Synthetic oligonucleotide
cccgcgcccagggcgaguc

SEQ ID NO: 102957 - RNA, 19 nt, Artificial Sequence
  Description of Artificial Sequence: Synthetic oligonucleotide
cggggucgccgccugcacg

SEQ ID NO: 102958 - RNA, 19 nt, Artificial Sequence
  Description of Artificial Sequence: Synthetic oligonucleotide
gcuucucaguguuccccgc

SEQ ID NO: 102959 - RNA, 19 nt, Artificial Sequence
  Description of Artificial Sequence: Synthetic oligonucleotide
cgccccgcauguaacccgg

SEQ ID NO: 102960 - RNA, 19 nt, Artificial Sequence
  Description of Artificial Sequence: Synthetic oligonucleotide
gccaggcccccgcaacugu

SEQ ID NO: 102961 - RNA, 19 nt, Artificial Sequence
  Description of Artificial Sequence: Synthetic oligonucleotide
uguccccugcagcuccagc

SEQ ID NO: 102962 - RNA, 19 nt, Artificial Sequence
  Description of Artificial Sequence: Synthetic oligonucleotide
ccccgggcugcaccccccc

SEQ ID NO: 102963 - RNA, 19 nt, Artificial Sequence
  Description of Artificial Sequence: Synthetic oligonucleotide
cgccccgacaccagcucuc

SEQ ID NO: 102964 - RNA, 19 nt, Artificial Sequence
  Description of Artificial Sequence: Synthetic oligonucleotide
ccagccugcucguccagga

SEQ ID NO: 102965 - RNA, 19 nt, Artificial Sequence
  Description of Artificial Sequence: Synthetic oligonucleotide
auggccgcggccaaggccg

SEQ ID NO: 102966 - RNA, 19 nt, Artificial Sequence
  Description of Artificial Sequence: Synthetic oligonucleotide
gagaugcagcugauguccc

SEQ ID NO: 102967 - RNA, 19 nt, Artificial Sequence
  Description of Artificial Sequence: Synthetic oligonucleotide
ccgcugcagaucucugacc

SEQ ID NO: 102968 - RNA, 19 nt, Artificial Sequence
  Description of Artificial Sequence: Synthetic oligonucleotide
ccguucggauccuuuccuc

SEQ ID NO: 102969 - RNA, 19 nt, Artificial Sequence
  Description of Artificial Sequence: Synthetic oligonucleotide
cacucgcccaccauggaca

SEQ ID NO: 102970 - RNA, 19 nt, Artificial Sequence
  Description of Artificial Sequence: Synthetic oligonucleotide
aacuacccuaagcuggagg

SEQ ID NO: 102971 - RNA, 19 nt, Artificial Sequence
  Description of Artificial Sequence: Synthetic oligonucleotide
gagaugaugcugcugagca

SEQ ID NO: 102972 - RNA, 19 nt, Artificial Sequence
  Description of Artificial Sequence: Synthetic oligonucleotide
aacggggcuccccaguucc

SEQ ID NO: 102973 - RNA, 19 nt, Artificial Sequence
  Description of Artificial Sequence: Synthetic oligonucleotide
cucggcgccgccggggccc

SEQ ID NO: 102974 - RNA, 19 nt, Artificial Sequence
  Description of Artificial Sequence: Synthetic oligonucleotide
ccagagggcagcggcagca

SEQ ID NO: 102975 - RNA, 19 nt, Artificial Sequence
  Description of Artificial Sequence: Synthetic oligonucleotide
aacagcagcagcagcagca

SEQ ID NO: 102976 - RNA, 19 nt, Artificial Sequence
  Description of Artificial Sequence: Synthetic oligonucleotide
agcgggggcgguggaggcg

SEQ ID NO: 102977 - RNA, 19 nt, Artificial Sequence
  Description of Artificial Sequence: Synthetic oligonucleotide
ggcgggggcggcagcaaca

SEQ ID NO: 102978 - RNA, 19 nt, Artificial Sequence
  Description of Artificial Sequence: Synthetic oligonucleotide
agcagcagcagcagcagca

SEQ ID NO: 102979 - RNA, 19 nt, Artificial Sequence
  Description of Artificial Sequence: Synthetic oligonucleotide
accuucaacccucaggcgg

SEQ ID NO: 102980 - RNA, 19 nt, Artificial Sequence
  Description of Artificial Sequence: Synthetic oligonucleotide
gacacgggcgagcagcccu

SEQ ID NO: 102981 - RNA, 19 nt, Artificial Sequence
  Description of Artificial Sequence: Synthetic oligonucleotide
uacgagcaccugaccgcag

SEQ ID NO: 102982 - RNA, 19 nt, Artificial Sequence
  Description of Artificial Sequence: Synthetic oligonucleotide
gagucuuuuccugacaucu

SEQ ID NO: 102983 - RNA, 19 nt, Artificial Sequence
  Description of Artificial Sequence: Synthetic oligonucleotide
ucucugaacaacgagaagg

SEQ ID NO: 102984 - RNA, 19 nt, Artificial Sequence
  Description of Artificial Sequence: Synthetic oligonucleotide
gugcugguggagaccaguu

SEQ ID NO: 102985 - RNA, 19 nt, Artificial Sequence
  Description of Artificial Sequence: Synthetic oligonucleotide
uaccccagccaaaccacuc

SEQ ID NO: 102986 - RNA, 19 nt, Artificial Sequence
  Description of Artificial Sequence: Synthetic oligonucleotide
cgacugccccccaucaccu

SEQ ID NO: 102987 - RNA, 19 nt, Artificial Sequence
  Description of Artificial Sequence: Synthetic oligonucleotide
uauacuggccgcuuuuccc

SEQ ID NO: 102988 - RNA, 19 nt, Artificial Sequence
  Description of Artificial Sequence: Synthetic oligonucleotide
cuggagccugcacccaaca

SEQ ID NO: 102989 - RNA, 19 nt, Artificial Sequence
  Description of Artificial Sequence: Synthetic oligonucleotide
aguggcaacaccuuguggc

SEQ ID NO: 102990 - RNA, 19 nt, Artificial Sequence
  Description of Artificial Sequence: Synthetic oligonucleotide
cccgagccccucuucagcu

SEQ ID NO: 102991 - RNA, 19 nt, Artificial Sequence
  Description of Artificial Sequence: Synthetic oligonucleotide
uuggucaguggccuaguga

SEQ ID NO: 102992 - RNA, 19 nt, Artificial Sequence
  Description of Artificial Sequence: Synthetic oligonucleotide
agcaugaccaacccaccgg

SEQ ID NO: 102993 - RNA, 19 nt, Artificial Sequence
  Description of Artificial Sequence: Synthetic oligonucleotide
gccuccucguccucagcac

SEQ ID NO: 102994 - RNA, 19 nt, Artificial Sequence
  Description of Artificial Sequence: Synthetic oligonucleotide
ccaucuccagcggccuccu

SEQ ID NO: 102995 - RNA, 19 nt, Artificial Sequence
  Description of Artificial Sequence: Synthetic oligonucleotide
uccgccuccgccucccaga

SEQ ID NO: 102996 - RNA, 19 nt, Artificial Sequence
  Description of Artificial Sequence: Synthetic oligonucleotide
agcccaccccugagcugcg

SEQ ID NO: 102997 - RNA, 19 nt, Artificial Sequence
  Description of Artificial Sequence: Synthetic oligonucleotide
gcagugccauccaacgaca

SEQ ID NO: 102998 - RNA, 19 nt, Artificial Sequence
  Description of Artificial Sequence: Synthetic oligonucleotide
agcagucccauuuacucag

SEQ ID NO: 102999 - RNA, 19 nt, Artificial Sequence
  Description of Artificial Sequence: Synthetic oligonucleotide
gcggcacccaccuucccca

SEQ ID NO: 103000 - RNA, 19 nt, Artificial Sequence
  Description of Artificial Sequence: Synthetic oligonucleotide
acgccgaacacugacauuu

SEQ ID NO: 103001 - RNA, 19 nt, Artificial Sequence
  Description of Artificial Sequence: Synthetic oligonucleotide
uucccugagccacaaagcc

SEQ ID NO: 103002 - RNA, 19 nt, Artificial Sequence
  Description of Artificial Sequence: Synthetic oligonucleotide
caggccuucccgggcucgg

SEQ ID NO: 103003 - RNA, 19 nt, Artificial Sequence
  Description of Artificial Sequence: Synthetic oligonucleotide
gcagggacagcgcuccagu

SEQ ID NO: 103004 - RNA, 19 nt, Artificial Sequence
  Description of Artificial Sequence: Synthetic oligonucleotide
uacccgccuccugccuacc

SEQ ID NO: 103005 - RNA, 19 nt, Artificial Sequence
  Description of Artificial Sequence: Synthetic oligonucleotide
ccugccgccaaggguggcu

SEQ ID NO: 103006 - RNA, 19 nt, Artificial Sequence
  Description of Artificial Sequence: Synthetic oligonucleotide
uuccagguucccaugaucc

SEQ ID NO: 103007 - RNA, 19 nt, Artificial Sequence
  Description of Artificial Sequence: Synthetic oligonucleotide
cccgacuaccuguuuccac

SEQ ID NO: 103008 - RNA, 19 nt, Artificial Sequence
  Description of Artificial Sequence: Synthetic oligonucleotide
cagcagcagggggaucugg

SEQ ID NO: 103009 - RNA, 19 nt, Artificial Sequence
  Description of Artificial Sequence: Synthetic oligonucleotide
ggccugggcaccccagacc

SEQ ID NO: 103010 - RNA, 19 nt, Artificial Sequence
  Description of Artificial Sequence: Synthetic oligonucleotide
cagaagcccuuccagggcc

SEQ ID NO: 103011 - RNA, 19 nt, Artificial Sequence
  Description of Artificial Sequence: Synthetic oligonucleotide
cuggagagccgcacccagc

SEQ ID NO: 103012 - RNA, 19 nt, Artificial Sequence
  Description of Artificial Sequence: Synthetic oligonucleotide
cagccuucgcuaaccccuc

SEQ ID NO: 103013 - RNA, 19 nt, Artificial Sequence
  Description of Artificial Sequence: Synthetic oligonucleotide
cugucuacuauuaaggccu

SEQ ID NO: 103014 - RNA, 19 nt, Artificial Sequence
  Description of Artificial Sequence: Synthetic oligonucleotide
uuugccacucagucgggcu

SEQ ID NO: 103015 - RNA, 19 nt, Artificial Sequence
  Description of Artificial Sequence: Synthetic oligonucleotide
ucccaggaccugaaggccc

SEQ ID NO: 103016 - RNA, 19 nt, Artificial Sequence
  Description of Artificial Sequence: Synthetic oligonucleotide
cucaauaccagcuaccagu

SEQ ID NO: 103017 - RNA, 19 nt, Artificial Sequence
  Description of Artificial Sequence: Synthetic oligonucleotide
ucccagcucaucaaaccca

SEQ ID NO: 103018 - RNA, 19 nt, Artificial Sequence
  Description of Artificial Sequence: Synthetic oligonucleotide
agccgcaugcgcaaguacc

SEQ ID NO: 103019 - RNA, 19 nt, Artificial Sequence
  Description of Artificial Sequence: Synthetic oligonucleotide
cccaaccggcccagcaaga

SEQ ID NO: 103020 - RNA, 19 nt, Artificial Sequence
  Description of Artificial Sequence: Synthetic oligonucleotide
acgcccccccacgaacgcc

SEQ ID NO: 103021 - RNA, 19 nt, Artificial Sequence
  Description of Artificial Sequence: Synthetic oligonucleotide
ccuuacgcuugcccagugg

SEQ ID NO: 103022 - RNA, 19 nt, Artificial Sequence
  Description of Artificial Sequence: Synthetic oligonucleotide
gaguccugugaucgccgcu

SEQ ID NO: 103023 - RNA, 19 nt, Artificial Sequence
  Description of Artificial Sequence: Synthetic oligonucleotide
uucucccgcuccgacgagc

SEQ ID NO: 103024 - RNA, 19 nt, Artificial Sequence
  Description of Artificial Sequence: Synthetic oligonucleotide
cucacccgccacauccgca

SEQ ID NO: 103025 - RNA, 19 nt, Artificial Sequence
  Description of Artificial Sequence: Synthetic oligonucleotide
auccacacaggccagaagc

SEQ ID NO: 103026 - RNA, 19 nt, Artificial Sequence
  Description of Artificial Sequence: Synthetic oligonucleotide
cccuuccagugccgcaucu

SEQ ID NO: 103027 - RNA, 19 nt, Artificial Sequence
  Description of Artificial Sequence: Synthetic oligonucleotide
ugcaugcgcaacuucagcc

SEQ ID NO: 103028 - RNA, 19 nt, Artificial Sequence
  Description of Artificial Sequence: Synthetic oligonucleotide
cgcagcgaccaccucacca

SEQ ID NO: 103029 - RNA, 19 nt, Artificial Sequence
  Description of Artificial Sequence: Synthetic oligonucleotide
acccacauccgcacccaca

SEQ ID NO: 103030 - RNA, 19 nt, Artificial Sequence
  Description of Artificial Sequence: Synthetic oligonucleotide
acaggcgaaaagcccuucg

SEQ ID NO: 103031 - RNA, 19 nt, Artificial Sequence
  Description of Artificial Sequence: Synthetic oligonucleotide
gccugcgacaucuguggaa

SEQ ID NO: 103032 - RNA, 19 nt, Artificial Sequence
  Description of Artificial Sequence: Synthetic oligonucleotide
agaaaguuugccaggagcg

SEQ ID NO: 103033 - RNA, 19 nt, Artificial Sequence
  Description of Artificial Sequence: Synthetic oligonucleotide
gaugaacgcaagaggcaua

SEQ ID NO: 103034 - RNA, 19 nt, Artificial Sequence
  Description of Artificial Sequence: Synthetic oligonucleotide
accaagauccacuugcggc

SEQ ID NO: 103035 - RNA, 19 nt, Artificial Sequence
  Description of Artificial Sequence: Synthetic oligonucleotide
cagaaggacaagaaagcag

SEQ ID NO: 103036 - RNA, 19 nt, Artificial Sequence
  Description of Artificial Sequence: Synthetic oligonucleotide
gacaaaaguguuguggccu

SEQ ID NO: 103037 - RNA, 19 nt, Artificial Sequence
  Description of Artificial Sequence: Synthetic oligonucleotide
ucuucggccaccuccucuc

SEQ ID NO: 103038 - RNA, 19 nt, Artificial Sequence
  Description of Artificial Sequence: Synthetic oligonucleotide
cucucuuccuacccguccc

SEQ ID NO: 103039 - RNA, 19 nt, Artificial Sequence
  Description of Artificial Sequence: Synthetic oligonucleotide
ccgguugcuaccucuuacc

SEQ ID NO: 103040 - RNA, 19 nt, Artificial Sequence
  Description of Artificial Sequence: Synthetic oligonucleotide
ccguccccgguuacuaccu

SEQ ID NO: 103041 - RNA, 19 nt, Artificial Sequence
  Description of Artificial Sequence: Synthetic oligonucleotide
ucuuauccauccccggcca

SEQ ID NO: 103042 - RNA, 19 nt, Artificial Sequence
  Description of Artificial Sequence: Synthetic oligonucleotide
accaccucauacccauccc

SEQ ID NO: 103043 - RNA, 19 nt, Artificial Sequence
  Description of Artificial Sequence: Synthetic oligonucleotide
ccugugcccaccuccuucu

SEQ ID NO: 103044 - RNA, 19 nt, Artificial Sequence
  Description of Artificial Sequence: Synthetic oligonucleotide
uccucucccggcuccucga

SEQ ID NO: 103045 - RNA, 19 nt, Artificial Sequence
  Description of Artificial Sequence: Synthetic oligonucleotide
accuacccauccccugugc

SEQ ID NO: 103046 - RNA, 19 nt, Artificial Sequence
  Description of Artificial Sequence: Synthetic oligonucleotide
cacaguggcuuccccuccc

SEQ ID NO: 103047 - RNA, 19 nt, Artificial Sequence
  Description of Artificial Sequence: Synthetic oligonucleotide
ccgucgguggccaccacgu

SEQ ID NO: 103048 - RNA, 19 nt, Artificial Sequence
  Description of Artificial Sequence: Synthetic oligonucleotide
uacuccucuguucccccug

SEQ ID NO: 103049 - RNA, 19 nt, Artificial Sequence
  Description of Artificial Sequence: Synthetic oligonucleotide
gcuuucccggcccagguca

SEQ ID NO: 103050 - RNA, 19 nt, Artificial Sequence
  Description of Artificial Sequence: Synthetic oligonucleotide
agcagcuucccuuccucag

SEQ ID NO: 103051 - RNA, 19 nt, Artificial Sequence
  Description of Artificial Sequence: Synthetic oligonucleotide
gcugucaccaacuccuuca

SEQ ID NO: 103052 - RNA, 19 nt, Artificial Sequence
  Description of Artificial Sequence: Synthetic oligonucleotide
agcgccuccacagggcuuu

SEQ ID NO: 103053 - RNA, 19 nt, Artificial Sequence
  Description of Artificial Sequence: Synthetic oligonucleotide
ucggacaugacagcaaccu

SEQ ID NO: 103054 - RNA, 19 nt, Artificial Sequence
  Description of Artificial Sequence: Synthetic oligonucleotide
uuuucucccaggacaauug

SEQ ID NO: 103055 - RNA, 19 nt, Artificial Sequence
  Description of Artificial Sequence: Synthetic oligonucleotide
gaaauuugcuaaagggaaa

SEQ ID NO: 103056 - RNA, 19 nt, Artificial Sequence
  Description of Artificial Sequence: Synthetic oligonucleotide
aggggaaagaaagggaaaa

SEQ ID NO: 103057 - RNA, 19 nt, Artificial Sequence
  Description of Artificial Sequence: Synthetic oligonucleotide
agggagaaaaagaaacaca

SEQ ID NO: 103058 - RNA, 19 nt, Artificial Sequence
  Description of Artificial Sequence: Synthetic oligonucleotide
aagagacuuaaaggacagg

SEQ ID NO: 103059 - RNA, 19 nt, Artificial Sequence
  Description of Artificial Sequence: Synthetic oligonucleotide
gaggaggagauggccauag

SEQ ID NO: 103060 - RNA, 19 nt, Artificial Sequence
  Description of Artificial Sequence: Synthetic oligonucleotide
ggagaggaggguuccucuu

SEQ ID NO: 103061 - RNA, 19 nt, Artificial Sequence
  Description of Artificial Sequence: Synthetic oligonucleotide
uaggucagauggagguucu

SEQ ID NO: 103062 - RNA, 19 nt, Artificial Sequence
  Description of Artificial Sequence: Synthetic oligonucleotide
ucagagccaaguccucccu

SEQ ID NO: 103063 - RNA, 19 nt, Artificial Sequence
  Description of Artificial Sequence: Synthetic oligonucleotide
ucucuacuggaguggaagg

SEQ ID NO: 103064 - RNA, 19 nt, Artificial Sequence
  Description of Artificial Sequence: Synthetic oligonucleotide
gucuauuggccaacaaucc

SEQ ID NO: 103065 - RNA, 19 nt, Artificial Sequence
  Description of Artificial Sequence: Synthetic oligonucleotide
cuuucugcccacuuccccu

SEQ ID NO: 103066 - RNA, 19 nt, Artificial Sequence
  Description of Artificial Sequence: Synthetic oligonucleotide
uuccccaauuacuauuccc

SEQ ID NO: 103067 - RNA, 19 nt, Artificial Sequence
  Description of Artificial Sequence: Synthetic oligonucleotide
cuuugacuucagcugccug

SEQ ID NO: 103068 - RNA, 19 nt, Artificial Sequence
  Description of Artificial Sequence: Synthetic oligonucleotide
gaaacagccauguccaagu

SEQ ID NO: 103069 - RNA, 19 nt, Artificial Sequence
  Description of Artificial Sequence: Synthetic oligonucleotide
uucuucaccucuauccaaa

SEQ ID NO: 103070 - RNA, 19 nt, Artificial Sequence
  Description of Artificial Sequence: Synthetic oligonucleotide
agaacuugauuugcaugga

SEQ ID NO: 103071 - RNA, 19 nt, Artificial Sequence
  Description of Artificial Sequence: Synthetic oligonucleotide
auuuuggauaaaucauuuc

SEQ ID NO: 103072 - RNA, 19 nt, Artificial Sequence
  Description of Artificial Sequence: Synthetic oligonucleotide
caguaucaucuccaucaua

SEQ ID NO: 103073 - RNA, 19 nt, Artificial Sequence
  Description of Artificial Sequence: Synthetic oligonucleotide
augccugaccccuugcucc

SEQ ID NO: 103074 - RNA, 19 nt, Artificial Sequence
  Description of Artificial Sequence: Synthetic oligonucleotide
ccuucaaugcuagaaaauc

SEQ ID NO: 103075 - RNA, 19 nt, Artificial Sequence
  Description of Artificial Sequence: Synthetic oligonucleotide
cgaguuggcaaaauggggu

SEQ ID NO: 103076 - RNA, 19 nt, Artificial Sequence
  Description of Artificial Sequence: Synthetic oligonucleotide
uuugggccccucagagccc

SEQ ID NO: 103077 - RNA, 19 nt, Artificial Sequence
  Description of Artificial Sequence: Synthetic oligonucleotide
cugcccugcacccuuguac

SEQ ID NO: 103078 - RNA, 19 nt, Artificial Sequence
  Description of Artificial Sequence: Synthetic oligonucleotide
cagugucugugccauggau

SEQ ID NO: 103079 - RNA, 19 nt, Artificial Sequence
  Description of Artificial Sequence: Synthetic oligonucleotide
uuucguuuuucuuggggua

SEQ ID NO: 103080 - RNA, 19 nt, Artificial Sequence
  Description of Artificial Sequence: Synthetic oligonucleotide
acucuugaugugaagauaa

SEQ ID NO: 103081 - RNA, 19 nt, Artificial Sequence
  Description of Artificial Sequence: Synthetic oligonucleotide
auuugcauauucuauugua

SEQ ID NO: 103082 - RNA, 19 nt, Artificial Sequence
  Description of Artificial Sequence: Synthetic oligonucleotide
auuauuuggaguuaggucc

SEQ ID NO: 103083 - RNA, 19 nt, Artificial Sequence
  Description of Artificial Sequence: Synthetic oligonucleotide
cucacuugggggaaaaaaa

SEQ ID NO: 103084 - RNA, 19 nt, Artificial Sequence
  Description of Artificial Sequence: Synthetic oligonucleotide
aaaaaagaaaagccaagca

SEQ ID NO: 103085 - RNA, 19 nt, Artificial Sequence
  Description of Artificial Sequence: Synthetic oligonucleotide
aaaccaauggugauccucu

SEQ ID NO: 103086 - RNA, 19 nt, Artificial Sequence
  Description of Artificial Sequence: Synthetic oligonucleotide
uauuuugugaugaugcugu

SEQ ID NO: 103087 - RNA, 19 nt, Artificial Sequence
  Description of Artificial Sequence: Synthetic oligonucleotide
ugacaauaaguuugaaccu

SEQ ID NO: 103088 - RNA, 19 nt, Artificial Sequence
  Description of Artificial Sequence: Synthetic oligonucleotide
uuuuuuuuugaaacagcag

SEQ ID NO: 103089 - RNA, 19 nt, Artificial Sequence
  Description of Artificial Sequence: Synthetic oligonucleotide
gucccaguauucucagagc

SEQ ID NO: 103090 - RNA, 19 nt, Artificial Sequence
  Description of Artificial Sequence: Synthetic oligonucleotide
caugugucagaguguuguu

SEQ ID NO: 103091 - RNA, 19 nt, Artificial Sequence
  Description of Artificial Sequence: Synthetic oligonucleotide
uccguuaaccuuuuuguaa

SEQ ID NO: 103092 - RNA, 19 nt, Artificial Sequence
  Description of Artificial Sequence: Synthetic oligonucleotide
aauacugcuugaccguacu

SEQ ID NO: 103093 - RNA, 19 nt, Artificial Sequence
  Description of Artificial Sequence: Synthetic oligonucleotide
ucucacauguggcaaaaua

SEQ ID NO: 103094 - RNA, 19 nt, Artificial Sequence
  Description of Artificial Sequence: Synthetic oligonucleotide
augguuugguuuuucuuuu

SEQ ID NO: 103095 - RNA, 19 nt, Artificial Sequence
  Description of Artificial Sequence: Synthetic oligonucleotide
guuuuuucuucguccuuuu

SEQ ID NO: 103096 - RNA, 19 nt, Artificial Sequence
  Description of Artificial Sequence: Synthetic oligonucleotide
ugguuuaaaaaguuucacg

SEQ ID NO: 103097 - RNA, 19 nt, Artificial Sequence
  Description of Artificial Sequence: Synthetic oligonucleotide
gucuuggugccuuuugugu

SEQ ID NO: 103098 - RNA, 19 nt, Artificial Sequence
  Description of Artificial Sequence: Synthetic oligonucleotide
ugaugcgccuugcugaugg

SEQ ID NO: 103099 - RNA, 19 nt, Artificial Sequence
  Description of Artificial Sequence: Synthetic oligonucleotide
gcuugacaugugcaauugu

SEQ ID NO: 103100 - RNA, 19 nt, Artificial Sequence
  Description of Artificial Sequence: Synthetic oligonucleotide
ugagggacaugcucaccuc

SEQ ID NO: 103101 - RNA, 19 nt, Artificial Sequence
  Description of Artificial Sequence: Synthetic oligonucleotide
cuagccuuaaggggggcag

SEQ ID NO: 103102 - RNA, 19 nt, Artificial Sequence
  Description of Artificial Sequence: Synthetic oligonucleotide
gggagugaugauuuggggg

SEQ ID NO: 103103 - RNA, 19 nt, Artificial Sequence
  Description of Artificial Sequence: Synthetic oligonucleotide
gaggcuuugggagcaaaau

SEQ ID NO: 103104 - RNA, 19 nt, Artificial Sequence
  Description of Artificial Sequence: Synthetic oligonucleotide
uaaggaagagggcugagcu

SEQ ID NO: 103105 - RNA, 19 nt, Artificial Sequence
  Description of Artificial Sequence: Synthetic oligonucleotide
ugagcuucgguucuccaga

SEQ ID NO: 103106 - RNA, 19 nt, Artificial Sequence
  Description of Artificial Sequence: Synthetic oligonucleotide
aauguaagaaaacaaaauc

SEQ ID NO: 103107 - RNA, 19 nt, Artificial Sequence
  Description of Artificial Sequence: Synthetic oligonucleotide
cuaaaacaaaaucugaacu

SEQ ID NO: 103108 - RNA, 19 nt, Artificial Sequence
  Description of Artificial Sequence: Synthetic oligonucleotide
ucucaaaagucuauuuuuu

SEQ ID NO: 103109 - RNA, 19 nt, Artificial Sequence
  Description of Artificial Sequence: Synthetic oligonucleotide
uuaacugaaaauguaaauu

SEQ ID NO: 103110 - RNA, 19 nt, Artificial Sequence
  Description of Artificial Sequence: Synthetic oligonucleotide
uuauaaauauauucaggag

SEQ ID NO: 103111 - RNA, 19 nt, Artificial Sequence
  Description of Artificial Sequence: Synthetic oligonucleotide
guuggaauguuguaguuac

SEQ ID NO: 103112 - RNA, 19 nt, Artificial Sequence
  Description of Artificial Sequence: Synthetic oligonucleotide
ccuacugaguaggcggcga

SEQ ID NO: 103113 - RNA, 19 nt, Artificial Sequence
  Description of Artificial Sequence: Synthetic oligonucleotide
auuuuuguauguuaugaac

SEQ ID NO: 103114 - RNA, 19 nt, Artificial Sequence
  Description of Artificial Sequence: Synthetic oligonucleotide
caugcaguucauuauuuug

SEQ ID NO: 103115 - RNA, 19 nt, Artificial Sequence
  Description of Artificial Sequence: Synthetic oligonucleotide
gugguucuauuuuacuuug

SEQ ID NO: 103116 - RNA, 19 nt, Artificial Sequence
  Description of Artificial Sequence: Synthetic oligonucleotide
guacuuguguuugcuuaaa

SEQ ID NO: 103117 - RNA, 19 nt, Artificial Sequence
  Description of Artificial Sequence: Synthetic oligonucleotide
acaaagugacuguuuggcu

SEQ ID NO: 103118 - RNA, 19 nt, Artificial Sequence
  Description of Artificial Sequence: Synthetic oligonucleotide
uuauaaacacauugaaugc

SEQ ID NO: 103119 - RNA, 19 nt, Artificial Sequence
  Description of Artificial Sequence: Synthetic oligonucleotide
cgcuuuauugcccauggga

SEQ ID NO: 103120 - RNA, 19 nt, Artificial Sequence
  Description of Artificial Sequence: Synthetic oligonucleotide
auaugugguguauauccuu

SEQ ID NO: 103121 - RNA, 19 nt, Artificial Sequence
  Description of Artificial Sequence: Synthetic oligonucleotide
uccaaaaaauuaaaacgaa

SEQ ID NO: 103122 - RNA, 19 nt, Artificial Sequence
  Description of Artificial Sequence: Synthetic oligonucleotide
aaauaaaguagcugcgauu

SEQ ID NO: 103123 - RNA, 19 nt, Artificial Sequence
  Description of Artificial Sequence: Synthetic oligonucleotide
uaaaguagcugcgauuggg

SEQ ID NO: 103124 - RNA, 25 nt, Artificial Sequence
  Description of Artificial Sequence: Synthetic oligonucleotide
gcgcagaacuuggggagccgccgcc

SEQ ID NO: 103125 - RNA, 25 nt, Artificial Sequence
  Description of Artificial Sequence: Synthetic oligonucleotide
cgccauccgccgccgcagccagcuu

SEQ ID NO: 103126 - RNA, 25 nt, Artificial Sequence
  Description of Artificial Sequence: Synthetic oligonucleotide
uccgccgccgcaggaccggccccug

SEQ ID NO: 103127 - RNA, 25 nt, Artificial Sequence
  Description of Artificial Sequence: Synthetic oligonucleotide
gccccagccuccgcagccgcggcgc

SEQ ID NO: 103128 - RNA, 25 nt, Artificial Sequence
  Description of Artificial Sequence: Synthetic oligonucleotide
cguccacgcccgcccgcgcccaggg

SEQ ID NO: 103129 - RNA, 25 nt, Artificial Sequence
  Description of Artificial Sequence: Synthetic oligonucleotide
gcgagucggggucgccgccugcacg

SEQ ID NO: 103130 - RNA, 25 nt, Artificial Sequence
  Description of Artificial Sequence: Synthetic oligonucleotide
gcuucucaguguuccccgcgccccg

SEQ ID NO: 103131 - RNA, 25 nt, Artificial Sequence
  Description of Artificial Sequence: Synthetic oligonucleotide
gcauguaacccggccaggcccccgc

SEQ ID NO: 103132 - RNA, 25 nt, Artificial Sequence
  Description of Artificial Sequence: Synthetic oligonucleotide
caacuguguccccugcagcuccagc

SEQ ID NO: 103133 - RNA, 25 nt, Artificial Sequence
  Description of Artificial Sequence: Synthetic oligonucleotide
ccccgggcugcacccccccgccccg

SEQ ID NO: 103134 - RNA, 25 nt, Artificial Sequence
  Description of Artificial Sequence: Synthetic oligonucleotide
gacaccagcucuccagccugcucgu

SEQ ID NO: 103135 - RNA, 25 nt, Artificial Sequence
  Description of Artificial Sequence: Synthetic oligonucleotide
uccaggauggccgcggccaaggccg

SEQ ID NO: 103136 - RNA, 25 nt, Artificial Sequence
  Description of Artificial Sequence: Synthetic oligonucleotide
gagaugcagcugauguccccgcugc

SEQ ID NO: 103137 - RNA, 25 nt, Artificial Sequence
  Description of Artificial Sequence: Synthetic oligonucleotide
cagaucucugacccguucggauccu

SEQ ID NO: 103138 - RNA, 25 nt, Artificial Sequence
  Description of Artificial Sequence: Synthetic oligonucleotide
uuuccucacucgcccaccauggaca

SEQ ID NO: 103139 - RNA, 25 nt, Artificial Sequence
  Description of Artificial Sequence: Synthetic oligonucleotide
aacuacccuaagcuggaggagauga

SEQ ID NO: 103140 - RNA, 25 nt, Artificial Sequence
  Description of Artificial Sequence: Synthetic oligonucleotide
augcugcugagcaacggggcucccc

SEQ ID NO: 103141 - RNA, 25 nt, Artificial Sequence
  Description of Artificial Sequence: Synthetic oligonucleotide
caguuccucggcgccgccggggccc

SEQ ID NO: 103142 - RNA, 25 nt, Artificial Sequence
  Description of Artificial Sequence: Synthetic oligonucleotide
ccagagggcagcggcagcaacagca

SEQ ID NO: 103143 - RNA, 25 nt, Artificial Sequence
  Description of Artificial Sequence: Synthetic oligonucleotide
agcagcagcagcagcgggggcggug

SEQ ID NO: 103144 - RNA, 25 nt, Artificial Sequence
  Description of Artificial Sequence: Synthetic oligonucleotide
ggaggcggcgggggcggcagcaaca

SEQ ID NO: 103145 - RNA, 25 nt, Artificial Sequence
  Description of Artificial Sequence: Synthetic oligonucleotide
agcagcagcagcagcagcaccuuca

SEQ ID NO: 103146 - RNA, 25 nt, Artificial Sequence
  Description of Artificial Sequence: Synthetic oligonucleotide
aacccucaggcggacacgggcgagc

SEQ ID NO: 103147 - RNA, 25 nt, Artificial Sequence
  Description of Artificial Sequence: Synthetic oligonucleotide
cagcccuacgagcaccugaccgcag

SEQ ID NO: 103148 - RNA, 25 nt, Artificial Sequence
  Description of Artificial Sequence: Synthetic oligonucleotide
gagucuuuuccugacaucucucuga

SEQ ID NO: 103149 - RNA, 25 nt, Artificial Sequence
  Description of Artificial Sequence: Synthetic oligonucleotide
aacaacgagaaggugcugguggaga

SEQ ID NO: 103150 - RNA, 25 nt, Artificial Sequence
  Description of Artificial Sequence: Synthetic oligonucleotide
accaguuaccccagccaaaccacuc

SEQ ID NO: 103151 - RNA, 25 nt, Artificial Sequence
  Description of Artificial Sequence: Synthetic oligonucleotide
cgacugccccccaucaccuauacug

SEQ ID NO: 103152 - RNA, 25 nt, Artificial Sequence
  Description of Artificial Sequence: Synthetic oligonucleotide
ggccgcuuuucccuggagccugcac

SEQ ID NO: 103153 - RNA, 25 nt, Artificial Sequence
  Description of Artificial Sequence: Synthetic oligonucleotide
cccaacaguggcaacaccuuguggc

SEQ ID NO: 103154 - RNA, 25 nt, Artificial Sequence
  Description of Artificial Sequence: Synthetic oligonucleotide
cccgagccccucuucagcuugguca

SEQ ID NO: 103155 - RNA, 25 nt, Artificial Sequence
  Description of Artificial Sequence: Synthetic oligonucleotide
aguggccuagugagcaugaccaacc

SEQ ID NO: 103156 - RNA, 25 nt, Artificial Sequence
  Description of Artificial Sequence: Synthetic oligonucleotide
ccaccggccuccucguccucagcac

SEQ ID NO: 103157 - RNA, 25 nt, Artificial Sequence
  Description of Artificial Sequence: Synthetic oligonucleotide
ccaucuccagcggccuccuccgccu

SEQ ID NO: 103158 - RNA, 25 nt, Artificial Sequence
  Description of Artificial Sequence: Synthetic oligonucleotide
uccgccucccagagcccaccccuga

SEQ ID NO: 103159 - RNA, 25 nt, Artificial Sequence
  Description of Artificial Sequence: Synthetic oligonucleotide
agcugcgcagugccauccaacgaca

SEQ ID NO: 103160 - RNA, 25 nt, Artificial Sequence
  Description of Artificial Sequence: Synthetic oligonucleotide
agcagucccauuuacucagcggcac

SEQ ID NO: 103161 - RNA, 25 nt, Artificial Sequence
  Description of Artificial Sequence: Synthetic oligonucleotide
cccaccuuccccacgccgaacacug

SEQ ID NO: 103162 - RNA, 25 nt, Artificial Sequence
  Description of Artificial Sequence: Synthetic oligonucleotide
gacauuuucccugagccacaaagcc

SEQ ID NO: 103163 - RNA, 25 nt, Artificial Sequence
  Description of Artificial Sequence: Synthetic oligonucleotide
caggccuucccgggcucggcaggga

SEQ ID NO: 103164 - RNA, 25 nt, Artificial Sequence
  Description of Artificial Sequence: Synthetic oligonucleotide
acagcgcuccaguacccgccuccug

SEQ ID NO: 103165 - RNA, 25 nt, Artificial Sequence
  Description of Artificial Sequence: Synthetic oligonucleotide
gccuacccugccgccaaggguggcu

SEQ ID NO: 103166 - RNA, 25 nt, Artificial Sequence
  Description of Artificial Sequence: Synthetic oligonucleotide
uuccagguucccaugauccccgacu

SEQ ID NO: 103167 - RNA, 25 nt, Artificial Sequence
  Description of Artificial Sequence: Synthetic oligonucleotide
uaccuguuuccacagcagcaggggg

SEQ ID NO: 103168 - RNA, 25 nt, Artificial Sequence
  Description of Artificial Sequence: Synthetic oligonucleotide
gaucugggccugggcaccccagacc

SEQ ID NO: 103169 - RNA, 25 nt, Artificial Sequence
  Description of Artificial Sequence: Synthetic oligonucleotide
cagaagcccuuccagggccuggaga

SEQ ID NO: 103170 - RNA, 25 nt, Artificial Sequence
  Description of Artificial Sequence: Synthetic oligonucleotide
agccgcacccagcagccuucgcuaa

SEQ ID NO: 103171 - RNA, 25 nt, Artificial Sequence
  Description of Artificial Sequence: Synthetic oligonucleotide
accccucugucuacuauuaaggccu

SEQ ID NO: 103172 - RNA, 25 nt, Artificial Sequence
  Description of Artificial Sequence: Synthetic oligonucleotide
uuugccacucagucgggcucccagg

SEQ ID NO: 103173 - RNA, 25 nt, Artificial Sequence
  Description of Artificial Sequence: Synthetic oligonucleotide
gaccugaaggcccucaauaccagcu

SEQ ID NO: 103174 - RNA, 25 nt, Artificial Sequence
  Description of Artificial Sequence: Synthetic oligonucleotide
uaccagucccagcucaucaaaccca

SEQ ID NO: 103175 - RNA, 25 nt, Artificial Sequence
  Description of Artificial Sequence: Synthetic oligonucleotide
agccgcaugcgcaaguaccccaacc

SEQ ID NO: 103176 - RNA, 25 nt, Artificial Sequence
  Description of Artificial Sequence: Synthetic oligonucleotide
cggcccagcaagacgcccccccacg

SEQ ID NO: 103177 - RNA, 25 nt, Artificial Sequence
  Description of Artificial Sequence: Synthetic oligonucleotide
gaacgcccuuacgcuugcccagugg

SEQ ID NO: 103178 - RNA, 25 nt, Artificial Sequence
  Description of Artificial Sequence: Synthetic oligonucleotide
gaguccugugaucgccgcuucuccc

SEQ ID NO: 103179 - RNA, 25 nt, Artificial Sequence
  Description of Artificial Sequence: Synthetic oligonucleotide
cgcuccgacgagcucacccgccaca

SEQ ID NO: 103180 - RNA, 25 nt, Artificial Sequence
  Description of Artificial Sequence: Synthetic oligonucleotide
auccgcauccacacaggccagaagc

SEQ ID NO: 103181 - RNA, 25 nt, Artificial Sequence
  Description of Artificial Sequence: Synthetic oligonucleotide
cccuuccagugccgcaucugcaugc

SEQ ID NO: 103182 - RNA, 25 nt, Artificial Sequence
  Description of Artificial Sequence: Synthetic oligonucleotide
cgcaacuucagccgcagcgaccacc

SEQ ID NO: 103183 - RNA, 25 nt, Artificial Sequence
  Description of Artificial Sequence: Synthetic oligonucleotide
cucaccacccacauccgcacccaca

SEQ ID NO: 103184 - RNA, 25 nt, Artificial Sequence
  Description of Artificial Sequence: Synthetic oligonucleotide
acaggcgaaaagcccuucgccugcg

SEQ ID NO: 103185 - RNA, 25 nt, Artificial Sequence
  Description of Artificial Sequence: Synthetic oligonucleotide
gacaucuguggaagaaaguuugcca

SEQ ID NO: 103186 - RNA, 25 nt, Artificial Sequence
  Description of Artificial Sequence: Synthetic oligonucleotide
aggagcgaugaacgcaagaggcaua

SEQ ID NO: 103187 - RNA, 25 nt, Artificial Sequence
  Description of Artificial Sequence: Synthetic oligonucleotide
accaagauccacuugcggcagaagg

SEQ ID NO: 103188 - RNA, 25 nt, Artificial Sequence
  Description of Artificial Sequence: Synthetic oligonucleotide
gacaagaaagcagacaaaaguguug

SEQ ID NO: 103189 - RNA, 25 nt, Artificial Sequence
  Description of Artificial Sequence: Synthetic oligonucleotide
guggccucuucggccaccuccucuc

SEQ ID NO: 103190 - RNA, 25 nt, Artificial Sequence
  Description of Artificial Sequence: Synthetic oligonucleotide
cucucuuccuacccguccccgguug

SEQ ID NO: 103191 - RNA, 25 nt, Artificial Sequence
  Description of Artificial Sequence: Synthetic oligonucleotide
gcuaccucuuacccguccccgguua

SEQ ID NO: 103192 - RNA, 25 nt, Artificial Sequence
  Description of Artificial Sequence: Synthetic oligonucleotide
acuaccucuuauccauccccggcca

SEQ ID NO: 103193 - RNA, 25 nt, Artificial Sequence
  Description of Artificial Sequence: Synthetic oligonucleotide
accaccucauacccauccccugugc

SEQ ID NO: 103194 - RNA, 25 nt, Artificial Sequence
  Description of Artificial Sequence: Synthetic oligonucleotide
cccaccuccuucuccucucccggcu

SEQ ID NO: 103195 - RNA, 25 nt, Artificial Sequence
  Description of Artificial Sequence: Synthetic oligonucleotide
uccucgaccuacccauccccugugc

SEQ ID NO: 103196 - RNA, 25 nt, Artificial Sequence
  Description of Artificial Sequence: Synthetic oligonucleotide
cacaguggcuuccccuccccgucgg

SEQ ID NO: 103197 - RNA, 25 nt, Artificial Sequence
  Description of Artificial Sequence: Synthetic oligonucleotide
guggccaccacguacuccucuguuc

SEQ ID NO: 103198 - RNA, 25 nt, Artificial Sequence
  Description of Artificial Sequence: Synthetic oligonucleotide
cccccugcuuucccggcccagguca

SEQ ID NO: 103199 - RNA, 25 nt, Artificial Sequence
  Description of Artificial Sequence: Synthetic oligonucleotide
agcagcuucccuuccucagcuguca

SEQ ID NO: 103200 - RNA, 25 nt, Artificial Sequence
  Description of Artificial Sequence: Synthetic oligonucleotide
accaacuccuucagcgccuccacag

SEQ ID NO: 103201 - RNA, 25 nt, Artificial Sequence
  Description of Artificial Sequence: Synthetic oligonucleotide
gggcuuucggacaugacagcaaccu

SEQ ID NO: 103202 - RNA, 25 nt, Artificial Sequence
  Description of Artificial Sequence: Synthetic oligonucleotide
uuuucucccaggacaauugaaauuu

SEQ ID NO: 103203 - RNA, 25 nt, Artificial Sequence
  Description of Artificial Sequence: Synthetic oligonucleotide
ugcuaaagggaaaggggaaagaaag

SEQ ID NO: 103204 - RNA, 25 nt, Artificial Sequence
  Description of Artificial Sequence: Synthetic oligonucleotide
gggaaaagggagaaaaagaaacaca

SEQ ID NO: 103205 - RNA, 25 nt, Artificial Sequence
  Description of Artificial Sequence: Synthetic oligonucleotide
aagagacuuaaaggacaggaggagg

SEQ ID NO: 103206 - RNA, 25 nt, Artificial Sequence
  Description of Artificial Sequence: Synthetic oligonucleotide
gagauggccauaggagaggaggguu

SEQ ID NO: 103207 - RNA, 25 nt, Artificial Sequence
  Description of Artificial Sequence: Synthetic oligonucleotide
uccucuuaggucagauggagguucu

SEQ ID NO: 103208 - RNA, 25 nt, Artificial Sequence
  Description of Artificial Sequence: Synthetic oligonucleotide
ucagagccaaguccucccucucuac

SEQ ID NO: 103209 - RNA, 25 nt, Artificial Sequence
  Description of Artificial Sequence: Synthetic oligonucleotide
cuggaguggaaggucuauuggccaa

SEQ ID NO: 103210 - RNA, 25 nt, Artificial Sequence
  Description of Artificial Sequence: Synthetic oligonucleotide
acaauccuuucugcccacuuccccu

SEQ ID NO: 103211 - RNA, 25 nt, Artificial Sequence
  Description of Artificial Sequence: Synthetic oligonucleotide
uuccccaauuacuauucccuuugac

SEQ ID NO: 103212 - RNA, 25 nt, Artificial Sequence
  Description of Artificial Sequence: Synthetic oligonucleotide
cuucagcugccugaaacagccaugu

SEQ ID NO: 103213 - RNA, 25 nt, Artificial Sequence
  Description of Artificial Sequence: Synthetic oligonucleotide
uccaaguucuucaccucuauccaaa

SEQ ID NO: 103214 - RNA, 25 nt, Artificial Sequence
  Description of Artificial Sequence: Synthetic oligonucleotide
agaacuugauuugcauggauuuugg

SEQ ID NO: 103215 - RNA, 25 nt, Artificial Sequence
  Description of Artificial Sequence: Synthetic oligonucleotide
gauaaaucauuucaguaucaucucc

SEQ ID NO: 103216 - RNA, 25 nt, Artificial Sequence
  Description of Artificial Sequence: Synthetic oligonucleotide
caucauaugccugaccccuugcucc

SEQ ID NO: 103217 - RNA, 25 nt, Artificial Sequence
  Description of Artificial Sequence: Synthetic oligonucleotide
ccuucaaugcuagaaaaucgaguug

SEQ ID NO: 103218 - RNA, 25 nt, Artificial Sequence
  Description of Artificial Sequence: Synthetic oligonucleotide
ggcaaaaugggguuugggccccuca

SEQ ID NO: 103219 - RNA, 25 nt, Artificial Sequence
  Description of Artificial Sequence: Synthetic oligonucleotide
agagcccugcccugcacccuuguac

SEQ ID NO: 103220 - RNA, 25 nt, Artificial Sequence
  Description of Artificial Sequence: Synthetic oligonucleotide
cagugucugugccauggauuucguu

SEQ ID NO: 103221 - RNA, 25 nt, Artificial Sequence
  Description of Artificial Sequence: Synthetic oligonucleotide
uuuucuugggguacucuugauguga

SEQ ID NO: 103222 - RNA, 25 nt, Artificial Sequence
  Description of Artificial Sequence: Synthetic oligonucleotide
aagauaauuugcauauucuauugua

SEQ ID NO: 103223 - RNA, 25 nt, Artificial Sequence
  Description of Artificial Sequence: Synthetic oligonucleotide
auuauuuggaguuagguccucacuu

SEQ ID NO: 103224 - RNA, 25 nt, Artificial Sequence
  Description of Artificial Sequence: Synthetic oligonucleotide
ccaagcaaaccaauggugauccucu

SEQ ID NO: 103225 - RNA, 25 nt, Artificial Sequence
  Description of Artificial Sequence: Synthetic oligonucleotide
uauuuugugaugaugcugugacaau

SEQ ID NO: 103226 - RNA, 25 nt, Artificial Sequence
  Description of Artificial Sequence: Synthetic oligonucleotide
uaaguuugaaccuuuuuuuuugaaa

SEQ ID NO: 103227 - RNA, 25 nt, Artificial Sequence
  Description of Artificial Sequence: Synthetic oligonucleotide
acagcagucccaguauucucagagc

SEQ ID NO: 103228 - RNA, 25 nt, Artificial Sequence
  Description of Artificial Sequence: Synthetic oligonucleotide
caugugucagaguguuguuccguua

SEQ ID NO: 103229 - RNA, 25 nt, Artificial Sequence
  Description of Artificial Sequence: Synthetic oligonucleotide
aaccuuuuuguaaauacugcuugac

SEQ ID NO: 103230 - RNA, 25 nt, Artificial Sequence
  Description of Artificial Sequence: Synthetic oligonucleotide
ccguacucucacauguggcaaaaua

SEQ ID NO: 103231 - RNA, 25 nt, Artificial Sequence
  Description of Artificial Sequence: Synthetic oligonucleotide
uuuuuugaaaguguuuuuucuucgu

SEQ ID NO: 103232 - RNA, 25 nt, Artificial Sequence
  Description of Artificial Sequence: Synthetic oligonucleotide
uccuuuugguuuaaaaaguuucacg

SEQ ID NO: 103233 - RNA, 25 nt, Artificial Sequence
  Description of Artificial Sequence: Synthetic oligonucleotide
gucuuggugccuuuugugugaugcg

SEQ ID NO: 103234 - RNA, 25 nt, Artificial Sequence
  Description of Artificial Sequence: Synthetic oligonucleotide
gccuugcugauggcuugacaugugc

SEQ ID NO: 103235 - RNA, 25 nt, Artificial Sequence
  Description of Artificial Sequence: Synthetic oligonucleotide
caauugugagggacaugcucaccuc

SEQ ID NO: 103236 - RNA, 25 nt, Artificial Sequence
  Description of Artificial Sequence: Synthetic oligonucleotide
cuagccuuaaggggggcagggagug

SEQ ID NO: 103237 - RNA, 25 nt, Artificial Sequence
  Description of Artificial Sequence: Synthetic oligonucleotide
gaugauuugggggaggcuuugggag

SEQ ID NO: 103238 - RNA, 25 nt, Artificial Sequence
  Description of Artificial Sequence: Synthetic oligonucleotide
gcaaaauaaggaagagggcugagcu

SEQ ID NO: 103239 - RNA, 25 nt, Artificial Sequence
  Description of Artificial Sequence: Synthetic oligonucleotide
ugagcuucgguucuccagaauguaa

SEQ ID NO: 103240 - RNA, 25 nt, Artificial Sequence
  Description of Artificial Sequence: Synthetic oligonucleotide
agaaaacaaaaucuaaaacaaaauc

SEQ ID NO: 103241 - RNA, 25 nt, Artificial Sequence
  Description of Artificial Sequence: Synthetic oligonucleotide
cugaacucucaaaagucuauuuuuu

SEQ ID NO: 103242 - RNA, 25 nt, Artificial Sequence
  Description of Artificial Sequence: Synthetic oligonucleotide
uuaacugaaaauguaaauuuauaaa

SEQ ID NO: 103243 - RNA, 25 nt, Artificial Sequence
  Description of Artificial Sequence: Synthetic oligonucleotide
auauauucaggaguuggaauguugu

SEQ ID NO: 103244 - RNA, 25 nt, Artificial Sequence
  Description of Artificial Sequence: Synthetic oligonucleotide
uaguuaccuacugaguaggcggcga

SEQ ID NO: 103245 - RNA, 25 nt, Artificial Sequence
  Description of Artificial Sequence: Synthetic oligonucleotide
auuuuuguauguuaugaacaugcag

SEQ ID NO: 103246 - RNA, 25 nt, Artificial Sequence
  Description of Artificial Sequence: Synthetic oligonucleotide
guucauuauuuugugguucuauuuu

SEQ ID NO: 103247 - RNA, 25 nt, Artificial Sequence
  Description of Artificial Sequence: Synthetic oligonucleotide
uacuuuguacuuguguuugcuuaaa

SEQ ID NO: 103248 - RNA, 25 nt, Artificial Sequence
  Description of Artificial Sequence: Synthetic oligonucleotide
acaaagugacuguuuggcuuauaaa

SEQ ID NO: 103249 - RNA, 25 nt, Artificial Sequence
  Description of Artificial Sequence: Synthetic oligonucleotide
acacauugaaugcgcuuuauugccc

SEQ ID NO: 103250 - RNA, 25 nt, Artificial Sequence
  Description of Artificial Sequence: Synthetic oligonucleotide
caugggauaugugguguauauccuu

SEQ ID NO: 103251 - RNA, 25 nt, Artificial Sequence
  Description of Artificial Sequence: Synthetic oligonucleotide
uccaaaaaauuaaaacgaaaauaaa

SEQ ID NO: 103252 - RNA, 25 nt, Artificial Sequence
  Description of Artificial Sequence: Synthetic oligonucleotide
cgaaaauaaaguagcugcgauuggg

SEQ ID NO: 103253 - RNA, 2984 nt, Homo sapiens
uaacugagcgaggagcaauugauuaauagcucggcgaggggacucacugacuguuauaauaacacuacaccagcaacuccuggcuucccagcagccggaacacagacaggagagagucaguggcaaauagacauuuuucuuauuucuuaaaaaacagcaacuuguuugcuacuuuuauuucuguugauuuuuuuuucuugguguguguggugguuguuuuuaaguguggagggcaaaaggagauaccaucccaggcucaguccaaccccucuccaaaacggcuuuucugacacuccagguagcgagggaguugggucuccagguugugcgaggagcaaaugaugaccgccaaggccguagacaaaaucccaguaacucucagugguuuugugcaccagcugucugacaacaucuacccgguggaggaccucgccgccacgucggugaccaucuuucccaaugccgaacugggaggccccuuugaccagaugaacggaguggccggagauggcaugaucaacauugacaugacuggagagaagaggucguuggaucucccauaucccagcagcuuugcucccgucucugcaccuagaaaccagaccuucacuuacaugggcaaguucuccauugacccucaguacccuggugccagcugcuacccagaaggcauaaucaauauugugagugcaggcaucuugcaaggggucacuuccccagcuucaaccacagccucauccagcgucaccucugccucccccaacccacuggccacaggaccccugggugugugcaccaugucccagacccagccugaccuggaccaccuguacucuccgccaccgccuccuccuccuuauucuggcugugcaggagaccucuaccaggacccuucugcguuccugucagcagccaccaccuccaccucuuccucucuggccuacccaccaccuccuuccuauccaucccccaagccagccacggacccaggucucuucccaaugaucccagacuauccuggauucuuuccaucucagugccagagagaccuacaugguacagcuggcccagaccguaagcccuuucccugcccacuggacacccugcgggugcccccuccacucacuccacucucuacaauccguaacuuuacccuggggggccccagugcuggggugaccggaccaggggccaguggaggcagcgagggaccccggcugccugguagcagcucagcagcagcagcagccgccgccgccgccgccuauaacccacaccaccugccacugcggcccauucugaggccucgcaaguaccccaacagacccagcaagacgccggugcacgagaggcccuacccgugcccagcagaaggcugcgaccggcgguucucccgcucugacgagcugacacggcacauccgaauccacacugggcauaagcccuuccagugucggaucugcaugcgcaacuucagccgcagugaccaccucaccacccauauccgcacccacaccggugagaagcccuucgccugugacuacuguggccgaaaguuugcccggagugaugagaggaagcgccacaccaagauccaccugagacagaaagagcggaaaagcagugcccccucugcaucggugccagcccccucuacagccuccugcucugggggcgugcagccuggggguacccugugcagcaguaacagcagcagucuuggcggagggccgcucgccccuugcuccucucggacccggacaccuugagaugagacucaggcugauacaccagcucccaaaggucccggaggcccuuuguccacuggagcugcacaacaaacacuaccacccuuuccugucccucucucccuuuguugggcaaagggcuuugguggagcuagcacugcccccuuuccaccuagaagcagguucuuccuaaaacuuagcccauucuagucucucuuaggugaguugacuaucaacccaaggcaaaggggaggcucagaaggaggugguguggggauccccuggccaagagggcugaggucugacccugcuuuaaaggguuguuugacuagguuuugcuaccccacuuccccuuauuuugacccaucacagguuuuugacccuggaugucagaguugaucuaagacguuuucuacaauagguugggagaugcugaucccuucaaguggggacagcaaaaagacaagcaaaacugaugugcacuuuauggcuugggacugauuugggggacauuguacagugagugaaguauagccuuuaugccacacucuguggcccuaaaauggugaaucagagcauaucuaguugucucaacccuugaagcaauauguauuauauacucagagaacagaagugcaaugugaugggaggaacguagcaauaucugcuccuuuucgaguuguuugagaaauguaggcuauuuuuucaguguauauccacucagauuuuguguauuuuugauguacccacacuguucucuaaauucugaaucuuugggaaaaaauguaaagcauuuaugaucucagagguuaacuuauuuaagggggauguacauauucucugaaacuaggaugcaugcaauuguguuggaaguguccuuggucgccuugugugauguagacaaauguuacaaggcugcauguaaauggguugccuuauuauggagaaaaaaaucacucccugaguuuaguauggcuguauauuuaugccuauuaauauuuggaauuuuuuuuagaaaguauauuuuuguaugcuuuguuuugugacuuaaaaguguuaccuuuguagucaaauuucagauaagaauguacauaauguuaccggagcugauuuguuuggucauuagcucuuaauaguugugaaaaaauaaaucuauucuaacgcaaaaccacuaacugaaguucagauauaauggaugguuugugacuauaguguaaauaaauacuuuucaacaau

SEQ ID NO: 103254 - RNA, 19 nt, Artificial Sequence
  Description of Artificial Sequence: Synthetic oligonucleotide
uaacugagcgaggagcaau

SEQ ID NO: 103255 - RNA, 19 nt, Artificial Sequence
  Description of Artificial Sequence: Synthetic oligonucleotide
uugauuaauagcucggcga

SEQ ID NO: 103256 - RNA, 19 nt, Artificial Sequence
  Description of Artificial Sequence: Synthetic oligonucleotide
aggggacucacugacuguu

SEQ ID NO: 103257 - RNA, 19 nt, Artificial Sequence
  Description of Artificial Sequence: Synthetic oligonucleotide
uauaauaacacuacaccag

SEQ ID NO: 103258 - RNA, 19 nt, Artificial Sequence
  Description of Artificial Sequence: Synthetic oligonucleotide
gcaacuccuggcuucccag

SEQ ID NO: 103259 - RNA, 19 nt, Artificial Sequence
  Description of Artificial Sequence: Synthetic oligonucleotide
gcagccggaacacagacag

SEQ ID NO: 103260 - RNA, 19 nt, Artificial Sequence
  Description of Artificial Sequence: Synthetic oligonucleotide
ggagagagucaguggcaaa

SEQ ID NO: 103261 - RNA, 19 nt, Artificial Sequence
  Description of Artificial Sequence: Synthetic oligonucleotide
auagacauuuuucuuauuu

SEQ ID NO: 103262 - RNA, 19 nt, Artificial Sequence
  Description of Artificial Sequence: Synthetic oligonucleotide
ucuuaaaaaacagcaacuu

SEQ ID NO: 103263 - RNA, 19 nt, Artificial Sequence
  Description of Artificial Sequence: Synthetic oligonucleotide
uguuugcuacuuuuauuuc

SEQ ID NO: 103264 - RNA, 19 nt, Artificial Sequence
  Description of Artificial Sequence: Synthetic oligonucleotide
cuguugauuuuuuuuucuu

SEQ ID NO: 103265 - RNA, 19 nt, Artificial Sequence
  Description of Artificial Sequence: Synthetic oligonucleotide
ugguguguguggugguugu

SEQ ID NO: 103266 - RNA, 19 nt, Artificial Sequence
  Description of Artificial Sequence: Synthetic oligonucleotide
uuuuuaaguguggagggca

SEQ ID NO: 103267 - RNA, 19 nt, Artificial Sequence
  Description of Artificial Sequence: Synthetic oligonucleotide
aaaaggagauaccauccca

SEQ ID NO: 103268 - RNA, 19 nt, Artificial Sequence
  Description of Artificial Sequence: Synthetic oligonucleotide
aggcucaguccaaccccuc

SEQ ID NO: 103269 - RNA, 19 nt, Artificial Sequence
  Description of Artificial Sequence: Synthetic oligonucleotide
cuccaaaacggcuuuucug

SEQ ID NO: 103270 - RNA, 19 nt, Artificial Sequence
  Description of Artificial Sequence: Synthetic oligonucleotide
gacacuccagguagcgagg

SEQ ID NO: 103271 - RNA, 19 nt, Artificial Sequence
  Description of Artificial Sequence: Synthetic oligonucleotide
ggaguugggucuccagguu

SEQ ID NO: 103272 - RNA, 19 nt, Artificial Sequence
  Description of Artificial Sequence: Synthetic oligonucleotide
ugugcgaggagcaaaugau

SEQ ID NO: 103273 - RNA, 19 nt, Artificial Sequence
  Description of Artificial Sequence: Synthetic oligonucleotide
ugaccgccaaggccguaga

SEQ ID NO: 103274 - RNA, 19 nt, Artificial Sequence
  Description of Artificial Sequence: Synthetic oligonucleotide
acaaaaucccaguaacucu

SEQ ID NO: 103275 - RNA, 19 nt, Artificial Sequence
  Description of Artificial Sequence: Synthetic oligonucleotide
ucagugguuuugugcacca

SEQ ID NO: 103276 - RNA, 19 nt, Artificial Sequence
  Description of Artificial Sequence: Synthetic oligonucleotide
agcugucugacaacaucua

SEQ ID NO: 103277 - RNA, 19 nt, Artificial Sequence
  Description of Artificial Sequence: Synthetic oligonucleotide
acccgguggaggaccucgc

SEQ ID NO: 103278 - RNA, 19 nt, Artificial Sequence
  Description of Artificial Sequence: Synthetic oligonucleotide
ccgccacgucggugaccau

SEQ ID NO: 103279 - RNA, 19 nt, Artificial Sequence
  Description of Artificial Sequence: Synthetic oligonucleotide
ucuuucccaaugccgaacu

SEQ ID NO: 103280 - RNA, 19 nt, Artificial Sequence
  Description of Artificial Sequence: Synthetic oligonucleotide
ugggaggccccuuugacca

SEQ ID NO: 103281 - RNA, 19 nt, Artificial Sequence
  Description of Artificial Sequence: Synthetic oligonucleotide
agaugaacggaguggccgg

SEQ ID NO: 103282 - RNA, 19 nt, Artificial Sequence
  Description of Artificial Sequence: Synthetic oligonucleotide
gagauggcaugaucaacau

SEQ ID NO: 103283 - RNA, 19 nt, Artificial Sequence
  Description of Artificial Sequence: Synthetic oligonucleotide
uugacaugacuggagagaa

SEQ ID NO: 103284 - RNA, 19 nt, Artificial Sequence
  Description of Artificial Sequence: Synthetic oligonucleotide
agaggucguuggaucuccc

SEQ ID NO: 103285 - RNA, 19 nt, Artificial Sequence
  Description of Artificial Sequence: Synthetic oligonucleotide
cauaucccagcagcuuugc

SEQ ID NO: 103286 - RNA, 19 nt, Artificial Sequence
  Description of Artificial Sequence: Synthetic oligonucleotide
cucccgucucugcaccuag

SEQ ID NO: 103287 - RNA, 19 nt, Artificial Sequence
  Description of Artificial Sequence: Synthetic oligonucleotide
gaaaccagaccuucacuua

SEQ ID NO: 103288 - RNA, 19 nt, Artificial Sequence
  Description of Artificial Sequence: Synthetic oligonucleotide
acaugggcaaguucuccau

SEQ ID NO: 103289 - RNA, 19 nt, Artificial Sequence
  Description of Artificial Sequence: Synthetic oligonucleotide
uugacccucaguacccugg

SEQ ID NO: 103290 - RNA, 19 nt, Artificial Sequence
  Description of Artificial Sequence: Synthetic oligonucleotide
gugccagcugcuacccaga

SEQ ID NO: 103291 - RNA, 19 nt, Artificial Sequence
  Description of Artificial Sequence: Synthetic oligonucleotide
aaggcauaaucaauauugu

SEQ ID NO: 103292 - RNA, 19 nt, Artificial Sequence
  Description of Artificial Sequence: Synthetic oligonucleotide
ugagugcaggcaucuugca

SEQ ID NO: 103293 - RNA, 19 nt, Artificial Sequence
  Description of Artificial Sequence: Synthetic oligonucleotide
aaggggucacuuccccagc

SEQ ID NO: 103294 - RNA, 19 nt, Artificial Sequence
  Description of Artificial Sequence: Synthetic oligonucleotide
cuucaaccacagccucauc

SEQ ID NO: 103295 - RNA, 19 nt, Artificial Sequence
  Description of Artificial Sequence: Synthetic oligonucleotide
ccagcgucaccucugccuc

SEQ ID NO: 103296 - RNA, 19 nt, Artificial Sequence
  Description of Artificial Sequence: Synthetic oligonucleotide
cccccaacccacuggccac

SEQ ID NO: 103297 - RNA, 19 nt, Artificial Sequence
  Description of Artificial Sequence: Synthetic oligonucleotide
caggaccccugggugugug

SEQ ID NO: 103298 - RNA, 19 nt, Artificial Sequence
  Description of Artificial Sequence: Synthetic oligonucleotide
gcaccaugucccagaccca

SEQ ID NO: 103299 - RNA, 19 nt, Artificial Sequence
  Description of Artificial Sequence: Synthetic oligonucleotide
agccugaccuggaccaccu

SEQ ID NO: 103300 - RNA, 19 nt, Artificial Sequence
  Description of Artificial Sequence: Synthetic oligonucleotide
uguacucuccgccaccgcc

SEQ ID NO: 103301 - RNA, 19 nt, Artificial Sequence
  Description of Artificial Sequence: Synthetic oligonucleotide
cuccuccuccuuauucugg

SEQ ID NO: 103302 - RNA, 19 nt, Artificial Sequence
  Description of Artificial Sequence: Synthetic oligonucleotide
gcugugcaggagaccucua

SEQ ID NO: 103303 - RNA, 19 nt, Artificial Sequence
  Description of Artificial Sequence: Synthetic oligonucleotide
accaggacccuucugcguu

SEQ ID NO: 103304 - RNA, 19 nt, Artificial Sequence
  Description of Artificial Sequence: Synthetic oligonucleotide
uccugucagcagccaccac

SEQ ID NO: 103305 - RNA, 19 nt, Artificial Sequence
  Description of Artificial Sequence: Synthetic oligonucleotide
ccuccaccucuuccucucu

SEQ ID NO: 103306 - RNA, 19 nt, Artificial Sequence
  Description of Artificial Sequence: Synthetic oligonucleotide
uggccuacccaccaccucc

SEQ ID NO: 103307 - RNA, 19 nt, Artificial Sequence
  Description of Artificial Sequence: Synthetic oligonucleotide
cuuccuauccaucccccaa

SEQ ID NO: 103308 - RNA, 19 nt, Artificial Sequence
  Description of Artificial Sequence: Synthetic oligonucleotide
agccagccacggacccagg

SEQ ID NO: 103309 - RNA, 19 nt, Artificial Sequence
  Description of Artificial Sequence: Synthetic oligonucleotide
gucucuucccaaugauccc

SEQ ID NO: 103310 - RNA, 19 nt, Artificial Sequence
  Description of Artificial Sequence: Synthetic oligonucleotide
cagacuauccuggauucuu

SEQ ID NO: 103311 - RNA, 19 nt, Artificial Sequence
  Description of Artificial Sequence: Synthetic oligonucleotide
uuccaucucagugccagag

SEQ ID NO: 103312 - RNA, 19 nt, Artificial Sequence
  Description of Artificial Sequence: Synthetic oligonucleotide
gagaccuacaugguacagc

SEQ ID NO: 103313 - RNA, 19 nt, Artificial Sequence
  Description of Artificial Sequence: Synthetic oligonucleotide
cuggcccagaccguaagcc

SEQ ID NO: 103314 - RNA, 19 nt, Artificial Sequence
  Description of Artificial Sequence: Synthetic oligonucleotide
ccuuucccugcccacugga

SEQ ID NO: 103315 - RNA, 19 nt, Artificial Sequence
  Description of Artificial Sequence: Synthetic oligonucleotide
acacccugcgggugccccc

SEQ ID NO: 103316 - RNA, 19 nt, Artificial Sequence
  Description of Artificial Sequence: Synthetic oligonucleotide
cuccacucacuccacucuc

SEQ ID NO: 103317 - RNA, 19 nt, Artificial Sequence
  Description of Artificial Sequence: Synthetic oligonucleotide
cuacaauccguaacuuuac

SEQ ID NO: 103318 - RNA, 19 nt, Artificial Sequence
  Description of Artificial Sequence: Synthetic oligonucleotide
cccuggggggccccagugc

SEQ ID NO: 103319 - RNA, 19 nt, Artificial Sequence
  Description of Artificial Sequence: Synthetic oligonucleotide
cuggggugaccggaccagg

SEQ ID NO: 103320 - RNA, 19 nt, Artificial Sequence
  Description of Artificial Sequence: Synthetic oligonucleotide
gggccaguggaggcagcga

SEQ ID NO: 103321 - RNA, 19 nt, Artificial Sequence
  Description of Artificial Sequence: Synthetic oligonucleotide
agggaccccggcugccugg

SEQ ID NO: 103322 - RNA, 19 nt, Artificial Sequence
  Description of Artificial Sequence: Synthetic oligonucleotide
guagcagcucagcagcagc

SEQ ID NO: 103323 - RNA, 19 nt, Artificial Sequence
  Description of Artificial Sequence: Synthetic oligonucleotide
cagcagccgccgccgccgc

SEQ ID NO: 103324 - RNA, 19 nt, Artificial Sequence
  Description of Artificial Sequence: Synthetic oligonucleotide
ccgccuauaacccacacca

SEQ ID NO: 103325 - RNA, 19 nt, Artificial Sequence
  Description of Artificial Sequence: Synthetic oligonucleotide
accugccacugcggcccau

SEQ ID NO: 103326 - RNA, 19 nt, Artificial Sequence
  Description of Artificial Sequence: Synthetic oligonucleotide
uucugaggccucgcaagua

SEQ ID NO: 103327 - RNA, 19 nt, Artificial Sequence
  Description of Artificial Sequence: Synthetic oligonucleotide
accccaacagacccagcaa

SEQ ID NO: 103328 - RNA, 19 nt, Artificial Sequence
  Description of Artificial Sequence: Synthetic oligonucleotide
agacgccggugcacgagag

SEQ ID NO: 103329 - RNA, 19 nt, Artificial Sequence
  Description of Artificial Sequence: Synthetic oligonucleotide
ggcccuacccgugcccagc

SEQ ID NO: 103330 - RNA, 19 nt, Artificial Sequence
  Description of Artificial Sequence: Synthetic oligonucleotide
cagaaggcugcgaccggcg

SEQ ID NO: 103331 - RNA, 19 nt, Artificial Sequence
  Description of Artificial Sequence: Synthetic oligonucleotide
gguucucccgcucugacga

SEQ ID NO: 103332 - RNA, 19 nt, Artificial Sequence
  Description of Artificial Sequence: Synthetic oligonucleotide
agcugacacggcacauccg

SEQ ID NO: 103333 - RNA, 19 nt, Artificial Sequence
  Description of Artificial Sequence: Synthetic oligonucleotide
gaauccacacugggcauaa

SEQ ID NO: 103334 - RNA, 19 nt, Artificial Sequence
  Description of Artificial Sequence: Synthetic oligonucleotide
agcccuuccagugucggau

SEQ ID NO: 103335 - RNA, 19 nt, Artificial Sequence
  Description of Artificial Sequence: Synthetic oligonucleotide
ucugcaugcgcaacuucag

SEQ ID NO: 103336 - RNA, 19 nt, Artificial Sequence
  Description of Artificial Sequence: Synthetic oligonucleotide
gccgcagugaccaccucac

SEQ ID NO: 103337 - RNA, 19 nt, Artificial Sequence
  Description of Artificial Sequence: Synthetic oligonucleotide
ccacccauauccgcaccca

SEQ ID NO: 103338 - RNA, 19 nt, Artificial Sequence
  Description of Artificial Sequence: Synthetic oligonucleotide
acaccggugagaagcccuu

SEQ ID NO: 103339 - RNA, 19 nt, Artificial Sequence
  Description of Artificial Sequence: Synthetic oligonucleotide
ucgccugugacuacugugg

SEQ ID NO: 103340 - RNA, 19 nt, Artificial Sequence
  Description of Artificial Sequence: Synthetic oligonucleotide
gccgaaaguuugcccggag

SEQ ID NO: 103341 - RNA, 19 nt, Artificial Sequence
  Description of Artificial Sequence: Synthetic oligonucleotide
gugaugagaggaagcgcca

SEQ ID NO: 103342 - RNA, 19 nt, Artificial Sequence
  Description of Artificial Sequence: Synthetic oligonucleotide
acaccaagauccaccugag

SEQ ID NO: 103343 - RNA, 19 nt, Artificial Sequence
  Description of Artificial Sequence: Synthetic oligonucleotide
gacagaaagagcggaaaag

SEQ ID NO: 103344 - RNA, 19 nt, Artificial Sequence
  Description of Artificial Sequence: Synthetic oligonucleotide
gcagugcccccucugcauc

SEQ ID NO: 103345 - RNA, 19 nt, Artificial Sequence
  Description of Artificial Sequence: Synthetic oligonucleotide
cggugccagcccccucuac

SEQ ID NO: 103346 - RNA, 19 nt, Artificial Sequence
  Description of Artificial Sequence: Synthetic oligonucleotide
cagccuccugcucuggggg

SEQ ID NO: 103347 - RNA, 19 nt, Artificial Sequence
  Description of Artificial Sequence: Synthetic oligonucleotide
gcgugcagccuggggguac

SEQ ID NO: 103348 - RNA, 19 nt, Artificial Sequence
  Description of Artificial Sequence: Synthetic oligonucleotide
cccugugcagcaguaacag

SEQ ID NO: 103349 - RNA, 19 nt, Artificial Sequence
  Description of Artificial Sequence: Synthetic oligonucleotide
gcagcagucuuggcggagg

SEQ ID NO: 103350 - RNA, 19 nt, Artificial Sequence
  Description of Artificial Sequence: Synthetic oligonucleotide
ggccgcucgccccuugcuc

SEQ ID NO: 103351 - RNA, 19 nt, Artificial Sequence
  Description of Artificial Sequence: Synthetic oligonucleotide
ccucucggacccggacacc

SEQ ID NO: 103352 - RNA, 19 nt, Artificial Sequence
  Description of Artificial Sequence: Synthetic oligonucleotide
cuugagaugagacucaggc

SEQ ID NO: 103353 - RNA, 19 nt, Artificial Sequence
  Description of Artificial Sequence: Synthetic oligonucleotide
cugauacaccagcucccaa

SEQ ID NO: 103354 - RNA, 19 nt, Artificial Sequence
  Description of Artificial Sequence: Synthetic oligonucleotide
aaggucccggaggcccuuu

SEQ ID NO: 103355 - RNA, 19 nt, Artificial Sequence
  Description of Artificial Sequence: Synthetic oligonucleotide
uguccacuggagcugcaca

SEQ ID NO: 103356 - RNA, 19 nt, Artificial Sequence
  Description of Artificial Sequence: Synthetic oligonucleotide
aacaaacacuaccacccuu

SEQ ID NO: 103357 - RNA, 19 nt, Artificial Sequence
  Description of Artificial Sequence: Synthetic oligonucleotide
uuccugucccucucucccu

SEQ ID NO: 103358 - RNA, 19 nt, Artificial Sequence
  Description of Artificial Sequence: Synthetic oligonucleotide
uuuguugggcaaagggcuu

SEQ ID NO: 103359 - RNA, 19 nt, Artificial Sequence
  Description of Artificial Sequence: Synthetic oligonucleotide
uugguggagcuagcacugc

SEQ ID NO: 103360 - RNA, 19 nt, Artificial Sequence
  Description of Artificial Sequence: Synthetic oligonucleotide
cccccuuuccaccuagaag

SEQ ID NO: 103361 - RNA, 19 nt, Artificial Sequence
  Description of Artificial Sequence: Synthetic oligonucleotide
gcagguucuuccuaaaacu

SEQ ID NO: 103362 - RNA, 19 nt, Artificial Sequence
  Description of Artificial Sequence: Synthetic oligonucleotide
uuagcccauucuagucucu

SEQ ID NO: 103363 - RNA, 19 nt, Artificial Sequence
  Description of Artificial Sequence: Synthetic oligonucleotide
ucuuaggugaguugacuau

SEQ ID NO: 103364 - RNA, 19 nt, Artificial Sequence
  Description of Artificial Sequence: Synthetic oligonucleotide
ucaacccaaggcaaagggg

SEQ ID NO: 103365 - RNA, 19 nt, Artificial Sequence
  Description of Artificial Sequence: Synthetic oligonucleotide
gaggcucagaaggaggugg

SEQ ID NO: 103366 - RNA, 19 nt, Artificial Sequence
  Description of Artificial Sequence: Synthetic oligonucleotide
guguggggauccccuggcc

SEQ ID NO: 103367 - RNA, 19 nt, Artificial Sequence
  Description of Artificial Sequence: Synthetic oligonucleotide
caagagggcugaggucuga

SEQ ID NO: 103368 - RNA, 19 nt, Artificial Sequence
  Description of Artificial Sequence: Synthetic oligonucleotide
acccugcuuuaaaggguug

SEQ ID NO: 103369 - RNA, 19 nt, Artificial Sequence
  Description of Artificial Sequence: Synthetic oligonucleotide
guuugacuagguuuugcua

SEQ ID NO: 103370 - RNA, 19 nt, Artificial Sequence
  Description of Artificial Sequence: Synthetic oligonucleotide
accccacuuccccuuauuu

SEQ ID NO: 103371 - RNA, 19 nt, Artificial Sequence
  Description of Artificial Sequence: Synthetic oligonucleotide
uugacccaucacagguuuu

SEQ ID NO: 103372 - RNA, 19 nt, Artificial Sequence
  Description of Artificial Sequence: Synthetic oligonucleotide
uugacccuggaugucagag

SEQ ID NO: 103373 - RNA, 19 nt, Artificial Sequence
  Description of Artificial Sequence: Synthetic oligonucleotide
guugaucuaagacguuuuc

SEQ ID NO: 103374 - RNA, 19 nt, Artificial Sequence
  Description of Artificial Sequence: Synthetic oligonucleotide
cuacaauagguugggagau

SEQ ID NO: 103375 - RNA, 19 nt, Artificial Sequence
  Description of Artificial Sequence: Synthetic oligonucleotide
ugcugaucccuucaagugg

SEQ ID NO: 103376 - RNA, 19 nt, Artificial Sequence
  Description of Artificial Sequence: Synthetic oligonucleotide
gggacagcaaaaagacaag

SEQ ID NO: 103377 - RNA, 19 nt, Artificial Sequence
  Description of Artificial Sequence: Synthetic oligonucleotide
gcaaaacugaugugcacuu

SEQ ID NO: 103378 - RNA, 19 nt, Artificial Sequence
  Description of Artificial Sequence: Synthetic oligonucleotide
uuauggcuugggacugauu

SEQ ID NO: 103379 - RNA, 19 nt, Artificial Sequence
  Description of Artificial Sequence: Synthetic oligonucleotide
uugggggacauuguacagu

SEQ ID NO: 103380 - RNA, 19 nt, Artificial Sequence
  Description of Artificial Sequence: Synthetic oligonucleotide
ugagugaaguauagccuuu

SEQ ID NO: 103381 - RNA, 19 nt, Artificial Sequence
  Description of Artificial Sequence: Synthetic oligonucleotide
uaugccacacucuguggcc

SEQ ID NO: 103382 - RNA, 19 nt, Artificial Sequence
  Description of Artificial Sequence: Synthetic oligonucleotide
ccuaaaauggugaaucaga

SEQ ID NO: 103383 - RNA, 19 nt, Artificial Sequence
  Description of Artificial Sequence: Synthetic oligonucleotide
agcauaucuaguugucuca

SEQ ID NO: 103384 - RNA, 19 nt, Artificial Sequence
  Description of Artificial Sequence: Synthetic oligonucleotide
aacccuugaagcaauaugu

SEQ ID NO: 103385 - RNA, 19 nt, Artificial Sequence
  Description of Artificial Sequence: Synthetic oligonucleotide
uauuauauacucagagaac

SEQ ID NO: 103386 - RNA, 19 nt, Artificial Sequence
  Description of Artificial Sequence: Synthetic oligonucleotide
cagaagugcaaugugaugg

SEQ ID NO: 103387 - RNA, 19 nt, Artificial Sequence
  Description of Artificial Sequence: Synthetic oligonucleotide
ggaggaacguagcaauauc

SEQ ID NO: 103388 - RNA, 19 nt, Artificial Sequence
  Description of Artificial Sequence: Synthetic oligonucleotide
cugcuccuuuucgaguugu

SEQ ID NO: 103389 - RNA, 19 nt, Artificial Sequence
  Description of Artificial Sequence: Synthetic oligonucleotide
uuugagaaauguaggcuau

SEQ ID NO: 103390 - RNA, 19 nt, Artificial Sequence
  Description of Artificial Sequence: Synthetic oligonucleotide
uuuuuucaguguauaucca

SEQ ID NO: 103391 - RNA, 19 nt, Artificial Sequence
  Description of Artificial Sequence: Synthetic oligonucleotide
acucagauuuuguguauuu

SEQ ID NO: 103392 - RNA, 19 nt, Artificial Sequence
  Description of Artificial Sequence: Synthetic oligonucleotide
uuugauguacccacacugu

SEQ ID NO: 103393 - RNA, 19 nt, Artificial Sequence
  Description of Artificial Sequence: Synthetic oligonucleotide
uucucuaaauucugaaucu

SEQ ID NO: 103394 - RNA, 19 nt, Artificial Sequence
  Description of Artificial Sequence: Synthetic oligonucleotide
uuugggaaaaaauguaaag

SEQ ID NO: 103395 - RNA, 19 nt, Artificial Sequence
  Description of Artificial Sequence: Synthetic oligonucleotide
gcauuuaugaucucagagg

SEQ ID NO: 103396 - RNA, 19 nt, Artificial Sequence
  Description of Artificial Sequence: Synthetic oligonucleotide
guuaacuuauuuaaggggg

SEQ ID NO: 103397 - RNA, 19 nt, Artificial Sequence
  Description of Artificial Sequence: Synthetic oligonucleotide
gauguacauauucucugaa

SEQ ID NO: 103398 - RNA, 19 nt, Artificial Sequence
  Description of Artificial Sequence: Synthetic oligonucleotide
aacuaggaugcaugcaauu

SEQ ID NO: 103399 - RNA, 19 nt, Artificial Sequence
  Description of Artificial Sequence: Synthetic oligonucleotide
uguguuggaaguguccuug

SEQ ID NO: 103400 - RNA, 19 nt, Artificial Sequence
  Description of Artificial Sequence: Synthetic oligonucleotide
ggucgccuugugugaugua

SEQ ID NO: 103401 - RNA, 19 nt, Artificial Sequence
  Description of Artificial Sequence: Synthetic oligonucleotide
agacaaauguuacaaggcu

SEQ ID NO: 103402 - RNA, 19 nt, Artificial Sequence
  Description of Artificial Sequence: Synthetic oligonucleotide
ugcauguaaauggguugcc

SEQ ID NO: 103403 - RNA, 19 nt, Artificial Sequence
  Description of Artificial Sequence: Synthetic oligonucleotide
cuuauuauggagaaaaaaa

SEQ ID NO: 103404 - RNA, 19 nt, Artificial Sequence
  Description of Artificial Sequence: Synthetic oligonucleotide
aucacucccugaguuuagu

SEQ ID NO: 103405 - RNA, 19 nt, Artificial Sequence
  Description of Artificial Sequence: Synthetic oligonucleotide
uauggcuguauauuuaugc

SEQ ID NO: 103406 - RNA, 19 nt, Artificial Sequence
  Description of Artificial Sequence: Synthetic oligonucleotide
ccuauuaauauuuggaauu

SEQ ID NO: 103407 - RNA, 19 nt, Artificial Sequence
  Description of Artificial Sequence: Synthetic oligonucleotide
uuuuuuuagaaaguauauu

SEQ ID NO: 103408 - RNA, 19 nt, Artificial Sequence
  Description of Artificial Sequence: Synthetic oligonucleotide
uuuuguaugcuuuguuuug

SEQ ID NO: 103409 - RNA, 19 nt, Artificial Sequence
  Description of Artificial Sequence: Synthetic oligonucleotide
gugacuuaaaaguguuacc

SEQ ID NO: 103410 - RNA, 19 nt, Artificial Sequence
  Description of Artificial Sequence: Synthetic oligonucleotide
cuuuguagucaaauuucag

SEQ ID NO: 103411 - RNA, 19 nt, Artificial Sequence
  Description of Artificial Sequence: Synthetic oligonucleotide
gauaagaauguacauaaug

SEQ ID NO: 103412 - RNA, 19 nt, Artificial Sequence
  Description of Artificial Sequence: Synthetic oligonucleotide
guuaccggagcugauuugu

SEQ ID NO: 103413 - RNA, 19 nt, Artificial Sequence
  Description of Artificial Sequence: Synthetic oligonucleotide
uuuggucauuagcucuuaa

SEQ ID NO: 103414 - RNA, 19 nt, Artificial Sequence
  Description of Artificial Sequence: Synthetic oligonucleotide
auaguugugaaaaaauaaa

SEQ ID NO: 103415 - RNA, 19 nt, Artificial Sequence
  Description of Artificial Sequence: Synthetic oligonucleotide
aucuauucuaacgcaaaac

SEQ ID NO: 103416 - RNA, 19 nt, Artificial Sequence
  Description of Artificial Sequence: Synthetic oligonucleotide
ccacuaacugaaguucaga

SEQ ID NO: 103417 - RNA, 19 nt, Artificial Sequence
  Description of Artificial Sequence: Synthetic oligonucleotide
auauaauggaugguuugug

SEQ ID NO: 103418 - RNA, 19 nt, Artificial Sequence
  Description of Artificial Sequence: Synthetic oligonucleotide
gacuauaguguaaauaaau

SEQ ID NO: 103419 - RNA, 19 nt, Artificial Sequence
  Description of Artificial Sequence: Synthetic oligonucleotide
auaaauacuuuucaacaau

SEQ ID NO: 103420 - RNA, 25 nt, Artificial Sequence
  Description of Artificial Sequence: Synthetic oligonucleotide
uaacugagcgaggagcaauugauua

SEQ ID NO: 103421 - RNA, 25 nt, Artificial Sequence
  Description of Artificial Sequence: Synthetic oligonucleotide
aauagcucggcgaggggacucacug

SEQ ID NO: 103422 - RNA, 25 nt, Artificial Sequence
  Description of Artificial Sequence: Synthetic oligonucleotide
gacuguuauaauaacacuacaccag

SEQ ID NO: 103423 - RNA, 25 nt, Artificial Sequence
  Description of Artificial Sequence: Synthetic oligonucleotide
gcaacuccuggcuucccagcagccg

SEQ ID NO: 103424 - RNA, 25 nt, Artificial Sequence
  Description of Artificial Sequence: Synthetic oligonucleotide
ggaacacagacaggagagagucagu

SEQ ID NO: 103425 - RNA, 25 nt, Artificial Sequence
  Description of Artificial Sequence: Synthetic oligonucleotide
uggcaaauagacauuuuucuuauuu

SEQ ID NO: 103426 - RNA, 25 nt, Artificial Sequence
  Description of Artificial Sequence: Synthetic oligonucleotide
ucuuaaaaaacagcaacuuguuugc

SEQ ID NO: 103427 - RNA, 25 nt, Artificial Sequence
  Description of Artificial Sequence: Synthetic oligonucleotide
cuacuuuuauuucuguugauuuuuu

SEQ ID NO: 103428 - RNA, 25 nt, Artificial Sequence
  Description of Artificial Sequence: Synthetic oligonucleotide
uuuucuugguguguguggugguugu

SEQ ID NO: 103429 - RNA, 25 nt, Artificial Sequence
  Description of Artificial Sequence: Synthetic oligonucleotide
uuuuuaaguguggagggcaaaagga

SEQ ID NO: 103430 - RNA, 25 nt, Artificial Sequence
  Description of Artificial Sequence: Synthetic oligonucleotide
agauaccaucccaggcucaguccaa

SEQ ID NO: 103431 - RNA, 25 nt, Artificial Sequence
  Description of Artificial Sequence: Synthetic oligonucleotide
accccucuccaaaacggcuuuucug

SEQ ID NO: 103432 - RNA, 25 nt, Artificial Sequence
  Description of Artificial Sequence: Synthetic oligonucleotide
gacacuccagguagcgagggaguug

SEQ ID NO: 103433 - RNA, 25 nt, Artificial Sequence
  Description of Artificial Sequence: Synthetic oligonucleotide
gggucuccagguugugcgaggagca

SEQ ID NO: 103434 - RNA, 25 nt, Artificial Sequence
  Description of Artificial Sequence: Synthetic oligonucleotide
aaaugaugaccgccaaggccguaga

SEQ ID NO: 103435 - RNA, 25 nt, Artificial Sequence
  Description of Artificial Sequence: Synthetic oligonucleotide
acaaaaucccaguaacucucagugg

SEQ ID NO: 103436 - RNA, 25 nt, Artificial Sequence
  Description of Artificial Sequence: Synthetic oligonucleotide
guuuugugcaccagcugucugacaa

SEQ ID NO: 103437 - RNA, 25 nt, Artificial Sequence
  Description of Artificial Sequence: Synthetic oligonucleotide
acaucuacccgguggaggaccucgc

SEQ ID NO: 103438 - RNA, 25 nt, Artificial Sequence
  Description of Artificial Sequence: Synthetic oligonucleotide
ccgccacgucggugaccaucuuucc

SEQ ID NO: 103439 - RNA, 25 nt, Artificial Sequence
  Description of Artificial Sequence: Synthetic oligonucleotide
ccaaugccgaacugggaggccccuu

SEQ ID NO: 103440 - RNA, 25 nt, Artificial Sequence
  Description of Artificial Sequence: Synthetic oligonucleotide
uugaccagaugaacggaguggccgg

SEQ ID NO: 103441 - RNA, 25 nt, Artificial Sequence
  Description of Artificial Sequence: Synthetic oligonucleotide
gagauggcaugaucaacauugacau

SEQ ID NO: 103442 - RNA, 25 nt, Artificial Sequence
  Description of Artificial Sequence: Synthetic oligonucleotide
ugacuggagagaagaggucguugga

SEQ ID NO: 103443 - RNA, 25 nt, Artificial Sequence
  Description of Artificial Sequence: Synthetic oligonucleotide
aucucccauaucccagcagcuuugc

SEQ ID NO: 103444 - RNA, 25 nt, Artificial Sequence
  Description of Artificial Sequence: Synthetic oligonucleotide
cucccgucucugcaccuagaaacca

SEQ ID NO: 103445 - RNA, 25 nt, Artificial Sequence
  Description of Artificial Sequence: Synthetic oligonucleotide
agaccuucacuuacaugggcaaguu

SEQ ID NO: 103446 - RNA, 25 nt, Artificial Sequence
  Description of Artificial Sequence: Synthetic oligonucleotide
ucuccauugacccucaguacccugg

SEQ ID NO: 103447 - RNA, 25 nt, Artificial Sequence
  Description of Artificial Sequence: Synthetic oligonucleotide
gugccagcugcuacccagaaggcau

SEQ ID NO: 103448 - RNA, 25 nt, Artificial Sequence
  Description of Artificial Sequence: Synthetic oligonucleotide
uaaucaauauugugagugcaggcau

SEQ ID NO: 103449 - RNA, 25 nt, Artificial Sequence
  Description of Artificial Sequence: Synthetic oligonucleotide
ucuugcaaggggucacuuccccagc

SEQ ID NO: 103450 - RNA, 25 nt, Artificial Sequence
  Description of Artificial Sequence: Synthetic oligonucleotide
cuucaaccacagccucauccagcgu

SEQ ID NO: 103451 - RNA, 25 nt, Artificial Sequence
  Description of Artificial Sequence: Synthetic oligonucleotide
ucaccucugccucccccaacccacu

SEQ ID NO: 103452 - RNA, 25 nt, Artificial Sequence
  Description of Artificial Sequence: Synthetic oligonucleotide
uggccacaggaccccugggugugug

SEQ ID NO: 103453 - RNA, 25 nt, Artificial Sequence
  Description of Artificial Sequence: Synthetic oligonucleotide
gcaccaugucccagacccagccuga

SEQ ID NO: 103454 - RNA, 25 nt, Artificial Sequence
  Description of Artificial Sequence: Synthetic oligonucleotide
accuggaccaccuguacucuccgcc

SEQ ID NO: 103455 - RNA, 25 nt, Artificial Sequence
  Description of Artificial Sequence: Synthetic oligonucleotide
caccgccuccuccuccuuauucugg

SEQ ID NO: 103456 - RNA, 25 nt, Artificial Sequence
  Description of Artificial Sequence: Synthetic oligonucleotide
gcugugcaggagaccucuaccagga

SEQ ID NO: 103457 - RNA, 25 nt, Artificial Sequence
  Description of Artificial Sequence: Synthetic oligonucleotide
acccuucugcguuccugucagcagc

SEQ ID NO: 103458 - RNA, 25 nt, Artificial Sequence
  Description of Artificial Sequence: Synthetic oligonucleotide
ccaccaccuccaccucuuccucucu

SEQ ID NO: 103459 - RNA, 25 nt, Artificial Sequence
  Description of Artificial Sequence: Synthetic oligonucleotide
uggccuacccaccaccuccuuccua

SEQ ID NO: 103460 - RNA, 25 nt, Artificial Sequence
  Description of Artificial Sequence: Synthetic oligonucleotide
auccaucccccaagccagccacgga

SEQ ID NO: 103461 - RNA, 25 nt, Artificial Sequence
  Description of Artificial Sequence: Synthetic oligonucleotide
acccaggucucuucccaaugauccc

SEQ ID NO: 103462 - RNA, 25 nt, Artificial Sequence
  Description of Artificial Sequence: Synthetic oligonucleotide
cagacuauccuggauucuuuccauc

SEQ ID NO: 103463 - RNA, 25 nt, Artificial Sequence
  Description of Artificial Sequence: Synthetic oligonucleotide
cucagugccagagagaccuacaugg

SEQ ID NO: 103464 - RNA, 25 nt, Artificial Sequence
  Description of Artificial Sequence: Synthetic oligonucleotide
guacagcuggcccagaccguaagcc

SEQ ID NO: 103465 - RNA, 25 nt, Artificial Sequence
  Description of Artificial Sequence: Synthetic oligonucleotide
ccuuucccugcccacuggacacccu

SEQ ID NO: 103466 - RNA, 25 nt, Artificial Sequence
  Description of Artificial Sequence: Synthetic oligonucleotide
ugcgggugcccccuccacucacucc

SEQ ID NO: 103467 - RNA, 25 nt, Artificial Sequence
  Description of Artificial Sequence: Synthetic oligonucleotide
cacucucuacaauccguaacuuuac

SEQ ID NO: 103468 - RNA, 25 nt, Artificial Sequence
  Description of Artificial Sequence: Synthetic oligonucleotide
cccuggggggccccagugcuggggu

SEQ ID NO: 103469 - RNA, 25 nt, Artificial Sequence
  Description of Artificial Sequence: Synthetic oligonucleotide
ugaccggaccaggggccaguggagg

SEQ ID NO: 103470 - RNA, 25 nt, Artificial Sequence
  Description of Artificial Sequence: Synthetic oligonucleotide
gcagcgagggaccccggcugccugg

SEQ ID NO: 103471 - RNA, 25 nt, Artificial Sequence
  Description of Artificial Sequence: Synthetic oligonucleotide
guagcagcucagcagcagcagcagc

SEQ ID NO: 103472 - RNA, 25 nt, Artificial Sequence
  Description of Artificial Sequence: Synthetic oligonucleotide
ccgccgccgccgccgccuauaaccc

SEQ ID NO: 103473 - RNA, 25 nt, Artificial Sequence
  Description of Artificial Sequence: Synthetic oligonucleotide
cacaccaccugccacugcggcccau

SEQ ID NO: 103474 - RNA, 25 nt, Artificial Sequence
  Description of Artificial Sequence: Synthetic oligonucleotide
uucugaggccucgcaaguaccccaa

SEQ ID NO: 103475 - RNA, 25 nt, Artificial Sequence
  Description of Artificial Sequence: Synthetic oligonucleotide
acagacccagcaagacgccggugca

SEQ ID NO: 103476 - RNA, 25 nt, Artificial Sequence
  Description of Artificial Sequence: Synthetic oligonucleotide
acgagaggcccuacccgugcccagc

SEQ ID NO: 103477 - RNA, 25 nt, Artificial Sequence
  Description of Artificial Sequence: Synthetic oligonucleotide
cagaaggcugcgaccggcgguucuc

SEQ ID NO: 103478 - RNA, 25 nt, Artificial Sequence
  Description of Artificial Sequence: Synthetic oligonucleotide
cccgcucugacgagcugacacggca

SEQ ID NO: 103479 - RNA, 25 nt, Artificial Sequence
  Description of Artificial Sequence: Synthetic oligonucleotide
acauccgaauccacacugggcauaa

SEQ ID NO: 103480 - RNA, 25 nt, Artificial Sequence
  Description of Artificial Sequence: Synthetic oligonucleotide
agcccuuccagugucggaucugcau

SEQ ID NO: 103481 - RNA, 25 nt, Artificial Sequence
  Description of Artificial Sequence: Synthetic oligonucleotide
ugcgcaacuucagccgcagugacca

SEQ ID NO: 103482 - RNA, 25 nt, Artificial Sequence
  Description of Artificial Sequence: Synthetic oligonucleotide
accucaccacccauauccgcaccca

SEQ ID NO: 103483 - RNA, 25 nt, Artificial Sequence
  Description of Artificial Sequence: Synthetic oligonucleotide
acaccggugagaagcccuucgccug

SEQ ID NO: 103484 - RNA, 25 nt, Artificial Sequence
  Description of Artificial Sequence: Synthetic oligonucleotide
gugacuacuguggccgaaaguuugc

SEQ ID NO: 103485 - RNA, 25 nt, Artificial Sequence
  Description of Artificial Sequence: Synthetic oligonucleotide
cccggagugaugagaggaagcgcca

SEQ ID NO: 103486 - RNA, 25 nt, Artificial Sequence
  Description of Artificial Sequence: Synthetic oligonucleotide
acaccaagauccaccugagacagaa

SEQ ID NO: 103487 - RNA, 25 nt, Artificial Sequence
  Description of Artificial Sequence: Synthetic oligonucleotide
aagagcggaaaagcagugcccccuc

SEQ ID NO: 103488 - RNA, 25 nt, Artificial Sequence
  Description of Artificial Sequence: Synthetic oligonucleotide
cugcaucggugccagcccccucuac

SEQ ID NO: 103489 - RNA, 25 nt, Artificial Sequence
  Description of Artificial Sequence: Synthetic oligonucleotide
cagccuccugcucugggggcgugca

SEQ ID NO: 103490 - RNA, 25 nt, Artificial Sequence
  Description of Artificial Sequence: Synthetic oligonucleotide
agccuggggguacccugugcagcag

SEQ ID NO: 103491 - RNA, 25 nt, Artificial Sequence
  Description of Artificial Sequence: Synthetic oligonucleotide
guaacagcagcagucuuggcggagg

SEQ ID NO: 103492 - RNA, 25 nt, Artificial Sequence
  Description of Artificial Sequence: Synthetic oligonucleotide
ggccgcucgccccuugcuccucucg

SEQ ID NO: 103493 - RNA, 25 nt, Artificial Sequence
  Description of Artificial Sequence: Synthetic oligonucleotide
ggacccggacaccuugagaugagac

SEQ ID NO: 103494 - RNA, 25 nt, Artificial Sequence
  Description of Artificial Sequence: Synthetic oligonucleotide
cucaggcugauacaccagcucccaa

SEQ ID NO: 103495 - RNA, 25 nt, Artificial Sequence
  Description of Artificial Sequence: Synthetic oligonucleotide
aaggucccggaggcccuuuguccac

SEQ ID NO: 103496 - RNA, 25 nt, Artificial Sequence
  Description of Artificial Sequence: Synthetic oligonucleotide
cuggagcugcacaacaaacacuacc

SEQ ID NO: 103497 - RNA, 25 nt, Artificial Sequence
  Description of Artificial Sequence: Synthetic oligonucleotide
cacccuuuccugucccucucucccu

SEQ ID NO: 103498 - RNA, 25 nt, Artificial Sequence
  Description of Artificial Sequence: Synthetic oligonucleotide
uuuguugggcaaagggcuuuggugg

SEQ ID NO: 103499 - RNA, 25 nt, Artificial Sequence
  Description of Artificial Sequence: Synthetic oligonucleotide
gagcuagcacugcccccuuuccacc

SEQ ID NO: 103500 - RNA, 25 nt, Artificial Sequence
  Description of Artificial Sequence: Synthetic oligonucleotide
cuagaagcagguucuuccuaaaacu

SEQ ID NO: 103501 - RNA, 25 nt, Artificial Sequence
  Description of Artificial Sequence: Synthetic oligonucleotide
uuagcccauucuagucucucuuagg

SEQ ID NO: 103502 - RNA, 25 nt, Artificial Sequence
  Description of Artificial Sequence: Synthetic oligonucleotide
gugaguugacuaucaacccaaggca

SEQ ID NO: 103503 - RNA, 25 nt, Artificial Sequence
  Description of Artificial Sequence: Synthetic oligonucleotide
aaaggggaggcucagaaggaggugg

SEQ ID NO: 103504 - RNA, 25 nt, Artificial Sequence
  Description of Artificial Sequence: Synthetic oligonucleotide
guguggggauccccuggccaagagg

SEQ ID NO: 103505 - RNA, 25 nt, Artificial Sequence
  Description of Artificial Sequence: Synthetic oligonucleotide
ggcugaggucugacccugcuuuaaa

SEQ ID NO: 103506 - RNA, 25 nt, Artificial Sequence
  Description of Artificial Sequence: Synthetic oligonucleotide
aggguuguuugacuagguuuugcua

SEQ ID NO: 103507 - RNA, 25 nt, Artificial Sequence
  Description of Artificial Sequence: Synthetic oligonucleotide
accccacuuccccuuauuuugaccc

SEQ ID NO: 103508 - RNA, 25 nt, Artificial Sequence
  Description of Artificial Sequence: Synthetic oligonucleotide
caucacagguuuuugacccuggaug

SEQ ID NO: 103509 - RNA, 25 nt, Artificial Sequence
  Description of Artificial Sequence: Synthetic oligonucleotide
gucagaguugaucuaagacguuuuc

SEQ ID NO: 103510 - RNA, 25 nt, Artificial Sequence
  Description of Artificial Sequence: Synthetic oligonucleotide
cuacaauagguugggagaugcugau

SEQ ID NO: 103511 - RNA, 25 nt, Artificial Sequence
  Description of Artificial Sequence: Synthetic oligonucleotide
ucccuucaaguggggacagcaaaaa

SEQ ID NO: 103512 - RNA, 25 nt, Artificial Sequence
  Description of Artificial Sequence: Synthetic oligonucleotide
agacaagcaaaacugaugugcacuu

SEQ ID NO: 103513 - RNA, 25 nt, Artificial Sequence
  Description of Artificial Sequence: Synthetic oligonucleotide
uuauggcuugggacugauuuggggg

SEQ ID NO: 103514 - RNA, 25 nt, Artificial Sequence
  Description of Artificial Sequence: Synthetic oligonucleotide
gacauuguacagugagugaaguaua

SEQ ID NO: 103515 - RNA, 25 nt, Artificial Sequence
  Description of Artificial Sequence: Synthetic oligonucleotide
agccuuuaugccacacucuguggcc

SEQ ID NO: 103516 - RNA, 25 nt, Artificial Sequence
  Description of Artificial Sequence: Synthetic oligonucleotide
ccuaaaauggugaaucagagcauau

SEQ ID NO: 103517 - RNA, 25 nt, Artificial Sequence
  Description of Artificial Sequence: Synthetic oligonucleotide
ucuaguugucucaacccuugaagca

SEQ ID NO: 103518 - RNA, 25 nt, Artificial Sequence
  Description of Artificial Sequence: Synthetic oligonucleotide
aauauguauuauauacucagagaac

SEQ ID NO: 103519 - RNA, 25 nt, Artificial Sequence
  Description of Artificial Sequence: Synthetic oligonucleotide
cagaagugcaaugugaugggaggaa

SEQ ID NO: 103520 - RNA, 25 nt, Artificial Sequence
  Description of Artificial Sequence: Synthetic oligonucleotide
acguagcaauaucugcuccuuuucg

SEQ ID NO: 103521 - RNA, 25 nt, Artificial Sequence
  Description of Artificial Sequence: Synthetic oligonucleotide
gaguuguuugagaaauguaggcuau

SEQ ID NO: 103522 - RNA, 25 nt, Artificial Sequence
  Description of Artificial Sequence: Synthetic oligonucleotide
uuuuuucaguguauauccacucaga

SEQ ID NO: 103523 - RNA, 25 nt, Artificial Sequence
  Description of Artificial Sequence: Synthetic oligonucleotide
auuuuguguauuuuugauguaccca

SEQ ID NO: 103524 - RNA, 25 nt, Artificial Sequence
  Description of Artificial Sequence: Synthetic oligonucleotide
acacuguucucuaaauucugaaucu

SEQ ID NO: 103525 - RNA, 25 nt, Artificial Sequence
  Description of Artificial Sequence: Synthetic oligonucleotide
uuugggaaaaaauguaaagcauuua

SEQ ID NO: 103526 - RNA, 25 nt, Artificial Sequence
  Description of Artificial Sequence: Synthetic oligonucleotide
augaucucagagguuaacuuauuua

SEQ ID NO: 103527 - RNA, 25 nt, Artificial Sequence
  Description of Artificial Sequence: Synthetic oligonucleotide
aagggggauguacauauucucugaa

SEQ ID NO: 103528 - RNA, 25 nt, Artificial Sequence
  Description of Artificial Sequence: Synthetic oligonucleotide
aacuaggaugcaugcaauuguguug

SEQ ID NO: 103529 - RNA, 25 nt, Artificial Sequence
  Description of Artificial Sequence: Synthetic oligonucleotide
ggaaguguccuuggucgccuugugu

SEQ ID NO: 103530 - RNA, 25 nt, Artificial Sequence
  Description of Artificial Sequence: Synthetic oligonucleotide
ugauguagacaaauguuacaaggcu

SEQ ID NO: 103531 - RNA, 25 nt, Artificial Sequence
  Description of Artificial Sequence: Synthetic oligonucleotide
ugcauguaaauggguugccuuauua

SEQ ID NO: 103532 - RNA, 25 nt, Artificial Sequence
  Description of Artificial Sequence: Synthetic oligonucleotide
auggagaaaaaaaucacucccugag

SEQ ID NO: 103533 - RNA, 25 nt, Artificial Sequence
  Description of Artificial Sequence: Synthetic oligonucleotide
guuuaguauggcuguauauuuaugc

SEQ ID NO: 103534 - RNA, 25 nt, Artificial Sequence
  Description of Artificial Sequence: Synthetic oligonucleotide
ccuauuaauauuuggaauuuuuuuu

SEQ ID NO: 103535 - RNA, 25 nt, Artificial Sequence
  Description of Artificial Sequence: Synthetic oligonucleotide
uagaaaguauauuuuuguaugcuuu

SEQ ID NO: 103536 - RNA, 25 nt, Artificial Sequence
  Description of Artificial Sequence: Synthetic oligonucleotide
uguuuugugacuuaaaaguguuacc

SEQ ID NO: 103537 - RNA, 25 nt, Artificial Sequence
  Description of Artificial Sequence: Synthetic oligonucleotide
cuuuguagucaaauuucagauaaga

SEQ ID NO: 103538 - RNA, 25 nt, Artificial Sequence
  Description of Artificial Sequence: Synthetic oligonucleotide
aauguacauaauguuaccggagcug

SEQ ID NO: 103539 - RNA, 25 nt, Artificial Sequence
  Description of Artificial Sequence: Synthetic oligonucleotide
gauuuguuuggucauuagcucuuaa

SEQ ID NO: 103540 - RNA, 25 nt, Artificial Sequence
  Description of Artificial Sequence: Synthetic oligonucleotide
auaguugugaaaaaauaaaucuauu

SEQ ID NO: 103541 - RNA, 25 nt, Artificial Sequence
  Description of Artificial Sequence: Synthetic oligonucleotide
ucuaacgcaaaaccacuaacugaag

SEQ ID NO: 103542 - RNA, 25 nt, Artificial Sequence
  Description of Artificial Sequence: Synthetic oligonucleotide
guucagauauaauggaugguuugug

SEQ ID NO: 103543 - RNA, 25 nt, Artificial Sequence
  Description of Artificial Sequence: Synthetic oligonucleotide
gacuauaguguaaauaaauacuuuu

SEQ ID NO: 103544 - RNA, 25 nt, Artificial Sequence
  Description of Artificial Sequence: Synthetic oligonucleotide
guguaaauaaauacuuuucaacaau

SEQ ID NO: 103545 - RNA, 4342 nt, Homo sapiens
gaucaauacugaggccgcguccgacccccuugagccgagauccccccccagcccagcccccaccccaccccccgcacacgccccaccccccccacgacccagccucauaccgcaccagcugaggcacccaagaggauuacccccuggggcccucucccgccccccaaaaaagagaagauccccucuccuggcccaucccuucccuucuucccuccccccuccccccgaacuuucccucucgcaugcuuuuccccugcaccacggaucgccucucggaugccgcuugccuggaagcugcguuaggagcgagcggcggcgguggcggcgguggcggcggcggcggcagcucgggagugcuaugaccggcaaacucgccgagaagcugccggugaccaugagcaguuugcuaaaccaacugccugacaaucuguaccccgaggagauccccagcgcgcucaaccucuucuccggcagcagcgacucgguaguccauuacaaucagauggcuacagagaauguaauggacaucggucugaccaacgagaagcccaacccggaacucucuuacuccggcuccuuccagccagcccccggcaacaagaccgugaccuacuugggaaaguucgccuucgacuccccuuccaacuggugccaggacaacaucauuagccucaugagcgccggcaucuugggggugcccccggcuucaggggcgcucagcacgcagacguccacggccagcauggugcagccaccgcagggugacguggaggccauguaucccgcgcuaccccccuacuccaacugcggcgaccucuacucagagcccgugucuuuccacgacccccagggcaaucccgggcucgccuauuccccccaggauuaccaaucggccaagccggcguuggacagcaaucucuuccccaugauuccugacuacaaccucuaccaccaccccaacgacaugggcuccauuccggagcacaagcccuuccagggcauggaccccauccgggucaacccgcccccuauuaccccucuggagaccaucaaggcauucaaagacaagcagauccacccgggcuuuggcagccugccccagccgccgcucacccucaagcccauccggccccgcaaguaccccaaccggccuagcaagacaccgcuccacgaacggccccacgcgugcccggccgagggcugcgaccgccguuucagccguucggacgagcugacccggcaccugcgcauccacacgggccacaagcccuuccagugccggaucugcaugcggagcuucagccgcagcgaccaccucaccacucacauccgcacucauacgggcgagaagcccuuugccugcgaguucugcgggcgcaaguuugcgcgcagcgacgagcgcaagcgccacgccaagauccaccucaagcaaaaggagaagaaggcggagaagggcggugcacccucugcauccucggcgccccccgugucgcuggcccccguggucaccaccugcgccugaggaucgggcccccagauccccacuuuuccccuccagugccucccggcugcuagccugaaagcagcgggaaagccagccacggaggcguaggggccgcgcccuggccucuccauggacgugcggccccuugcuuccccuucgaugcccccgguucccaaccuuucacgccggccagcggucaggggccagggcuggaggcgccuuccccucgcggucccccacuuagccaaggcgugggggcggaaagguggcgucuagcccgcuuuguucaguucggaucgccuugauccaggggccgccgggccgcgccaaggaccugcaagggacugaaggcggagcccauccaacccucgcccgacccaaacaccucauuguuucccccacgucucccucuauacccccucgaagacucgagagggggaggggguaaggagcgcaccaaagcgcagagcuugcugcccgccgcacgcacgcgcgccugcgugcggggaugcgcgcgagugugugcgugcucgcguguguguguaugugugugugugagugugugugugugcgcgcgcgcaagcguguguguuuaagacucuugagcugaacugggcuguguuuaccccaaacucuuccccaccucggguccccaagccgcugggagaugucccaugcuggggguccgcacguggcuggaggagguggucuuccauccgcucugaaaucauguuucuuagagaaaugccucggaugccgccgacgcggugcugcugccgccgcuucggguuuggccccucagaaccccuccuuuucugagcgcuucccucuuaggccucagggcaguuugaucuguggggagaaagagcagccaucgcugagccugccuuuuaaaauauauguguauuuccuuagccccacucuaagaaaucuauguuccugaguuugcccccugcccucccacuccuuccccuucuccccucuaaaccuucucccaucucuuucaaaaucuuuucccagaaaggcaggcuucaaccagccacuccagcuuugugucuucucucaauuacauagcaauuucuccuucccaccaucauggggaagcuggcucugcuuuugcccuuugucaucaccaacacaacagauagaauuuaaauauaaguauauggugugcguguguauguauguguauguauaugcaugcauguguauaaagaugcacaugcguacauauacauaacauacacacaauauguauuccuagcaaaauaaaaucucuaagguacuugguuauccagugcagugcaccggaauaaagagaauuuguaggcguauacagcuuuaaaugauuuauuuuuuaugaaaauguuaacugaugagauuauaucuacauacguguguuauguguguggauauagaugcacacauaucuguacauauacaugugaguguacauauauacacauauacacaucuauguauggauauguguguauacacauauacacaucucuguccaaaauuuccucaaagauauggggauuuuuucaugaauccauguggaugaaugaggugucuccuuuccauacccagucucaccuucuccccacccuaccucaccucuucucaggcaccccucuuccccagcuguccugccagcccuucucguacaggguggcuccuuugaaguggaguaauagggaagguugcucucugccacagcuugcagcauggucuugacugaauguacuguuccuguuagcguuacuucuccuguggucaguaaguugcccagagagaaggaacaaaggucuggaguuuacagaaugucuguuuuuaaagucacuuuaugcguuuuccacuuuuuucuuuuuuaagaaaaagaaguaccauuuuuguuuuguuuuguuuugauuuuuggugguggauaaauaauacuaaaaggacucuaguggaaaggggggauaucgaagagcaggggguugugaauuuccagguacuuggacuuuuuguagaaggagagagaagaagaugaaguuugccaggagggcccauauuuuuucagcugaaggguaaaaucuuucuuugcagagacaguauuuugcugaauacuuuuuauaaugugaugauuauuaaaaaagcaaaaauuuuggucacuuccaagcuagaaggaggaaucagauacccuuuaauauuuuuuccucgcuccuucugguauaugcaugucacugcaugauaauugaguuuuccuuuguuuuaauaaaacuguucucagacauuaagcuaaacuaagagaaaaauaacuuuguugccaaaagguugugcuauccagauuuuuuauaugucugcauguuuaaaaaaaaaaagcaacaaaagaaaaugcacucuaacuuaugugaacugagagaaaaaaaucagguuuuaaacaggaaaaccuauggggaaugauauuuuuugaaagacuuuuguauaaaguugaguacuuagaaaaaagacaaaccagauguaauauauuuuguggauguuuuuauuucuuggauuuauaguaccuuauacuaagguuaaaaaaauaugcuugauauugugaaaaggugaaauucuucaccaacauuucauuugcuccuuugucauauuguaaugccaauauaauauaguuaaugaaaacagcauuuuuaaaaaccgaaauauugaaaugguguaauguuguaccauuugcacugugagcaaaugcuaauacaguaaauauauuguguuugcugacaaucagccggccuauaaaucuccuuauuuuauuucuuguuuuuauagcauaaagcuuuaguuuggccugaaaaaaaa

SEQ ID NO: 103546 - RNA, 19 nt, Artificial Sequence
  Description of Artificial Sequence: Synthetic oligonucleotide
gaucaauacugaggccgcg

SEQ ID NO: 103547 - RNA, 19 nt, Artificial Sequence
  Description of Artificial Sequence: Synthetic oligonucleotide
guccgacccccuugagccg

SEQ ID NO: 103548 - RNA, 19 nt, Artificial Sequence
  Description of Artificial Sequence: Synthetic oligonucleotide
gagauccccccccagccca

SEQ ID NO: 103549 - RNA, 19 nt, Artificial Sequence
  Description of Artificial Sequence: Synthetic oligonucleotide
agcccccaccccacccccc

SEQ ID NO: 103550 - RNA, 19 nt, Artificial Sequence
  Description of Artificial Sequence: Synthetic oligonucleotide
cgcacacgccccacccccc

SEQ ID NO: 103551 - RNA, 19 nt, Artificial Sequence
  Description of Artificial Sequence: Synthetic oligonucleotide
cccacgacccagccucaua

SEQ ID NO: 103552 - RNA, 19 nt, Artificial Sequence
  Description of Artificial Sequence: Synthetic oligonucleotide
accgcaccagcugaggcac

SEQ ID NO: 103553 - RNA, 19 nt, Artificial Sequence
  Description of Artificial Sequence: Synthetic oligonucleotide
cccaagaggauuacccccu

SEQ ID NO: 103554 - RNA, 19 nt, Artificial Sequence
  Description of Artificial Sequence: Synthetic oligonucleotide
uggggcccucucccgcccc

SEQ ID NO: 103555 - RNA, 19 nt, Artificial Sequence
  Description of Artificial Sequence: Synthetic oligonucleotide
cccaaaaaagagaagaucc

SEQ ID NO: 103556 - RNA, 19 nt, Artificial Sequence
  Description of Artificial Sequence: Synthetic oligonucleotide
cccucuccuggcccauccc

SEQ ID NO: 103557 - RNA, 19 nt, Artificial Sequence
  Description of Artificial Sequence: Synthetic oligonucleotide
cuucccuucuucccucccc

SEQ ID NO: 103558 - RNA, 19 nt, Artificial Sequence
  Description of Artificial Sequence: Synthetic oligonucleotide
cccuccccccgaacuuucc

SEQ ID NO: 103559 - RNA, 19 nt, Artificial Sequence
  Description of Artificial Sequence: Synthetic oligonucleotide
ccucucgcaugcuuuuccc

SEQ ID NO: 103560 - RNA, 19 nt, Artificial Sequence
  Description of Artificial Sequence: Synthetic oligonucleotide
ccugcaccacggaucgccu

SEQ ID NO: 103561 - RNA, 19 nt, Artificial Sequence
  Description of Artificial Sequence: Synthetic oligonucleotide
ucucggaugccgcuugccu

SEQ ID NO: 103562 - RNA, 19 nt, Artificial Sequence
  Description of Artificial Sequence: Synthetic oligonucleotide
uggaagcugcguuaggagc

SEQ ID NO: 103563 - RNA, 19 nt, Artificial Sequence
  Description of Artificial Sequence: Synthetic oligonucleotide
cgagcggcggcgguggcgg

SEQ ID NO: 103564 - RNA, 19 nt, Artificial Sequence
  Description of Artificial Sequence: Synthetic oligonucleotide
gcgguggcggcggcggcgg

SEQ ID NO: 103565 - RNA, 19 nt, Artificial Sequence
  Description of Artificial Sequence: Synthetic oligonucleotide
gcagcucgggagugcuaug

SEQ ID NO: 103566 - RNA, 19 nt, Artificial Sequence
  Description of Artificial Sequence: Synthetic oligonucleotide
gaccggcaaacucgccgag

SEQ ID NO: 103567 - RNA, 19 nt, Artificial Sequence
  Description of Artificial Sequence: Synthetic oligonucleotide
gaagcugccggugaccaug

SEQ ID NO: 103568 - RNA, 19 nt, Artificial Sequence
  Description of Artificial Sequence: Synthetic oligonucleotide
gagcaguuugcuaaaccaa

SEQ ID NO: 103569 - RNA, 19 nt, Artificial Sequence
  Description of Artificial Sequence: Synthetic oligonucleotide
acugccugacaaucuguac

SEQ ID NO: 103570 - RNA, 19 nt, Artificial Sequence
  Description of Artificial Sequence: Synthetic oligonucleotide
ccccgaggagauccccagc

SEQ ID NO: 103571 - RNA, 19 nt, Artificial Sequence
  Description of Artificial Sequence: Synthetic oligonucleotide
cgcgcucaaccucuucucc

SEQ ID NO: 103572 - RNA, 19 nt, Artificial Sequence
  Description of Artificial Sequence: Synthetic oligonucleotide
cggcagcagcgacucggua

SEQ ID NO: 103573 - RNA, 19 nt, Artificial Sequence
  Description of Artificial Sequence: Synthetic oligonucleotide
aguccauuacaaucagaug

SEQ ID NO: 103574 - RNA, 19 nt, Artificial Sequence
  Description of Artificial Sequence: Synthetic oligonucleotide
ggcuacagagaauguaaug

SEQ ID NO: 103575 - RNA, 19 nt, Artificial Sequence
  Description of Artificial Sequence: Synthetic oligonucleotide
ggacaucggucugaccaac

SEQ ID NO: 103576 - RNA, 19 nt, Artificial Sequence
  Description of Artificial Sequence: Synthetic oligonucleotide
cgagaagcccaacccggaa

SEQ ID NO: 103577 - RNA, 19 nt, Artificial Sequence
  Description of Artificial Sequence: Synthetic oligonucleotide
acucucuuacuccggcucc

SEQ ID NO: 103578 - RNA, 19 nt, Artificial Sequence
  Description of Artificial Sequence: Synthetic oligonucleotide
cuuccagccagcccccggc

SEQ ID NO: 103579 - RNA, 19 nt, Artificial Sequence
  Description of Artificial Sequence: Synthetic oligonucleotide
caacaagaccgugaccuac

SEQ ID NO: 103580 - RNA, 19 nt, Artificial Sequence
  Description of Artificial Sequence: Synthetic oligonucleotide
cuugggaaaguucgccuuc

SEQ ID NO: 103581 - RNA, 19 nt, Artificial Sequence
  Description of Artificial Sequence: Synthetic oligonucleotide
cgacuccccuuccaacugg

SEQ ID NO: 103582 - RNA, 19 nt, Artificial Sequence
  Description of Artificial Sequence: Synthetic oligonucleotide
gugccaggacaacaucauu

SEQ ID NO: 103583 - RNA, 19 nt, Artificial Sequence
  Description of Artificial Sequence: Synthetic oligonucleotide
uagccucaugagcgccggc

SEQ ID NO: 103584 - RNA, 19 nt, Artificial Sequence
  Description of Artificial Sequence: Synthetic oligonucleotide
caucuugggggugcccccg

SEQ ID NO: 103585 - RNA, 19 nt, Artificial Sequence
  Description of Artificial Sequence: Synthetic oligonucleotide
ggcuucaggggcgcucagc

SEQ ID NO: 103586 - RNA, 19 nt, Artificial Sequence
  Description of Artificial Sequence: Synthetic oligonucleotide
cacgcagacguccacggcc

SEQ ID NO: 103587 - RNA, 19 nt, Artificial Sequence
  Description of Artificial Sequence: Synthetic oligonucleotide
cagcauggugcagccaccg

SEQ ID NO: 103588 - RNA, 19 nt, Artificial Sequence
  Description of Artificial Sequence: Synthetic oligonucleotide
gcagggugacguggaggcc

SEQ ID NO: 103589 - RNA, 19 nt, Artificial Sequence
  Description of Artificial Sequence: Synthetic oligonucleotide
cauguaucccgcgcuaccc

SEQ ID NO: 103590 - RNA, 19 nt, Artificial Sequence
  Description of Artificial Sequence: Synthetic oligonucleotide
ccccuacuccaacugcggc

SEQ ID NO: 103591 - RNA, 19 nt, Artificial Sequence
  Description of Artificial Sequence: Synthetic oligonucleotide
cgaccucuacucagagccc

SEQ ID NO: 103592 - RNA, 19 nt, Artificial Sequence
  Description of Artificial Sequence: Synthetic oligonucleotide
cgugucuuuccacgacccc

SEQ ID NO: 103593 - RNA, 19 nt, Artificial Sequence
  Description of Artificial Sequence: Synthetic oligonucleotide
ccagggcaaucccgggcuc

SEQ ID NO: 103594 - RNA, 19 nt, Artificial Sequence
  Description of Artificial Sequence: Synthetic oligonucleotide
cgccuauuccccccaggau

SEQ ID NO: 103595 - RNA, 19 nt, Artificial Sequence
  Description of Artificial Sequence: Synthetic oligonucleotide
uuaccaaucggccaagccg

SEQ ID NO: 103596 - RNA, 19 nt, Artificial Sequence
  Description of Artificial Sequence: Synthetic oligonucleotide
ggcguuggacagcaaucuc

SEQ ID NO: 103597 - RNA, 19 nt, Artificial Sequence
  Description of Artificial Sequence: Synthetic oligonucleotide
cuuccccaugauuccugac

SEQ ID NO: 103598 - RNA, 19 nt, Artificial Sequence
  Description of Artificial Sequence: Synthetic oligonucleotide
cuacaaccucuaccaccac

SEQ ID NO: 103599 - RNA, 19 nt, Artificial Sequence
  Description of Artificial Sequence: Synthetic oligonucleotide
ccccaacgacaugggcucc

SEQ ID NO: 103600 - RNA, 19 nt, Artificial Sequence
  Description of Artificial Sequence: Synthetic oligonucleotide
cauuccggagcacaagccc

SEQ ID NO: 103601 - RNA, 19 nt, Artificial Sequence
  Description of Artificial Sequence: Synthetic oligonucleotide
cuuccagggcauggacccc

SEQ ID NO: 103602 - RNA, 19 nt, Artificial Sequence
  Description of Artificial Sequence: Synthetic oligonucleotide
cauccgggucaacccgccc

SEQ ID NO: 103603 - RNA, 19 nt, Artificial Sequence
  Description of Artificial Sequence: Synthetic oligonucleotide
cccuauuaccccucuggag

SEQ ID NO: 103604 - RNA, 19 nt, Artificial Sequence
  Description of Artificial Sequence: Synthetic oligonucleotide
gaccaucaaggcauucaaa

SEQ ID NO: 103605 - RNA, 19 nt, Artificial Sequence
  Description of Artificial Sequence: Synthetic oligonucleotide
agacaagcagauccacccg

SEQ ID NO: 103606 - RNA, 19 nt, Artificial Sequence
  Description of Artificial Sequence: Synthetic oligonucleotide
gggcuuuggcagccugccc

SEQ ID NO: 103607 - RNA, 19 nt, Artificial Sequence
  Description of Artificial Sequence: Synthetic oligonucleotide
ccagccgccgcucacccuc

SEQ ID NO: 103608 - RNA, 19 nt, Artificial Sequence
  Description of Artificial Sequence: Synthetic oligonucleotide
caagcccauccggccccgc

SEQ ID NO: 103609 - RNA, 19 nt, Artificial Sequence
  Description of Artificial Sequence: Synthetic oligonucleotide
caaguaccccaaccggccu

SEQ ID NO: 103610 - RNA, 19 nt, Artificial Sequence
  Description of Artificial Sequence: Synthetic oligonucleotide
uagcaagacaccgcuccac

SEQ ID NO: 103611 - RNA, 19 nt, Artificial Sequence
  Description of Artificial Sequence: Synthetic oligonucleotide
cgaacggccccacgcgugc

SEQ ID NO: 103612 - RNA, 19 nt, Artificial Sequence
  Description of Artificial Sequence: Synthetic oligonucleotide
cccggccgagggcugcgac

SEQ ID NO: 103613 - RNA, 19 nt, Artificial Sequence
  Description of Artificial Sequence: Synthetic oligonucleotide
ccgccguuucagccguucg

SEQ ID NO: 103614 - RNA, 19 nt, Artificial Sequence
  Description of Artificial Sequence: Synthetic oligonucleotide
ggacgagcugacccggcac

SEQ ID NO: 103615 - RNA, 19 nt, Artificial Sequence
  Description of Artificial Sequence: Synthetic oligonucleotide
ccugcgcauccacacgggc

SEQ ID NO: 103616 - RNA, 19 nt, Artificial Sequence
  Description of Artificial Sequence: Synthetic oligonucleotide
ccacaagcccuuccagugc

SEQ ID NO: 103617 - RNA, 19 nt, Artificial Sequence
  Description of Artificial Sequence: Synthetic oligonucleotide
ccggaucugcaugcggagc

SEQ ID NO: 103618 - RNA, 19 nt, Artificial Sequence
  Description of Artificial Sequence: Synthetic oligonucleotide
cuucagccgcagcgaccac

SEQ ID NO: 103619 - RNA, 19 nt, Artificial Sequence
  Description of Artificial Sequence: Synthetic oligonucleotide
ccucaccacucacauccgc

SEQ ID NO: 103620 - RNA, 19 nt, Artificial Sequence
  Description of Artificial Sequence: Synthetic oligonucleotide
cacucauacgggcgagaag

SEQ ID NO: 103621 - RNA, 19 nt, Artificial Sequence
  Description of Artificial Sequence: Synthetic oligonucleotide
gcccuuugccugcgaguuc

SEQ ID NO: 103622 - RNA, 19 nt, Artificial Sequence
  Description of Artificial Sequence: Synthetic oligonucleotide
cugcgggcgcaaguuugcg

SEQ ID NO: 103623 - RNA, 19 nt, Artificial Sequence
  Description of Artificial Sequence: Synthetic oligonucleotide
gcgcagcgacgagcgcaag

SEQ ID NO: 103624 - RNA, 19 nt, Artificial Sequence
  Description of Artificial Sequence: Synthetic oligonucleotide
gcgccacgccaagauccac

SEQ ID NO: 103625 - RNA, 19 nt, Artificial Sequence
  Description of Artificial Sequence: Synthetic oligonucleotide
ccucaagcaaaaggagaag

SEQ ID NO: 103626 - RNA, 19 nt, Artificial Sequence
  Description of Artificial Sequence: Synthetic oligonucleotide
gaaggcggagaagggcggu

SEQ ID NO: 103627 - RNA, 19 nt, Artificial Sequence
  Description of Artificial Sequence: Synthetic oligonucleotide
ugcacccucugcauccucg

SEQ ID NO: 103628 - RNA, 19 nt, Artificial Sequence
  Description of Artificial Sequence: Synthetic oligonucleotide
ggcgccccccgugucgcug

SEQ ID NO: 103629 - RNA, 19 nt, Artificial Sequence
  Description of Artificial Sequence: Synthetic oligonucleotide
ggcccccguggucaccacc

SEQ ID NO: 103630 - RNA, 19 nt, Artificial Sequence
  Description of Artificial Sequence: Synthetic oligonucleotide
cugcgccugaggaucgggc

SEQ ID NO: 103631 - RNA, 19 nt, Artificial Sequence
  Description of Artificial Sequence: Synthetic oligonucleotide
cccccagauccccacuuuu

SEQ ID NO: 103632 - RNA, 19 nt, Artificial Sequence
  Description of Artificial Sequence: Synthetic oligonucleotide
uccccuccagugccucccg

SEQ ID NO: 103633 - RNA, 19 nt, Artificial Sequence
  Description of Artificial Sequence: Synthetic oligonucleotide
ggcugcuagccugaaagca

SEQ ID NO: 103634 - RNA, 19 nt, Artificial Sequence
  Description of Artificial Sequence: Synthetic oligonucleotide
agcgggaaagccagccacg

SEQ ID NO: 103635 - RNA, 19 nt, Artificial Sequence
  Description of Artificial Sequence: Synthetic oligonucleotide
ggaggcguaggggccgcgc

SEQ ID NO: 103636 - RNA, 19 nt, Artificial Sequence
  Description of Artificial Sequence: Synthetic oligonucleotide
cccuggccucuccauggac

SEQ ID NO: 103637 - RNA, 19 nt, Artificial Sequence
  Description of Artificial Sequence: Synthetic oligonucleotide
cgugcggccccuugcuucc

SEQ ID NO: 103638 - RNA, 19 nt, Artificial Sequence
  Description of Artificial Sequence: Synthetic oligonucleotide
cccuucgaugcccccgguu

SEQ ID NO: 103639 - RNA, 19 nt, Artificial Sequence
  Description of Artificial Sequence: Synthetic oligonucleotide
ucccaaccuuucacgccgg

SEQ ID NO: 103640 - RNA, 19 nt, Artificial Sequence
  Description of Artificial Sequence: Synthetic oligonucleotide
gccagcggucaggggccag

SEQ ID NO: 103641 - RNA, 19 nt, Artificial Sequence
  Description of Artificial Sequence: Synthetic oligonucleotide
gggcuggaggcgccuuccc

SEQ ID NO: 103642 - RNA, 19 nt, Artificial Sequence
  Description of Artificial Sequence: Synthetic oligonucleotide
ccucgcggucccccacuua

SEQ ID NO: 103643 - RNA, 19 nt, Artificial Sequence
  Description of Artificial Sequence: Synthetic oligonucleotide
agccaaggcgugggggcgg

SEQ ID NO: 103644 - RNA, 19 nt, Artificial Sequence
  Description of Artificial Sequence: Synthetic oligonucleotide
gaaagguggcgucuagccc

SEQ ID NO: 103645 - RNA, 19 nt, Artificial Sequence
  Description of Artificial Sequence: Synthetic oligonucleotide
cgcuuuguucaguucggau

SEQ ID NO: 103646 - RNA, 19 nt, Artificial Sequence
  Description of Artificial Sequence: Synthetic oligonucleotide
ucgccuugauccaggggcc

SEQ ID NO: 103647 - RNA, 19 nt, Artificial Sequence
  Description of Artificial Sequence: Synthetic oligonucleotide
cgccgggccgcgccaagga

SEQ ID NO: 103648 - RNA, 19 nt, Artificial Sequence
  Description of Artificial Sequence: Synthetic oligonucleotide
accugcaagggacugaagg

SEQ ID NO: 103649 - RNA, 19 nt, Artificial Sequence
  Description of Artificial Sequence: Synthetic oligonucleotide
gcggagcccauccaacccu

SEQ ID NO: 103650 - RNA, 19 nt, Artificial Sequence
  Description of Artificial Sequence: Synthetic oligonucleotide
ucgcccgacccaaacaccu

SEQ ID NO: 103651 - RNA, 19 nt, Artificial Sequence
  Description of Artificial Sequence: Synthetic oligonucleotide
ucauuguuucccccacguc

SEQ ID NO: 103652 - RNA, 19 nt, Artificial Sequence
  Description of Artificial Sequence: Synthetic oligonucleotide
cucccucuauacccccucg

SEQ ID NO: 103653 - RNA, 19 nt, Artificial Sequence
  Description of Artificial Sequence: Synthetic oligonucleotide
gaagacucgagagggggag

SEQ ID NO: 103654 - RNA, 19 nt, Artificial Sequence
  Description of Artificial Sequence: Synthetic oligonucleotide
ggggguaaggagcgcacca

SEQ ID NO: 103655 - RNA, 19 nt, Artificial Sequence
  Description of Artificial Sequence: Synthetic oligonucleotide
aaagcgcagagcuugcugc

SEQ ID NO: 103656 - RNA, 19 nt, Artificial Sequence
  Description of Artificial Sequence: Synthetic oligonucleotide
cccgccgcacgcacgcgcg

SEQ ID NO: 103657 - RNA, 19 nt, Artificial Sequence
  Description of Artificial Sequence: Synthetic oligonucleotide
gccugcgugcggggaugcg

SEQ ID NO: 103658 - RNA, 19 nt, Artificial Sequence
  Description of Artificial Sequence: Synthetic oligonucleotide
gcgcgagugugugcgugcu

SEQ ID NO: 103659 - RNA, 19 nt, Artificial Sequence
  Description of Artificial Sequence: Synthetic oligonucleotide
ucgcguguguguguaugug

SEQ ID NO: 103660 - RNA, 19 nt, Artificial Sequence
  Description of Artificial Sequence: Synthetic oligonucleotide
gugugugugagugugugug

SEQ ID NO: 103661 - RNA, 19 nt, Artificial Sequence
  Description of Artificial Sequence: Synthetic oligonucleotide
gugugcgcgcgcgcaagcg

SEQ ID NO: 103662 - RNA, 19 nt, Artificial Sequence
  Description of Artificial Sequence: Synthetic oligonucleotide
guguguguuuaagacucuu

SEQ ID NO: 103663 - RNA, 19 nt, Artificial Sequence
  Description of Artificial Sequence: Synthetic oligonucleotide
ugagcugaacugggcugug

SEQ ID NO: 103664 - RNA, 19 nt, Artificial Sequence
  Description of Artificial Sequence: Synthetic oligonucleotide
guuuaccccaaacucuucc

SEQ ID NO: 103665 - RNA, 19 nt, Artificial Sequence
  Description of Artificial Sequence: Synthetic oligonucleotide
cccaccucggguccccaag

SEQ ID NO: 103666 - RNA, 19 nt, Artificial Sequence
  Description of Artificial Sequence: Synthetic oligonucleotide
gccgcugggagauguccca

SEQ ID NO: 103667 - RNA, 19 nt, Artificial Sequence
  Description of Artificial Sequence: Synthetic oligonucleotide
augcuggggguccgcacgu

SEQ ID NO: 103668 - RNA, 19 nt, Artificial Sequence
  Description of Artificial Sequence: Synthetic oligonucleotide
uggcuggaggagguggucu

SEQ ID NO: 103669 - RNA, 19 nt, Artificial Sequence
  Description of Artificial Sequence: Synthetic oligonucleotide
uuccauccgcucugaaauc

SEQ ID NO: 103670 - RNA, 19 nt, Artificial Sequence
  Description of Artificial Sequence: Synthetic oligonucleotide
cauguuucuuagagaaaug

SEQ ID NO: 103671 - RNA, 19 nt, Artificial Sequence
  Description of Artificial Sequence: Synthetic oligonucleotide
gccucggaugccgccgacg

SEQ ID NO: 103672 - RNA, 19 nt, Artificial Sequence
  Description of Artificial Sequence: Synthetic oligonucleotide
gcggugcugcugccgccgc

SEQ ID NO: 103673 - RNA, 19 nt, Artificial Sequence
  Description of Artificial Sequence: Synthetic oligonucleotide
cuucggguuuggccccuca

SEQ ID NO: 103674 - RNA, 19 nt, Artificial Sequence
  Description of Artificial Sequence: Synthetic oligonucleotide
agaaccccuccuuuucuga

SEQ ID NO: 103675 - RNA, 19 nt, Artificial Sequence
  Description of Artificial Sequence: Synthetic oligonucleotide
agcgcuucccucuuaggcc

SEQ ID NO: 103676 - RNA, 19 nt, Artificial Sequence
  Description of Artificial Sequence: Synthetic oligonucleotide
cucagggcaguuugaucug

SEQ ID NO: 103677 - RNA, 19 nt, Artificial Sequence
  Description of Artificial Sequence: Synthetic oligonucleotide
guggggagaaagagcagcc

SEQ ID NO: 103678 - RNA, 19 nt, Artificial Sequence
  Description of Artificial Sequence: Synthetic oligonucleotide
caucgcugagccugccuuu

SEQ ID NO: 103679 - RNA, 19 nt, Artificial Sequence
  Description of Artificial Sequence: Synthetic oligonucleotide
uuaaaauauauguguauuu

SEQ ID NO: 103680 - RNA, 19 nt, Artificial Sequence
  Description of Artificial Sequence: Synthetic oligonucleotide
uccuuagccccacucuaag

SEQ ID NO: 103681 - RNA, 19 nt, Artificial Sequence
  Description of Artificial Sequence: Synthetic oligonucleotide
gaaaucuauguuccugagu

SEQ ID NO: 103682 - RNA, 19 nt, Artificial Sequence
  Description of Artificial Sequence: Synthetic oligonucleotide
uuugcccccugcccuccca

SEQ ID NO: 103683 - RNA, 19 nt, Artificial Sequence
  Description of Artificial Sequence: Synthetic oligonucleotide
acuccuuccccuucucccc

SEQ ID NO: 103684 - RNA, 19 nt, Artificial Sequence
  Description of Artificial Sequence: Synthetic oligonucleotide
cucuaaaccuucucccauc

SEQ ID NO: 103685 - RNA, 19 nt, Artificial Sequence
  Description of Artificial Sequence: Synthetic oligonucleotide
cucuuucaaaaucuuuucc

SEQ ID NO: 103686 - RNA, 19 nt, Artificial Sequence
  Description of Artificial Sequence: Synthetic oligonucleotide
ccagaaaggcaggcuucaa

SEQ ID NO: 103687 - RNA, 19 nt, Artificial Sequence
  Description of Artificial Sequence: Synthetic oligonucleotide
accagccacuccagcuuug

SEQ ID NO: 103688 - RNA, 19 nt, Artificial Sequence
  Description of Artificial Sequence: Synthetic oligonucleotide
gugucuucucucaauuaca

SEQ ID NO: 103689 - RNA, 19 nt, Artificial Sequence
  Description of Artificial Sequence: Synthetic oligonucleotide
auagcaauuucuccuuccc

SEQ ID NO: 103690 - RNA, 19 nt, Artificial Sequence
  Description of Artificial Sequence: Synthetic oligonucleotide
caccaucauggggaagcug

SEQ ID NO: 103691 - RNA, 19 nt, Artificial Sequence
  Description of Artificial Sequence: Synthetic oligonucleotide
ggcucugcuuuugcccuuu

SEQ ID NO: 103692 - RNA, 19 nt, Artificial Sequence
  Description of Artificial Sequence: Synthetic oligonucleotide
ugucaucaccaacacaaca

SEQ ID NO: 103693 - RNA, 19 nt, Artificial Sequence
  Description of Artificial Sequence: Synthetic oligonucleotide
agauagaauuuaaauauaa

SEQ ID NO: 103694 - RNA, 19 nt, Artificial Sequence
  Description of Artificial Sequence: Synthetic oligonucleotide
aguauauggugugcgugug

SEQ ID NO: 103695 - RNA, 19 nt, Artificial Sequence
  Description of Artificial Sequence: Synthetic oligonucleotide
guauguauguguauguaua

SEQ ID NO: 103696 - RNA, 19 nt, Artificial Sequence
  Description of Artificial Sequence: Synthetic oligonucleotide
augcaugcauguguauaaa

SEQ ID NO: 103697 - RNA, 19 nt, Artificial Sequence
  Description of Artificial Sequence: Synthetic oligonucleotide
agaugcacaugcguacaua

SEQ ID NO: 103698 - RNA, 19 nt, Artificial Sequence
  Description of Artificial Sequence: Synthetic oligonucleotide
auacauaacauacacacaa

SEQ ID NO: 103699 - RNA, 19 nt, Artificial Sequence
  Description of Artificial Sequence: Synthetic oligonucleotide
auauguauuccuagcaaaa

SEQ ID NO: 103700 - RNA, 19 nt, Artificial Sequence
  Description of Artificial Sequence: Synthetic oligonucleotide
auaaaaucucuaagguacu

SEQ ID NO: 103701 - RNA, 19 nt, Artificial Sequence
  Description of Artificial Sequence: Synthetic oligonucleotide
uugguuauccagugcagug

SEQ ID NO: 103702 - RNA, 19 nt, Artificial Sequence
  Description of Artificial Sequence: Synthetic oligonucleotide
gcaccggaauaaagagaau

SEQ ID NO: 103703 - RNA, 19 nt, Artificial Sequence
  Description of Artificial Sequence: Synthetic oligonucleotide
uuuguaggcguauacagcu

SEQ ID NO: 103704 - RNA, 19 nt, Artificial Sequence
  Description of Artificial Sequence: Synthetic oligonucleotide
uuuaaaugauuuauuuuuu

SEQ ID NO: 103705 - RNA, 19 nt, Artificial Sequence
  Description of Artificial Sequence: Synthetic oligonucleotide
uaugaaaauguuaacugau

SEQ ID NO: 103706 - RNA, 19 nt, Artificial Sequence
  Description of Artificial Sequence: Synthetic oligonucleotide
ugagauuauaucuacauac

SEQ ID NO: 103707 - RNA, 19 nt, Artificial Sequence
  Description of Artificial Sequence: Synthetic oligonucleotide
cguguguuaugugugugga

SEQ ID NO: 103708 - RNA, 19 nt, Artificial Sequence
  Description of Artificial Sequence: Synthetic oligonucleotide
auauagaugcacacauauc

SEQ ID NO: 103709 - RNA, 19 nt, Artificial Sequence
  Description of Artificial Sequence: Synthetic oligonucleotide
cuguacauauacaugugag

SEQ ID NO: 103710 - RNA, 19 nt, Artificial Sequence
  Description of Artificial Sequence: Synthetic oligonucleotide
guguacauauauacacaua

SEQ ID NO: 103711 - RNA, 19 nt, Artificial Sequence
  Description of Artificial Sequence: Synthetic oligonucleotide
auacacaucuauguaugga

SEQ ID NO: 103712 - RNA, 19 nt, Artificial Sequence
  Description of Artificial Sequence: Synthetic oligonucleotide
auauguguguauacacaua

SEQ ID NO: 103713 - RNA, 19 nt, Artificial Sequence
  Description of Artificial Sequence: Synthetic oligonucleotide
auacacaucucuguccaaa

SEQ ID NO: 103714 - RNA, 19 nt, Artificial Sequence
  Description of Artificial Sequence: Synthetic oligonucleotide
aauuuccucaaagauaugg

SEQ ID NO: 103715 - RNA, 19 nt, Artificial Sequence
  Description of Artificial Sequence: Synthetic oligonucleotide
gggauuuuuucaugaaucc

SEQ ID NO: 103716 - RNA, 19 nt, Artificial Sequence
  Description of Artificial Sequence: Synthetic oligonucleotide
cauguggaugaaugaggug

SEQ ID NO: 103717 - RNA, 19 nt, Artificial Sequence
  Description of Artificial Sequence: Synthetic oligonucleotide
gucuccuuuccauacccag

SEQ ID NO: 103718 - RNA, 19 nt, Artificial Sequence
  Description of Artificial Sequence: Synthetic oligonucleotide
gucucaccuucuccccacc

SEQ ID NO: 103719 - RNA, 19 nt, Artificial Sequence
  Description of Artificial Sequence: Synthetic oligonucleotide
ccuaccucaccucuucuca

SEQ ID NO: 103720 - RNA, 19 nt, Artificial Sequence
  Description of Artificial Sequence: Synthetic oligonucleotide
aggcaccccucuuccccag

SEQ ID NO: 103721 - RNA, 19 nt, Artificial Sequence
  Description of Artificial Sequence: Synthetic oligonucleotide
gcuguccugccagcccuuc

SEQ ID NO: 103722 - RNA, 19 nt, Artificial Sequence
  Description of Artificial Sequence: Synthetic oligonucleotide
cucguacaggguggcuccu

SEQ ID NO: 103723 - RNA, 19 nt, Artificial Sequence
  Description of Artificial Sequence: Synthetic oligonucleotide
uuugaaguggaguaauagg

SEQ ID NO: 103724 - RNA, 19 nt, Artificial Sequence
  Description of Artificial Sequence: Synthetic oligonucleotide
ggaagguugcucucugcca

SEQ ID NO: 103725 - RNA, 19 nt, Artificial Sequence
  Description of Artificial Sequence: Synthetic oligonucleotide
acagcuugcagcauggucu

SEQ ID NO: 103726 - RNA, 19 nt, Artificial Sequence
  Description of Artificial Sequence: Synthetic oligonucleotide
uugacugaauguacuguuc

SEQ ID NO: 103727 - RNA, 19 nt, Artificial Sequence
  Description of Artificial Sequence: Synthetic oligonucleotide
ccuguuagcguuacuucuc

SEQ ID NO: 103728 - RNA, 19 nt, Artificial Sequence
  Description of Artificial Sequence: Synthetic oligonucleotide
ccuguggucaguaaguugc

SEQ ID NO: 103729 - RNA, 19 nt, Artificial Sequence
  Description of Artificial Sequence: Synthetic oligonucleotide
cccagagagaaggaacaaa

SEQ ID NO: 103730 - RNA, 19 nt, Artificial Sequence
  Description of Artificial Sequence: Synthetic oligonucleotide
aggucuggaguuuacagaa

SEQ ID NO: 103731 - RNA, 19 nt, Artificial Sequence
  Description of Artificial Sequence: Synthetic oligonucleotide
augucuguuuuuaaaguca

SEQ ID NO: 103732 - RNA, 19 nt, Artificial Sequence
  Description of Artificial Sequence: Synthetic oligonucleotide
acuuuaugcguuuuccacu

SEQ ID NO: 103733 - RNA, 19 nt, Artificial Sequence
  Description of Artificial Sequence: Synthetic oligonucleotide
uuuuuucuuuuuuaagaaa

SEQ ID NO: 103734 - RNA, 19 nt, Artificial Sequence
  Description of Artificial Sequence: Synthetic oligonucleotide
aaagaaguaccauuuuugu

SEQ ID NO: 103735 - RNA, 19 nt, Artificial Sequence
  Description of Artificial Sequence: Synthetic oligonucleotide
uuuuguuuuguuuugauuu

SEQ ID NO: 103736 - RNA, 19 nt, Artificial Sequence
  Description of Artificial Sequence: Synthetic oligonucleotide
uuuggugguggauaaauaa

SEQ ID NO: 103737 - RNA, 19 nt, Artificial Sequence
  Description of Artificial Sequence: Synthetic oligonucleotide
auacuaaaaggacucuagu

SEQ ID NO: 103738 - RNA, 19 nt, Artificial Sequence
  Description of Artificial Sequence: Synthetic oligonucleotide
uggaaaggggggauaucga

SEQ ID NO: 103739 - RNA, 19 nt, Artificial Sequence
  Description of Artificial Sequence: Synthetic oligonucleotide
aagagcaggggguugugaa

SEQ ID NO: 103740 - RNA, 19 nt, Artificial Sequence
  Description of Artificial Sequence: Synthetic oligonucleotide
auuuccagguacuuggacu

SEQ ID NO: 103741 - RNA, 19 nt, Artificial Sequence
  Description of Artificial Sequence: Synthetic oligonucleotide
uuuuuguagaaggagagag

SEQ ID NO: 103742 - RNA, 19 nt, Artificial Sequence
  Description of Artificial Sequence: Synthetic oligonucleotide
gaagaagaugaaguuugcc

SEQ ID NO: 103743 - RNA, 19 nt, Artificial Sequence
  Description of Artificial Sequence: Synthetic oligonucleotide
caggagggcccauauuuuu

SEQ ID NO: 103744 - RNA, 19 nt, Artificial Sequence
  Description of Artificial Sequence: Synthetic oligonucleotide
uucagcugaaggguaaaau

SEQ ID NO: 103745 - RNA, 19 nt, Artificial Sequence
  Description of Artificial Sequence: Synthetic oligonucleotide
ucuuucuuugcagagacag

SEQ ID NO: 103746 - RNA, 19 nt, Artificial Sequence
  Description of Artificial Sequence: Synthetic oligonucleotide
guauuuugcugaauacuuu

SEQ ID NO: 103747 - RNA, 19 nt, Artificial Sequence
  Description of Artificial Sequence: Synthetic oligonucleotide
uuuauaaugugaugauuau

SEQ ID NO: 103748 - RNA, 19 nt, Artificial Sequence
  Description of Artificial Sequence: Synthetic oligonucleotide
uuaaaaaagcaaaaauuuu

SEQ ID NO: 103749 - RNA, 19 nt, Artificial Sequence
  Description of Artificial Sequence: Synthetic oligonucleotide
uggucacuuccaagcuaga

SEQ ID NO: 103750 - RNA, 19 nt, Artificial Sequence
  Description of Artificial Sequence: Synthetic oligonucleotide
aaggaggaaucagauaccc

SEQ ID NO: 103751 - RNA, 19 nt, Artificial Sequence
  Description of Artificial Sequence: Synthetic oligonucleotide
cuuuaauauuuuuuccucg

SEQ ID NO: 103752 - RNA, 19 nt, Artificial Sequence
  Description of Artificial Sequence: Synthetic oligonucleotide
gcuccuucugguauaugca

SEQ ID NO: 103753 - RNA, 19 nt, Artificial Sequence
  Description of Artificial Sequence: Synthetic oligonucleotide
augucacugcaugauaauu

SEQ ID NO: 103754 - RNA, 19 nt, Artificial Sequence
  Description of Artificial Sequence: Synthetic oligonucleotide
ugaguuuuccuuuguuuua

SEQ ID NO: 103755 - RNA, 19 nt, Artificial Sequence
  Description of Artificial Sequence: Synthetic oligonucleotide
aauaaaacuguucucagac

SEQ ID NO: 103756 - RNA, 19 nt, Artificial Sequence
  Description of Artificial Sequence: Synthetic oligonucleotide
cauuaagcuaaacuaagag

SEQ ID NO: 103757 - RNA, 19 nt, Artificial Sequence
  Description of Artificial Sequence: Synthetic oligonucleotide
gaaaaauaacuuuguugcc

SEQ ID NO: 103758 - RNA, 19 nt, Artificial Sequence
  Description of Artificial Sequence: Synthetic oligonucleotide
caaaagguugugcuaucca

SEQ ID NO: 103759 - RNA, 19 nt, Artificial Sequence
  Description of Artificial Sequence: Synthetic oligonucleotide
agauuuuuuauaugucugc

SEQ ID NO: 103760 - RNA, 19 nt, Artificial Sequence
  Description of Artificial Sequence: Synthetic oligonucleotide
gcaacaaaagaaaaugcac

SEQ ID NO: 103761 - RNA, 19 nt, Artificial Sequence
  Description of Artificial Sequence: Synthetic oligonucleotide
cucuaacuuaugugaacug

SEQ ID NO: 103762 - RNA, 19 nt, Artificial Sequence
  Description of Artificial Sequence: Synthetic oligonucleotide
gagagaaaaaaaucagguu

SEQ ID NO: 103763 - RNA, 19 nt, Artificial Sequence
  Description of Artificial Sequence: Synthetic oligonucleotide
uuuaaacaggaaaaccuau

SEQ ID NO: 103764 - RNA, 19 nt, Artificial Sequence
  Description of Artificial Sequence: Synthetic oligonucleotide
uggggaaugauauuuuuug

SEQ ID NO: 103765 - RNA, 19 nt, Artificial Sequence
  Description of Artificial Sequence: Synthetic oligonucleotide
gaaagacuuuuguauaaag

SEQ ID NO: 103766 - RNA, 19 nt, Artificial Sequence
  Description of Artificial Sequence: Synthetic oligonucleotide
guugaguacuuagaaaaaa

SEQ ID NO: 103767 - RNA, 19 nt, Artificial Sequence
  Description of Artificial Sequence: Synthetic oligonucleotide
agacaaaccagauguaaua

SEQ ID NO: 103768 - RNA, 19 nt, Artificial Sequence
  Description of Artificial Sequence: Synthetic oligonucleotide
auauuuuguggauguuuuu

SEQ ID NO: 103769 - RNA, 19 nt, Artificial Sequence
  Description of Artificial Sequence: Synthetic oligonucleotide
uauuucuuggauuuauagu

SEQ ID NO: 103770 - RNA, 19 nt, Artificial Sequence
  Description of Artificial Sequence: Synthetic oligonucleotide
uaccuuauacuaagguuaa

SEQ ID NO: 103771 - RNA, 19 nt, Artificial Sequence
  Description of Artificial Sequence: Synthetic oligonucleotide
aaaaaauaugcuugauauu

SEQ ID NO: 103772 - RNA, 19 nt, Artificial Sequence
  Description of Artificial Sequence: Synthetic oligonucleotide
ugugaaaaggugaaauucu

SEQ ID NO: 103773 - RNA, 19 nt, Artificial Sequence
  Description of Artificial Sequence: Synthetic oligonucleotide
uucaccaacauuucauuug

SEQ ID NO: 103774 - RNA, 19 nt, Artificial Sequence
  Description of Artificial Sequence: Synthetic oligonucleotide
gcuccuuugucauauugua

SEQ ID NO: 103775 - RNA, 19 nt, Artificial Sequence
  Description of Artificial Sequence: Synthetic oligonucleotide
aaugccaauauaauauagu

SEQ ID NO: 103776 - RNA, 19 nt, Artificial Sequence
  Description of Artificial Sequence: Synthetic oligonucleotide
uuaaugaaaacagcauuuu

SEQ ID NO: 103777 - RNA, 19 nt, Artificial Sequence
  Description of Artificial Sequence: Synthetic oligonucleotide
uuaaaaaccgaaauauuga

SEQ ID NO: 103778 - RNA, 19 nt, Artificial Sequence
  Description of Artificial Sequence: Synthetic oligonucleotide
aaaugguguaauguuguac

SEQ ID NO: 103779 - RNA, 19 nt, Artificial Sequence
  Description of Artificial Sequence: Synthetic oligonucleotide
ccauuugcacugugagcaa

SEQ ID NO: 103780 - RNA, 19 nt, Artificial Sequence
  Description of Artificial Sequence: Synthetic oligonucleotide
aaugcuaauacaguaaaua

SEQ ID NO: 103781 - RNA, 19 nt, Artificial Sequence
  Description of Artificial Sequence: Synthetic oligonucleotide
auauuguguuugcugacaa

SEQ ID NO: 103782 - RNA, 19 nt, Artificial Sequence
  Description of Artificial Sequence: Synthetic oligonucleotide
aucagccggccuauaaauc

SEQ ID NO: 103783 - RNA, 19 nt, Artificial Sequence
  Description of Artificial Sequence: Synthetic oligonucleotide
cuccuuauuuuauuucuug

SEQ ID NO: 103784 - RNA, 19 nt, Artificial Sequence
  Description of Artificial Sequence: Synthetic oligonucleotide
guuuuuauagcauaaagcu

SEQ ID NO: 103785 - RNA, 19 nt, Artificial Sequence
  Description of Artificial Sequence: Synthetic oligonucleotide
uuuaguuuggccugaaaaa

SEQ ID NO: 103786 - RNA, 19 nt, Artificial Sequence
  Description of Artificial Sequence: Synthetic oligonucleotide
aguuuggccugaaaaaaaa

SEQ ID NO: 103787 - RNA, 25 nt, Artificial Sequence
  Description of Artificial Sequence: Synthetic oligonucleotide
gaucaauacugaggccgcguccgac

SEQ ID NO: 103788 - RNA, 25 nt, Artificial Sequence
  Description of Artificial Sequence: Synthetic oligonucleotide
cccccuugagccgagaucccccccc

SEQ ID NO: 103789 - RNA, 25 nt, Artificial Sequence
  Description of Artificial Sequence: Synthetic oligonucleotide
cagcccagcccccaccccacccccc

SEQ ID NO: 103790 - RNA, 25 nt, Artificial Sequence
  Description of Artificial Sequence: Synthetic oligonucleotide
cgcacacgccccaccccccccacga

SEQ ID NO: 103791 - RNA, 25 nt, Artificial Sequence
  Description of Artificial Sequence: Synthetic oligonucleotide
acccagccucauaccgcaccagcug

SEQ ID NO: 103792 - RNA, 25 nt, Artificial Sequence
  Description of Artificial Sequence: Synthetic oligonucleotide
gaggcacccaagaggauuacccccu

SEQ ID NO: 103793 - RNA, 25 nt, Artificial Sequence
  Description of Artificial Sequence: Synthetic oligonucleotide
uggggcccucucccgccccccaaaa

SEQ ID NO: 103794 - RNA, 25 nt, Artificial Sequence
  Description of Artificial Sequence: Synthetic oligonucleotide
aaagagaagauccccucuccuggcc

SEQ ID NO: 103795 - RNA, 25 nt, Artificial Sequence
  Description of Artificial Sequence: Synthetic oligonucleotide
ccaucccuucccuucuucccucccc

SEQ ID NO: 103796 - RNA, 25 nt, Artificial Sequence
  Description of Artificial Sequence: Synthetic oligonucleotide
cccuccccccgaacuuucccucucg

SEQ ID NO: 103797 - RNA, 25 nt, Artificial Sequence
  Description of Artificial Sequence: Synthetic oligonucleotide
gcaugcuuuuccccugcaccacgga

SEQ ID NO: 103798 - RNA, 25 nt, Artificial Sequence
  Description of Artificial Sequence: Synthetic oligonucleotide
aucgccucucggaugccgcuugccu

SEQ ID NO: 103799 - RNA, 25 nt, Artificial Sequence
  Description of Artificial Sequence: Synthetic oligonucleotide
uggaagcugcguuaggagcgagcgg

SEQ ID NO: 103800 - RNA, 25 nt, Artificial Sequence
  Description of Artificial Sequence: Synthetic oligonucleotide
gcggcgguggcggcgguggcggcgg

SEQ ID NO: 103801 - RNA, 25 nt, Artificial Sequence
  Description of Artificial Sequence: Synthetic oligonucleotide
gcggcggcagcucgggagugcuaug

SEQ ID NO: 103802 - RNA, 25 nt, Artificial Sequence
  Description of Artificial Sequence: Synthetic oligonucleotide
gaccggcaaacucgccgagaagcug

SEQ ID NO: 103803 - RNA, 25 nt, Artificial Sequence
  Description of Artificial Sequence: Synthetic oligonucleotide
gccggugaccaugagcaguuugcua

SEQ ID NO: 103804 - RNA, 25 nt, Artificial Sequence
  Description of Artificial Sequence: Synthetic oligonucleotide
aaaccaacugccugacaaucuguac

SEQ ID NO: 103805 - RNA, 25 nt, Artificial Sequence
  Description of Artificial Sequence: Synthetic oligonucleotide
ccccgaggagauccccagcgcgcuc

SEQ ID NO: 103806 - RNA, 25 nt, Artificial Sequence
  Description of Artificial Sequence: Synthetic oligonucleotide
caaccucuucuccggcagcagcgac

SEQ ID NO: 103807 - RNA, 25 nt, Artificial Sequence
  Description of Artificial Sequence: Synthetic oligonucleotide
cucgguaguccauuacaaucagaug

SEQ ID NO: 103808 - RNA, 25 nt, Artificial Sequence
  Description of Artificial Sequence: Synthetic oligonucleotide
ggcuacagagaauguaauggacauc

SEQ ID NO: 103809 - RNA, 25 nt, Artificial Sequence
  Description of Artificial Sequence: Synthetic oligonucleotide
cggucugaccaacgagaagcccaac

SEQ ID NO: 103810 - RNA, 25 nt, Artificial Sequence
  Description of Artificial Sequence: Synthetic oligonucleotide
cccggaacucucuuacuccggcucc

SEQ ID NO: 103811 - RNA, 25 nt, Artificial Sequence
  Description of Artificial Sequence: Synthetic oligonucleotide
cuuccagccagcccccggcaacaag

SEQ ID NO: 103812 - RNA, 25 nt, Artificial Sequence
  Description of Artificial Sequence: Synthetic oligonucleotide
gaccgugaccuacuugggaaaguuc

SEQ ID NO: 103813 - RNA, 25 nt, Artificial Sequence
  Description of Artificial Sequence: Synthetic oligonucleotide
cgccuucgacuccccuuccaacugg

SEQ ID NO: 103814 - RNA, 25 nt, Artificial Sequence
  Description of Artificial Sequence: Synthetic oligonucleotide
gugccaggacaacaucauuagccuc

SEQ ID NO: 103815 - RNA, 25 nt, Artificial Sequence
  Description of Artificial Sequence: Synthetic oligonucleotide
caugagcgccggcaucuugggggug

SEQ ID NO: 103816 - RNA, 25 nt, Artificial Sequence
  Description of Artificial Sequence: Synthetic oligonucleotide
gcccccggcuucaggggcgcucagc

SEQ ID NO: 103817 - RNA, 25 nt, Artificial Sequence
  Description of Artificial Sequence: Synthetic oligonucleotide
cacgcagacguccacggccagcaug

SEQ ID NO: 103818 - RNA, 25 nt, Artificial Sequence
  Description of Artificial Sequence: Synthetic oligonucleotide
ggugcagccaccgcagggugacgug

SEQ ID NO: 103819 - RNA, 25 nt, Artificial Sequence
  Description of Artificial Sequence: Synthetic oligonucleotide
ggaggccauguaucccgcgcuaccc

SEQ ID NO: 103820 - RNA, 25 nt, Artificial Sequence
  Description of Artificial Sequence: Synthetic oligonucleotide
ccccuacuccaacugcggcgaccuc

SEQ ID NO: 103821 - RNA, 25 nt, Artificial Sequence
  Description of Artificial Sequence: Synthetic oligonucleotide
cuacucagagcccgugucuuuccac

SEQ ID NO: 103822 - RNA, 25 nt, Artificial Sequence
  Description of Artificial Sequence: Synthetic oligonucleotide
cgacccccagggcaaucccgggcuc

SEQ ID NO: 103823 - RNA, 25 nt, Artificial Sequence
  Description of Artificial Sequence: Synthetic oligonucleotide
cgccuauuccccccaggauuaccaa

SEQ ID NO: 103824 - RNA, 25 nt, Artificial Sequence
  Description of Artificial Sequence: Synthetic oligonucleotide
aucggccaagccggcguuggacagc

SEQ ID NO: 103825 - RNA, 25 nt, Artificial Sequence
  Description of Artificial Sequence: Synthetic oligonucleotide
caaucucuuccccaugauuccugac

SEQ ID NO: 103826 - RNA, 25 nt, Artificial Sequence
  Description of Artificial Sequence: Synthetic oligonucleotide
cuacaaccucuaccaccaccccaac

SEQ ID NO: 103827 - RNA, 25 nt, Artificial Sequence
  Description of Artificial Sequence: Synthetic oligonucleotide
cgacaugggcuccauuccggagcac

SEQ ID NO: 103828 - RNA, 25 nt, Artificial Sequence
  Description of Artificial Sequence: Synthetic oligonucleotide
caagcccuuccagggcauggacccc

SEQ ID NO: 103829 - RNA, 25 nt, Artificial Sequence
  Description of Artificial Sequence: Synthetic oligonucleotide
cauccgggucaacccgcccccuauu

SEQ ID NO: 103830 - RNA, 25 nt, Artificial Sequence
  Description of Artificial Sequence: Synthetic oligonucleotide
uaccccucuggagaccaucaaggca

SEQ ID NO: 103831 - RNA, 25 nt, Artificial Sequence
  Description of Artificial Sequence: Synthetic oligonucleotide
auucaaagacaagcagauccacccg

SEQ ID NO: 103832 - RNA, 25 nt, Artificial Sequence
  Description of Artificial Sequence: Synthetic oligonucleotide
gggcuuuggcagccugccccagccg

SEQ ID NO: 103833 - RNA, 25 nt, Artificial Sequence
  Description of Artificial Sequence: Synthetic oligonucleotide
gccgcucacccucaagcccauccgg

SEQ ID NO: 103834 - RNA, 25 nt, Artificial Sequence
  Description of Artificial Sequence: Synthetic oligonucleotide
gccccgcaaguaccccaaccggccu

SEQ ID NO: 103835 - RNA, 25 nt, Artificial Sequence
  Description of Artificial Sequence: Synthetic oligonucleotide
uagcaagacaccgcuccacgaacgg

SEQ ID NO: 103836 - RNA, 25 nt, Artificial Sequence
  Description of Artificial Sequence: Synthetic oligonucleotide
gccccacgcgugcccggccgagggc

SEQ ID NO: 103837 - RNA, 25 nt, Artificial Sequence
  Description of Artificial Sequence: Synthetic oligonucleotide
cugcgaccgccguuucagccguucg

SEQ ID NO: 103838 - RNA, 25 nt, Artificial Sequence
  Description of Artificial Sequence: Synthetic oligonucleotide
ggacgagcugacccggcaccugcgc

SEQ ID NO: 103839 - RNA, 25 nt, Artificial Sequence
  Description of Artificial Sequence: Synthetic oligonucleotide
cauccacacgggccacaagcccuuc

SEQ ID NO: 103840 - RNA, 25 nt, Artificial Sequence
  Description of Artificial Sequence: Synthetic oligonucleotide
ccagugccggaucugcaugcggagc

SEQ ID NO: 103841 - RNA, 25 nt, Artificial Sequence
  Description of Artificial Sequence: Synthetic oligonucleotide
cuucagccgcagcgaccaccucacc

SEQ ID NO: 103842 - RNA, 25 nt, Artificial Sequence
  Description of Artificial Sequence: Synthetic oligonucleotide
cacucacauccgcacucauacgggc

SEQ ID NO: 103843 - RNA, 25 nt, Artificial Sequence
  Description of Artificial Sequence: Synthetic oligonucleotide
cgagaagcccuuugccugcgaguuc

SEQ ID NO: 103844 - RNA, 25 nt, Artificial Sequence
  Description of Artificial Sequence: Synthetic oligonucleotide
cugcgggcgcaaguuugcgcgcagc

SEQ ID NO: 103845 - RNA, 25 nt, Artificial Sequence
  Description of Artificial Sequence: Synthetic oligonucleotide
cgacgagcgcaagcgccacgccaag

SEQ ID NO: 103846 - RNA, 25 nt, Artificial Sequence
  Description of Artificial Sequence: Synthetic oligonucleotide
gauccaccucaagcaaaaggagaag

SEQ ID NO: 103847 - RNA, 25 nt, Artificial Sequence
  Description of Artificial Sequence: Synthetic oligonucleotide
gaaggcggagaagggcggugcaccc

SEQ ID NO: 103848 - RNA, 25 nt, Artificial Sequence
  Description of Artificial Sequence: Synthetic oligonucleotide
cucugcauccucggcgccccccgug

SEQ ID NO: 103849 - RNA, 25 nt, Artificial Sequence
  Description of Artificial Sequence: Synthetic oligonucleotide
gucgcuggcccccguggucaccacc

SEQ ID NO: 103850 - RNA, 25 nt, Artificial Sequence
  Description of Artificial Sequence: Synthetic oligonucleotide
cugcgccugaggaucgggcccccag

SEQ ID NO: 103851 - RNA, 25 nt, Artificial Sequence
  Description of Artificial Sequence: Synthetic oligonucleotide
gauccccacuuuuccccuccagugc

SEQ ID NO: 103852 - RNA, 25 nt, Artificial Sequence
  Description of Artificial Sequence: Synthetic oligonucleotide
ccucccggcugcuagccugaaagca

SEQ ID NO: 103853 - RNA, 25 nt, Artificial Sequence
  Description of Artificial Sequence: Synthetic oligonucleotide
agcgggaaagccagccacggaggcg

SEQ ID NO: 103854 - RNA, 25 nt, Artificial Sequence
  Description of Artificial Sequence: Synthetic oligonucleotide
guaggggccgcgcccuggccucucc

SEQ ID NO: 103855 - RNA, 25 nt, Artificial Sequence
  Description of Artificial Sequence: Synthetic oligonucleotide
cauggacgugcggccccuugcuucc

SEQ ID NO: 103856 - RNA, 25 nt, Artificial Sequence
  Description of Artificial Sequence: Synthetic oligonucleotide
cccuucgaugcccccgguucccaac

SEQ ID NO: 103857 - RNA, 25 nt, Artificial Sequence
  Description of Artificial Sequence: Synthetic oligonucleotide
ccuuucacgccggccagcggucagg

SEQ ID NO: 103858 - RNA, 25 nt, Artificial Sequence
  Description of Artificial Sequence: Synthetic oligonucleotide
gggccagggcuggaggcgccuuccc

SEQ ID NO: 103859 - RNA, 25 nt, Artificial Sequence
  Description of Artificial Sequence: Synthetic oligonucleotide
ccucgcggucccccacuuagccaag

SEQ ID NO: 103860 - RNA, 25 nt, Artificial Sequence
  Description of Artificial Sequence: Synthetic oligonucleotide
ggcgugggggcggaaagguggcguc

SEQ ID NO: 103861 - RNA, 25 nt, Artificial Sequence
  Description of Artificial Sequence: Synthetic oligonucleotide
cuagcccgcuuuguucaguucggau

SEQ ID NO: 103862 - RNA, 25 nt, Artificial Sequence
  Description of Artificial Sequence: Synthetic oligonucleotide
ucgccuugauccaggggccgccggg

SEQ ID NO: 103863 - RNA, 25 nt, Artificial Sequence
  Description of Artificial Sequence: Synthetic oligonucleotide
gccgcgccaaggaccugcaagggac

SEQ ID NO: 103864 - RNA, 25 nt, Artificial Sequence
  Description of Artificial Sequence: Synthetic oligonucleotide
cugaaggcggagcccauccaacccu

SEQ ID NO: 103865 - RNA, 25 nt, Artificial Sequence
  Description of Artificial Sequence: Synthetic oligonucleotide
ucgcccgacccaaacaccucauugu

SEQ ID NO: 103866 - RNA, 25 nt, Artificial Sequence
  Description of Artificial Sequence: Synthetic oligonucleotide
uuucccccacgucucccucuauacc

SEQ ID NO: 103867 - RNA, 25 nt, Artificial Sequence
  Description of Artificial Sequence: Synthetic oligonucleotide
ccccucgaagacucgagagggggag

SEQ ID NO: 103868 - RNA, 25 nt, Artificial Sequence
  Description of Artificial Sequence: Synthetic oligonucleotide
ggggguaaggagcgcaccaaagcgc

SEQ ID NO: 103869 - RNA, 25 nt, Artificial Sequence
  Description of Artificial Sequence: Synthetic oligonucleotide
cagagcuugcugcccgccgcacgca

SEQ ID NO: 103870 - RNA, 25 nt, Artificial Sequence
  Description of Artificial Sequence: Synthetic oligonucleotide
acgcgcgccugcgugcggggaugcg

SEQ ID NO: 103871 - RNA, 25 nt, Artificial Sequence
  Description of Artificial Sequence: Synthetic oligonucleotide
gcgcgagugugugcgugcucgcgug

SEQ ID NO: 103872 - RNA, 25 nt, Artificial Sequence
  Description of Artificial Sequence: Synthetic oligonucleotide
guguguguaugugugugugugagug

SEQ ID NO: 103873 - RNA, 25 nt, Artificial Sequence
  Description of Artificial Sequence: Synthetic oligonucleotide
gugugugugugcgcgcgcgcaagcg

SEQ ID NO: 103874 - RNA, 25 nt, Artificial Sequence
  Description of Artificial Sequence: Synthetic oligonucleotide
guguguguuuaagacucuugagcug

SEQ ID NO: 103875 - RNA, 25 nt, Artificial Sequence
  Description of Artificial Sequence: Synthetic oligonucleotide
gaacugggcuguguuuaccccaaac

SEQ ID NO: 103876 - RNA, 25 nt, Artificial Sequence
  Description of Artificial Sequence: Synthetic oligonucleotide
cucuuccccaccucggguccccaag

SEQ ID NO: 103877 - RNA, 25 nt, Artificial Sequence
  Description of Artificial Sequence: Synthetic oligonucleotide
gccgcugggagaugucccaugcugg

SEQ ID NO: 103878 - RNA, 25 nt, Artificial Sequence
  Description of Artificial Sequence: Synthetic oligonucleotide
gggguccgcacguggcuggaggagg

SEQ ID NO: 103879 - RNA, 25 nt, Artificial Sequence
  Description of Artificial Sequence: Synthetic oligonucleotide
guggucuuccauccgcucugaaauc

SEQ ID NO: 103880 - RNA, 25 nt, Artificial Sequence
  Description of Artificial Sequence: Synthetic oligonucleotide
cauguuucuuagagaaaugccucgg

SEQ ID NO: 103881 - RNA, 25 nt, Artificial Sequence
  Description of Artificial Sequence: Synthetic oligonucleotide
gaugccgccgacgcggugcugcugc

SEQ ID NO: 103882 - RNA, 25 nt, Artificial Sequence
  Description of Artificial Sequence: Synthetic oligonucleotide
ccgccgcuucggguuuggccccuca

SEQ ID NO: 103883 - RNA, 25 nt, Artificial Sequence
  Description of Artificial Sequence: Synthetic oligonucleotide
agaaccccuccuuuucugagcgcuu

SEQ ID NO: 103884 - RNA, 25 nt, Artificial Sequence
  Description of Artificial Sequence: Synthetic oligonucleotide
ucccucuuaggccucagggcaguuu

SEQ ID NO: 103885 - RNA, 25 nt, Artificial Sequence
  Description of Artificial Sequence: Synthetic oligonucleotide
ugaucuguggggagaaagagcagcc

SEQ ID NO: 103886 - RNA, 25 nt, Artificial Sequence
  Description of Artificial Sequence: Synthetic oligonucleotide
caucgcugagccugccuuuuaaaau

SEQ ID NO: 103887 - RNA, 25 nt, Artificial Sequence
  Description of Artificial Sequence: Synthetic oligonucleotide
uauauguguauuuccuuagccccac

SEQ ID NO: 103888 - RNA, 25 nt, Artificial Sequence
  Description of Artificial Sequence: Synthetic oligonucleotide
cucuaagaaaucuauguuccugagu

SEQ ID NO: 103889 - RNA, 25 nt, Artificial Sequence
  Description of Artificial Sequence: Synthetic oligonucleotide
uuugcccccugcccucccacuccuu

SEQ ID NO: 103890 - RNA, 25 nt, Artificial Sequence
  Description of Artificial Sequence: Synthetic oligonucleotide
uccccuucuccccucuaaaccuucu

SEQ ID NO: 103891 - RNA, 25 nt, Artificial Sequence
  Description of Artificial Sequence: Synthetic oligonucleotide
ucccaucucuuucaaaaucuuuucc

SEQ ID NO: 103892 - RNA, 25 nt, Artificial Sequence
  Description of Artificial Sequence: Synthetic oligonucleotide
ccagaaaggcaggcuucaaccagcc

SEQ ID NO: 103893 - RNA, 25 nt, Artificial Sequence
  Description of Artificial Sequence: Synthetic oligonucleotide
cacuccagcuuugugucuucucuca

SEQ ID NO: 103894 - RNA, 25 nt, Artificial Sequence
  Description of Artificial Sequence: Synthetic oligonucleotide
aauuacauagcaauuucuccuuccc

SEQ ID NO: 103895 - RNA, 25 nt, Artificial Sequence
  Description of Artificial Sequence: Synthetic oligonucleotide
caccaucauggggaagcuggcucug

SEQ ID NO: 103896 - RNA, 25 nt, Artificial Sequence
  Description of Artificial Sequence: Synthetic oligonucleotide
gcuuuugcccuuugucaucaccaac

SEQ ID NO: 103897 - RNA, 25 nt, Artificial Sequence
  Description of Artificial Sequence: Synthetic oligonucleotide
cacaacagauagaauuuaaauauaa

SEQ ID NO: 103898 - RNA, 25 nt, Artificial Sequence
  Description of Artificial Sequence: Synthetic oligonucleotide
aguauauggugugcguguguaugua

SEQ ID NO: 103899 - RNA, 25 nt, Artificial Sequence
  Description of Artificial Sequence: Synthetic oligonucleotide
auguguauguauaugcaugcaugug

SEQ ID NO: 103900 - RNA, 25 nt, Artificial Sequence
  Description of Artificial Sequence: Synthetic oligonucleotide
guauaaagaugcacaugcguacaua

SEQ ID NO: 103901 - RNA, 25 nt, Artificial Sequence
  Description of Artificial Sequence: Synthetic oligonucleotide
auacauaacauacacacaauaugua

SEQ ID NO: 103902 - RNA, 25 nt, Artificial Sequence
  Description of Artificial Sequence: Synthetic oligonucleotide
auuccuagcaaaauaaaaucucuaa

SEQ ID NO: 103903 - RNA, 25 nt, Artificial Sequence
  Description of Artificial Sequence: Synthetic oligonucleotide
agguacuugguuauccagugcagug

SEQ ID NO: 103904 - RNA, 25 nt, Artificial Sequence
  Description of Artificial Sequence: Synthetic oligonucleotide
gcaccggaauaaagagaauuuguag

SEQ ID NO: 103905 - RNA, 25 nt, Artificial Sequence
  Description of Artificial Sequence: Synthetic oligonucleotide
ggcguauacagcuuuaaaugauuua

SEQ ID NO: 103906 - RNA, 25 nt, Artificial Sequence
  Description of Artificial Sequence: Synthetic oligonucleotide
auuuuuuaugaaaauguuaacugau

SEQ ID NO: 103907 - RNA, 25 nt, Artificial Sequence
  Description of Artificial Sequence: Synthetic oligonucleotide
ugagauuauaucuacauacgugugu

SEQ ID NO: 103908 - RNA, 25 nt, Artificial Sequence
  Description of Artificial Sequence: Synthetic oligonucleotide
uuauguguguggauauagaugcaca

SEQ ID NO: 103909 - RNA, 25 nt, Artificial Sequence
  Description of Artificial Sequence: Synthetic oligonucleotide
acauaucuguacauauacaugugag

SEQ ID NO: 103910 - RNA, 25 nt, Artificial Sequence
  Description of Artificial Sequence: Synthetic oligonucleotide
guguacauauauacacauauacaca

SEQ ID NO: 103911 - RNA, 25 nt, Artificial Sequence
  Description of Artificial Sequence: Synthetic oligonucleotide
aucuauguauggauauguguguaua

SEQ ID NO: 103912 - RNA, 25 nt, Artificial Sequence
  Description of Artificial Sequence: Synthetic oligonucleotide
acacauauacacaucucuguccaaa

SEQ ID NO: 103913 - RNA, 25 nt, Artificial Sequence
  Description of Artificial Sequence: Synthetic oligonucleotide
aauuuccucaaagauauggggauuu

SEQ ID NO: 103914 - RNA, 25 nt, Artificial Sequence
  Description of Artificial Sequence: Synthetic oligonucleotide
uuuucaugaauccauguggaugaau

SEQ ID NO: 103915 - RNA, 25 nt, Artificial Sequence
  Description of Artificial Sequence: Synthetic oligonucleotide
ugaggugucuccuuuccauacccag

SEQ ID NO: 103916 - RNA, 25 nt, Artificial Sequence
  Description of Artificial Sequence: Synthetic oligonucleotide
gucucaccuucuccccacccuaccu

SEQ ID NO: 103917 - RNA, 25 nt, Artificial Sequence
  Description of Artificial Sequence: Synthetic oligonucleotide
ucaccucuucucaggcaccccucuu

SEQ ID NO: 103918 - RNA, 25 nt, Artificial Sequence
  Description of Artificial Sequence: Synthetic oligonucleotide
uccccagcuguccugccagcccuuc

SEQ ID NO: 103919 - RNA, 25 nt, Artificial Sequence
  Description of Artificial Sequence: Synthetic oligonucleotide
cucguacaggguggcuccuuugaag

SEQ ID NO: 103920 - RNA, 25 nt, Artificial Sequence
  Description of Artificial Sequence: Synthetic oligonucleotide
guggaguaauagggaagguugcucu

SEQ ID NO: 103921 - RNA, 25 nt, Artificial Sequence
  Description of Artificial Sequence: Synthetic oligonucleotide
ucugccacagcuugcagcauggucu

SEQ ID NO: 103922 - RNA, 25 nt, Artificial Sequence
  Description of Artificial Sequence: Synthetic oligonucleotide
uugacugaauguacuguuccuguua

SEQ ID NO: 103923 - RNA, 25 nt, Artificial Sequence
  Description of Artificial Sequence: Synthetic oligonucleotide
agcguuacuucuccuguggucagua

SEQ ID NO: 103924 - RNA, 25 nt, Artificial Sequence
  Description of Artificial Sequence: Synthetic oligonucleotide
aaguugcccagagagaaggaacaaa

SEQ ID NO: 103925 - RNA, 25 nt, Artificial Sequence
  Description of Artificial Sequence: Synthetic oligonucleotide
aggucuggaguuuacagaaugucug

SEQ ID NO: 103926 - RNA, 25 nt, Artificial Sequence
  Description of Artificial Sequence: Synthetic oligonucleotide
guuuuuaaagucacuuuaugcguuu

SEQ ID NO: 103927 - RNA, 25 nt, Artificial Sequence
  Description of Artificial Sequence: Synthetic oligonucleotide
uuccacuuuuuucuuuuuuaagaaa

SEQ ID NO: 103928 - RNA, 25 nt, Artificial Sequence
  Description of Artificial Sequence: Synthetic oligonucleotide
aaagaaguaccauuuuuguuuuguu

SEQ ID NO: 103929 - RNA, 25 nt, Artificial Sequence
  Description of Artificial Sequence: Synthetic oligonucleotide
uuuguuuugauuuuuggugguggau

SEQ ID NO: 103930 - RNA, 25 nt, Artificial Sequence
  Description of Artificial Sequence: Synthetic oligonucleotide
uaaauaauacuaaaaggacucuagu

SEQ ID NO: 103931 - RNA, 25 nt, Artificial Sequence
  Description of Artificial Sequence: Synthetic oligonucleotide
uggaaaggggggauaucgaagagca

SEQ ID NO: 103932 - RNA, 25 nt, Artificial Sequence
  Description of Artificial Sequence: Synthetic oligonucleotide
aggggguugugaauuuccagguacu

SEQ ID NO: 103933 - RNA, 25 nt, Artificial Sequence
  Description of Artificial Sequence: Synthetic oligonucleotide
uuggacuuuuuguagaaggagagag

SEQ ID NO: 103934 - RNA, 25 nt, Artificial Sequence
  Description of Artificial Sequence: Synthetic oligonucleotide
gaagaagaugaaguuugccaggagg

SEQ ID NO: 103935 - RNA, 25 nt, Artificial Sequence
  Description of Artificial Sequence: Synthetic oligonucleotide
ggcccauauuuuuucagcugaaggg

SEQ ID NO: 103936 - RNA, 25 nt, Artificial Sequence
  Description of Artificial Sequence: Synthetic oligonucleotide
guaaaaucuuucuuugcagagacag

SEQ ID NO: 103937 - RNA, 25 nt, Artificial Sequence
  Description of Artificial Sequence: Synthetic oligonucleotide
guauuuugcugaauacuuuuuauaa

SEQ ID NO: 103938 - RNA, 25 nt, Artificial Sequence
  Description of Artificial Sequence: Synthetic oligonucleotide
augugaugauuauuaaaaaagcaaa

SEQ ID NO: 103939 - RNA, 25 nt, Artificial Sequence
  Description of Artificial Sequence: Synthetic oligonucleotide
aaauuuuggucacuuccaagcuaga

SEQ ID NO: 103940 - RNA, 25 nt, Artificial Sequence
  Description of Artificial Sequence: Synthetic oligonucleotide
aaggaggaaucagauacccuuuaau

SEQ ID NO: 103941 - RNA, 25 nt, Artificial Sequence
  Description of Artificial Sequence: Synthetic oligonucleotide
uauuuuuuccucgcuccuucuggua

SEQ ID NO: 103942 - RNA, 25 nt, Artificial Sequence
  Description of Artificial Sequence: Synthetic oligonucleotide
auaugcaugucacugcaugauaauu

SEQ ID NO: 103943 - RNA, 25 nt, Artificial Sequence
  Description of Artificial Sequence: Synthetic oligonucleotide
ugaguuuuccuuuguuuuaauaaaa

SEQ ID NO: 103944 - RNA, 25 nt, Artificial Sequence
  Description of Artificial Sequence: Synthetic oligonucleotide
acuguucucagacauuaagcuaaac

SEQ ID NO: 103945 - RNA, 25 nt, Artificial Sequence
  Description of Artificial Sequence: Synthetic oligonucleotide
cuaagagaaaaauaacuuuguugcc

SEQ ID NO: 103946 - RNA, 25 nt, Artificial Sequence
  Description of Artificial Sequence: Synthetic oligonucleotide
caaaagguugugcuauccagauuuu

SEQ ID NO: 103947 - RNA, 25 nt, Artificial Sequence
  Description of Artificial Sequence: Synthetic oligonucleotide
uuuauaugucugcauguuuaaaaaa

SEQ ID NO: 103948 - RNA, 25 nt, Artificial Sequence
  Description of Artificial Sequence: Synthetic oligonucleotide
aaaaaagcaacaaaagaaaaugcac

SEQ ID NO: 103949 - RNA, 25 nt, Artificial Sequence
  Description of Artificial Sequence: Synthetic oligonucleotide
cucuaacuuaugugaacugagagaa

SEQ ID NO: 103950 - RNA, 25 nt, Artificial Sequence
  Description of Artificial Sequence: Synthetic oligonucleotide
aaaaaaucagguuuuaaacaggaaa

SEQ ID NO: 103951 - RNA, 25 nt, Artificial Sequence
  Description of Artificial Sequence: Synthetic oligonucleotide
aaccuauggggaaugauauuuuuug

SEQ ID NO: 103952 - RNA, 25 nt, Artificial Sequence
  Description of Artificial Sequence: Synthetic oligonucleotide
gaaagacuuuuguauaaaguugagu

SEQ ID NO: 103953 - RNA, 25 nt, Artificial Sequence
  Description of Artificial Sequence: Synthetic oligonucleotide
uacuuagaaaaaagacaaaccagau

SEQ ID NO: 103954 - RNA, 25 nt, Artificial Sequence
  Description of Artificial Sequence: Synthetic oligonucleotide
uguaauauauuuuguggauguuuuu

SEQ ID NO: 103955 - RNA, 25 nt, Artificial Sequence
  Description of Artificial Sequence: Synthetic oligonucleotide
uauuucuuggauuuauaguaccuua

SEQ ID NO: 103956 - RNA, 25 nt, Artificial Sequence
  Description of Artificial Sequence: Synthetic oligonucleotide
auacuaagguuaaaaaaauaugcuu

SEQ ID NO: 103957 - RNA, 25 nt, Artificial Sequence
  Description of Artificial Sequence: Synthetic oligonucleotide
ugauauugugaaaaggugaaauucu

SEQ ID NO: 103958 - RNA, 25 nt, Artificial Sequence
  Description of Artificial Sequence: Synthetic oligonucleotide
uucaccaacauuucauuugcuccuu

SEQ ID NO: 103959 - RNA, 25 nt, Artificial Sequence
  Description of Artificial Sequence: Synthetic oligonucleotide
uugucauauuguaaugccaauauaa

SEQ ID NO: 103960 - RNA, 25 nt, Artificial Sequence
  Description of Artificial Sequence: Synthetic oligonucleotide
auauaguuaaugaaaacagcauuuu

SEQ ID NO: 103961 - RNA, 25 nt, Artificial Sequence
  Description of Artificial Sequence: Synthetic oligonucleotide
uuaaaaaccgaaauauugaaauggu

SEQ ID NO: 103962 - RNA, 25 nt, Artificial Sequence
  Description of Artificial Sequence: Synthetic oligonucleotide
uguaauguuguaccauuugcacugu

SEQ ID NO: 103963 - RNA, 25 nt, Artificial Sequence
  Description of Artificial Sequence: Synthetic oligonucleotide
ugagcaaaugcuaauacaguaaaua

SEQ ID NO: 103964 - RNA, 25 nt, Artificial Sequence
  Description of Artificial Sequence: Synthetic oligonucleotide
auauuguguuugcugacaaucagcc

SEQ ID NO: 103965 - RNA, 25 nt, Artificial Sequence
  Description of Artificial Sequence: Synthetic oligonucleotide
cggccuauaaaucuccuuauuuuau

SEQ ID NO: 103966 - RNA, 25 nt, Artificial Sequence
  Description of Artificial Sequence: Synthetic oligonucleotide
uuucuuguuuuuauagcauaaagcu

SEQ ID NO: 103967 - RNA, 25 nt, Artificial Sequence
  Description of Artificial Sequence: Synthetic oligonucleotide
agcuuuaguuuggccugaaaaaaaa

SEQ ID NO: 103968 - RNA, 2223 nt, Homo sapiens
cccggcagcgcuuuggagaggcgaggagccgccgcccgaggccggugcgggcgagcgagggcgccgcggcuccccgacuccuuucccagaggugagugcccgaagccaggagcccgggcgccuaggucugugcgcugcggggaaccccuaccgccagccuccccgccacccgcgcgcccccaagcccagcgggcgaggccccgggcgccccacagccggcgccgcgccaugcuccaccuuagcgaguuuuccgaacccgacgcgcuccucgucaaguccacugaaggcuguugcgccgaacccagcgcugaauugccccggcugccugccagggacgcucccgcggccaccggcuacccuggagcaggcgacuucuugagcugggcuuugaacagcugcggcgcaaguggggacuuagccgacuccugcuuccuggaggggccugcgcccacacccccucccggccucagcuacagcgguagcuucuucauucaggcagugcccgaacacccgcacgacccggaggcacucuucaaccucaugucgggcaucuuaggccuggcacccuuccccgguccagaggcagcagcguccagauccccgcuggaugccccuuuuccugcgggguccgaugccuugcugccggguccgccggaccuuuacuccccggaucugggcgcugccccuuucccagaggcguucugggaggccucgccuugcgcgggugcccccucgcagugccuguaugagccucagcucuccccgcccgacgucaagcccggccuccgggcgccucccgccucgccagcgcuggacgcugucucugccuucaagggucccuacgcgcccugggagcugcuuucugugggggccccagggaacugugggucacagggagacuaccaggccgccccggaggcucguuuucccguaauagggaccaagauugaggacuugcuguccaucagcugcccugcggaacugccggccgucccagccaacagacucuaucccagcggggccuaugacgcuuucccgcuggccccgggugacuuaggggagggggcugagggccucccugggcuccugaccccuccuaguggggagggagggaguagcggcgacggcggagaguuucuggccaguacgcagccucagcuuuccccgcugggccuucgcagcgccgccgcggcggacuucccuaaaccucugguggcggacaucccuggaagcaguggcguggcugcaccacccgugccgccgccgccgcccaccccuuucccccaggccaaggcgcgacgcaaggggcgccgcggcggcaaaugcagcacgcgcugcuucugcccgcggccgcacgccaaggccuucgcuugcccgguggagaguugugugcggagcuuugcgcgcuccgacgagcucaaucgccaccugcgcauccacacgggccacaaacccuuccagugccgcaucugccuccgcaacuucagccgcagcgaccaccucaccacgcacgugcgcacccacaccggcgagaagccuuuugcuugcgacgugugcggccgccgcuucgcgcgcagcgaugagaagaaacggcacagcaaggugcaccucaagcagaaggcgcgcgccgaggagcggcucaagggccucggcuuuuacucgcugggccucuccuucgcuucucucugagcaagagauggguuuauggguuggggcgccgccguucggcgcgcacgaguuccgggccguuccccuccccgcucuucuuccaacuccuccucgcacgcccgagggccggccuccggucccgcuuccaguuuccuugaagcgcccgccgcacacgcccuauucagcaccagcuccgcggacaguucccgcgguccaggcgcugucacccuugucagccgcgcuuugggggaagucuucugagaccacccagugaauaggcacuacccugggauucaagacagucuuuuguaacuggcacacgccccacgccuuccucuauaacccccagagacaggcuggggcagcgccaaggcggucucgcgcgggacuuuguacagcagugucuuauccagcagccauuggauguaacguuuugcuuuggguuuuuuuuccuuuuguuguuguuaauuuuuguaaagcagacgcuacucucaagcaguugacaaaacuguuuauuuuugcaauuaaaauuauugugcuaaaagcuuaaaaaaa

SEQ ID NO: 103969 - RNA, 19 nt, Artificial Sequence
  Description of Artificial Sequence: Synthetic oligonucleotide
cccggcagcgcuuuggaga

SEQ ID NO: 103970 - RNA, 19 nt, Artificial Sequence
  Description of Artificial Sequence: Synthetic oligonucleotide
aggcgaggagccgccgccc

SEQ ID NO: 103971 - RNA, 19 nt, Artificial Sequence
  Description of Artificial Sequence: Synthetic oligonucleotide
cgaggccggugcgggcgag

SEQ ID NO: 103972 - RNA, 19 nt, Artificial Sequence
  Description of Artificial Sequence: Synthetic oligonucleotide
gcgagggcgccgcggcucc

SEQ ID NO: 103973 - RNA, 19 nt, Artificial Sequence
  Description of Artificial Sequence: Synthetic oligonucleotide
cccgacuccuuucccagag

SEQ ID NO: 103974 - RNA, 19 nt, Artificial Sequence
  Description of Artificial Sequence: Synthetic oligonucleotide
ggugagugcccgaagccag

SEQ ID NO: 103975 - RNA, 19 nt, Artificial Sequence
  Description of Artificial Sequence: Synthetic oligonucleotide
ggagcccgggcgccuaggu

SEQ ID NO: 103976 - RNA, 19 nt, Artificial Sequence
  Description of Artificial Sequence: Synthetic oligonucleotide
ucugugcgcugcggggaac

SEQ ID NO: 103977 - RNA, 19 nt, Artificial Sequence
  Description of Artificial Sequence: Synthetic oligonucleotide
ccccuaccgccagccuccc

SEQ ID NO: 103978 - RNA, 19 nt, Artificial Sequence
  Description of Artificial Sequence: Synthetic oligonucleotide
ccgccacccgcgcgccccc

SEQ ID NO: 103979 - RNA, 19 nt, Artificial Sequence
  Description of Artificial Sequence: Synthetic oligonucleotide
caagcccagcgggcgaggc

SEQ ID NO: 103980 - RNA, 19 nt, Artificial Sequence
  Description of Artificial Sequence: Synthetic oligonucleotide
ccccgggcgccccacagcc

SEQ ID NO: 103981 - RNA, 19 nt, Artificial Sequence
  Description of Artificial Sequence: Synthetic oligonucleotide
cggcgccgcgccaugcucc

SEQ ID NO: 103982 - RNA, 19 nt, Artificial Sequence
  Description of Artificial Sequence: Synthetic oligonucleotide
caccuuagcgaguuuuccg

SEQ ID NO: 103983 - RNA, 19 nt, Artificial Sequence
  Description of Artificial Sequence: Synthetic oligonucleotide
gaacccgacgcgcuccucg

SEQ ID NO: 103984 - RNA, 19 nt, Artificial Sequence
  Description of Artificial Sequence: Synthetic oligonucleotide
gucaaguccacugaaggcu

SEQ ID NO: 103985 - RNA, 19 nt, Artificial Sequence
  Description of Artificial Sequence: Synthetic oligonucleotide
uguugcgccgaacccagcg

SEQ ID NO: 103986 - RNA, 19 nt, Artificial Sequence
  Description of Artificial Sequence: Synthetic oligonucleotide
gcugaauugccccggcugc

SEQ ID NO: 103987 - RNA, 19 nt, Artificial Sequence
  Description of Artificial Sequence: Synthetic oligonucleotide
ccugccagggacgcucccg

SEQ ID NO: 103988 - RNA, 19 nt, Artificial Sequence
  Description of Artificial Sequence: Synthetic oligonucleotide
gcggccaccggcuacccug

SEQ ID NO: 103989 - RNA, 19 nt, Artificial Sequence
  Description of Artificial Sequence: Synthetic oligonucleotide
ggagcaggcgacuucuuga

SEQ ID NO: 103990 - RNA, 19 nt, Artificial Sequence
  Description of Artificial Sequence: Synthetic oligonucleotide
agcugggcuuugaacagcu

SEQ ID NO: 103991 - RNA, 19 nt, Artificial Sequence
  Description of Artificial Sequence: Synthetic oligonucleotide
ugcggcgcaaguggggacu

SEQ ID NO: 103992 - RNA, 19 nt, Artificial Sequence
  Description of Artificial Sequence: Synthetic oligonucleotide
uuagccgacuccugcuucc

SEQ ID NO: 103993 - RNA, 19 nt, Artificial Sequence
  Description of Artificial Sequence: Synthetic oligonucleotide
cuggaggggccugcgccca

SEQ ID NO: 103994 - RNA, 19 nt, Artificial Sequence
  Description of Artificial Sequence: Synthetic oligonucleotide
acacccccucccggccuca

SEQ ID NO: 103995 - RNA, 19 nt, Artificial Sequence
  Description of Artificial Sequence: Synthetic oligonucleotide
agcuacagcgguagcuucu

SEQ ID NO: 103996 - RNA, 19 nt, Artificial Sequence
  Description of Artificial Sequence: Synthetic oligonucleotide
uucauucaggcagugcccg

SEQ ID NO: 103997 - RNA, 19 nt, Artificial Sequence
  Description of Artificial Sequence: Synthetic oligonucleotide
gaacacccgcacgacccgg

SEQ ID NO: 103998 - RNA, 19 nt, Artificial Sequence
  Description of Artificial Sequence: Synthetic oligonucleotide
gaggcacucuucaaccuca

SEQ ID NO: 103999 - RNA, 19 nt, Artificial Sequence
  Description of Artificial Sequence: Synthetic oligonucleotide
augucgggcaucuuaggcc

SEQ ID NO: 104000 - RNA, 19 nt, Artificial Sequence
  Description of Artificial Sequence: Synthetic oligonucleotide
cuggcacccuuccccgguc

SEQ ID NO: 104001 - RNA, 19 nt, Artificial Sequence
  Description of Artificial Sequence: Synthetic oligonucleotide
ccagaggcagcagcgucca

SEQ ID NO: 104002 - RNA, 19 nt, Artificial Sequence
  Description of Artificial Sequence: Synthetic oligonucleotide
agauccccgcuggaugccc

SEQ ID NO: 104003 - RNA, 19 nt, Artificial Sequence
  Description of Artificial Sequence: Synthetic oligonucleotide
ccuuuuccugcgggguccg

SEQ ID NO: 104004 - RNA, 19 nt, Artificial Sequence
  Description of Artificial Sequence: Synthetic oligonucleotide
gaugccuugcugccggguc

SEQ ID NO: 104005 - RNA, 19 nt, Artificial Sequence
  Description of Artificial Sequence: Synthetic oligonucleotide
ccgccggaccuuuacuccc

SEQ ID NO: 104006 - RNA, 19 nt, Artificial Sequence
  Description of Artificial Sequence: Synthetic oligonucleotide
ccggaucugggcgcugccc

SEQ ID NO: 104007 - RNA, 19 nt, Artificial Sequence
  Description of Artificial Sequence: Synthetic oligonucleotide
ccuuucccagaggcguucu

SEQ ID NO: 104008 - RNA, 19 nt, Artificial Sequence
  Description of Artificial Sequence: Synthetic oligonucleotide
ugggaggccucgccuugcg

SEQ ID NO: 104009 - RNA, 19 nt, Artificial Sequence
  Description of Artificial Sequence: Synthetic oligonucleotide
gcgggugcccccucgcagu

SEQ ID NO: 104010 - RNA, 19 nt, Artificial Sequence
  Description of Artificial Sequence: Synthetic oligonucleotide
ugccuguaugagccucagc

SEQ ID NO: 104011 - RNA, 19 nt, Artificial Sequence
  Description of Artificial Sequence: Synthetic oligonucleotide
cucuccccgcccgacguca

SEQ ID NO: 104012 - RNA, 19 nt, Artificial Sequence
  Description of Artificial Sequence: Synthetic oligonucleotide
aagcccggccuccgggcgc

SEQ ID NO: 104013 - RNA, 19 nt, Artificial Sequence
  Description of Artificial Sequence: Synthetic oligonucleotide
ccucccgccucgccagcgc

SEQ ID NO: 104014 - RNA, 19 nt, Artificial Sequence
  Description of Artificial Sequence: Synthetic oligonucleotide
cuggacgcugucucugccu

SEQ ID NO: 104015 - RNA, 19 nt, Artificial Sequence
  Description of Artificial Sequence: Synthetic oligonucleotide
uucaagggucccuacgcgc

SEQ ID NO: 104016 - RNA, 19 nt, Artificial Sequence
  Description of Artificial Sequence: Synthetic oligonucleotide
cccugggagcugcuuucug

SEQ ID NO: 104017 - RNA, 19 nt, Artificial Sequence
  Description of Artificial Sequence: Synthetic oligonucleotide
gugggggccccagggaacu

SEQ ID NO: 104018 - RNA, 19 nt, Artificial Sequence
  Description of Artificial Sequence: Synthetic oligonucleotide
ugugggucacagggagacu

SEQ ID NO: 104019 - RNA, 19 nt, Artificial Sequence
  Description of Artificial Sequence: Synthetic oligonucleotide
uaccaggccgccccggagg

SEQ ID NO: 104020 - RNA, 19 nt, Artificial Sequence
  Description of Artificial Sequence: Synthetic oligonucleotide
gcucguuuucccguaauag

SEQ ID NO: 104021 - RNA, 19 nt, Artificial Sequence
  Description of Artificial Sequence: Synthetic oligonucleotide
gggaccaagauugaggacu

SEQ ID NO: 104022 - RNA, 19 nt, Artificial Sequence
  Description of Artificial Sequence: Synthetic oligonucleotide
uugcuguccaucagcugcc

SEQ ID NO: 104023 - RNA, 19 nt, Artificial Sequence
  Description of Artificial Sequence: Synthetic oligonucleotide
ccugcggaacugccggccg

SEQ ID NO: 104024 - RNA, 19 nt, Artificial Sequence
  Description of Artificial Sequence: Synthetic oligonucleotide
gucccagccaacagacucu

SEQ ID NO: 104025 - RNA, 19 nt, Artificial Sequence
  Description of Artificial Sequence: Synthetic oligonucleotide
uaucccagcggggccuaug

SEQ ID NO: 104026 - RNA, 19 nt, Artificial Sequence
  Description of Artificial Sequence: Synthetic oligonucleotide
gacgcuuucccgcuggccc

SEQ ID NO: 104027 - RNA, 19 nt, Artificial Sequence
  Description of Artificial Sequence: Synthetic oligonucleotide
ccgggugacuuaggggagg

SEQ ID NO: 104028 - RNA, 19 nt, Artificial Sequence
  Description of Artificial Sequence: Synthetic oligonucleotide
ggggcugagggccucccug

SEQ ID NO: 104029 - RNA, 19 nt, Artificial Sequence
  Description of Artificial Sequence: Synthetic oligonucleotide
gggcuccugaccccuccua

SEQ ID NO: 104030 - RNA, 19 nt, Artificial Sequence
  Description of Artificial Sequence: Synthetic oligonucleotide
aguggggagggagggagua

SEQ ID NO: 104031 - RNA, 19 nt, Artificial Sequence
  Description of Artificial Sequence: Synthetic oligonucleotide
agcggcgacggcggagagu

SEQ ID NO: 104032 - RNA, 19 nt, Artificial Sequence
  Description of Artificial Sequence: Synthetic oligonucleotide
uuucuggccaguacgcagc

SEQ ID NO: 104033 - RNA, 19 nt, Artificial Sequence
  Description of Artificial Sequence: Synthetic oligonucleotide
ccucagcuuuccccgcugg

SEQ ID NO: 104034 - RNA, 19 nt, Artificial Sequence
  Description of Artificial Sequence: Synthetic oligonucleotide
ggccuucgcagcgccgccg

SEQ ID NO: 104035 - RNA, 19 nt, Artificial Sequence
  Description of Artificial Sequence: Synthetic oligonucleotide
gcggcggacuucccuaaac

SEQ ID NO: 104036 - RNA, 19 nt, Artificial Sequence
  Description of Artificial Sequence: Synthetic oligonucleotide
ccucugguggcggacaucc

SEQ ID NO: 104037 - RNA, 19 nt, Artificial Sequence
  Description of Artificial Sequence: Synthetic oligonucleotide
ccuggaagcaguggcgugg

SEQ ID NO: 104038 - RNA, 19 nt, Artificial Sequence
  Description of Artificial Sequence: Synthetic oligonucleotide
gcugcaccacccgugccgc

SEQ ID NO: 104039 - RNA, 19 nt, Artificial Sequence
  Description of Artificial Sequence: Synthetic oligonucleotide
ccgccgccgcccaccccuu

SEQ ID NO: 104040 - RNA, 19 nt, Artificial Sequence
  Description of Artificial Sequence: Synthetic oligonucleotide
uucccccaggccaaggcgc

SEQ ID NO: 104041 - RNA, 19 nt, Artificial Sequence
  Description of Artificial Sequence: Synthetic oligonucleotide
cgacgcaaggggcgccgcg

SEQ ID NO: 104042 - RNA, 19 nt, Artificial Sequence
  Description of Artificial Sequence: Synthetic oligonucleotide
ggcggcaaaugcagcacgc

SEQ ID NO: 104043 - RNA, 19 nt, Artificial Sequence
  Description of Artificial Sequence: Synthetic oligonucleotide
cgcugcuucugcccgcggc

SEQ ID NO: 104044 - RNA, 19 nt, Artificial Sequence
  Description of Artificial Sequence: Synthetic oligonucleotide
ccgcacgccaaggccuucg

SEQ ID NO: 104045 - RNA, 19 nt, Artificial Sequence
  Description of Artificial Sequence: Synthetic oligonucleotide
gcuugcccgguggagaguu

SEQ ID NO: 104046 - RNA, 19 nt, Artificial Sequence
  Description of Artificial Sequence: Synthetic oligonucleotide
ugugugcggagcuuugcgc

SEQ ID NO: 104047 - RNA, 19 nt, Artificial Sequence
  Description of Artificial Sequence: Synthetic oligonucleotide
cgcuccgacgagcucaauc

SEQ ID NO: 104048 - RNA, 19 nt, Artificial Sequence
  Description of Artificial Sequence: Synthetic oligonucleotide
cgccaccugcgcauccaca

SEQ ID NO: 104049 - RNA, 19 nt, Artificial Sequence
  Description of Artificial Sequence: Synthetic oligonucleotide
acgggccacaaacccuucc

SEQ ID NO: 104050 - RNA, 19 nt, Artificial Sequence
  Description of Artificial Sequence: Synthetic oligonucleotide
cagugccgcaucugccucc

SEQ ID NO: 104051 - RNA, 19 nt, Artificial Sequence
  Description of Artificial Sequence: Synthetic oligonucleotide
cgcaacuucagccgcagcg

SEQ ID NO: 104052 - RNA, 19 nt, Artificial Sequence
  Description of Artificial Sequence: Synthetic oligonucleotide
gaccaccucaccacgcacg

SEQ ID NO: 104053 - RNA, 19 nt, Artificial Sequence
  Description of Artificial Sequence: Synthetic oligonucleotide
gugcgcacccacaccggcg

SEQ ID NO: 104054 - RNA, 19 nt, Artificial Sequence
  Description of Artificial Sequence: Synthetic oligonucleotide
gagaagccuuuugcuugcg

SEQ ID NO: 104055 - RNA, 19 nt, Artificial Sequence
  Description of Artificial Sequence: Synthetic oligonucleotide
gacgugugcggccgccgcu

SEQ ID NO: 104056 - RNA, 19 nt, Artificial Sequence
  Description of Artificial Sequence: Synthetic oligonucleotide
uucgcgcgcagcgaugaga

SEQ ID NO: 104057 - RNA, 19 nt, Artificial Sequence
  Description of Artificial Sequence: Synthetic oligonucleotide
aagaaacggcacagcaagg

SEQ ID NO: 104058 - RNA, 19 nt, Artificial Sequence
  Description of Artificial Sequence: Synthetic oligonucleotide
gugcaccucaagcagaagg

SEQ ID NO: 104059 - RNA, 19 nt, Artificial Sequence
  Description of Artificial Sequence: Synthetic oligonucleotide
gcgcgcgccgaggagcggc

SEQ ID NO: 104060 - RNA, 19 nt, Artificial Sequence
  Description of Artificial Sequence: Synthetic oligonucleotide
cucaagggccucggcuuuu

SEQ ID NO: 104061 - RNA, 19 nt, Artificial Sequence
  Description of Artificial Sequence: Synthetic oligonucleotide
uacucgcugggccucuccu

SEQ ID NO: 104062 - RNA, 19 nt, Artificial Sequence
  Description of Artificial Sequence: Synthetic oligonucleotide
uucgcuucucucugagcaa

SEQ ID NO: 104063 - RNA, 19 nt, Artificial Sequence
  Description of Artificial Sequence: Synthetic oligonucleotide
agagauggguuuauggguu

SEQ ID NO: 104064 - RNA, 19 nt, Artificial Sequence
  Description of Artificial Sequence: Synthetic oligonucleotide
uggggcgccgccguucggc

SEQ ID NO: 104065 - RNA, 19 nt, Artificial Sequence
  Description of Artificial Sequence: Synthetic oligonucleotide
cgcgcacgaguuccgggcc

SEQ ID NO: 104066 - RNA, 19 nt, Artificial Sequence
  Description of Artificial Sequence: Synthetic oligonucleotide
cguuccccuccccgcucuu

SEQ ID NO: 104067 - RNA, 19 nt, Artificial Sequence
  Description of Artificial Sequence: Synthetic oligonucleotide
ucuuccaacuccuccucgc

SEQ ID NO: 104068 - RNA, 19 nt, Artificial Sequence
  Description of Artificial Sequence: Synthetic oligonucleotide
cacgcccgagggccggccu

SEQ ID NO: 104069 - RNA, 19 nt, Artificial Sequence
  Description of Artificial Sequence: Synthetic oligonucleotide
uccggucccgcuuccaguu

SEQ ID NO: 104070 - RNA, 19 nt, Artificial Sequence
  Description of Artificial Sequence: Synthetic oligonucleotide
uuccuugaagcgcccgccg

SEQ ID NO: 104071 - RNA, 19 nt, Artificial Sequence
  Description of Artificial Sequence: Synthetic oligonucleotide
gcacacgcccuauucagca

SEQ ID NO: 104072 - RNA, 19 nt, Artificial Sequence
  Description of Artificial Sequence: Synthetic oligonucleotide
accagcuccgcggacaguu

SEQ ID NO: 104073 - RNA, 19 nt, Artificial Sequence
  Description of Artificial Sequence: Synthetic oligonucleotide
ucccgcgguccaggcgcug

SEQ ID NO: 104074 - RNA, 19 nt, Artificial Sequence
  Description of Artificial Sequence: Synthetic oligonucleotide
gucacccuugucagccgcg

SEQ ID NO: 104075 - RNA, 19 nt, Artificial Sequence
  Description of Artificial Sequence: Synthetic oligonucleotide
gcuuugggggaagucuucu

SEQ ID NO: 104076 - RNA, 19 nt, Artificial Sequence
  Description of Artificial Sequence: Synthetic oligonucleotide
ugagaccacccagugaaua

SEQ ID NO: 104077 - RNA, 19 nt, Artificial Sequence
  Description of Artificial Sequence: Synthetic oligonucleotide
aggcacuacccugggauuc

SEQ ID NO: 104078 - RNA, 19 nt, Artificial Sequence
  Description of Artificial Sequence: Synthetic oligonucleotide
caagacagucuuuuguaac

SEQ ID NO: 104079 - RNA, 19 nt, Artificial Sequence
  Description of Artificial Sequence: Synthetic oligonucleotide
cuggcacacgccccacgcc

SEQ ID NO: 104080 - RNA, 19 nt, Artificial Sequence
  Description of Artificial Sequence: Synthetic oligonucleotide
cuuccucuauaacccccag

SEQ ID NO: 104081 - RNA, 19 nt, Artificial Sequence
  Description of Artificial Sequence: Synthetic oligonucleotide
gagacaggcuggggcagcg

SEQ ID NO: 104082 - RNA, 19 nt, Artificial Sequence
  Description of Artificial Sequence: Synthetic oligonucleotide
gccaaggcggucucgcgcg

SEQ ID NO: 104083 - RNA, 19 nt, Artificial Sequence
  Description of Artificial Sequence: Synthetic oligonucleotide
gggacuuuguacagcagug

SEQ ID NO: 104084 - RNA, 19 nt, Artificial Sequence
  Description of Artificial Sequence: Synthetic oligonucleotide
gucuuauccagcagccauu

SEQ ID NO: 104085 - RNA, 19 nt, Artificial Sequence
  Description of Artificial Sequence: Synthetic oligonucleotide
uggauguaacguuuugcuu

SEQ ID NO: 104086 - RNA, 19 nt, Artificial Sequence
  Description of Artificial Sequence: Synthetic oligonucleotide
uuggguuuuuuuuccuuuu

SEQ ID NO: 104087 - RNA, 19 nt, Artificial Sequence
  Description of Artificial Sequence: Synthetic oligonucleotide
uguuguuguuaauuuuugu

SEQ ID NO: 104088 - RNA, 19 nt, Artificial Sequence
  Description of Artificial Sequence: Synthetic oligonucleotide
uaaagcagacgcuacucuc

SEQ ID NO: 104089 - RNA, 19 nt, Artificial Sequence
  Description of Artificial Sequence: Synthetic oligonucleotide
caagcaguugacaaaacug

SEQ ID NO: 104090 - RNA, 19 nt, Artificial Sequence
  Description of Artificial Sequence: Synthetic oligonucleotide
guuuauuuuugcaauuaaa

SEQ ID NO: 104091 - RNA, 19 nt, Artificial Sequence
  Description of Artificial Sequence: Synthetic oligonucleotide
aauuauugugcuaaaagcu

SEQ ID NO: 104092 - RNA, 19 nt, Artificial Sequence
  Description of Artificial Sequence: Synthetic oligonucleotide
ugcuaaaagcuuaaaaaaa

SEQ ID NO: 104093 - RNA, 25 nt, Artificial Sequence
  Description of Artificial Sequence: Synthetic oligonucleotide
cccggcagcgcuuuggagaggcgag

SEQ ID NO: 104094 - RNA, 25 nt, Artificial Sequence
  Description of Artificial Sequence: Synthetic oligonucleotide
ggagccgccgcccgaggccggugcg

SEQ ID NO: 104095 - RNA, 25 nt, Artificial Sequence
  Description of Artificial Sequence: Synthetic oligonucleotide
gggcgagcgagggcgccgcggcucc

SEQ ID NO: 104096 - RNA, 25 nt, Artificial Sequence
  Description of Artificial Sequence: Synthetic oligonucleotide
cccgacuccuuucccagaggugagu

SEQ ID NO: 104097 - RNA, 25 nt, Artificial Sequence
  Description of Artificial Sequence: Synthetic oligonucleotide
ugcccgaagccaggagcccgggcgc

SEQ ID NO: 104098 - RNA, 25 nt, Artificial Sequence
  Description of Artificial Sequence: Synthetic oligonucleotide
ccuaggucugugcgcugcggggaac

SEQ ID NO: 104099 - RNA, 25 nt, Artificial Sequence
  Description of Artificial Sequence: Synthetic oligonucleotide
ccccuaccgccagccuccccgccac

SEQ ID NO: 104100 - RNA, 25 nt, Artificial Sequence
  Description of Artificial Sequence: Synthetic oligonucleotide
cccgcgcgcccccaagcccagcggg

SEQ ID NO: 104101 - RNA, 25 nt, Artificial Sequence
  Description of Artificial Sequence: Synthetic oligonucleotide
gcgaggccccgggcgccccacagcc

SEQ ID NO: 104102 - RNA, 25 nt, Artificial Sequence
  Description of Artificial Sequence: Synthetic oligonucleotide
cggcgccgcgccaugcuccaccuua

SEQ ID NO: 104103 - RNA, 25 nt, Artificial Sequence
  Description of Artificial Sequence: Synthetic oligonucleotide
agcgaguuuuccgaacccgacgcgc

SEQ ID NO: 104104 - RNA, 25 nt, Artificial Sequence
  Description of Artificial Sequence: Synthetic oligonucleotide
cuccucgucaaguccacugaaggcu

SEQ ID NO: 104105 - RNA, 25 nt, Artificial Sequence
  Description of Artificial Sequence: Synthetic oligonucleotide
uguugcgccgaacccagcgcugaau

SEQ ID NO: 104106 - RNA, 25 nt, Artificial Sequence
  Description of Artificial Sequence: Synthetic oligonucleotide
uugccccggcugccugccagggacg

SEQ ID NO: 104107 - RNA, 25 nt, Artificial Sequence
  Description of Artificial Sequence: Synthetic oligonucleotide
gcucccgcggccaccggcuacccug

SEQ ID NO: 104108 - RNA, 25 nt, Artificial Sequence
  Description of Artificial Sequence: Synthetic oligonucleotide
ggagcaggcgacuucuugagcuggg

SEQ ID NO: 104109 - RNA, 25 nt, Artificial Sequence
  Description of Artificial Sequence: Synthetic oligonucleotide
gcuuugaacagcugcggcgcaagug

SEQ ID NO: 104110 - RNA, 25 nt, Artificial Sequence
  Description of Artificial Sequence: Synthetic oligonucleotide
ggggacuuagccgacuccugcuucc

SEQ ID NO: 104111 - RNA, 25 nt, Artificial Sequence
  Description of Artificial Sequence: Synthetic oligonucleotide
cuggaggggccugcgcccacacccc

SEQ ID NO: 104112 - RNA, 25 nt, Artificial Sequence
  Description of Artificial Sequence: Synthetic oligonucleotide
ccucccggccucagcuacagcggua

SEQ ID NO: 104113 - RNA, 25 nt, Artificial Sequence
  Description of Artificial Sequence: Synthetic oligonucleotide
agcuucuucauucaggcagugcccg

SEQ ID NO: 104114 - RNA, 25 nt, Artificial Sequence
  Description of Artificial Sequence: Synthetic oligonucleotide
gaacacccgcacgacccggaggcac

SEQ ID NO: 104115 - RNA, 25 nt, Artificial Sequence
  Description of Artificial Sequence: Synthetic oligonucleotide
cucuucaaccucaugucgggcaucu

SEQ ID NO: 104116 - RNA, 25 nt, Artificial Sequence
  Description of Artificial Sequence: Synthetic oligonucleotide
uuaggccuggcacccuuccccgguc

SEQ ID NO: 104117 - RNA, 25 nt, Artificial Sequence
  Description of Artificial Sequence: Synthetic oligonucleotide
ccagaggcagcagcguccagauccc

SEQ ID NO: 104118 - RNA, 25 nt, Artificial Sequence
  Description of Artificial Sequence: Synthetic oligonucleotide
ccgcuggaugccccuuuuccugcgg

SEQ ID NO: 104119 - RNA, 25 nt, Artificial Sequence
  Description of Artificial Sequence: Synthetic oligonucleotide
ggguccgaugccuugcugccggguc

SEQ ID NO: 104120 - RNA, 25 nt, Artificial Sequence
  Description of Artificial Sequence: Synthetic oligonucleotide
ccgccggaccuuuacuccccggauc

SEQ ID NO: 104121 - RNA, 25 nt, Artificial Sequence
  Description of Artificial Sequence: Synthetic oligonucleotide
cugggcgcugccccuuucccagagg

SEQ ID NO: 104122 - RNA, 25 nt, Artificial Sequence
  Description of Artificial Sequence: Synthetic oligonucleotide
gcguucugggaggccucgccuugcg

SEQ ID NO: 104123 - RNA, 25 nt, Artificial Sequence
  Description of Artificial Sequence: Synthetic oligonucleotide
gcgggugcccccucgcagugccugu

SEQ ID NO: 104124 - RNA, 25 nt, Artificial Sequence
  Description of Artificial Sequence: Synthetic oligonucleotide
uaugagccucagcucuccccgcccg

SEQ ID NO: 104125 - RNA, 25 nt, Artificial Sequence
  Description of Artificial Sequence: Synthetic oligonucleotide
gacgucaagcccggccuccgggcgc

SEQ ID NO: 104126 - RNA, 25 nt, Artificial Sequence
  Description of Artificial Sequence: Synthetic oligonucleotide
ccucccgccucgccagcgcuggacg

SEQ ID NO: 104127 - RNA, 25 nt, Artificial Sequence
  Description of Artificial Sequence: Synthetic oligonucleotide
gcugucucugccuucaagggucccu

SEQ ID NO: 104128 - RNA, 25 nt, Artificial Sequence
  Description of Artificial Sequence: Synthetic oligonucleotide
uacgcgcccugggagcugcuuucug

SEQ ID NO: 104129 - RNA, 25 nt, Artificial Sequence
  Description of Artificial Sequence: Synthetic oligonucleotide
gugggggccccagggaacugugggu

SEQ ID NO: 104130 - RNA, 25 nt, Artificial Sequence
  Description of Artificial Sequence: Synthetic oligonucleotide
ucacagggagacuaccaggccgccc

SEQ ID NO: 104131 - RNA, 25 nt, Artificial Sequence
  Description of Artificial Sequence: Synthetic oligonucleotide
ccggaggcucguuuucccguaauag

SEQ ID NO: 104132 - RNA, 25 nt, Artificial Sequence
  Description of Artificial Sequence: Synthetic oligonucleotide
gggaccaagauugaggacuugcugu

SEQ ID NO: 104133 - RNA, 25 nt, Artificial Sequence
  Description of Artificial Sequence: Synthetic oligonucleotide
uccaucagcugcccugcggaacugc

SEQ ID NO: 104134 - RNA, 25 nt, Artificial Sequence
  Description of Artificial Sequence: Synthetic oligonucleotide
ccggccgucccagccaacagacucu

SEQ ID NO: 104135 - RNA, 25 nt, Artificial Sequence
  Description of Artificial Sequence: Synthetic oligonucleotide
uaucccagcggggccuaugacgcuu

SEQ ID NO: 104136 - RNA, 25 nt, Artificial Sequence
  Description of Artificial Sequence: Synthetic oligonucleotide
uucccgcuggccccgggugacuuag

SEQ ID NO: 104137 - RNA, 25 nt, Artificial Sequence
  Description of Artificial Sequence: Synthetic oligonucleotide
ggggagggggcugagggccucccug

SEQ ID NO: 104138 - RNA, 25 nt, Artificial Sequence
  Description of Artificial Sequence: Synthetic oligonucleotide
gggcuccugaccccuccuagugggg

SEQ ID NO: 104139 - RNA, 25 nt, Artificial Sequence
  Description of Artificial Sequence: Synthetic oligonucleotide
gagggagggaguagcggcgacggcg

SEQ ID NO: 104140 - RNA, 25 nt, Artificial Sequence
  Description of Artificial Sequence: Synthetic oligonucleotide
ggagaguuucuggccaguacgcagc

SEQ ID NO: 104141 - RNA, 25 nt, Artificial Sequence
  Description of Artificial Sequence: Synthetic oligonucleotide
ccucagcuuuccccgcugggccuuc

SEQ ID NO: 104142 - RNA, 25 nt, Artificial Sequence
  Description of Artificial Sequence: Synthetic oligonucleotide
cgcagcgccgccgcggcggacuucc

SEQ ID NO: 104143 - RNA, 25 nt, Artificial Sequence
  Description of Artificial Sequence: Synthetic oligonucleotide
ccuaaaccucugguggcggacaucc

SEQ ID NO: 104144 - RNA, 25 nt, Artificial Sequence
  Description of Artificial Sequence: Synthetic oligonucleotide
ccuggaagcaguggcguggcugcac

SEQ ID NO: 104145 - RNA, 25 nt, Artificial Sequence
  Description of Artificial Sequence: Synthetic oligonucleotide
ccacccgugccgccgccgccgccca

SEQ ID NO: 104146 - RNA, 25 nt, Artificial Sequence
  Description of Artificial Sequence: Synthetic oligonucleotide
accccuuucccccaggccaaggcgc

SEQ ID NO: 104147 - RNA, 25 nt, Artificial Sequence
  Description of Artificial Sequence: Synthetic oligonucleotide
cgacgcaaggggcgccgcggcggca

SEQ ID NO: 104148 - RNA, 25 nt, Artificial Sequence
  Description of Artificial Sequence: Synthetic oligonucleotide
aaaugcagcacgcgcugcuucugcc

SEQ ID NO: 104149 - RNA, 25 nt, Artificial Sequence
  Description of Artificial Sequence: Synthetic oligonucleotide
ccgcggccgcacgccaaggccuucg

SEQ ID NO: 104150 - RNA, 25 nt, Artificial Sequence
  Description of Artificial Sequence: Synthetic oligonucleotide
gcuugcccgguggagaguugugugc

SEQ ID NO: 104151 - RNA, 25 nt, Artificial Sequence
  Description of Artificial Sequence: Synthetic oligonucleotide
cggagcuuugcgcgcuccgacgagc

SEQ ID NO: 104152 - RNA, 25 nt, Artificial Sequence
  Description of Artificial Sequence: Synthetic oligonucleotide
cucaaucgccaccugcgcauccaca

SEQ ID NO: 104153 - RNA, 25 nt, Artificial Sequence
  Description of Artificial Sequence: Synthetic oligonucleotide
acgggccacaaacccuuccagugcc

SEQ ID NO: 104154 - RNA, 25 nt, Artificial Sequence
  Description of Artificial Sequence: Synthetic oligonucleotide
cgcaucugccuccgcaacuucagcc

SEQ ID NO: 104155 - RNA, 25 nt, Artificial Sequence
  Description of Artificial Sequence: Synthetic oligonucleotide
cgcagcgaccaccucaccacgcacg

SEQ ID NO: 104156 - RNA, 25 nt, Artificial Sequence
  Description of Artificial Sequence: Synthetic oligonucleotide
gugcgcacccacaccggcgagaagc

SEQ ID NO: 104157 - RNA, 25 nt, Artificial Sequence
  Description of Artificial Sequence: Synthetic oligonucleotide
ccuuuugcuugcgacgugugcggcc

SEQ ID NO: 104158 - RNA, 25 nt, Artificial Sequence
  Description of Artificial Sequence: Synthetic oligonucleotide
cgccgcuucgcgcgcagcgaugaga

SEQ ID NO: 104159 - RNA, 25 nt, Artificial Sequence
  Description of Artificial Sequence: Synthetic oligonucleotide
aagaaacggcacagcaaggugcacc

SEQ ID NO: 104160 - RNA, 25 nt, Artificial Sequence
  Description of Artificial Sequence: Synthetic oligonucleotide
cucaagcagaaggcgcgcgccgagg

SEQ ID NO: 104161 - RNA, 25 nt, Artificial Sequence
  Description of Artificial Sequence: Synthetic oligonucleotide
gagcggcucaagggccucggcuuuu

SEQ ID NO: 104162 - RNA, 25 nt, Artificial Sequence
  Description of Artificial Sequence: Synthetic oligonucleotide
uacucgcugggccucuccuucgcuu

SEQ ID NO: 104163 - RNA, 25 nt, Artificial Sequence
  Description of Artificial Sequence: Synthetic oligonucleotide
ucucucugagcaagagauggguuua

SEQ ID NO: 104164 - RNA, 25 nt, Artificial Sequence
  Description of Artificial Sequence: Synthetic oligonucleotide
auggguuggggcgccgccguucggc

SEQ ID NO: 104165 - RNA, 25 nt, Artificial Sequence
  Description of Artificial Sequence: Synthetic oligonucleotide
cgcgcacgaguuccgggccguuccc

SEQ ID NO: 104166 - RNA, 25 nt, Artificial Sequence
  Description of Artificial Sequence: Synthetic oligonucleotide
ccuccccgcucuucuuccaacuccu

SEQ ID NO: 104167 - RNA, 25 nt, Artificial Sequence
  Description of Artificial Sequence: Synthetic oligonucleotide
uccucgcacgcccgagggccggccu

SEQ ID NO: 104168 - RNA, 25 nt, Artificial Sequence
  Description of Artificial Sequence: Synthetic oligonucleotide
uccggucccgcuuccaguuuccuug

SEQ ID NO: 104169 - RNA, 25 nt, Artificial Sequence
  Description of Artificial Sequence: Synthetic oligonucleotide
gaagcgcccgccgcacacgcccuau

SEQ ID NO: 104170 - RNA, 25 nt, Artificial Sequence
  Description of Artificial Sequence: Synthetic oligonucleotide
uucagcaccagcuccgcggacaguu

SEQ ID NO: 104171 - RNA, 25 nt, Artificial Sequence
  Description of Artificial Sequence: Synthetic oligonucleotide
ucccgcgguccaggcgcugucaccc

SEQ ID NO: 104172 - RNA, 25 nt, Artificial Sequence
  Description of Artificial Sequence: Synthetic oligonucleotide
cuugucagccgcgcuuugggggaag

SEQ ID NO: 104173 - RNA, 25 nt, Artificial Sequence
  Description of Artificial Sequence: Synthetic oligonucleotide
gucuucugagaccacccagugaaua

SEQ ID NO: 104174 - RNA, 25 nt, Artificial Sequence
  Description of Artificial Sequence: Synthetic oligonucleotide
aggcacuacccugggauucaagaca

SEQ ID NO: 104175 - RNA, 25 nt, Artificial Sequence
  Description of Artificial Sequence: Synthetic oligonucleotide
agucuuuuguaacuggcacacgccc

SEQ ID NO: 104176 - RNA, 25 nt, Artificial Sequence
  Description of Artificial Sequence: Synthetic oligonucleotide
ccacgccuuccucuauaacccccag

SEQ ID NO: 104177 - RNA, 25 nt, Artificial Sequence
  Description of Artificial Sequence: Synthetic oligonucleotide
gagacaggcuggggcagcgccaagg

SEQ ID NO: 104178 - RNA, 25 nt, Artificial Sequence
  Description of Artificial Sequence: Synthetic oligonucleotide
gcggucucgcgcgggacuuuguaca

SEQ ID NO: 104179 - RNA, 25 nt, Artificial Sequence
  Description of Artificial Sequence: Synthetic oligonucleotide
agcagugucuuauccagcagccauu

SEQ ID NO: 104180 - RNA, 25 nt, Artificial Sequence
  Description of Artificial Sequence: Synthetic oligonucleotide
uggauguaacguuuugcuuuggguu

SEQ ID NO: 104181 - RNA, 25 nt, Artificial Sequence
  Description of Artificial Sequence: Synthetic oligonucleotide
uuuuuuuccuuuuguuguuguuaau

SEQ ID NO: 104182 - RNA, 25 nt, Artificial Sequence
  Description of Artificial Sequence: Synthetic oligonucleotide
uuuuuguaaagcagacgcuacucuc

SEQ ID NO: 104183 - RNA, 25 nt, Artificial Sequence
  Description of Artificial Sequence: Synthetic oligonucleotide
caagcaguugacaaaacuguuuauu

SEQ ID NO: 104184 - RNA, 25 nt, Artificial Sequence
  Description of Artificial Sequence: Synthetic oligonucleotide
uuuugcaauuaaaauuauugugcua

SEQ ID NO: 104185 - RNA, 25 nt, Artificial Sequence
  Description of Artificial Sequence: Synthetic oligonucleotide
uuauugugcuaaaagcuuaaaaaaa

SEQ ID NO: 104186 - DNA, 21 bp, Artificial Sequence
  Description of Artificial Sequence: Synthetic oligonucleotide
  Description of Combined DNA/RNA Molecule: Synthetic oligonucleotide
cuacacaaaucagcgauuutt

SEQ ID NO: 104187 - DNA, 21 bp, Artificial Sequence
  Description of Artificial Sequence: Synthetic oligonucleotide
  Description of Combined DNA/RNA Molecule: Synthetic oligonucleotide
aaaucgcugauuuguguagtt

SEQ ID NO: 104188 - DNA, 25 bp, Artificial Sequence
  Description of Artificial Sequence: Synthetic oligonucleotide
  Description of Combined DNA/RNA Molecule: Synthetic oligonucleotide
cuacacaaaucagcgauuuccaugt

SEQ ID NO: 104189 - RNA, 27 nt, Artificial Sequence
  Description of Artificial Sequence: Synthetic oligonucleotide
acauggaaaucgcugauuuguguaguc

SEQ ID NO: 104190 - RNA, 13 nt, Artificial Sequence
  Description of Artificial Sequence: Synthetic oligonucleotide
cuacacaaaucag

SEQ ID NO: 104191 - DNA, 11 bp, Artificial Sequence
  Description of Artificial Sequence: Synthetic oligonucleotide
  Description of Combined DNA/RNA Molecule: Synthetic oligonucleotide
gauuuccaugt

SEQ ID NO: 104192 - DNA, 21 bp, Artificial Sequence
  Description of Artificial Sequence: Synthetic oligonucleotide
  Description of Combined DNA/RNA Molecule: Synthetic oligonucleotide
ggaucuuauuucuucggagtt

SEQ ID NO: 104193 - DNA, 21 bp, Artificial Sequence
  Description of Artificial Sequence: Synthetic oligonucleotide
  Description of Combined DNA/RNA Molecule: Synthetic oligonucleotide
cuccgaagaaauaagaucctt

SEQ ID NO: 104194 - RNA, 11 nt, Artificial Sequence
  Description of Artificial Sequence: Synthetic oligonucleotide
ggaucuuauuu

SEQ ID NO: 104195 - DNA, 10 bp, Artificial Sequence
  Description of Artificial Sequence: Synthetic oligonucleotide
  Description of Combined DNA/RNA Molecule: Synthetic oligonucleotide
cuucggagtt

SEQ ID NO: 104196 - RNA, 27 nt, Artificial Sequence
  Description of Artificial Sequence: Synthetic oligonucleotide
cauugucuccgaagaaauaagauccuu

SEQ ID NO: 104197 - RNA, 8 nt, Artificial Sequence
  Description of Artificial Sequence: Synthetic oligonucleotide
  modified_base (2): LNA-G
ggaucuua

SEQ ID NO: 104198 - DNA, 17 bp, Artificial Sequence
  Description of Artificial Sequence: Synthetic oligonucleotide
  Description of Combined DNA/RNA Molecule: Synthetic oligonucleotide
uuucuucggagacaatg

SEQ ID NO: 104199 - DNA, 16 bp, Artificial Sequence
  Description of Artificial Sequence: Synthetic oligonucleotide
  Description of Combined DNA/RNA Molecule: Synthetic oligonucleotide
uucuucggagacaatg

SEQ ID NO: 104200 - DNA, 15 bp, Artificial Sequence
  Description of Artificial Sequence: Synthetic oligonucleotide
  Description of Combined DNA/RNA Molecule: Synthetic oligonucleotide
ucuucggagacaatg

SEQ ID NO: 104201 - DNA, 14 bp, Artificial Sequence
  Description of Artificial Sequence: Synthetic oligonucleotide
  Description of Combined DNA/RNA Molecule: Synthetic oligonucleotide
cuucggagacaatg

SEQ ID NO: 104202 - DNA, 13 bp, Artificial Sequence
  Description of Artificial Sequence: Synthetic oligonucleotide
  Description of Combined DNA/RNA Molecule: Synthetic oligonucleotide
uucggagacaatg

SEQ ID NO: 104203 - DNA, 12 bp, Artificial Sequence
  Description of Artificial Sequence: Synthetic oligonucleotide
  Description of Combined DNA/RNA Molecule: Synthetic oligonucleotide
ucggagacaatg

SEQ ID NO: 104204 - DNA, 11 bp, Artificial Sequence
  Description of Artificial Sequence: Synthetic oligonucleotide
  Description of Combined DNA/RNA Molecule: Synthetic oligonucleotide
cggagacaatg

SEQ ID NO: 104205 - RNA, 9 nt, Artificial Sequence
  Description of Artificial Sequence: Synthetic oligonucleotide
  modified_base (2): LNA-G
ggaucuuau

SEQ ID NO: 104206 - RNA, 10 nt, Artificial Sequence
  Description of Artificial Sequence: Synthetic oligonucleotide
  modified_base (2): LNA-G
ggaucuuauu

SEQ ID NO: 104207 - RNA, 11 nt, Artificial Sequence
  Description of Artificial Sequence: Synthetic oligonucleotide
  modified_base (2): LNA-G
ggaucuuauuu

SEQ ID NO: 104208 - RNA, 12 nt, Artificial Sequence
  Description of Artificial Sequence: Synthetic oligonucleotide
  modified_base (2): LNA-G
ggaucuuauuuc

SEQ ID NO: 104209 - RNA, 8 nt, Artificial Sequence
  Description of Artificial Sequence: Synthetic oligonucleotide
  modified_base (3): LNA-A
cuacacaa

SEQ ID NO: 104210 - DNA, 13 bp, Artificial Sequence
  Description of Artificial Sequence: Synthetic oligonucleotide
  Description of Combined DNA/RNA Molecule: Synthetic oligonucleotide
  modified_base (8): LNA-A
aucagcgauuutt

SEQ ID NO: 104211 - DNA, 12 bp, Artificial Sequence
  Description of Artificial Sequence: Synthetic oligonucleotide
  Description of Combined DNA/RNA Molecule: Synthetic oligonucleotide
  modified_base (7): LNA-A
ucagcgauuutt

SEQ ID NO: 104212 - DNA, 11 bp, Artificial Sequence
  Description of Artificial Sequence: Synthetic oligonucleotide
  Description of Combined DNA/RNA Molecule: Synthetic oligonucleotide
  modified_base (6): LNA-A
cagcgauuutt

SEQ ID NO: 104213 - DNA, 10 bp, Artificial Sequence
  Description of Artificial Sequence: Synthetic oligonucleotide
  Description of Combined DNA/RNA Molecule: Synthetic oligonucleotide
  modified_base (5): LNA-A
agcgauuutt

SEQ ID NO: 104214 - DNA, 9 bp, Artificial Sequence
  Description of Artificial Sequence: Synthetic oligonucleotide
  Description of Combined DNA/RNA Molecule: Synthetic oligonucleotide
  modified_base (4): LNA-A
gcgauuutt

SEQ ID NO: 104215 - DNA, 8 bp, Artificial Sequence
  Description of Artificial Sequence: Synthetic oligonucleotide
  Description of Combined DNA/RNA Molecule: Synthetic oligonucleotide
  modified_base (3): LNA-A
cgauuutt

SEQ ID NO: 104216 - DNA, 7 bp, Artificial Sequence
  Description of Artificial Sequence: Synthetic oligonucleotide
  Description of Combined DNA/RNA Molecule: Synthetic oligonucleotide
  modified_base (2): LNA-A
gauuutt

SEQ ID NO: 104217 - RNA, 9 nt, Artificial Sequence
  Description of Artificial Sequence: Synthetic oligonucleotide
  modified_base (3): LNA-A
cuacacaaa

SEQ ID NO: 104218 - RNA, 10 nt, Artificial Sequence
  Description of Artificial Sequence: Synthetic oligonucleotide
  modified_base (3): LNA-A
cuacacaaau

SEQ ID NO: 104219 - RNA, 11 nt, Artificial Sequence
  Description of Artificial Sequence: Synthetic oligonucleotide
  modified_base (3): LNA-A
cuacacaaauc

SEQ ID NO: 104220 - RNA, 12 nt, Artificial Sequence
  Description of Artificial Sequence: Synthetic oligonucleotide
  modified_base (3): LNA-A
cuacacaaauca

SEQ ID NO: 104221 - RNA, 13 nt, Artificial Sequence
  Description of Artificial Sequence: Synthetic oligonucleotide
  modified_base (3): LNA-A
cuacacaaaucag

SEQ ID NO: 104222 - RNA, 14 nt, Artificial Sequence
  Description of Artificial Sequence: Synthetic oligonucleotide
  modified_base (3): LNA-A
cuacacaaaucagc

SEQ ID NO: 104223 - RNA, 13 nt, Artificial Sequence
  Description of Artificial Sequence: Synthetic oligonucleotide
  modified_base (2): LNA-G
ggaucuuauuucu

SEQ ID NO: 104224 - RNA, 14 nt, Artificial Sequence
  Description of Artificial Sequence: Synthetic oligonucleotide
  modified_base (2): LNA-G
ggaucuuauuucuu

SEQ ID NO: 104225 - RNA, 8 nt, Artificial Sequence
  Description of Artificial Sequence: Synthetic oligonucleotide
  modified_base (2): LNA-G
  modified_base (8): LNA-A
ggaucuua

SEQ ID NO: 104226 - RNA, 9 nt, Artificial Sequence
  Description of Artificial Sequence: Synthetic oligonucleotide
  modified_base (2): LNA-G
  modified_base (9): LNA-U
ggaucuuau

SEQ ID NO: 104227 - RNA, 10 nt, Artificial Sequence
  Description of Artificial Sequence: Synthetic oligonucleotide
  modified_base (2): LNA-G
  modified_base (10): LNA-U
ggaucuuauu

SEQ ID NO: 104228 - RNA, 11 nt, Artificial Sequence
  Description of Artificial Sequence: Synthetic oligonucleotide
  modified_base (2): LNA-G
  modified_base (11): LNA-U
ggaucuuauuu

SEQ ID NO: 104229 - RNA, 12 nt, Artificial Sequence
  Description of Artificial Sequence: Synthetic oligonucleotide
  modified_base (2): LNA-G
  modified_base (12): LNA-C
ggaucuuauuuc

SEQ ID NO: 104230 - RNA, 13 nt, Artificial Sequence
  Description of Artificial Sequence: Synthetic oligonucleotide
  modified_base (2): LNA-G
  modified_base (13): LNA-U
ggaucuuauuucu

SEQ ID NO: 104231 - RNA, 14 nt, Artificial Sequence
  Description of Artificial Sequence: Synthetic oligonucleotide
  modified_base (2): LNA-G
  modified_base (14): LNA-U
ggaucuuauuucuu

SEQ ID NO: 104232 - DNA, 13 bp, Artificial Sequence
  Description of Artificial Sequence: Synthetic oligonucleotide
  Description of Combined DNA/RNA Molecule: Synthetic oligonucleotide
  modified_base (8): LNA-G
uuucuucggagtt

SEQ ID NO: 104233 - DNA, 12 bp, Artificial Sequence
  Description of Artificial Sequence: Synthetic oligonucleotide
  Description of Combined DNA/RNA Molecule: Synthetic oligonucleotide
  modified_base (7): LNA-G
uucuucggagtt

SEQ ID NO: 104234 - DNA, 11 bp, Artificial Sequence
  Description of Artificial Sequence: Synthetic oligonucleotide
  Description of Combined DNA/RNA Molecule: Synthetic oligonucleotide
  modified_base (6): LNA-G
ucuucggagtt

SEQ ID NO: 104235 - DNA, 10 bp, Artificial Sequence
  Description of Artificial Sequence: Synthetic oligonucleotide
  Description of Combined DNA/RNA Molecule: Synthetic oligonucleotide
  modified_base (5): LNA-G
cuucggagtt

SEQ ID NO: 104236 - DNA, 9 bp, Artificial Sequence
  Description of Artificial Sequence: Synthetic oligonucleotide
  Description of Combined DNA/RNA Molecule: Synthetic oligonucleotide
  modified_base (4): LNA-G
uucggagtt

SEQ ID NO: 104237 - DNA, 8 bp, Artificial Sequence
  Description of Artificial Sequence: Synthetic oligonucleotide
  Description of Combined DNA/RNA Molecule: Synthetic oligonucleotide
  modified_base (3): LNA-G
ucggagtt

SEQ ID NO: 104238 - DNA, 7 bp, Artificial Sequence
  Description of Artificial Sequence: Synthetic oligonucleotide
  Description of Combined DNA/RNA Molecule: Synthetic oligonucleotide
  modified_base (2): LNA-G
cggagtt

SEQ ID NO: 104239 - DNA, 13 bp, Artificial Sequence
  Description of Artificial Sequence: Synthetic oligonucleotide
  Description of Combined DNA/RNA Molecule: Synthetic oligonucleotide
  modified_base (1): LNA-U
  modified_base (8): LNA-G
uuucuucggagtt

SEQ ID NO: 104240 - DNA, 12 bp, Artificial Sequence
  Description of Artificial Sequence: Synthetic oligonucleotide
  Description of Combined DNA/RNA Molecule: Synthetic oligonucleotide
  modified_base (1): LNA-U
  modified_base (7): LNA-G
uucuucggagtt

SEQ ID NO: 104241 - DNA, 11 bp, Artificial Sequence
  Description of Artificial Sequence: Synthetic oligonucleotide
  Description of Combined DNA/RNA Molecule: Synthetic oligonucleotide
  modified_base (1): LNA-U
  modified_base (6): LNA-G
ucuucggagtt

SEQ ID NO: 104242 - DNA, 10 bp, Artificial Sequence
  Description of Artificial Sequence: Synthetic oligonucleotide
  Description of Combined DNA/RNA Molecule: Synthetic oligonucleotide
  modified_base (1): LNA-C
  modified_base (5): LNA-G
cuucggagtt

SEQ ID NO: 104243 - DNA, 9 bp, Artificial Sequence
  Description of Artificial Sequence: Synthetic oligonucleotide
  Description of Combined DNA/RNA Molecule: Synthetic oligonucleotide
  modified_base (1): LNA-U
  modified_base (4): LNA-G
uucggagtt

SEQ ID NO: 104244 - DNA, 8 bp, Artificial Sequence
  Description of Artificial Sequence: Synthetic oligonucleotide
  Description of Combined DNA/RNA Molecule: Synthetic oligonucleotide
  modified_base (1): LNA-U
  modified_base (3): LNA-G
ucggagtt

SEQ ID NO: 104245 - DNA, 7 bp, Artificial Sequence
  Description of Artificial Sequence: Synthetic oligonucleotide
  Description of Combined DNA/RNA Molecule: Synthetic oligonucleotide
  modified_base (1): LNA-C
  modified_base (2): LNA-G
cggagtt

SEQ ID NO: 104246 - DNA, 21 bp, Artificial Sequence
  Description of Artificial Sequence: Synthetic oligonucleotide
  Description of Combined DNA/RNA Molecule: Synthetic oligonucleotide
  modified_base (2): LNA-G
  modified_base (16): LNA-G
ggaucuuauuucuucggagtt

SEQ ID NO: 104247 - DNA, 25 bp, Artificial Sequence
  Description of Artificial Sequence: Synthetic oligonucleotide
  Description of Combined DNA/RNA Molecule: Synthetic oligonucleotide
ggaucuuauuucuucggagacaatg

SEQ ID NO: 104248 - RNA, 25 nt, Artificial Sequence
  Description of Artificial Sequence: Synthetic oligonucleotide
uaagcagaguucaaaagcccuucag

SEQ ID NO: 104249 - RNA, 25 nt, Artificial Sequence
  Description of Artificial Sequence: Synthetic oligonucleotide
agcagaguucaaaagcccuucagcg

SEQ ID NO: 104250 - RNA, 25 nt, Artificial Sequence
  Description of Artificial Sequence: Synthetic oligonucleotide
cucagggucugagugaagccgcucg

SEQ ID NO: 104251 - RNA, 25 nt, Artificial Sequence
  Description of Artificial Sequence: Synthetic oligonucleotide
caagcaacuacaucacgccagucaa

SEQ ID NO: 104252 - RNA, 25 nt, Artificial Sequence
  Description of Artificial Sequence: Synthetic oligonucleotide
aucaauggcagcuucuuggugcgug

SEQ ID NO: 104253 - RNA, 25 nt, Artificial Sequence
  Description of Artificial Sequence: Synthetic oligonucleotide
uuccagcccacauuggauucaucag

SEQ ID NO: 104254 - RNA, 25 nt, Artificial Sequence
  Description of Artificial Sequence: Synthetic oligonucleotide
cagcugagaauguggaauaccuaag

SEQ ID NO: 104255 - RNA, 25 nt, Artificial Sequence
  Description of Artificial Sequence: Synthetic oligonucleotide
aacguaucuccuaauuugaggcuca

SEQ ID NO: 104256 - RNA, 25 nt, Artificial Sequence
  Description of Artificial Sequence: Synthetic oligonucleotide
ccuaaaauaauuucucuacaauugg

SEQ ID NO: 104257 - RNA, 25 nt, Artificial Sequence
  Description of Artificial Sequence: Synthetic oligonucleotide
uggaagauucagcuaguuaggagcc

SEQ ID NO: 104258 - RNA, 25 nt, Artificial Sequence
  Description of Artificial Sequence: Synthetic oligonucleotide
uuaaacucuccuagucaauauccac

SEQ ID NO: 104259 - RNA, 25 nt, Artificial Sequence
  Description of Artificial Sequence: Synthetic oligonucleotide
cagccuacaguuauguucagucaca

SEQ ID NO: 104260 - RNA, 25 nt, Artificial Sequence
  Description of Artificial Sequence: Synthetic oligonucleotide
guuauguucagucacacacacauac

SEQ ID NO: 104261 - RNA, 25 nt, Artificial Sequence
  Description of Artificial Sequence: Synthetic oligonucleotide
cacauacaaaauguuccuuuugcuu

SEQ ID NO: 104262 - RNA, 25 nt, Artificial Sequence
  Description of Artificial Sequence: Synthetic oligonucleotide
uccuuuugcuuuuaaaguaauuuuu

SEQ ID NO: 104263 - RNA, 25 nt, Artificial Sequence
  Description of Artificial Sequence: Synthetic oligonucleotide
ugaccugugaagcaacagucaaugg

SEQ ID NO: 104264 - RNA, 25 nt, Artificial Sequence
  Description of Artificial Sequence: Synthetic oligonucleotide
cuaucucacacaucgacaaaccaau

SEQ ID NO: 104265 - RNA, 25 nt, Artificial Sequence
  Description of Artificial Sequence: Synthetic oligonucleotide
uguccucaauuguacugcuaccacu

SEQ ID NO: 104266 - RNA, 25 nt, Artificial Sequence
  Description of Artificial Sequence: Synthetic oligonucleotide
aaaccguagcuggcaagcggucuua

SEQ ID NO: 104267 - RNA, 25 nt, Artificial Sequence
  Description of Artificial Sequence: Synthetic oligonucleotide
uagcuggcaagcggucuuaccggcu

SEQ ID NO: 104268 - RNA, 25 nt, Artificial Sequence
  Description of Artificial Sequence: Synthetic oligonucleotide
uuguaugguuaaaagauggguuacc

SEQ ID NO: 104269 - RNA, 25 nt, Artificial Sequence
  Description of Artificial Sequence: Synthetic oligonucleotide
ugguuaaaagauggguuaccugcga

SEQ ID NO: 104270 - RNA, 25 nt, Artificial Sequence
  Description of Artificial Sequence: Synthetic oligonucleotide
cagggaauuauacaaucuugcugag

SEQ ID NO: 104271 - RNA, 25 nt, Artificial Sequence
  Description of Artificial Sequence: Synthetic oligonucleotide
acaaucuugcugagcauaaaacagu

SEQ ID NO: 104272 - RNA, 25 nt, Artificial Sequence
  Description of Artificial Sequence: Synthetic oligonucleotide
ccaauaaugaagaguccuuuauccu

SEQ ID NO: 104273 - RNA, 25 nt, Artificial Sequence
  Description of Artificial Sequence: Synthetic oligonucleotide
acuuuggauguuccaacgcaaguug

SEQ ID NO: 104274 - RNA, 25 nt, Artificial Sequence
  Description of Artificial Sequence: Synthetic oligonucleotide
aaugcuuccacuaaacugaaaccau

SEQ ID NO: 104275 - RNA, 25 nt, Artificial Sequence
  Description of Artificial Sequence: Synthetic oligonucleotide
gagaaaguuugacuuuguuaaauau

SEQ ID NO: 104276 - RNA, 25 nt, Artificial Sequence
  Description of Artificial Sequence: Synthetic oligonucleotide
aaagaacuacuguauauuaaaaguu

SEQ ID NO: 104277 - RNA, 25 nt, Artificial Sequence
  Description of Artificial Sequence: Synthetic oligonucleotide
uuagaaauacggguuuugacuuaac

SEQ ID NO: 104278 - RNA, 25 nt, Artificial Sequence
  Description of Artificial Sequence: Synthetic oligonucleotide
aacauggguacagcaaacucagcac

SEQ ID NO: 104279 - RNA, 25 nt, Artificial Sequence
  Description of Artificial Sequence: Synthetic oligonucleotide
aaagacacagaagaugcugaccuca

SEQ ID NO: 104280 - RNA, 25 nt, Artificial Sequence
  Description of Artificial Sequence: Synthetic oligonucleotide
uaguagggagguuuauucagaucgc

SEQ ID NO: 104281 - RNA, 25 nt, Artificial Sequence
  Description of Artificial Sequence: Synthetic oligonucleotide
gccuucugcagcaggguucugggau

SEQ ID NO: 104282 - RNA, 25 nt, Artificial Sequence
  Description of Artificial Sequence: Synthetic oligonucleotide
ggucugguacauauuggaaauuaug

SEQ ID NO: 104283 - RNA, 25 nt, Artificial Sequence
  Description of Artificial Sequence: Synthetic oligonucleotide
cuaguccuuccgauggaagcacuag

SEQ ID NO: 104284 - RNA, 25 nt, Artificial Sequence
  Description of Artificial Sequence: Synthetic oligonucleotide
ccagugaauauuguuuuuaugugga

SEQ ID NO: 104285 - RNA, 25 nt, Artificial Sequence
  Description of Artificial Sequence: Synthetic oligonucleotide
augaauucaaguuggaauugguaga

SEQ ID NO: 104286 - RNA, 25 nt, Artificial Sequence
  Description of Artificial Sequence: Synthetic oligonucleotide
caggacacagauuuagacuuggaga

SEQ ID NO: 104287 - RNA, 25 nt, Artificial Sequence
  Description of Artificial Sequence: Synthetic oligonucleotide
cucaaagcacaguuacaguauucca

SEQ ID NO: 104288 - RNA, 25 nt, Artificial Sequence
  Description of Artificial Sequence: Synthetic oligonucleotide
accacugccaccacugaugaauuaa

SEQ ID NO: 104289 - RNA, 25 nt, Artificial Sequence
  Description of Artificial Sequence: Synthetic oligonucleotide
gaaacuacuagugccacaucaucac

SEQ ID NO: 104290 - RNA, 25 nt, Artificial Sequence
  Description of Artificial Sequence: Synthetic oligonucleotide
aagucggacagccucaccaaacaga

SEQ ID NO: 104291 - RNA, 25 nt, Artificial Sequence
  Description of Artificial Sequence: Synthetic oligonucleotide
gaaagcgaaaaauggaacaugaugg

SEQ ID NO: 104292 - RNA, 25 nt, Artificial Sequence
  Description of Artificial Sequence: Synthetic oligonucleotide
cccucugauuuagcauguagacugc

SEQ ID NO: 104293 - RNA, 25 nt, Artificial Sequence
  Description of Artificial Sequence: Synthetic oligonucleotide
ugagcuauuuaaggaucuauuuaug

SEQ ID NO: 104294 - RNA, 25 nt, Artificial Sequence
  Description of Artificial Sequence: Synthetic oligonucleotide
aaaaggugaaaaagcacuauuauca

SEQ ID NO: 104295 - RNA, 25 nt, Artificial Sequence
  Description of Artificial Sequence: Synthetic oligonucleotide
gaaaaagcacuauuaucaguucugc

SEQ ID NO: 104296 - RNA, 25 nt, Artificial Sequence
  Description of Artificial Sequence: Synthetic oligonucleotide
ggcugaaaagaaagauuaaaccuac

SEQ ID NO: 104297 - RNA, 25 nt, Artificial Sequence
  Description of Artificial Sequence: Synthetic oligonucleotide
uaaacccuuauaauaaaauccuucu

SEQ ID NO: 104298 - RNA, 25 nt, Artificial Sequence
  Description of Artificial Sequence: Synthetic oligonucleotide
cauacuauuagccaaugcuguagac

SEQ ID NO: 104299 - RNA, 25 nt, Artificial Sequence
  Description of Artificial Sequence: Synthetic oligonucleotide
gacagaagcauuuugauaggaauag

SEQ ID NO: 104300 - RNA, 25 nt, Artificial Sequence
  Description of Artificial Sequence: Synthetic oligonucleotide
agagcaaauaagauaauggcccuga

SEQ ID NO: 104301 - RNA, 25 nt, Artificial Sequence
  Description of Artificial Sequence: Synthetic oligonucleotide
ccaacauuuuucucuuccucaagca

SEQ ID NO: 104302 - RNA, 25 nt, Artificial Sequence
  Description of Artificial Sequence: Synthetic oligonucleotide
uuaaguaugagaaaaguucagccca

SEQ ID NO: 104303 - RNA, 25 nt, Artificial Sequence
  Description of Artificial Sequence: Synthetic oligonucleotide
caggaauaaagauggcugcugaacc

SEQ ID NO: 104304 - RNA, 25 nt, Artificial Sequence
  Description of Artificial Sequence: Synthetic oligonucleotide
aauuugaaugaccaaguucucuuca

SEQ ID NO: 104305 - RNA, 25 nt, Artificial Sequence
  Description of Artificial Sequence: Synthetic oligonucleotide
auguauaaagauagccagccuagag

SEQ ID NO: 104306 - RNA, 25 nt, Artificial Sequence
  Description of Artificial Sequence: Synthetic oligonucleotide
ggcuguaacuaucucugugaagugu

SEQ ID NO: 104307 - RNA, 25 nt, Artificial Sequence
  Description of Artificial Sequence: Synthetic oligonucleotide
ucugugaagugugagaaaauuucaa

SEQ ID NO: 104308 - RNA, 25 nt, Artificial Sequence
  Description of Artificial Sequence: Synthetic oligonucleotide
ccuuuaaggaaaugaauccuccuga

SEQ ID NO: 104309 - RNA, 25 nt, Artificial Sequence
  Description of Artificial Sequence: Synthetic oligonucleotide
aaggauacaaaaagugacaucauau

SEQ ID NO: 104310 - RNA, 25 nt, Artificial Sequence
  Description of Artificial Sequence: Synthetic oligonucleotide
agaugcaauuugaaucuucaucaua

SEQ ID NO: 104311 - RNA, 25 nt, Artificial Sequence
  Description of Artificial Sequence: Synthetic oligonucleotide
guucaaaacgaagacuagcuauuaa

SEQ ID NO: 104312 - RNA, 25 nt, Artificial Sequence
  Description of Artificial Sequence: Synthetic oligonucleotide
gugaaaccucaucucuacuaaaaau

SEQ ID NO: 104313 - RNA, 25 nt, Artificial Sequence
  Description of Artificial Sequence: Synthetic oligonucleotide
acgaaagagaagcucuaucucgccu

SEQ ID NO: 104314 - RNA, 25 nt, Artificial Sequence
  Description of Artificial Sequence: Synthetic oligonucleotide
cuccacaagcgccuucgguccaguu

SEQ ID NO: 104315 - RNA, 25 nt, Artificial Sequence
  Description of Artificial Sequence: Synthetic oligonucleotide
gagaagauuccaaagauguagccgc

SEQ ID NO: 104316 - RNA, 25 nt, Artificial Sequence
  Description of Artificial Sequence: Synthetic oligonucleotide
aaucuggauucaaugaggagacuug

SEQ ID NO: 104317 - RNA, 25 nt, Artificial Sequence
  Description of Artificial Sequence: Synthetic oligonucleotide
agaacagauuugagaguagugagga

SEQ ID NO: 104318 - RNA, 25 nt, Artificial Sequence
  Description of Artificial Sequence: Synthetic oligonucleotide
ccagagcugugcagaugaguacaaa

SEQ ID NO: 104319 - RNA, 25 nt, Artificial Sequence
  Description of Artificial Sequence: Synthetic oligonucleotide
ccucagauuguuguuguuaaugggc

SEQ ID NO: 104320 - RNA, 25 nt, Artificial Sequence
  Description of Artificial Sequence: Synthetic oligonucleotide
cuauuuuaauuauuuuuaauuuauu

SEQ ID NO: 104321 - RNA, 25 nt, Artificial Sequence
  Description of Artificial Sequence: Synthetic oligonucleotide
uuuaauuuauuaauauuuaaauaug

SEQ ID NO: 104322 - RNA, 25 nt, Artificial Sequence
  Description of Artificial Sequence: Synthetic oligonucleotide
augcaguuugaauauccuuuguuuc

SEQ ID NO: 104323 - RNA, 25 nt, Artificial Sequence
  Description of Artificial Sequence: Synthetic oligonucleotide
caugcugcuggcgucuaaguguuug

SEQ ID NO: 104324 - RNA, 25 nt, Artificial Sequence
  Description of Artificial Sequence: Synthetic oligonucleotide
agaugugcauuucaccugugacaaa

SEQ ID NO: 104325 - RNA, 25 nt, Artificial Sequence
  Description of Artificial Sequence: Synthetic oligonucleotide
ucaaaaccugugccaggcugaauua

SEQ ID NO: 104326 - RNA, 25 nt, Artificial Sequence
  Description of Artificial Sequence: Synthetic oligonucleotide
gaauguggguagucauucuuacaau

SEQ ID NO: 104327 - RNA, 25 nt, Artificial Sequence
  Description of Artificial Sequence: Synthetic oligonucleotide
auguggguagucauucuuacaauug

SEQ ID NO: 104328 - RNA, 25 nt, Artificial Sequence
  Description of Artificial Sequence: Synthetic oligonucleotide
ugaaaaugagcaucagagaguguac

SEQ ID NO: 104329 - RNA, 25 nt, Artificial Sequence
  Description of Artificial Sequence: Synthetic oligonucleotide
uugcuuuucauguagaacucagcag

SEQ ID NO: 104330 - RNA, 25 nt, Artificial Sequence
  Description of Artificial Sequence: Synthetic oligonucleotide
uguauuucuauauuuauuuucagua

SEQ ID NO: 104331 - RNA, 25 nt, Artificial Sequence
  Description of Artificial Sequence: Synthetic oligonucleotide
uuugauuaauguuucuuaaauggaa

SEQ ID NO: 104332 - RNA, 25 nt, Artificial Sequence
  Description of Artificial Sequence: Synthetic oligonucleotide
caacguguauagugccuaaaauugu

SEQ ID NO: 104333 - RNA, 25 nt, Artificial Sequence
  Description of Artificial Sequence: Synthetic oligonucleotide
cauauccuuggcuacuaacaucugg

SEQ ID NO: 104334 - RNA, 25 nt, Artificial Sequence
  Description of Artificial Sequence: Synthetic oligonucleotide
uacuaacaucuggagacugugagcu

SEQ ID NO: 104335 - RNA, 25 nt, Artificial Sequence
  Description of Artificial Sequence: Synthetic oligonucleotide
cauaaguugugugcuuuuuauuaau

SEQ ID NO: 104336 - RNA, 25 nt, Artificial Sequence
  Description of Artificial Sequence: Synthetic oligonucleotide
gcaucauuuuggcucuucuuacauu

SEQ ID NO: 104337 - RNA, 25 nt, Artificial Sequence
  Description of Artificial Sequence: Synthetic oligonucleotide
gcucuucuuacauuuguaaaaaugu

SEQ ID NO: 104338 - RNA, 25 nt, Artificial Sequence
  Description of Artificial Sequence: Synthetic oligonucleotide
agauuaggucaucuuaauucauauu

SEQ ID NO: 104339 - RNA, 25 nt, Artificial Sequence
  Description of Artificial Sequence: Synthetic oligonucleotide
auggaauugaaagaacuaaucauga

SEQ ID NO: 104340 - RNA, 25 nt, Artificial Sequence
  Description of Artificial Sequence: Synthetic oligonucleotide
cacacucauuccuucugcucuuggg

SEQ ID NO: 104341 - RNA, 25 nt, Artificial Sequence
  Description of Artificial Sequence: Synthetic oligonucleotide
uguagagguaaccaguagcuuugag

SEQ ID NO: 104342 - RNA, 25 nt, Artificial Sequence
  Description of Artificial Sequence: Synthetic oligonucleotide
caaccacaugccacguaauauuuca

SEQ ID NO: 104343 - RNA, 25 nt, Artificial Sequence
  Description of Artificial Sequence: Synthetic oligonucleotide
ucggaaacaaguuauucucuucacu

SEQ ID NO: 104344 - RNA, 25 nt, Artificial Sequence
  Description of Artificial Sequence: Synthetic oligonucleotide
acucccaauaacuaaugcuaagaaa

SEQ ID NO: 104345 - RNA, 25 nt, Artificial Sequence
  Description of Artificial Sequence: Synthetic oligonucleotide
aaugcuaagaaaugcugaaaaucaa

SEQ ID NO: 104346 - RNA, 25 nt, Artificial Sequence
  Description of Artificial Sequence: Synthetic oligonucleotide
gucuuucucuaaauaugauuacuuu

SEQ ID NO: 104347 - RNA, 25 nt, Artificial Sequence
  Description of Artificial Sequence: Synthetic oligonucleotide
ugaauuucaggcauuuuguucuaca

SEQ ID NO: 104348 - RNA, 25 nt, Artificial Sequence
  Description of Artificial Sequence: Synthetic oligonucleotide
cgauucccucucacccgggacucuc

SEQ ID NO: 104349 - RNA, 25 nt, Artificial Sequence
  Description of Artificial Sequence: Synthetic oligonucleotide
aggaaagugaaccuuuaaaguaaag

SEQ ID NO: 104350 - RNA, 25 nt, Artificial Sequence
  Description of Artificial Sequence: Synthetic oligonucleotide
gaggcugcaugcucuggaagccugg

SEQ ID NO: 104351 - RNA, 25 nt, Artificial Sequence
  Description of Artificial Sequence: Synthetic oligonucleotide
ucucugaacagaaaacaaaagagag

SEQ ID NO: 104352 - RNA, 25 nt, Artificial Sequence
  Description of Artificial Sequence: Synthetic oligonucleotide
aacuuggcuguaaucaguuaugccg

SEQ ID NO: 104353 - RNA, 25 nt, Artificial Sequence
  Description of Artificial Sequence: Synthetic oligonucleotide
agaagccaaaauuaaaagaagucca

SEQ ID NO: 104354 - RNA, 25 nt, Artificial Sequence
  Description of Artificial Sequence: Synthetic oligonucleotide
auuaaaagaaguccaggugagguua

SEQ ID NO: 104355 - RNA, 25 nt, Artificial Sequence
  Description of Artificial Sequence: Synthetic oligonucleotide
gaauccggauuaucgggaagaggac

SEQ ID NO: 104356 - RNA, 25 nt, Artificial Sequence
  Description of Artificial Sequence: Synthetic oligonucleotide
aaugugacaucaaagcaaguauugu

SEQ ID NO: 104357 - RNA, 25 nt, Artificial Sequence
  Description of Artificial Sequence: Synthetic oligonucleotide
caucaaagcaaguauuguagcacuc

SEQ ID NO: 104358 - RNA, 25 nt, Artificial Sequence
  Description of Artificial Sequence: Synthetic oligonucleotide
agagagagaaaacaaaaccacaaau

SEQ ID NO: 104359 - RNA, 25 nt, Artificial Sequence
  Description of Artificial Sequence: Synthetic oligonucleotide
ucgcuguaguauuuaagcccauaca

SEQ ID NO: 104360 - RNA, 25 nt, Artificial Sequence
  Description of Artificial Sequence: Synthetic oligonucleotide
cgcuguaguauuuaagcccauacag

SEQ ID NO: 104361 - RNA, 25 nt, Artificial Sequence
  Description of Artificial Sequence: Synthetic oligonucleotide
auuuaagcccauacagaaaccuucc

SEQ ID NO: 104362 - RNA, 25 nt, Artificial Sequence
  Description of Artificial Sequence: Synthetic oligonucleotide
auuaaaauaaacaugguauaccuac

SEQ ID NO: 104363 - RNA, 25 nt, Artificial Sequence
  Description of Artificial Sequence: Synthetic oligonucleotide
cuguucugaucggccaguuuucgga

SEQ ID NO: 104364 - RNA, 25 nt, Artificial Sequence
  Description of Artificial Sequence: Synthetic oligonucleotide
aaauaauuugaacuuuggaacaggg

SEQ ID NO: 104365 - RNA, 25 nt, Artificial Sequence
  Description of Artificial Sequence: Synthetic oligonucleotide
ugcgaccuuaauuuaacuuuccagu

SEQ ID NO: 104366 - RNA, 25 nt, Artificial Sequence
  Description of Artificial Sequence: Synthetic oligonucleotide
cugagaaagcuaaaguuugguuuug

SEQ ID NO: 104367 - RNA, 25 nt, Artificial Sequence
  Description of Artificial Sequence: Synthetic oligonucleotide
aguaaagaugcuacuucccacugua

SEQ ID NO: 104368 - RNA, 25 nt, Artificial Sequence
  Description of Artificial Sequence: Synthetic oligonucleotide
cugcuuaauugcugauaccauauga

SEQ ID NO: 104369 - RNA, 25 nt, Artificial Sequence
  Description of Artificial Sequence: Synthetic oligonucleotide
uaccauaugaaugaaacaugggcug

SEQ ID NO: 104370 - RNA, 25 nt, Artificial Sequence
  Description of Artificial Sequence: Synthetic oligonucleotide
aacuuucuuauccaacuuuuucaua

SEQ ID NO: 104371 - RNA, 25 nt, Artificial Sequence
  Description of Artificial Sequence: Synthetic oligonucleotide
ccuugcaugacaucaugaggccgga

SEQ ID NO: 104372 - RNA, 25 nt, Artificial Sequence
  Description of Artificial Sequence: Synthetic oligonucleotide
ugaauuuguauaugacugcauuugu

SEQ ID NO: 104373 - RNA, 25 nt, Artificial Sequence
  Description of Artificial Sequence: Synthetic oligonucleotide
gaauccuaguagaauguuuacuacc

SEQ ID NO: 104374 - RNA, 25 nt, Artificial Sequence
  Description of Artificial Sequence: Synthetic oligonucleotide
gaaagggaagaauuuuuugaugaaa

SEQ ID NO: 104375 - RNA, 25 nt, Artificial Sequence
  Description of Artificial Sequence: Synthetic oligonucleotide
uaucggcaugccagugugugaauuu

SEQ ID NO: 104376 - RNA, 25 nt, Artificial Sequence
  Description of Artificial Sequence: Synthetic oligonucleotide
caccucauaguagagcaauguaugu

SEQ ID NO: 104377 - RNA, 25 nt, Artificial Sequence
  Description of Artificial Sequence: Synthetic oligonucleotide
ccagaauugccaaagcacauauaua

SEQ ID NO: 104378 - RNA, 25 nt, Artificial Sequence
  Description of Artificial Sequence: Synthetic oligonucleotide
uggugaucuggguaauaguuucucc

SEQ ID NO: 104379 - RNA, 25 nt, Artificial Sequence
  Description of Artificial Sequence: Synthetic oligonucleotide
gaucuggguaauaguuucuccaaau

SEQ ID NO: 104380 - RNA, 25 nt, Artificial Sequence
  Description of Artificial Sequence: Synthetic oligonucleotide
ggaugugaugaauacuuccuagaaa

SEQ ID NO: 104381 - RNA, 25 nt, Artificial Sequence
  Description of Artificial Sequence: Synthetic oligonucleotide
cauuuccacagcuacaccauauaug

SEQ ID NO: 104382 - RNA, 25 nt, Artificial Sequence
  Description of Artificial Sequence: Synthetic oligonucleotide
acagcuacaccauauaugaauggag

SEQ ID NO: 104383 - RNA, 25 nt, Artificial Sequence
  Description of Artificial Sequence: Synthetic oligonucleotide
ugcaguucuuacacgagaagaagau

SEQ ID NO: 104384 - RNA, 25 nt, Artificial Sequence
  Description of Artificial Sequence: Synthetic oligonucleotide
acgagaagaagaucauuuacaggga

SEQ ID NO: 104385 - RNA, 25 nt, Artificial Sequence
  Description of Artificial Sequence: Synthetic oligonucleotide
cgagaagaagaucauuuacagggac

SEQ ID NO: 104386 - RNA, 25 nt, Artificial Sequence
  Description of Artificial Sequence: Synthetic oligonucleotide
aagaagaucauuuacagggaccuga

SEQ ID NO: 104387 - RNA, 25 nt, Artificial Sequence
  Description of Artificial Sequence: Synthetic oligonucleotide
agaggaagagguguuugacugcauc

SEQ ID NO: 104388 - RNA, 25 nt, Artificial Sequence
  Description of Artificial Sequence: Synthetic oligonucleotide
gaggaagagguguuugacugcaucg

SEQ ID NO: 104389 - RNA, 25 nt, Artificial Sequence
  Description of Artificial Sequence: Synthetic oligonucleotide
cuacuuugagggcgaguucacaggg

SEQ ID NO: 104390 - RNA, 25 nt, Artificial Sequence
  Description of Artificial Sequence: Synthetic oligonucleotide
agggcaucuccuggcaccucugucc

SEQ ID NO: 104391 - RNA, 25 nt, Artificial Sequence
  Description of Artificial Sequence: Synthetic oligonucleotide
ggagugauaugguuugucuuuuuaa

SEQ ID NO: 104392 - RNA, 25 nt, Artificial Sequence
  Description of Artificial Sequence: Synthetic oligonucleotide
gagugauaugguuugucuuuuuaag

SEQ ID NO: 104393 - RNA, 25 nt, Artificial Sequence
  Description of Artificial Sequence: Synthetic oligonucleotide
ugcaguaaagauccuaaagguuguc

SEQ ID NO: 104394 - RNA, 25 nt, Artificial Sequence
  Description of Artificial Sequence: Synthetic oligonucleotide
aguaaagauccuaaagguugucgac

SEQ ID NO: 104395 - RNA, 25 nt, Artificial Sequence
  Description of Artificial Sequence: Synthetic oligonucleotide
ugacaaaggacaaccuggcaauugu

SEQ ID NO: 104396 - RNA, 25 nt, Artificial Sequence
  Description of Artificial Sequence: Synthetic oligonucleotide
gcaauugugacccaguggugcgagg

SEQ ID NO: 104397 - RNA, 25 nt, Artificial Sequence
  Description of Artificial Sequence: Synthetic oligonucleotide
aacaucauccauagagacaugaaau

SEQ ID NO: 104398 - RNA, 25 nt, Artificial Sequence
  Description of Artificial Sequence: Synthetic oligonucleotide
ugaaauccaacaauauauuucucca

SEQ ID NO: 104399 - RNA, 25 nt, Artificial Sequence
  Description of Artificial Sequence: Synthetic oligonucleotide
aacaauauauuucuccaugaaggcu

SEQ ID NO: 104400 - RNA, 25 nt, Artificial Sequence
  Description of Artificial Sequence: Synthetic oligonucleotide
aacaguaaagucacgcuggaguggu

SEQ ID NO: 104401 - RNA, 25 nt, Artificial Sequence
  Description of Artificial Sequence: Synthetic oligonucleotide
ugugaagaaaguaaaggaagagagg

SEQ ID NO: 104402 - RNA, 25 nt, Artificial Sequence
  Description of Artificial Sequence: Synthetic oligonucleotide
cuuccgagccauccuugcaucgggc

SEQ ID NO: 104403 - RNA, 25 nt, Artificial Sequence
  Description of Artificial Sequence: Synthetic oligonucleotide
aauggagguugaauauccuacugug

SEQ ID NO: 104404 - RNA, 25 nt, Artificial Sequence
  Description of Artificial Sequence: Synthetic oligonucleotide
ggagguugaauauccuacuguguaa

SEQ ID NO: 104405 - RNA, 25 nt, Artificial Sequence
  Description of Artificial Sequence: Synthetic oligonucleotide
auuuugaguuuucccuuguagugua

SEQ ID NO: 104406 - RNA, 25 nt, Artificial Sequence
  Description of Artificial Sequence: Synthetic oligonucleotide
uauccuguuuguucuuuguugauug

SEQ ID NO: 104407 - RNA, 25 nt, Artificial Sequence
  Description of Artificial Sequence: Synthetic oligonucleotide
ccuguuuguucuuuguugauugaaa

SEQ ID NO: 104408 - RNA, 25 nt, Artificial Sequence
  Description of Artificial Sequence: Synthetic oligonucleotide
cucuacagccuucuuuuucuuccau

SEQ ID NO: 104409 - RNA, 25 nt, Artificial Sequence
  Description of Artificial Sequence: Synthetic oligonucleotide
ucuuccauagcuaaucuuccuucua

SEQ ID NO: 104410 - RNA, 25 nt, Artificial Sequence
  Description of Artificial Sequence: Synthetic oligonucleotide
auaaucuuccuguugaaugcuucau

SEQ ID NO: 104411 - RNA, 25 nt, Artificial Sequence
  Description of Artificial Sequence: Synthetic oligonucleotide
uaaucuuccuguugaaugcuucaug

SEQ ID NO: 104412 - RNA, 25 nt, Artificial Sequence
  Description of Artificial Sequence: Synthetic oligonucleotide
cuucaugacuugaauucuacuuuga

SEQ ID NO: 104413 - RNA, 25 nt, Artificial Sequence
  Description of Artificial Sequence: Synthetic oligonucleotide
aagagggagagaagcaacuacagac

SEQ ID NO: 104414 - RNA, 25 nt, Artificial Sequence
  Description of Artificial Sequence: Synthetic oligonucleotide
cgucuccuaccagaccaaggucaac

SEQ ID NO: 104415 - RNA, 25 nt, Artificial Sequence
  Description of Artificial Sequence: Synthetic oligonucleotide
gaucaaucggcccgacuaucucgac

SEQ ID NO: 104416 - RNA, 25 nt, Artificial Sequence
  Description of Artificial Sequence: Synthetic oligonucleotide
ggacgaacauccaaccuucccaaac

SEQ ID NO: 104417 - RNA, 25 nt, Artificial Sequence
  Description of Artificial Sequence: Synthetic oligonucleotide
agggucggaacccaagcuuagaacu

SEQ ID NO: 104418 - RNA, 25 nt, Artificial Sequence
  Description of Artificial Sequence: Synthetic oligonucleotide
ucggaacccaagcuuagaacuuuaa

SEQ ID NO: 104419 - RNA, 25 nt, Artificial Sequence
  Description of Artificial Sequence: Synthetic oligonucleotide
acccaagcuuagaacuuuaagcaac

SEQ ID NO: 104420 - RNA, 25 nt, Artificial Sequence
  Description of Artificial Sequence: Synthetic oligonucleotide
gaacuuuaagcaacaagaccaccac

SEQ ID NO: 104421 - RNA, 25 nt, Artificial Sequence
  Description of Artificial Sequence: Synthetic oligonucleotide
acuauucaguggcgagaaauaaagu

SEQ ID NO: 104422 - RNA, 25 nt, Artificial Sequence
  Description of Artificial Sequence: Synthetic oligonucleotide
cuauucaguggcgagaaauaaaguu

SEQ ID NO: 104423 - RNA, 25 nt, Artificial Sequence
  Description of Artificial Sequence: Synthetic oligonucleotide
aaacacagauaacaggaaaugaucc

SEQ ID NO: 104424 - RNA, 25 nt, Artificial Sequence
  Description of Artificial Sequence: Synthetic oligonucleotide
cuuaagaaaagagaagaaaugaaac

SEQ ID NO: 104425 - RNA, 25 nt, Artificial Sequence
  Description of Artificial Sequence: Synthetic oligonucleotide
cugaaggaguguguuuccauccucc

SEQ ID NO: 104426 - RNA, 25 nt, Artificial Sequence
  Description of Artificial Sequence: Synthetic oligonucleotide
ucaccgcgggacugaaaaucuuuga

SEQ ID NO: 104427 - RNA, 25 nt, Artificial Sequence
  Description of Artificial Sequence: Synthetic oligonucleotide
agcagaaauaagcgugccguucagg

SEQ ID NO: 104428 - RNA, 25 nt, Artificial Sequence
  Description of Artificial Sequence: Synthetic oligonucleotide
aagcgugccguucaggguccagaag

SEQ ID NO: 104429 - RNA, 25 nt, Artificial Sequence
  Description of Artificial Sequence: Synthetic oligonucleotide
agaaacagucacucaagacugcuug

SEQ ID NO: 104430 - RNA, 25 nt, Artificial Sequence
  Description of Artificial Sequence: Synthetic oligonucleotide
agaggaagaagguccaugucuuugg

SEQ ID NO: 104431 - RNA, 25 nt, Artificial Sequence
  Description of Artificial Sequence: Synthetic oligonucleotide
uguauucaaaauaugccugaaacac

SEQ ID NO: 104432 - RNA, 25 nt, Artificial Sequence
  Description of Artificial Sequence: Synthetic oligonucleotide
auuuuccucccuuucucuguaccuc

SEQ ID NO: 104433 - RNA, 25 nt, Artificial Sequence
  Description of Artificial Sequence: Synthetic oligonucleotide
caaagaaagauagagcaagacaaga

SEQ ID NO: 104434 - RNA, 25 nt, Artificial Sequence
  Description of Artificial Sequence: Synthetic oligonucleotide
aagaaagauagagcaagacaagaaa

SEQ ID NO: 104435 - RNA, 25 nt, Artificial Sequence
  Description of Artificial Sequence: Synthetic oligonucleotide
gaaagcauuuguuuguacaagaucc

SEQ ID NO: 104436 - RNA, 25 nt, Artificial Sequence
  Description of Artificial Sequence: Synthetic oligonucleotide
ugaguuaaacgaacguacuugcaga

SEQ ID NO: 104437 - RNA, 25 nt, Artificial Sequence
  Description of Artificial Sequence: Synthetic oligonucleotide
acugauacagaacgaucgauacaga

SEQ ID NO: 104438 - RNA, 25 nt, Artificial Sequence
  Description of Artificial Sequence: Synthetic oligonucleotide
auauuauauauauauaaaaauaaau

SEQ ID NO: 104439 - RNA, 25 nt, Artificial Sequence
  Description of Artificial Sequence: Synthetic oligonucleotide
auuauauauauauaaaaauaaauau

SEQ ID NO: 104440 - RNA, 25 nt, Artificial Sequence
  Description of Artificial Sequence: Synthetic oligonucleotide
ucacuggauguauuugacugcugug

SEQ ID NO: 104441 - RNA, 25 nt, Artificial Sequence
  Description of Artificial Sequence: Synthetic oligonucleotide
cagggaagaggaggagaugagagac

SEQ ID NO: 104442 - RNA, 25 nt, Artificial Sequence
  Description of Artificial Sequence: Synthetic oligonucleotide
augaucuuuuuuuugucccacuugg

SEQ ID NO: 104443 - RNA, 27 nt, Artificial Sequence
  Description of Artificial Sequence: Synthetic oligonucleotide
ggccgugaacuccucaucaaaauaccu

SEQ ID NO: 104444 - RNA, 27 nt, Artificial Sequence
  Description of Artificial Sequence: Synthetic oligonucleotide
uggugugauggugaucaucugggccgu

SEQ ID NO: 104445 - RNA, 27 nt, Artificial Sequence
  Description of Artificial Sequence: Synthetic oligonucleotide
aaacccgcaggauaguuuucuucccua

SEQ ID NO: 104446 - RNA, 27 nt, Artificial Sequence
  Description of Artificial Sequence: Synthetic oligonucleotide
caaacuggaugaaauaaauuaaaaccc

SEQ ID NO: 104447 - RNA, 27 nt, Artificial Sequence
  Description of Artificial Sequence: Synthetic oligonucleotide
agaaguccuuaacauuucccuacguga

SEQ ID NO: 104448 - RNA, 27 nt, Artificial Sequence
  Description of Artificial Sequence: Synthetic oligonucleotide
cucugucccacuggguaaacccuggcc

SEQ ID NO: 104449 - RNA, 27 nt, Artificial Sequence
  Description of Artificial Sequence: Synthetic oligonucleotide
cacaauaacaaauuuaaaccuugcucc

SEQ ID NO: 104450 - RNA, 27 nt, Artificial Sequence
  Description of Artificial Sequence: Synthetic oligonucleotide
aaaugcauuugaacaacauaauacaca

SEQ ID NO: 104451 - RNA, 27 nt, Artificial Sequence
  Description of Artificial Sequence: Synthetic oligonucleotide
ggcuuuccugucacaaagauuaaaaac

SEQ ID NO: 104452 - RNA, 27 nt, Artificial Sequence
  Description of Artificial Sequence: Synthetic oligonucleotide
agggcuuuccugucacaaagauuaaaa

SEQ ID NO: 104453 - RNA, 27 nt, Artificial Sequence
  Description of Artificial Sequence: Synthetic oligonucleotide
ggccaugcugggagacauaagcagcag

SEQ ID NO: 104454 - RNA, 27 nt, Artificial Sequence
  Description of Artificial Sequence: Synthetic oligonucleotide
ucagggagaagcuucugaaacacuucu

SEQ ID NO: 104455 - RNA, 27 nt, Artificial Sequence
  Description of Artificial Sequence: Synthetic oligonucleotide
aagggcuucuuccuuauugauggucag

SEQ ID NO: 104456 - RNA, 27 nt, Artificial Sequence
  Description of Artificial Sequence: Synthetic oligonucleotide
ugaagggcuucuuccuuauugaugguc

SEQ ID NO: 104457 - RNA, 27 nt, Artificial Sequence
  Description of Artificial Sequence: Synthetic oligonucleotide
cgcugaagggcuucuuccuuauugaug

SEQ ID NO: 104458 - RNA, 27 nt, Artificial Sequence
  Description of Artificial Sequence: Synthetic oligonucleotide
gccgcugaagggcuucuuccuuauuga

SEQ ID NO: 104459 - RNA, 27 nt, Artificial Sequence
  Description of Artificial Sequence: Synthetic oligonucleotide
acuggccgcugaagggcuucuuccuua

SEQ ID NO: 104460 - RNA, 27 nt, Artificial Sequence
  Description of Artificial Sequence: Synthetic oligonucleotide
cggagcuuuucaccuuuaguuaugcuu

SEQ ID NO: 104461 - RNA, 27 nt, Artificial Sequence
  Description of Artificial Sequence: Synthetic oligonucleotide
ccggagcuuuucaccuuuaguuaugcu

SEQ ID NO: 104462 - RNA, 27 nt, Artificial Sequence
  Description of Artificial Sequence: Synthetic oligonucleotide
cagacuguugacuggcgugauguaguu

SEQ ID NO: 104463 - RNA, 27 nt, Artificial Sequence
  Description of Artificial Sequence: Synthetic oligonucleotide
cuuuugaacucugcuuaaauccagugg

SEQ ID NO: 104464 - RNA, 27 nt, Artificial Sequence
  Description of Artificial Sequence: Synthetic oligonucleotide
gcuuuugaacucugcuuaaauccagug

SEQ ID NO: 104465 - RNA, 27 nt, Artificial Sequence
  Description of Artificial Sequence: Synthetic oligonucleotide
agggcuuuugaacucugcuuaaaucca

SEQ ID NO: 104466 - RNA, 27 nt, Artificial Sequence
  Description of Artificial Sequence: Synthetic oligonucleotide
aagggcuuuugaacucugcuuaaaucc

SEQ ID NO: 104467 - RNA, 27 nt, Artificial Sequence
  Description of Artificial Sequence: Synthetic oligonucleotide
ugaagggcuuuugaacucugcuuaaau

SEQ ID NO: 104468 - RNA, 27 nt, Artificial Sequence
  Description of Artificial Sequence: Synthetic oligonucleotide
cugaagggcuuuugaacucugcuuaaa

SEQ ID NO: 104469 - RNA, 27 nt, Artificial Sequence
  Description of Artificial Sequence: Synthetic oligonucleotide
cgcugaagggcuuuugaacucugcuua

SEQ ID NO: 104470 - RNA, 27 nt, Artificial Sequence
  Description of Artificial Sequence: Synthetic oligonucleotide
cgagcggcuucacucagacccugaggc

SEQ ID NO: 104471 - RNA, 27 nt, Artificial Sequence
  Description of Artificial Sequence: Synthetic oligonucleotide
uugacuggcgugauguaguugcuuggg

SEQ ID NO: 104472 - RNA, 27 nt, Artificial Sequence
  Description of Artificial Sequence: Synthetic oligonucleotide
cacgcaccaagaagcugccauugaucc

SEQ ID NO: 104473 - RNA, 27 nt, Artificial Sequence
  Description of Artificial Sequence: Synthetic oligonucleotide
cugaugaauccaaugugggcuggaauc

SEQ ID NO: 104474 - RNA, 27 nt, Artificial Sequence
  Description of Artificial Sequence: Synthetic oligonucleotide
cuuagguauuccacauucucagcugug

SEQ ID NO: 104475 - RNA, 27 nt, Artificial Sequence
  Description of Artificial Sequence: Synthetic oligonucleotide
ugagccucaaauuaggagauacguuuu

SEQ ID NO: 104476 - RNA, 27 nt, Artificial Sequence
  Description of Artificial Sequence: Synthetic oligonucleotide
ccaauuguagagaaauuauuuuaggaa

SEQ ID NO: 104477 - RNA, 27 nt, Artificial Sequence
  Description of Artificial Sequence: Synthetic oligonucleotide
ggcuccuaacuagcugaaucuuccaau

SEQ ID NO: 104478 - RNA, 27 nt, Artificial Sequence
  Description of Artificial Sequence: Synthetic oligonucleotide
guggauauugacuaggagaguuuaaaa

SEQ ID NO: 104479 - RNA, 27 nt, Artificial Sequence
  Description of Artificial Sequence: Synthetic oligonucleotide
ugugacugaacauaacuguaggcugaa

SEQ ID NO: 104480 - RNA, 27 nt, Artificial Sequence
  Description of Artificial Sequence: Synthetic oligonucleotide
guaugugugugugacugaacauaacug

SEQ ID NO: 104481 - RNA, 27 nt, Artificial Sequence
  Description of Artificial Sequence: Synthetic oligonucleotide
aagcaaaaggaacauuuuguaugugug

SEQ ID NO: 104482 - RNA, 27 nt, Artificial Sequence
  Description of Artificial Sequence: Synthetic oligonucleotide
aaaaauuacuuuaaaagcaaaaggaac

SEQ ID NO: 104483 - RNA, 27 nt, Artificial Sequence
  Description of Artificial Sequence: Synthetic oligonucleotide
ccauugacuguugcuucacaggucaga

SEQ ID NO: 104484 - RNA, 27 nt, Artificial Sequence
  Description of Artificial Sequence: Synthetic oligonucleotide
auugguuugucgaugugugagauaguu

SEQ ID NO: 104485 - RNA, 27 nt, Artificial Sequence
  Description of Artificial Sequence: Synthetic oligonucleotide
agugguagcaguacaauugaggacaag

SEQ ID NO: 104486 - RNA, 27 nt, Artificial Sequence
  Description of Artificial Sequence: Synthetic oligonucleotide
uaagaccgcuugccagcuacgguuuca

SEQ ID NO: 104487 - RNA, 27 nt, Artificial Sequence
  Description of Artificial Sequence: Synthetic oligonucleotide
agccgguaagaccgcuugccagcuacg

SEQ ID NO: 104488 - RNA, 27 nt, Artificial Sequence
  Description of Artificial Sequence: Synthetic oligonucleotide
gguaacccaucuuuuaaccauacaacu

SEQ ID NO: 104489 - RNA, 27 nt, Artificial Sequence
  Description of Artificial Sequence: Synthetic oligonucleotide
ucgcagguaacccaucuuuuaaccaua

SEQ ID NO: 104490 - RNA, 27 nt, Artificial Sequence
  Description of Artificial Sequence: Synthetic oligonucleotide
cucagcaagauuguauaauucccugca

SEQ ID NO: 104491 - RNA, 27 nt, Artificial Sequence
  Description of Artificial Sequence: Synthetic oligonucleotide
acuguuuuaugcucagcaagauuguau

SEQ ID NO: 104492 - RNA, 27 nt, Artificial Sequence
  Description of Artificial Sequence: Synthetic oligonucleotide
aggauaaaggacucuucauuauuggaa

SEQ ID NO: 104493 - RNA, 27 nt, Artificial Sequence
  Description of Artificial Sequence: Synthetic oligonucleotide
caacuugcguuggaacauccaaagugu

SEQ ID NO: 104494 - RNA, 27 nt, Artificial Sequence
  Description of Artificial Sequence: Synthetic oligonucleotide
augguuucaguuuaguggaagcauuua

SEQ ID NO: 104495 - RNA, 27 nt, Artificial Sequence
  Description of Artificial Sequence: Synthetic oligonucleotide
auauuuaacaaagucaaacuuucucac

SEQ ID NO: 104496 - RNA, 27 nt, Artificial Sequence
  Description of Artificial Sequence: Synthetic oligonucleotide
aacuuuuaauauacaguaguucuuuuc

SEQ ID NO: 104497 - RNA, 27 nt, Artificial Sequence
  Description of Artificial Sequence: Synthetic oligonucleotide
guuaagucaaaacccguauuucuaaag

SEQ ID NO: 104498 - RNA, 27 nt, Artificial Sequence
  Description of Artificial Sequence: Synthetic oligonucleotide
gugcugaguuugcuguacccauguuga

SEQ ID NO: 104499 - RNA, 27 nt, Artificial Sequence
  Description of Artificial Sequence: Synthetic oligonucleotide
ugaggucagcaucuucugugucuuuac

SEQ ID NO: 104500 - RNA, 27 nt, Artificial Sequence
  Description of Artificial Sequence: Synthetic oligonucleotide
gcgaucugaauaaaccucccuacuagc

SEQ ID NO: 104501 - RNA, 27 nt, Artificial Sequence
  Description of Artificial Sequence: Synthetic oligonucleotide
aucccagaacccugcugcagaaggcca

SEQ ID NO: 104502 - RNA, 27 nt, Artificial Sequence
  Description of Artificial Sequence: Synthetic oligonucleotide
cauaauuuccaauauguaccagaccuu

SEQ ID NO: 104503 - RNA, 27 nt, Artificial Sequence
  Description of Artificial Sequence: Synthetic oligonucleotide
cuagugcuuccaucggaaggacuaggu

SEQ ID NO: 104504 - RNA, 27 nt, Artificial Sequence
  Description of Artificial Sequence: Synthetic oligonucleotide
uccacauaaaaacaauauucacuggga

SEQ ID NO: 104505 - RNA, 27 nt, Artificial Sequence
  Description of Artificial Sequence: Synthetic oligonucleotide
ucuaccaauuccaacuugaauucauug

SEQ ID NO: 104506 - RNA, 27 nt, Artificial Sequence
  Description of Artificial Sequence: Synthetic oligonucleotide
ucuccaagucuaaaucuguguccugag

SEQ ID NO: 104507 - RNA, 27 nt, Artificial Sequence
  Description of Artificial Sequence: Synthetic oligonucleotide
uggaauacuguaacugugcuuugagga

SEQ ID NO: 104508 - RNA, 27 nt, Artificial Sequence
  Description of Artificial Sequence: Synthetic oligonucleotide
uuaauucaucagugguggcagugguag

SEQ ID NO: 104509 - RNA, 27 nt, Artificial Sequence
  Description of Artificial Sequence: Synthetic oligonucleotide
gugaugauguggcacuaguaguuucuu

SEQ ID NO: 104510 - RNA, 27 nt, Artificial Sequence
  Description of Artificial Sequence: Synthetic oligonucleotide
ucuguuuggugaggcuguccgacuuug

SEQ ID NO: 104511 - RNA, 27 nt, Artificial Sequence
  Description of Artificial Sequence: Synthetic oligonucleotide
ccaucauguuccauuuuucgcuuucuc

SEQ ID NO: 104512 - RNA, 27 nt, Artificial Sequence
  Description of Artificial Sequence: Synthetic oligonucleotide
gcagucuacaugcuaaaucagagggua

SEQ ID NO: 104513 - RNA, 27 nt, Artificial Sequence
  Description of Artificial Sequence: Synthetic oligonucleotide
cauaaauagauccuuaaauagcucaaa

SEQ ID NO: 104514 - RNA, 27 nt, Artificial Sequence
  Description of Artificial Sequence: Synthetic oligonucleotide
ugauaauagugcuuuuucaccuuuuuc

SEQ ID NO: 104515 - RNA, 27 nt, Artificial Sequence
  Description of Artificial Sequence: Synthetic oligonucleotide
gcagaacugauaauagugcuuuuucac

SEQ ID NO: 104516 - RNA, 27 nt, Artificial Sequence
  Description of Artificial Sequence: Synthetic oligonucleotide
guagguuuaaucuuucuuuucagccau

SEQ ID NO: 104517 - RNA, 27 nt, Artificial Sequence
  Description of Artificial Sequence: Synthetic oligonucleotide
agaaggauuuuauuauaaggguuuaau

SEQ ID NO: 104518 - RNA, 27 nt, Artificial Sequence
  Description of Artificial Sequence: Synthetic oligonucleotide
gucuacagcauuggcuaauaguaugaa

SEQ ID NO: 104519 - RNA, 27 nt, Artificial Sequence
  Description of Artificial Sequence: Synthetic oligonucleotide
cuauuccuaucaaaaugcuucugucua

SEQ ID NO: 104520 - RNA, 27 nt, Artificial Sequence
  Description of Artificial Sequence: Synthetic oligonucleotide
ucagggccauuaucuuauuugcucuau

SEQ ID NO: 104521 - RNA, 27 nt, Artificial Sequence
  Description of Artificial Sequence: Synthetic oligonucleotide
ugcuugaggaagagaaaaauguugguc

SEQ ID NO: 104522 - RNA, 27 nt, Artificial Sequence
  Description of Artificial Sequence: Synthetic oligonucleotide
ugggcugaacuuuucucauacuuaaag

SEQ ID NO: 104523 - RNA, 27 nt, Artificial Sequence
  Description of Artificial Sequence: Synthetic oligonucleotide
gguucagcagccaucuuuauuccugcg

SEQ ID NO: 104524 - RNA, 27 nt, Artificial Sequence
  Description of Artificial Sequence: Synthetic oligonucleotide
ugaagagaacuuggucauucaaauuuc

SEQ ID NO: 104525 - RNA, 27 nt, Artificial Sequence
  Description of Artificial Sequence: Synthetic oligonucleotide
cucuaggcuggcuaucuuuauacauac

SEQ ID NO: 104526 - RNA, 27 nt, Artificial Sequence
  Description of Artificial Sequence: Synthetic oligonucleotide
acacuucacagagauaguuacagccau

SEQ ID NO: 104527 - RNA, 27 nt, Artificial Sequence
  Description of Artificial Sequence: Synthetic oligonucleotide
uugaaauuuucucacacuucacagaga

SEQ ID NO: 104528 - RNA, 27 nt, Artificial Sequence
  Description of Artificial Sequence: Synthetic oligonucleotide
ucaggaggauucauuuccuuaaaggaa

SEQ ID NO: 104529 - RNA, 27 nt, Artificial Sequence
  Description of Artificial Sequence: Synthetic oligonucleotide
auaugaugucacuuuuuguauccuuga

SEQ ID NO: 104530 - RNA, 27 nt, Artificial Sequence
  Description of Artificial Sequence: Synthetic oligonucleotide
uaugaugaagauucaaauugcaucuua

SEQ ID NO: 104531 - RNA, 27 nt, Artificial Sequence
  Description of Artificial Sequence: Synthetic oligonucleotide
uuaauagcuagucuucguuuugaacag

SEQ ID NO: 104532 - RNA, 27 nt, Artificial Sequence
  Description of Artificial Sequence: Synthetic oligonucleotide
auuuuuaguagagaugagguuucacca

SEQ ID NO: 104533 - RNA, 27 nt, Artificial Sequence
  Description of Artificial Sequence: Synthetic oligonucleotide
aggcgagauagagcuucucuuucguuc

SEQ ID NO: 104534 - RNA, 27 nt, Artificial Sequence
  Description of Artificial Sequence: Synthetic oligonucleotide
aacuggaccgaaggcgcuuguggagaa

SEQ ID NO: 104535 - RNA, 27 nt, Artificial Sequence
  Description of Artificial Sequence: Synthetic oligonucleotide
gcggcuacaucuuuggaaucuucuccu

SEQ ID NO: 104536 - RNA, 27 nt, Artificial Sequence
  Description of Artificial Sequence: Synthetic oligonucleotide
caagucuccucauugaauccagauugg

SEQ ID NO: 104537 - RNA, 27 nt, Artificial Sequence
  Description of Artificial Sequence: Synthetic oligonucleotide
uccucacuacucucaaaucuguucugg

SEQ ID NO: 104538 - RNA, 27 nt, Artificial Sequence
  Description of Artificial Sequence: Synthetic oligonucleotide
uuuguacucaucugcacagcucuggcu

SEQ ID NO: 104539 - RNA, 27 nt, Artificial Sequence
  Description of Artificial Sequence: Synthetic oligonucleotide
gcccauuaacaacaacaaucugaggug

SEQ ID NO: 104540 - RNA, 27 nt, Artificial Sequence
  Description of Artificial Sequence: Synthetic oligonucleotide
aauaaauuaaaaauaauuaaaauagug

SEQ ID NO: 104541 - RNA, 27 nt, Artificial Sequence
  Description of Artificial Sequence: Synthetic oligonucleotide
cauauuuaaauauuaauaaauuaaaaa

SEQ ID NO: 104542 - RNA, 27 nt, Artificial Sequence
  Description of Artificial Sequence: Synthetic oligonucleotide
gaaacaaaggauauucaaacugcauag

SEQ ID NO: 104543 - RNA, 27 nt, Artificial Sequence
  Description of Artificial Sequence: Synthetic oligonucleotide
caaacacuuagacgccagcagcauggg

SEQ ID NO: 104544 - RNA, 27 nt, Artificial Sequence
  Description of Artificial Sequence: Synthetic oligonucleotide
uuugucacaggugaaaugcacaucuga

SEQ ID NO: 104545 - RNA, 27 nt, Artificial Sequence
  Description of Artificial Sequence: Synthetic oligonucleotide
uaauucagccuggcacagguuuugauc

SEQ ID NO: 104546 - RNA, 27 nt, Artificial Sequence
  Description of Artificial Sequence: Synthetic oligonucleotide
auuguaagaaugacuacccacauucac

SEQ ID NO: 104547 - RNA, 27 nt, Artificial Sequence
  Description of Artificial Sequence: Synthetic oligonucleotide
caauuguaagaaugacuacccacauuc

SEQ ID NO: 104548 - RNA, 27 nt, Artificial Sequence
  Description of Artificial Sequence: Synthetic oligonucleotide
guacacucucugaugcucauuuucaua

SEQ ID NO: 104549 - RNA, 27 nt, Artificial Sequence
  Description of Artificial Sequence: Synthetic oligonucleotide
cugcugaguucuacaugaaaagcaaau

SEQ ID NO: 104550 - RNA, 27 nt, Artificial Sequence
  Description of Artificial Sequence: Synthetic oligonucleotide
uacugaaaauaaauauagaaauacaac

SEQ ID NO: 104551 - RNA, 27 nt, Artificial Sequence
  Description of Artificial Sequence: Synthetic oligonucleotide
uuccauuuaagaaacauuaaucaaaac

SEQ ID NO: 104552 - RNA, 27 nt, Artificial Sequence
  Description of Artificial Sequence: Synthetic oligonucleotide
acaauuuuaggcacuauacacguuguu

SEQ ID NO: 104553 - RNA, 27 nt, Artificial Sequence
  Description of Artificial Sequence: Synthetic oligonucleotide
ccagauguuaguagccaaggauauggu

SEQ ID NO: 104554 - RNA, 27 nt, Artificial Sequence
  Description of Artificial Sequence: Synthetic oligonucleotide
agcucacagucuccagauguuaguagc

SEQ ID NO: 104555 - RNA, 27 nt, Artificial Sequence
  Description of Artificial Sequence: Synthetic oligonucleotide
auuaauaaaaagcacacaacuuauggc

SEQ ID NO: 104556 - RNA, 27 nt, Artificial Sequence
  Description of Artificial Sequence: Synthetic oligonucleotide
aauguaagaagagccaaaaugaugcau

SEQ ID NO: 104557 - RNA, 27 nt, Artificial Sequence
  Description of Artificial Sequence: Synthetic oligonucleotide
acauuuuuacaaauguaagaagagcca

SEQ ID NO: 104558 - RNA, 27 nt, Artificial Sequence
  Description of Artificial Sequence: Synthetic oligonucleotide
aauaugaauuaagaugaccuaaucugu

SEQ ID NO: 104559 - RNA, 27 nt, Artificial Sequence
  Description of Artificial Sequence: Synthetic oligonucleotide
ucaugauuaguucuuucaauuccaucc

SEQ ID NO: 104560 - RNA, 27 nt, Artificial Sequence
  Description of Artificial Sequence: Synthetic oligonucleotide
cccaagagcagaaggaaugagugugca

SEQ ID NO: 104561 - RNA, 27 nt, Artificial Sequence
  Description of Artificial Sequence: Synthetic oligonucleotide
cucaaagcuacugguuaccucuacacc

SEQ ID NO: 104562 - RNA, 27 nt, Artificial Sequence
  Description of Artificial Sequence: Synthetic oligonucleotide
ugaaauauuacguggcaugugguuggg

SEQ ID NO: 104563 - RNA, 27 nt, Artificial Sequence
  Description of Artificial Sequence: Synthetic oligonucleotide
agugaagagaauaacuuguuuccgaag

SEQ ID NO: 104564 - RNA, 27 nt, Artificial Sequence
  Description of Artificial Sequence: Synthetic oligonucleotide
uuucuuagcauuaguuauugggaguga

SEQ ID NO: 104565 - RNA, 27 nt, Artificial Sequence
  Description of Artificial Sequence: Synthetic oligonucleotide
uugauuuucagcauuucuuagcauuag

SEQ ID NO: 104566 - RNA, 27 nt, Artificial Sequence
  Description of Artificial Sequence: Synthetic oligonucleotide
aaaguaaucauauuuagagaaagacag

SEQ ID NO: 104567 - RNA, 27 nt, Artificial Sequence
  Description of Artificial Sequence: Synthetic oligonucleotide
uguagaacaaaaugccugaaauucagc

SEQ ID NO: 104568 - RNA, 27 nt, Artificial Sequence
  Description of Artificial Sequence: Synthetic oligonucleotide
gagagucccgggugagagggaaucgcc

SEQ ID NO: 104569 - RNA, 27 nt, Artificial Sequence
  Description of Artificial Sequence: Synthetic oligonucleotide
cuuuacuuuaaagguucacuuuccuug

SEQ ID NO: 104570 - RNA, 27 nt, Artificial Sequence
  Description of Artificial Sequence: Synthetic oligonucleotide
ccaggcuuccagagcaugcagccuccu

SEQ ID NO: 104571 - RNA, 27 nt, Artificial Sequence
  Description of Artificial Sequence: Synthetic oligonucleotide
cucucuuuuguuuucuguucagagaaa

SEQ ID NO: 104572 - RNA, 27 nt, Artificial Sequence
  Description of Artificial Sequence: Synthetic oligonucleotide
cggcauaacugauuacagccaaguuca

SEQ ID NO: 104573 - RNA, 27 nt, Artificial Sequence
  Description of Artificial Sequence: Synthetic oligonucleotide
uggacuucuuuuaauuuuggcuucuuc

SEQ ID NO: 104574 - RNA, 27 nt, Artificial Sequence
  Description of Artificial Sequence: Synthetic oligonucleotide
uaaccucaccuggacuucuuuuaauuu

SEQ ID NO: 104575 - RNA, 27 nt, Artificial Sequence
  Description of Artificial Sequence: Synthetic oligonucleotide
guccucuucccgauaauccggauucag

SEQ ID NO: 104576 - RNA, 27 nt, Artificial Sequence
  Description of Artificial Sequence: Synthetic oligonucleotide
acaauacuugcuuugaugucacauuaa

SEQ ID NO: 104577 - RNA, 27 nt, Artificial Sequence
  Description of Artificial Sequence: Synthetic oligonucleotide
gagugcuacaauacuugcuuugauguc

SEQ ID NO: 104578 - RNA, 27 nt, Artificial Sequence
  Description of Artificial Sequence: Synthetic oligonucleotide
auuugugguuuuguuuucucucucucu

SEQ ID NO: 104579 - RNA, 27 nt, Artificial Sequence
  Description of Artificial Sequence: Synthetic oligonucleotide
uguaugggcuuaaauacuacagcgagg

SEQ ID NO: 104580 - RNA, 27 nt, Artificial Sequence
  Description of Artificial Sequence: Synthetic oligonucleotide
cuguaugggcuuaaauacuacagcgag

SEQ ID NO: 104581 - RNA, 27 nt, Artificial Sequence
  Description of Artificial Sequence: Synthetic oligonucleotide
ggaagguuucuguaugggcuuaaauac

SEQ ID NO: 104582 - RNA, 27 nt, Artificial Sequence
  Description of Artificial Sequence: Synthetic oligonucleotide
guagguauaccauguuuauuuuaauac

SEQ ID NO: 104583 - RNA, 27 nt, Artificial Sequence
  Description of Artificial Sequence: Synthetic oligonucleotide
uccgaaaacuggccgaucagaacagcc

SEQ ID NO: 104584 - RNA, 27 nt, Artificial Sequence
  Description of Artificial Sequence: Synthetic oligonucleotide
cccuguuccaaaguucaaauuauuugu

SEQ ID NO: 104585 - RNA, 27 nt, Artificial Sequence
  Description of Artificial Sequence: Synthetic oligonucleotide
acuggaaaguuaaauuaaggucgcaau

SEQ ID NO: 104586 - RNA, 27 nt, Artificial Sequence
  Description of Artificial Sequence: Synthetic oligonucleotide
caaaaccaaacuuuagcuuucucagcc

SEQ ID NO: 104587 - RNA, 27 nt, Artificial Sequence
  Description of Artificial Sequence: Synthetic oligonucleotide
uacagugggaaguagcaucuuuacuuu

SEQ ID NO: 104588 - RNA, 27 nt, Artificial Sequence
  Description of Artificial Sequence: Synthetic oligonucleotide
ucauaugguaucagcaauuaagcagua

SEQ ID NO: 104589 - RNA, 27 nt, Artificial Sequence
  Description of Artificial Sequence: Synthetic oligonucleotide
cagcccauguuucauucauaugguauc

SEQ ID NO: 104590 - RNA, 27 nt, Artificial Sequence
  Description of Artificial Sequence: Synthetic oligonucleotide
uaugaaaaaguuggauaagaaaguugg

SEQ ID NO: 104591 - RNA, 27 nt, Artificial Sequence
  Description of Artificial Sequence: Synthetic oligonucleotide
uccggccucaugaugucaugcaaggcu

SEQ ID NO: 104592 - RNA, 27 nt, Artificial Sequence
  Description of Artificial Sequence: Synthetic oligonucleotide
acaaaugcagucauauacaaauucagg

SEQ ID NO: 104593 - RNA, 27 nt, Artificial Sequence
  Description of Artificial Sequence: Synthetic oligonucleotide
gguaguaaacauucuacuaggauucuu

SEQ ID NO: 104594 - RNA, 27 nt, Artificial Sequence
  Description of Artificial Sequence: Synthetic oligonucleotide
uuucaucaaaaaauucuucccuuucug

SEQ ID NO: 104595 - RNA, 27 nt, Artificial Sequence
  Description of Artificial Sequence: Synthetic oligonucleotide
aaauucacacacuggcaugccgauagc

SEQ ID NO: 104596 - RNA, 27 nt, Artificial Sequence
  Description of Artificial Sequence: Synthetic oligonucleotide
acauacauugcucuacuaugaggugaa

SEQ ID NO: 104597 - RNA, 27 nt, Artificial Sequence
  Description of Artificial Sequence: Synthetic oligonucleotide
uauauaugugcuuuggcaauucuggug

SEQ ID NO: 104598 - RNA, 27 nt, Artificial Sequence
  Description of Artificial Sequence: Synthetic oligonucleotide
ggagaaacuauuacccagaucaccacu

SEQ ID NO: 104599 - RNA, 27 nt, Artificial Sequence
  Description of Artificial Sequence: Synthetic oligonucleotide
auuuggagaaacuauuacccagaucac

SEQ ID NO: 104600 - RNA, 27 nt, Artificial Sequence
  Description of Artificial Sequence: Synthetic oligonucleotide
uuucuaggaaguauucaucacauccac

SEQ ID NO: 104601 - RNA, 27 nt, Artificial Sequence
  Description of Artificial Sequence: Synthetic oligonucleotide
cauauaugguguagcuguggaaaugcg

SEQ ID NO: 104602 - RNA, 27 nt, Artificial Sequence
  Description of Artificial Sequence: Synthetic oligonucleotide
cuccauucauauaugguguagcugugg

SEQ ID NO: 104603 - RNA, 27 nt, Artificial Sequence
  Description of Artificial Sequence: Synthetic oligonucleotide
aucuucuucucguguaagaacugcagc

SEQ ID NO: 104604 - RNA, 27 nt, Artificial Sequence
  Description of Artificial Sequence: Synthetic oligonucleotide
ucccuguaaaugaucuucuucucgugu

SEQ ID NO: 104605 - RNA, 27 nt, Artificial Sequence
  Description of Artificial Sequence: Synthetic oligonucleotide
gucccuguaaaugaucuucuucucgug

SEQ ID NO: 104606 - RNA, 27 nt, Artificial Sequence
  Description of Artificial Sequence: Synthetic oligonucleotide
ucaggucccuguaaaugaucuucuucu

SEQ ID NO: 104607 - RNA, 27 nt, Artificial Sequence
  Description of Artificial Sequence: Synthetic oligonucleotide
gaugcagucaaacaccucuuccucugu

SEQ ID NO: 104608 - RNA, 27 nt, Artificial Sequence
  Description of Artificial Sequence: Synthetic oligonucleotide
cgaugcagucaaacaccucuuccucug

SEQ ID NO: 104609 - RNA, 27 nt, Artificial Sequence
  Description of Artificial Sequence: Synthetic oligonucleotide
cccugugaacucgcccucaaaguagcg

SEQ ID NO: 104610 - RNA, 27 nt, Artificial Sequence
  Description of Artificial Sequence: Synthetic oligonucleotide
ggacagaggugccaggagaugcccuca

SEQ ID NO: 104611 - RNA, 27 nt, Artificial Sequence
  Description of Artificial Sequence: Synthetic oligonucleotide
uuaaaaagacaaaccauaucacuccuu

SEQ ID NO: 104612 - RNA, 27 nt, Artificial Sequence
  Description of Artificial Sequence: Synthetic oligonucleotide
cuuaaaaagacaaaccauaucacuccu

SEQ ID NO: 104613 - RNA, 27 nt, Artificial Sequence
  Description of Artificial Sequence: Synthetic oligonucleotide
gacaaccuuuaggaucuuuacugcaac

SEQ ID NO: 104614 - RNA, 27 nt, Artificial Sequence
  Description of Artificial Sequence: Synthetic oligonucleotide
gucgacaaccuuuaggaucuuuacugc

SEQ ID NO: 104615 - RNA, 27 nt, Artificial Sequence
  Description of Artificial Sequence: Synthetic oligonucleotide
acaauugccagguuguccuuugucaug

SEQ ID NO: 104616 - RNA, 27 nt, Artificial Sequence
  Description of Artificial Sequence: Synthetic oligonucleotide
ccucgcaccacugggucacaauugcca

SEQ ID NO: 104617 - RNA, 27 nt, Artificial Sequence
  Description of Artificial Sequence: Synthetic oligonucleotide
auuucaugucucuauggaugauguucu

SEQ ID NO: 104618 - RNA, 27 nt, Artificial Sequence
  Description of Artificial Sequence: Synthetic oligonucleotide
uggagaaauauauuguuggauuucaug

SEQ ID NO: 104619 - RNA, 27 nt, Artificial Sequence
  Description of Artificial Sequence: Synthetic oligonucleotide
agccuucauggagaaauauauuguugg

SEQ ID NO: 104620 - RNA, 27 nt, Artificial Sequence
  Description of Artificial Sequence: Synthetic oligonucleotide
accacuccagcgugacuuuacuguugc

SEQ ID NO: 104621 - RNA, 27 nt, Artificial Sequence
  Description of Artificial Sequence: Synthetic oligonucleotide
ccucucuuccuuuacuuucuucacaca

SEQ ID NO: 104622 - RNA, 27 nt, Artificial Sequence
  Description of Artificial Sequence: Synthetic oligonucleotide
gcccgaugcaaggauggcucggaagcg

SEQ ID NO: 104623 - RNA, 27 nt, Artificial Sequence
  Description of Artificial Sequence: Synthetic oligonucleotide
cacaguaggauauucaaccuccauuuc

SEQ ID NO: 104624 - RNA, 27 nt, Artificial Sequence
  Description of Artificial Sequence: Synthetic oligonucleotide
uuacacaguaggauauucaaccuccau

SEQ ID NO: 104625 - RNA, 27 nt, Artificial Sequence
  Description of Artificial Sequence: Synthetic oligonucleotide
uacacuacaagggaaaacucaaaaucu

SEQ ID NO: 104626 - RNA, 27 nt, Artificial Sequence
  Description of Artificial Sequence: Synthetic oligonucleotide
caaucaacaaagaacaaacaggauaaa

SEQ ID NO: 104627 - RNA, 27 nt, Artificial Sequence
  Description of Artificial Sequence: Synthetic oligonucleotide
uuucaaucaacaaagaacaaacaggau

SEQ ID NO: 104628 - RNA, 27 nt, Artificial Sequence
  Description of Artificial Sequence: Synthetic oligonucleotide
auggaagaaaaagaaggcuguagagaa

SEQ ID NO: 104629 - RNA, 27 nt, Artificial Sequence
  Description of Artificial Sequence: Synthetic oligonucleotide
uagaaggaagauuagcuauggaagaaa

SEQ ID NO: 104630 - RNA, 27 nt, Artificial Sequence
  Description of Artificial Sequence: Synthetic oligonucleotide
augaagcauucaacaggaagauuauuu

SEQ ID NO: 104631 - RNA, 27 nt, Artificial Sequence
  Description of Artificial Sequence: Synthetic oligonucleotide
caugaagcauucaacaggaagauuauu

SEQ ID NO: 104632 - RNA, 27 nt, Artificial Sequence
  Description of Artificial Sequence: Synthetic oligonucleotide
ucaaaguagaauucaagucaugaagca

SEQ ID NO: 104633 - RNA, 27 nt, Artificial Sequence
  Description of Artificial Sequence: Synthetic oligonucleotide
gucuguaguugcuucucucccucuuag

SEQ ID NO: 104634 - RNA, 27 nt, Artificial Sequence
  Description of Artificial Sequence: Synthetic oligonucleotide
guugaccuuggucugguaggagacggc

SEQ ID NO: 104635 - RNA, 27 nt, Artificial Sequence
  Description of Artificial Sequence: Synthetic oligonucleotide
gucgagauagucgggccgauugaucuc

SEQ ID NO: 104636 - RNA, 27 nt, Artificial Sequence
  Description of Artificial Sequence: Synthetic oligonucleotide
guuugggaagguuggauguucguccuc

SEQ ID NO: 104637 - RNA, 27 nt, Artificial Sequence
  Description of Artificial Sequence: Synthetic oligonucleotide
aguucuaagcuuggguuccgacccuaa

SEQ ID NO: 104638 - RNA, 27 nt, Artificial Sequence
  Description of Artificial Sequence: Synthetic oligonucleotide
uuaaaguucuaagcuuggguuccgacc

SEQ ID NO: 104639 - RNA, 27 nt, Artificial Sequence
  Description of Artificial Sequence: Synthetic oligonucleotide
guugcuuaaaguucuaagcuuggguuc

SEQ ID NO: 104640 - RNA, 27 nt, Artificial Sequence
  Description of Artificial Sequence: Synthetic oligonucleotide
gugguggucuuguugcuuaaaguucua

SEQ ID NO: 104641 - RNA, 27 nt, Artificial Sequence
  Description of Artificial Sequence: Synthetic oligonucleotide
acuuuauuucucgccacugaauaguag

SEQ ID NO: 104642 - RNA, 27 nt, Artificial Sequence
  Description of Artificial Sequence: Synthetic oligonucleotide
aacuuuauuucucgccacugaauagua

SEQ ID NO: 104643 - RNA, 27 nt, Artificial Sequence
  Description of Artificial Sequence: Synthetic oligonucleotide
ggaucauuuccuguuaucuguguuugu

SEQ ID NO: 104644 - RNA, 27 nt, Artificial Sequence
  Description of Artificial Sequence: Synthetic oligonucleotide
guuucauuucuucucuuuucuuaaggc

SEQ ID NO: 104645 - RNA, 27 nt, Artificial Sequence
  Description of Artificial Sequence: Synthetic oligonucleotide
ggaggauggaaacacacuccuucaguu

SEQ ID NO: 104646 - RNA, 27 nt, Artificial Sequence
  Description of Artificial Sequence: Synthetic oligonucleotide
ucaaagauuuucagucccgcggugaca

SEQ ID NO: 104647 - RNA, 27 nt, Artificial Sequence
  Description of Artificial Sequence: Synthetic oligonucleotide
ccugaacggcacgcuuauuucugcugu

SEQ ID NO: 104648 - RNA, 27 nt, Artificial Sequence
  Description of Artificial Sequence: Synthetic oligonucleotide
cuucuggacccugaacggcacgcuuau

SEQ ID NO: 104649 - RNA, 27 nt, Artificial Sequence
  Description of Artificial Sequence: Synthetic oligonucleotide
caagcagucuugagugacuguuucuuc

SEQ ID NO: 104650 - RNA, 27 nt, Artificial Sequence
  Description of Artificial Sequence: Synthetic oligonucleotide
ccaaagacauggaccuucuuccucuga

SEQ ID NO: 104651 - RNA, 27 nt, Artificial Sequence
  Description of Artificial Sequence: Synthetic oligonucleotide
guguuucaggcauauuuugaauacauc

SEQ ID NO: 104652 - RNA, 27 nt, Artificial Sequence
  Description of Artificial Sequence: Synthetic oligonucleotide
gagguacagagaaagggaggaaaauag

SEQ ID NO: 104653 - RNA, 27 nt, Artificial Sequence
  Description of Artificial Sequence: Synthetic oligonucleotide
ucuugucuugcucuaucuuucuuuggu

SEQ ID NO: 104654 - RNA, 27 nt, Artificial Sequence
  Description of Artificial Sequence: Synthetic oligonucleotide
uuucuugucuugcucuaucuuucuuug

SEQ ID NO: 104655 - RNA, 27 nt, Artificial Sequence
  Description of Artificial Sequence: Synthetic oligonucleotide
ggaucuuguacaaacaaaugcuuucuc

SEQ ID NO: 104656 - RNA, 27 nt, Artificial Sequence
  Description of Artificial Sequence: Synthetic oligonucleotide
ucugcaaguacguucguuuaacucaag

SEQ ID NO: 104657 - RNA, 27 nt, Artificial Sequence
  Description of Artificial Sequence: Synthetic oligonucleotide
ucuguaucgaucguucuguaucagucu

SEQ ID NO: 104658 - RNA, 27 nt, Artificial Sequence
  Description of Artificial Sequence: Synthetic oligonucleotide
auuuauuuuuauauauauauaauauau

SEQ ID NO: 104659 - RNA, 27 nt, Artificial Sequence
  Description of Artificial Sequence: Synthetic oligonucleotide
auauuuauuuuuauauauauauaauau

SEQ ID NO: 104660 - RNA, 27 nt, Artificial Sequence
  Description of Artificial Sequence: Synthetic oligonucleotide
cacagcagucaaauacauccagugaag

SEQ ID NO: 104661 - RNA, 27 nt, Artificial Sequence
  Description of Artificial Sequence: Synthetic oligonucleotide
gucucucaucuccuccucuucccuguc

SEQ ID NO: 104662 - RNA, 27 nt, Artificial Sequence
  Description of Artificial Sequence: Synthetic oligonucleotide
ccaagugggacaaaaaaaagaucaugc

SEQ ID NO: 104663 - RNA, 14 nt, Artificial Sequence
  Description of Artificial Sequence: Synthetic oligonucleotide
guauuuugaugagg

SEQ ID NO: 104664 - RNA, 12 nt, Artificial Sequence
  Description of Artificial Sequence: Synthetic oligonucleotide
ggcccagaugau

SEQ ID NO: 104665 - RNA, 14 nt, Artificial Sequence
  Description of Artificial Sequence: Synthetic oligonucleotide
gggaagaaaacuau

SEQ ID NO: 104666 - RNA, 15 nt, Artificial Sequence
  Description of Artificial Sequence: Synthetic oligonucleotide
guuuuaauuuauuuc

SEQ ID NO: 104667 - RNA, 12 nt, Artificial Sequence
  Description of Artificial Sequence: Synthetic oligonucleotide
acguagggaaau

SEQ ID NO: 104668 - RNA, 12 nt, Artificial Sequence
  Description of Artificial Sequence: Synthetic oligonucleotide
ccaggguuuacc

SEQ ID NO: 104669 - RNA, 11 nt, Artificial Sequence
  Description of Artificial Sequence: Synthetic oligonucleotide
agcaagguuua

SEQ ID NO: 104670 - RNA, 12 nt, Artificial Sequence
  Description of Artificial Sequence: Synthetic oligonucleotide
uguauuauguug

SEQ ID NO: 104671 - RNA, 15 nt, Artificial Sequence
  Description of Artificial Sequence: Synthetic oligonucleotide
uuuuaaucuuuguga

SEQ ID NO: 104672 - RNA, 14 nt, Artificial Sequence
  Description of Artificial Sequence: Synthetic oligonucleotide
uuaaucuuugugac

SEQ ID NO: 104673 - RNA, 13 nt, Artificial Sequence
  Description of Artificial Sequence: Synthetic oligonucleotide
gcugcuuaugucu

SEQ ID NO: 104674 - RNA, 14 nt, Artificial Sequence
  Description of Artificial Sequence: Synthetic oligonucleotide
aaguguuucagaag

SEQ ID NO: 104675 - RNA, 13 nt, Artificial Sequence
  Description of Artificial Sequence: Synthetic oligonucleotide
gaccaucaauaag

SEQ ID NO: 104676 - RNA, 13 nt, Artificial Sequence
  Description of Artificial Sequence: Synthetic oligonucleotide
ccaucaauaagga

SEQ ID NO: 104677 - RNA, 14 nt, Artificial Sequence
  Description of Artificial Sequence: Synthetic oligonucleotide
ucaauaaggaagaa

SEQ ID NO: 104678 - RNA, 14 nt, Artificial Sequence
  Description of Artificial Sequence: Synthetic oligonucleotide
aauaaggaagaagc

SEQ ID NO: 104679 - RNA, 13 nt, Artificial Sequence
  Description of Artificial Sequence: Synthetic oligonucleotide
aggaagaagcccu

SEQ ID NO: 104680 - RNA, 13 nt, Artificial Sequence
  Description of Artificial Sequence: Synthetic oligonucleotide
gcauaacuaaagg

SEQ ID NO: 104681 - RNA, 14 nt, Artificial Sequence
  Description of Artificial Sequence: Synthetic oligonucleotide
cauaacuaaaggug

SEQ ID NO: 104682 - RNA, 12 nt, Artificial Sequence
  Description of Artificial Sequence: Synthetic oligonucleotide
cuacaucacgcc

SEQ ID NO: 104683 - RNA, 12 nt, Artificial Sequence
  Description of Artificial Sequence: Synthetic oligonucleotide
acuggauuuaag

SEQ ID NO: 104684 - RNA, 12 nt, Artificial Sequence
  Description of Artificial Sequence: Synthetic oligonucleotide
cuggauuuaagc

SEQ ID NO: 104685 - RNA, 13 nt, Artificial Sequence
  Description of Artificial Sequence: Synthetic oligonucleotide
gauuuaagcagag

SEQ ID NO: 104686 - RNA, 13 nt, Artificial Sequence
  Description of Artificial Sequence: Synthetic oligonucleotide
auuuaagcagagu

SEQ ID NO: 104687 - RNA, 13 nt, Artificial Sequence
  Description of Artificial Sequence: Synthetic oligonucleotide
uuaagcagaguuc

SEQ ID NO: 104688 - RNA, 13 nt, Artificial Sequence
  Description of Artificial Sequence: Synthetic oligonucleotide
uaagcagaguuca

SEQ ID NO: 104689 - RNA, 14 nt, Artificial Sequence
  Description of Artificial Sequence: Synthetic oligonucleotide
agcagaguucaaaa

SEQ ID NO: 104690 - RNA, 12 nt, Artificial Sequence
  Description of Artificial Sequence: Synthetic oligonucleotide
cucagggucuga

SEQ ID NO: 104691 - RNA, 13 nt, Artificial Sequence
  Description of Artificial Sequence: Synthetic oligonucleotide
caagcaacuacau

SEQ ID NO: 104692 - RNA, 12 nt, Artificial Sequence
  Description of Artificial Sequence: Synthetic oligonucleotide
aucaauggcagc

SEQ ID NO: 104693 - RNA, 11 nt, Artificial Sequence
  Description of Artificial Sequence: Synthetic oligonucleotide
uuccagcccac

SEQ ID NO: 104694 - RNA, 12 nt, Artificial Sequence
  Description of Artificial Sequence: Synthetic oligonucleotide
cagcugagaaug

SEQ ID NO: 104695 - RNA, 13 nt, Artificial Sequence
  Description of Artificial Sequence: Synthetic oligonucleotide
aacguaucuccua

SEQ ID NO: 104696 - RNA, 14 nt, Artificial Sequence
  Description of Artificial Sequence: Synthetic oligonucleotide
ccuaaaauaauuuc

SEQ ID NO: 104697 - RNA, 13 nt, Artificial Sequence
  Description of Artificial Sequence: Synthetic oligonucleotide
uggaagauucagc

SEQ ID NO: 104698 - RNA, 12 nt, Artificial Sequence
  Description of Artificial Sequence: Synthetic oligonucleotide
uuaaacucuccu

SEQ ID NO: 104699 - RNA, 12 nt, Artificial Sequence
  Description of Artificial Sequence: Synthetic oligonucleotide
cagccuacaguu

SEQ ID NO: 104700 - RNA, 13 nt, Artificial Sequence
  Description of Artificial Sequence: Synthetic oligonucleotide
guuauguucaguc

SEQ ID NO: 104701 - RNA, 13 nt, Artificial Sequence
  Description of Artificial Sequence: Synthetic oligonucleotide
cacauacaaaaug

SEQ ID NO: 104702 - RNA, 9 nt, Artificial Sequence
  Description of Artificial Sequence: Synthetic oligonucleotide
uccuuuugc

SEQ ID NO: 104703 - RNA, 12 nt, Artificial Sequence
  Description of Artificial Sequence: Synthetic oligonucleotide
ugaccugugaag

SEQ ID NO: 104704 - RNA, 12 nt, Artificial Sequence
  Description of Artificial Sequence: Synthetic oligonucleotide
cuaucucacaca

SEQ ID NO: 104705 - RNA, 13 nt, Artificial Sequence
  Description of Artificial Sequence: Synthetic oligonucleotide
uguccucaauugu

SEQ ID NO: 104706 - RNA, 12 nt, Artificial Sequence
  Description of Artificial Sequence: Synthetic oligonucleotide
aaaccguagcug

SEQ ID NO: 104707 - RNA, 12 nt, Artificial Sequence
  Description of Artificial Sequence: Synthetic oligonucleotide
uagcuggcaagc

SEQ ID NO: 104708 - RNA, 14 nt, Artificial Sequence
  Description of Artificial Sequence: Synthetic oligonucleotide
uuguaugguuaaaa

SEQ ID NO: 104709 - RNA, 14 nt, Artificial Sequence
  Description of Artificial Sequence: Synthetic oligonucleotide
ugguuaaaagaugg

SEQ ID NO: 104710 - RNA, 13 nt, Artificial Sequence
  Description of Artificial Sequence: Synthetic oligonucleotide
cagggaauuauac

SEQ ID NO: 104711 - RNA, 12 nt, Artificial Sequence
  Description of Artificial Sequence: Synthetic oligonucleotide
acaaucuugcug

SEQ ID NO: 104712 - RNA, 13 nt, Artificial Sequence
  Description of Artificial Sequence: Synthetic oligonucleotide
ccaauaaugaaga

SEQ ID NO: 104713 - RNA, 13 nt, Artificial Sequence
  Description of Artificial Sequence: Synthetic oligonucleotide
acuuuggauguuc

SEQ ID NO: 104714 - RNA, 12 nt, Artificial Sequence
  Description of Artificial Sequence: Synthetic oligonucleotide
aaugcuuccacu

SEQ ID NO: 104715 - RNA, 11 nt, Artificial Sequence
  Description of Artificial Sequence: Synthetic oligonucleotide
gagaaaguuug

SEQ ID NO: 104716 - RNA, 11 nt, Artificial Sequence
  Description of Artificial Sequence: Synthetic oligonucleotide
aaagaacuacu

SEQ ID NO: 104717 - RNA, 12 nt, Artificial Sequence
  Description of Artificial Sequence: Synthetic oligonucleotide
uuagaaauacgg

SEQ ID NO: 104718 - RNA, 12 nt, Artificial Sequence
  Description of Artificial Sequence: Synthetic oligonucleotide
aacauggguaca

SEQ ID NO: 104719 - RNA, 14 nt, Artificial Sequence
  Description of Artificial Sequence: Synthetic oligonucleotide
aaagacacagaaga

SEQ ID NO: 104720 - RNA, 11 nt, Artificial Sequence
  Description of Artificial Sequence: Synthetic oligonucleotide
uaguagggagg

SEQ ID NO: 104721 - RNA, 12 nt, Artificial Sequence
  Description of Artificial Sequence: Synthetic oligonucleotide
gccuucugcagc

SEQ ID NO: 104722 - RNA, 10 nt, Artificial Sequence
  Description of Artificial Sequence: Synthetic oligonucleotide
ggucugguac

SEQ ID NO: 104723 - RNA, 12 nt, Artificial Sequence
  Description of Artificial Sequence: Synthetic oligonucleotide
cuaguccuuccg

SEQ ID NO: 104724 - RNA, 12 nt, Artificial Sequence
  Description of Artificial Sequence: Synthetic oligonucleotide
ccagugaauauu

SEQ ID NO: 104725 - RNA, 13 nt, Artificial Sequence
  Description of Artificial Sequence: Synthetic oligonucleotide
augaauucaaguu

SEQ ID NO: 104726 - RNA, 12 nt, Artificial Sequence
  Description of Artificial Sequence: Synthetic oligonucleotide
caggacacagau

SEQ ID NO: 104727 - RNA, 12 nt, Artificial Sequence
  Description of Artificial Sequence: Synthetic oligonucleotide
cucaaagcacag

SEQ ID NO: 104728 - RNA, 10 nt, Artificial Sequence
  Description of Artificial Sequence: Synthetic oligonucleotide
accacugcca

SEQ ID NO: 104729 - RNA, 13 nt, Artificial Sequence
  Description of Artificial Sequence: Synthetic oligonucleotide
gaaacuacuagug

SEQ ID NO: 104730 - RNA, 12 nt, Artificial Sequence
  Description of Artificial Sequence: Synthetic oligonucleotide
aagucggacagc

SEQ ID NO: 104731 - RNA, 13 nt, Artificial Sequence
  Description of Artificial Sequence: Synthetic oligonucleotide
gaaagcgaaaaau

SEQ ID NO: 104732 - RNA, 13 nt, Artificial Sequence
  Description of Artificial Sequence: Synthetic oligonucleotide
cccucugauuuag

SEQ ID NO: 104733 - RNA, 12 nt, Artificial Sequence
  Description of Artificial Sequence: Synthetic oligonucleotide
ugagcuauuuaa

SEQ ID NO: 104734 - RNA, 13 nt, Artificial Sequence
  Description of Artificial Sequence: Synthetic oligonucleotide
aaaaggugaaaaa

SEQ ID NO: 104735 - RNA, 14 nt, Artificial Sequence
  Description of Artificial Sequence: Synthetic oligonucleotide
gaaaaagcacuauu

SEQ ID NO: 104736 - RNA, 12 nt, Artificial Sequence
  Description of Artificial Sequence: Synthetic oligonucleotide
ggcugaaaagaa

SEQ ID NO: 104737 - RNA, 12 nt, Artificial Sequence
  Description of Artificial Sequence: Synthetic oligonucleotide
uaaacccuuaua

SEQ ID NO: 104738 - RNA, 13 nt, Artificial Sequence
  Description of Artificial Sequence: Synthetic oligonucleotide
cauacuauuagcc

SEQ ID NO: 104739 - RNA, 12 nt, Artificial Sequence
  Description of Artificial Sequence: Synthetic oligonucleotide
gacagaagcauu

SEQ ID NO: 104740 - RNA, 14 nt, Artificial Sequence
  Description of Artificial Sequence: Synthetic oligonucleotide
agagcaaauaagau

SEQ ID NO: 104741 - RNA, 14 nt, Artificial Sequence
  Description of Artificial Sequence: Synthetic oligonucleotide
ccaacauuuuucuc

SEQ ID NO: 104742 - RNA, 15 nt, Artificial Sequence
  Description of Artificial Sequence: Synthetic oligonucleotide
uuaaguaugagaaaa

SEQ ID NO: 104743 - RNA, 14 nt, Artificial Sequence
  Description of Artificial Sequence: Synthetic oligonucleotide
caggaauaaagaug

SEQ ID NO: 104744 - RNA, 13 nt, Artificial Sequence
  Description of Artificial Sequence: Synthetic oligonucleotide
aauuugaaugacc

SEQ ID NO: 104745 - RNA, 14 nt, Artificial Sequence
  Description of Artificial Sequence: Synthetic oligonucleotide
auguauaaagauag

SEQ ID NO: 104746 - RNA, 12 nt, Artificial Sequence
  Description of Artificial Sequence: Synthetic oligonucleotide
ggcuguaacuau

SEQ ID NO: 104747 - RNA, 11 nt, Artificial Sequence
  Description of Artificial Sequence: Synthetic oligonucleotide
ucugugaagug

SEQ ID NO: 104748 - RNA, 14 nt, Artificial Sequence
  Description of Artificial Sequence: Synthetic oligonucleotide
ccuuuaaggaaaug

SEQ ID NO: 104749 - RNA, 13 nt, Artificial Sequence
  Description of Artificial Sequence: Synthetic oligonucleotide
aaggauacaaaaa

SEQ ID NO: 104750 - RNA, 12 nt, Artificial Sequence
  Description of Artificial Sequence: Synthetic oligonucleotide
agaugcaauuug

SEQ ID NO: 104751 - RNA, 12 nt, Artificial Sequence
  Description of Artificial Sequence: Synthetic oligonucleotide
guucaaaacgaa

SEQ ID NO: 104752 - RNA, 11 nt, Artificial Sequence
  Description of Artificial Sequence: Synthetic oligonucleotide
gugaaaccuca

SEQ ID NO: 104753 - RNA, 13 nt, Artificial Sequence
  Description of Artificial Sequence: Synthetic oligonucleotide
acgaaagagaagc

SEQ ID NO: 104754 - RNA, 12 nt, Artificial Sequence
  Description of Artificial Sequence: Synthetic oligonucleotide
cuccacaagcgc

SEQ ID NO: 104755 - RNA, 14 nt, Artificial Sequence
  Description of Artificial Sequence: Synthetic oligonucleotide
gagaagauuccaaa

SEQ ID NO: 104756 - RNA, 13 nt, Artificial Sequence
  Description of Artificial Sequence: Synthetic oligonucleotide
aaucuggauucaa

SEQ ID NO: 104757 - RNA, 13 nt, Artificial Sequence
  Description of Artificial Sequence: Synthetic oligonucleotide
agaacagauuuga

SEQ ID NO: 104758 - RNA, 11 nt, Artificial Sequence
  Description of Artificial Sequence: Synthetic oligonucleotide
ccagagcugug

SEQ ID NO: 104759 - RNA, 12 nt, Artificial Sequence
  Description of Artificial Sequence: Synthetic oligonucleotide
ccucagauuguu

SEQ ID NO: 104760 - RNA, 12 nt, Artificial Sequence
  Description of Artificial Sequence: Synthetic oligonucleotide
cuauuuuaauua

SEQ ID NO: 104761 - RNA, 13 nt, Artificial Sequence
  Description of Artificial Sequence: Synthetic oligonucleotide
uuuaauuuauuaa

SEQ ID NO: 104762 - RNA, 12 nt, Artificial Sequence
  Description of Artificial Sequence: Synthetic oligonucleotide
augcaguuugaa

SEQ ID NO: 104763 - RNA, 11 nt, Artificial Sequence
  Description of Artificial Sequence: Synthetic oligonucleotide
caugcugcugg

SEQ ID NO: 104764 - RNA, 13 nt, Artificial Sequence
  Description of Artificial Sequence: Synthetic oligonucleotide
agaugugcauuuc

SEQ ID NO: 104765 - RNA, 12 nt, Artificial Sequence
  Description of Artificial Sequence: Synthetic oligonucleotide
ucaaaaccugug

SEQ ID NO: 104766 - RNA, 11 nt, Artificial Sequence
  Description of Artificial Sequence: Synthetic oligonucleotide
gaaugugggua

SEQ ID NO: 104767 - RNA, 10 nt, Artificial Sequence
  Description of Artificial Sequence: Synthetic oligonucleotide
auguggguag

SEQ ID NO: 104768 - RNA, 13 nt, Artificial Sequence
  Description of Artificial Sequence: Synthetic oligonucleotide
ugaaaaugagcau

SEQ ID NO: 104769 - RNA, 13 nt, Artificial Sequence
  Description of Artificial Sequence: Synthetic oligonucleotide
uugcuuuucaugu

SEQ ID NO: 104770 - RNA, 12 nt, Artificial Sequence
  Description of Artificial Sequence: Synthetic oligonucleotide
uguauuucuaua

SEQ ID NO: 104771 - RNA, 13 nt, Artificial Sequence
  Description of Artificial Sequence: Synthetic oligonucleotide
uuugauuaauguu

SEQ ID NO: 104772 - RNA, 12 nt, Artificial Sequence
  Description of Artificial Sequence: Synthetic oligonucleotide
caacguguauag

SEQ ID NO: 104773 - RNA, 12 nt, Artificial Sequence
  Description of Artificial Sequence: Synthetic oligonucleotide
cauauccuuggc

SEQ ID NO: 104774 - RNA, 13 nt, Artificial Sequence
  Description of Artificial Sequence: Synthetic oligonucleotide
uacuaacaucugg

SEQ ID NO: 104775 - RNA, 11 nt, Artificial Sequence
  Description of Artificial Sequence: Synthetic oligonucleotide
cauaaguugug

SEQ ID NO: 104776 - RNA, 12 nt, Artificial Sequence
  Description of Artificial Sequence: Synthetic oligonucleotide
gcaucauuuugg

SEQ ID NO: 104777 - RNA, 10 nt, Artificial Sequence
  Description of Artificial Sequence: Synthetic oligonucleotide
gcucuucuua

SEQ ID NO: 104778 - RNA, 10 nt, Artificial Sequence
  Description of Artificial Sequence: Synthetic oligonucleotide
agauuagguc

SEQ ID NO: 104779 - RNA, 12 nt, Artificial Sequence
  Description of Artificial Sequence: Synthetic oligonucleotide
auggaauugaaa

SEQ ID NO: 104780 - RNA, 13 nt, Artificial Sequence
  Description of Artificial Sequence: Synthetic oligonucleotide
cacacucauuccu

SEQ ID NO: 104781 - RNA, 12 nt, Artificial Sequence
  Description of Artificial Sequence: Synthetic oligonucleotide
uguagagguaac

SEQ ID NO: 104782 - RNA, 11 nt, Artificial Sequence
  Description of Artificial Sequence: Synthetic oligonucleotide
caaccacaugc

SEQ ID NO: 104783 - RNA, 12 nt, Artificial Sequence
  Description of Artificial Sequence: Synthetic oligonucleotide
ucggaaacaagu

SEQ ID NO: 104784 - RNA, 11 nt, Artificial Sequence
  Description of Artificial Sequence: Synthetic oligonucleotide
acucccaauaa

SEQ ID NO: 104785 - RNA, 13 nt, Artificial Sequence
  Description of Artificial Sequence: Synthetic oligonucleotide
aaugcuaagaaau

SEQ ID NO: 104786 - RNA, 11 nt, Artificial Sequence
  Description of Artificial Sequence: Synthetic oligonucleotide
gucuuucucua

SEQ ID NO: 104787 - RNA, 11 nt, Artificial Sequence
  Description of Artificial Sequence: Synthetic oligonucleotide
ugaauuucagg

SEQ ID NO: 104788 - RNA, 13 nt, Artificial Sequence
  Description of Artificial Sequence: Synthetic oligonucleotide
cgauucccucuca

SEQ ID NO: 104789 - RNA, 11 nt, Artificial Sequence
  Description of Artificial Sequence: Synthetic oligonucleotide
aggaaagugaa

SEQ ID NO: 104790 - RNA, 12 nt, Artificial Sequence
  Description of Artificial Sequence: Synthetic oligonucleotide
gaggcugcaugc

SEQ ID NO: 104791 - RNA, 11 nt, Artificial Sequence
  Description of Artificial Sequence: Synthetic oligonucleotide
ucucugaacag

SEQ ID NO: 104792 - RNA, 12 nt, Artificial Sequence
  Description of Artificial Sequence: Synthetic oligonucleotide
aacuuggcugua

SEQ ID NO: 104793 - RNA, 12 nt, Artificial Sequence
  Description of Artificial Sequence: Synthetic oligonucleotide
agaagccaaaau

SEQ ID NO: 104794 - RNA, 14 nt, Artificial Sequence
  Description of Artificial Sequence: Synthetic oligonucleotide
auuaaaagaagucc

SEQ ID NO: 104795 - RNA, 14 nt, Artificial Sequence
  Description of Artificial Sequence: Synthetic oligonucleotide
gaauccggauuauc

SEQ ID NO: 104796 - RNA, 12 nt, Artificial Sequence
  Description of Artificial Sequence: Synthetic oligonucleotide
aaugugacauca

SEQ ID NO: 104797 - RNA, 13 nt, Artificial Sequence
  Description of Artificial Sequence: Synthetic oligonucleotide
caucaaagcaagu

SEQ ID NO: 104798 - RNA, 11 nt, Artificial Sequence
  Description of Artificial Sequence: Synthetic oligonucleotide
agagagagaaa

SEQ ID NO: 104799 - RNA, 13 nt, Artificial Sequence
  Description of Artificial Sequence: Synthetic oligonucleotide
ucgcuguaguauu

SEQ ID NO: 104800 - RNA, 14 nt, Artificial Sequence
  Description of Artificial Sequence: Synthetic oligonucleotide
cgcuguaguauuua

SEQ ID NO: 104801 - RNA, 13 nt, Artificial Sequence
  Description of Artificial Sequence: Synthetic oligonucleotide
auuuaagcccaua

SEQ ID NO: 104802 - RNA, 15 nt, Artificial Sequence
  Description of Artificial Sequence: Synthetic oligonucleotide
auuaaaauaaacaug

SEQ ID NO: 104803 - RNA, 12 nt, Artificial Sequence
  Description of Artificial Sequence: Synthetic oligonucleotide
cuguucugaucg

SEQ ID NO: 104804 - RNA, 16 nt, Artificial Sequence
  Description of Artificial Sequence: Synthetic oligonucleotide
aaauaauuugaacuuu

SEQ ID NO: 104805 - RNA, 12 nt, Artificial Sequence
  Description of Artificial Sequence: Synthetic oligonucleotide
ugcgaccuuaau

SEQ ID NO: 104806 - RNA, 11 nt, Artificial Sequence
  Description of Artificial Sequence: Synthetic oligonucleotide
cugagaaagcu

SEQ ID NO: 104807 - RNA, 13 nt, Artificial Sequence
  Description of Artificial Sequence: Synthetic oligonucleotide
aguaaagaugcua

SEQ ID NO: 104808 - RNA, 12 nt, Artificial Sequence
  Description of Artificial Sequence: Synthetic oligonucleotide
cugcuuaauugc

SEQ ID NO: 104809 - RNA, 14 nt, Artificial Sequence
  Description of Artificial Sequence: Synthetic oligonucleotide
uaccauaugaauga

SEQ ID NO: 104810 - RNA, 12 nt, Artificial Sequence
  Description of Artificial Sequence: Synthetic oligonucleotide
aacuuucuuauc

SEQ ID NO: 104811 - RNA, 13 nt, Artificial Sequence
  Description of Artificial Sequence: Synthetic oligonucleotide
ccuugcaugacau

SEQ ID NO: 104812 - RNA, 14 nt, Artificial Sequence
  Description of Artificial Sequence: Synthetic oligonucleotide
ugaauuuguauaug

SEQ ID NO: 104813 - RNA, 12 nt, Artificial Sequence
  Description of Artificial Sequence: Synthetic oligonucleotide
gaauccuaguag

SEQ ID NO: 104814 - RNA, 10 nt, Artificial Sequence
  Description of Artificial Sequence: Synthetic oligonucleotide
gaaagggaag

SEQ ID NO: 104815 - RNA, 11 nt, Artificial Sequence
  Description of Artificial Sequence: Synthetic oligonucleotide
uaucggcaugc

SEQ ID NO: 104816 - RNA, 12 nt, Artificial Sequence
  Description of Artificial Sequence: Synthetic oligonucleotide
caccucauagua

SEQ ID NO: 104817 - RNA, 11 nt, Artificial Sequence
  Description of Artificial Sequence: Synthetic oligonucleotide
ccagaauugcc

SEQ ID NO: 104818 - RNA, 11 nt, Artificial Sequence
  Description of Artificial Sequence: Synthetic oligonucleotide
uggugaucugg

SEQ ID NO: 104819 - RNA, 12 nt, Artificial Sequence
  Description of Artificial Sequence: Synthetic oligonucleotide
gaucuggguaau

SEQ ID NO: 104820 - RNA, 12 nt, Artificial Sequence
  Description of Artificial Sequence: Synthetic oligonucleotide
ggaugugaugaa

SEQ ID NO: 104821 - RNA, 12 nt, Artificial Sequence
  Description of Artificial Sequence: Synthetic oligonucleotide
cauuuccacagc

SEQ ID NO: 104822 - RNA, 11 nt, Artificial Sequence
  Description of Artificial Sequence: Synthetic oligonucleotide
acagcuacacc

SEQ ID NO: 104823 - RNA, 12 nt, Artificial Sequence
  Description of Artificial Sequence: Synthetic oligonucleotide
ugcaguucuuac

SEQ ID NO: 104824 - RNA, 12 nt, Artificial Sequence
  Description of Artificial Sequence: Synthetic oligonucleotide
acgagaagaaga

SEQ ID NO: 104825 - RNA, 12 nt, Artificial Sequence
  Description of Artificial Sequence: Synthetic oligonucleotide
cgagaagaagau

SEQ ID NO: 104826 - RNA, 15 nt, Artificial Sequence
  Description of Artificial Sequence: Synthetic oligonucleotide
aagaagaucauuuac

SEQ ID NO: 104827 - RNA, 11 nt, Artificial Sequence
  Description of Artificial Sequence: Synthetic oligonucleotide
agaggaagagg

SEQ ID NO: 104828 - RNA, 12 nt, Artificial Sequence
  Description of Artificial Sequence: Synthetic oligonucleotide
gaggaagaggug

SEQ ID NO: 104829 - RNA, 13 nt, Artificial Sequence
  Description of Artificial Sequence: Synthetic oligonucleotide
cuacuuugagggc

SEQ ID NO: 104830 - RNA, 12 nt, Artificial Sequence
  Description of Artificial Sequence: Synthetic oligonucleotide
agggcaucuccu

SEQ ID NO: 104831 - RNA, 10 nt, Artificial Sequence
  Description of Artificial Sequence: Synthetic oligonucleotide
ggagugauau

SEQ ID NO: 104832 - RNA, 11 nt, Artificial Sequence
  Description of Artificial Sequence: Synthetic oligonucleotide
gagugauaugg

SEQ ID NO: 104833 - RNA, 12 nt, Artificial Sequence
  Description of Artificial Sequence: Synthetic oligonucleotide
ugcaguaaagau

SEQ ID NO: 104834 - RNA, 13 nt, Artificial Sequence
  Description of Artificial Sequence: Synthetic oligonucleotide
aguaaagauccua

SEQ ID NO: 104835 - RNA, 12 nt, Artificial Sequence
  Description of Artificial Sequence: Synthetic oligonucleotide
ugacaaaggaca

SEQ ID NO: 104836 - RNA, 13 nt, Artificial Sequence
  Description of Artificial Sequence: Synthetic oligonucleotide
gcaauugugaccc

SEQ ID NO: 104837 - RNA, 12 nt, Artificial Sequence
  Description of Artificial Sequence: Synthetic oligonucleotide
aacaucauccau

SEQ ID NO: 104838 - RNA, 12 nt, Artificial Sequence
  Description of Artificial Sequence: Synthetic oligonucleotide
ugaaauccaaca

SEQ ID NO: 104839 - RNA, 15 nt, Artificial Sequence
  Description of Artificial Sequence: Synthetic oligonucleotide
aacaauauauuucuc

SEQ ID NO: 104840 - RNA, 14 nt, Artificial Sequence
  Description of Artificial Sequence: Synthetic oligonucleotide
aacaguaaagucac

SEQ ID NO: 104841 - RNA, 14 nt, Artificial Sequence
  Description of Artificial Sequence: Synthetic oligonucleotide
ugugaagaaaguaa

SEQ ID NO: 104842 - RNA, 13 nt, Artificial Sequence
  Description of Artificial Sequence: Synthetic oligonucleotide
cuuccgagccauc

SEQ ID NO: 104843 - RNA, 12 nt, Artificial Sequence
  Description of Artificial Sequence: Synthetic oligonucleotide
aauggagguuga

SEQ ID NO: 104844 - RNA, 12 nt, Artificial Sequence
  Description of Artificial Sequence: Synthetic oligonucleotide
ggagguugaaua

SEQ ID NO: 104845 - RNA, 13 nt, Artificial Sequence
  Description of Artificial Sequence: Synthetic oligonucleotide
auuuugaguuuuc

SEQ ID NO: 104846 - RNA, 12 nt, Artificial Sequence
  Description of Artificial Sequence: Synthetic oligonucleotide
uauccuguuugu

SEQ ID NO: 104847 - RNA, 11 nt, Artificial Sequence
  Description of Artificial Sequence: Synthetic oligonucleotide
ccuguuuguuc

SEQ ID NO: 104848 - RNA, 10 nt, Artificial Sequence
  Description of Artificial Sequence: Synthetic oligonucleotide
cucuacagcc

SEQ ID NO: 104849 - RNA, 12 nt, Artificial Sequence
  Description of Artificial Sequence: Synthetic oligonucleotide
ucuuccauagcu

SEQ ID NO: 104850 - RNA, 12 nt, Artificial Sequence
  Description of Artificial Sequence: Synthetic oligonucleotide
auaaucuuccug

SEQ ID NO: 104851 - RNA, 12 nt, Artificial Sequence
  Description of Artificial Sequence: Synthetic oligonucleotide
uaaucuuccugu

SEQ ID NO: 104852 - RNA, 12 nt, Artificial Sequence
  Description of Artificial Sequence: Synthetic oligonucleotide
cuucaugacuug

SEQ ID NO: 104853 - RNA, 12 nt, Artificial Sequence
  Description of Artificial Sequence: Synthetic oligonucleotide
aagagggagaga

SEQ ID NO: 104854 - RNA, 12 nt, Artificial Sequence
  Description of Artificial Sequence: Synthetic oligonucleotide
cgucuccuacca

SEQ ID NO: 104855 - RNA, 12 nt, Artificial Sequence
  Description of Artificial Sequence: Synthetic oligonucleotide
gaucaaucggcc

SEQ ID NO: 104856 - RNA, 12 nt, Artificial Sequence
  Description of Artificial Sequence: Synthetic oligonucleotide
ggacgaacaucc

SEQ ID NO: 104857 - RNA, 11 nt, Artificial Sequence
  Description of Artificial Sequence: Synthetic oligonucleotide
agggucggaac

SEQ ID NO: 104858 - RNA, 10 nt, Artificial Sequence
  Description of Artificial Sequence: Synthetic oligonucleotide
ucggaaccca

SEQ ID NO: 104859 - RNA, 11 nt, Artificial Sequence
  Description of Artificial Sequence: Synthetic oligonucleotide
acccaagcuua

SEQ ID NO: 104860 - RNA, 14 nt, Artificial Sequence
  Description of Artificial Sequence: Synthetic oligonucleotide
gaacuuuaagcaac

SEQ ID NO: 104861 - RNA, 11 nt, Artificial Sequence
  Description of Artificial Sequence: Synthetic oligonucleotide
acuauucagug

SEQ ID NO: 104862 - RNA, 11 nt, Artificial Sequence
  Description of Artificial Sequence: Synthetic oligonucleotide
cuauucagugg

SEQ ID NO: 104863 - RNA, 13 nt, Artificial Sequence
  Description of Artificial Sequence: Synthetic oligonucleotide
aaacacagauaac

SEQ ID NO: 104864 - RNA, 12 nt, Artificial Sequence
  Description of Artificial Sequence: Synthetic oligonucleotide
cuuaagaaaaga

SEQ ID NO: 104865 - RNA, 12 nt, Artificial Sequence
  Description of Artificial Sequence: Synthetic oligonucleotide
cugaaggagugu

SEQ ID NO: 104866 - RNA, 10 nt, Artificial Sequence
  Description of Artificial Sequence: Synthetic oligonucleotide
ucaccgcggg

SEQ ID NO: 104867 - RNA, 14 nt, Artificial Sequence
  Description of Artificial Sequence: Synthetic oligonucleotide
agcagaaauaagcg

SEQ ID NO: 104868 - RNA, 12 nt, Artificial Sequence
  Description of Artificial Sequence: Synthetic oligonucleotide
aagcgugccguu

SEQ ID NO: 104869 - RNA, 12 nt, Artificial Sequence
  Description of Artificial Sequence: Synthetic oligonucleotide
agaaacagucac

SEQ ID NO: 104870 - RNA, 12 nt, Artificial Sequence
  Description of Artificial Sequence: Synthetic oligonucleotide
agaggaagaagg

SEQ ID NO: 104871 - RNA, 14 nt, Artificial Sequence
  Description of Artificial Sequence: Synthetic oligonucleotide
uguauucaaaauau

SEQ ID NO: 104872 - RNA, 13 nt, Artificial Sequence
  Description of Artificial Sequence: Synthetic oligonucleotide
auuuuccucccuu

SEQ ID NO: 104873 - RNA, 13 nt, Artificial Sequence
  Description of Artificial Sequence: Synthetic oligonucleotide
caaagaaagauag

SEQ ID NO: 104874 - RNA, 12 nt, Artificial Sequence
  Description of Artificial Sequence: Synthetic oligonucleotide
aagaaagauaga

SEQ ID NO: 104875 - RNA, 13 nt, Artificial Sequence
  Description of Artificial Sequence: Synthetic oligonucleotide
gaaagcauuuguu

SEQ ID NO: 104876 - RNA, 13 nt, Artificial Sequence
  Description of Artificial Sequence: Synthetic oligonucleotide
ugaguuaaacgaa

SEQ ID NO: 104877 - RNA, 12 nt, Artificial Sequence
  Description of Artificial Sequence: Synthetic oligonucleotide
acugauacagaa

SEQ ID NO: 104878 - RNA, 12 nt, Artificial Sequence
  Description of Artificial Sequence: Synthetic oligonucleotide
auauuauauaua

SEQ ID NO: 104879 - RNA, 12 nt, Artificial Sequence
  Description of Artificial Sequence: Synthetic oligonucleotide
auuauauauaua

SEQ ID NO: 104880 - RNA, 12 nt, Artificial Sequence
  Description of Artificial Sequence: Synthetic oligonucleotide
ucacuggaugua

SEQ ID NO: 104881 - RNA, 12 nt, Artificial Sequence
  Description of Artificial Sequence: Synthetic oligonucleotide
cagggaagagga

SEQ ID NO: 104882 - RNA, 15 nt, Artificial Sequence
  Description of Artificial Sequence: Synthetic oligonucleotide
augaucuuuuuuuug

SEQ ID NO: 104883 - RNA, 11 nt, Artificial Sequence
  Description of Artificial Sequence: Synthetic oligonucleotide
aguucacggcc

SEQ ID NO: 104884 - RNA, 13 nt, Artificial Sequence
  Description of Artificial Sequence: Synthetic oligonucleotide
caccaucacacca

SEQ ID NO: 104885 - RNA, 11 nt, Artificial Sequence
  Description of Artificial Sequence: Synthetic oligonucleotide
ccugcggguuu

SEQ ID NO: 104886 - RNA, 10 nt, Artificial Sequence
  Description of Artificial Sequence: Synthetic oligonucleotide
auccaguuug

SEQ ID NO: 104887 - RNA, 13 nt, Artificial Sequence
  Description of Artificial Sequence: Synthetic oligonucleotide
guuaaggacuucu

SEQ ID NO: 104888 - RNA, 13 nt, Artificial Sequence
  Description of Artificial Sequence: Synthetic oligonucleotide
cagugggacagag

SEQ ID NO: 104889 - RNA, 14 nt, Artificial Sequence
  Description of Artificial Sequence: Synthetic oligonucleotide
aauuuguuauugug

SEQ ID NO: 104890 - RNA, 13 nt, Artificial Sequence
  Description of Artificial Sequence: Synthetic oligonucleotide
uucaaaugcauuu

SEQ ID NO: 104891 - RNA, 10 nt, Artificial Sequence
  Description of Artificial Sequence: Synthetic oligonucleotide
caggaaagcc

SEQ ID NO: 104892 - RNA, 11 nt, Artificial Sequence
  Description of Artificial Sequence: Synthetic oligonucleotide
aggaaagcccu

SEQ ID NO: 104893 - RNA, 12 nt, Artificial Sequence
  Description of Artificial Sequence: Synthetic oligonucleotide
cccagcauggcc

SEQ ID NO: 104894 - RNA, 11 nt, Artificial Sequence
  Description of Artificial Sequence: Synthetic oligonucleotide
cuucucccuga

SEQ ID NO: 104895 - RNA, 12 nt, Artificial Sequence
  Description of Artificial Sequence: Synthetic oligonucleotide
gaagaagcccuu

SEQ ID NO: 104896 - RNA, 12 nt, Artificial Sequence
  Description of Artificial Sequence: Synthetic oligonucleotide
agaagcccuuca

SEQ ID NO: 104897 - RNA, 11 nt, Artificial Sequence
  Description of Artificial Sequence: Synthetic oligonucleotide
gcccuucagcg

SEQ ID NO: 104898 - RNA, 11 nt, Artificial Sequence
  Description of Artificial Sequence: Synthetic oligonucleotide
ccuucagcggc

SEQ ID NO: 104899 - RNA, 12 nt, Artificial Sequence
  Description of Artificial Sequence: Synthetic oligonucleotide
ucagcggccagu

SEQ ID NO: 104900 - RNA, 12 nt, Artificial Sequence
  Description of Artificial Sequence: Synthetic oligonucleotide
ugaaaagcuccg

SEQ ID NO: 104901 - RNA, 11 nt, Artificial Sequence
  Description of Artificial Sequence: Synthetic oligonucleotide
aaaagcuccgg

SEQ ID NO: 104902 - RNA, 13 nt, Artificial Sequence
  Description of Artificial Sequence: Synthetic oligonucleotide
agucaacagucug

SEQ ID NO: 104903 - RNA, 13 nt, Artificial Sequence
  Description of Artificial Sequence: Synthetic oligonucleotide
cagaguucaaaag

SEQ ID NO: 104904 - RNA, 13 nt, Artificial Sequence
  Description of Artificial Sequence: Synthetic oligonucleotide
agaguucaaaagc

SEQ ID NO: 104905 - RNA, 12 nt, Artificial Sequence
  Description of Artificial Sequence: Synthetic oligonucleotide
uucaaaagcccu

SEQ ID NO: 104906 - RNA, 12 nt, Artificial Sequence
  Description of Artificial Sequence: Synthetic oligonucleotide
ucaaaagcccuu

SEQ ID NO: 104907 - RNA, 12 nt, Artificial Sequence
  Description of Artificial Sequence: Synthetic oligonucleotide
aaaagcccuuca

SEQ ID NO: 104908 - RNA, 12 nt, Artificial Sequence
  Description of Artificial Sequence: Synthetic oligonucleotide
aaagcccuucag

SEQ ID NO: 104909 - RNA, 13 nt, Artificial Sequence
  Description of Artificial Sequence: Synthetic oligonucleotide
gugaagccgcucg

SEQ ID NO: 104910 - RNA, 12 nt, Artificial Sequence
  Description of Artificial Sequence: Synthetic oligonucleotide
cacgccagucaa

SEQ ID NO: 104911 - RNA, 13 nt, Artificial Sequence
  Description of Artificial Sequence: Synthetic oligonucleotide
uucuuggugcgug

SEQ ID NO: 104912 - RNA, 14 nt, Artificial Sequence
  Description of Artificial Sequence: Synthetic oligonucleotide
auuggauucaucag

SEQ ID NO: 104913 - RNA, 13 nt, Artificial Sequence
  Description of Artificial Sequence: Synthetic oligonucleotide
uggaauaccuaag

SEQ ID NO: 104914 - RNA, 12 nt, Artificial Sequence
  Description of Artificial Sequence: Synthetic oligonucleotide
auuugaggcuca

SEQ ID NO: 104915 - RNA, 11 nt, Artificial Sequence
  Description of Artificial Sequence: Synthetic oligonucleotide
ucuacaauugg

SEQ ID NO: 104916 - RNA, 12 nt, Artificial Sequence
  Description of Artificial Sequence: Synthetic oligonucleotide
uaguuaggagcc

SEQ ID NO: 104917 - RNA, 13 nt, Artificial Sequence
  Description of Artificial Sequence: Synthetic oligonucleotide
agucaauauccac

SEQ ID NO: 104918 - RNA, 13 nt, Artificial Sequence
  Description of Artificial Sequence: Synthetic oligonucleotide
auguucagucaca

SEQ ID NO: 104919 - RNA, 12 nt, Artificial Sequence
  Description of Artificial Sequence: Synthetic oligonucleotide
acacacacauac

SEQ ID NO: 104920 - RNA, 12 nt, Artificial Sequence
  Description of Artificial Sequence: Synthetic oligonucleotide
uuccuuuugcuu

SEQ ID NO: 104921 - RNA, 16 nt, Artificial Sequence
  Description of Artificial Sequence: Synthetic oligonucleotide
uuuuaaaguaauuuuu

SEQ ID NO: 104922 - RNA, 13 nt, Artificial Sequence
  Description of Artificial Sequence: Synthetic oligonucleotide
caacagucaaugg

SEQ ID NO: 104923 - RNA, 13 nt, Artificial Sequence
  Description of Artificial Sequence: Synthetic oligonucleotide
ucgacaaaccaau

SEQ ID NO: 104924 - RNA, 12 nt, Artificial Sequence
  Description of Artificial Sequence: Synthetic oligonucleotide
acugcuaccacu

SEQ ID NO: 104925 - RNA, 13 nt, Artificial Sequence
  Description of Artificial Sequence: Synthetic oligonucleotide
gcaagcggucuua

SEQ ID NO: 104926 - RNA, 13 nt, Artificial Sequence
  Description of Artificial Sequence: Synthetic oligonucleotide
ggucuuaccggcu

SEQ ID NO: 104927 - RNA, 11 nt, Artificial Sequence
  Description of Artificial Sequence: Synthetic oligonucleotide
gauggguuacc

SEQ ID NO: 104928 - RNA, 11 nt, Artificial Sequence
  Description of Artificial Sequence: Synthetic oligonucleotide
guuaccugcga

SEQ ID NO: 104929 - RNA, 12 nt, Artificial Sequence
  Description of Artificial Sequence: Synthetic oligonucleotide
aaucuugcugag

SEQ ID NO: 104930 - RNA, 13 nt, Artificial Sequence
  Description of Artificial Sequence: Synthetic oligonucleotide
agcauaaaacagu

SEQ ID NO: 104931 - RNA, 12 nt, Artificial Sequence
  Description of Artificial Sequence: Synthetic oligonucleotide
guccuuuauccu

SEQ ID NO: 104932 - RNA, 12 nt, Artificial Sequence
  Description of Artificial Sequence: Synthetic oligonucleotide
caacgcaaguug

SEQ ID NO: 104933 - RNA, 13 nt, Artificial Sequence
  Description of Artificial Sequence: Synthetic oligonucleotide
aaacugaaaccau

SEQ ID NO: 104934 - RNA, 14 nt, Artificial Sequence
  Description of Artificial Sequence: Synthetic oligonucleotide
acuuuguuaaauau

SEQ ID NO: 104935 - RNA, 14 nt, Artificial Sequence
  Description of Artificial Sequence: Synthetic oligonucleotide
guauauuaaaaguu

SEQ ID NO: 104936 - RNA, 13 nt, Artificial Sequence
  Description of Artificial Sequence: Synthetic oligonucleotide
guuuugacuuaac

SEQ ID NO: 104937 - RNA, 13 nt, Artificial Sequence
  Description of Artificial Sequence: Synthetic oligonucleotide
gcaaacucagcac

SEQ ID NO: 104938 - RNA, 11 nt, Artificial Sequence
  Description of Artificial Sequence: Synthetic oligonucleotide
ugcugaccuca

SEQ ID NO: 104939 - RNA, 14 nt, Artificial Sequence
  Description of Artificial Sequence: Synthetic oligonucleotide
uuuauucagaucgc

SEQ ID NO: 104940 - RNA, 13 nt, Artificial Sequence
  Description of Artificial Sequence: Synthetic oligonucleotide
aggguucugggau

SEQ ID NO: 104941 - RNA, 15 nt, Artificial Sequence
  Description of Artificial Sequence: Synthetic oligonucleotide
auauuggaaauuaug

SEQ ID NO: 104942 - RNA, 13 nt, Artificial Sequence
  Description of Artificial Sequence: Synthetic oligonucleotide
auggaagcacuag

SEQ ID NO: 104943 - RNA, 13 nt, Artificial Sequence
  Description of Artificial Sequence: Synthetic oligonucleotide
guuuuuaugugga

SEQ ID NO: 104944 - RNA, 12 nt, Artificial Sequence
  Description of Artificial Sequence: Synthetic oligonucleotide
ggaauugguaga

SEQ ID NO: 104945 - RNA, 13 nt, Artificial Sequence
  Description of Artificial Sequence: Synthetic oligonucleotide
uuagacuuggaga

SEQ ID NO: 104946 - RNA, 13 nt, Artificial Sequence
  Description of Artificial Sequence: Synthetic oligonucleotide
uuacaguauucca

SEQ ID NO: 104947 - RNA, 15 nt, Artificial Sequence
  Description of Artificial Sequence: Synthetic oligonucleotide
ccacugaugaauuaa

SEQ ID NO: 104948 - RNA, 12 nt, Artificial Sequence
  Description of Artificial Sequence: Synthetic oligonucleotide
ccacaucaucac

SEQ ID NO: 104949 - RNA, 13 nt, Artificial Sequence
  Description of Artificial Sequence: Synthetic oligonucleotide
cucaccaaacaga

SEQ ID NO: 104950 - RNA, 12 nt, Artificial Sequence
  Description of Artificial Sequence: Synthetic oligonucleotide
ggaacaugaugg

SEQ ID NO: 104951 - RNA, 12 nt, Artificial Sequence
  Description of Artificial Sequence: Synthetic oligonucleotide
cauguagacugc

SEQ ID NO: 104952 - RNA, 13 nt, Artificial Sequence
  Description of Artificial Sequence: Synthetic oligonucleotide
ggaucuauuuaug

SEQ ID NO: 104953 - RNA, 12 nt, Artificial Sequence
  Description of Artificial Sequence: Synthetic oligonucleotide
gcacuauuauca

SEQ ID NO: 104954 - RNA, 11 nt, Artificial Sequence
  Description of Artificial Sequence: Synthetic oligonucleotide
aucaguucugc

SEQ ID NO: 104955 - RNA, 13 nt, Artificial Sequence
  Description of Artificial Sequence: Synthetic oligonucleotide
agauuaaaccuac

SEQ ID NO: 104956 - RNA, 13 nt, Artificial Sequence
  Description of Artificial Sequence: Synthetic oligonucleotide
auaaaauccuucu

SEQ ID NO: 104957 - RNA, 12 nt, Artificial Sequence
  Description of Artificial Sequence: Synthetic oligonucleotide
aaugcuguagac

SEQ ID NO: 104958 - RNA, 13 nt, Artificial Sequence
  Description of Artificial Sequence: Synthetic oligonucleotide
uugauaggaauag

SEQ ID NO: 104959 - RNA, 11 nt, Artificial Sequence
  Description of Artificial Sequence: Synthetic oligonucleotide
aauggcccuga

SEQ ID NO: 104960 - RNA, 11 nt, Artificial Sequence
  Description of Artificial Sequence: Synthetic oligonucleotide
uuccucaagca

SEQ ID NO: 104961 - RNA, 10 nt, Artificial Sequence
  Description of Artificial Sequence: Synthetic oligonucleotide
guucagccca

SEQ ID NO: 104962 - RNA, 11 nt, Artificial Sequence
  Description of Artificial Sequence: Synthetic oligonucleotide
gcugcugaacc

SEQ ID NO: 104963 - RNA, 12 nt, Artificial Sequence
  Description of Artificial Sequence: Synthetic oligonucleotide
aaguucucuuca

SEQ ID NO: 104964 - RNA, 11 nt, Artificial Sequence
  Description of Artificial Sequence: Synthetic oligonucleotide
ccagccuagag

SEQ ID NO: 104965 - RNA, 13 nt, Artificial Sequence
  Description of Artificial Sequence: Synthetic oligonucleotide
cucugugaagugu

SEQ ID NO: 104966 - RNA, 14 nt, Artificial Sequence
  Description of Artificial Sequence: Synthetic oligonucleotide
ugagaaaauuucaa

SEQ ID NO: 104967 - RNA, 11 nt, Artificial Sequence
  Description of Artificial Sequence: Synthetic oligonucleotide
aauccuccuga

SEQ ID NO: 104968 - RNA, 12 nt, Artificial Sequence
  Description of Artificial Sequence: Synthetic oligonucleotide
gugacaucauau

SEQ ID NO: 104969 - RNA, 13 nt, Artificial Sequence
  Description of Artificial Sequence: Synthetic oligonucleotide
aaucuucaucaua

SEQ ID NO: 104970 - RNA, 13 nt, Artificial Sequence
  Description of Artificial Sequence: Synthetic oligonucleotide
gacuagcuauuaa

SEQ ID NO: 104971 - RNA, 14 nt, Artificial Sequence
  Description of Artificial Sequence: Synthetic oligonucleotide
ucucuacuaaaaau

SEQ ID NO: 104972 - RNA, 12 nt, Artificial Sequence
  Description of Artificial Sequence: Synthetic oligonucleotide
ucuaucucgccu

SEQ ID NO: 104973 - RNA, 13 nt, Artificial Sequence
  Description of Artificial Sequence: Synthetic oligonucleotide
cuucgguccaguu

SEQ ID NO: 104974 - RNA, 11 nt, Artificial Sequence
  Description of Artificial Sequence: Synthetic oligonucleotide
gauguagccgc

SEQ ID NO: 104975 - RNA, 12 nt, Artificial Sequence
  Description of Artificial Sequence: Synthetic oligonucleotide
ugaggagacuug

SEQ ID NO: 104976 - RNA, 12 nt, Artificial Sequence
  Description of Artificial Sequence: Synthetic oligonucleotide
gaguagugagga

SEQ ID NO: 104977 - RNA, 14 nt, Artificial Sequence
  Description of Artificial Sequence: Synthetic oligonucleotide
cagaugaguacaaa

SEQ ID NO: 104978 - RNA, 13 nt, Artificial Sequence
  Description of Artificial Sequence: Synthetic oligonucleotide
guuguuaaugggc

SEQ ID NO: 104979 - RNA, 13 nt, Artificial Sequence
  Description of Artificial Sequence: Synthetic oligonucleotide
uuuuuaauuuauu

SEQ ID NO: 104980 - RNA, 12 nt, Artificial Sequence
  Description of Artificial Sequence: Synthetic oligonucleotide
uauuuaaauaug

SEQ ID NO: 104981 - RNA, 13 nt, Artificial Sequence
  Description of Artificial Sequence: Synthetic oligonucleotide
uauccuuuguuuc

SEQ ID NO: 104982 - RNA, 14 nt, Artificial Sequence
  Description of Artificial Sequence: Synthetic oligonucleotide
cgucuaaguguuug

SEQ ID NO: 104983 - RNA, 12 nt, Artificial Sequence
  Description of Artificial Sequence: Synthetic oligonucleotide
accugugacaaa

SEQ ID NO: 104984 - RNA, 13 nt, Artificial Sequence
  Description of Artificial Sequence: Synthetic oligonucleotide
ccaggcugaauua

SEQ ID NO: 104985 - RNA, 14 nt, Artificial Sequence
  Description of Artificial Sequence: Synthetic oligonucleotide
gucauucuuacaau

SEQ ID NO: 104986 - RNA, 15 nt, Artificial Sequence
  Description of Artificial Sequence: Synthetic oligonucleotide
ucauucuuacaauug

SEQ ID NO: 104987 - RNA, 12 nt, Artificial Sequence
  Description of Artificial Sequence: Synthetic oligonucleotide
cagagaguguac

SEQ ID NO: 104988 - RNA, 12 nt, Artificial Sequence
  Description of Artificial Sequence: Synthetic oligonucleotide
agaacucagcag

SEQ ID NO: 104989 - RNA, 13 nt, Artificial Sequence
  Description of Artificial Sequence: Synthetic oligonucleotide
uuuauuuucagua

SEQ ID NO: 104990 - RNA, 12 nt, Artificial Sequence
  Description of Artificial Sequence: Synthetic oligonucleotide
ucuuaaauggaa

SEQ ID NO: 104991 - RNA, 13 nt, Artificial Sequence
  Description of Artificial Sequence: Synthetic oligonucleotide
ugccuaaaauugu

SEQ ID NO: 104992 - RNA, 12 nt, Artificial Sequence
  Description of Artificial Sequence: Synthetic oligonucleotide
agacugugagcu

SEQ ID NO: 104993 - RNA, 14 nt, Artificial Sequence
  Description of Artificial Sequence: Synthetic oligonucleotide
ugcuuuuuauuaau

SEQ ID NO: 104994 - RNA, 13 nt, Artificial Sequence
  Description of Artificial Sequence: Synthetic oligonucleotide
cucuucuuacauu

SEQ ID NO: 104995 - RNA, 15 nt, Artificial Sequence
  Description of Artificial Sequence: Synthetic oligonucleotide
cauuuguaaaaaugu

SEQ ID NO: 104996 - RNA, 15 nt, Artificial Sequence
  Description of Artificial Sequence: Synthetic oligonucleotide
aucuuaauucauauu

SEQ ID NO: 104997 - RNA, 13 nt, Artificial Sequence
  Description of Artificial Sequence: Synthetic oligonucleotide
gaacuaaucauga

SEQ ID NO: 104998 - RNA, 12 nt, Artificial Sequence
  Description of Artificial Sequence: Synthetic oligonucleotide
ucugcucuuggg

SEQ ID NO: 104999 - RNA, 13 nt, Artificial Sequence
  Description of Artificial Sequence: Synthetic oligonucleotide
caguagcuuugag

SEQ ID NO: 105000 - RNA, 14 nt, Artificial Sequence
  Description of Artificial Sequence: Synthetic oligonucleotide
cacguaauauuuca

SEQ ID NO: 105001 - RNA, 13 nt, Artificial Sequence
  Description of Artificial Sequence: Synthetic oligonucleotide
uauucucuucacu

SEQ ID NO: 105002 - RNA, 14 nt, Artificial Sequence
  Description of Artificial Sequence: Synthetic oligonucleotide
cuaaugcuaagaaa

SEQ ID NO: 105003 - RNA, 12 nt, Artificial Sequence
  Description of Artificial Sequence: Synthetic oligonucleotide
gcugaaaaucaa

SEQ ID NO: 105004 - RNA, 14 nt, Artificial Sequence
  Description of Artificial Sequence: Synthetic oligonucleotide
aauaugauuacuuu

SEQ ID NO: 105005 - RNA, 14 nt, Artificial Sequence
  Description of Artificial Sequence: Synthetic oligonucleotide
cauuuuguucuaca

SEQ ID NO: 105006 - RNA, 12 nt, Artificial Sequence
  Description of Artificial Sequence: Synthetic oligonucleotide
cccgggacucuc

SEQ ID NO: 105007 - RNA, 14 nt, Artificial Sequence
  Description of Artificial Sequence: Synthetic oligonucleotide
ccuuuaaaguaaag

SEQ ID NO: 105008 - RNA, 13 nt, Artificial Sequence
  Description of Artificial Sequence: Synthetic oligonucleotide
ucuggaagccugg

SEQ ID NO: 105009 - RNA, 14 nt, Artificial Sequence
  Description of Artificial Sequence: Synthetic oligonucleotide
aaaacaaaagagag

SEQ ID NO: 105010 - RNA, 13 nt, Artificial Sequence
  Description of Artificial Sequence: Synthetic oligonucleotide
aucaguuaugccg

SEQ ID NO: 105011 - RNA, 13 nt, Artificial Sequence
  Description of Artificial Sequence: Synthetic oligonucleotide
uaaaagaagucca

SEQ ID NO: 105012 - RNA, 11 nt, Artificial Sequence
  Description of Artificial Sequence: Synthetic oligonucleotide
aggugagguua

SEQ ID NO: 105013 - RNA, 11 nt, Artificial Sequence
  Description of Artificial Sequence: Synthetic oligonucleotide
gggaagaggac

SEQ ID NO: 105014 - RNA, 13 nt, Artificial Sequence
  Description of Artificial Sequence: Synthetic oligonucleotide
aagcaaguauugu

SEQ ID NO: 105015 - RNA, 12 nt, Artificial Sequence
  Description of Artificial Sequence: Synthetic oligonucleotide
auuguagcacuc

SEQ ID NO: 105016 - RNA, 14 nt, Artificial Sequence
  Description of Artificial Sequence: Synthetic oligonucleotide
acaaaaccacaaau

SEQ ID NO: 105017 - RNA, 12 nt, Artificial Sequence
  Description of Artificial Sequence: Synthetic oligonucleotide
uaagcccauaca

SEQ ID NO: 105018 - RNA, 11 nt, Artificial Sequence
  Description of Artificial Sequence: Synthetic oligonucleotide
agcccauacag

SEQ ID NO: 105019 - RNA, 12 nt, Artificial Sequence
  Description of Artificial Sequence: Synthetic oligonucleotide
cagaaaccuucc

SEQ ID NO: 105020 - RNA, 10 nt, Artificial Sequence
  Description of Artificial Sequence: Synthetic oligonucleotide
guauaccuac

SEQ ID NO: 105021 - RNA, 13 nt, Artificial Sequence
  Description of Artificial Sequence: Synthetic oligonucleotide
gccaguuuucgga

SEQ ID NO: 105022 - RNA, 9 nt, Artificial Sequence
  Description of Artificial Sequence: Synthetic oligonucleotide
ggaacaggg

SEQ ID NO: 105023 - RNA, 13 nt, Artificial Sequence
  Description of Artificial Sequence: Synthetic oligonucleotide
uuaacuuuccagu

SEQ ID NO: 105024 - RNA, 14 nt, Artificial Sequence
  Description of Artificial Sequence: Synthetic oligonucleotide
aaaguuugguuuug

SEQ ID NO: 105025 - RNA, 12 nt, Artificial Sequence
  Description of Artificial Sequence: Synthetic oligonucleotide
cuucccacugua

SEQ ID NO: 105026 - RNA, 13 nt, Artificial Sequence
  Description of Artificial Sequence: Synthetic oligonucleotide
ugauaccauauga

SEQ ID NO: 105027 - RNA, 11 nt, Artificial Sequence
  Description of Artificial Sequence: Synthetic oligonucleotide
aacaugggcug

SEQ ID NO: 105028 - RNA, 13 nt, Artificial Sequence
  Description of Artificial Sequence: Synthetic oligonucleotide
caacuuuuucaua

SEQ ID NO: 105029 - RNA, 12 nt, Artificial Sequence
  Description of Artificial Sequence: Synthetic oligonucleotide
caugaggccgga

SEQ ID NO: 105030 - RNA, 11 nt, Artificial Sequence
  Description of Artificial Sequence: Synthetic oligonucleotide
acugcauuugu

SEQ ID NO: 105031 - RNA, 13 nt, Artificial Sequence
  Description of Artificial Sequence: Synthetic oligonucleotide
aauguuuacuacc

SEQ ID NO: 105032 - RNA, 15 nt, Artificial Sequence
  Description of Artificial Sequence: Synthetic oligonucleotide
aauuuuuugaugaaa

SEQ ID NO: 105033 - RNA, 14 nt, Artificial Sequence
  Description of Artificial Sequence: Synthetic oligonucleotide
cagugugugaauuu

SEQ ID NO: 105034 - RNA, 13 nt, Artificial Sequence
  Description of Artificial Sequence: Synthetic oligonucleotide
gagcaauguaugu

SEQ ID NO: 105035 - RNA, 14 nt, Artificial Sequence
  Description of Artificial Sequence: Synthetic oligonucleotide
aaagcacauauaua

SEQ ID NO: 105036 - RNA, 14 nt, Artificial Sequence
  Description of Artificial Sequence: Synthetic oligonucleotide
guaauaguuucucc

SEQ ID NO: 105037 - RNA, 13 nt, Artificial Sequence
  Description of Artificial Sequence: Synthetic oligonucleotide
aguuucuccaaau

SEQ ID NO: 105038 - RNA, 13 nt, Artificial Sequence
  Description of Artificial Sequence: Synthetic oligonucleotide
uacuuccuagaaa

SEQ ID NO: 105039 - RNA, 13 nt, Artificial Sequence
  Description of Artificial Sequence: Synthetic oligonucleotide
uacaccauauaug

SEQ ID NO: 105040 - RNA, 14 nt, Artificial Sequence
  Description of Artificial Sequence: Synthetic oligonucleotide
auauaugaauggag

SEQ ID NO: 105041 - RNA, 13 nt, Artificial Sequence
  Description of Artificial Sequence: Synthetic oligonucleotide
acgagaagaagau

SEQ ID NO: 105042 - RNA, 13 nt, Artificial Sequence
  Description of Artificial Sequence: Synthetic oligonucleotide
ucauuuacaggga

SEQ ID NO: 105043 - RNA, 13 nt, Artificial Sequence
  Description of Artificial Sequence: Synthetic oligonucleotide
cauuuacagggac

SEQ ID NO: 105044 - RNA, 10 nt, Artificial Sequence
  Description of Artificial Sequence: Synthetic oligonucleotide
agggaccuga

SEQ ID NO: 105045 - RNA, 14 nt, Artificial Sequence
  Description of Artificial Sequence: Synthetic oligonucleotide
uguuugacugcauc

SEQ ID NO: 105046 - RNA, 13 nt, Artificial Sequence
  Description of Artificial Sequence: Synthetic oligonucleotide
uuugacugcaucg

SEQ ID NO: 105047 - RNA, 12 nt, Artificial Sequence
  Description of Artificial Sequence: Synthetic oligonucleotide
gaguucacaggg

SEQ ID NO: 105048 - RNA, 13 nt, Artificial Sequence
  Description of Artificial Sequence: Synthetic oligonucleotide
ggcaccucugucc

SEQ ID NO: 105049 - RNA, 15 nt, Artificial Sequence
  Description of Artificial Sequence: Synthetic oligonucleotide
gguuugucuuuuuaa

SEQ ID NO: 105050 - RNA, 14 nt, Artificial Sequence
  Description of Artificial Sequence: Synthetic oligonucleotide
uuugucuuuuuaag

SEQ ID NO: 105051 - RNA, 13 nt, Artificial Sequence
  Description of Artificial Sequence: Synthetic oligonucleotide
ccuaaagguuguc

SEQ ID NO: 105052 - RNA, 12 nt, Artificial Sequence
  Description of Artificial Sequence: Synthetic oligonucleotide
aagguugucgac

SEQ ID NO: 105053 - RNA, 13 nt, Artificial Sequence
  Description of Artificial Sequence: Synthetic oligonucleotide
accuggcaauugu

SEQ ID NO: 105054 - RNA, 12 nt, Artificial Sequence
  Description of Artificial Sequence: Synthetic oligonucleotide
aguggugcgagg

SEQ ID NO: 105055 - RNA, 13 nt, Artificial Sequence
  Description of Artificial Sequence: Synthetic oligonucleotide
agagacaugaaau

SEQ ID NO: 105056 - RNA, 13 nt, Artificial Sequence
  Description of Artificial Sequence: Synthetic oligonucleotide
auauauuucucca

SEQ ID NO: 105057 - RNA, 10 nt, Artificial Sequence
  Description of Artificial Sequence: Synthetic oligonucleotide
caugaaggcu

SEQ ID NO: 105058 - RNA, 11 nt, Artificial Sequence
  Description of Artificial Sequence: Synthetic oligonucleotide
gcuggaguggu

SEQ ID NO: 105059 - RNA, 11 nt, Artificial Sequence
  Description of Artificial Sequence: Synthetic oligonucleotide
aggaagagagg

SEQ ID NO: 105060 - RNA, 12 nt, Artificial Sequence
  Description of Artificial Sequence: Synthetic oligonucleotide
cuugcaucgggc

SEQ ID NO: 105061 - RNA, 13 nt, Artificial Sequence
  Description of Artificial Sequence: Synthetic oligonucleotide
auauccuacugug

SEQ ID NO: 105062 - RNA, 13 nt, Artificial Sequence
  Description of Artificial Sequence: Synthetic oligonucleotide
uccuacuguguaa

SEQ ID NO: 105063 - RNA, 12 nt, Artificial Sequence
  Description of Artificial Sequence: Synthetic oligonucleotide
ccuuguagugua

SEQ ID NO: 105064 - RNA, 13 nt, Artificial Sequence
  Description of Artificial Sequence: Synthetic oligonucleotide
ucuuuguugauug

SEQ ID NO: 105065 - RNA, 14 nt, Artificial Sequence
  Description of Artificial Sequence: Synthetic oligonucleotide
uuuguugauugaaa

SEQ ID NO: 105066 - RNA, 15 nt, Artificial Sequence
  Description of Artificial Sequence: Synthetic oligonucleotide
uucuuuuucuuccau

SEQ ID NO: 105067 - RNA, 13 nt, Artificial Sequence
  Description of Artificial Sequence: Synthetic oligonucleotide
aaucuuccuucua

SEQ ID NO: 105068 - RNA, 13 nt, Artificial Sequence
  Description of Artificial Sequence: Synthetic oligonucleotide
uugaaugcuucau

SEQ ID NO: 105069 - RNA, 13 nt, Artificial Sequence
  Description of Artificial Sequence: Synthetic oligonucleotide
ugaaugcuucaug

SEQ ID NO: 105070 - RNA, 13 nt, Artificial Sequence
  Description of Artificial Sequence: Synthetic oligonucleotide
aauucuacuuuga

SEQ ID NO: 105071 - RNA, 13 nt, Artificial Sequence
  Description of Artificial Sequence: Synthetic oligonucleotide
agcaacuacagac

SEQ ID NO: 105072 - RNA, 13 nt, Artificial Sequence
  Description of Artificial Sequence: Synthetic oligonucleotide
gaccaaggucaac

SEQ ID NO: 105073 - RNA, 13 nt, Artificial Sequence
  Description of Artificial Sequence: Synthetic oligonucleotide
cgacuaucucgac

SEQ ID NO: 105074 - RNA, 13 nt, Artificial Sequence
  Description of Artificial Sequence: Synthetic oligonucleotide
aaccuucccaaac

SEQ ID NO: 105075 - RNA, 14 nt, Artificial Sequence
  Description of Artificial Sequence: Synthetic oligonucleotide
ccaagcuuagaacu

SEQ ID NO: 105076 - RNA, 15 nt, Artificial Sequence
  Description of Artificial Sequence: Synthetic oligonucleotide
agcuuagaacuuuaa

SEQ ID NO: 105077 - RNA, 11 nt, Artificial Sequence
  Description of Artificial Sequence: Synthetic oligonucleotide
aagaccaccac

SEQ ID NO: 105078 - RNA, 14 nt, Artificial Sequence
  Description of Artificial Sequence: Synthetic oligonucleotide
gcgagaaauaaagu

SEQ ID NO: 105079 - RNA, 14 nt, Artificial Sequence
  Description of Artificial Sequence: Synthetic oligonucleotide
cgagaaauaaaguu

SEQ ID NO: 105080 - RNA, 12 nt, Artificial Sequence
  Description of Artificial Sequence: Synthetic oligonucleotide
aggaaaugaucc

SEQ ID NO: 105081 - RNA, 13 nt, Artificial Sequence
  Description of Artificial Sequence: Synthetic oligonucleotide
gaagaaaugaaac

SEQ ID NO: 105082 - RNA, 13 nt, Artificial Sequence
  Description of Artificial Sequence: Synthetic oligonucleotide
guuuccauccucc

SEQ ID NO: 105083 - RNA, 15 nt, Artificial Sequence
  Description of Artificial Sequence: Synthetic oligonucleotide
acugaaaaucuuuga

SEQ ID NO: 105084 - RNA, 11 nt, Artificial Sequence
  Description of Artificial Sequence: Synthetic oligonucleotide
ugccguucagg

SEQ ID NO: 105085 - RNA, 13 nt, Artificial Sequence
  Description of Artificial Sequence: Synthetic oligonucleotide
caggguccagaag

SEQ ID NO: 105086 - RNA, 13 nt, Artificial Sequence
  Description of Artificial Sequence: Synthetic oligonucleotide
ucaagacugcuug

SEQ ID NO: 105087 - RNA, 13 nt, Artificial Sequence
  Description of Artificial Sequence: Synthetic oligonucleotide
uccaugucuuugg

SEQ ID NO: 105088 - RNA, 11 nt, Artificial Sequence
  Description of Artificial Sequence: Synthetic oligonucleotide
gccugaaacac

SEQ ID NO: 105089 - RNA, 12 nt, Artificial Sequence
  Description of Artificial Sequence: Synthetic oligonucleotide
ucucuguaccuc

SEQ ID NO: 105090 - RNA, 12 nt, Artificial Sequence
  Description of Artificial Sequence: Synthetic oligonucleotide
agcaagacaaga

SEQ ID NO: 105091 - RNA, 13 nt, Artificial Sequence
  Description of Artificial Sequence: Synthetic oligonucleotide
gcaagacaagaaa

SEQ ID NO: 105092 - RNA, 12 nt, Artificial Sequence
  Description of Artificial Sequence: Synthetic oligonucleotide
uguacaagaucc

SEQ ID NO: 105093 - RNA, 12 nt, Artificial Sequence
  Description of Artificial Sequence: Synthetic oligonucleotide
cguacuugcaga

SEQ ID NO: 105094 - RNA, 13 nt, Artificial Sequence
  Description of Artificial Sequence: Synthetic oligonucleotide
cgaucgauacaga

SEQ ID NO: 105095 - RNA, 13 nt, Artificial Sequence
  Description of Artificial Sequence: Synthetic oligonucleotide
uauaaaaauaaau

SEQ ID NO: 105096 - RNA, 13 nt, Artificial Sequence
  Description of Artificial Sequence: Synthetic oligonucleotide
uaaaaauaaauau

SEQ ID NO: 105097 - RNA, 13 nt, Artificial Sequence
  Description of Artificial Sequence: Synthetic oligonucleotide
uuugacugcugug

SEQ ID NO: 105098 - RNA, 13 nt, Artificial Sequence
  Description of Artificial Sequence: Synthetic oligonucleotide
ggagaugagagac

SEQ ID NO: 105099 - RNA, 10 nt, Artificial Sequence
  Description of Artificial Sequence: Synthetic oligonucleotide
ucccacuugg

SEQ ID NO: 105100 - RNA, 10 nt, Artificial Sequence
  Description of Artificial Sequence: Synthetic oligonucleotide
guucacggcc

SEQ ID NO: 105101 - RNA, 12 nt, Artificial Sequence
  Description of Artificial Sequence: Synthetic oligonucleotide
accaucacacca

SEQ ID NO: 105102 - RNA, 10 nt, Artificial Sequence
  Description of Artificial Sequence: Synthetic oligonucleotide
cugcggguuu

SEQ ID NO: 105103 - RNA, 9 nt, Artificial Sequence
  Description of Artificial Sequence: Synthetic oligonucleotide
uccaguuug

SEQ ID NO: 105104 - RNA, 12 nt, Artificial Sequence
  Description of Artificial Sequence: Synthetic oligonucleotide
uuaaggacuucu

SEQ ID NO: 105105 - RNA, 12 nt, Artificial Sequence
  Description of Artificial Sequence: Synthetic oligonucleotide
agugggacagag

SEQ ID NO: 105106 - RNA, 13 nt, Artificial Sequence
  Description of Artificial Sequence: Synthetic oligonucleotide
auuuguuauugug

SEQ ID NO: 105107 - RNA, 12 nt, Artificial Sequence
  Description of Artificial Sequence: Synthetic oligonucleotide
ucaaaugcauuu

SEQ ID NO: 105108 - RNA, 9 nt, Artificial Sequence
  Description of Artificial Sequence: Synthetic oligonucleotide
aggaaagcc

SEQ ID NO: 105109 - RNA, 10 nt, Artificial Sequence
  Description of Artificial Sequence: Synthetic oligonucleotide
ggaaagcccu

SEQ ID NO: 105110 - RNA, 11 nt, Artificial Sequence
  Description of Artificial Sequence: Synthetic oligonucleotide
ccagcauggcc

SEQ ID NO: 105111 - RNA, 10 nt, Artificial Sequence
  Description of Artificial Sequence: Synthetic oligonucleotide
uucucccuga

SEQ ID NO: 105112 - RNA, 11 nt, Artificial Sequence
  Description of Artificial Sequence: Synthetic oligonucleotide
aagaagcccuu

SEQ ID NO: 105113 - RNA, 11 nt, Artificial Sequence
  Description of Artificial Sequence: Synthetic oligonucleotide
gaagcccuuca

SEQ ID NO: 105114 - RNA, 10 nt, Artificial Sequence
  Description of Artificial Sequence: Synthetic oligonucleotide
cccuucagcg

SEQ ID NO: 105115 - RNA, 10 nt, Artificial Sequence
  Description of Artificial Sequence: Synthetic oligonucleotide
cuucagcggc

SEQ ID NO: 105116 - RNA, 11 nt, Artificial Sequence
  Description of Artificial Sequence: Synthetic oligonucleotide
cagcggccagu

SEQ ID NO: 105117 - RNA, 11 nt, Artificial Sequence
  Description of Artificial Sequence: Synthetic oligonucleotide
gaaaagcuccg

SEQ ID NO: 105118 - RNA, 10 nt, Artificial Sequence
  Description of Artificial Sequence: Synthetic oligonucleotide
aaagcuccgg

SEQ ID NO: 105119 - RNA, 12 nt, Artificial Sequence
  Description of Artificial Sequence: Synthetic oligonucleotide
gucaacagucug

SEQ ID NO: 105120 - RNA, 12 nt, Artificial Sequence
  Description of Artificial Sequence: Synthetic oligonucleotide
agaguucaaaag

SEQ ID NO: 105121 - RNA, 12 nt, Artificial Sequence
  Description of Artificial Sequence: Synthetic oligonucleotide
gaguucaaaagc

SEQ ID NO: 105122 - RNA, 11 nt, Artificial Sequence
  Description of Artificial Sequence: Synthetic oligonucleotide
ucaaaagcccu

SEQ ID NO: 105123 - RNA, 11 nt, Artificial Sequence
  Description of Artificial Sequence: Synthetic oligonucleotide
caaaagcccuu

SEQ ID NO: 105124 - RNA, 11 nt, Artificial Sequence
  Description of Artificial Sequence: Synthetic oligonucleotide
aaagcccuuca

SEQ ID NO: 105125 - RNA, 11 nt, Artificial Sequence
  Description of Artificial Sequence: Synthetic oligonucleotide
aagcccuucag

SEQ ID NO: 105126 - RNA, 12 nt, Artificial Sequence
  Description of Artificial Sequence: Synthetic oligonucleotide
ugaagccgcucg

SEQ ID NO: 105127 - RNA, 11 nt, Artificial Sequence
  Description of Artificial Sequence: Synthetic oligonucleotide
acgccagucaa

SEQ ID NO: 105128 - RNA, 12 nt, Artificial Sequence
  Description of Artificial Sequence: Synthetic oligonucleotide
ucuuggugcgug

SEQ ID NO: 105129 - RNA, 13 nt, Artificial Sequence
  Description of Artificial Sequence: Synthetic oligonucleotide
uuggauucaucag

SEQ ID NO: 105130 - RNA, 12 nt, Artificial Sequence
  Description of Artificial Sequence: Synthetic oligonucleotide
ggaauaccuaag

SEQ ID NO: 105131 - RNA, 11 nt, Artificial Sequence
  Description of Artificial Sequence: Synthetic oligonucleotide
uuugaggcuca

SEQ ID NO: 105132 - RNA, 10 nt, Artificial Sequence
  Description of Artificial Sequence: Synthetic oligonucleotide
cuacaauugg

SEQ ID NO: 105133 - RNA, 11 nt, Artificial Sequence
  Description of Artificial Sequence: Synthetic oligonucleotide
aguuaggagcc

SEQ ID NO: 105134 - RNA, 12 nt, Artificial Sequence
  Description of Artificial Sequence: Synthetic oligonucleotide
gucaauauccac

SEQ ID NO: 105135 - RNA, 12 nt, Artificial Sequence
  Description of Artificial Sequence: Synthetic oligonucleotide
uguucagucaca

SEQ ID NO: 105136 - RNA, 11 nt, Artificial Sequence
  Description of Artificial Sequence: Synthetic oligonucleotide
cacacacauac

SEQ ID NO: 105137 - RNA, 11 nt, Artificial Sequence
  Description of Artificial Sequence: Synthetic oligonucleotide
uccuuuugcuu

SEQ ID NO: 105138 - RNA, 15 nt, Artificial Sequence
  Description of Artificial Sequence: Synthetic oligonucleotide
uuuaaaguaauuuuu

SEQ ID NO: 105139 - RNA, 12 nt, Artificial Sequence
  Description of Artificial Sequence: Synthetic oligonucleotide
aacagucaaugg

SEQ ID NO: 105140 - RNA, 12 nt, Artificial Sequence
  Description of Artificial Sequence: Synthetic oligonucleotide
cgacaaaccaau

SEQ ID NO: 105141 - RNA, 11 nt, Artificial Sequence
  Description of Artificial Sequence: Synthetic oligonucleotide
cugcuaccacu

SEQ ID NO: 105142 - RNA, 12 nt, Artificial Sequence
  Description of Artificial Sequence: Synthetic oligonucleotide
caagcggucuua

SEQ ID NO: 105143 - RNA, 12 nt, Artificial Sequence
  Description of Artificial Sequence: Synthetic oligonucleotide
gucuuaccggcu

SEQ ID NO: 105144 - RNA, 10 nt, Artificial Sequence
  Description of Artificial Sequence: Synthetic oligonucleotide
auggguuacc

SEQ ID NO: 105145 - RNA, 10 nt, Artificial Sequence
  Description of Artificial Sequence: Synthetic oligonucleotide
uuaccugcga

SEQ ID NO: 105146 - RNA, 11 nt, Artificial Sequence
  Description of Artificial Sequence: Synthetic oligonucleotide
aucuugcugag

SEQ ID NO: 105147 - RNA, 12 nt, Artificial Sequence
  Description of Artificial Sequence: Synthetic oligonucleotide
gcauaaaacagu

SEQ ID NO: 105148 - RNA, 11 nt, Artificial Sequence
  Description of Artificial Sequence: Synthetic oligonucleotide
uccuuuauccu

SEQ ID NO: 105149 - RNA, 11 nt, Artificial Sequence
  Description of Artificial Sequence: Synthetic oligonucleotide
aacgcaaguug

SEQ ID NO: 105150 - RNA, 12 nt, Artificial Sequence
  Description of Artificial Sequence: Synthetic oligonucleotide
aacugaaaccau

SEQ ID NO: 105151 - RNA, 13 nt, Artificial Sequence
  Description of Artificial Sequence: Synthetic oligonucleotide
cuuuguuaaauau

SEQ ID NO: 105152 - RNA, 13 nt, Artificial Sequence
  Description of Artificial Sequence: Synthetic oligonucleotide
uauauuaaaaguu

SEQ ID NO: 105153 - RNA, 12 nt, Artificial Sequence
  Description of Artificial Sequence: Synthetic oligonucleotide
uuuugacuuaac

SEQ ID NO: 105154 - RNA, 12 nt, Artificial Sequence
  Description of Artificial Sequence: Synthetic oligonucleotide
caaacucagcac

SEQ ID NO: 105155 - RNA, 10 nt, Artificial Sequence
  Description of Artificial Sequence: Synthetic oligonucleotide
gcugaccuca

SEQ ID NO: 105156 - RNA, 13 nt, Artificial Sequence
  Description of Artificial Sequence: Synthetic oligonucleotide
uuauucagaucgc

SEQ ID NO: 105157 - RNA, 12 nt, Artificial Sequence
  Description of Artificial Sequence: Synthetic oligonucleotide
ggguucugggau

SEQ ID NO: 105158 - RNA, 14 nt, Artificial Sequence
  Description of Artificial Sequence: Synthetic oligonucleotide
uauuggaaauuaug

SEQ ID NO: 105159 - RNA, 12 nt, Artificial Sequence
  Description of Artificial Sequence: Synthetic oligonucleotide
uggaagcacuag

SEQ ID NO: 105160 - RNA, 12 nt, Artificial Sequence
  Description of Artificial Sequence: Synthetic oligonucleotide
uuuuuaugugga

SEQ ID NO: 105161 - RNA, 11 nt, Artificial Sequence
  Description of Artificial Sequence: Synthetic oligonucleotide
gaauugguaga

SEQ ID NO: 105162 - RNA, 12 nt, Artificial Sequence
  Description of Artificial Sequence: Synthetic oligonucleotide
uagacuuggaga

SEQ ID NO: 105163 - RNA, 12 nt, Artificial Sequence
  Description of Artificial Sequence: Synthetic oligonucleotide
uacaguauucca

SEQ ID NO: 105164 - RNA, 14 nt, Artificial Sequence
  Description of Artificial Sequence: Synthetic oligonucleotide
cacugaugaauuaa

SEQ ID NO: 105165 - RNA, 11 nt, Artificial Sequence
  Description of Artificial Sequence: Synthetic oligonucleotide
cacaucaucac

SEQ ID NO: 105166 - RNA, 12 nt, Artificial Sequence
  Description of Artificial Sequence: Synthetic oligonucleotide
ucaccaaacaga

SEQ ID NO: 105167 - RNA, 11 nt, Artificial Sequence
  Description of Artificial Sequence: Synthetic oligonucleotide
gaacaugaugg

SEQ ID NO: 105168 - RNA, 11 nt, Artificial Sequence
  Description of Artificial Sequence: Synthetic oligonucleotide
auguagacugc

SEQ ID NO: 105169 - RNA, 12 nt, Artificial Sequence
  Description of Artificial Sequence: Synthetic oligonucleotide
gaucuauuuaug

SEQ ID NO: 105170 - RNA, 11 nt, Artificial Sequence
  Description of Artificial Sequence: Synthetic oligonucleotide
cacuauuauca

SEQ ID NO: 105171 - RNA, 10 nt, Artificial Sequence
  Description of Artificial Sequence: Synthetic oligonucleotide
ucaguucugc

SEQ ID NO: 105172 - RNA, 12 nt, Artificial Sequence
  Description of Artificial Sequence: Synthetic oligonucleotide
gauuaaaccuac

SEQ ID NO: 105173 - RNA, 12 nt, Artificial Sequence
  Description of Artificial Sequence: Synthetic oligonucleotide
uaaaauccuucu

SEQ ID NO: 105174 - RNA, 11 nt, Artificial Sequence
  Description of Artificial Sequence: Synthetic oligonucleotide
augcuguagac

SEQ ID NO: 105175 - RNA, 12 nt, Artificial Sequence
  Description of Artificial Sequence: Synthetic oligonucleotide
ugauaggaauag

SEQ ID NO: 105176 - RNA, 10 nt, Artificial Sequence
  Description of Artificial Sequence: Synthetic oligonucleotide
auggcccuga

SEQ ID NO: 105177 - RNA, 10 nt, Artificial Sequence
  Description of Artificial Sequence: Synthetic oligonucleotide
uccucaagca

SEQ ID NO: 105178 - RNA, 9 nt, Artificial Sequence
  Description of Artificial Sequence: Synthetic oligonucleotide
uucagccca

SEQ ID NO: 105179 - RNA, 10 nt, Artificial Sequence
  Description of Artificial Sequence: Synthetic oligonucleotide
cugcugaacc

SEQ ID NO: 105180 - RNA, 11 nt, Artificial Sequence
  Description of Artificial Sequence: Synthetic oligonucleotide
aguucucuuca

SEQ ID NO: 105181 - RNA, 10 nt, Artificial Sequence
  Description of Artificial Sequence: Synthetic oligonucleotide
cagccuagag

SEQ ID NO: 105182 - RNA, 12 nt, Artificial Sequence
  Description of Artificial Sequence: Synthetic oligonucleotide
ucugugaagugu

SEQ ID NO: 105183 - RNA, 13 nt, Artificial Sequence
  Description of Artificial Sequence: Synthetic oligonucleotide
gagaaaauuucaa

SEQ ID NO: 105184 - RNA, 10 nt, Artificial Sequence
  Description of Artificial Sequence: Synthetic oligonucleotide
auccuccuga

SEQ ID NO: 105185 - RNA, 11 nt, Artificial Sequence
  Description of Artificial Sequence: Synthetic oligonucleotide
ugacaucauau

SEQ ID NO: 105186 - RNA, 12 nt, Artificial Sequence
  Description of Artificial Sequence: Synthetic oligonucleotide
aucuucaucaua

SEQ ID NO: 105187 - RNA, 12 nt, Artificial Sequence
  Description of Artificial Sequence: Synthetic oligonucleotide
acuagcuauuaa

SEQ ID NO: 105188 - RNA, 13 nt, Artificial Sequence
  Description of Artificial Sequence: Synthetic oligonucleotide
cucuacuaaaaau

SEQ ID NO: 105189 - RNA, 11 nt, Artificial Sequence
  Description of Artificial Sequence: Synthetic oligonucleotide
cuaucucgccu

SEQ ID NO: 105190 - RNA, 12 nt, Artificial Sequence
  Description of Artificial Sequence: Synthetic oligonucleotide
uucgguccaguu

SEQ ID NO: 105191 - RNA, 10 nt, Artificial Sequence
  Description of Artificial Sequence: Synthetic oligonucleotide
auguagccgc

SEQ ID NO: 105192 - RNA, 11 nt, Artificial Sequence
  Description of Artificial Sequence: Synthetic oligonucleotide
gaggagacuug

SEQ ID NO: 105193 - RNA, 11 nt, Artificial Sequence
  Description of Artificial Sequence: Synthetic oligonucleotide
aguagugagga

SEQ ID NO: 105194 - RNA, 13 nt, Artificial Sequence
  Description of Artificial Sequence: Synthetic oligonucleotide
agaugaguacaaa

SEQ ID NO: 105195 - RNA, 12 nt, Artificial Sequence
  Description of Artificial Sequence: Synthetic oligonucleotide
uuguuaaugggc

SEQ ID NO: 105196 - RNA, 12 nt, Artificial Sequence
  Description of Artificial Sequence: Synthetic oligonucleotide
uuuuaauuuauu

SEQ ID NO: 105197 - RNA, 11 nt, Artificial Sequence
  Description of Artificial Sequence: Synthetic oligonucleotide
auuuaaauaug

SEQ ID NO: 105198 - RNA, 12 nt, Artificial Sequence
  Description of Artificial Sequence: Synthetic oligonucleotide
auccuuuguuuc

SEQ ID NO: 105199 - RNA, 13 nt, Artificial Sequence
  Description of Artificial Sequence: Synthetic oligonucleotide
gucuaaguguuug

SEQ ID NO: 105200 - RNA, 11 nt, Artificial Sequence
  Description of Artificial Sequence: Synthetic oligonucleotide
ccugugacaaa

SEQ ID NO: 105201 - RNA, 12 nt, Artificial Sequence
  Description of Artificial Sequence: Synthetic oligonucleotide
caggcugaauua

SEQ ID NO: 105202 - RNA, 13 nt, Artificial Sequence
  Description of Artificial Sequence: Synthetic oligonucleotide
ucauucuuacaau

SEQ ID NO: 105203 - RNA, 14 nt, Artificial Sequence
  Description of Artificial Sequence: Synthetic oligonucleotide
cauucuuacaauug

SEQ ID NO: 105204 - RNA, 11 nt, Artificial Sequence
  Description of Artificial Sequence: Synthetic oligonucleotide
agagaguguac

SEQ ID NO: 105205 - RNA, 11 nt, Artificial Sequence
  Description of Artificial Sequence: Synthetic oligonucleotide
gaacucagcag

SEQ ID NO: 105206 - RNA, 12 nt, Artificial Sequence
  Description of Artificial Sequence: Synthetic oligonucleotide
uuauuuucagua

SEQ ID NO: 105207 - RNA, 11 nt, Artificial Sequence
  Description of Artificial Sequence: Synthetic oligonucleotide
cuuaaauggaa

SEQ ID NO: 105208 - RNA, 12 nt, Artificial Sequence
  Description of Artificial Sequence: Synthetic oligonucleotide
gccuaaaauugu

SEQ ID NO: 105209 - RNA, 12 nt, Artificial Sequence
  Description of Artificial Sequence: Synthetic oligonucleotide
acuaacaucugg

SEQ ID NO: 105210 - RNA, 11 nt, Artificial Sequence
  Description of Artificial Sequence: Synthetic oligonucleotide
gacugugagcu

SEQ ID NO: 105211 - RNA, 13 nt, Artificial Sequence
  Description of Artificial Sequence: Synthetic oligonucleotide
gcuuuuuauuaau

SEQ ID NO: 105212 - RNA, 12 nt, Artificial Sequence
  Description of Artificial Sequence: Synthetic oligonucleotide
ucuucuuacauu

SEQ ID NO: 105213 - RNA, 14 nt, Artificial Sequence
  Description of Artificial Sequence: Synthetic oligonucleotide
auuuguaaaaaugu

SEQ ID NO: 105214 - RNA, 14 nt, Artificial Sequence
  Description of Artificial Sequence: Synthetic oligonucleotide
ucuuaauucauauu

SEQ ID NO: 105215 - RNA, 12 nt, Artificial Sequence
  Description of Artificial Sequence: Synthetic oligonucleotide
aacuaaucauga

SEQ ID NO: 105216 - RNA, 11 nt, Artificial Sequence
  Description of Artificial Sequence: Synthetic oligonucleotide
cugcucuuggg

SEQ ID NO: 105217 - RNA, 12 nt, Artificial Sequence
  Description of Artificial Sequence: Synthetic oligonucleotide
aguagcuuugag

SEQ ID NO: 105218 - RNA, 13 nt, Artificial Sequence
  Description of Artificial Sequence: Synthetic oligonucleotide
acguaauauuuca

SEQ ID NO: 105219 - RNA, 12 nt, Artificial Sequence
  Description of Artificial Sequence: Synthetic oligonucleotide
auucucuucacu

SEQ ID NO: 105220 - RNA, 13 nt, Artificial Sequence
  Description of Artificial Sequence: Synthetic oligonucleotide
uaaugcuaagaaa

SEQ ID NO: 105221 - RNA, 11 nt, Artificial Sequence
  Description of Artificial Sequence: Synthetic oligonucleotide
cugaaaaucaa

SEQ ID NO: 105222 - RNA, 13 nt, Artificial Sequence
  Description of Artificial Sequence: Synthetic oligonucleotide
auaugauuacuuu

SEQ ID NO: 105223 - RNA, 13 nt, Artificial Sequence
  Description of Artificial Sequence: Synthetic oligonucleotide
auuuuguucuaca

SEQ ID NO: 105224 - RNA, 11 nt, Artificial Sequence
  Description of Artificial Sequence: Synthetic oligonucleotide
ccgggacucuc

SEQ ID NO: 105225 - RNA, 13 nt, Artificial Sequence
  Description of Artificial Sequence: Synthetic oligonucleotide
cuuuaaaguaaag

SEQ ID NO: 105226 - RNA, 12 nt, Artificial Sequence
  Description of Artificial Sequence: Synthetic oligonucleotide
cuggaagccugg

SEQ ID NO: 105227 - RNA, 13 nt, Artificial Sequence
  Description of Artificial Sequence: Synthetic oligonucleotide
aaacaaaagagag

SEQ ID NO: 105228 - RNA, 12 nt, Artificial Sequence
  Description of Artificial Sequence: Synthetic oligonucleotide
ucaguuaugccg

SEQ ID NO: 105229 - RNA, 12 nt, Artificial Sequence
  Description of Artificial Sequence: Synthetic oligonucleotide
aaaagaagucca

SEQ ID NO: 105230 - RNA, 10 nt, Artificial Sequence
  Description of Artificial Sequence: Synthetic oligonucleotide
ggugagguua

SEQ ID NO: 105231 - RNA, 10 nt, Artificial Sequence
  Description of Artificial Sequence: Synthetic oligonucleotide
ggaagaggac

SEQ ID NO: 105232 - RNA, 12 nt, Artificial Sequence
  Description of Artificial Sequence: Synthetic oligonucleotide
agcaaguauugu

SEQ ID NO: 105233 - RNA, 11 nt, Artificial Sequence
  Description of Artificial Sequence: Synthetic oligonucleotide
uuguagcacuc

SEQ ID NO: 105234 - RNA, 13 nt, Artificial Sequence
  Description of Artificial Sequence: Synthetic oligonucleotide
caaaaccacaaau

SEQ ID NO: 105235 - RNA, 11 nt, Artificial Sequence
  Description of Artificial Sequence: Synthetic oligonucleotide
aagcccauaca

SEQ ID NO: 105236 - RNA, 10 nt, Artificial Sequence
  Description of Artificial Sequence: Synthetic oligonucleotide
gcccauacag

SEQ ID NO: 105237 - RNA, 11 nt, Artificial Sequence
  Description of Artificial Sequence: Synthetic oligonucleotide
agaaaccuucc

SEQ ID NO: 105238 - RNA, 9 nt, Artificial Sequence
  Description of Artificial Sequence: Synthetic oligonucleotide
uauaccuac

SEQ ID NO: 105239 - RNA, 12 nt, Artificial Sequence
  Description of Artificial Sequence: Synthetic oligonucleotide
ccaguuuucgga

SEQ ID NO: 105240 - RNA, 8 nt, Artificial Sequence
  Description of Artificial Sequence: Synthetic oligonucleotide
gaacaggg

SEQ ID NO: 105241 - RNA, 12 nt, Artificial Sequence
  Description of Artificial Sequence: Synthetic oligonucleotide
uaacuuuccagu

SEQ ID NO: 105242 - RNA, 13 nt, Artificial Sequence
  Description of Artificial Sequence: Synthetic oligonucleotide
aaguuugguuuug

SEQ ID NO: 105243 - RNA, 11 nt, Artificial Sequence
  Description of Artificial Sequence: Synthetic oligonucleotide
uucccacugua

SEQ ID NO: 105244 - RNA, 12 nt, Artificial Sequence
  Description of Artificial Sequence: Synthetic oligonucleotide
gauaccauauga

SEQ ID NO: 105245 - RNA, 10 nt, Artificial Sequence
  Description of Artificial Sequence: Synthetic oligonucleotide
acaugggcug

SEQ ID NO: 105246 - RNA, 12 nt, Artificial Sequence
  Description of Artificial Sequence: Synthetic oligonucleotide
aacuuuuucaua

SEQ ID NO: 105247 - RNA, 11 nt, Artificial Sequence
  Description of Artificial Sequence: Synthetic oligonucleotide
augaggccgga

SEQ ID NO: 105248 - RNA, 10 nt, Artificial Sequence
  Description of Artificial Sequence: Synthetic oligonucleotide
cugcauuugu

SEQ ID NO: 105249 - RNA, 12 nt, Artificial Sequence
  Description of Artificial Sequence: Synthetic oligonucleotide
auguuuacuacc

SEQ ID NO: 105250 - RNA, 14 nt, Artificial Sequence
  Description of Artificial Sequence: Synthetic oligonucleotide
auuuuuugaugaaa

SEQ ID NO: 105251 - RNA, 13 nt, Artificial Sequence
  Description of Artificial Sequence: Synthetic oligonucleotide
agugugugaauuu

SEQ ID NO: 105252 - RNA, 12 nt, Artificial Sequence
  Description of Artificial Sequence: Synthetic oligonucleotide
agcaauguaugu

SEQ ID NO: 105253 - RNA, 13 nt, Artificial Sequence
  Description of Artificial Sequence: Synthetic oligonucleotide
aagcacauauaua

SEQ ID NO: 105254 - RNA, 13 nt, Artificial Sequence
  Description of Artificial Sequence: Synthetic oligonucleotide
uaauaguuucucc

SEQ ID NO: 105255 - RNA, 12 nt, Artificial Sequence
  Description of Artificial Sequence: Synthetic oligonucleotide
guuucuccaaau

SEQ ID NO: 105256 - RNA, 12 nt, Artificial Sequence
  Description of Artificial Sequence: Synthetic oligonucleotide
acuuccuagaaa

SEQ ID NO: 105257 - RNA, 12 nt, Artificial Sequence
  Description of Artificial Sequence: Synthetic oligonucleotide
acaccauauaug

SEQ ID NO: 105258 - RNA, 13 nt, Artificial Sequence
  Description of Artificial Sequence: Synthetic oligonucleotide
uauaugaauggag

SEQ ID NO: 105259 - RNA, 12 nt, Artificial Sequence
  Description of Artificial Sequence: Synthetic oligonucleotide
cauuuacaggga

SEQ ID NO: 105260 - RNA, 12 nt, Artificial Sequence
  Description of Artificial Sequence: Synthetic oligonucleotide
auuuacagggac

SEQ ID NO: 105261 - RNA, 9 nt, Artificial Sequence
  Description of Artificial Sequence: Synthetic oligonucleotide
gggaccuga

SEQ ID NO: 105262 - RNA, 13 nt, Artificial Sequence
  Description of Artificial Sequence: Synthetic oligonucleotide
guuugacugcauc

SEQ ID NO: 105263 - RNA, 12 nt, Artificial Sequence
  Description of Artificial Sequence: Synthetic oligonucleotide
uugacugcaucg

SEQ ID NO: 105264 - RNA, 11 nt, Artificial Sequence
  Description of Artificial Sequence: Synthetic oligonucleotide
aguucacaggg

SEQ ID NO: 105265 - RNA, 12 nt, Artificial Sequence
  Description of Artificial Sequence: Synthetic oligonucleotide
gcaccucugucc

SEQ ID NO: 105266 - RNA, 14 nt, Artificial Sequence
  Description of Artificial Sequence: Synthetic oligonucleotide
guuugucuuuuuaa

SEQ ID NO: 105267 - RNA, 13 nt, Artificial Sequence
  Description of Artificial Sequence: Synthetic oligonucleotide
uugucuuuuuaag

SEQ ID NO: 105268 - RNA, 12 nt, Artificial Sequence
  Description of Artificial Sequence: Synthetic oligonucleotide
cuaaagguuguc

SEQ ID NO: 105269 - RNA, 11 nt, Artificial Sequence
  Description of Artificial Sequence: Synthetic oligonucleotide
agguugucgac

SEQ ID NO: 105270 - RNA, 12 nt, Artificial Sequence
  Description of Artificial Sequence: Synthetic oligonucleotide
ccuggcaauugu

SEQ ID NO: 105271 - RNA, 11 nt, Artificial Sequence
  Description of Artificial Sequence: Synthetic oligonucleotide
guggugcgagg

SEQ ID NO: 105272 - RNA, 12 nt, Artificial Sequence
  Description of Artificial Sequence: Synthetic oligonucleotide
gagacaugaaau

SEQ ID NO: 105273 - RNA, 12 nt, Artificial Sequence
  Description of Artificial Sequence: Synthetic oligonucleotide
uauauuucucca

SEQ ID NO: 105274 - RNA, 9 nt, Artificial Sequence
  Description of Artificial Sequence: Synthetic oligonucleotide
augaaggcu

SEQ ID NO: 105275 - RNA, 10 nt, Artificial Sequence
  Description of Artificial Sequence: Synthetic oligonucleotide
cuggaguggu

SEQ ID NO: 105276 - RNA, 10 nt, Artificial Sequence
  Description of Artificial Sequence: Synthetic oligonucleotide
ggaagagagg

SEQ ID NO: 105277 - RNA, 11 nt, Artificial Sequence
  Description of Artificial Sequence: Synthetic oligonucleotide
uugcaucgggc

SEQ ID NO: 105278 - RNA, 12 nt, Artificial Sequence
  Description of Artificial Sequence: Synthetic oligonucleotide
uauccuacugug

SEQ ID NO: 105279 - RNA, 12 nt, Artificial Sequence
  Description of Artificial Sequence: Synthetic oligonucleotide
ccuacuguguaa

SEQ ID NO: 105280 - RNA, 11 nt, Artificial Sequence
  Description of Artificial Sequence: Synthetic oligonucleotide
cuuguagugua

SEQ ID NO: 105281 - RNA, 12 nt, Artificial Sequence
  Description of Artificial Sequence: Synthetic oligonucleotide
cuuuguugauug

SEQ ID NO: 105282 - RNA, 13 nt, Artificial Sequence
  Description of Artificial Sequence: Synthetic oligonucleotide
uuguugauugaaa

SEQ ID NO: 105283 - RNA, 14 nt, Artificial Sequence
  Description of Artificial Sequence: Synthetic oligonucleotide
ucuuuuucuuccau

SEQ ID NO: 105284 - RNA, 12 nt, Artificial Sequence
  Description of Artificial Sequence: Synthetic oligonucleotide
aucuuccuucua

SEQ ID NO: 105285 - RNA, 12 nt, Artificial Sequence
  Description of Artificial Sequence: Synthetic oligonucleotide
ugaaugcuucau

SEQ ID NO: 105286 - RNA, 12 nt, Artificial Sequence
  Description of Artificial Sequence: Synthetic oligonucleotide
gaaugcuucaug

SEQ ID NO: 105287 - RNA, 12 nt, Artificial Sequence
  Description of Artificial Sequence: Synthetic oligonucleotide
auucuacuuuga

SEQ ID NO: 105288 - RNA, 12 nt, Artificial Sequence
  Description of Artificial Sequence: Synthetic oligonucleotide
gcaacuacagac

SEQ ID NO: 105289 - RNA, 12 nt, Artificial Sequence
  Description of Artificial Sequence: Synthetic oligonucleotide
accaaggucaac

SEQ ID NO: 105290 - RNA, 12 nt, Artificial Sequence
  Description of Artificial Sequence: Synthetic oligonucleotide
gacuaucucgac

SEQ ID NO: 105291 - RNA, 12 nt, Artificial Sequence
  Description of Artificial Sequence: Synthetic oligonucleotide
accuucccaaac

SEQ ID NO: 105292 - RNA, 13 nt, Artificial Sequence
  Description of Artificial Sequence: Synthetic oligonucleotide
caagcuuagaacu

SEQ ID NO: 105293 - RNA, 14 nt, Artificial Sequence
  Description of Artificial Sequence: Synthetic oligonucleotide
gcuuagaacuuuaa

SEQ ID NO: 105294 - RNA, 13 nt, Artificial Sequence
  Description of Artificial Sequence: Synthetic oligonucleotide
aacuuuaagcaac

SEQ ID NO: 105295 - RNA, 10 nt, Artificial Sequence
  Description of Artificial Sequence: Synthetic oligonucleotide
agaccaccac

SEQ ID NO: 105296 - RNA, 13 nt, Artificial Sequence
  Description of Artificial Sequence: Synthetic oligonucleotide
cgagaaauaaagu

SEQ ID NO: 105297 - RNA, 13 nt, Artificial Sequence
  Description of Artificial Sequence: Synthetic oligonucleotide
gagaaauaaaguu

SEQ ID NO: 105298 - RNA, 11 nt, Artificial Sequence
  Description of Artificial Sequence: Synthetic oligonucleotide
ggaaaugaucc

SEQ ID NO: 105299 - RNA, 12 nt, Artificial Sequence
  Description of Artificial Sequence: Synthetic oligonucleotide
aagaaaugaaac

SEQ ID NO: 105300 - RNA, 12 nt, Artificial Sequence
  Description of Artificial Sequence: Synthetic oligonucleotide
uuuccauccucc

SEQ ID NO: 105301 - RNA, 14 nt, Artificial Sequence
  Description of Artificial Sequence: Synthetic oligonucleotide
cugaaaaucuuuga

SEQ ID NO: 105302 - RNA, 10 nt, Artificial Sequence
  Description of Artificial Sequence: Synthetic oligonucleotide
gccguucagg

SEQ ID NO: 105303 - RNA, 12 nt, Artificial Sequence
  Description of Artificial Sequence: Synthetic oligonucleotide
aggguccagaag

SEQ ID NO: 105304 - RNA, 12 nt, Artificial Sequence
  Description of Artificial Sequence: Synthetic oligonucleotide
caagacugcuug

SEQ ID NO: 105305 - RNA, 12 nt, Artificial Sequence
  Description of Artificial Sequence: Synthetic oligonucleotide
ccaugucuuugg

SEQ ID NO: 105306 - RNA, 10 nt, Artificial Sequence
  Description of Artificial Sequence: Synthetic oligonucleotide
ccugaaacac

SEQ ID NO: 105307 - RNA, 11 nt, Artificial Sequence
  Description of Artificial Sequence: Synthetic oligonucleotide
cucuguaccuc

SEQ ID NO: 105308 - RNA, 11 nt, Artificial Sequence
  Description of Artificial Sequence: Synthetic oligonucleotide
gcaagacaaga

SEQ ID NO: 105309 - RNA, 12 nt, Artificial Sequence
  Description of Artificial Sequence: Synthetic oligonucleotide
caagacaagaaa

SEQ ID NO: 105310 - RNA, 11 nt, Artificial Sequence
  Description of Artificial Sequence: Synthetic oligonucleotide
guacaagaucc

SEQ ID NO: 105311 - RNA, 11 nt, Artificial Sequence
  Description of Artificial Sequence: Synthetic oligonucleotide
guacuugcaga

SEQ ID NO: 105312 - RNA, 12 nt, Artificial Sequence
  Description of Artificial Sequence: Synthetic oligonucleotide
gaucgauacaga

SEQ ID NO: 105313 - RNA, 12 nt, Artificial Sequence
  Description of Artificial Sequence: Synthetic oligonucleotide
auaaaaauaaau

SEQ ID NO: 105314 - RNA, 12 nt, Artificial Sequence
  Description of Artificial Sequence: Synthetic oligonucleotide
aaaaauaaauau

SEQ ID NO: 105315 - RNA, 12 nt, Artificial Sequence
  Description of Artificial Sequence: Synthetic oligonucleotide
uugacugcugug

SEQ ID NO: 105316 - RNA, 12 nt, Artificial Sequence
  Description of Artificial Sequence: Synthetic oligonucleotide
gagaugagagac

SEQ ID NO: 105317 - RNA, 9 nt, Artificial Sequence
  Description of Artificial Sequence: Synthetic oligonucleotide
cccacuugg

SEQ ID NO: 105318 - RNA, 2695 nt, Homo sapiens
caaauaaaagcgauggcgauugggcugccgcguuuggcgcucgguccggucgcguccgacacccggugggacucagaaggcaguggagccccggcggcggcggcggcggcgcgcgggggcgacgcgcgggaacaacgcgagucggcgcgcgggacgaagaauaaucaugggccagacugggaagaaaucugagaagggaccaguuuguuggcggaagcguguaaaaucagaguacaugcgacugagacagcucaagagguucagacgagcugaugaaguaaagaguauguuuaguuccaaucgucagaaaauuuuggaaagaacggaaaucuuaaaccaagaauggaaacagcgaaggauacagccugugcacauccugacuucugugagcucauugcgcgggacuagggaguguucggugaccagugacuuggauuuuccaacacaagucaucccauuaaagacucugaaugcaguugcuucaguacccauaauguauucuuggucuccccuacagcagaauuuuaugguggaagaugaaacuguuuuacauaacauuccuuauaugggagaugaaguuuuagaucaggaugguacuuucauugaagaacuaauaaaaaauuaugaugggaaaguacacggggauagagaauguggguuuauaaaugaugaaauuuuuguggaguuggugaaugcccuuggucaauauaaugaugaugacgaugaugaugauggagacgauccugaagaaagagaagaaaagcagaaagaucuggaggaucaccgagaugauaaagaaagccgcccaccucggaaauuuccuucugauaaaauuuuugaagccauuuccucaauguuuccagauaagggcacagcagaagaacuaaaggaaaaauauaaagaacucaccgaacagcagcucccaggcgcacuuccuccugaauguacccccaacauagauggaccaaaugcuaaaucuguucagagagagcaaagcuuacacuccuuucauacgcuuuucuguaggcgauguuuuaaauaugacugcuuccuacaucguaagugcaauuauucuuuucaugcaacacccaacacuuauaagcggaagaacacagaaacagcucuagacaacaaaccuuguggaccacaguguuaccagcauuuggagggagcaaaggaguuugcugcugcucucaccgcugagcggauaaagaccccaccaaaacguccaggaggccgcagaagaggacggcuucccaauaacaguagcaggcccagcacccccaccauuaaugugcuggaaucaaaggauacagacagugauagggaagcagggacugaaacggggggagagaacaaugauaaagaagaagaagagaagaaagaugaaacuucgagcuccucugaagcaaauucucggugucaaacaccaauaaagaugaagccaaauauugaaccuccugagaauguggaguggaguggugcugaagccucaauguuuagaguccucauuggcacuuacuaugacaauuucugugccauugcuagguuaauugggaccaaaacauguagacagguguaugaguuuagagucaaagaaucuagcaucauagcuccagcucccgcugaggauguggauacuccuccaaggaaaaagaagaggaaacaccgguugugggcugcacacugcagaaagauacagcugaaaaaggacggcuccucuaaccauguuuacaacuaucaacccugugaucauccacggcagccuugugacaguucgugcccuugugugauagcacaaaauuuuugugaaaaguuuugucaauguaguucagagugucaaaaccgcuuuccgggaugccgcugcaaagcacagugcaacaccaagcagugcccgugcuaccuggcuguccgagagugugacccugaccucugucuuacuuguggagccgcugaccauugggacaguaaaaauguguccugcaagaacugcaguauucagcggggcuccaaaaagcaucuauugcuggcaccaucugacguggcaggcugggggauuuuuaucaaagauccugugcagaaaaaugaauucaucucagaauacuguggagagauuauuucucaagaugaagcugacagaagagggaaaguguaugauaaauacaugugcagcuuucuguucaacuugaacaaugauuuugugguggaugcaacccgcaaggguaacaaaauucguuuugcaaaucauucgguaaauccaaacugcuaugcaaaaguuaugaugguuaacggugaucacaggauagguauuuuugccaagagagccauccagacuggcgaagagcuguuuuuugauuacagauacagccaggcugaugcccugaaguaugucggcaucgaaagagaaauggaaaucccuugacaucugcuaccuccuccccccuccucugaaacagcugccuuagcuucaggaaccucgaguacugugggcaauuuagaaaaagaacaugcaguuugaaauucugaauuugcaaaguacuguaagaauaauuuauaguaaugaguuuaaaaaucaacuuuuuauugccuucucaccagcugcaaaguguuuuguaccagugaauuuuugcaauaaugcaguaugguacauuuuucaacuuugaauaaagaauacuugaacuugucaaaaaaaaaa

SEQ ID NO: 105319 - RNA, 2563 nt, Homo sapiens
caaauaaaagcgauggcgauugggcugccgcguuuggcgcucgguccggucgcguccgacacccggugggacucagaaggcaguggagccccggcggcggcggcggcggcgcgcgggggcgacgcgcgggaacaacgcgagucggcgcgcgggacgaagaauaaucaugggccagacugggaagaaaucugagaagggaccaguuuguuggcggaagcguguaaaaucagaguacaugcgacugagacagcucaagagguucagacgagcugaugaaguaaagaguauguuuaguuccaaucgucagaaaauuuuggaaagaacggaaaucuuaaaccaagaauggaaacagcgaaggauacagccugugcacauccugacuucugugagcucauugcgcgggacuagggagguggaagaugaaacuguuuuacauaacauuccuuauaugggagaugaaguuuuagaucaggaugguacuuucauugaagaacuaauaaaaaauuaugaugggaaaguacacggggauagagaauguggguuuauaaaugaugaaauuuuuguggaguuggugaaugcccuuggucaauauaaugaugaugacgaugaugaugauggagacgauccugaagaaagagaagaaaagcagaaagaucuggaggaucaccgagaugauaaagaaagccgcccaccucggaaauuuccuucugauaaaauuuuugaagccauuuccucaauguuuccagauaagggcacagcagaagaacuaaaggaaaaauauaaagaacucaccgaacagcagcucccaggcgcacuuccuccugaauguacccccaacauagauggaccaaaugcuaaaucuguucagagagagcaaagcuuacacuccuuucauacgcuuuucuguaggcgauguuuuaaauaugacugcuuccuacauccuuuucaugcaacacccaacacuuauaagcggaagaacacagaaacagcucuagacaacaaaccuuguggaccacaguguuaccagcauuuggagggagcaaaggaguuugcugcugcucucaccgcugagcggauaaagaccccaccaaaacguccaggaggccgcagaagaggacggcuucccaauaacaguagcaggcccagcacccccaccauuaaugugcuggaaucaaaggauacagacagugauagggaagcagggacugaaacggggggagagaacaaugauaaagaagaagaagagaagaaagaugaaacuucgagcuccucugaagcaaauucucggugucaaacaccaauaaagaugaagccaaauauugaaccuccugagaauguggaguggaguggugcugaagccucaauguuuagaguccucauuggcacuuacuaugacaauuucugugccauugcuagguuaauugggaccaaaacauguagacagguguaugaguuuagagucaaagaaucuagcaucauagcuccagcucccgcugaggauguggauacuccuccaaggaaaaagaagaggaaacaccgguugugggcugcacacugcagaaagauacagcugaaaaaggacggcuccucuaaccauguuuacaacuaucaacccugugaucauccacggcagccuugugacaguucgugcccuugugugauagcacaaaauuuuugugaaaaguuuugucaauguaguucagagugucaaaaccgcuuuccgggaugccgcugcaaagcacagugcaacaccaagcagugcccgugcuaccuggcuguccgagagugugacccugaccucugucuuacuuguggagccgcugaccauugggacaguaaaaauguguccugcaagaacugcaguauucagcggggcuccaaaaagcaucuauugcuggcaccaucugacguggcaggcugggggauuuuuaucaaagauccugugcagaaaaaugaauucaucucagaauacuguggagagauuauuucucaagaugaagcugacagaagagggaaaguguaugauaaauacaugugcagcuuucuguucaacuugaacaaugauuuugugguggaugcaacccgcaaggguaacaaaauucguuuugcaaaucauucgguaaauccaaacugcuaugcaaaaguuaugaugguuaacggugaucacaggauagguauuuuugccaagagagccauccagacuggcgaagagcuguuuuuugauuacagauacagccaggcugaugcccugaaguaugucggcaucgaaagagaaauggaaaucccuugacaucugcuaccuccuccccccuccucugaaacagcugccuuagcuucaggaaccucgaguacugugggcaauuuagaaaaagaacaugcaguuugaaauucugaauuugcaaaguacuguaagaauaauuuauaguaaugaguuuaaaaaucaacuuuuuauugccuucucaccagcugcaaaguguuuuguaccagugaauuuuugcaauaaugcaguaugguacauuuuucaacuuugaauaaagaauacuugaacuugucaaaaaaaaaa

SEQ ID NO: 105320 - RNA, 19 nt, Artificial Sequence
  Description of Artificial Sequence: Synthetic oligonucleotide
caaauaaaagcgauggcga

SEQ ID NO: 105321 - RNA, 19 nt, Artificial Sequence
  Description of Artificial Sequence: Synthetic oligonucleotide
auugggcugccgcguuugg

SEQ ID NO: 105322 - RNA, 19 nt, Artificial Sequence
  Description of Artificial Sequence: Synthetic oligonucleotide
gcgcucgguccggucgcgu

SEQ ID NO: 105323 - RNA, 19 nt, Artificial Sequence
  Description of Artificial Sequence: Synthetic oligonucleotide
uccgacacccggugggacu

SEQ ID NO: 105324 - RNA, 19 nt, Artificial Sequence
  Description of Artificial Sequence: Synthetic oligonucleotide
ucagaaggcaguggagccc

SEQ ID NO: 105325 - RNA, 19 nt, Artificial Sequence
  Description of Artificial Sequence: Synthetic oligonucleotide
ccggcggcggcggcggcgg

SEQ ID NO: 105326 - RNA, 19 nt, Artificial Sequence
  Description of Artificial Sequence: Synthetic oligonucleotide
gcgcgcgggggcgacgcgc

SEQ ID NO: 105327 - RNA, 19 nt, Artificial Sequence
  Description of Artificial Sequence: Synthetic oligonucleotide
cgggaacaacgcgagucgg

SEQ ID NO: 105328 - RNA, 19 nt, Artificial Sequence
  Description of Artificial Sequence: Synthetic oligonucleotide
gcgcgcgggacgaagaaua

SEQ ID NO: 105329 - RNA, 19 nt, Artificial Sequence
  Description of Artificial Sequence: Synthetic oligonucleotide
aaucaugggccagacuggg

SEQ ID NO: 105330 - RNA, 19 nt, Artificial Sequence
  Description of Artificial Sequence: Synthetic oligonucleotide
gaagaaaucugagaaggga

SEQ ID NO: 105331 - RNA, 19 nt, Artificial Sequence
  Description of Artificial Sequence: Synthetic oligonucleotide
accaguuuguuggcggaag

SEQ ID NO: 105332 - RNA, 19 nt, Artificial Sequence
  Description of Artificial Sequence: Synthetic oligonucleotide
gcguguaaaaucagaguac

SEQ ID NO: 105333 - RNA, 19 nt, Artificial Sequence
  Description of Artificial Sequence: Synthetic oligonucleotide
caugcgacugagacagcuc

SEQ ID NO: 105334 - RNA, 19 nt, Artificial Sequence
  Description of Artificial Sequence: Synthetic oligonucleotide
caagagguucagacgagcu

SEQ ID NO: 105335 - RNA, 19 nt, Artificial Sequence
  Description of Artificial Sequence: Synthetic oligonucleotide
ugaugaaguaaagaguaug

SEQ ID NO: 105336 - RNA, 19 nt, Artificial Sequence
  Description of Artificial Sequence: Synthetic oligonucleotide
guuuaguuccaaucgucag

SEQ ID NO: 105337 - RNA, 19 nt, Artificial Sequence
  Description of Artificial Sequence: Synthetic oligonucleotide
gaaaauuuuggaaagaacg

SEQ ID NO: 105338 - RNA, 19 nt, Artificial Sequence
  Description of Artificial Sequence: Synthetic oligonucleotide
ggaaaucuuaaaccaagaa

SEQ ID NO: 105339 - RNA, 19 nt, Artificial Sequence
  Description of Artificial Sequence: Synthetic oligonucleotide
auggaaacagcgaaggaua

SEQ ID NO: 105340 - RNA, 19 nt, Artificial Sequence
  Description of Artificial Sequence: Synthetic oligonucleotide
acagccugugcacauccug

SEQ ID NO: 105341 - RNA, 19 nt, Artificial Sequence
  Description of Artificial Sequence: Synthetic oligonucleotide
gacuucugugagcucauug

SEQ ID NO: 105342 - RNA, 19 nt, Artificial Sequence
  Description of Artificial Sequence: Synthetic oligonucleotide
gcgcgggacuagggaggug

SEQ ID NO: 105343 - RNA, 19 nt, Artificial Sequence
  Description of Artificial Sequence: Synthetic oligonucleotide
ggaagaugaaacuguuuua

SEQ ID NO: 105344 - RNA, 19 nt, Artificial Sequence
  Description of Artificial Sequence: Synthetic oligonucleotide
acauaacauuccuuauaug

SEQ ID NO: 105345 - RNA, 19 nt, Artificial Sequence
  Description of Artificial Sequence: Synthetic oligonucleotide
gggagaugaaguuuuagau

SEQ ID NO: 105346 - RNA, 19 nt, Artificial Sequence
  Description of Artificial Sequence: Synthetic oligonucleotide
ucaggaugguacuuucauu

SEQ ID NO: 105347 - RNA, 19 nt, Artificial Sequence
  Description of Artificial Sequence: Synthetic oligonucleotide
ugaagaacuaauaaaaaau

SEQ ID NO: 105348 - RNA, 19 nt, Artificial Sequence
  Description of Artificial Sequence: Synthetic oligonucleotide
uuaugaugggaaaguacac

SEQ ID NO: 105349 - RNA, 19 nt, Artificial Sequence
  Description of Artificial Sequence: Synthetic oligonucleotide
cggggauagagaauguggg

SEQ ID NO: 105350 - RNA, 19 nt, Artificial Sequence
  Description of Artificial Sequence: Synthetic oligonucleotide
guuuauaaaugaugaaauu

SEQ ID NO: 105351 - RNA, 19 nt, Artificial Sequence
  Description of Artificial Sequence: Synthetic oligonucleotide
uuuuguggaguuggugaau

SEQ ID NO: 105352 - RNA, 19 nt, Artificial Sequence
  Description of Artificial Sequence: Synthetic oligonucleotide
ugcccuuggucaauauaau

SEQ ID NO: 105353 - RNA, 19 nt, Artificial Sequence
  Description of Artificial Sequence: Synthetic oligonucleotide
ugaugaugacgaugaugau

SEQ ID NO: 105354 - RNA, 19 nt, Artificial Sequence
  Description of Artificial Sequence: Synthetic oligonucleotide
ugauggagacgauccugaa

SEQ ID NO: 105355 - RNA, 19 nt, Artificial Sequence
  Description of Artificial Sequence: Synthetic oligonucleotide
agaaagagaagaaaagcag

SEQ ID NO: 105356 - RNA, 19 nt, Artificial Sequence
  Description of Artificial Sequence: Synthetic oligonucleotide
gaaagaucuggaggaucac

SEQ ID NO: 105357 - RNA, 19 nt, Artificial Sequence
  Description of Artificial Sequence: Synthetic oligonucleotide
ccgagaugauaaagaaagc

SEQ ID NO: 105358 - RNA, 19 nt, Artificial Sequence
  Description of Artificial Sequence: Synthetic oligonucleotide
ccgcccaccucggaaauuu

SEQ ID NO: 105359 - RNA, 19 nt, Artificial Sequence
  Description of Artificial Sequence: Synthetic oligonucleotide
uccuucugauaaaauuuuu

SEQ ID NO: 105360 - RNA, 19 nt, Artificial Sequence
  Description of Artificial Sequence: Synthetic oligonucleotide
ugaagccauuuccucaaug

SEQ ID NO: 105361 - RNA, 19 nt, Artificial Sequence
  Description of Artificial Sequence: Synthetic oligonucleotide
guuuccagauaagggcaca

SEQ ID NO: 105362 - RNA, 19 nt, Artificial Sequence
  Description of Artificial Sequence: Synthetic oligonucleotide
agcagaagaacuaaaggaa

SEQ ID NO: 105363 - RNA, 19 nt, Artificial Sequence
  Description of Artificial Sequence: Synthetic oligonucleotide
aaaauauaaagaacucacc

SEQ ID NO: 105364 - RNA, 19 nt, Artificial Sequence
  Description of Artificial Sequence: Synthetic oligonucleotide
cgaacagcagcucccaggc

SEQ ID NO: 105365 - RNA, 19 nt, Artificial Sequence
  Description of Artificial Sequence: Synthetic oligonucleotide
cgcacuuccuccugaaugu

SEQ ID NO: 105366 - RNA, 19 nt, Artificial Sequence
  Description of Artificial Sequence: Synthetic oligonucleotide
uacccccaacauagaugga

SEQ ID NO: 105367 - RNA, 19 nt, Artificial Sequence
  Description of Artificial Sequence: Synthetic oligonucleotide
accaaaugcuaaaucuguu

SEQ ID NO: 105368 - RNA, 19 nt, Artificial Sequence
  Description of Artificial Sequence: Synthetic oligonucleotide
ucagagagagcaaagcuua

SEQ ID NO: 105369 - RNA, 19 nt, Artificial Sequence
  Description of Artificial Sequence: Synthetic oligonucleotide
acacuccuuucauacgcuu

SEQ ID NO: 105370 - RNA, 19 nt, Artificial Sequence
  Description of Artificial Sequence: Synthetic oligonucleotide
uuucuguaggcgauguuuu

SEQ ID NO: 105371 - RNA, 19 nt, Artificial Sequence
  Description of Artificial Sequence: Synthetic oligonucleotide
uaaauaugacugcuuccua

SEQ ID NO: 105372 - RNA, 19 nt, Artificial Sequence
  Description of Artificial Sequence: Synthetic oligonucleotide
acauccuuuucaugcaaca

SEQ ID NO: 105373 - RNA, 19 nt, Artificial Sequence
  Description of Artificial Sequence: Synthetic oligonucleotide
acccaacacuuauaagcgg

SEQ ID NO: 105374 - RNA, 19 nt, Artificial Sequence
  Description of Artificial Sequence: Synthetic oligonucleotide
gaagaacacagaaacagcu

SEQ ID NO: 105375 - RNA, 19 nt, Artificial Sequence
  Description of Artificial Sequence: Synthetic oligonucleotide
ucuagacaacaaaccuugu

SEQ ID NO: 105376 - RNA, 19 nt, Artificial Sequence
  Description of Artificial Sequence: Synthetic oligonucleotide
uggaccacaguguuaccag

SEQ ID NO: 105377 - RNA, 19 nt, Artificial Sequence
  Description of Artificial Sequence: Synthetic oligonucleotide
gcauuuggagggagcaaag

SEQ ID NO: 105378 - RNA, 19 nt, Artificial Sequence
  Description of Artificial Sequence: Synthetic oligonucleotide
ggaguuugcugcugcucuc

SEQ ID NO: 105379 - RNA, 19 nt, Artificial Sequence
  Description of Artificial Sequence: Synthetic oligonucleotide
caccgcugagcggauaaag

SEQ ID NO: 105380 - RNA, 19 nt, Artificial Sequence
  Description of Artificial Sequence: Synthetic oligonucleotide
gaccccaccaaaacgucca

SEQ ID NO: 105381 - RNA, 19 nt, Artificial Sequence
  Description of Artificial Sequence: Synthetic oligonucleotide
aggaggccgcagaagagga

SEQ ID NO: 105382 - RNA, 19 nt, Artificial Sequence
  Description of Artificial Sequence: Synthetic oligonucleotide
acggcuucccaauaacagu

SEQ ID NO: 105383 - RNA, 19 nt, Artificial Sequence
  Description of Artificial Sequence: Synthetic oligonucleotide
uagcaggcccagcaccccc

SEQ ID NO: 105384 - RNA, 19 nt, Artificial Sequence
  Description of Artificial Sequence: Synthetic oligonucleotide
caccauuaaugugcuggaa

SEQ ID NO: 105385 - RNA, 19 nt, Artificial Sequence
  Description of Artificial Sequence: Synthetic oligonucleotide
aucaaaggauacagacagu

SEQ ID NO: 105386 - RNA, 19 nt, Artificial Sequence
  Description of Artificial Sequence: Synthetic oligonucleotide
ugauagggaagcagggacu

SEQ ID NO: 105387 - RNA, 19 nt, Artificial Sequence
  Description of Artificial Sequence: Synthetic oligonucleotide
ugaaacggggggagagaac

SEQ ID NO: 105388 - RNA, 19 nt, Artificial Sequence
  Description of Artificial Sequence: Synthetic oligonucleotide
caaugauaaagaagaagaa

SEQ ID NO: 105389 - RNA, 19 nt, Artificial Sequence
  Description of Artificial Sequence: Synthetic oligonucleotide
agagaagaaagaugaaacu

SEQ ID NO: 105390 - RNA, 19 nt, Artificial Sequence
  Description of Artificial Sequence: Synthetic oligonucleotide
uucgagcuccucugaagca

SEQ ID NO: 105391 - RNA, 19 nt, Artificial Sequence
  Description of Artificial Sequence: Synthetic oligonucleotide
aaauucucggugucaaaca

SEQ ID NO: 105392 - RNA, 19 nt, Artificial Sequence
  Description of Artificial Sequence: Synthetic oligonucleotide
accaauaaagaugaagcca

SEQ ID NO: 105393 - RNA, 19 nt, Artificial Sequence
  Description of Artificial Sequence: Synthetic oligonucleotide
aaauauugaaccuccugag

SEQ ID NO: 105394 - RNA, 19 nt, Artificial Sequence
  Description of Artificial Sequence: Synthetic oligonucleotide
gaauguggaguggaguggu

SEQ ID NO: 105395 - RNA, 19 nt, Artificial Sequence
  Description of Artificial Sequence: Synthetic oligonucleotide
ugcugaagccucaauguuu

SEQ ID NO: 105396 - RNA, 19 nt, Artificial Sequence
  Description of Artificial Sequence: Synthetic oligonucleotide
uagaguccucauuggcacu

SEQ ID NO: 105397 - RNA, 19 nt, Artificial Sequence
  Description of Artificial Sequence: Synthetic oligonucleotide
uuacuaugacaauuucugu

SEQ ID NO: 105398 - RNA, 19 nt, Artificial Sequence
  Description of Artificial Sequence: Synthetic oligonucleotide
ugccauugcuagguuaauu

SEQ ID NO: 105399 - RNA, 19 nt, Artificial Sequence
  Description of Artificial Sequence: Synthetic oligonucleotide
ugggaccaaaacauguaga

SEQ ID NO: 105400 - RNA, 19 nt, Artificial Sequence
  Description of Artificial Sequence: Synthetic oligonucleotide
acagguguaugaguuuaga

SEQ ID NO: 105401 - RNA, 19 nt, Artificial Sequence
  Description of Artificial Sequence: Synthetic oligonucleotide
agucaaagaaucuagcauc

SEQ ID NO: 105402 - RNA, 19 nt, Artificial Sequence
  Description of Artificial Sequence: Synthetic oligonucleotide
cauagcuccagcucccgcu

SEQ ID NO: 105403 - RNA, 19 nt, Artificial Sequence
  Description of Artificial Sequence: Synthetic oligonucleotide
ugaggauguggauacuccu

SEQ ID NO: 105404 - RNA, 19 nt, Artificial Sequence
  Description of Artificial Sequence: Synthetic oligonucleotide
uccaaggaaaaagaagagg

SEQ ID NO: 105405 - RNA, 19 nt, Artificial Sequence
  Description of Artificial Sequence: Synthetic oligonucleotide
gaaacaccgguugugggcu

SEQ ID NO: 105406 - RNA, 19 nt, Artificial Sequence
  Description of Artificial Sequence: Synthetic oligonucleotide
ugcacacugcagaaagaua

SEQ ID NO: 105407 - RNA, 19 nt, Artificial Sequence
  Description of Artificial Sequence: Synthetic oligonucleotide
acagcugaaaaaggacggc

SEQ ID NO: 105408 - RNA, 19 nt, Artificial Sequence
  Description of Artificial Sequence: Synthetic oligonucleotide
cuccucuaaccauguuuac

SEQ ID NO: 105409 - RNA, 19 nt, Artificial Sequence
  Description of Artificial Sequence: Synthetic oligonucleotide
caacuaucaacccugugau

SEQ ID NO: 105410 - RNA, 19 nt, Artificial Sequence
  Description of Artificial Sequence: Synthetic oligonucleotide
ucauccacggcagccuugu

SEQ ID NO: 105411 - RNA, 19 nt, Artificial Sequence
  Description of Artificial Sequence: Synthetic oligonucleotide
ugacaguucgugcccuugu

SEQ ID NO: 105412 - RNA, 19 nt, Artificial Sequence
  Description of Artificial Sequence: Synthetic oligonucleotide
ugugauagcacaaaauuuu

SEQ ID NO: 105413 - RNA, 19 nt, Artificial Sequence
  Description of Artificial Sequence: Synthetic oligonucleotide
uugugaaaaguuuugucaa

SEQ ID NO: 105414 - RNA, 19 nt, Artificial Sequence
  Description of Artificial Sequence: Synthetic oligonucleotide
auguaguucagagugucaa

SEQ ID NO: 105415 - RNA, 19 nt, Artificial Sequence
  Description of Artificial Sequence: Synthetic oligonucleotide
aaaccgcuuuccgggaugc

SEQ ID NO: 105416 - RNA, 19 nt, Artificial Sequence
  Description of Artificial Sequence: Synthetic oligonucleotide
ccgcugcaaagcacagugc

SEQ ID NO: 105417 - RNA, 19 nt, Artificial Sequence
  Description of Artificial Sequence: Synthetic oligonucleotide
caacaccaagcagugcccg

SEQ ID NO: 105418 - RNA, 19 nt, Artificial Sequence
  Description of Artificial Sequence: Synthetic oligonucleotide
gugcuaccuggcuguccga

SEQ ID NO: 105419 - RNA, 19 nt, Artificial Sequence
  Description of Artificial Sequence: Synthetic oligonucleotide
agagugugacccugaccuc

SEQ ID NO: 105420 - RNA, 19 nt, Artificial Sequence
  Description of Artificial Sequence: Synthetic oligonucleotide
cugucuuacuuguggagcc

SEQ ID NO: 105421 - RNA, 19 nt, Artificial Sequence
  Description of Artificial Sequence: Synthetic oligonucleotide
cgcugaccauugggacagu

SEQ ID NO: 105422 - RNA, 19 nt, Artificial Sequence
  Description of Artificial Sequence: Synthetic oligonucleotide
uaaaaauguguccugcaag

SEQ ID NO: 105423 - RNA, 19 nt, Artificial Sequence
  Description of Artificial Sequence: Synthetic oligonucleotide
gaacugcaguauucagcgg

SEQ ID NO: 105424 - RNA, 19 nt, Artificial Sequence
  Description of Artificial Sequence: Synthetic oligonucleotide
gggcuccaaaaagcaucua

SEQ ID NO: 105425 - RNA, 19 nt, Artificial Sequence
  Description of Artificial Sequence: Synthetic oligonucleotide
auugcuggcaccaucugac

SEQ ID NO: 105426 - RNA, 19 nt, Artificial Sequence
  Description of Artificial Sequence: Synthetic oligonucleotide
cguggcaggcugggggauu

SEQ ID NO: 105427 - RNA, 19 nt, Artificial Sequence
  Description of Artificial Sequence: Synthetic oligonucleotide
uuuuaucaaagauccugug

SEQ ID NO: 105428 - RNA, 19 nt, Artificial Sequence
  Description of Artificial Sequence: Synthetic oligonucleotide
gcagaaaaaugaauucauc

SEQ ID NO: 105429 - RNA, 19 nt, Artificial Sequence
  Description of Artificial Sequence: Synthetic oligonucleotide
cucagaauacuguggagag

SEQ ID NO: 105430 - RNA, 19 nt, Artificial Sequence
  Description of Artificial Sequence: Synthetic oligonucleotide
gauuauuucucaagaugaa

SEQ ID NO: 105431 - RNA, 19 nt, Artificial Sequence
  Description of Artificial Sequence: Synthetic oligonucleotide
agcugacagaagagggaaa

SEQ ID NO: 105432 - RNA, 19 nt, Artificial Sequence
  Description of Artificial Sequence: Synthetic oligonucleotide
aguguaugauaaauacaug

SEQ ID NO: 105433 - RNA, 19 nt, Artificial Sequence
  Description of Artificial Sequence: Synthetic oligonucleotide
gugcagcuuucuguucaac

SEQ ID NO: 105434 - RNA, 19 nt, Artificial Sequence
  Description of Artificial Sequence: Synthetic oligonucleotide
cuugaacaaugauuuugug

SEQ ID NO: 105435 - RNA, 19 nt, Artificial Sequence
  Description of Artificial Sequence: Synthetic oligonucleotide
gguggaugcaacccgcaag

SEQ ID NO: 105436 - RNA, 19 nt, Artificial Sequence
  Description of Artificial Sequence: Synthetic oligonucleotide
ggguaacaaaauucguuuu

SEQ ID NO: 105437 - RNA, 19 nt, Artificial Sequence
  Description of Artificial Sequence: Synthetic oligonucleotide
ugcaaaucauucgguaaau

SEQ ID NO: 105438 - RNA, 19 nt, Artificial Sequence
  Description of Artificial Sequence: Synthetic oligonucleotide
uccaaacugcuaugcaaaa

SEQ ID NO: 105439 - RNA, 19 nt, Artificial Sequence
  Description of Artificial Sequence: Synthetic oligonucleotide
aguuaugaugguuaacggu

SEQ ID NO: 105440 - RNA, 19 nt, Artificial Sequence
  Description of Artificial Sequence: Synthetic oligonucleotide
ugaucacaggauagguauu

SEQ ID NO: 105441 - RNA, 19 nt, Artificial Sequence
  Description of Artificial Sequence: Synthetic oligonucleotide
uuuugccaagagagccauc

SEQ ID NO: 105442 - RNA, 19 nt, Artificial Sequence
  Description of Artificial Sequence: Synthetic oligonucleotide
ccagacuggcgaagagcug

SEQ ID NO: 105443 - RNA, 19 nt, Artificial Sequence
  Description of Artificial Sequence: Synthetic oligonucleotide
guuuuuugauuacagauac

SEQ ID NO: 105444 - RNA, 19 nt, Artificial Sequence
  Description of Artificial Sequence: Synthetic oligonucleotide
cagccaggcugaugcccug

SEQ ID NO: 105445 - RNA, 19 nt, Artificial Sequence
  Description of Artificial Sequence: Synthetic oligonucleotide
gaaguaugucggcaucgaa

SEQ ID NO: 105446 - RNA, 19 nt, Artificial Sequence
  Description of Artificial Sequence: Synthetic oligonucleotide
aagagaaauggaaaucccu

SEQ ID NO: 105447 - RNA, 19 nt, Artificial Sequence
  Description of Artificial Sequence: Synthetic oligonucleotide
uugacaucugcuaccuccu

SEQ ID NO: 105448 - RNA, 19 nt, Artificial Sequence
  Description of Artificial Sequence: Synthetic oligonucleotide
uccccccuccucugaaaca

SEQ ID NO: 105449 - RNA, 19 nt, Artificial Sequence
  Description of Artificial Sequence: Synthetic oligonucleotide
agcugccuuagcuucagga

SEQ ID NO: 105450 - RNA, 19 nt, Artificial Sequence
  Description of Artificial Sequence: Synthetic oligonucleotide
aaccucgaguacugugggc

SEQ ID NO: 105451 - RNA, 19 nt, Artificial Sequence
  Description of Artificial Sequence: Synthetic oligonucleotide
caauuuagaaaaagaacau

SEQ ID NO: 105452 - RNA, 19 nt, Artificial Sequence
  Description of Artificial Sequence: Synthetic oligonucleotide
ugcaguuugaaauucugaa

SEQ ID NO: 105453 - RNA, 19 nt, Artificial Sequence
  Description of Artificial Sequence: Synthetic oligonucleotide
auuugcaaaguacuguaag

SEQ ID NO: 105454 - RNA, 19 nt, Artificial Sequence
  Description of Artificial Sequence: Synthetic oligonucleotide
gaauaauuuauaguaauga

SEQ ID NO: 105455 - RNA, 19 nt, Artificial Sequence
  Description of Artificial Sequence: Synthetic oligonucleotide
aguuuaaaaaucaacuuuu

SEQ ID NO: 105456 - RNA, 19 nt, Artificial Sequence
  Description of Artificial Sequence: Synthetic oligonucleotide
uuauugccuucucaccagc

SEQ ID NO: 105457 - RNA, 19 nt, Artificial Sequence
  Description of Artificial Sequence: Synthetic oligonucleotide
cugcaaaguguuuuguacc

SEQ ID NO: 105458 - RNA, 19 nt, Artificial Sequence
  Description of Artificial Sequence: Synthetic oligonucleotide
cagugaauuuuugcaauaa

SEQ ID NO: 105459 - RNA, 19 nt, Artificial Sequence
  Description of Artificial Sequence: Synthetic oligonucleotide
augcaguaugguacauuuu

SEQ ID NO: 105460 - RNA, 19 nt, Artificial Sequence
  Description of Artificial Sequence: Synthetic oligonucleotide
uucaacuuugaauaaagaa

SEQ ID NO: 105461 - RNA, 19 nt, Artificial Sequence
  Description of Artificial Sequence: Synthetic oligonucleotide
auacuugaacuugucaaaa

SEQ ID NO: 105462 - RNA, 19 nt, Artificial Sequence
  Description of Artificial Sequence: Synthetic oligonucleotide
gcgcgggacuagggagugu

SEQ ID NO: 105463 - RNA, 19 nt, Artificial Sequence
  Description of Artificial Sequence: Synthetic oligonucleotide
uucggugaccagugacuug

SEQ ID NO: 105464 - RNA, 19 nt, Artificial Sequence
  Description of Artificial Sequence: Synthetic oligonucleotide
ggauuuuccaacacaaguc

SEQ ID NO: 105465 - RNA, 19 nt, Artificial Sequence
  Description of Artificial Sequence: Synthetic oligonucleotide
caucccauuaaagacucug

SEQ ID NO: 105466 - RNA, 19 nt, Artificial Sequence
  Description of Artificial Sequence: Synthetic oligonucleotide
gaaugcaguugcuucagua

SEQ ID NO: 105467 - RNA, 19 nt, Artificial Sequence
  Description of Artificial Sequence: Synthetic oligonucleotide
acccauaauguauucuugg

SEQ ID NO: 105468 - RNA, 19 nt, Artificial Sequence
  Description of Artificial Sequence: Synthetic oligonucleotide
gucuccccuacagcagaau

SEQ ID NO: 105469 - RNA, 19 nt, Artificial Sequence
  Description of Artificial Sequence: Synthetic oligonucleotide
uuuuaugguggaagaugaa

SEQ ID NO: 105470 - RNA, 19 nt, Artificial Sequence
  Description of Artificial Sequence: Synthetic oligonucleotide
aacuguuuuacauaacauu

SEQ ID NO: 105471 - RNA, 19 nt, Artificial Sequence
  Description of Artificial Sequence: Synthetic oligonucleotide
uccuuauaugggagaugaa

SEQ ID NO: 105472 - RNA, 19 nt, Artificial Sequence
  Description of Artificial Sequence: Synthetic oligonucleotide
aguuuuagaucaggauggu

SEQ ID NO: 105473 - RNA, 19 nt, Artificial Sequence
  Description of Artificial Sequence: Synthetic oligonucleotide
uacuuucauugaagaacua

SEQ ID NO: 105474 - RNA, 19 nt, Artificial Sequence
  Description of Artificial Sequence: Synthetic oligonucleotide
aauaaaaaauuaugauggg

SEQ ID NO: 105475 - RNA, 19 nt, Artificial Sequence
  Description of Artificial Sequence: Synthetic oligonucleotide
gaaaguacacggggauaga

SEQ ID NO: 105476 - RNA, 19 nt, Artificial Sequence
  Description of Artificial Sequence: Synthetic oligonucleotide
agaauguggguuuauaaau

SEQ ID NO: 105477 - RNA, 19 nt, Artificial Sequence
  Description of Artificial Sequence: Synthetic oligonucleotide
ugaugaaauuuuuguggag

SEQ ID NO: 105478 - RNA, 19 nt, Artificial Sequence
  Description of Artificial Sequence: Synthetic oligonucleotide
guuggugaaugcccuuggu

SEQ ID NO: 105479 - RNA, 19 nt, Artificial Sequence
  Description of Artificial Sequence: Synthetic oligonucleotide
ucaauauaaugaugaugac

SEQ ID NO: 105480 - RNA, 19 nt, Artificial Sequence
  Description of Artificial Sequence: Synthetic oligonucleotide
cgaugaugaugauggagac

SEQ ID NO: 105481 - RNA, 19 nt, Artificial Sequence
  Description of Artificial Sequence: Synthetic oligonucleotide
cgauccugaagaaagagaa

SEQ ID NO: 105482 - RNA, 19 nt, Artificial Sequence
  Description of Artificial Sequence: Synthetic oligonucleotide
agaaaagcagaaagaucug

SEQ ID NO: 105483 - RNA, 19 nt, Artificial Sequence
  Description of Artificial Sequence: Synthetic oligonucleotide
ggaggaucaccgagaugau

SEQ ID NO: 105484 - RNA, 19 nt, Artificial Sequence
  Description of Artificial Sequence: Synthetic oligonucleotide
uaaagaaagccgcccaccu

SEQ ID NO: 105485 - RNA, 19 nt, Artificial Sequence
  Description of Artificial Sequence: Synthetic oligonucleotide
ucggaaauuuccuucugau

SEQ ID NO: 105486 - RNA, 19 nt, Artificial Sequence
  Description of Artificial Sequence: Synthetic oligonucleotide
uaaaauuuuugaagccauu

SEQ ID NO: 105487 - RNA, 19 nt, Artificial Sequence
  Description of Artificial Sequence: Synthetic oligonucleotide
uuccucaauguuuccagau

SEQ ID NO: 105488 - RNA, 19 nt, Artificial Sequence
  Description of Artificial Sequence: Synthetic oligonucleotide
uaagggcacagcagaagaa

SEQ ID NO: 105489 - RNA, 19 nt, Artificial Sequence
  Description of Artificial Sequence: Synthetic oligonucleotide
acuaaaggaaaaauauaaa

SEQ ID NO: 105490 - RNA, 19 nt, Artificial Sequence
  Description of Artificial Sequence: Synthetic oligonucleotide
agaacucaccgaacagcag

SEQ ID NO: 105491 - RNA, 19 nt, Artificial Sequence
  Description of Artificial Sequence: Synthetic oligonucleotide
gcucccaggcgcacuuccu

SEQ ID NO: 105492 - RNA, 19 nt, Artificial Sequence
  Description of Artificial Sequence: Synthetic oligonucleotide
uccugaauguacccccaac

SEQ ID NO: 105493 - RNA, 19 nt, Artificial Sequence
  Description of Artificial Sequence: Synthetic oligonucleotide
cauagauggaccaaaugcu

SEQ ID NO: 105494 - RNA, 19 nt, Artificial Sequence
  Description of Artificial Sequence: Synthetic oligonucleotide
uaaaucuguucagagagag

SEQ ID NO: 105495 - RNA, 19 nt, Artificial Sequence
  Description of Artificial Sequence: Synthetic oligonucleotide
gcaaagcuuacacuccuuu

SEQ ID NO: 105496 - RNA, 19 nt, Artificial Sequence
  Description of Artificial Sequence: Synthetic oligonucleotide
ucauacgcuuuucuguagg

SEQ ID NO: 105497 - RNA, 19 nt, Artificial Sequence
  Description of Artificial Sequence: Synthetic oligonucleotide
gcgauguuuuaaauaugac

SEQ ID NO: 105498 - RNA, 19 nt, Artificial Sequence
  Description of Artificial Sequence: Synthetic oligonucleotide
cugcuuccuacaucguaag

SEQ ID NO: 105499 - RNA, 19 nt, Artificial Sequence
  Description of Artificial Sequence: Synthetic oligonucleotide
gugcaauuauucuuuucau

SEQ ID NO: 105500 - RNA, 19 nt, Artificial Sequence
  Description of Artificial Sequence: Synthetic oligonucleotide
ugcaacacccaacacuuau

SEQ ID NO: 105501 - RNA, 19 nt, Artificial Sequence
  Description of Artificial Sequence: Synthetic oligonucleotide
uaagcggaagaacacagaa

SEQ ID NO: 105502 - RNA, 19 nt, Artificial Sequence
  Description of Artificial Sequence: Synthetic oligonucleotide
aacagcucuagacaacaaa

SEQ ID NO: 105503 - RNA, 19 nt, Artificial Sequence
  Description of Artificial Sequence: Synthetic oligonucleotide
accuuguggaccacagugu

SEQ ID NO: 105504 - RNA, 19 nt, Artificial Sequence
  Description of Artificial Sequence: Synthetic oligonucleotide
uuaccagcauuuggaggga

SEQ ID NO: 105505 - RNA, 19 nt, Artificial Sequence
  Description of Artificial Sequence: Synthetic oligonucleotide
agcaaaggaguuugcugcu

SEQ ID NO: 105506 - RNA, 19 nt, Artificial Sequence
  Description of Artificial Sequence: Synthetic oligonucleotide
ugcucucaccgcugagcgg

SEQ ID NO: 105507 - RNA, 19 nt, Artificial Sequence
  Description of Artificial Sequence: Synthetic oligonucleotide
gauaaagaccccaccaaaa

SEQ ID NO: 105508 - RNA, 19 nt, Artificial Sequence
  Description of Artificial Sequence: Synthetic oligonucleotide
acguccaggaggccgcaga

SEQ ID NO: 105509 - RNA, 19 nt, Artificial Sequence
  Description of Artificial Sequence: Synthetic oligonucleotide
aagaggacggcuucccaau

SEQ ID NO: 105510 - RNA, 19 nt, Artificial Sequence
  Description of Artificial Sequence: Synthetic oligonucleotide
uaacaguagcaggcccagc

SEQ ID NO: 105511 - RNA, 19 nt, Artificial Sequence
  Description of Artificial Sequence: Synthetic oligonucleotide
cacccccaccauuaaugug

SEQ ID NO: 105512 - RNA, 19 nt, Artificial Sequence
  Description of Artificial Sequence: Synthetic oligonucleotide
gcuggaaucaaaggauaca

SEQ ID NO: 105513 - RNA, 19 nt, Artificial Sequence
  Description of Artificial Sequence: Synthetic oligonucleotide
agacagugauagggaagca

SEQ ID NO: 105514 - RNA, 19 nt, Artificial Sequence
  Description of Artificial Sequence: Synthetic oligonucleotide
agggacugaaacgggggga

SEQ ID NO: 105515 - RNA, 19 nt, Artificial Sequence
  Description of Artificial Sequence: Synthetic oligonucleotide
agagaacaaugauaaagaa

SEQ ID NO: 105516 - RNA, 19 nt, Artificial Sequence
  Description of Artificial Sequence: Synthetic oligonucleotide
agaagaagagaagaaagau

SEQ ID NO: 105517 - RNA, 19 nt, Artificial Sequence
  Description of Artificial Sequence: Synthetic oligonucleotide
ugaaacuucgagcuccucu

SEQ ID NO: 105518 - RNA, 19 nt, Artificial Sequence
  Description of Artificial Sequence: Synthetic oligonucleotide
ugaagcaaauucucggugu

SEQ ID NO: 105519 - RNA, 19 nt, Artificial Sequence
  Description of Artificial Sequence: Synthetic oligonucleotide
ucaaacaccaauaaagaug

SEQ ID NO: 105520 - RNA, 19 nt, Artificial Sequence
  Description of Artificial Sequence: Synthetic oligonucleotide
gaagccaaauauugaaccu

SEQ ID NO: 105521 - RNA, 19 nt, Artificial Sequence
  Description of Artificial Sequence: Synthetic oligonucleotide
uccugagaauguggagugg

SEQ ID NO: 105522 - RNA, 19 nt, Artificial Sequence
  Description of Artificial Sequence: Synthetic oligonucleotide
gaguggugcugaagccuca

SEQ ID NO: 105523 - RNA, 19 nt, Artificial Sequence
  Description of Artificial Sequence: Synthetic oligonucleotide
aauguuuagaguccucauu

SEQ ID NO: 105524 - RNA, 19 nt, Artificial Sequence
  Description of Artificial Sequence: Synthetic oligonucleotide
uggcacuuacuaugacaau

SEQ ID NO: 105525 - RNA, 19 nt, Artificial Sequence
  Description of Artificial Sequence: Synthetic oligonucleotide
uuucugugccauugcuagg

SEQ ID NO: 105526 - RNA, 19 nt, Artificial Sequence
  Description of Artificial Sequence: Synthetic oligonucleotide
guuaauugggaccaaaaca

SEQ ID NO: 105527 - RNA, 19 nt, Artificial Sequence
  Description of Artificial Sequence: Synthetic oligonucleotide
auguagacagguguaugag

SEQ ID NO: 105528 - RNA, 19 nt, Artificial Sequence
  Description of Artificial Sequence: Synthetic oligonucleotide
guuuagagucaaagaaucu

SEQ ID NO: 105529 - RNA, 19 nt, Artificial Sequence
  Description of Artificial Sequence: Synthetic oligonucleotide
uagcaucauagcuccagcu

SEQ ID NO: 105530 - RNA, 19 nt, Artificial Sequence
  Description of Artificial Sequence: Synthetic oligonucleotide
ucccgcugaggauguggau

SEQ ID NO: 105531 - RNA, 19 nt, Artificial Sequence
  Description of Artificial Sequence: Synthetic oligonucleotide
uacuccuccaaggaaaaag

SEQ ID NO: 105532 - RNA, 19 nt, Artificial Sequence
  Description of Artificial Sequence: Synthetic oligonucleotide
gaagaggaaacaccgguug

SEQ ID NO: 105533 - RNA, 19 nt, Artificial Sequence
  Description of Artificial Sequence: Synthetic oligonucleotide
gugggcugcacacugcaga

SEQ ID NO: 105534 - RNA, 19 nt, Artificial Sequence
  Description of Artificial Sequence: Synthetic oligonucleotide
aaagauacagcugaaaaag

SEQ ID NO: 105535 - RNA, 19 nt, Artificial Sequence
  Description of Artificial Sequence: Synthetic oligonucleotide
ggacggcuccucuaaccau

SEQ ID NO: 105536 - RNA, 19 nt, Artificial Sequence
  Description of Artificial Sequence: Synthetic oligonucleotide
uguuuacaacuaucaaccc

SEQ ID NO: 105537 - RNA, 19 nt, Artificial Sequence
  Description of Artificial Sequence: Synthetic oligonucleotide
cugugaucauccacggcag

SEQ ID NO: 105538 - RNA, 19 nt, Artificial Sequence
  Description of Artificial Sequence: Synthetic oligonucleotide
gccuugugacaguucgugc

SEQ ID NO: 105539 - RNA, 19 nt, Artificial Sequence
  Description of Artificial Sequence: Synthetic oligonucleotide
cccuugugugauagcacaa

SEQ ID NO: 105540 - RNA, 19 nt, Artificial Sequence
  Description of Artificial Sequence: Synthetic oligonucleotide
aaauuuuugugaaaaguuu

SEQ ID NO: 105541 - RNA, 19 nt, Artificial Sequence
  Description of Artificial Sequence: Synthetic oligonucleotide
uugucaauguaguucagag

SEQ ID NO: 105542 - RNA, 19 nt, Artificial Sequence
  Description of Artificial Sequence: Synthetic oligonucleotide
gugucaaaaccgcuuuccg

SEQ ID NO: 105543 - RNA, 19 nt, Artificial Sequence
  Description of Artificial Sequence: Synthetic oligonucleotide
gggaugccgcugcaaagca

SEQ ID NO: 105544 - RNA, 19 nt, Artificial Sequence
  Description of Artificial Sequence: Synthetic oligonucleotide
acagugcaacaccaagcag

SEQ ID NO: 105545 - RNA, 19 nt, Artificial Sequence
  Description of Artificial Sequence: Synthetic oligonucleotide
gugcccgugcuaccuggcu

SEQ ID NO: 105546 - RNA, 19 nt, Artificial Sequence
  Description of Artificial Sequence: Synthetic oligonucleotide
uguccgagagugugacccu

SEQ ID NO: 105547 - RNA, 19 nt, Artificial Sequence
  Description of Artificial Sequence: Synthetic oligonucleotide
ugaccucugucuuacuugu

SEQ ID NO: 105548 - RNA, 19 nt, Artificial Sequence
  Description of Artificial Sequence: Synthetic oligonucleotide
uggagccgcugaccauugg

SEQ ID NO: 105549 - RNA, 19 nt, Artificial Sequence
  Description of Artificial Sequence: Synthetic oligonucleotide
ggacaguaaaaaugugucc

SEQ ID NO: 105550 - RNA, 19 nt, Artificial Sequence
  Description of Artificial Sequence: Synthetic oligonucleotide
cugcaagaacugcaguauu

SEQ ID NO: 105551 - RNA, 19 nt, Artificial Sequence
  Description of Artificial Sequence: Synthetic oligonucleotide
ucagcggggcuccaaaaag

SEQ ID NO: 105552 - RNA, 19 nt, Artificial Sequence
  Description of Artificial Sequence: Synthetic oligonucleotide
gcaucuauugcuggcacca

SEQ ID NO: 105553 - RNA, 19 nt, Artificial Sequence
  Description of Artificial Sequence: Synthetic oligonucleotide
aucugacguggcaggcugg

SEQ ID NO: 105554 - RNA, 19 nt, Artificial Sequence
  Description of Artificial Sequence: Synthetic oligonucleotide
ggggauuuuuaucaaagau

SEQ ID NO: 105555 - RNA, 19 nt, Artificial Sequence
  Description of Artificial Sequence: Synthetic oligonucleotide
uccugugcagaaaaaugaa

SEQ ID NO: 105556 - RNA, 19 nt, Artificial Sequence
  Description of Artificial Sequence: Synthetic oligonucleotide
auucaucucagaauacugu

SEQ ID NO: 105557 - RNA, 19 nt, Artificial Sequence
  Description of Artificial Sequence: Synthetic oligonucleotide
uggagagauuauuucucaa

SEQ ID NO: 105558 - RNA, 19 nt, Artificial Sequence
  Description of Artificial Sequence: Synthetic oligonucleotide
agaugaagcugacagaaga

SEQ ID NO: 105559 - RNA, 19 nt, Artificial Sequence
  Description of Artificial Sequence: Synthetic oligonucleotide
agggaaaguguaugauaaa

SEQ ID NO: 105560 - RNA, 19 nt, Artificial Sequence
  Description of Artificial Sequence: Synthetic oligonucleotide
auacaugugcagcuuucug

SEQ ID NO: 105561 - RNA, 19 nt, Artificial Sequence
  Description of Artificial Sequence: Synthetic oligonucleotide
guucaacuugaacaaugau

SEQ ID NO: 105562 - RNA, 19 nt, Artificial Sequence
  Description of Artificial Sequence: Synthetic oligonucleotide
uuuugugguggaugcaacc

SEQ ID NO: 105563 - RNA, 19 nt, Artificial Sequence
  Description of Artificial Sequence: Synthetic oligonucleotide
ccgcaaggguaacaaaauu

SEQ ID NO: 105564 - RNA, 19 nt, Artificial Sequence
  Description of Artificial Sequence: Synthetic oligonucleotide
ucguuuugcaaaucauucg

SEQ ID NO: 105565 - RNA, 19 nt, Artificial Sequence
  Description of Artificial Sequence: Synthetic oligonucleotide
gguaaauccaaacugcuau

SEQ ID NO: 105566 - RNA, 19 nt, Artificial Sequence
  Description of Artificial Sequence: Synthetic oligonucleotide
ugcaaaaguuaugaugguu

SEQ ID NO: 105567 - RNA, 19 nt, Artificial Sequence
  Description of Artificial Sequence: Synthetic oligonucleotide
uaacggugaucacaggaua

SEQ ID NO: 105568 - RNA, 19 nt, Artificial Sequence
  Description of Artificial Sequence: Synthetic oligonucleotide
agguauuuuugccaagaga

SEQ ID NO: 105569 - RNA, 19 nt, Artificial Sequence
  Description of Artificial Sequence: Synthetic oligonucleotide
agccauccagacuggcgaa

SEQ ID NO: 105570 - RNA, 19 nt, Artificial Sequence
  Description of Artificial Sequence: Synthetic oligonucleotide
agagcuguuuuuugauuac

SEQ ID NO: 105571 - RNA, 19 nt, Artificial Sequence
  Description of Artificial Sequence: Synthetic oligonucleotide
cagauacagccaggcugau

SEQ ID NO: 105572 - RNA, 19 nt, Artificial Sequence
  Description of Artificial Sequence: Synthetic oligonucleotide
ugcccugaaguaugucggc

SEQ ID NO: 105573 - RNA, 19 nt, Artificial Sequence
  Description of Artificial Sequence: Synthetic oligonucleotide
caucgaaagagaaauggaa

SEQ ID NO: 105574 - RNA, 19 nt, Artificial Sequence
  Description of Artificial Sequence: Synthetic oligonucleotide
aaucccuugacaucugcua

SEQ ID NO: 105575 - RNA, 19 nt, Artificial Sequence
  Description of Artificial Sequence: Synthetic oligonucleotide
accuccuccccccuccucu

SEQ ID NO: 105576 - RNA, 19 nt, Artificial Sequence
  Description of Artificial Sequence: Synthetic oligonucleotide
ugaaacagcugccuuagcu

SEQ ID NO: 105577 - RNA, 19 nt, Artificial Sequence
  Description of Artificial Sequence: Synthetic oligonucleotide
uucaggaaccucgaguacu

SEQ ID NO: 105578 - RNA, 19 nt, Artificial Sequence
  Description of Artificial Sequence: Synthetic oligonucleotide
ugugggcaauuuagaaaaa

SEQ ID NO: 105579 - RNA, 19 nt, Artificial Sequence
  Description of Artificial Sequence: Synthetic oligonucleotide
agaacaugcaguuugaaau

SEQ ID NO: 105580 - RNA, 19 nt, Artificial Sequence
  Description of Artificial Sequence: Synthetic oligonucleotide
uucugaauuugcaaaguac

SEQ ID NO: 105581 - RNA, 19 nt, Artificial Sequence
  Description of Artificial Sequence: Synthetic oligonucleotide
cuguaagaauaauuuauag

SEQ ID NO: 105582 - RNA, 19 nt, Artificial Sequence
  Description of Artificial Sequence: Synthetic oligonucleotide
guaaugaguuuaaaaauca

SEQ ID NO: 105583 - RNA, 19 nt, Artificial Sequence
  Description of Artificial Sequence: Synthetic oligonucleotide
aacuuuuuauugccuucuc

SEQ ID NO: 105584 - RNA, 19 nt, Artificial Sequence
  Description of Artificial Sequence: Synthetic oligonucleotide
caccagcugcaaaguguuu

SEQ ID NO: 105585 - RNA, 19 nt, Artificial Sequence
  Description of Artificial Sequence: Synthetic oligonucleotide
uuguaccagugaauuuuug

SEQ ID NO: 105586 - RNA, 19 nt, Artificial Sequence
  Description of Artificial Sequence: Synthetic oligonucleotide
gcaauaaugcaguauggua

SEQ ID NO: 105587 - RNA, 19 nt, Artificial Sequence
  Description of Artificial Sequence: Synthetic oligonucleotide
acauuuuucaacuuugaau

SEQ ID NO: 105588 - RNA, 19 nt, Artificial Sequence
  Description of Artificial Sequence: Synthetic oligonucleotide
uaaagaauacuugaacuug

SEQ ID NO: 105589 - RNA, 25 nt, Artificial Sequence
  Description of Artificial Sequence: Synthetic oligonucleotide
caaauaaaagcgauggcgauugggc

SEQ ID NO: 105590 - RNA, 25 nt, Artificial Sequence
  Description of Artificial Sequence: Synthetic oligonucleotide
cugccgcguuuggcgcucgguccgg

SEQ ID NO: 105591 - RNA, 25 nt, Artificial Sequence
  Description of Artificial Sequence: Synthetic oligonucleotide
gucgcguccgacacccggugggacu

SEQ ID NO: 105592 - RNA, 25 nt, Artificial Sequence
  Description of Artificial Sequence: Synthetic oligonucleotide
ucagaaggcaguggagccccggcgg

SEQ ID NO: 105593 - RNA, 25 nt, Artificial Sequence
  Description of Artificial Sequence: Synthetic oligonucleotide
gcggcggcggcggcgcgcgggggcg

SEQ ID NO: 105594 - RNA, 25 nt, Artificial Sequence
  Description of Artificial Sequence: Synthetic oligonucleotide
gacgcgcgggaacaacgcgagucgg

SEQ ID NO: 105595 - RNA, 25 nt, Artificial Sequence
  Description of Artificial Sequence: Synthetic oligonucleotide
gcgcgcgggacgaagaauaaucaug

SEQ ID NO: 105596 - RNA, 25 nt, Artificial Sequence
  Description of Artificial Sequence: Synthetic oligonucleotide
gggccagacugggaagaaaucugag

SEQ ID NO: 105597 - RNA, 25 nt, Artificial Sequence
  Description of Artificial Sequence: Synthetic oligonucleotide
gaagggaccaguuuguuggcggaag

SEQ ID NO: 105598 - RNA, 25 nt, Artificial Sequence
  Description of Artificial Sequence: Synthetic oligonucleotide
gcguguaaaaucagaguacaugcga

SEQ ID NO: 105599 - RNA, 25 nt, Artificial Sequence
  Description of Artificial Sequence: Synthetic oligonucleotide
acugagacagcucaagagguucaga

SEQ ID NO: 105600 - RNA, 25 nt, Artificial Sequence
  Description of Artificial Sequence: Synthetic oligonucleotide
acgagcugaugaaguaaagaguaug

SEQ ID NO: 105601 - RNA, 25 nt, Artificial Sequence
  Description of Artificial Sequence: Synthetic oligonucleotide
guuuaguuccaaucgucagaaaauu

SEQ ID NO: 105602 - RNA, 25 nt, Artificial Sequence
  Description of Artificial Sequence: Synthetic oligonucleotide
uuuggaaagaacggaaaucuuaaac

SEQ ID NO: 105603 - RNA, 25 nt, Artificial Sequence
  Description of Artificial Sequence: Synthetic oligonucleotide
ccaagaauggaaacagcgaaggaua

SEQ ID NO: 105604 - RNA, 25 nt, Artificial Sequence
  Description of Artificial Sequence: Synthetic oligonucleotide
acagccugugcacauccugacuucu

SEQ ID NO: 105605 - RNA, 25 nt, Artificial Sequence
  Description of Artificial Sequence: Synthetic oligonucleotide
ugugagcucauugcgcgggacuagg

SEQ ID NO: 105606 - RNA, 25 nt, Artificial Sequence
  Description of Artificial Sequence: Synthetic oligonucleotide
ggagguggaagaugaaacuguuuua

SEQ ID NO: 105607 - RNA, 25 nt, Artificial Sequence
  Description of Artificial Sequence: Synthetic oligonucleotide
acauaacauuccuuauaugggagau

SEQ ID NO: 105608 - RNA, 25 nt, Artificial Sequence
  Description of Artificial Sequence: Synthetic oligonucleotide
ugaaguuuuagaucaggaugguacu

SEQ ID NO: 105609 - RNA, 25 nt, Artificial Sequence
  Description of Artificial Sequence: Synthetic oligonucleotide
uuucauugaagaacuaauaaaaaau

SEQ ID NO: 105610 - RNA, 25 nt, Artificial Sequence
  Description of Artificial Sequence: Synthetic oligonucleotide
uuaugaugggaaaguacacggggau

SEQ ID NO: 105611 - RNA, 25 nt, Artificial Sequence
  Description of Artificial Sequence: Synthetic oligonucleotide
uagagaauguggguuuauaaaugau

SEQ ID NO: 105612 - RNA, 25 nt, Artificial Sequence
  Description of Artificial Sequence: Synthetic oligonucleotide
ugaaauuuuuguggaguuggugaau

SEQ ID NO: 105613 - RNA, 25 nt, Artificial Sequence
  Description of Artificial Sequence: Synthetic oligonucleotide
ugcccuuggucaauauaaugaugau

SEQ ID NO: 105614 - RNA, 25 nt, Artificial Sequence
  Description of Artificial Sequence: Synthetic oligonucleotide
ugacgaugaugaugauggagacgau

SEQ ID NO: 105615 - RNA, 25 nt, Artificial Sequence
  Description of Artificial Sequence: Synthetic oligonucleotide
uccugaagaaagagaagaaaagcag

SEQ ID NO: 105616 - RNA, 25 nt, Artificial Sequence
  Description of Artificial Sequence: Synthetic oligonucleotide
gaaagaucuggaggaucaccgagau

SEQ ID NO: 105617 - RNA, 25 nt, Artificial Sequence
  Description of Artificial Sequence: Synthetic oligonucleotide
ugauaaagaaagccgcccaccucgg

SEQ ID NO: 105618 - RNA, 25 nt, Artificial Sequence
  Description of Artificial Sequence: Synthetic oligonucleotide
gaaauuuccuucugauaaaauuuuu

SEQ ID NO: 105619 - RNA, 25 nt, Artificial Sequence
  Description of Artificial Sequence: Synthetic oligonucleotide
ugaagccauuuccucaauguuucca

SEQ ID NO: 105620 - RNA, 25 nt, Artificial Sequence
  Description of Artificial Sequence: Synthetic oligonucleotide
agauaagggcacagcagaagaacua

SEQ ID NO: 105621 - RNA, 25 nt, Artificial Sequence
  Description of Artificial Sequence: Synthetic oligonucleotide
aaaggaaaaauauaaagaacucacc

SEQ ID NO: 105622 - RNA, 25 nt, Artificial Sequence
  Description of Artificial Sequence: Synthetic oligonucleotide
cgaacagcagcucccaggcgcacuu

SEQ ID NO: 105623 - RNA, 25 nt, Artificial Sequence
  Description of Artificial Sequence: Synthetic oligonucleotide
uccuccugaauguacccccaacaua

SEQ ID NO: 105624 - RNA, 25 nt, Artificial Sequence
  Description of Artificial Sequence: Synthetic oligonucleotide
agauggaccaaaugcuaaaucuguu

SEQ ID NO: 105625 - RNA, 25 nt, Artificial Sequence
  Description of Artificial Sequence: Synthetic oligonucleotide
ucagagagagcaaagcuuacacucc

SEQ ID NO: 105626 - RNA, 25 nt, Artificial Sequence
  Description of Artificial Sequence: Synthetic oligonucleotide
cuuucauacgcuuuucuguaggcga

SEQ ID NO: 105627 - RNA, 25 nt, Artificial Sequence
  Description of Artificial Sequence: Synthetic oligonucleotide
auguuuuaaauaugacugcuuccua

SEQ ID NO: 105628 - RNA, 25 nt, Artificial Sequence
  Description of Artificial Sequence: Synthetic oligonucleotide
acauccuuuucaugcaacacccaac

SEQ ID NO: 105629 - RNA, 25 nt, Artificial Sequence
  Description of Artificial Sequence: Synthetic oligonucleotide
cacuuauaagcggaagaacacagaa

SEQ ID NO: 105630 - RNA, 25 nt, Artificial Sequence
  Description of Artificial Sequence: Synthetic oligonucleotide
aacagcucuagacaacaaaccuugu

SEQ ID NO: 105631 - RNA, 25 nt, Artificial Sequence
  Description of Artificial Sequence: Synthetic oligonucleotide
uggaccacaguguuaccagcauuug

SEQ ID NO: 105632 - RNA, 25 nt, Artificial Sequence
  Description of Artificial Sequence: Synthetic oligonucleotide
ggagggagcaaaggaguuugcugcu

SEQ ID NO: 105633 - RNA, 25 nt, Artificial Sequence
  Description of Artificial Sequence: Synthetic oligonucleotide
ugcucucaccgcugagcggauaaag

SEQ ID NO: 105634 - RNA, 25 nt, Artificial Sequence
  Description of Artificial Sequence: Synthetic oligonucleotide
gaccccaccaaaacguccaggaggc

SEQ ID NO: 105635 - RNA, 25 nt, Artificial Sequence
  Description of Artificial Sequence: Synthetic oligonucleotide
ccgcagaagaggacggcuucccaau

SEQ ID NO: 105636 - RNA, 25 nt, Artificial Sequence
  Description of Artificial Sequence: Synthetic oligonucleotide
uaacaguagcaggcccagcaccccc

SEQ ID NO: 105637 - RNA, 25 nt, Artificial Sequence
  Description of Artificial Sequence: Synthetic oligonucleotide
caccauuaaugugcuggaaucaaag

SEQ ID NO: 105638 - RNA, 25 nt, Artificial Sequence
  Description of Artificial Sequence: Synthetic oligonucleotide
ggauacagacagugauagggaagca

SEQ ID NO: 105639 - RNA, 25 nt, Artificial Sequence
  Description of Artificial Sequence: Synthetic oligonucleotide
agggacugaaacggggggagagaac

SEQ ID NO: 105640 - RNA, 25 nt, Artificial Sequence
  Description of Artificial Sequence: Synthetic oligonucleotide
caaugauaaagaagaagaagagaag

SEQ ID NO: 105641 - RNA, 25 nt, Artificial Sequence
  Description of Artificial Sequence: Synthetic oligonucleotide
gaaagaugaaacuucgagcuccucu

SEQ ID NO: 105642 - RNA, 25 nt, Artificial Sequence
  Description of Artificial Sequence: Synthetic oligonucleotide
ugaagcaaauucucggugucaaaca

SEQ ID NO: 105643 - RNA, 25 nt, Artificial Sequence
  Description of Artificial Sequence: Synthetic oligonucleotide
accaauaaagaugaagccaaauauu

SEQ ID NO: 105644 - RNA, 25 nt, Artificial Sequence
  Description of Artificial Sequence: Synthetic oligonucleotide
ugaaccuccugagaauguggagugg

SEQ ID NO: 105645 - RNA, 25 nt, Artificial Sequence
  Description of Artificial Sequence: Synthetic oligonucleotide
gaguggugcugaagccucaauguuu

SEQ ID NO: 105646 - RNA, 25 nt, Artificial Sequence
  Description of Artificial Sequence: Synthetic oligonucleotide
uagaguccucauuggcacuuacuau

SEQ ID NO: 105647 - RNA, 25 nt, Artificial Sequence
  Description of Artificial Sequence: Synthetic oligonucleotide
ugacaauuucugugccauugcuagg

SEQ ID NO: 105648 - RNA, 25 nt, Artificial Sequence
  Description of Artificial Sequence: Synthetic oligonucleotide
guuaauugggaccaaaacauguaga

SEQ ID NO: 105649 - RNA, 25 nt, Artificial Sequence
  Description of Artificial Sequence: Synthetic oligonucleotide
acagguguaugaguuuagagucaaa

SEQ ID NO: 105650 - RNA, 25 nt, Artificial Sequence
  Description of Artificial Sequence: Synthetic oligonucleotide
agaaucuagcaucauagcuccagcu

SEQ ID NO: 105651 - RNA, 25 nt, Artificial Sequence
  Description of Artificial Sequence: Synthetic oligonucleotide
ucccgcugaggauguggauacuccu

SEQ ID NO: 105652 - RNA, 25 nt, Artificial Sequence
  Description of Artificial Sequence: Synthetic oligonucleotide
uccaaggaaaaagaagaggaaacac

SEQ ID NO: 105653 - RNA, 25 nt, Artificial Sequence
  Description of Artificial Sequence: Synthetic oligonucleotide
ccgguugugggcugcacacugcaga

SEQ ID NO: 105654 - RNA, 25 nt, Artificial Sequence
  Description of Artificial Sequence: Synthetic oligonucleotide
aaagauacagcugaaaaaggacggc

SEQ ID NO: 105655 - RNA, 25 nt, Artificial Sequence
  Description of Artificial Sequence: Synthetic oligonucleotide
cuccucuaaccauguuuacaacuau

SEQ ID NO: 105656 - RNA, 25 nt, Artificial Sequence
  Description of Artificial Sequence: Synthetic oligonucleotide
ucaacccugugaucauccacggcag

SEQ ID NO: 105657 - RNA, 25 nt, Artificial Sequence
  Description of Artificial Sequence: Synthetic oligonucleotide
gccuugugacaguucgugcccuugu

SEQ ID NO: 105658 - RNA, 25 nt, Artificial Sequence
  Description of Artificial Sequence: Synthetic oligonucleotide
ugugauagcacaaaauuuuugugaa

SEQ ID NO: 105659 - RNA, 25 nt, Artificial Sequence
  Description of Artificial Sequence: Synthetic oligonucleotide
aaaguuuugucaauguaguucagag

SEQ ID NO: 105660 - RNA, 25 nt, Artificial Sequence
  Description of Artificial Sequence: Synthetic oligonucleotide
gugucaaaaccgcuuuccgggaugc

SEQ ID NO: 105661 - RNA, 25 nt, Artificial Sequence
  Description of Artificial Sequence: Synthetic oligonucleotide
ccgcugcaaagcacagugcaacacc

SEQ ID NO: 105662 - RNA, 25 nt, Artificial Sequence
  Description of Artificial Sequence: Synthetic oligonucleotide
caagcagugcccgugcuaccuggcu

SEQ ID NO: 105663 - RNA, 25 nt, Artificial Sequence
  Description of Artificial Sequence: Synthetic oligonucleotide
uguccgagagugugacccugaccuc

SEQ ID NO: 105664 - RNA, 25 nt, Artificial Sequence
  Description of Artificial Sequence: Synthetic oligonucleotide
cugucuuacuuguggagccgcugac

SEQ ID NO: 105665 - RNA, 25 nt, Artificial Sequence
  Description of Artificial Sequence: Synthetic oligonucleotide
ccauugggacaguaaaaaugugucc

SEQ ID NO: 105666 - RNA, 25 nt, Artificial Sequence
  Description of Artificial Sequence: Synthetic oligonucleotide
cugcaagaacugcaguauucagcgg

SEQ ID NO: 105667 - RNA, 25 nt, Artificial Sequence
  Description of Artificial Sequence: Synthetic oligonucleotide
gggcuccaaaaagcaucuauugcug

SEQ ID NO: 105668 - RNA, 25 nt, Artificial Sequence
  Description of Artificial Sequence: Synthetic oligonucleotide
ggcaccaucugacguggcaggcugg

SEQ ID NO: 105669 - RNA, 25 nt, Artificial Sequence
  Description of Artificial Sequence: Synthetic oligonucleotide
ggggauuuuuaucaaagauccugug

SEQ ID NO: 105670 - RNA, 25 nt, Artificial Sequence
  Description of Artificial Sequence: Synthetic oligonucleotide
gcagaaaaaugaauucaucucagaa

SEQ ID NO: 105671 - RNA, 25 nt, Artificial Sequence
  Description of Artificial Sequence: Synthetic oligonucleotide
auacuguggagagauuauuucucaa

SEQ ID NO: 105672 - RNA, 25 nt, Artificial Sequence
  Description of Artificial Sequence: Synthetic oligonucleotide
agaugaagcugacagaagagggaaa

SEQ ID NO: 105673 - RNA, 25 nt, Artificial Sequence
  Description of Artificial Sequence: Synthetic oligonucleotide
aguguaugauaaauacaugugcagc

SEQ ID NO: 105674 - RNA, 25 nt, Artificial Sequence
  Description of Artificial Sequence: Synthetic oligonucleotide
cuuucuguucaacuugaacaaugau

SEQ ID NO: 105675 - RNA, 25 nt, Artificial Sequence
  Description of Artificial Sequence: Synthetic oligonucleotide
uuuugugguggaugcaacccgcaag

SEQ ID NO: 105676 - RNA, 25 nt, Artificial Sequence
  Description of Artificial Sequence: Synthetic oligonucleotide
ggguaacaaaauucguuuugcaaau

SEQ ID NO: 105677 - RNA, 25 nt, Artificial Sequence
  Description of Artificial Sequence: Synthetic oligonucleotide
ucauucgguaaauccaaacugcuau

SEQ ID NO: 105678 - RNA, 25 nt, Artificial Sequence
  Description of Artificial Sequence: Synthetic oligonucleotide
ugcaaaaguuaugaugguuaacggu

SEQ ID NO: 105679 - RNA, 25 nt, Artificial Sequence
  Description of Artificial Sequence: Synthetic oligonucleotide
ugaucacaggauagguauuuuugcc

SEQ ID NO: 105680 - RNA, 25 nt, Artificial Sequence
  Description of Artificial Sequence: Synthetic oligonucleotide
caagagagccauccagacuggcgaa

SEQ ID NO: 105681 - RNA, 25 nt, Artificial Sequence
  Description of Artificial Sequence: Synthetic oligonucleotide
agagcuguuuuuugauuacagauac

SEQ ID NO: 105682 - RNA, 25 nt, Artificial Sequence
  Description of Artificial Sequence: Synthetic oligonucleotide
cagccaggcugaugcccugaaguau

SEQ ID NO: 105683 - RNA, 25 nt, Artificial Sequence
  Description of Artificial Sequence: Synthetic oligonucleotide
ugucggcaucgaaagagaaauggaa

SEQ ID NO: 105684 - RNA, 25 nt, Artificial Sequence
  Description of Artificial Sequence: Synthetic oligonucleotide
aaucccuugacaucugcuaccuccu

SEQ ID NO: 105685 - RNA, 25 nt, Artificial Sequence
  Description of Artificial Sequence: Synthetic oligonucleotide
uccccccuccucugaaacagcugcc

SEQ ID NO: 105686 - RNA, 25 nt, Artificial Sequence
  Description of Artificial Sequence: Synthetic oligonucleotide
cuuagcuucaggaaccucgaguacu

SEQ ID NO: 105687 - RNA, 25 nt, Artificial Sequence
  Description of Artificial Sequence: Synthetic oligonucleotide
ugugggcaauuuagaaaaagaacau

SEQ ID NO: 105688 - RNA, 25 nt, Artificial Sequence
  Description of Artificial Sequence: Synthetic oligonucleotide
ugcaguuugaaauucugaauuugca

SEQ ID NO: 105689 - RNA, 25 nt, Artificial Sequence
  Description of Artificial Sequence: Synthetic oligonucleotide
aaaguacuguaagaauaauuuauag

SEQ ID NO: 105690 - RNA, 25 nt, Artificial Sequence
  Description of Artificial Sequence: Synthetic oligonucleotide
guaaugaguuuaaaaaucaacuuuu

SEQ ID NO: 105691 - RNA, 25 nt, Artificial Sequence
  Description of Artificial Sequence: Synthetic oligonucleotide
uuauugccuucucaccagcugcaaa

SEQ ID NO: 105692 - RNA, 25 nt, Artificial Sequence
  Description of Artificial Sequence: Synthetic oligonucleotide
aguguuuuguaccagugaauuuuug

SEQ ID NO: 105693 - RNA, 25 nt, Artificial Sequence
  Description of Artificial Sequence: Synthetic oligonucleotide
gcaauaaugcaguaugguacauuuu

SEQ ID NO: 105694 - RNA, 25 nt, Artificial Sequence
  Description of Artificial Sequence: Synthetic oligonucleotide
uucaacuuugaauaaagaauacuug

SEQ ID NO: 105695 - RNA, 25 nt, Artificial Sequence
  Description of Artificial Sequence: Synthetic oligonucleotide
ggaguguucggugaccagugacuug

SEQ ID NO: 105696 - RNA, 25 nt, Artificial Sequence
  Description of Artificial Sequence: Synthetic oligonucleotide
ggauuuuccaacacaagucauccca

SEQ ID NO: 105697 - RNA, 25 nt, Artificial Sequence
  Description of Artificial Sequence: Synthetic oligonucleotide
auuaaagacucugaaugcaguugcu

SEQ ID NO: 105698 - RNA, 25 nt, Artificial Sequence
  Description of Artificial Sequence: Synthetic oligonucleotide
uucaguacccauaauguauucuugg

SEQ ID NO: 105699 - RNA, 25 nt, Artificial Sequence
  Description of Artificial Sequence: Synthetic oligonucleotide
gucuccccuacagcagaauuuuaug

SEQ ID NO: 105700 - RNA, 25 nt, Artificial Sequence
  Description of Artificial Sequence: Synthetic oligonucleotide
gguggaagaugaaacuguuuuacau

SEQ ID NO: 105701 - RNA, 25 nt, Artificial Sequence
  Description of Artificial Sequence: Synthetic oligonucleotide
uaacauuccuuauaugggagaugaa

SEQ ID NO: 105702 - RNA, 25 nt, Artificial Sequence
  Description of Artificial Sequence: Synthetic oligonucleotide
aguuuuagaucaggaugguacuuuc

SEQ ID NO: 105703 - RNA, 25 nt, Artificial Sequence
  Description of Artificial Sequence: Synthetic oligonucleotide
cauugaagaacuaauaaaaaauuau

SEQ ID NO: 105704 - RNA, 25 nt, Artificial Sequence
  Description of Artificial Sequence: Synthetic oligonucleotide
ugaugggaaaguacacggggauaga

SEQ ID NO: 105705 - RNA, 25 nt, Artificial Sequence
  Description of Artificial Sequence: Synthetic oligonucleotide
agaauguggguuuauaaaugaugaa

SEQ ID NO: 105706 - RNA, 25 nt, Artificial Sequence
  Description of Artificial Sequence: Synthetic oligonucleotide
aauuuuuguggaguuggugaaugcc

SEQ ID NO: 105707 - RNA, 25 nt, Artificial Sequence
  Description of Artificial Sequence: Synthetic oligonucleotide
ccuuggucaauauaaugaugaugac

SEQ ID NO: 105708 - RNA, 25 nt, Artificial Sequence
  Description of Artificial Sequence: Synthetic oligonucleotide
cgaugaugaugauggagacgauccu

SEQ ID NO: 105709 - RNA, 25 nt, Artificial Sequence
  Description of Artificial Sequence: Synthetic oligonucleotide
ugaagaaagagaagaaaagcagaaa

SEQ ID NO: 105710 - RNA, 25 nt, Artificial Sequence
  Description of Artificial Sequence: Synthetic oligonucleotide
agaucuggaggaucaccgagaugau

SEQ ID NO: 105711 - RNA, 25 nt, Artificial Sequence
  Description of Artificial Sequence: Synthetic oligonucleotide
uaaagaaagccgcccaccucggaaa

SEQ ID NO: 105712 - RNA, 25 nt, Artificial Sequence
  Description of Artificial Sequence: Synthetic oligonucleotide
auuuccuucugauaaaauuuuugaa

SEQ ID NO: 105713 - RNA, 25 nt, Artificial Sequence
  Description of Artificial Sequence: Synthetic oligonucleotide
agccauuuccucaauguuuccagau

SEQ ID NO: 105714 - RNA, 25 nt, Artificial Sequence
  Description of Artificial Sequence: Synthetic oligonucleotide
uaagggcacagcagaagaacuaaag

SEQ ID NO: 105715 - RNA, 25 nt, Artificial Sequence
  Description of Artificial Sequence: Synthetic oligonucleotide
ggaaaaauauaaagaacucaccgaa

SEQ ID NO: 105716 - RNA, 25 nt, Artificial Sequence
  Description of Artificial Sequence: Synthetic oligonucleotide
acagcagcucccaggcgcacuuccu

SEQ ID NO: 105717 - RNA, 25 nt, Artificial Sequence
  Description of Artificial Sequence: Synthetic oligonucleotide
uccugaauguacccccaacauagau

SEQ ID NO: 105718 - RNA, 25 nt, Artificial Sequence
  Description of Artificial Sequence: Synthetic oligonucleotide
uggaccaaaugcuaaaucuguucag

SEQ ID NO: 105719 - RNA, 25 nt, Artificial Sequence
  Description of Artificial Sequence: Synthetic oligonucleotide
gagagagcaaagcuuacacuccuuu

SEQ ID NO: 105720 - RNA, 25 nt, Artificial Sequence
  Description of Artificial Sequence: Synthetic oligonucleotide
ucauacgcuuuucuguaggcgaugu

SEQ ID NO: 105721 - RNA, 25 nt, Artificial Sequence
  Description of Artificial Sequence: Synthetic oligonucleotide
uuuuaaauaugacugcuuccuacau

SEQ ID NO: 105722 - RNA, 25 nt, Artificial Sequence
  Description of Artificial Sequence: Synthetic oligonucleotide
ucguaagugcaauuauucuuuucau

SEQ ID NO: 105723 - RNA, 25 nt, Artificial Sequence
  Description of Artificial Sequence: Synthetic oligonucleotide
ugcaacacccaacacuuauaagcgg

SEQ ID NO: 105724 - RNA, 25 nt, Artificial Sequence
  Description of Artificial Sequence: Synthetic oligonucleotide
gaagaacacagaaacagcucuagac

SEQ ID NO: 105725 - RNA, 25 nt, Artificial Sequence
  Description of Artificial Sequence: Synthetic oligonucleotide
caacaaaccuuguggaccacagugu

SEQ ID NO: 105726 - RNA, 25 nt, Artificial Sequence
  Description of Artificial Sequence: Synthetic oligonucleotide
uuaccagcauuuggagggagcaaag

SEQ ID NO: 105727 - RNA, 25 nt, Artificial Sequence
  Description of Artificial Sequence: Synthetic oligonucleotide
ggaguuugcugcugcucucaccgcu

SEQ ID NO: 105728 - RNA, 25 nt, Artificial Sequence
  Description of Artificial Sequence: Synthetic oligonucleotide
ugagcggauaaagaccccaccaaaa

SEQ ID NO: 105729 - RNA, 25 nt, Artificial Sequence
  Description of Artificial Sequence: Synthetic oligonucleotide
acguccaggaggccgcagaagagga

SEQ ID NO: 105730 - RNA, 25 nt, Artificial Sequence
  Description of Artificial Sequence: Synthetic oligonucleotide
acggcuucccaauaacaguagcagg

SEQ ID NO: 105731 - RNA, 25 nt, Artificial Sequence
  Description of Artificial Sequence: Synthetic oligonucleotide
gcccagcacccccaccauuaaugug

SEQ ID NO: 105732 - RNA, 25 nt, Artificial Sequence
  Description of Artificial Sequence: Synthetic oligonucleotide
gcuggaaucaaaggauacagacagu

SEQ ID NO: 105733 - RNA, 25 nt, Artificial Sequence
  Description of Artificial Sequence: Synthetic oligonucleotide
ugauagggaagcagggacugaaacg

SEQ ID NO: 105734 - RNA, 25 nt, Artificial Sequence
  Description of Artificial Sequence: Synthetic oligonucleotide
ggggggagagaacaaugauaaagaa

SEQ ID NO: 105735 - RNA, 25 nt, Artificial Sequence
  Description of Artificial Sequence: Synthetic oligonucleotide
agaagaagagaagaaagaugaaacu

SEQ ID NO: 105736 - RNA, 25 nt, Artificial Sequence
  Description of Artificial Sequence: Synthetic oligonucleotide
uucgagcuccucugaagcaaauucu

SEQ ID NO: 105737 - RNA, 25 nt, Artificial Sequence
  Description of Artificial Sequence: Synthetic oligonucleotide
ucggugucaaacaccaauaaagaug

SEQ ID NO: 105738 - RNA, 25 nt, Artificial Sequence
  Description of Artificial Sequence: Synthetic oligonucleotide
gaagccaaauauugaaccuccugag

SEQ ID NO: 105739 - RNA, 25 nt, Artificial Sequence
  Description of Artificial Sequence: Synthetic oligonucleotide
gaauguggaguggaguggugcugaa

SEQ ID NO: 105740 - RNA, 25 nt, Artificial Sequence
  Description of Artificial Sequence: Synthetic oligonucleotide
agccucaauguuuagaguccucauu

SEQ ID NO: 105741 - RNA, 25 nt, Artificial Sequence
  Description of Artificial Sequence: Synthetic oligonucleotide
uggcacuuacuaugacaauuucugu

SEQ ID NO: 105742 - RNA, 25 nt, Artificial Sequence
  Description of Artificial Sequence: Synthetic oligonucleotide
ugccauugcuagguuaauugggacc

SEQ ID NO: 105743 - RNA, 25 nt, Artificial Sequence
  Description of Artificial Sequence: Synthetic oligonucleotide
caaaacauguagacagguguaugag

SEQ ID NO: 105744 - RNA, 25 nt, Artificial Sequence
  Description of Artificial Sequence: Synthetic oligonucleotide
guuuagagucaaagaaucuagcauc

SEQ ID NO: 105745 - RNA, 25 nt, Artificial Sequence
  Description of Artificial Sequence: Synthetic oligonucleotide
cauagcuccagcucccgcugaggau

SEQ ID NO: 105746 - RNA, 25 nt, Artificial Sequence
  Description of Artificial Sequence: Synthetic oligonucleotide
uguggauacuccuccaaggaaaaag

SEQ ID NO: 105747 - RNA, 25 nt, Artificial Sequence
  Description of Artificial Sequence: Synthetic oligonucleotide
gaagaggaaacaccgguugugggcu

SEQ ID NO: 105748 - RNA, 25 nt, Artificial Sequence
  Description of Artificial Sequence: Synthetic oligonucleotide
ugcacacugcagaaagauacagcug

SEQ ID NO: 105749 - RNA, 25 nt, Artificial Sequence
  Description of Artificial Sequence: Synthetic oligonucleotide
gaaaaaggacggcuccucuaaccau

SEQ ID NO: 105750 - RNA, 25 nt, Artificial Sequence
  Description of Artificial Sequence: Synthetic oligonucleotide
uguuuacaacuaucaacccugugau

SEQ ID NO: 105751 - RNA, 25 nt, Artificial Sequence
  Description of Artificial Sequence: Synthetic oligonucleotide
ucauccacggcagccuugugacagu

SEQ ID NO: 105752 - RNA, 25 nt, Artificial Sequence
  Description of Artificial Sequence: Synthetic oligonucleotide
uucgugcccuugugugauagcacaa

SEQ ID NO: 105753 - RNA, 25 nt, Artificial Sequence
  Description of Artificial Sequence: Synthetic oligonucleotide
aaauuuuugugaaaaguuuugucaa

SEQ ID NO: 105754 - RNA, 25 nt, Artificial Sequence
  Description of Artificial Sequence: Synthetic oligonucleotide
auguaguucagagugucaaaaccgc

SEQ ID NO: 105755 - RNA, 25 nt, Artificial Sequence
  Description of Artificial Sequence: Synthetic oligonucleotide
cuuuccgggaugccgcugcaaagca

SEQ ID NO: 105756 - RNA, 25 nt, Artificial Sequence
  Description of Artificial Sequence: Synthetic oligonucleotide
acagugcaacaccaagcagugcccg

SEQ ID NO: 105757 - RNA, 25 nt, Artificial Sequence
  Description of Artificial Sequence: Synthetic oligonucleotide
gugcuaccuggcuguccgagagugu

SEQ ID NO: 105758 - RNA, 25 nt, Artificial Sequence
  Description of Artificial Sequence: Synthetic oligonucleotide
ugacccugaccucugucuuacuugu

SEQ ID NO: 105759 - RNA, 25 nt, Artificial Sequence
  Description of Artificial Sequence: Synthetic oligonucleotide
uggagccgcugaccauugggacagu

SEQ ID NO: 105760 - RNA, 25 nt, Artificial Sequence
  Description of Artificial Sequence: Synthetic oligonucleotide
uaaaaauguguccugcaagaacugc

SEQ ID NO: 105761 - RNA, 25 nt, Artificial Sequence
  Description of Artificial Sequence: Synthetic oligonucleotide
caguauucagcggggcuccaaaaag

SEQ ID NO: 105762 - RNA, 25 nt, Artificial Sequence
  Description of Artificial Sequence: Synthetic oligonucleotide
gcaucuauugcuggcaccaucugac

SEQ ID NO: 105763 - RNA, 25 nt, Artificial Sequence
  Description of Artificial Sequence: Synthetic oligonucleotide
cguggcaggcugggggauuuuuauc

SEQ ID NO: 105764 - RNA, 25 nt, Artificial Sequence
  Description of Artificial Sequence: Synthetic oligonucleotide
caaagauccugugcagaaaaaugaa

SEQ ID NO: 105765 - RNA, 25 nt, Artificial Sequence
  Description of Artificial Sequence: Synthetic oligonucleotide
auucaucucagaauacuguggagag

SEQ ID NO: 105766 - RNA, 25 nt, Artificial Sequence
  Description of Artificial Sequence: Synthetic oligonucleotide
gauuauuucucaagaugaagcugac

SEQ ID NO: 105767 - RNA, 25 nt, Artificial Sequence
  Description of Artificial Sequence: Synthetic oligonucleotide
cagaagagggaaaguguaugauaaa

SEQ ID NO: 105768 - RNA, 25 nt, Artificial Sequence
  Description of Artificial Sequence: Synthetic oligonucleotide
auacaugugcagcuuucuguucaac

SEQ ID NO: 105769 - RNA, 25 nt, Artificial Sequence
  Description of Artificial Sequence: Synthetic oligonucleotide
cuugaacaaugauuuugugguggau

SEQ ID NO: 105770 - RNA, 25 nt, Artificial Sequence
  Description of Artificial Sequence: Synthetic oligonucleotide
ugcaacccgcaaggguaacaaaauu

SEQ ID NO: 105771 - RNA, 25 nt, Artificial Sequence
  Description of Artificial Sequence: Synthetic oligonucleotide
ucguuuugcaaaucauucgguaaau

SEQ ID NO: 105772 - RNA, 25 nt, Artificial Sequence
  Description of Artificial Sequence: Synthetic oligonucleotide
uccaaacugcuaugcaaaaguuaug

SEQ ID NO: 105773 - RNA, 25 nt, Artificial Sequence
  Description of Artificial Sequence: Synthetic oligonucleotide
gaugguuaacggugaucacaggaua

SEQ ID NO: 105774 - RNA, 25 nt, Artificial Sequence
  Description of Artificial Sequence: Synthetic oligonucleotide
agguauuuuugccaagagagccauc

SEQ ID NO: 105775 - RNA, 25 nt, Artificial Sequence
  Description of Artificial Sequence: Synthetic oligonucleotide
ccagacuggcgaagagcuguuuuuu

SEQ ID NO: 105776 - RNA, 25 nt, Artificial Sequence
  Description of Artificial Sequence: Synthetic oligonucleotide
ugauuacagauacagccaggcugau

SEQ ID NO: 105777 - RNA, 25 nt, Artificial Sequence
  Description of Artificial Sequence: Synthetic oligonucleotide
ugcccugaaguaugucggcaucgaa

SEQ ID NO: 105778 - RNA, 25 nt, Artificial Sequence
  Description of Artificial Sequence: Synthetic oligonucleotide
aagagaaauggaaaucccuugacau

SEQ ID NO: 105779 - RNA, 25 nt, Artificial Sequence
  Description of Artificial Sequence: Synthetic oligonucleotide
ucugcuaccuccuccccccuccucu

SEQ ID NO: 105780 - RNA, 25 nt, Artificial Sequence
  Description of Artificial Sequence: Synthetic oligonucleotide
ugaaacagcugccuuagcuucagga

SEQ ID NO: 105781 - RNA, 25 nt, Artificial Sequence
  Description of Artificial Sequence: Synthetic oligonucleotide
aaccucgaguacugugggcaauuua

SEQ ID NO: 105782 - RNA, 25 nt, Artificial Sequence
  Description of Artificial Sequence: Synthetic oligonucleotide
agaaaaagaacaugcaguuugaaau

SEQ ID NO: 105783 - RNA, 25 nt, Artificial Sequence
  Description of Artificial Sequence: Synthetic oligonucleotide
uucugaauuugcaaaguacuguaag

SEQ ID NO: 105784 - RNA, 25 nt, Artificial Sequence
  Description of Artificial Sequence: Synthetic oligonucleotide
gaauaauuuauaguaaugaguuuaa

SEQ ID NO: 105785 - RNA, 25 nt, Artificial Sequence
  Description of Artificial Sequence: Synthetic oligonucleotide
aaaaucaacuuuuuauugccuucuc

SEQ ID NO: 105786 - RNA, 25 nt, Artificial Sequence
  Description of Artificial Sequence: Synthetic oligonucleotide
caccagcugcaaaguguuuuguacc

SEQ ID NO: 105787 - RNA, 25 nt, Artificial Sequence
  Description of Artificial Sequence: Synthetic oligonucleotide
cagugaauuuuugcaauaaugcagu

SEQ ID NO: 105788 - RNA, 25 nt, Artificial Sequence
  Description of Artificial Sequence: Synthetic oligonucleotide
uaugguacauuuuucaacuuugaau

SEQ ID NO: 105789 - RNA, 25 nt, Artificial Sequence
  Description of Artificial Sequence: Synthetic oligonucleotide
uaaagaauacuugaacuugucaaaa

SEQ ID NO: 105790 - DNA, 21 bp, Artificial Sequence
  Description of Artificial Sequence: Synthetic oligonucleotide
  Description of Combined DNA/RNA Molecule: Synthetic oligonucleotide
cuacacaaaucagcgauuutt

SEQ ID NO: 105791 - DNA, 21 bp, Artificial Sequence
  Description of Artificial Sequence: Synthetic oligonucleotide
  Description of Combined DNA/RNA Molecule: Synthetic oligonucleotide
aaaucgcugauuuguguagtt

SEQ ID NO: 105792 - DNA, 25 bp, Artificial Sequence
  Description of Artificial Sequence: Synthetic oligonucleotide
  Description of Combined DNA/RNA Molecule: Synthetic oligonucleotide
cuacacaaaucagcgauuuccaugt

SEQ ID NO: 105793 - RNA, 27 nt, Artificial Sequence
  Description of Artificial Sequence: Synthetic oligonucleotide
acauggaaaucgcugauuuguguaguc

SEQ ID NO: 105794 - RNA, 13 nt, Artificial Sequence
  Description of Artificial Sequence: Synthetic oligonucleotide
cuacacaaaucag

SEQ ID NO: 105795 - DNA, 11 bp, Artificial Sequence
  Description of Artificial Sequence: Synthetic oligonucleotide
  Description of Combined DNA/RNA Molecule: Synthetic oligonucleotide
gauuuccaugt

SEQ ID NO: 105796 - DNA, 21 bp, Artificial Sequence
  Description of Artificial Sequence: Synthetic oligonucleotide
  Description of Combined DNA/RNA Molecule: Synthetic oligonucleotide
ggaucuuauuucuucggagtt

SEQ ID NO: 105797 - DNA, 21 bp, Artificial Sequence
  Description of Artificial Sequence: Synthetic oligonucleotide
  Description of Combined DNA/RNA Molecule: Synthetic oligonucleotide
cuccgaagaaauaagaucctt

SEQ ID NO: 105798 - RNA, 11 nt, Artificial Sequence
  Description of Artificial Sequence: Synthetic oligonucleotide
ggaucuuauuu

SEQ ID NO: 105799 - DNA, 10 bp, Artificial Sequence
  Description of Artificial Sequence: Synthetic oligonucleotide
  Description of Combined DNA/RNA Molecule: Synthetic oligonucleotide
cuucggagtt

SEQ ID NO: 105800 - RNA, 27 nt, Artificial Sequence
  Description of Artificial Sequence: Synthetic oligonucleotide
cauugucuccgaagaaauaagauccuu

SEQ ID NO: 105801 - RNA, 8 nt, Artificial Sequence
  Description of Artificial Sequence: Synthetic oligonucleotide
  modified_base (2): LNA-G
ggaucuua

SEQ ID NO: 105802 - DNA, 17 bp, Artificial Sequence
  Description of Artificial Sequence: Synthetic oligonucleotide
  Description of Combined DNA/RNA Molecule: Synthetic oligonucleotide
uuucuucggagacaatg

SEQ ID NO: 105803 - DNA, 16 bp, Artificial Sequence
  Description of Artificial Sequence: Synthetic oligonucleotide
  Description of Combined DNA/RNA Molecule: Synthetic oligonucleotide
uucuucggagacaatg

SEQ ID NO: 105804 - DNA, 15 bp, Artificial Sequence
  Description of Artificial Sequence: Synthetic oligonucleotide
  Description of Combined DNA/RNA Molecule: Synthetic oligonucleotide
ucuucggagacaatg

SEQ ID NO: 105805 - DNA, 14 bp, Artificial Sequence
  Description of Artificial Sequence: Synthetic oligonucleotide
  Description of Combined DNA/RNA Molecule: Synthetic oligonucleotide
cuucggagacaatg

SEQ ID NO: 105806 - DNA, 13 bp, Artificial Sequence
  Description of Artificial Sequence: Synthetic oligonucleotide
  Description of Combined DNA/RNA Molecule: Synthetic oligonucleotide
uucggagacaatg

SEQ ID NO: 105807 - DNA, 12 bp, Artificial Sequence
  Description of Artificial Sequence: Synthetic oligonucleotide
  Description of Combined DNA/RNA Molecule: Synthetic oligonucleotide
ucggagacaatg

SEQ ID NO: 105808 - DNA, 11 bp, Artificial Sequence
  Description of Artificial Sequence: Synthetic oligonucleotide
  Description of Combined DNA/RNA Molecule: Synthetic oligonucleotide
cggagacaatg

SEQ ID NO: 105809 - RNA, 9 nt, Artificial Sequence
  Description of Artificial Sequence: Synthetic oligonucleotide
  modified_base (2): LNA-G
ggaucuuau

SEQ ID NO: 105810 - RNA, 10 nt, Artificial Sequence
  Description of Artificial Sequence: Synthetic oligonucleotide
  modified_base (2): LNA-G
ggaucuuauu

SEQ ID NO: 105811 - RNA, 11 nt, Artificial Sequence
  Description of Artificial Sequence: Synthetic oligonucleotide
  modified_base (2): LNA-G
ggaucuuauuu

SEQ ID NO: 105812 - RNA, 12 nt, Artificial Sequence
  Description of Artificial Sequence: Synthetic oligonucleotide
  modified_base (2): LNA-G
ggaucuuauuuc

SEQ ID NO: 105813 - RNA, 8 nt, Artificial Sequence
  Description of Artificial Sequence: Synthetic oligonucleotide
  modified_base (3): LNA-A
cuacacaa

SEQ ID NO: 105814 - DNA, 13 bp, Artificial Sequence
  Description of Artificial Sequence: Synthetic oligonucleotide
  Description of Combined DNA/RNA Molecule: Synthetic oligonucleotide
  modified_base (8): LNA-A
aucagcgauuutt

SEQ ID NO: 105815 - DNA, 12 bp, Artificial Sequence
  Description of Artificial Sequence: Synthetic oligonucleotide
  Description of Combined DNA/RNA Molecule: Synthetic oligonucleotide
  modified_base (7): LNA-A
ucagcgauuutt

SEQ ID NO: 105816 - DNA, 11 bp, Artificial Sequence
  Description of Artificial Sequence: Synthetic oligonucleotide
  Description of Combined DNA/RNA Molecule: Synthetic oligonucleotide
  modified_base (6): LNA-A
cagcgauuutt

SEQ ID NO: 105817 - DNA, 10 bp, Artificial Sequence
  Description of Artificial Sequence: Synthetic oligonucleotide
  Description of Combined DNA/RNA Molecule: Synthetic oligonucleotide
  modified_base (5): LNA-A
agcgauuutt

SEQ ID NO: 105818 - DNA, 9 bp, Artificial Sequence
  Description of Artificial Sequence: Synthetic oligonucleotide
  Description of Combined DNA/RNA Molecule: Synthetic oligonucleotide
  modified_base (4): LNA-A
gcgauuutt

SEQ ID NO: 105819 - DNA, 8 bp, Artificial Sequence
  Description of Artificial Sequence: Synthetic oligonucleotide
  Description of Combined DNA/RNA Molecule: Synthetic oligonucleotide
  modified_base (3): LNA-A
cgauuutt

SEQ ID NO: 105820 - DNA, 7 bp, Artificial Sequence
  Description of Artificial Sequence: Synthetic oligonucleotide
  Description of Combined DNA/RNA Molecule: Synthetic oligonucleotide
  modified_base (2): LNA-A
gauuutt

SEQ ID NO: 105821 - RNA, 9 nt, Artificial Sequence
  Description of Artificial Sequence: Synthetic oligonucleotide
  modified_base (3): LNA-A
cuacacaaa

SEQ ID NO: 105822 - RNA, 10 nt, Artificial Sequence
  Description of Artificial Sequence: Synthetic oligonucleotide
  modified_base (3): LNA-A
cuacacaaau

SEQ ID NO: 105823 - RNA, 11 nt, Artificial Sequence
  Description of Artificial Sequence: Synthetic oligonucleotide
  modified_base (3): LNA-A
cuacacaaauc

SEQ ID NO: 105824 - RNA, 12 nt, Artificial Sequence
  Description of Artificial Sequence: Synthetic oligonucleotide
  modified_base (3): LNA-A
cuacacaaauca

SEQ ID NO: 105825 - RNA, 13 nt, Artificial Sequence
  Description of Artificial Sequence: Synthetic oligonucleotide
  modified_base (3): LNA-A
cuacacaaaucag

SEQ ID NO: 105826 - RNA, 14 nt, Artificial Sequence
  Description of Artificial Sequence: Synthetic oligonucleotide
  modified_base (3): LNA-A
cuacacaaaucagc

SEQ ID NO: 105827 - RNA, 13 nt, Artificial Sequence
  Description of Artificial Sequence: Synthetic oligonucleotide
  modified_base (2): LNA-G
ggaucuuauuucu

SEQ ID NO: 105828 - RNA, 14 nt, Artificial Sequence
  Description of Artificial Sequence: Synthetic oligonucleotide
  modified_base (2): LNA-G
ggaucuuauuucuu

SEQ ID NO: 105829 - RNA, 8 nt, Artificial Sequence
  Description of Artificial Sequence: Synthetic oligonucleotide
  modified_base (2): LNA-G
  modified_base (8): LNA-A
ggaucuua

SEQ ID NO: 105830 - RNA, 9 nt, Artificial Sequence
  Description of Artificial Sequence: Synthetic oligonucleotide
  modified_base (2): LNA-G
  modified_base (9): LNA-U
ggaucuuau

SEQ ID NO: 105831 - RNA, 10 nt, Artificial Sequence
  Description of Artificial Sequence: Synthetic oligonucleotide
  modified_base (2): LNA-G
  modified_base (10): LNA-U
ggaucuuauu

SEQ ID NO: 105832 - RNA, 11 nt, Artificial Sequence
  Description of Artificial Sequence: Synthetic oligonucleotide
  modified_base (2): LNA-G
  modified_base (11): LNA-U
ggaucuuauuu

SEQ ID NO: 105833 - RNA, 12 nt, Artificial Sequence
  Description of Artificial Sequence: Synthetic oligonucleotide
  modified_base (2): LNA-G
  modified_base (12): LNA-C
ggaucuuauuuc

SEQ ID NO: 105834 - RNA, 13 nt, Artificial Sequence
  Description of Artificial Sequence: Synthetic oligonucleotide
  modified_base (2): LNA-G
  modified_base (13): LNA-U
ggaucuuauuucu

SEQ ID NO: 105835 - RNA, 14 nt, Artificial Sequence
  Description of Artificial Sequence: Synthetic oligonucleotide
  modified_base (2): LNA-G
  modified_base (14): LNA-U
ggaucuuauuucuu

SEQ ID NO: 105836 - DNA, 13 bp, Artificial Sequence
  Description of Artificial Sequence: Synthetic oligonucleotide
  Description of Combined DNA/RNA Molecule: Synthetic oligonucleotide
  modified_base (8): LNA-G
uuucuucggagtt

SEQ ID NO: 105837 - DNA, 12 bp, Artificial Sequence
  Description of Artificial Sequence: Synthetic oligonucleotide
  Description of Combined DNA/RNA Molecule: Synthetic oligonucleotide
  modified_base (7): LNA-G
uucuucggagtt

SEQ ID NO: 105838 - DNA, 11 bp, Artificial Sequence
  Description of Artificial Sequence: Synthetic oligonucleotide
  Description of Combined DNA/RNA Molecule: Synthetic oligonucleotide
  modified_base (6): LNA-G
ucuucggagtt

SEQ ID NO: 105839 - DNA, 10 bp, Artificial Sequence
  Description of Artificial Sequence: Synthetic oligonucleotide
  Description of Combined DNA/RNA Molecule: Synthetic oligonucleotide
  modified_base (5): LNA-G
cuucggagtt

SEQ ID NO: 105840 - DNA, 9 bp, Artificial Sequence
  Description of Artificial Sequence: Synthetic oligonucleotide
  Description of Combined DNA/RNA Molecule: Synthetic oligonucleotide
  modified_base (4): LNA-G
uucggagtt

SEQ ID NO: 105841 - DNA, 8 bp, Artificial Sequence
  Description of Artificial Sequence: Synthetic oligonucleotide
  Description of Combined DNA/RNA Molecule: Synthetic oligonucleotide
  modified_base (3): LNA-G
ucggagtt

SEQ ID NO: 105842 - DNA, 7 bp, Artificial Sequence
  Description of Artificial Sequence: Synthetic oligonucleotide
  Description of Combined DNA/RNA Molecule: Synthetic oligonucleotide
  modified_base (2): LNA-G
cggagtt

SEQ ID NO: 105843 - DNA, 13 bp, Artificial Sequence
  Description of Artificial Sequence: Synthetic oligonucleotide
  Description of Combined DNA/RNA Molecule: Synthetic oligonucleotide
  modified_base (1): LNA-U
  modified_base (8): LNA-G
uuucuucggagtt

SEQ ID NO: 105844 - DNA, 12 bp, Artificial Sequence
  Description of Artificial Sequence: Synthetic oligonucleotide
  Description of Combined DNA/RNA Molecule: Synthetic oligonucleotide
  modified_base (1): LNA-U
  modified_base (7): LNA-G
uucuucggagtt

SEQ ID NO: 105845 - DNA, 11 bp, Artificial Sequence
  Description of Artificial Sequence: Synthetic oligonucleotide
  Description of Combined DNA/RNA Molecule: Synthetic oligonucleotide
  modified_base (1): LNA-U
  modified_base (6): LNA-G
ucuucggagtt

SEQ ID NO: 105846 - DNA, 10 bp, Artificial Sequence
  Description of Artificial Sequence: Synthetic oligonucleotide
  Description of Combined DNA/RNA Molecule: Synthetic oligonucleotide
  modified_base (1): LNA-C
  modified_base (5): LNA-G
cuucggagtt

SEQ ID NO: 105847 - DNA, 9 bp, Artificial Sequence
  Description of Artificial Sequence: Synthetic oligonucleotide
  Description of Combined DNA/RNA Molecule: Synthetic oligonucleotide
  modified_base (1): LNA-U
  modified_base (4): LNA-G
uucggagtt

SEQ ID NO: 105848 - DNA, 8 bp, Artificial Sequence
  Description of Artificial Sequence: Synthetic oligonucleotide
  Description of Combined DNA/RNA Molecule: Synthetic oligonucleotide
  modified_base (1): LNA-U
  modified_base (3): LNA-G
ucggagtt

SEQ ID NO: 105849 - DNA, 7 bp, Artificial Sequence
  Description of Artificial Sequence: Synthetic oligonucleotide
  Description of Combined DNA/RNA Molecule: Synthetic oligonucleotide
  modified_base (1): LNA-C
  modified_base (2): LNA-G
cggagtt

SEQ ID NO: 105850 - DNA, 21 bp, Artificial Sequence
  Description of Artificial Sequence: Synthetic oligonucleotide
  Description of Combined DNA/RNA Molecule: Synthetic oligonucleotide
  modified_base (2): LNA-G
  modified_base (16): LNA-G
ggaucuuauuucuucggagtt

SEQ ID NO: 105851 - DNA, 25 bp, Artificial Sequence
  Description of Artificial Sequence: Synthetic oligonucleotide
  Description of Combined DNA/RNA Molecule: Synthetic oligonucleotide
ggaucuuauuucuucggagacaatg

SEQ ID NO: 105852 - RNA, 25 nt, Artificial Sequence
  Description of Artificial Sequence: Synthetic oligonucleotide
uaagcagaguucaaaagcccuucag

SEQ ID NO: 105853 - RNA, 25 nt, Artificial Sequence
  Description of Artificial Sequence: Synthetic oligonucleotide
agcagaguucaaaagcccuucagcg

SEQ ID NO: 105854 - RNA, 25 nt, Artificial Sequence
  Description of Artificial Sequence: Synthetic oligonucleotide
cucagggucugagugaagccgcucg

SEQ ID NO: 105855 - RNA, 25 nt, Artificial Sequence
  Description of Artificial Sequence: Synthetic oligonucleotide
caagcaacuacaucacgccagucaa

SEQ ID NO: 105856 - RNA, 25 nt, Artificial Sequence
  Description of Artificial Sequence: Synthetic oligonucleotide
aucaauggcagcuucuuggugcgug

SEQ ID NO: 105857 - RNA, 25 nt, Artificial Sequence
  Description of Artificial Sequence: Synthetic oligonucleotide
uuccagcccacauuggauucaucag

SEQ ID NO: 105858 - RNA, 25 nt, Artificial Sequence
  Description of Artificial Sequence: Synthetic oligonucleotide
cagcugagaauguggaauaccuaag

SEQ ID NO: 105859 - RNA, 25 nt, Artificial Sequence
  Description of Artificial Sequence: Synthetic oligonucleotide
aacguaucuccuaauuugaggcuca

SEQ ID NO: 105860 - RNA, 25 nt, Artificial Sequence
  Description of Artificial Sequence: Synthetic oligonucleotide
ccuaaaauaauuucucuacaauugg

SEQ ID NO: 105861 - RNA, 25 nt, Artificial Sequence
  Description of Artificial Sequence: Synthetic oligonucleotide
uggaagauucagcuaguuaggagcc

SEQ ID NO: 105862 - RNA, 25 nt, Artificial Sequence
  Description of Artificial Sequence: Synthetic oligonucleotide
uuaaacucuccuagucaauauccac

SEQ ID NO: 105863 - RNA, 25 nt, Artificial Sequence
  Description of Artificial Sequence: Synthetic oligonucleotide
cagccuacaguuauguucagucaca

SEQ ID NO: 105864 - RNA, 25 nt, Artificial Sequence
  Description of Artificial Sequence: Synthetic oligonucleotide
guuauguucagucacacacacauac

SEQ ID NO: 105865 - RNA, 25 nt, Artificial Sequence
  Description of Artificial Sequence: Synthetic oligonucleotide
cacauacaaaauguuccuuuugcuu

SEQ ID NO: 105866 - RNA, 25 nt, Artificial Sequence
  Description of Artificial Sequence: Synthetic oligonucleotide
uccuuuugcuuuuaaaguaauuuuu

SEQ ID NO: 105867 - RNA, 25 nt, Artificial Sequence
  Description of Artificial Sequence: Synthetic oligonucleotide
ugaccugugaagcaacagucaaugg

SEQ ID NO: 105868 - RNA, 25 nt, Artificial Sequence
  Description of Artificial Sequence: Synthetic oligonucleotide
cuaucucacacaucgacaaaccaau

SEQ ID NO: 105869 - RNA, 25 nt, Artificial Sequence
  Description of Artificial Sequence: Synthetic oligonucleotide
uguccucaauuguacugcuaccacu

SEQ ID NO: 105870 - RNA, 25 nt, Artificial Sequence
  Description of Artificial Sequence: Synthetic oligonucleotide
aaaccguagcuggcaagcggucuua

SEQ ID NO: 105871 - RNA, 25 nt, Artificial Sequence
  Description of Artificial Sequence: Synthetic oligonucleotide
uagcuggcaagcggucuuaccggcu

SEQ ID NO: 105872 - RNA, 25 nt, Artificial Sequence
  Description of Artificial Sequence: Synthetic oligonucleotide
uuguaugguuaaaagauggguuacc

SEQ ID NO: 105873 - RNA, 25 nt, Artificial Sequence
  Description of Artificial Sequence: Synthetic oligonucleotide
ugguuaaaagauggguuaccugcga

SEQ ID NO: 105874 - RNA, 25 nt, Artificial Sequence
  Description of Artificial Sequence: Synthetic oligonucleotide
cagggaauuauacaaucuugcugag

SEQ ID NO: 105875 - RNA, 25 nt, Artificial Sequence
  Description of Artificial Sequence: Synthetic oligonucleotide
acaaucuugcugagcauaaaacagu

SEQ ID NO: 105876 - RNA, 25 nt, Artificial Sequence
  Description of Artificial Sequence: Synthetic oligonucleotide
ccaauaaugaagaguccuuuauccu

SEQ ID NO: 105877 - RNA, 25 nt, Artificial Sequence
  Description of Artificial Sequence: Synthetic oligonucleotide
acuuuggauguuccaacgcaaguug

SEQ ID NO: 105878 - RNA, 25 nt, Artificial Sequence
  Description of Artificial Sequence: Synthetic oligonucleotide
aaugcuuccacuaaacugaaaccau

SEQ ID NO: 105879 - RNA, 25 nt, Artificial Sequence
  Description of Artificial Sequence: Synthetic oligonucleotide
gagaaaguuugacuuuguuaaauau

SEQ ID NO: 105880 - RNA, 25 nt, Artificial Sequence
  Description of Artificial Sequence: Synthetic oligonucleotide
aaagaacuacuguauauuaaaaguu

SEQ ID NO: 105881 - RNA, 25 nt, Artificial Sequence
  Description of Artificial Sequence: Synthetic oligonucleotide
uuagaaauacggguuuugacuuaac

SEQ ID NO: 105882 - RNA, 25 nt, Artificial Sequence
  Description of Artificial Sequence: Synthetic oligonucleotide
aacauggguacagcaaacucagcac

SEQ ID NO: 105883 - RNA, 25 nt, Artificial Sequence
  Description of Artificial Sequence: Synthetic oligonucleotide
aaagacacagaagaugcugaccuca

SEQ ID NO: 105884 - RNA, 25 nt, Artificial Sequence
  Description of Artificial Sequence: Synthetic oligonucleotide
uaguagggagguuuauucagaucgc

SEQ ID NO: 105885 - RNA, 25 nt, Artificial Sequence
  Description of Artificial Sequence: Synthetic oligonucleotide
gccuucugcagcaggguucugggau

SEQ ID NO: 105886 - RNA, 25 nt, Artificial Sequence
  Description of Artificial Sequence: Synthetic oligonucleotide
ggucugguacauauuggaaauuaug

SEQ ID NO: 105887 - RNA, 25 nt, Artificial Sequence
  Description of Artificial Sequence: Synthetic oligonucleotide
cuaguccuuccgauggaagcacuag

SEQ ID NO: 105888 - RNA, 25 nt, Artificial Sequence
  Description of Artificial Sequence: Synthetic oligonucleotide
ccagugaauauuguuuuuaugugga

SEQ ID NO: 105889 - RNA, 25 nt, Artificial Sequence
  Description of Artificial Sequence: Synthetic oligonucleotide
augaauucaaguuggaauugguaga

SEQ ID NO: 105890 - RNA, 25 nt, Artificial Sequence
  Description of Artificial Sequence: Synthetic oligonucleotide
caggacacagauuuagacuuggaga

SEQ ID NO: 105891 - RNA, 25 nt, Artificial Sequence
  Description of Artificial Sequence: Synthetic oligonucleotide
cucaaagcacaguuacaguauucca

SEQ ID NO: 105892 - RNA, 25 nt, Artificial Sequence
  Description of Artificial Sequence: Synthetic oligonucleotide
accacugccaccacugaugaauuaa

SEQ ID NO: 105893 - RNA, 25 nt, Artificial Sequence
  Description of Artificial Sequence: Synthetic oligonucleotide
gaaacuacuagugccacaucaucac

SEQ ID NO: 105894 - RNA, 25 nt, Artificial Sequence
  Description of Artificial Sequence: Synthetic oligonucleotide
aagucggacagccucaccaaacaga

SEQ ID NO: 105895 - RNA, 25 nt, Artificial Sequence
  Description of Artificial Sequence: Synthetic oligonucleotide
gaaagcgaaaaauggaacaugaugg

SEQ ID NO: 105896 - RNA, 25 nt, Artificial Sequence
  Description of Artificial Sequence: Synthetic oligonucleotide
cccucugauuuagcauguagacugc

SEQ ID NO: 105897 - RNA, 25 nt, Artificial Sequence
  Description of Artificial Sequence: Synthetic oligonucleotide
ugagcuauuuaaggaucuauuuaug

SEQ ID NO: 105898 - RNA, 25 nt, Artificial Sequence
  Description of Artificial Sequence: Synthetic oligonucleotide
aaaaggugaaaaagcacuauuauca

SEQ ID NO: 105899 - RNA, 25 nt, Artificial Sequence
  Description of Artificial Sequence: Synthetic oligonucleotide
gaaaaagcacuauuaucaguucugc

SEQ ID NO: 105900 - RNA, 25 nt, Artificial Sequence
  Description of Artificial Sequence: Synthetic oligonucleotide
ggcugaaaagaaagauuaaaccuac

SEQ ID NO: 105901 - RNA, 25 nt, Artificial Sequence
  Description of Artificial Sequence: Synthetic oligonucleotide
uaaacccuuauaauaaaauccuucu

SEQ ID NO: 105902 - RNA, 25 nt, Artificial Sequence
  Description of Artificial Sequence: Synthetic oligonucleotide
cauacuauuagccaaugcuguagac

SEQ ID NO: 105903 - RNA, 25 nt, Artificial Sequence
  Description of Artificial Sequence: Synthetic oligonucleotide
gacagaagcauuuugauaggaauag

SEQ ID NO: 105904 - RNA, 25 nt, Artificial Sequence
  Description of Artificial Sequence: Synthetic oligonucleotide
agagcaaauaagauaauggcccuga

SEQ ID NO: 105905 - RNA, 25 nt, Artificial Sequence
  Description of Artificial Sequence: Synthetic oligonucleotide
ccaacauuuuucucuuccucaagca

SEQ ID NO: 105906 - RNA, 25 nt, Artificial Sequence
  Description of Artificial Sequence: Synthetic oligonucleotide
uuaaguaugagaaaaguucagccca

SEQ ID NO: 105907 - RNA, 25 nt, Artificial Sequence
  Description of Artificial Sequence: Synthetic oligonucleotide
caggaauaaagauggcugcugaacc

SEQ ID NO: 105908 - RNA, 25 nt, Artificial Sequence
  Description of Artificial Sequence: Synthetic oligonucleotide
aauuugaaugaccaaguucucuuca

SEQ ID NO: 105909 - RNA, 25 nt, Artificial Sequence
  Description of Artificial Sequence: Synthetic oligonucleotide
auguauaaagauagccagccuagag

SEQ ID NO: 105910 - RNA, 25 nt, Artificial Sequence
  Description of Artificial Sequence: Synthetic oligonucleotide
ggcuguaacuaucucugugaagugu

SEQ ID NO: 105911 - RNA, 25 nt, Artificial Sequence
  Description of Artificial Sequence: Synthetic oligonucleotide
ucugugaagugugagaaaauuucaa

SEQ ID NO: 105912 - RNA, 25 nt, Artificial Sequence
  Description of Artificial Sequence: Synthetic oligonucleotide
ccuuuaaggaaaugaauccuccuga

SEQ ID NO: 105913 - RNA, 25 nt, Artificial Sequence
  Description of Artificial Sequence: Synthetic oligonucleotide
aaggauacaaaaagugacaucauau

SEQ ID NO: 105914 - RNA, 25 nt, Artificial Sequence
  Description of Artificial Sequence: Synthetic oligonucleotide
agaugcaauuugaaucuucaucaua

SEQ ID NO: 105915 - RNA, 25 nt, Artificial Sequence
  Description of Artificial Sequence: Synthetic oligonucleotide
guucaaaacgaagacuagcuauuaa

SEQ ID NO: 105916 - RNA, 25 nt, Artificial Sequence
  Description of Artificial Sequence: Synthetic oligonucleotide
gugaaaccucaucucuacuaaaaau

SEQ ID NO: 105917 - RNA, 25 nt, Artificial Sequence
  Description of Artificial Sequence: Synthetic oligonucleotide
acgaaagagaagcucuaucucgccu

SEQ ID NO: 105918 - RNA, 25 nt, Artificial Sequence
  Description of Artificial Sequence: Synthetic oligonucleotide
cuccacaagcgccuucgguccaguu

SEQ ID NO: 105919 - RNA, 25 nt, Artificial Sequence
  Description of Artificial Sequence: Synthetic oligonucleotide
gagaagauuccaaagauguagccgc

SEQ ID NO: 105920 - RNA, 25 nt, Artificial Sequence
  Description of Artificial Sequence: Synthetic oligonucleotide
aaucuggauucaaugaggagacuug

SEQ ID NO: 105921 - RNA, 25 nt, Artificial Sequence
  Description of Artificial Sequence: Synthetic oligonucleotide
agaacagauuugagaguagugagga

SEQ ID NO: 105922 - RNA, 25 nt, Artificial Sequence
  Description of Artificial Sequence: Synthetic oligonucleotide
ccagagcugugcagaugaguacaaa

SEQ ID NO: 105923 - RNA, 25 nt, Artificial Sequence
  Description of Artificial Sequence: Synthetic oligonucleotide
ccucagauuguuguuguuaaugggc

SEQ ID NO: 105924 - RNA, 25 nt, Artificial Sequence
  Description of Artificial Sequence: Synthetic oligonucleotide
cuauuuuaauuauuuuuaauuuauu

SEQ ID NO: 105925 - RNA, 25 nt, Artificial Sequence
  Description of Artificial Sequence: Synthetic oligonucleotide
uuuaauuuauuaauauuuaaauaug

SEQ ID NO: 105926 - RNA, 25 nt, Artificial Sequence
  Description of Artificial Sequence: Synthetic oligonucleotide
augcaguuugaauauccuuuguuuc

SEQ ID NO: 105927 - RNA, 25 nt, Artificial Sequence
  Description of Artificial Sequence: Synthetic oligonucleotide
caugcugcuggcgucuaaguguuug

SEQ ID NO: 105928 - RNA, 25 nt, Artificial Sequence
  Description of Artificial Sequence: Synthetic oligonucleotide
agaugugcauuucaccugugacaaa

SEQ ID NO: 105929 - RNA, 25 nt, Artificial Sequence
  Description of Artificial Sequence: Synthetic oligonucleotide
ucaaaaccugugccaggcugaauua

SEQ ID NO: 105930 - RNA, 25 nt, Artificial Sequence
  Description of Artificial Sequence: Synthetic oligonucleotide
gaauguggguagucauucuuacaau

SEQ ID NO: 105931 - RNA, 25 nt, Artificial Sequence
  Description of Artificial Sequence: Synthetic oligonucleotide
auguggguagucauucuuacaauug

SEQ ID NO: 105932 - RNA, 25 nt, Artificial Sequence
  Description of Artificial Sequence: Synthetic oligonucleotide
ugaaaaugagcaucagagaguguac

SEQ ID NO: 105933 - RNA, 25 nt, Artificial Sequence
  Description of Artificial Sequence: Synthetic oligonucleotide
uugcuuuucauguagaacucagcag

SEQ ID NO: 105934 - RNA, 25 nt, Artificial Sequence
  Description of Artificial Sequence: Synthetic oligonucleotide
uguauuucuauauuuauuuucagua

SEQ ID NO: 105935 - RNA, 25 nt, Artificial Sequence
  Description of Artificial Sequence: Synthetic oligonucleotide
uuugauuaauguuucuuaaauggaa

SEQ ID NO: 105936 - RNA, 25 nt, Artificial Sequence
  Description of Artificial Sequence: Synthetic oligonucleotide
caacguguauagugccuaaaauugu

SEQ ID NO: 105937 - RNA, 25 nt, Artificial Sequence
  Description of Artificial Sequence: Synthetic oligonucleotide
cauauccuuggcuacuaacaucugg

SEQ ID NO: 105938 - RNA, 25 nt, Artificial Sequence
  Description of Artificial Sequence: Synthetic oligonucleotide
uacuaacaucuggagacugugagcu

SEQ ID NO: 105939 - RNA, 25 nt, Artificial Sequence
  Description of Artificial Sequence: Synthetic oligonucleotide
cauaaguugugugcuuuuuauuaau

SEQ ID NO: 105940 - RNA, 25 nt, Artificial Sequence
  Description of Artificial Sequence: Synthetic oligonucleotide
gcaucauuuuggcucuucuuacauu

SEQ ID NO: 105941 - RNA, 25 nt, Artificial Sequence
  Description of Artificial Sequence: Synthetic oligonucleotide
gcucuucuuacauuuguaaaaaugu

SEQ ID NO: 105942 - RNA, 25 nt, Artificial Sequence
  Description of Artificial Sequence: Synthetic oligonucleotide
agauuaggucaucuuaauucauauu

SEQ ID NO: 105943 - RNA, 25 nt, Artificial Sequence
  Description of Artificial Sequence: Synthetic oligonucleotide
auggaauugaaagaacuaaucauga

SEQ ID NO: 105944 - RNA, 25 nt, Artificial Sequence
  Description of Artificial Sequence: Synthetic oligonucleotide
cacacucauuccuucugcucuuggg

SEQ ID NO: 105945 - RNA, 25 nt, Artificial Sequence
  Description of Artificial Sequence: Synthetic oligonucleotide
uguagagguaaccaguagcuuugag

SEQ ID NO: 105946 - RNA, 25 nt, Artificial Sequence
  Description of Artificial Sequence: Synthetic oligonucleotide
caaccacaugccacguaauauuuca

SEQ ID NO: 105947 - RNA, 25 nt, Artificial Sequence
  Description of Artificial Sequence: Synthetic oligonucleotide
ucggaaacaaguuauucucuucacu

SEQ ID NO: 105948 - RNA, 25 nt, Artificial Sequence
  Description of Artificial Sequence: Synthetic oligonucleotide
acucccaauaacuaaugcuaagaaa

SEQ ID NO: 105949 - RNA, 25 nt, Artificial Sequence
  Description of Artificial Sequence: Synthetic oligonucleotide
aaugcuaagaaaugcugaaaaucaa

SEQ ID NO: 105950 - RNA, 25 nt, Artificial Sequence
  Description of Artificial Sequence: Synthetic oligonucleotide
gucuuucucuaaauaugauuacuuu

SEQ ID NO: 105951 - RNA, 25 nt, Artificial Sequence
  Description of Artificial Sequence: Synthetic oligonucleotide
ugaauuucaggcauuuuguucuaca

SEQ ID NO: 105952 - RNA, 25 nt, Artificial Sequence
  Description of Artificial Sequence: Synthetic oligonucleotide
cgauucccucucacccgggacucuc

SEQ ID NO: 105953 - RNA, 25 nt, Artificial Sequence
  Description of Artificial Sequence: Synthetic oligonucleotide
aggaaagugaaccuuuaaaguaaag

SEQ ID NO: 105954 - RNA, 25 nt, Artificial Sequence
  Description of Artificial Sequence: Synthetic oligonucleotide
gaggcugcaugcucuggaagccugg

SEQ ID NO: 105955 - RNA, 25 nt, Artificial Sequence
  Description of Artificial Sequence: Synthetic oligonucleotide
ucucugaacagaaaacaaaagagag

SEQ ID NO: 105956 - RNA, 25 nt, Artificial Sequence
  Description of Artificial Sequence: Synthetic oligonucleotide
aacuuggcuguaaucaguuaugccg

SEQ ID NO: 105957 - RNA, 25 nt, Artificial Sequence
  Description of Artificial Sequence: Synthetic oligonucleotide
agaagccaaaauuaaaagaagucca

SEQ ID NO: 105958 - RNA, 25 nt, Artificial Sequence
  Description of Artificial Sequence: Synthetic oligonucleotide
auuaaaagaaguccaggugagguua

SEQ ID NO: 105959 - RNA, 25 nt, Artificial Sequence
  Description of Artificial Sequence: Synthetic oligonucleotide
gaauccggauuaucgggaagaggac

SEQ ID NO: 105960 - RNA, 25 nt, Artificial Sequence
  Description of Artificial Sequence: Synthetic oligonucleotide
aaugugacaucaaagcaaguauugu

SEQ ID NO: 105961 - RNA, 25 nt, Artificial Sequence
  Description of Artificial Sequence: Synthetic oligonucleotide
caucaaagcaaguauuguagcacuc

SEQ ID NO: 105962 - RNA, 25 nt, Artificial Sequence
  Description of Artificial Sequence: Synthetic oligonucleotide
agagagagaaaacaaaaccacaaau

SEQ ID NO: 105963 - RNA, 25 nt, Artificial Sequence
  Description of Artificial Sequence: Synthetic oligonucleotide
ucgcuguaguauuuaagcccauaca

SEQ ID NO: 105964 - RNA, 25 nt, Artificial Sequence
  Description of Artificial Sequence: Synthetic oligonucleotide
cgcuguaguauuuaagcccauacag

SEQ ID NO: 105965 - RNA, 25 nt, Artificial Sequence
  Description of Artificial Sequence: Synthetic oligonucleotide
auuuaagcccauacagaaaccuucc

SEQ ID NO: 105966 - RNA, 25 nt, Artificial Sequence
  Description of Artificial Sequence: Synthetic oligonucleotide
auuaaaauaaacaugguauaccuac

SEQ ID NO: 105967 - RNA, 25 nt, Artificial Sequence
  Description of Artificial Sequence: Synthetic oligonucleotide
cuguucugaucggccaguuuucgga

SEQ ID NO: 105968 - RNA, 25 nt, Artificial Sequence
  Description of Artificial Sequence: Synthetic oligonucleotide
aaauaauuugaacuuuggaacaggg

SEQ ID NO: 105969 - RNA, 25 nt, Artificial Sequence
  Description of Artificial Sequence: Synthetic oligonucleotide
ugcgaccuuaauuuaacuuuccagu

SEQ ID NO: 105970 - RNA, 25 nt, Artificial Sequence
  Description of Artificial Sequence: Synthetic oligonucleotide
cugagaaagcuaaaguuugguuuug

SEQ ID NO: 105971 - RNA, 25 nt, Artificial Sequence
  Description of Artificial Sequence: Synthetic oligonucleotide
aguaaagaugcuacuucccacugua

SEQ ID NO: 105972 - RNA, 25 nt, Artificial Sequence
  Description of Artificial Sequence: Synthetic oligonucleotide
cugcuuaauugcugauaccauauga

SEQ ID NO: 105973 - RNA, 25 nt, Artificial Sequence
  Description of Artificial Sequence: Synthetic oligonucleotide
uaccauaugaaugaaacaugggcug

SEQ ID NO: 105974 - RNA, 25 nt, Artificial Sequence
  Description of Artificial Sequence: Synthetic oligonucleotide
aacuuucuuauccaacuuuuucaua

SEQ ID NO: 105975 - RNA, 25 nt, Artificial Sequence
  Description of Artificial Sequence: Synthetic oligonucleotide
ccuugcaugacaucaugaggccgga

SEQ ID NO: 105976 - RNA, 25 nt, Artificial Sequence
  Description of Artificial Sequence: Synthetic oligonucleotide
ugaauuuguauaugacugcauuugu

SEQ ID NO: 105977 - RNA, 25 nt, Artificial Sequence
  Description of Artificial Sequence: Synthetic oligonucleotide
gaauccuaguagaauguuuacuacc

SEQ ID NO: 105978 - RNA, 25 nt, Artificial Sequence
  Description of Artificial Sequence: Synthetic oligonucleotide
gaaagggaagaauuuuuugaugaaa

SEQ ID NO: 105979 - RNA, 25 nt, Artificial Sequence
  Description of Artificial Sequence: Synthetic oligonucleotide
uaucggcaugccagugugugaauuu

SEQ ID NO: 105980 - RNA, 25 nt, Artificial Sequence
  Description of Artificial Sequence: Synthetic oligonucleotide
caccucauaguagagcaauguaugu

SEQ ID NO: 105981 - RNA, 25 nt, Artificial Sequence
  Description of Artificial Sequence: Synthetic oligonucleotide
ccagaauugccaaagcacauauaua

SEQ ID NO: 105982 - RNA, 25 nt, Artificial Sequence
  Description of Artificial Sequence: Synthetic oligonucleotide
uggugaucuggguaauaguuucucc

SEQ ID NO: 105983 - RNA, 25 nt, Artificial Sequence
  Description of Artificial Sequence: Synthetic oligonucleotide
gaucuggguaauaguuucuccaaau

SEQ ID NO: 105984 - RNA, 25 nt, Artificial Sequence
  Description of Artificial Sequence: Synthetic oligonucleotide
ggaugugaugaauacuuccuagaaa

SEQ ID NO: 105985 - RNA, 25 nt, Artificial Sequence
  Description of Artificial Sequence: Synthetic oligonucleotide
cauuuccacagcuacaccauauaug

SEQ ID NO: 105986 - RNA, 25 nt, Artificial Sequence
  Description of Artificial Sequence: Synthetic oligonucleotide
acagcuacaccauauaugaauggag

SEQ ID NO: 105987 - RNA, 25 nt, Artificial Sequence
  Description of Artificial Sequence: Synthetic oligonucleotide
ugcaguucuuacacgagaagaagau

SEQ ID NO: 105988 - RNA, 25 nt, Artificial Sequence
  Description of Artificial Sequence: Synthetic oligonucleotide
acgagaagaagaucauuuacaggga

SEQ ID NO: 105989 - RNA, 25 nt, Artificial Sequence
  Description of Artificial Sequence: Synthetic oligonucleotide
cgagaagaagaucauuuacagggac

SEQ ID NO: 105990 - RNA, 25 nt, Artificial Sequence
  Description of Artificial Sequence: Synthetic oligonucleotide
aagaagaucauuuacagggaccuga

SEQ ID NO: 105991 - RNA, 25 nt, Artificial Sequence
  Description of Artificial Sequence: Synthetic oligonucleotide
agaggaagagguguuugacugcauc

SEQ ID NO: 105992 - RNA, 25 nt, Artificial Sequence
  Description of Artificial Sequence: Synthetic oligonucleotide
gaggaagagguguuugacugcaucg

SEQ ID NO: 105993 - RNA, 25 nt, Artificial Sequence
  Description of Artificial Sequence: Synthetic oligonucleotide
cuacuuugagggcgaguucacaggg

SEQ ID NO: 105994 - RNA, 25 nt, Artificial Sequence
  Description of Artificial Sequence: Synthetic oligonucleotide
agggcaucuccuggcaccucugucc

SEQ ID NO: 105995 - RNA, 25 nt, Artificial Sequence
  Description of Artificial Sequence: Synthetic oligonucleotide
ggagugauaugguuugucuuuuuaa

SEQ ID NO: 105996 - RNA, 25 nt, Artificial Sequence
  Description of Artificial Sequence: Synthetic oligonucleotide
gagugauaugguuugucuuuuuaag

SEQ ID NO: 105997 - RNA, 25 nt, Artificial Sequence
  Description of Artificial Sequence: Synthetic oligonucleotide
ugcaguaaagauccuaaagguuguc

SEQ ID NO: 105998 - RNA, 25 nt, Artificial Sequence
  Description of Artificial Sequence: Synthetic oligonucleotide
aguaaagauccuaaagguugucgac

SEQ ID NO: 105999 - RNA, 25 nt, Artificial Sequence
  Description of Artificial Sequence: Synthetic oligonucleotide
ugacaaaggacaaccuggcaauugu

SEQ ID NO: 106000 - RNA, 25 nt, Artificial Sequence
  Description of Artificial Sequence: Synthetic oligonucleotide
gcaauugugacccaguggugcgagg

SEQ ID NO: 106001 - RNA, 25 nt, Artificial Sequence
  Description of Artificial Sequence: Synthetic oligonucleotide
aacaucauccauagagacaugaaau

SEQ ID NO: 106002 - RNA, 25 nt, Artificial Sequence
  Description of Artificial Sequence: Synthetic oligonucleotide
ugaaauccaacaauauauuucucca

SEQ ID NO: 106003 - RNA, 25 nt, Artificial Sequence
  Description of Artificial Sequence: Synthetic oligonucleotide
aacaauauauuucuccaugaaggcu

SEQ ID NO: 106004 - RNA, 25 nt, Artificial Sequence
  Description of Artificial Sequence: Synthetic oligonucleotide
aacaguaaagucacgcuggaguggu

SEQ ID NO: 106005 - RNA, 25 nt, Artificial Sequence
  Description of Artificial Sequence: Synthetic oligonucleotide
ugugaagaaaguaaaggaagagagg

SEQ ID NO: 106006 - RNA, 25 nt, Artificial Sequence
  Description of Artificial Sequence: Synthetic oligonucleotide
cuuccgagccauccuugcaucgggc

SEQ ID NO: 106007 - RNA, 25 nt, Artificial Sequence
  Description of Artificial Sequence: Synthetic oligonucleotide
aauggagguugaauauccuacugug

SEQ ID NO: 106008 - RNA, 25 nt, Artificial Sequence
  Description of Artificial Sequence: Synthetic oligonucleotide
ggagguugaauauccuacuguguaa

SEQ ID NO: 106009 - RNA, 25 nt, Artificial Sequence
  Description of Artificial Sequence: Synthetic oligonucleotide
auuuugaguuuucccuuguagugua

SEQ ID NO: 106010 - RNA, 25 nt, Artificial Sequence
  Description of Artificial Sequence: Synthetic oligonucleotide
uauccuguuuguucuuuguugauug

SEQ ID NO: 106011 - RNA, 25 nt, Artificial Sequence
  Description of Artificial Sequence: Synthetic oligonucleotide
ccuguuuguucuuuguugauugaaa

SEQ ID NO: 106012 - RNA, 25 nt, Artificial Sequence
  Description of Artificial Sequence: Synthetic oligonucleotide
cucuacagccuucuuuuucuuccau

SEQ ID NO: 106013 - RNA, 25 nt, Artificial Sequence
  Description of Artificial Sequence: Synthetic oligonucleotide
ucuuccauagcuaaucuuccuucua

SEQ ID NO: 106014 - RNA, 25 nt, Artificial Sequence
  Description of Artificial Sequence: Synthetic oligonucleotide
auaaucuuccuguugaaugcuucau

SEQ ID NO: 106015 - RNA, 25 nt, Artificial Sequence
  Description of Artificial Sequence: Synthetic oligonucleotide
uaaucuuccuguugaaugcuucaug

SEQ ID NO: 106016 - RNA, 25 nt, Artificial Sequence
  Description of Artificial Sequence: Synthetic oligonucleotide
cuucaugacuugaauucuacuuuga

SEQ ID NO: 106017 - RNA, 25 nt, Artificial Sequence
  Description of Artificial Sequence: Synthetic oligonucleotide
aagagggagagaagcaacuacagac

SEQ ID NO: 106018 - RNA, 25 nt, Artificial Sequence
  Description of Artificial Sequence: Synthetic oligonucleotide
cgucuccuaccagaccaaggucaac

SEQ ID NO: 106019 - RNA, 25 nt, Artificial Sequence
  Description of Artificial Sequence: Synthetic oligonucleotide
gaucaaucggcccgacuaucucgac

SEQ ID NO: 106020 - RNA, 25 nt, Artificial Sequence
  Description of Artificial Sequence: Synthetic oligonucleotide
ggacgaacauccaaccuucccaaac

SEQ ID NO: 106021 - RNA, 25 nt, Artificial Sequence
  Description of Artificial Sequence: Synthetic oligonucleotide
agggucggaacccaagcuuagaacu

SEQ ID NO: 106022 - RNA, 25 nt, Artificial Sequence
  Description of Artificial Sequence: Synthetic oligonucleotide
ucggaacccaagcuuagaacuuuaa

SEQ ID NO: 106023 - RNA, 25 nt, Artificial Sequence
  Description of Artificial Sequence: Synthetic oligonucleotide
acccaagcuuagaacuuuaagcaac

SEQ ID NO: 106024 - RNA, 25 nt, Artificial Sequence
  Description of Artificial Sequence: Synthetic oligonucleotide
gaacuuuaagcaacaagaccaccac

SEQ ID NO: 106025 - RNA, 25 nt, Artificial Sequence
  Description of Artificial Sequence: Synthetic oligonucleotide
acuauucaguggcgagaaauaaagu

SEQ ID NO: 106026 - RNA, 25 nt, Artificial Sequence
  Description of Artificial Sequence: Synthetic oligonucleotide
cuauucaguggcgagaaauaaaguu

SEQ ID NO: 106027 - RNA, 25 nt, Artificial Sequence
  Description of Artificial Sequence: Synthetic oligonucleotide
aaacacagauaacaggaaaugaucc

SEQ ID NO: 106028 - RNA, 25 nt, Artificial Sequence
  Description of Artificial Sequence: Synthetic oligonucleotide
cuuaagaaaagagaagaaaugaaac

SEQ ID NO: 106029 - RNA, 25 nt, Artificial Sequence
  Description of Artificial Sequence: Synthetic oligonucleotide
cugaaggaguguguuuccauccucc

SEQ ID NO: 106030 - RNA, 25 nt, Artificial Sequence
  Description of Artificial Sequence: Synthetic oligonucleotide
ucaccgcgggacugaaaaucuuuga

SEQ ID NO: 106031 - RNA, 25 nt, Artificial Sequence
  Description of Artificial Sequence: Synthetic oligonucleotide
agcagaaauaagcgugccguucagg

SEQ ID NO: 106032 - RNA, 25 nt, Artificial Sequence
  Description of Artificial Sequence: Synthetic oligonucleotide
aagcgugccguucaggguccagaag

SEQ ID NO: 106033 - RNA, 25 nt, Artificial Sequence
  Description of Artificial Sequence: Synthetic oligonucleotide
agaaacagucacucaagacugcuug

SEQ ID NO: 106034 - RNA, 25 nt, Artificial Sequence
  Description of Artificial Sequence: Synthetic oligonucleotide
agaggaagaagguccaugucuuugg

SEQ ID NO: 106035 - RNA, 25 nt, Artificial Sequence
  Description of Artificial Sequence: Synthetic oligonucleotide
uguauucaaaauaugccugaaacac

SEQ ID NO: 106036 - RNA, 25 nt, Artificial Sequence
  Description of Artificial Sequence: Synthetic oligonucleotide
auuuuccucccuuucucuguaccuc

SEQ ID NO: 106037 - RNA, 25 nt, Artificial Sequence
  Description of Artificial Sequence: Synthetic oligonucleotide
caaagaaagauagagcaagacaaga

SEQ ID NO: 106038 - RNA, 25 nt, Artificial Sequence
  Description of Artificial Sequence: Synthetic oligonucleotide
aagaaagauagagcaagacaagaaa

SEQ ID NO: 106039 - RNA, 25 nt, Artificial Sequence
  Description of Artificial Sequence: Synthetic oligonucleotide
gaaagcauuuguuuguacaagaucc

SEQ ID NO: 106040 - RNA, 25 nt, Artificial Sequence
  Description of Artificial Sequence: Synthetic oligonucleotide
ugaguuaaacgaacguacuugcaga

SEQ ID NO: 106041 - RNA, 25 nt, Artificial Sequence
  Description of Artificial Sequence: Synthetic oligonucleotide
acugauacagaacgaucgauacaga

SEQ ID NO: 106042 - RNA, 25 nt, Artificial Sequence
  Description of Artificial Sequence: Synthetic oligonucleotide
auauuauauauauauaaaaauaaau

SEQ ID NO: 106043 - RNA, 25 nt, Artificial Sequence
  Description of Artificial Sequence: Synthetic oligonucleotide
auuauauauauauaaaaauaaauau

SEQ ID NO: 106044 - RNA, 25 nt, Artificial Sequence
  Description of Artificial Sequence: Synthetic oligonucleotide
ucacuggauguauuugacugcugug

SEQ ID NO: 106045 - RNA, 25 nt, Artificial Sequence
  Description of Artificial Sequence: Synthetic oligonucleotide
cagggaagaggaggagaugagagac

SEQ ID NO: 106046 - RNA, 25 nt, Artificial Sequence
  Description of Artificial Sequence: Synthetic oligonucleotide
augaucuuuuuuuugucccacuugg

SEQ ID NO: 106047 - RNA, 27 nt, Artificial Sequence
  Description of Artificial Sequence: Synthetic oligonucleotide
ggccgugaacuccucaucaaaauaccu

SEQ ID NO: 106048 - RNA, 27 nt, Artificial Sequence
  Description of Artificial Sequence: Synthetic oligonucleotide
uggugugauggugaucaucugggccgu

SEQ ID NO: 106049 - RNA, 27 nt, Artificial Sequence
  Description of Artificial Sequence: Synthetic oligonucleotide
aaacccgcaggauaguuuucuucccua

SEQ ID NO: 106050 - RNA, 27 nt, Artificial Sequence
  Description of Artificial Sequence: Synthetic oligonucleotide
caaacuggaugaaauaaauuaaaaccc

SEQ ID NO: 106051 - RNA, 27 nt, Artificial Sequence
  Description of Artificial Sequence: Synthetic oligonucleotide
agaaguccuuaacauuucccuacguga

SEQ ID NO: 106052 - RNA, 27 nt, Artificial Sequence
  Description of Artificial Sequence: Synthetic oligonucleotide
cucugucccacuggguaaacccuggcc

SEQ ID NO: 106053 - RNA, 27 nt, Artificial Sequence
  Description of Artificial Sequence: Synthetic oligonucleotide
cacaauaacaaauuuaaaccuugcucc

SEQ ID NO: 106054 - RNA, 27 nt, Artificial Sequence
  Description of Artificial Sequence: Synthetic oligonucleotide
aaaugcauuugaacaacauaauacaca

SEQ ID NO: 106055 - RNA, 27 nt, Artificial Sequence
  Description of Artificial Sequence: Synthetic oligonucleotide
ggcuuuccugucacaaagauuaaaaac

SEQ ID NO: 106056 - RNA, 27 nt, Artificial Sequence
  Description of Artificial Sequence: Synthetic oligonucleotide
agggcuuuccugucacaaagauuaaaa

SEQ ID NO: 106057 - RNA, 27 nt, Artificial Sequence
  Description of Artificial Sequence: Synthetic oligonucleotide
ggccaugcugggagacauaagcagcag

SEQ ID NO: 106058 - RNA, 27 nt, Artificial Sequence
  Description of Artificial Sequence: Synthetic oligonucleotide
ucagggagaagcuucugaaacacuucu

SEQ ID NO: 106059 - RNA, 27 nt, Artificial Sequence
  Description of Artificial Sequence: Synthetic oligonucleotide
aagggcuucuuccuuauugauggucag

SEQ ID NO: 106060 - RNA, 27 nt, Artificial Sequence
  Description of Artificial Sequence: Synthetic oligonucleotide
ugaagggcuucuuccuuauugaugguc

SEQ ID NO: 106061 - RNA, 27 nt, Artificial Sequence
  Description of Artificial Sequence: Synthetic oligonucleotide
cgcugaagggcuucuuccuuauugaug

SEQ ID NO: 106062 - RNA, 27 nt, Artificial Sequence
  Description of Artificial Sequence: Synthetic oligonucleotide
gccgcugaagggcuucuuccuuauuga

SEQ ID NO: 106063 - RNA, 27 nt, Artificial Sequence
  Description of Artificial Sequence: Synthetic oligonucleotide
acuggccgcugaagggcuucuuccuua

SEQ ID NO: 106064 - RNA, 27 nt, Artificial Sequence
  Description of Artificial Sequence: Synthetic oligonucleotide
cggagcuuuucaccuuuaguuaugcuu

SEQ ID NO: 106065 - RNA, 27 nt, Artificial Sequence
  Description of Artificial Sequence: Synthetic oligonucleotide
ccggagcuuuucaccuuuaguuaugcu

SEQ ID NO: 106066 - RNA, 27 nt, Artificial Sequence
  Description of Artificial Sequence: Synthetic oligonucleotide
cagacuguugacuggcgugauguaguu

SEQ ID NO: 106067 - RNA, 27 nt, Artificial Sequence
  Description of Artificial Sequence: Synthetic oligonucleotide
cuuuugaacucugcuuaaauccagugg

SEQ ID NO: 106068 - RNA, 27 nt, Artificial Sequence
  Description of Artificial Sequence: Synthetic oligonucleotide
gcuuuugaacucugcuuaaauccagug

SEQ ID NO: 106069 - RNA, 27 nt, Artificial Sequence
  Description of Artificial Sequence: Synthetic oligonucleotide
agggcuuuugaacucugcuuaaaucca

SEQ ID NO: 106070 - RNA, 27 nt, Artificial Sequence
  Description of Artificial Sequence: Synthetic oligonucleotide
aagggcuuuugaacucugcuuaaaucc

SEQ ID NO: 106071 - RNA, 27 nt, Artificial Sequence
  Description of Artificial Sequence: Synthetic oligonucleotide
ugaagggcuuuugaacucugcuuaaau

SEQ ID NO: 106072 - RNA, 27 nt, Artificial Sequence
  Description of Artificial Sequence: Synthetic oligonucleotide
cugaagggcuuuugaacucugcuuaaa

SEQ ID NO: 106073 - RNA, 27 nt, Artificial Sequence
  Description of Artificial Sequence: Synthetic oligonucleotide
cgcugaagggcuuuugaacucugcuua

SEQ ID NO: 106074 - RNA, 27 nt, Artificial Sequence
  Description of Artificial Sequence: Synthetic oligonucleotide
cgagcggcuucacucagacccugaggc

SEQ ID NO: 106075 - RNA, 27 nt, Artificial Sequence
  Description of Artificial Sequence: Synthetic oligonucleotide
uugacuggcgugauguaguugcuuggg

SEQ ID NO: 106076 - RNA, 27 nt, Artificial Sequence
  Description of Artificial Sequence: Synthetic oligonucleotide
cacgcaccaagaagcugccauugaucc

SEQ ID NO: 106077 - RNA, 27 nt, Artificial Sequence
  Description of Artificial Sequence: Synthetic oligonucleotide
cugaugaauccaaugugggcuggaauc

SEQ ID NO: 106078 - RNA, 27 nt, Artificial Sequence
  Description of Artificial Sequence: Synthetic oligonucleotide
cuuagguauuccacauucucagcugug

SEQ ID NO: 106079 - RNA, 27 nt, Artificial Sequence
  Description of Artificial Sequence: Synthetic oligonucleotide
ugagccucaaauuaggagauacguuuu

SEQ ID NO: 106080 - RNA, 27 nt, Artificial Sequence
  Description of Artificial Sequence: Synthetic oligonucleotide
ccaauuguagagaaauuauuuuaggaa

SEQ ID NO: 106081 - RNA, 27 nt, Artificial Sequence
  Description of Artificial Sequence: Synthetic oligonucleotide
ggcuccuaacuagcugaaucuuccaau

SEQ ID NO: 106082 - RNA, 27 nt, Artificial Sequence
  Description of Artificial Sequence: Synthetic oligonucleotide
guggauauugacuaggagaguuuaaaa

SEQ ID NO: 106083 - RNA, 27 nt, Artificial Sequence
  Description of Artificial Sequence: Synthetic oligonucleotide
ugugacugaacauaacuguaggcugaa

SEQ ID NO: 106084 - RNA, 27 nt, Artificial Sequence
  Description of Artificial Sequence: Synthetic oligonucleotide
guaugugugugugacugaacauaacug

SEQ ID NO: 106085 - RNA, 27 nt, Artificial Sequence
  Description of Artificial Sequence: Synthetic oligonucleotide
aagcaaaaggaacauuuuguaugugug

SEQ ID NO: 106086 - RNA, 27 nt, Artificial Sequence
  Description of Artificial Sequence: Synthetic oligonucleotide
aaaaauuacuuuaaaagcaaaaggaac

SEQ ID NO: 106087 - RNA, 27 nt, Artificial Sequence
  Description of Artificial Sequence: Synthetic oligonucleotide
ccauugacuguugcuucacaggucaga

SEQ ID NO: 106088 - RNA, 27 nt, Artificial Sequence
  Description of Artificial Sequence: Synthetic oligonucleotide
auugguuugucgaugugugagauaguu

SEQ ID NO: 106089 - RNA, 27 nt, Artificial Sequence
  Description of Artificial Sequence: Synthetic oligonucleotide
agugguagcaguacaauugaggacaag

SEQ ID NO: 106090 - RNA, 27 nt, Artificial Sequence
  Description of Artificial Sequence: Synthetic oligonucleotide
uaagaccgcuugccagcuacgguuuca

SEQ ID NO: 106091 - RNA, 27 nt, Artificial Sequence
  Description of Artificial Sequence: Synthetic oligonucleotide
agccgguaagaccgcuugccagcuacg

SEQ ID NO: 106092 - RNA, 27 nt, Artificial Sequence
  Description of Artificial Sequence: Synthetic oligonucleotide
gguaacccaucuuuuaaccauacaacu

SEQ ID NO: 106093 - RNA, 27 nt, Artificial Sequence
  Description of Artificial Sequence: Synthetic oligonucleotide
ucgcagguaacccaucuuuuaaccaua

SEQ ID NO: 106094 - RNA, 27 nt, Artificial Sequence
  Description of Artificial Sequence: Synthetic oligonucleotide
cucagcaagauuguauaauucccugca

SEQ ID NO: 106095 - RNA, 27 nt, Artificial Sequence
  Description of Artificial Sequence: Synthetic oligonucleotide
acuguuuuaugcucagcaagauuguau

SEQ ID NO: 106096 - RNA, 27 nt, Artificial Sequence
  Description of Artificial Sequence: Synthetic oligonucleotide
aggauaaaggacucuucauuauuggaa

SEQ ID NO: 106097 - RNA, 27 nt, Artificial Sequence
  Description of Artificial Sequence: Synthetic oligonucleotide
caacuugcguuggaacauccaaagugu

SEQ ID NO: 106098 - RNA, 27 nt, Artificial Sequence
  Description of Artificial Sequence: Synthetic oligonucleotide
augguuucaguuuaguggaagcauuua

SEQ ID NO: 106099 - RNA, 27 nt, Artificial Sequence
  Description of Artificial Sequence: Synthetic oligonucleotide
auauuuaacaaagucaaacuuucucac

SEQ ID NO: 106100 - RNA, 27 nt, Artificial Sequence
  Description of Artificial Sequence: Synthetic oligonucleotide
aacuuuuaauauacaguaguucuuuuc

SEQ ID NO: 106101 - RNA, 27 nt, Artificial Sequence
  Description of Artificial Sequence: Synthetic oligonucleotide
guuaagucaaaacccguauuucuaaag

SEQ ID NO: 106102 - RNA, 27 nt, Artificial Sequence
  Description of Artificial Sequence: Synthetic oligonucleotide
gugcugaguuugcuguacccauguuga

SEQ ID NO: 106103 - RNA, 27 nt, Artificial Sequence
  Description of Artificial Sequence: Synthetic oligonucleotide
ugaggucagcaucuucugugucuuuac

SEQ ID NO: 106104 - RNA, 27 nt, Artificial Sequence
  Description of Artificial Sequence: Synthetic oligonucleotide
gcgaucugaauaaaccucccuacuagc

SEQ ID NO: 106105 - RNA, 27 nt, Artificial Sequence
  Description of Artificial Sequence: Synthetic oligonucleotide
aucccagaacccugcugcagaaggcca

SEQ ID NO: 106106 - RNA, 27 nt, Artificial Sequence
  Description of Artificial Sequence: Synthetic oligonucleotide
cauaauuuccaauauguaccagaccuu

SEQ ID NO: 106107 - RNA, 27 nt, Artificial Sequence
  Description of Artificial Sequence: Synthetic oligonucleotide
cuagugcuuccaucggaaggacuaggu

SEQ ID NO: 106108 - RNA, 27 nt, Artificial Sequence
  Description of Artificial Sequence: Synthetic oligonucleotide
uccacauaaaaacaauauucacuggga

SEQ ID NO: 106109 - RNA, 27 nt, Artificial Sequence
  Description of Artificial Sequence: Synthetic oligonucleotide
ucuaccaauuccaacuugaauucauug

SEQ ID NO: 106110 - RNA, 27 nt, Artificial Sequence
  Description of Artificial Sequence: Synthetic oligonucleotide
ucuccaagucuaaaucuguguccugag

SEQ ID NO: 106111 - RNA, 27 nt, Artificial Sequence
  Description of Artificial Sequence: Synthetic oligonucleotide
uggaauacuguaacugugcuuugagga

SEQ ID NO: 106112 - RNA, 27 nt, Artificial Sequence
  Description of Artificial Sequence: Synthetic oligonucleotide
uuaauucaucagugguggcagugguag

SEQ ID NO: 106113 - RNA, 27 nt, Artificial Sequence
  Description of Artificial Sequence: Synthetic oligonucleotide
gugaugauguggcacuaguaguuucuu

SEQ ID NO: 106114 - RNA, 27 nt, Artificial Sequence
  Description of Artificial Sequence: Synthetic oligonucleotide
ucuguuuggugaggcuguccgacuuug

SEQ ID NO: 106115 - RNA, 27 nt, Artificial Sequence
  Description of Artificial Sequence: Synthetic oligonucleotide
ccaucauguuccauuuuucgcuuucuc

SEQ ID NO: 106116 - RNA, 27 nt, Artificial Sequence
  Description of Artificial Sequence: Synthetic oligonucleotide
gcagucuacaugcuaaaucagagggua

SEQ ID NO: 106117 - RNA, 27 nt, Artificial Sequence
  Description of Artificial Sequence: Synthetic oligonucleotide
cauaaauagauccuuaaauagcucaaa

SEQ ID NO: 106118 - RNA, 27 nt, Artificial Sequence
  Description of Artificial Sequence: Synthetic oligonucleotide
ugauaauagugcuuuuucaccuuuuuc

SEQ ID NO: 106119 - RNA, 27 nt, Artificial Sequence
  Description of Artificial Sequence: Synthetic oligonucleotide
gcagaacugauaauagugcuuuuucac

SEQ ID NO: 106120 - RNA, 27 nt, Artificial Sequence
  Description of Artificial Sequence: Synthetic oligonucleotide
guagguuuaaucuuucuuuucagccau

SEQ ID NO: 106121 - RNA, 27 nt, Artificial Sequence
  Description of Artificial Sequence: Synthetic oligonucleotide
agaaggauuuuauuauaaggguuuaau

SEQ ID NO: 106122 - RNA, 27 nt, Artificial Sequence
  Description of Artificial Sequence: Synthetic oligonucleotide
gucuacagcauuggcuaauaguaugaa

SEQ ID NO: 106123 - RNA, 27 nt, Artificial Sequence
  Description of Artificial Sequence: Synthetic oligonucleotide
cuauuccuaucaaaaugcuucugucua

SEQ ID NO: 106124 - RNA, 27 nt, Artificial Sequence
  Description of Artificial Sequence: Synthetic oligonucleotide
ucagggccauuaucuuauuugcucuau

SEQ ID NO: 106125 - RNA, 27 nt, Artificial Sequence
  Description of Artificial Sequence: Synthetic oligonucleotide
ugcuugaggaagagaaaaauguugguc

SEQ ID NO: 106126 - RNA, 27 nt, Artificial Sequence
  Description of Artificial Sequence: Synthetic oligonucleotide
ugggcugaacuuuucucauacuuaaag

SEQ ID NO: 106127 - RNA, 27 nt, Artificial Sequence
  Description of Artificial Sequence: Synthetic oligonucleotide
gguucagcagccaucuuuauuccugcg

SEQ ID NO: 106128 - RNA, 27 nt, Artificial Sequence
  Description of Artificial Sequence: Synthetic oligonucleotide
ugaagagaacuuggucauucaaauuuc

SEQ ID NO: 106129 - RNA, 27 nt, Artificial Sequence
  Description of Artificial Sequence: Synthetic oligonucleotide
cucuaggcuggcuaucuuuauacauac

SEQ ID NO: 106130 - RNA, 27 nt, Artificial Sequence
  Description of Artificial Sequence: Synthetic oligonucleotide
acacuucacagagauaguuacagccau

SEQ ID NO: 106131 - RNA, 27 nt, Artificial Sequence
  Description of Artificial Sequence: Synthetic oligonucleotide
uugaaauuuucucacacuucacagaga

SEQ ID NO: 106132 - RNA, 27 nt, Artificial Sequence
  Description of Artificial Sequence: Synthetic oligonucleotide
ucaggaggauucauuuccuuaaaggaa

SEQ ID NO: 106133 - RNA, 27 nt, Artificial Sequence
  Description of Artificial Sequence: Synthetic oligonucleotide
auaugaugucacuuuuuguauccuuga

SEQ ID NO: 106134 - RNA, 27 nt, Artificial Sequence
  Description of Artificial Sequence: Synthetic oligonucleotide
uaugaugaagauucaaauugcaucuua

SEQ ID NO: 106135 - RNA, 27 nt, Artificial Sequence
  Description of Artificial Sequence: Synthetic oligonucleotide
uuaauagcuagucuucguuuugaacag

SEQ ID NO: 106136 - RNA, 27 nt, Artificial Sequence
  Description of Artificial Sequence: Synthetic oligonucleotide
auuuuuaguagagaugagguuucacca

SEQ ID NO: 106137 - RNA, 27 nt, Artificial Sequence
  Description of Artificial Sequence: Synthetic oligonucleotide
aggcgagauagagcuucucuuucguuc

SEQ ID NO: 106138 - RNA, 27 nt, Artificial Sequence
  Description of Artificial Sequence: Synthetic oligonucleotide
aacuggaccgaaggcgcuuguggagaa

SEQ ID NO: 106139 - RNA, 27 nt, Artificial Sequence
  Description of Artificial Sequence: Synthetic oligonucleotide
gcggcuacaucuuuggaaucuucuccu

SEQ ID NO: 106140 - RNA, 27 nt, Artificial Sequence
  Description of Artificial Sequence: Synthetic oligonucleotide
caagucuccucauugaauccagauugg

SEQ ID NO: 106141 - RNA, 27 nt, Artificial Sequence
  Description of Artificial Sequence: Synthetic oligonucleotide
uccucacuacucucaaaucuguucugg

SEQ ID NO: 106142 - RNA, 27 nt, Artificial Sequence
  Description of Artificial Sequence: Synthetic oligonucleotide
uuuguacucaucugcacagcucuggcu

SEQ ID NO: 106143 - RNA, 27 nt, Artificial Sequence
  Description of Artificial Sequence: Synthetic oligonucleotide
gcccauuaacaacaacaaucugaggug

SEQ ID NO: 106144 - RNA, 27 nt, Artificial Sequence
  Description of Artificial Sequence: Synthetic oligonucleotide
aauaaauuaaaaauaauuaaaauagug

SEQ ID NO: 106145 - RNA, 27 nt, Artificial Sequence
  Description of Artificial Sequence: Synthetic oligonucleotide
cauauuuaaauauuaauaaauuaaaaa

SEQ ID NO: 106146 - RNA, 27 nt, Artificial Sequence
  Description of Artificial Sequence: Synthetic oligonucleotide
gaaacaaaggauauucaaacugcauag

SEQ ID NO: 106147 - RNA, 27 nt, Artificial Sequence
  Description of Artificial Sequence: Synthetic oligonucleotide
caaacacuuagacgccagcagcauggg

SEQ ID NO: 106148 - RNA, 27 nt, Artificial Sequence
  Description of Artificial Sequence: Synthetic oligonucleotide
uuugucacaggugaaaugcacaucuga

SEQ ID NO: 106149 - RNA, 27 nt, Artificial Sequence
  Description of Artificial Sequence: Synthetic oligonucleotide
uaauucagccuggcacagguuuugauc

SEQ ID NO: 106150 - RNA, 27 nt, Artificial Sequence
  Description of Artificial Sequence: Synthetic oligonucleotide
auuguaagaaugacuacccacauucac

SEQ ID NO: 106151 - RNA, 27 nt, Artificial Sequence
  Description of Artificial Sequence: Synthetic oligonucleotide
caauuguaagaaugacuacccacauuc

SEQ ID NO: 106152 - RNA, 27 nt, Artificial Sequence
  Description of Artificial Sequence: Synthetic oligonucleotide
guacacucucugaugcucauuuucaua

SEQ ID NO: 106153 - RNA, 27 nt, Artificial Sequence
  Description of Artificial Sequence: Synthetic oligonucleotide
cugcugaguucuacaugaaaagcaaau

SEQ ID NO: 106154 - RNA, 27 nt, Artificial Sequence
  Description of Artificial Sequence: Synthetic oligonucleotide
uacugaaaauaaauauagaaauacaac

SEQ ID NO: 106155 - RNA, 27 nt, Artificial Sequence
  Description of Artificial Sequence: Synthetic oligonucleotide
uuccauuuaagaaacauuaaucaaaac

SEQ ID NO: 106156 - RNA, 27 nt, Artificial Sequence
  Description of Artificial Sequence: Synthetic oligonucleotide
acaauuuuaggcacuauacacguuguu

SEQ ID NO: 106157 - RNA, 27 nt, Artificial Sequence
  Description of Artificial Sequence: Synthetic oligonucleotide
ccagauguuaguagccaaggauauggu

SEQ ID NO: 106158 - RNA, 27 nt, Artificial Sequence
  Description of Artificial Sequence: Synthetic oligonucleotide
agcucacagucuccagauguuaguagc

SEQ ID NO: 106159 - RNA, 27 nt, Artificial Sequence
  Description of Artificial Sequence: Synthetic oligonucleotide
auuaauaaaaagcacacaacuuauggc

SEQ ID NO: 106160 - RNA, 27 nt, Artificial Sequence
  Description of Artificial Sequence: Synthetic oligonucleotide
aauguaagaagagccaaaaugaugcau

SEQ ID NO: 106161 - RNA, 27 nt, Artificial Sequence
  Description of Artificial Sequence: Synthetic oligonucleotide
acauuuuuacaaauguaagaagagcca

SEQ ID NO: 106162 - RNA, 27 nt, Artificial Sequence
  Description of Artificial Sequence: Synthetic oligonucleotide
aauaugaauuaagaugaccuaaucugu

SEQ ID NO: 106163 - RNA, 27 nt, Artificial Sequence
  Description of Artificial Sequence: Synthetic oligonucleotide
ucaugauuaguucuuucaauuccaucc

SEQ ID NO: 106164 - RNA, 27 nt, Artificial Sequence
  Description of Artificial Sequence: Synthetic oligonucleotide
cccaagagcagaaggaaugagugugca

SEQ ID NO: 106165 - RNA, 27 nt, Artificial Sequence
  Description of Artificial Sequence: Synthetic oligonucleotide
cucaaagcuacugguuaccucuacacc

SEQ ID NO: 106166 - RNA, 27 nt, Artificial Sequence
  Description of Artificial Sequence: Synthetic oligonucleotide
ugaaauauuacguggcaugugguuggg

SEQ ID NO: 106167 - RNA, 27 nt, Artificial Sequence
  Description of Artificial Sequence: Synthetic oligonucleotide
agugaagagaauaacuuguuuccgaag

SEQ ID NO: 106168 - RNA, 27 nt, Artificial Sequence
  Description of Artificial Sequence: Synthetic oligonucleotide
uuucuuagcauuaguuauugggaguga

SEQ ID NO: 106169 - RNA, 27 nt, Artificial Sequence
  Description of Artificial Sequence: Synthetic oligonucleotide
uugauuuucagcauuucuuagcauuag

SEQ ID NO: 106170 - RNA, 27 nt, Artificial Sequence
  Description of Artificial Sequence: Synthetic oligonucleotide
aaaguaaucauauuuagagaaagacag

SEQ ID NO: 106171 - RNA, 27 nt, Artificial Sequence
  Description of Artificial Sequence: Synthetic oligonucleotide
uguagaacaaaaugccugaaauucagc

SEQ ID NO: 106172 - RNA, 27 nt, Artificial Sequence
  Description of Artificial Sequence: Synthetic oligonucleotide
gagagucccgggugagagggaaucgcc

SEQ ID NO: 106173 - RNA, 27 nt, Artificial Sequence
  Description of Artificial Sequence: Synthetic oligonucleotide
cuuuacuuuaaagguucacuuuccuug

SEQ ID NO: 106174 - RNA, 27 nt, Artificial Sequence
  Description of Artificial Sequence: Synthetic oligonucleotide
ccaggcuuccagagcaugcagccuccu

SEQ ID NO: 106175 - RNA, 27 nt, Artificial Sequence
  Description of Artificial Sequence: Synthetic oligonucleotide
cucucuuuuguuuucuguucagagaaa

SEQ ID NO: 106176 - RNA, 27 nt, Artificial Sequence
  Description of Artificial Sequence: Synthetic oligonucleotide
cggcauaacugauuacagccaaguuca

SEQ ID NO: 106177 - RNA, 27 nt, Artificial Sequence
  Description of Artificial Sequence: Synthetic oligonucleotide
uggacuucuuuuaauuuuggcuucuuc

SEQ ID NO: 106178 - RNA, 27 nt, Artificial Sequence
  Description of Artificial Sequence: Synthetic oligonucleotide
uaaccucaccuggacuucuuuuaauuu

SEQ ID NO: 106179 - RNA, 27 nt, Artificial Sequence
  Description of Artificial Sequence: Synthetic oligonucleotide
guccucuucccgauaauccggauucag

SEQ ID NO: 106180 - RNA, 27 nt, Artificial Sequence
  Description of Artificial Sequence: Synthetic oligonucleotide
acaauacuugcuuugaugucacauuaa

SEQ ID NO: 106181 - RNA, 27 nt, Artificial Sequence
  Description of Artificial Sequence: Synthetic oligonucleotide
gagugcuacaauacuugcuuugauguc

SEQ ID NO: 106182 - RNA, 27 nt, Artificial Sequence
  Description of Artificial Sequence: Synthetic oligonucleotide
auuugugguuuuguuuucucucucucu

SEQ ID NO: 106183 - RNA, 27 nt, Artificial Sequence
  Description of Artificial Sequence: Synthetic oligonucleotide
uguaugggcuuaaauacuacagcgagg

SEQ ID NO: 106184 - RNA, 27 nt, Artificial Sequence
  Description of Artificial Sequence: Synthetic oligonucleotide
cuguaugggcuuaaauacuacagcgag

SEQ ID NO: 106185 - RNA, 27 nt, Artificial Sequence
  Description of Artificial Sequence: Synthetic oligonucleotide
ggaagguuucuguaugggcuuaaauac

SEQ ID NO: 106186 - RNA, 27 nt, Artificial Sequence
  Description of Artificial Sequence: Synthetic oligonucleotide
guagguauaccauguuuauuuuaauac

SEQ ID NO: 106187 - RNA, 27 nt, Artificial Sequence
  Description of Artificial Sequence: Synthetic oligonucleotide
uccgaaaacuggccgaucagaacagcc

SEQ ID NO: 106188 - RNA, 27 nt, Artificial Sequence
  Description of Artificial Sequence: Synthetic oligonucleotide
cccuguuccaaaguucaaauuauuugu

SEQ ID NO: 106189 - RNA, 27 nt, Artificial Sequence
  Description of Artificial Sequence: Synthetic oligonucleotide
acuggaaaguuaaauuaaggucgcaau

SEQ ID NO: 106190 - RNA, 27 nt, Artificial Sequence
  Description of Artificial Sequence: Synthetic oligonucleotide
caaaaccaaacuuuagcuuucucagcc

SEQ ID NO: 106191 - RNA, 27 nt, Artificial Sequence
  Description of Artificial Sequence: Synthetic oligonucleotide
uacagugggaaguagcaucuuuacuuu

SEQ ID NO: 106192 - RNA, 27 nt, Artificial Sequence
  Description of Artificial Sequence: Synthetic oligonucleotide
ucauaugguaucagcaauuaagcagua

SEQ ID NO: 106193 - RNA, 27 nt, Artificial Sequence
  Description of Artificial Sequence: Synthetic oligonucleotide
cagcccauguuucauucauaugguauc

SEQ ID NO: 106194 - RNA, 27 nt, Artificial Sequence
  Description of Artificial Sequence: Synthetic oligonucleotide
uaugaaaaaguuggauaagaaaguugg

SEQ ID NO: 106195 - RNA, 27 nt, Artificial Sequence
  Description of Artificial Sequence: Synthetic oligonucleotide
uccggccucaugaugucaugcaaggcu

SEQ ID NO: 106196 - RNA, 27 nt, Artificial Sequence
  Description of Artificial Sequence: Synthetic oligonucleotide
acaaaugcagucauauacaaauucagg

SEQ ID NO: 106197 - RNA, 27 nt, Artificial Sequence
  Description of Artificial Sequence: Synthetic oligonucleotide
gguaguaaacauucuacuaggauucuu

SEQ ID NO: 106198 - RNA, 27 nt, Artificial Sequence
  Description of Artificial Sequence: Synthetic oligonucleotide
uuucaucaaaaaauucuucccuuucug

SEQ ID NO: 106199 - RNA, 27 nt, Artificial Sequence
  Description of Artificial Sequence: Synthetic oligonucleotide
aaauucacacacuggcaugccgauagc

SEQ ID NO: 106200 - RNA, 27 nt, Artificial Sequence
  Description of Artificial Sequence: Synthetic oligonucleotide
acauacauugcucuacuaugaggugaa

SEQ ID NO: 106201 - RNA, 27 nt, Artificial Sequence
  Description of Artificial Sequence: Synthetic oligonucleotide
uauauaugugcuuuggcaauucuggug

SEQ ID NO: 106202 - RNA, 27 nt, Artificial Sequence
  Description of Artificial Sequence: Synthetic oligonucleotide
ggagaaacuauuacccagaucaccacu

SEQ ID NO: 106203 - RNA, 27 nt, Artificial Sequence
  Description of Artificial Sequence: Synthetic oligonucleotide
auuuggagaaacuauuacccagaucac

SEQ ID NO: 106204 - RNA, 27 nt, Artificial Sequence
  Description of Artificial Sequence: Synthetic oligonucleotide
uuucuaggaaguauucaucacauccac

SEQ ID NO: 106205 - RNA, 27 nt, Artificial Sequence
  Description of Artificial Sequence: Synthetic oligonucleotide
cauauaugguguagcuguggaaaugcg

SEQ ID NO: 106206 - RNA, 27 nt, Artificial Sequence
  Description of Artificial Sequence: Synthetic oligonucleotide
cuccauucauauaugguguagcugugg

SEQ ID NO: 106207 - RNA, 27 nt, Artificial Sequence
  Description of Artificial Sequence: Synthetic oligonucleotide
aucuucuucucguguaagaacugcagc

SEQ ID NO: 106208 - RNA, 27 nt, Artificial Sequence
  Description of Artificial Sequence: Synthetic oligonucleotide
ucccuguaaaugaucuucuucucgugu

SEQ ID NO: 106209 - RNA, 27 nt, Artificial Sequence
  Description of Artificial Sequence: Synthetic oligonucleotide
gucccuguaaaugaucuucuucucgug

SEQ ID NO: 106210 - RNA, 27 nt, Artificial Sequence
  Description of Artificial Sequence: Synthetic oligonucleotide
ucaggucccuguaaaugaucuucuucu

SEQ ID NO: 106211 - RNA, 27 nt, Artificial Sequence
  Description of Artificial Sequence: Synthetic oligonucleotide
gaugcagucaaacaccucuuccucugu

SEQ ID NO: 106212 - RNA, 27 nt, Artificial Sequence
  Description of Artificial Sequence: Synthetic oligonucleotide
cgaugcagucaaacaccucuuccucug

SEQ ID NO: 106213 - RNA, 27 nt, Artificial Sequence
  Description of Artificial Sequence: Synthetic oligonucleotide
cccugugaacucgcccucaaaguagcg

SEQ ID NO: 106214 - RNA, 27 nt, Artificial Sequence
  Description of Artificial Sequence: Synthetic oligonucleotide
ggacagaggugccaggagaugcccuca

SEQ ID NO: 106215 - RNA, 27 nt, Artificial Sequence
  Description of Artificial Sequence: Synthetic oligonucleotide
uuaaaaagacaaaccauaucacuccuu

SEQ ID NO: 106216 - RNA, 27 nt, Artificial Sequence
  Description of Artificial Sequence: Synthetic oligonucleotide
cuuaaaaagacaaaccauaucacuccu

SEQ ID NO: 106217 - RNA, 27 nt, Artificial Sequence
  Description of Artificial Sequence: Synthetic oligonucleotide
gacaaccuuuaggaucuuuacugcaac

SEQ ID NO: 106218 - RNA, 27 nt, Artificial Sequence
  Description of Artificial Sequence: Synthetic oligonucleotide
gucgacaaccuuuaggaucuuuacugc

SEQ ID NO: 106219 - RNA, 27 nt, Artificial Sequence
  Description of Artificial Sequence: Synthetic oligonucleotide
acaauugccagguuguccuuugucaug

SEQ ID NO: 106220 - RNA, 27 nt, Artificial Sequence
  Description of Artificial Sequence: Synthetic oligonucleotide
ccucgcaccacugggucacaauugcca

SEQ ID NO: 106221 - RNA, 27 nt, Artificial Sequence
  Description of Artificial Sequence: Synthetic oligonucleotide
auuucaugucucuauggaugauguucu

SEQ ID NO: 106222 - RNA, 27 nt, Artificial Sequence
  Description of Artificial Sequence: Synthetic oligonucleotide
uggagaaauauauuguuggauuucaug

SEQ ID NO: 106223 - RNA, 27 nt, Artificial Sequence
  Description of Artificial Sequence: Synthetic oligonucleotide
agccuucauggagaaauauauuguugg

SEQ ID NO: 106224 - RNA, 27 nt, Artificial Sequence
  Description of Artificial Sequence: Synthetic oligonucleotide
accacuccagcgugacuuuacuguugc

SEQ ID NO: 106225 - RNA, 27 nt, Artificial Sequence
  Description of Artificial Sequence: Synthetic oligonucleotide
ccucucuuccuuuacuuucuucacaca

SEQ ID NO: 106226 - RNA, 27 nt, Artificial Sequence
  Description of Artificial Sequence: Synthetic oligonucleotide
gcccgaugcaaggauggcucggaagcg

SEQ ID NO: 106227 - RNA, 27 nt, Artificial Sequence
  Description of Artificial Sequence: Synthetic oligonucleotide
cacaguaggauauucaaccuccauuuc

SEQ ID NO: 106228 - RNA, 27 nt, Artificial Sequence
  Description of Artificial Sequence: Synthetic oligonucleotide
uuacacaguaggauauucaaccuccau

SEQ ID NO: 106229 - RNA, 27 nt, Artificial Sequence
  Description of Artificial Sequence: Synthetic oligonucleotide
uacacuacaagggaaaacucaaaaucu

SEQ ID NO: 106230 - RNA, 27 nt, Artificial Sequence
  Description of Artificial Sequence: Synthetic oligonucleotide
caaucaacaaagaacaaacaggauaaa

SEQ ID NO: 106231 - RNA, 27 nt, Artificial Sequence
  Description of Artificial Sequence: Synthetic oligonucleotide
uuucaaucaacaaagaacaaacaggau

SEQ ID NO: 106232 - RNA, 27 nt, Artificial Sequence
  Description of Artificial Sequence: Synthetic oligonucleotide
auggaagaaaaagaaggcuguagagaa

SEQ ID NO: 106233 - RNA, 27 nt, Artificial Sequence
  Description of Artificial Sequence: Synthetic oligonucleotide
uagaaggaagauuagcuauggaagaaa

SEQ ID NO: 106234 - RNA, 27 nt, Artificial Sequence
  Description of Artificial Sequence: Synthetic oligonucleotide
augaagcauucaacaggaagauuauuu

SEQ ID NO: 106235 - RNA, 27 nt, Artificial Sequence
  Description of Artificial Sequence: Synthetic oligonucleotide
caugaagcauucaacaggaagauuauu

SEQ ID NO: 106236 - RNA, 27 nt, Artificial Sequence
  Description of Artificial Sequence: Synthetic oligonucleotide
ucaaaguagaauucaagucaugaagca

SEQ ID NO: 106237 - RNA, 27 nt, Artificial Sequence
  Description of Artificial Sequence: Synthetic oligonucleotide
gucuguaguugcuucucucccucuuag

SEQ ID NO: 106238 - RNA, 27 nt, Artificial Sequence
  Description of Artificial Sequence: Synthetic oligonucleotide
guugaccuuggucugguaggagacggc

SEQ ID NO: 106239 - RNA, 27 nt, Artificial Sequence
  Description of Artificial Sequence: Synthetic oligonucleotide
gucgagauagucgggccgauugaucuc

SEQ ID NO: 106240 - RNA, 27 nt, Artificial Sequence
  Description of Artificial Sequence: Synthetic oligonucleotide
guuugggaagguuggauguucguccuc

SEQ ID NO: 106241 - RNA, 27 nt, Artificial Sequence
  Description of Artificial Sequence: Synthetic oligonucleotide
aguucuaagcuuggguuccgacccuaa

SEQ ID NO: 106242 - RNA, 27 nt, Artificial Sequence
  Description of Artificial Sequence: Synthetic oligonucleotide
uuaaaguucuaagcuuggguuccgacc

SEQ ID NO: 106243 - RNA, 27 nt, Artificial Sequence
  Description of Artificial Sequence: Synthetic oligonucleotide
guugcuuaaaguucuaagcuuggguuc

SEQ ID NO: 106244 - RNA, 27 nt, Artificial Sequence
  Description of Artificial Sequence: Synthetic oligonucleotide
gugguggucuuguugcuuaaaguucua

SEQ ID NO: 106245 - RNA, 27 nt, Artificial Sequence
  Description of Artificial Sequence: Synthetic oligonucleotide
acuuuauuucucgccacugaauaguag

SEQ ID NO: 106246 - RNA, 27 nt, Artificial Sequence
  Description of Artificial Sequence: Synthetic oligonucleotide
aacuuuauuucucgccacugaauagua

SEQ ID NO: 106247 - RNA, 27 nt, Artificial Sequence
  Description of Artificial Sequence: Synthetic oligonucleotide
ggaucauuuccuguuaucuguguuugu

SEQ ID NO: 106248 - RNA, 27 nt, Artificial Sequence
  Description of Artificial Sequence: Synthetic oligonucleotide
guuucauuucuucucuuuucuuaaggc

SEQ ID NO: 106249 - RNA, 27 nt, Artificial Sequence
  Description of Artificial Sequence: Synthetic oligonucleotide
ggaggauggaaacacacuccuucaguu

SEQ ID NO: 106250 - RNA, 27 nt, Artificial Sequence
  Description of Artificial Sequence: Synthetic oligonucleotide
ucaaagauuuucagucccgcggugaca

SEQ ID NO: 106251 - RNA, 27 nt, Artificial Sequence
  Description of Artificial Sequence: Synthetic oligonucleotide
ccugaacggcacgcuuauuucugcugu

SEQ ID NO: 106252 - RNA, 27 nt, Artificial Sequence
  Description of Artificial Sequence: Synthetic oligonucleotide
cuucuggacccugaacggcacgcuuau

SEQ ID NO: 106253 - RNA, 27 nt, Artificial Sequence
  Description of Artificial Sequence: Synthetic oligonucleotide
caagcagucuugagugacuguuucuuc

SEQ ID NO: 106254 - RNA, 27 nt, Artificial Sequence
  Description of Artificial Sequence: Synthetic oligonucleotide
ccaaagacauggaccuucuuccucuga

SEQ ID NO: 106255 - RNA, 27 nt, Artificial Sequence
  Description of Artificial Sequence: Synthetic oligonucleotide
guguuucaggcauauuuugaauacauc

SEQ ID NO: 106256 - RNA, 27 nt, Artificial Sequence
  Description of Artificial Sequence: Synthetic oligonucleotide
gagguacagagaaagggaggaaaauag

SEQ ID NO: 106257 - RNA, 27 nt, Artificial Sequence
  Description of Artificial Sequence: Synthetic oligonucleotide
ucuugucuugcucuaucuuucuuuggu

SEQ ID NO: 106258 - RNA, 27 nt, Artificial Sequence
  Description of Artificial Sequence: Synthetic oligonucleotide
uuucuugucuugcucuaucuuucuuug

SEQ ID NO: 106259 - RNA, 27 nt, Artificial Sequence
  Description of Artificial Sequence: Synthetic oligonucleotide
ggaucuuguacaaacaaaugcuuucuc

SEQ ID NO: 106260 - RNA, 27 nt, Artificial Sequence
  Description of Artificial Sequence: Synthetic oligonucleotide
ucugcaaguacguucguuuaacucaag

SEQ ID NO: 106261 - RNA, 27 nt, Artificial Sequence
  Description of Artificial Sequence: Synthetic oligonucleotide
ucuguaucgaucguucuguaucagucu

SEQ ID NO: 106262 - RNA, 27 nt, Artificial Sequence
  Description of Artificial Sequence: Synthetic oligonucleotide
auuuauuuuuauauauauauaauauau

SEQ ID NO: 106263 - RNA, 27 nt, Artificial Sequence
  Description of Artificial Sequence: Synthetic oligonucleotide
auauuuauuuuuauauauauauaauau

SEQ ID NO: 106264 - RNA, 27 nt, Artificial Sequence
  Description of Artificial Sequence: Synthetic oligonucleotide
cacagcagucaaauacauccagugaag

SEQ ID NO: 106265 - RNA, 27 nt, Artificial Sequence
  Description of Artificial Sequence: Synthetic oligonucleotide
gucucucaucuccuccucuucccuguc

SEQ ID NO: 106266 - RNA, 27 nt, Artificial Sequence
  Description of Artificial Sequence: Synthetic oligonucleotide
ccaagugggacaaaaaaaagaucaugc

SEQ ID NO: 106267 - RNA, 14 nt, Artificial Sequence
  Description of Artificial Sequence: Synthetic oligonucleotide
guauuuugaugagg

SEQ ID NO: 106268 - RNA, 12 nt, Artificial Sequence
  Description of Artificial Sequence: Synthetic oligonucleotide
ggcccagaugau

SEQ ID NO: 106269 - RNA, 14 nt, Artificial Sequence
  Description of Artificial Sequence: Synthetic oligonucleotide
gggaagaaaacuau

SEQ ID NO: 106270 - RNA, 15 nt, Artificial Sequence
  Description of Artificial Sequence: Synthetic oligonucleotide
guuuuaauuuauuuc

SEQ ID NO: 106271 - RNA, 12 nt, Artificial Sequence
  Description of Artificial Sequence: Synthetic oligonucleotide
acguagggaaau

SEQ ID NO: 106272 - RNA, 12 nt, Artificial Sequence
  Description of Artificial Sequence: Synthetic oligonucleotide
ccaggguuuacc

SEQ ID NO: 106273 - RNA, 11 nt, Artificial Sequence
  Description of Artificial Sequence: Synthetic oligonucleotide
agcaagguuua

SEQ ID NO: 106274 - RNA, 12 nt, Artificial Sequence
  Description of Artificial Sequence: Synthetic oligonucleotide
uguauuauguug

SEQ ID NO: 106275 - RNA, 15 nt, Artificial Sequence
  Description of Artificial Sequence: Synthetic oligonucleotide
uuuuaaucuuuguga

SEQ ID NO: 106276 - RNA, 14 nt, Artificial Sequence
  Description of Artificial Sequence: Synthetic oligonucleotide
uuaaucuuugugac

SEQ ID NO: 106277 - RNA, 13 nt, Artificial Sequence
  Description of Artificial Sequence: Synthetic oligonucleotide
gcugcuuaugucu

SEQ ID NO: 106278 - RNA, 14 nt, Artificial Sequence
  Description of Artificial Sequence: Synthetic oligonucleotide
aaguguuucagaag

SEQ ID NO: 106279 - RNA, 13 nt, Artificial Sequence
  Description of Artificial Sequence: Synthetic oligonucleotide
gaccaucaauaag

SEQ ID NO: 106280 - RNA, 13 nt, Artificial Sequence
  Description of Artificial Sequence: Synthetic oligonucleotide
ccaucaauaagga

SEQ ID NO: 106281 - RNA, 14 nt, Artificial Sequence
  Description of Artificial Sequence: Synthetic oligonucleotide
ucaauaaggaagaa

SEQ ID NO: 106282 - RNA, 14 nt, Artificial Sequence
  Description of Artificial Sequence: Synthetic oligonucleotide
aauaaggaagaagc

SEQ ID NO: 106283 - RNA, 13 nt, Artificial Sequence
  Description of Artificial Sequence: Synthetic oligonucleotide
aggaagaagcccu

SEQ ID NO: 106284 - RNA, 13 nt, Artificial Sequence
  Description of Artificial Sequence: Synthetic oligonucleotide
gcauaacuaaagg

SEQ ID NO: 106285 - RNA, 14 nt, Artificial Sequence
  Description of Artificial Sequence: Synthetic oligonucleotide
cauaacuaaaggug

SEQ ID NO: 106286 - RNA, 12 nt, Artificial Sequence
  Description of Artificial Sequence: Synthetic oligonucleotide
cuacaucacgcc

SEQ ID NO: 106287 - RNA, 12 nt, Artificial Sequence
  Description of Artificial Sequence: Synthetic oligonucleotide
acuggauuuaag

SEQ ID NO: 106288 - RNA, 12 nt, Artificial Sequence
  Description of Artificial Sequence: Synthetic oligonucleotide
cuggauuuaagc

SEQ ID NO: 106289 - RNA, 13 nt, Artificial Sequence
  Description of Artificial Sequence: Synthetic oligonucleotide
gauuuaagcagag

SEQ ID NO: 106290 - RNA, 13 nt, Artificial Sequence
  Description of Artificial Sequence: Synthetic oligonucleotide
auuuaagcagagu

SEQ ID NO: 106291 - RNA, 13 nt, Artificial Sequence
  Description of Artificial Sequence: Synthetic oligonucleotide
uuaagcagaguuc

SEQ ID NO: 106292 - RNA, 13 nt, Artificial Sequence
  Description of Artificial Sequence: Synthetic oligonucleotide
uaagcagaguuca

SEQ ID NO: 106293 - RNA, 14 nt, Artificial Sequence
  Description of Artificial Sequence: Synthetic oligonucleotide
agcagaguucaaaa

SEQ ID NO: 106294 - RNA, 12 nt, Artificial Sequence
  Description of Artificial Sequence: Synthetic oligonucleotide
cucagggucuga

SEQ ID NO: 106295 - RNA, 13 nt, Artificial Sequence
  Description of Artificial Sequence: Synthetic oligonucleotide
caagcaacuacau

SEQ ID NO: 106296 - RNA, 12 nt, Artificial Sequence
  Description of Artificial Sequence: Synthetic oligonucleotide
aucaauggcagc

SEQ ID NO: 106297 - RNA, 11 nt, Artificial Sequence
  Description of Artificial Sequence: Synthetic oligonucleotide
uuccagcccac

SEQ ID NO: 106298 - RNA, 12 nt, Artificial Sequence
  Description of Artificial Sequence: Synthetic oligonucleotide
cagcugagaaug

SEQ ID NO: 106299 - RNA, 13 nt, Artificial Sequence
  Description of Artificial Sequence: Synthetic oligonucleotide
aacguaucuccua

SEQ ID NO: 106300 - RNA, 14 nt, Artificial Sequence
  Description of Artificial Sequence: Synthetic oligonucleotide
ccuaaaauaauuuc

SEQ ID NO: 106301 - RNA, 13 nt, Artificial Sequence
  Description of Artificial Sequence: Synthetic oligonucleotide
uggaagauucagc

SEQ ID NO: 106302 - RNA, 12 nt, Artificial Sequence
  Description of Artificial Sequence: Synthetic oligonucleotide
uuaaacucuccu

SEQ ID NO: 106303 - RNA, 12 nt, Artificial Sequence
  Description of Artificial Sequence: Synthetic oligonucleotide
cagccuacaguu

SEQ ID NO: 106304 - RNA, 13 nt, Artificial Sequence
  Description of Artificial Sequence: Synthetic oligonucleotide
guuauguucaguc

SEQ ID NO: 106305 - RNA, 13 nt, Artificial Sequence
  Description of Artificial Sequence: Synthetic oligonucleotide
cacauacaaaaug

SEQ ID NO: 106306 - RNA, 9 nt, Artificial Sequence
  Description of Artificial Sequence: Synthetic oligonucleotide
uccuuuugc

SEQ ID NO: 106307 - RNA, 12 nt, Artificial Sequence
  Description of Artificial Sequence: Synthetic oligonucleotide
ugaccugugaag

SEQ ID NO: 106308 - RNA, 12 nt, Artificial Sequence
  Description of Artificial Sequence: Synthetic oligonucleotide
cuaucucacaca

SEQ ID NO: 106309 - RNA, 13 nt, Artificial Sequence
  Description of Artificial Sequence: Synthetic oligonucleotide
uguccucaauugu

SEQ ID NO: 106310 - RNA, 12 nt, Artificial Sequence
  Description of Artificial Sequence: Synthetic oligonucleotide
aaaccguagcug

SEQ ID NO: 106311 - RNA, 12 nt, Artificial Sequence
  Description of Artificial Sequence: Synthetic oligonucleotide
uagcuggcaagc

SEQ ID NO: 106312 - RNA, 14 nt, Artificial Sequence
  Description of Artificial Sequence: Synthetic oligonucleotide
uuguaugguuaaaa

SEQ ID NO: 106313 - RNA, 14 nt, Artificial Sequence
  Description of Artificial Sequence: Synthetic oligonucleotide
ugguuaaaagaugg

SEQ ID NO: 106314 - RNA, 13 nt, Artificial Sequence
  Description of Artificial Sequence: Synthetic oligonucleotide
cagggaauuauac

SEQ ID NO: 106315 - RNA, 12 nt, Artificial Sequence
  Description of Artificial Sequence: Synthetic oligonucleotide
acaaucuugcug

SEQ ID NO: 106316 - RNA, 13 nt, Artificial Sequence
  Description of Artificial Sequence: Synthetic oligonucleotide
ccaauaaugaaga

SEQ ID NO: 106317 - RNA, 13 nt, Artificial Sequence
  Description of Artificial Sequence: Synthetic oligonucleotide
acuuuggauguuc

SEQ ID NO: 106318 - RNA, 12 nt, Artificial Sequence
  Description of Artificial Sequence: Synthetic oligonucleotide
aaugcuuccacu

SEQ ID NO: 106319 - RNA, 11 nt, Artificial Sequence
  Description of Artificial Sequence: Synthetic oligonucleotide
gagaaaguuug

SEQ ID NO: 106320 - RNA, 11 nt, Artificial Sequence
  Description of Artificial Sequence: Synthetic oligonucleotide
aaagaacuacu

SEQ ID NO: 106321 - RNA, 12 nt, Artificial Sequence
  Description of Artificial Sequence: Synthetic oligonucleotide
uuagaaauacgg

SEQ ID NO: 106322 - RNA, 12 nt, Artificial Sequence
  Description of Artificial Sequence: Synthetic oligonucleotide
aacauggguaca

SEQ ID NO: 106323 - RNA, 14 nt, Artificial Sequence
  Description of Artificial Sequence: Synthetic oligonucleotide
aaagacacagaaga

SEQ ID NO: 106324 - RNA, 11 nt, Artificial Sequence
  Description of Artificial Sequence: Synthetic oligonucleotide
uaguagggagg

SEQ ID NO: 106325 - RNA, 12 nt, Artificial Sequence
  Description of Artificial Sequence: Synthetic oligonucleotide
gccuucugcagc

SEQ ID NO: 106326 - RNA, 10 nt, Artificial Sequence
  Description of Artificial Sequence: Synthetic oligonucleotide
ggucugguac

SEQ ID NO: 106327 - RNA, 12 nt, Artificial Sequence
  Description of Artificial Sequence: Synthetic oligonucleotide
cuaguccuuccg

SEQ ID NO: 106328 - RNA, 12 nt, Artificial Sequence
  Description of Artificial Sequence: Synthetic oligonucleotide
ccagugaauauu

SEQ ID NO: 106329 - RNA, 13 nt, Artificial Sequence
  Description of Artificial Sequence: Synthetic oligonucleotide
augaauucaaguu

SEQ ID NO: 106330 - RNA, 12 nt, Artificial Sequence
  Description of Artificial Sequence: Synthetic oligonucleotide
caggacacagau

SEQ ID NO: 106331 - RNA, 12 nt, Artificial Sequence
  Description of Artificial Sequence: Synthetic oligonucleotide
cucaaagcacag

SEQ ID NO: 106332 - RNA, 10 nt, Artificial Sequence
  Description of Artificial Sequence: Synthetic oligonucleotide
accacugcca

SEQ ID NO: 106333 - RNA, 13 nt, Artificial Sequence
  Description of Artificial Sequence: Synthetic oligonucleotide
gaaacuacuagug

SEQ ID NO: 106334 - RNA, 12 nt, Artificial Sequence
  Description of Artificial Sequence: Synthetic oligonucleotide
aagucggacagc

SEQ ID NO: 106335 - RNA, 13 nt, Artificial Sequence
  Description of Artificial Sequence: Synthetic oligonucleotide
gaaagcgaaaaau

SEQ ID NO: 106336 - RNA, 13 nt, Artificial Sequence
  Description of Artificial Sequence: Synthetic oligonucleotide
cccucugauuuag

SEQ ID NO: 106337 - RNA, 12 nt, Artificial Sequence
  Description of Artificial Sequence: Synthetic oligonucleotide
ugagcuauuuaa

SEQ ID NO: 106338 - RNA, 13 nt, Artificial Sequence
  Description of Artificial Sequence: Synthetic oligonucleotide
aaaaggugaaaaa

SEQ ID NO: 106339 - RNA, 14 nt, Artificial Sequence
  Description of Artificial Sequence: Synthetic oligonucleotide
gaaaaagcacuauu

SEQ ID NO: 106340 - RNA, 12 nt, Artificial Sequence
  Description of Artificial Sequence: Synthetic oligonucleotide
ggcugaaaagaa

SEQ ID NO: 106341 - RNA, 12 nt, Artificial Sequence
  Description of Artificial Sequence: Synthetic oligonucleotide
uaaacccuuaua

SEQ ID NO: 106342 - RNA, 13 nt, Artificial Sequence
  Description of Artificial Sequence: Synthetic oligonucleotide
cauacuauuagcc

SEQ ID NO: 106343 - RNA, 12 nt, Artificial Sequence
  Description of Artificial Sequence: Synthetic oligonucleotide
gacagaagcauu

SEQ ID NO: 106344 - RNA, 14 nt, Artificial Sequence
  Description of Artificial Sequence: Synthetic oligonucleotide
agagcaaauaagau

SEQ ID NO: 106345 - RNA, 14 nt, Artificial Sequence
  Description of Artificial Sequence: Synthetic oligonucleotide
ccaacauuuuucuc

SEQ ID NO: 106346 - RNA, 15 nt, Artificial Sequence
  Description of Artificial Sequence: Synthetic oligonucleotide
uuaaguaugagaaaa

SEQ ID NO: 106347 - RNA, 14 nt, Artificial Sequence
  Description of Artificial Sequence: Synthetic oligonucleotide
caggaauaaagaug

SEQ ID NO: 106348 - RNA, 13 nt, Artificial Sequence
  Description of Artificial Sequence: Synthetic oligonucleotide
aauuugaaugacc

SEQ ID NO: 106349 - RNA, 14 nt, Artificial Sequence
  Description of Artificial Sequence: Synthetic oligonucleotide
auguauaaagauag

SEQ ID NO: 106350 - RNA, 12 nt, Artificial Sequence
  Description of Artificial Sequence: Synthetic oligonucleotide
ggcuguaacuau

SEQ ID NO: 106351 - RNA, 11 nt, Artificial Sequence
  Description of Artificial Sequence: Synthetic oligonucleotide
ucugugaagug

SEQ ID NO: 106352 - RNA, 14 nt, Artificial Sequence
  Description of Artificial Sequence: Synthetic oligonucleotide
ccuuuaaggaaaug

SEQ ID NO: 106353 - RNA, 13 nt, Artificial Sequence
  Description of Artificial Sequence: Synthetic oligonucleotide
aaggauacaaaaa

SEQ ID NO: 106354 - RNA, 12 nt, Artificial Sequence
  Description of Artificial Sequence: Synthetic oligonucleotide
agaugcaauuug

SEQ ID NO: 106355 - RNA, 12 nt, Artificial Sequence
  Description of Artificial Sequence: Synthetic oligonucleotide
guucaaaacgaa

SEQ ID NO: 106356 - RNA, 11 nt, Artificial Sequence
  Description of Artificial Sequence: Synthetic oligonucleotide
gugaaaccuca

SEQ ID NO: 106357 - RNA, 13 nt, Artificial Sequence
  Description of Artificial Sequence: Synthetic oligonucleotide
acgaaagagaagc

SEQ ID NO: 106358 - RNA, 12 nt, Artificial Sequence
  Description of Artificial Sequence: Synthetic oligonucleotide
cuccacaagcgc

SEQ ID NO: 106359 - RNA, 14 nt, Artificial Sequence
  Description of Artificial Sequence: Synthetic oligonucleotide
gagaagauuccaaa

SEQ ID NO: 106360 - RNA, 13 nt, Artificial Sequence
  Description of Artificial Sequence: Synthetic oligonucleotide
aaucuggauucaa

SEQ ID NO: 106361 - RNA, 13 nt, Artificial Sequence
  Description of Artificial Sequence: Synthetic oligonucleotide
agaacagauuuga

SEQ ID NO: 106362 - RNA, 11 nt, Artificial Sequence
  Description of Artificial Sequence: Synthetic oligonucleotide
ccagagcugug

SEQ ID NO: 106363 - RNA, 12 nt, Artificial Sequence
  Description of Artificial Sequence: Synthetic oligonucleotide
ccucagauuguu

SEQ ID NO: 106364 - RNA, 12 nt, Artificial Sequence
  Description of Artificial Sequence: Synthetic oligonucleotide
cuauuuuaauua

SEQ ID NO: 106365 - RNA, 13 nt, Artificial Sequence
  Description of Artificial Sequence: Synthetic oligonucleotide
uuuaauuuauuaa

SEQ ID NO: 106366 - RNA, 12 nt, Artificial Sequence
  Description of Artificial Sequence: Synthetic oligonucleotide
augcaguuugaa

SEQ ID NO: 106367 - RNA, 11 nt, Artificial Sequence
  Description of Artificial Sequence: Synthetic oligonucleotide
caugcugcugg

SEQ ID NO: 106368 - RNA, 13 nt, Artificial Sequence
  Description of Artificial Sequence: Synthetic oligonucleotide
agaugugcauuuc

SEQ ID NO: 106369 - RNA, 12 nt, Artificial Sequence
  Description of Artificial Sequence: Synthetic oligonucleotide
ucaaaaccugug

SEQ ID NO: 106370 - RNA, 11 nt, Artificial Sequence
  Description of Artificial Sequence: Synthetic oligonucleotide
gaaugugggua

SEQ ID NO: 106371 - RNA, 10 nt, Artificial Sequence
  Description of Artificial Sequence: Synthetic oligonucleotide
auguggguag

SEQ ID NO: 106372 - RNA, 13 nt, Artificial Sequence
  Description of Artificial Sequence: Synthetic oligonucleotide
ugaaaaugagcau

SEQ ID NO: 106373 - RNA, 13 nt, Artificial Sequence
  Description of Artificial Sequence: Synthetic oligonucleotide
uugcuuuucaugu

SEQ ID NO: 106374 - RNA, 12 nt, Artificial Sequence
  Description of Artificial Sequence: Synthetic oligonucleotide
uguauuucuaua

SEQ ID NO: 106375 - RNA, 13 nt, Artificial Sequence
  Description of Artificial Sequence: Synthetic oligonucleotide
uuugauuaauguu

SEQ ID NO: 106376 - RNA, 12 nt, Artificial Sequence
  Description of Artificial Sequence: Synthetic oligonucleotide
caacguguauag

SEQ ID NO: 106377 - RNA, 12 nt, Artificial Sequence
  Description of Artificial Sequence: Synthetic oligonucleotide
cauauccuuggc

SEQ ID NO: 106378 - RNA, 13 nt, Artificial Sequence
  Description of Artificial Sequence: Synthetic oligonucleotide
uacuaacaucugg

SEQ ID NO: 106379 - RNA, 11 nt, Artificial Sequence
  Description of Artificial Sequence: Synthetic oligonucleotide
cauaaguugug

SEQ ID NO: 106380 - RNA, 12 nt, Artificial Sequence
  Description of Artificial Sequence: Synthetic oligonucleotide
gcaucauuuugg

SEQ ID NO: 106381 - RNA, 10 nt, Artificial Sequence
  Description of Artificial Sequence: Synthetic oligonucleotide
gcucuucuua

SEQ ID NO: 106382 - RNA, 10 nt, Artificial Sequence
  Description of Artificial Sequence: Synthetic oligonucleotide
agauuagguc

SEQ ID NO: 106383 - RNA, 12 nt, Artificial Sequence
  Description of Artificial Sequence: Synthetic oligonucleotide
auggaauugaaa

SEQ ID NO: 106384 - RNA, 13 nt, Artificial Sequence
  Description of Artificial Sequence: Synthetic oligonucleotide
cacacucauuccu

SEQ ID NO: 106385 - RNA, 12 nt, Artificial Sequence
  Description of Artificial Sequence: Synthetic oligonucleotide
uguagagguaac

SEQ ID NO: 106386 - RNA, 11 nt, Artificial Sequence
  Description of Artificial Sequence: Synthetic oligonucleotide
caaccacaugc

SEQ ID NO: 106387 - RNA, 12 nt, Artificial Sequence
  Description of Artificial Sequence: Synthetic oligonucleotide
ucggaaacaagu

SEQ ID NO: 106388 - RNA, 11 nt, Artificial Sequence
  Description of Artificial Sequence: Synthetic oligonucleotide
acucccaauaa

SEQ ID NO: 106389 - RNA, 13 nt, Artificial Sequence
  Description of Artificial Sequence: Synthetic oligonucleotide
aaugcuaagaaau

SEQ ID NO: 106390 - RNA, 11 nt, Artificial Sequence
  Description of Artificial Sequence: Synthetic oligonucleotide
gucuuucucua

SEQ ID NO: 106391 - RNA, 11 nt, Artificial Sequence
  Description of Artificial Sequence: Synthetic oligonucleotide
ugaauuucagg

SEQ ID NO: 106392 - RNA, 13 nt, Artificial Sequence
  Description of Artificial Sequence: Synthetic oligonucleotide
cgauucccucuca

SEQ ID NO: 106393 - RNA, 11 nt, Artificial Sequence
  Description of Artificial Sequence: Synthetic oligonucleotide
aggaaagugaa

SEQ ID NO: 106394 - RNA, 12 nt, Artificial Sequence
  Description of Artificial Sequence: Synthetic oligonucleotide
gaggcugcaugc

SEQ ID NO: 106395 - RNA, 11 nt, Artificial Sequence
  Description of Artificial Sequence: Synthetic oligonucleotide
ucucugaacag

SEQ ID NO: 106396 - RNA, 12 nt, Artificial Sequence
  Description of Artificial Sequence: Synthetic oligonucleotide
aacuuggcugua

SEQ ID NO: 106397 - RNA, 12 nt, Artificial Sequence
  Description of Artificial Sequence: Synthetic oligonucleotide
agaagccaaaau

SEQ ID NO: 106398 - RNA, 14 nt, Artificial Sequence
  Description of Artificial Sequence: Synthetic oligonucleotide
auuaaaagaagucc

SEQ ID NO: 106399 - RNA, 14 nt, Artificial Sequence
  Description of Artificial Sequence: Synthetic oligonucleotide
gaauccggauuauc

SEQ ID NO: 106400 - RNA, 12 nt, Artificial Sequence
  Description of Artificial Sequence: Synthetic oligonucleotide
aaugugacauca

SEQ ID NO: 106401 - RNA, 13 nt, Artificial Sequence
  Description of Artificial Sequence: Synthetic oligonucleotide
caucaaagcaagu

SEQ ID NO: 106402 - RNA, 11 nt, Artificial Sequence
  Description of Artificial Sequence: Synthetic oligonucleotide
agagagagaaa

SEQ ID NO: 106403 - RNA, 13 nt, Artificial Sequence
  Description of Artificial Sequence: Synthetic oligonucleotide
ucgcuguaguauu

SEQ ID NO: 106404 - RNA, 14 nt, Artificial Sequence
  Description of Artificial Sequence: Synthetic oligonucleotide
cgcuguaguauuua

SEQ ID NO: 106405 - RNA, 13 nt, Artificial Sequence
  Description of Artificial Sequence: Synthetic oligonucleotide
auuuaagcccaua

SEQ ID NO: 106406 - RNA, 15 nt, Artificial Sequence
  Description of Artificial Sequence: Synthetic oligonucleotide
auuaaaauaaacaug

SEQ ID NO: 106407 - RNA, 12 nt, Artificial Sequence
  Description of Artificial Sequence: Synthetic oligonucleotide
cuguucugaucg

SEQ ID NO: 106408 - RNA, 16 nt, Artificial Sequence
  Description of Artificial Sequence: Synthetic oligonucleotide
aaauaauuugaacuuu

SEQ ID NO: 106409 - RNA, 12 nt, Artificial Sequence
  Description of Artificial Sequence: Synthetic oligonucleotide
ugcgaccuuaau

SEQ ID NO: 106410 - RNA, 11 nt, Artificial Sequence
  Description of Artificial Sequence: Synthetic oligonucleotide
cugagaaagcu

SEQ ID NO: 106411 - RNA, 13 nt, Artificial Sequence
  Description of Artificial Sequence: Synthetic oligonucleotide
aguaaagaugcua

SEQ ID NO: 106412 - RNA, 12 nt, Artificial Sequence
  Description of Artificial Sequence: Synthetic oligonucleotide
cugcuuaauugc

SEQ ID NO: 106413 - RNA, 14 nt, Artificial Sequence
  Description of Artificial Sequence: Synthetic oligonucleotide
uaccauaugaauga

SEQ ID NO: 106414 - RNA, 12 nt, Artificial Sequence
  Description of Artificial Sequence: Synthetic oligonucleotide
aacuuucuuauc

SEQ ID NO: 106415 - RNA, 13 nt, Artificial Sequence
  Description of Artificial Sequence: Synthetic oligonucleotide
ccuugcaugacau

SEQ ID NO: 106416 - RNA, 14 nt, Artificial Sequence
  Description of Artificial Sequence: Synthetic oligonucleotide
ugaauuuguauaug

SEQ ID NO: 106417 - RNA, 12 nt, Artificial Sequence
  Description of Artificial Sequence: Synthetic oligonucleotide
gaauccuaguag

SEQ ID NO: 106418 - RNA, 10 nt, Artificial Sequence
  Description of Artificial Sequence: Synthetic oligonucleotide
gaaagggaag

SEQ ID NO: 106419 - RNA, 11 nt, Artificial Sequence
  Description of Artificial Sequence: Synthetic oligonucleotide
uaucggcaugc

SEQ ID NO: 106420 - RNA, 12 nt, Artificial Sequence
  Description of Artificial Sequence: Synthetic oligonucleotide
caccucauagua

SEQ ID NO: 106421 - RNA, 11 nt, Artificial Sequence
  Description of Artificial Sequence: Synthetic oligonucleotide
ccagaauugcc

SEQ ID NO: 106422 - RNA, 11 nt, Artificial Sequence
  Description of Artificial Sequence: Synthetic oligonucleotide
uggugaucugg

SEQ ID NO: 106423 - RNA, 12 nt, Artificial Sequence
  Description of Artificial Sequence: Synthetic oligonucleotide
gaucuggguaau

SEQ ID NO: 106424 - RNA, 12 nt, Artificial Sequence
  Description of Artificial Sequence: Synthetic oligonucleotide
ggaugugaugaa

SEQ ID NO: 106425 - RNA, 12 nt, Artificial Sequence
  Description of Artificial Sequence: Synthetic oligonucleotide
cauuuccacagc

SEQ ID NO: 106426 - RNA, 11 nt, Artificial Sequence
  Description of Artificial Sequence: Synthetic oligonucleotide
acagcuacacc

SEQ ID NO: 106427 - RNA, 12 nt, Artificial Sequence
  Description of Artificial Sequence: Synthetic oligonucleotide
ugcaguucuuac

SEQ ID NO: 106428 - RNA, 12 nt, Artificial Sequence
  Description of Artificial Sequence: Synthetic oligonucleotide
acgagaagaaga

SEQ ID NO: 106429 - RNA, 12 nt, Artificial Sequence
  Description of Artificial Sequence: Synthetic oligonucleotide
cgagaagaagau

SEQ ID NO: 106430 - RNA, 15 nt, Artificial Sequence
  Description of Artificial Sequence: Synthetic oligonucleotide
aagaagaucauuuac

SEQ ID NO: 106431 - RNA, 11 nt, Artificial Sequence
  Description of Artificial Sequence: Synthetic oligonucleotide
agaggaagagg

SEQ ID NO: 106432 - RNA, 12 nt, Artificial Sequence
  Description of Artificial Sequence: Synthetic oligonucleotide
gaggaagaggug

SEQ ID NO: 106433 - RNA, 13 nt, Artificial Sequence
  Description of Artificial Sequence: Synthetic oligonucleotide
cuacuuugagggc

SEQ ID NO: 106434 - RNA, 12 nt, Artificial Sequence
  Description of Artificial Sequence: Synthetic oligonucleotide
agggcaucuccu

SEQ ID NO: 106435 - RNA, 10 nt, Artificial Sequence
  Description of Artificial Sequence: Synthetic oligonucleotide
ggagugauau

SEQ ID NO: 106436 - RNA, 11 nt, Artificial Sequence
  Description of Artificial Sequence: Synthetic oligonucleotide
gagugauaugg

SEQ ID NO: 106437 - RNA, 12 nt, Artificial Sequence
  Description of Artificial Sequence: Synthetic oligonucleotide
ugcaguaaagau

SEQ ID NO: 106438 - RNA, 13 nt, Artificial Sequence
  Description of Artificial Sequence: Synthetic oligonucleotide
aguaaagauccua

SEQ ID NO: 106439 - RNA, 12 nt, Artificial Sequence
  Description of Artificial Sequence: Synthetic oligonucleotide
ugacaaaggaca

SEQ ID NO: 106440 - RNA, 13 nt, Artificial Sequence
  Description of Artificial Sequence: Synthetic oligonucleotide
gcaauugugaccc

SEQ ID NO: 106441 - RNA, 12 nt, Artificial Sequence
  Description of Artificial Sequence: Synthetic oligonucleotide
aacaucauccau

SEQ ID NO: 106442 - RNA, 12 nt, Artificial Sequence
  Description of Artificial Sequence: Synthetic oligonucleotide
ugaaauccaaca

SEQ ID NO: 106443 - RNA, 15 nt, Artificial Sequence
  Description of Artificial Sequence: Synthetic oligonucleotide
aacaauauauuucuc

SEQ ID NO: 106444 - RNA, 14 nt, Artificial Sequence
  Description of Artificial Sequence: Synthetic oligonucleotide
aacaguaaagucac

SEQ ID NO: 106445 - RNA, 14 nt, Artificial Sequence
  Description of Artificial Sequence: Synthetic oligonucleotide
ugugaagaaaguaa

SEQ ID NO: 106446 - RNA, 13 nt, Artificial Sequence
  Description of Artificial Sequence: Synthetic oligonucleotide
cuuccgagccauc

SEQ ID NO: 106447 - RNA, 12 nt, Artificial Sequence
  Description of Artificial Sequence: Synthetic oligonucleotide
aauggagguuga

SEQ ID NO: 106448 - RNA, 12 nt, Artificial Sequence
  Description of Artificial Sequence: Synthetic oligonucleotide
ggagguugaaua

SEQ ID NO: 106449 - RNA, 13 nt, Artificial Sequence
  Description of Artificial Sequence: Synthetic oligonucleotide
auuuugaguuuuc

SEQ ID NO: 106450 - RNA, 12 nt, Artificial Sequence
  Description of Artificial Sequence: Synthetic oligonucleotide
uauccuguuugu

SEQ ID NO: 106451 - RNA, 11 nt, Artificial Sequence
  Description of Artificial Sequence: Synthetic oligonucleotide
ccuguuuguuc

SEQ ID NO: 106452 - RNA, 10 nt, Artificial Sequence
  Description of Artificial Sequence: Synthetic oligonucleotide
cucuacagcc

SEQ ID NO: 106453 - RNA, 12 nt, Artificial Sequence
  Description of Artificial Sequence: Synthetic oligonucleotide
ucuuccauagcu

SEQ ID NO: 106454 - RNA, 12 nt, Artificial Sequence
  Description of Artificial Sequence: Synthetic oligonucleotide
auaaucuuccug

SEQ ID NO: 106455 - RNA, 12 nt, Artificial Sequence
  Description of Artificial Sequence: Synthetic oligonucleotide
uaaucuuccugu

SEQ ID NO: 106456 - RNA, 12 nt, Artificial Sequence
  Description of Artificial Sequence: Synthetic oligonucleotide
cuucaugacuug

SEQ ID NO: 106457 - RNA, 12 nt, Artificial Sequence
  Description of Artificial Sequence: Synthetic oligonucleotide
aagagggagaga

SEQ ID NO: 106458 - RNA, 12 nt, Artificial Sequence
  Description of Artificial Sequence: Synthetic oligonucleotide
cgucuccuacca

SEQ ID NO: 106459 - RNA, 12 nt, Artificial Sequence
  Description of Artificial Sequence: Synthetic oligonucleotide
gaucaaucggcc

SEQ ID NO: 106460 - RNA, 12 nt, Artificial Sequence
  Description of Artificial Sequence: Synthetic oligonucleotide
ggacgaacaucc

SEQ ID NO: 106461 - RNA, 11 nt, Artificial Sequence
  Description of Artificial Sequence: Synthetic oligonucleotide
agggucggaac

SEQ ID NO: 106462 - RNA, 10 nt, Artificial Sequence
  Description of Artificial Sequence: Synthetic oligonucleotide
ucggaaccca

SEQ ID NO: 106463 - RNA, 11 nt, Artificial Sequence
  Description of Artificial Sequence: Synthetic oligonucleotide
acccaagcuua

SEQ ID NO: 106464 - RNA, 14 nt, Artificial Sequence
  Description of Artificial Sequence: Synthetic oligonucleotide
gaacuuuaagcaac

SEQ ID NO: 106465 - RNA, 11 nt, Artificial Sequence
  Description of Artificial Sequence: Synthetic oligonucleotide
acuauucagug

SEQ ID NO: 106466 - RNA, 11 nt, Artificial Sequence
  Description of Artificial Sequence: Synthetic oligonucleotide
cuauucagugg

SEQ ID NO: 106467 - RNA, 13 nt, Artificial Sequence
  Description of Artificial Sequence: Synthetic oligonucleotide
aaacacagauaac

SEQ ID NO: 106468 - RNA, 12 nt, Artificial Sequence
  Description of Artificial Sequence: Synthetic oligonucleotide
cuuaagaaaaga

SEQ ID NO: 106469 - RNA, 12 nt, Artificial Sequence
  Description of Artificial Sequence: Synthetic oligonucleotide
cugaaggagugu

SEQ ID NO: 106470 - RNA, 10 nt, Artificial Sequence
  Description of Artificial Sequence: Synthetic oligonucleotide
ucaccgcggg

SEQ ID NO: 106471 - RNA, 14 nt, Artificial Sequence
  Description of Artificial Sequence: Synthetic oligonucleotide
agcagaaauaagcg

SEQ ID NO: 106472 - RNA, 12 nt, Artificial Sequence
  Description of Artificial Sequence: Synthetic oligonucleotide
aagcgugccguu

SEQ ID NO: 106473 - RNA, 12 nt, Artificial Sequence
  Description of Artificial Sequence: Synthetic oligonucleotide
agaaacagucac

SEQ ID NO: 106474 - RNA, 12 nt, Artificial Sequence
  Description of Artificial Sequence: Synthetic oligonucleotide
agaggaagaagg

SEQ ID NO: 106475 - RNA, 14 nt, Artificial Sequence
  Description of Artificial Sequence: Synthetic oligonucleotide
uguauucaaaauau

SEQ ID NO: 106476 - RNA, 13 nt, Artificial Sequence
  Description of Artificial Sequence: Synthetic oligonucleotide
auuuuccucccuu

SEQ ID NO: 106477 - RNA, 13 nt, Artificial Sequence
  Description of Artificial Sequence: Synthetic oligonucleotide
caaagaaagauag

SEQ ID NO: 106478 - RNA, 12 nt, Artificial Sequence
  Description of Artificial Sequence: Synthetic oligonucleotide
aagaaagauaga

SEQ ID NO: 106479 - RNA, 13 nt, Artificial Sequence
  Description of Artificial Sequence: Synthetic oligonucleotide
gaaagcauuuguu

SEQ ID NO: 106480 - RNA, 13 nt, Artificial Sequence
  Description of Artificial Sequence: Synthetic oligonucleotide
ugaguuaaacgaa

SEQ ID NO: 106481 - RNA, 12 nt, Artificial Sequence
  Description of Artificial Sequence: Synthetic oligonucleotide
acugauacagaa

SEQ ID NO: 106482 - RNA, 12 nt, Artificial Sequence
  Description of Artificial Sequence: Synthetic oligonucleotide
auauuauauaua

SEQ ID NO: 106483 - RNA, 12 nt, Artificial Sequence
  Description of Artificial Sequence: Synthetic oligonucleotide
auuauauauaua

SEQ ID NO: 106484 - RNA, 12 nt, Artificial Sequence
  Description of Artificial Sequence: Synthetic oligonucleotide
ucacuggaugua

SEQ ID NO: 106485 - RNA, 12 nt, Artificial Sequence
  Description of Artificial Sequence: Synthetic oligonucleotide
cagggaagagga

SEQ ID NO: 106486 - RNA, 15 nt, Artificial Sequence
  Description of Artificial Sequence: Synthetic oligonucleotide
augaucuuuuuuuug

SEQ ID NO: 106487 - RNA, 11 nt, Artificial Sequence
  Description of Artificial Sequence: Synthetic oligonucleotide
aguucacggcc

SEQ ID NO: 106488 - RNA, 13 nt, Artificial Sequence
  Description of Artificial Sequence: Synthetic oligonucleotide
caccaucacacca

SEQ ID NO: 106489 - RNA, 11 nt, Artificial Sequence
  Description of Artificial Sequence: Synthetic oligonucleotide
ccugcggguuu

SEQ ID NO: 106490 - RNA, 10 nt, Artificial Sequence
  Description of Artificial Sequence: Synthetic oligonucleotide
auccaguuug

SEQ ID NO: 106491 - RNA, 13 nt, Artificial Sequence
  Description of Artificial Sequence: Synthetic oligonucleotide
guuaaggacuucu

SEQ ID NO: 106492 - RNA, 13 nt, Artificial Sequence
  Description of Artificial Sequence: Synthetic oligonucleotide
cagugggacagag

SEQ ID NO: 106493 - RNA, 14 nt, Artificial Sequence
  Description of Artificial Sequence: Synthetic oligonucleotide
aauuuguuauugug

SEQ ID NO: 106494 - RNA, 13 nt, Artificial Sequence
  Description of Artificial Sequence: Synthetic oligonucleotide
uucaaaugcauuu

SEQ ID NO: 106495 - RNA, 10 nt, Artificial Sequence
  Description of Artificial Sequence: Synthetic oligonucleotide
caggaaagcc

SEQ ID NO: 106496 - RNA, 11 nt, Artificial Sequence
  Description of Artificial Sequence: Synthetic oligonucleotide
aggaaagcccu

SEQ ID NO: 106497 - RNA, 12 nt, Artificial Sequence
  Description of Artificial Sequence: Synthetic oligonucleotide
cccagcauggcc

SEQ ID NO: 106498 - RNA, 11 nt, Artificial Sequence
  Description of Artificial Sequence: Synthetic oligonucleotide
cuucucccuga

SEQ ID NO: 106499 - RNA, 12 nt, Artificial Sequence
  Description of Artificial Sequence: Synthetic oligonucleotide
gaagaagcccuu

SEQ ID NO: 106500 - RNA, 12 nt, Artificial Sequence
  Description of Artificial Sequence: Synthetic oligonucleotide
agaagcccuuca

SEQ ID NO: 106501 - RNA, 11 nt, Artificial Sequence
  Description of Artificial Sequence: Synthetic oligonucleotide
gcccuucagcg

SEQ ID NO: 106502 - RNA, 11 nt, Artificial Sequence
  Description of Artificial Sequence: Synthetic oligonucleotide
ccuucagcggc

SEQ ID NO: 106503 - RNA, 12 nt, Artificial Sequence
  Description of Artificial Sequence: Synthetic oligonucleotide
ucagcggccagu

SEQ ID NO: 106504 - RNA, 12 nt, Artificial Sequence
  Description of Artificial Sequence: Synthetic oligonucleotide
ugaaaagcuccg

SEQ ID NO: 106505 - RNA, 11 nt, Artificial Sequence
  Description of Artificial Sequence: Synthetic oligonucleotide
aaaagcuccgg

SEQ ID NO: 106506 - RNA, 13 nt, Artificial Sequence
  Description of Artificial Sequence: Synthetic oligonucleotide
agucaacagucug

SEQ ID NO: 106507 - RNA, 13 nt, Artificial Sequence
  Description of Artificial Sequence: Synthetic oligonucleotide
cagaguucaaaag

SEQ ID NO: 106508 - RNA, 13 nt, Artificial Sequence
  Description of Artificial Sequence: Synthetic oligonucleotide
agaguucaaaagc

SEQ ID NO: 106509 - RNA, 12 nt, Artificial Sequence
  Description of Artificial Sequence: Synthetic oligonucleotide
uucaaaagcccu

SEQ ID NO: 106510 - RNA, 12 nt, Artificial Sequence
  Description of Artificial Sequence: Synthetic oligonucleotide
ucaaaagcccuu

SEQ ID NO: 106511 - RNA, 12 nt, Artificial Sequence
  Description of Artificial Sequence: Synthetic oligonucleotide
aaaagcccuuca

SEQ ID NO: 106512 - RNA, 12 nt, Artificial Sequence
  Description of Artificial Sequence: Synthetic oligonucleotide
aaagcccuucag

SEQ ID NO: 106513 - RNA, 13 nt, Artificial Sequence
  Description of Artificial Sequence: Synthetic oligonucleotide
gugaagccgcucg

SEQ ID NO: 106514 - RNA, 12 nt, Artificial Sequence
  Description of Artificial Sequence: Synthetic oligonucleotide
cacgccagucaa

SEQ ID NO: 106515 - RNA, 13 nt, Artificial Sequence
  Description of Artificial Sequence: Synthetic oligonucleotide
uucuuggugcgug

SEQ ID NO: 106516 - RNA, 14 nt, Artificial Sequence
  Description of Artificial Sequence: Synthetic oligonucleotide
auuggauucaucag

SEQ ID NO: 106517 - RNA, 13 nt, Artificial Sequence
  Description of Artificial Sequence: Synthetic oligonucleotide
uggaauaccuaag

SEQ ID NO: 106518 - RNA, 12 nt, Artificial Sequence
  Description of Artificial Sequence: Synthetic oligonucleotide
auuugaggcuca

SEQ ID NO: 106519 - RNA, 11 nt, Artificial Sequence
  Description of Artificial Sequence: Synthetic oligonucleotide
ucuacaauugg

SEQ ID NO: 106520 - RNA, 12 nt, Artificial Sequence
  Description of Artificial Sequence: Synthetic oligonucleotide
uaguuaggagcc

SEQ ID NO: 106521 - RNA, 13 nt, Artificial Sequence
  Description of Artificial Sequence: Synthetic oligonucleotide
agucaauauccac

SEQ ID NO: 106522 - RNA, 13 nt, Artificial Sequence
  Description of Artificial Sequence: Synthetic oligonucleotide
auguucagucaca

SEQ ID NO: 106523 - RNA, 12 nt, Artificial Sequence
  Description of Artificial Sequence: Synthetic oligonucleotide
acacacacauac

SEQ ID NO: 106524 - RNA, 12 nt, Artificial Sequence
  Description of Artificial Sequence: Synthetic oligonucleotide
uuccuuuugcuu

SEQ ID NO: 106525 - RNA, 16 nt, Artificial Sequence
  Description of Artificial Sequence: Synthetic oligonucleotide
uuuuaaaguaauuuuu

SEQ ID NO: 106526 - RNA, 13 nt, Artificial Sequence
  Description of Artificial Sequence: Synthetic oligonucleotide
caacagucaaugg

SEQ ID NO: 106527 - RNA, 13 nt, Artificial Sequence
  Description of Artificial Sequence: Synthetic oligonucleotide
ucgacaaaccaau

SEQ ID NO: 106528 - RNA, 12 nt, Artificial Sequence
  Description of Artificial Sequence: Synthetic oligonucleotide
acugcuaccacu

SEQ ID NO: 106529 - RNA, 13 nt, Artificial Sequence
  Description of Artificial Sequence: Synthetic oligonucleotide
gcaagcggucuua

SEQ ID NO: 106530 - RNA, 13 nt, Artificial Sequence
  Description of Artificial Sequence: Synthetic oligonucleotide
ggucuuaccggcu

SEQ ID NO: 106531 - RNA, 11 nt, Artificial Sequence
  Description of Artificial Sequence: Synthetic oligonucleotide
gauggguuacc

SEQ ID NO: 106532 - RNA, 11 nt, Artificial Sequence
  Description of Artificial Sequence: Synthetic oligonucleotide
guuaccugcga

SEQ ID NO: 106533 - RNA, 12 nt, Artificial Sequence
  Description of Artificial Sequence: Synthetic oligonucleotide
aaucuugcugag

SEQ ID NO: 106534 - RNA, 13 nt, Artificial Sequence
  Description of Artificial Sequence: Synthetic oligonucleotide
agcauaaaacagu

SEQ ID NO: 106535 - RNA, 12 nt, Artificial Sequence
  Description of Artificial Sequence: Synthetic oligonucleotide
guccuuuauccu

SEQ ID NO: 106536 - RNA, 12 nt, Artificial Sequence
  Description of Artificial Sequence: Synthetic oligonucleotide
caacgcaaguug

SEQ ID NO: 106537 - RNA, 13 nt, Artificial Sequence
  Description of Artificial Sequence: Synthetic oligonucleotide
aaacugaaaccau

SEQ ID NO: 106538 - RNA, 14 nt, Artificial Sequence
  Description of Artificial Sequence: Synthetic oligonucleotide
acuuuguuaaauau

SEQ ID NO: 106539 - RNA, 14 nt, Artificial Sequence
  Description of Artificial Sequence: Synthetic oligonucleotide
guauauuaaaaguu

SEQ ID NO: 106540 - RNA, 13 nt, Artificial Sequence
  Description of Artificial Sequence: Synthetic oligonucleotide
guuuugacuuaac

SEQ ID NO: 106541 - RNA, 13 nt, Artificial Sequence
  Description of Artificial Sequence: Synthetic oligonucleotide
gcaaacucagcac

SEQ ID NO: 106542 - RNA, 11 nt, Artificial Sequence
  Description of Artificial Sequence: Synthetic oligonucleotide
ugcugaccuca

SEQ ID NO: 106543 - RNA, 14 nt, Artificial Sequence
  Description of Artificial Sequence: Synthetic oligonucleotide
uuuauucagaucgc

SEQ ID NO: 106544 - RNA, 13 nt, Artificial Sequence
  Description of Artificial Sequence: Synthetic oligonucleotide
aggguucugggau

SEQ ID NO: 106545 - RNA, 15 nt, Artificial Sequence
  Description of Artificial Sequence: Synthetic oligonucleotide
auauuggaaauuaug

SEQ ID NO: 106546 - RNA, 13 nt, Artificial Sequence
  Description of Artificial Sequence: Synthetic oligonucleotide
auggaagcacuag

SEQ ID NO: 106547 - RNA, 13 nt, Artificial Sequence
  Description of Artificial Sequence: Synthetic oligonucleotide
guuuuuaugugga

SEQ ID NO: 106548 - RNA, 12 nt, Artificial Sequence
  Description of Artificial Sequence: Synthetic oligonucleotide
ggaauugguaga

SEQ ID NO: 106549 - RNA, 13 nt, Artificial Sequence
  Description of Artificial Sequence: Synthetic oligonucleotide
uuagacuuggaga

SEQ ID NO: 106550 - RNA, 13 nt, Artificial Sequence
  Description of Artificial Sequence: Synthetic oligonucleotide
uuacaguauucca

SEQ ID NO: 106551 - RNA, 15 nt, Artificial Sequence
  Description of Artificial Sequence: Synthetic oligonucleotide
ccacugaugaauuaa

SEQ ID NO: 106552 - RNA, 12 nt, Artificial Sequence
  Description of Artificial Sequence: Synthetic oligonucleotide
ccacaucaucac

SEQ ID NO: 106553 - RNA, 13 nt, Artificial Sequence
  Description of Artificial Sequence: Synthetic oligonucleotide
cucaccaaacaga

SEQ ID NO: 106554 - RNA, 12 nt, Artificial Sequence
  Description of Artificial Sequence: Synthetic oligonucleotide
ggaacaugaugg

SEQ ID NO: 106555 - RNA, 12 nt, Artificial Sequence
  Description of Artificial Sequence: Synthetic oligonucleotide
cauguagacugc

SEQ ID NO: 106556 - RNA, 13 nt, Artificial Sequence
  Description of Artificial Sequence: Synthetic oligonucleotide
ggaucuauuuaug

SEQ ID NO: 106557 - RNA, 12 nt, Artificial Sequence
  Description of Artificial Sequence: Synthetic oligonucleotide
gcacuauuauca

SEQ ID NO: 106558 - RNA, 11 nt, Artificial Sequence
  Description of Artificial Sequence: Synthetic oligonucleotide
aucaguucugc

SEQ ID NO: 106559 - RNA, 13 nt, Artificial Sequence
  Description of Artificial Sequence: Synthetic oligonucleotide
agauuaaaccuac

SEQ ID NO: 106560 - RNA, 13 nt, Artificial Sequence
  Description of Artificial Sequence: Synthetic oligonucleotide
auaaaauccuucu

SEQ ID NO: 106561 - RNA, 12 nt, Artificial Sequence
  Description of Artificial Sequence: Synthetic oligonucleotide
aaugcuguagac

SEQ ID NO: 106562 - RNA, 13 nt, Artificial Sequence
  Description of Artificial Sequence: Synthetic oligonucleotide
uugauaggaauag

SEQ ID NO: 106563 - RNA, 11 nt, Artificial Sequence
  Description of Artificial Sequence: Synthetic oligonucleotide
aauggcccuga

SEQ ID NO: 106564 - RNA, 11 nt, Artificial Sequence
  Description of Artificial Sequence: Synthetic oligonucleotide
uuccucaagca

SEQ ID NO: 106565 - RNA, 10 nt, Artificial Sequence
  Description of Artificial Sequence: Synthetic oligonucleotide
guucagccca

SEQ ID NO: 106566 - RNA, 11 nt, Artificial Sequence
  Description of Artificial Sequence: Synthetic oligonucleotide
gcugcugaacc

SEQ ID NO: 106567 - RNA, 12 nt, Artificial Sequence
  Description of Artificial Sequence: Synthetic oligonucleotide
aaguucucuuca

SEQ ID NO: 106568 - RNA, 11 nt, Artificial Sequence
  Description of Artificial Sequence: Synthetic oligonucleotide
ccagccuagag

SEQ ID NO: 106569 - RNA, 13 nt, Artificial Sequence
  Description of Artificial Sequence: Synthetic oligonucleotide
cucugugaagugu

SEQ ID NO: 106570 - RNA, 14 nt, Artificial Sequence
  Description of Artificial Sequence: Synthetic oligonucleotide
ugagaaaauuucaa

SEQ ID NO: 106571 - RNA, 11 nt, Artificial Sequence
  Description of Artificial Sequence: Synthetic oligonucleotide
aauccuccuga

SEQ ID NO: 106572 - RNA, 12 nt, Artificial Sequence
  Description of Artificial Sequence: Synthetic oligonucleotide
gugacaucauau

SEQ ID NO: 106573 - RNA, 13 nt, Artificial Sequence
  Description of Artificial Sequence: Synthetic oligonucleotide
aaucuucaucaua

SEQ ID NO: 106574 - RNA, 13 nt, Artificial Sequence
  Description of Artificial Sequence: Synthetic oligonucleotide
gacuagcuauuaa

SEQ ID NO: 106575 - RNA, 14 nt, Artificial Sequence
  Description of Artificial Sequence: Synthetic oligonucleotide
ucucuacuaaaaau

SEQ ID NO: 106576 - RNA, 12 nt, Artificial Sequence
  Description of Artificial Sequence: Synthetic oligonucleotide
ucuaucucgccu

SEQ ID NO: 106577 - RNA, 13 nt, Artificial Sequence
  Description of Artificial Sequence: Synthetic oligonucleotide
cuucgguccaguu

SEQ ID NO: 106578 - RNA, 11 nt, Artificial Sequence
  Description of Artificial Sequence: Synthetic oligonucleotide
gauguagccgc

SEQ ID NO: 106579 - RNA, 12 nt, Artificial Sequence
  Description of Artificial Sequence: Synthetic oligonucleotide
ugaggagacuug

SEQ ID NO: 106580 - RNA, 12 nt, Artificial Sequence
  Description of Artificial Sequence: Synthetic oligonucleotide
gaguagugagga

SEQ ID NO: 106581 - RNA, 14 nt, Artificial Sequence
  Description of Artificial Sequence: Synthetic oligonucleotide
cagaugaguacaaa

SEQ ID NO: 106582 - RNA, 13 nt, Artificial Sequence
  Description of Artificial Sequence: Synthetic oligonucleotide
guuguuaaugggc

SEQ ID NO: 106583 - RNA, 13 nt, Artificial Sequence
  Description of Artificial Sequence: Synthetic oligonucleotide
uuuuuaauuuauu

SEQ ID NO: 106584 - RNA, 12 nt, Artificial Sequence
  Description of Artificial Sequence: Synthetic oligonucleotide
uauuuaaauaug

SEQ ID NO: 106585 - RNA, 13 nt, Artificial Sequence
  Description of Artificial Sequence: Synthetic oligonucleotide
uauccuuuguuuc

SEQ ID NO: 106586 - RNA, 14 nt, Artificial Sequence
  Description of Artificial Sequence: Synthetic oligonucleotide
cgucuaaguguuug

SEQ ID NO: 106587 - RNA, 12 nt, Artificial Sequence
  Description of Artificial Sequence: Synthetic oligonucleotide
accugugacaaa

SEQ ID NO: 106588 - RNA, 13 nt, Artificial Sequence
  Description of Artificial Sequence: Synthetic oligonucleotide
ccaggcugaauua

SEQ ID NO: 106589 - RNA, 14 nt, Artificial Sequence
  Description of Artificial Sequence: Synthetic oligonucleotide
gucauucuuacaau

SEQ ID NO: 106590 - RNA, 15 nt, Artificial Sequence
  Description of Artificial Sequence: Synthetic oligonucleotide
ucauucuuacaauug

SEQ ID NO: 106591 - RNA, 12 nt, Artificial Sequence
  Description of Artificial Sequence: Synthetic oligonucleotide
cagagaguguac

SEQ ID NO: 106592 - RNA, 12 nt, Artificial Sequence
  Description of Artificial Sequence: Synthetic oligonucleotide
agaacucagcag

SEQ ID NO: 106593 - RNA, 13 nt, Artificial Sequence
  Description of Artificial Sequence: Synthetic oligonucleotide
uuuauuuucagua

SEQ ID NO: 106594 - RNA, 12 nt, Artificial Sequence
  Description of Artificial Sequence: Synthetic oligonucleotide
ucuuaaauggaa

SEQ ID NO: 106595 - RNA, 13 nt, Artificial Sequence
  Description of Artificial Sequence: Synthetic oligonucleotide
ugccuaaaauugu

SEQ ID NO: 106596 - RNA, 12 nt, Artificial Sequence
  Description of Artificial Sequence: Synthetic oligonucleotide
agacugugagcu

SEQ ID NO: 106597 - RNA, 14 nt, Artificial Sequence
  Description of Artificial Sequence: Synthetic oligonucleotide
ugcuuuuuauuaau

SEQ ID NO: 106598 - RNA, 13 nt, Artificial Sequence
  Description of Artificial Sequence: Synthetic oligonucleotide
cucuucuuacauu

SEQ ID NO: 106599 - RNA, 15 nt, Artificial Sequence
  Description of Artificial Sequence: Synthetic oligonucleotide
cauuuguaaaaaugu

SEQ ID NO: 106600 - RNA, 15 nt, Artificial Sequence
  Description of Artificial Sequence: Synthetic oligonucleotide
aucuuaauucauauu

SEQ ID NO: 106601 - RNA, 13 nt, Artificial Sequence
  Description of Artificial Sequence: Synthetic oligonucleotide
gaacuaaucauga

SEQ ID NO: 106602 - RNA, 12 nt, Artificial Sequence
  Description of Artificial Sequence: Synthetic oligonucleotide
ucugcucuuggg

SEQ ID NO: 106603 - RNA, 13 nt, Artificial Sequence
  Description of Artificial Sequence: Synthetic oligonucleotide
caguagcuuugag

SEQ ID NO: 106604 - RNA, 14 nt, Artificial Sequence
  Description of Artificial Sequence: Synthetic oligonucleotide
cacguaauauuuca

SEQ ID NO: 106605 - RNA, 13 nt, Artificial Sequence
  Description of Artificial Sequence: Synthetic oligonucleotide
uauucucuucacu

SEQ ID NO: 106606 - RNA, 14 nt, Artificial Sequence
  Description of Artificial Sequence: Synthetic oligonucleotide
cuaaugcuaagaaa

SEQ ID NO: 106607 - RNA, 12 nt, Artificial Sequence
  Description of Artificial Sequence: Synthetic oligonucleotide
gcugaaaaucaa

SEQ ID NO: 106608 - RNA, 14 nt, Artificial Sequence
  Description of Artificial Sequence: Synthetic oligonucleotide
aauaugauuacuuu

SEQ ID NO: 106609 - RNA, 14 nt, Artificial Sequence
  Description of Artificial Sequence: Synthetic oligonucleotide
cauuuuguucuaca

SEQ ID NO: 106610 - RNA, 12 nt, Artificial Sequence
  Description of Artificial Sequence: Synthetic oligonucleotide
cccgggacucuc

SEQ ID NO: 106611 - RNA, 14 nt, Artificial Sequence
  Description of Artificial Sequence: Synthetic oligonucleotide
ccuuuaaaguaaag

SEQ ID NO: 106612 - RNA, 13 nt, Artificial Sequence
  Description of Artificial Sequence: Synthetic oligonucleotide
ucuggaagccugg

SEQ ID NO: 106613 - RNA, 14 nt, Artificial Sequence
  Description of Artificial Sequence: Synthetic oligonucleotide
aaaacaaaagagag

SEQ ID NO: 106614 - RNA, 13 nt, Artificial Sequence
  Description of Artificial Sequence: Synthetic oligonucleotide
aucaguuaugccg

SEQ ID NO: 106615 - RNA, 13 nt, Artificial Sequence
  Description of Artificial Sequence: Synthetic oligonucleotide
uaaaagaagucca

SEQ ID NO: 106616 - RNA, 11 nt, Artificial Sequence
  Description of Artificial Sequence: Synthetic oligonucleotide
aggugagguua

SEQ ID NO: 106617 - RNA, 11 nt, Artificial Sequence
  Description of Artificial Sequence: Synthetic oligonucleotide
gggaagaggac

SEQ ID NO: 106618 - RNA, 13 nt, Artificial Sequence
  Description of Artificial Sequence: Synthetic oligonucleotide
aagcaaguauugu

SEQ ID NO: 106619 - RNA, 12 nt, Artificial Sequence
  Description of Artificial Sequence: Synthetic oligonucleotide
auuguagcacuc

SEQ ID NO: 106620 - RNA, 14 nt, Artificial Sequence
  Description of Artificial Sequence: Synthetic oligonucleotide
acaaaaccacaaau

SEQ ID NO: 106621 - RNA, 12 nt, Artificial Sequence
  Description of Artificial Sequence: Synthetic oligonucleotide
uaagcccauaca

SEQ ID NO: 106622 - RNA, 11 nt, Artificial Sequence
  Description of Artificial Sequence: Synthetic oligonucleotide
agcccauacag

SEQ ID NO: 106623 - RNA, 12 nt, Artificial Sequence
  Description of Artificial Sequence: Synthetic oligonucleotide
cagaaaccuucc

SEQ ID NO: 106624 - RNA, 10 nt, Artificial Sequence
  Description of Artificial Sequence: Synthetic oligonucleotide
guauaccuac

SEQ ID NO: 106625 - RNA, 13 nt, Artificial Sequence
  Description of Artificial Sequence: Synthetic oligonucleotide
gccaguuuucgga

SEQ ID NO: 106626 - RNA, 9 nt, Artificial Sequence
  Description of Artificial Sequence: Synthetic oligonucleotide
ggaacaggg

SEQ ID NO: 106627 - RNA, 13 nt, Artificial Sequence
  Description of Artificial Sequence: Synthetic oligonucleotide
uuaacuuuccagu

SEQ ID NO: 106628 - RNA, 14 nt, Artificial Sequence
  Description of Artificial Sequence: Synthetic oligonucleotide
aaaguuugguuuug

SEQ ID NO: 106629 - RNA, 12 nt, Artificial Sequence
  Description of Artificial Sequence: Synthetic oligonucleotide
cuucccacugua

SEQ ID NO: 106630 - RNA, 13 nt, Artificial Sequence
  Description of Artificial Sequence: Synthetic oligonucleotide
ugauaccauauga

SEQ ID NO: 106631 - RNA, 11 nt, Artificial Sequence
  Description of Artificial Sequence: Synthetic oligonucleotide
aacaugggcug

SEQ ID NO: 106632 - RNA, 13 nt, Artificial Sequence
  Description of Artificial Sequence: Synthetic oligonucleotide
caacuuuuucaua

SEQ ID NO: 106633 - RNA, 12 nt, Artificial Sequence
  Description of Artificial Sequence: Synthetic oligonucleotide
caugaggccgga

SEQ ID NO: 106634 - RNA, 11 nt, Artificial Sequence
  Description of Artificial Sequence: Synthetic oligonucleotide
acugcauuugu

SEQ ID NO: 106635 - RNA, 13 nt, Artificial Sequence
  Description of Artificial Sequence: Synthetic oligonucleotide
aauguuuacuacc

SEQ ID NO: 106636 - RNA, 15 nt, Artificial Sequence
  Description of Artificial Sequence: Synthetic oligonucleotide
aauuuuuugaugaaa

SEQ ID NO: 106637 - RNA, 14 nt, Artificial Sequence
  Description of Artificial Sequence: Synthetic oligonucleotide
cagugugugaauuu

SEQ ID NO: 106638 - RNA, 13 nt, Artificial Sequence
  Description of Artificial Sequence: Synthetic oligonucleotide
gagcaauguaugu

SEQ ID NO: 106639 - RNA, 14 nt, Artificial Sequence
  Description of Artificial Sequence: Synthetic oligonucleotide
aaagcacauauaua

SEQ ID NO: 106640 - RNA, 14 nt, Artificial Sequence
  Description of Artificial Sequence: Synthetic oligonucleotide
guaauaguuucucc

SEQ ID NO: 106641 - RNA, 13 nt, Artificial Sequence
  Description of Artificial Sequence: Synthetic oligonucleotide
aguuucuccaaau

SEQ ID NO: 106642 - RNA, 13 nt, Artificial Sequence
  Description of Artificial Sequence: Synthetic oligonucleotide
uacuuccuagaaa

SEQ ID NO: 106643 - RNA, 13 nt, Artificial Sequence
  Description of Artificial Sequence: Synthetic oligonucleotide
uacaccauauaug

SEQ ID NO: 106644 - RNA, 14 nt, Artificial Sequence
  Description of Artificial Sequence: Synthetic oligonucleotide
auauaugaauggag

SEQ ID NO: 106645 - RNA, 13 nt, Artificial Sequence
  Description of Artificial Sequence: Synthetic oligonucleotide
acgagaagaagau

SEQ ID NO: 106646 - RNA, 13 nt, Artificial Sequence
  Description of Artificial Sequence: Synthetic oligonucleotide
ucauuuacaggga

SEQ ID NO: 106647 - RNA, 13 nt, Artificial Sequence
  Description of Artificial Sequence: Synthetic oligonucleotide
cauuuacagggac

SEQ ID NO: 106648 - RNA, 10 nt, Artificial Sequence
  Description of Artificial Sequence: Synthetic oligonucleotide
agggaccuga

SEQ ID NO: 106649 - RNA, 14 nt, Artificial Sequence
  Description of Artificial Sequence: Synthetic oligonucleotide
uguuugacugcauc

SEQ ID NO: 106650 - RNA, 13 nt, Artificial Sequence
  Description of Artificial Sequence: Synthetic oligonucleotide
uuugacugcaucg

SEQ ID NO: 106651 - RNA, 12 nt, Artificial Sequence
  Description of Artificial Sequence: Synthetic oligonucleotide
gaguucacaggg

SEQ ID NO: 106652 - RNA, 13 nt, Artificial Sequence
  Description of Artificial Sequence: Synthetic oligonucleotide
ggcaccucugucc

SEQ ID NO: 106653 - RNA, 15 nt, Artificial Sequence
  Description of Artificial Sequence: Synthetic oligonucleotide
gguuugucuuuuuaa

SEQ ID NO: 106654 - RNA, 14 nt, Artificial Sequence
  Description of Artificial Sequence: Synthetic oligonucleotide
uuugucuuuuuaag

SEQ ID NO: 106655 - RNA, 13 nt, Artificial Sequence
  Description of Artificial Sequence: Synthetic oligonucleotide
ccuaaagguuguc

SEQ ID NO: 106656 - RNA, 12 nt, Artificial Sequence
  Description of Artificial Sequence: Synthetic oligonucleotide
aagguugucgac

SEQ ID NO: 106657 - RNA, 13 nt, Artificial Sequence
  Description of Artificial Sequence: Synthetic oligonucleotide
accuggcaauugu

SEQ ID NO: 106658 - RNA, 12 nt, Artificial Sequence
  Description of Artificial Sequence: Synthetic oligonucleotide
aguggugcgagg

SEQ ID NO: 106659 - RNA, 13 nt, Artificial Sequence
  Description of Artificial Sequence: Synthetic oligonucleotide
agagacaugaaau

SEQ ID NO: 106660 - RNA, 13 nt, Artificial Sequence
  Description of Artificial Sequence: Synthetic oligonucleotide
auauauuucucca

SEQ ID NO: 106661 - RNA, 10 nt, Artificial Sequence
  Description of Artificial Sequence: Synthetic oligonucleotide
caugaaggcu

SEQ ID NO: 106662 - RNA, 11 nt, Artificial Sequence
  Description of Artificial Sequence: Synthetic oligonucleotide
gcuggaguggu

SEQ ID NO: 106663 - RNA, 11 nt, Artificial Sequence
  Description of Artificial Sequence: Synthetic oligonucleotide
aggaagagagg

SEQ ID NO: 106664 - RNA, 12 nt, Artificial Sequence
  Description of Artificial Sequence: Synthetic oligonucleotide
cuugcaucgggc

SEQ ID NO: 106665 - RNA, 13 nt, Artificial Sequence
  Description of Artificial Sequence: Synthetic oligonucleotide
auauccuacugug

SEQ ID NO: 106666 - RNA, 13 nt, Artificial Sequence
  Description of Artificial Sequence: Synthetic oligonucleotide
uccuacuguguaa

SEQ ID NO: 106667 - RNA, 12 nt, Artificial Sequence
  Description of Artificial Sequence: Synthetic oligonucleotide
ccuuguagugua

SEQ ID NO: 106668 - RNA, 13 nt, Artificial Sequence
  Description of Artificial Sequence: Synthetic oligonucleotide
ucuuuguugauug

SEQ ID NO: 106669 - RNA, 14 nt, Artificial Sequence
  Description of Artificial Sequence: Synthetic oligonucleotide
uuuguugauugaaa

SEQ ID NO: 106670 - RNA, 15 nt, Artificial Sequence
  Description of Artificial Sequence: Synthetic oligonucleotide
uucuuuuucuuccau

SEQ ID NO: 106671 - RNA, 13 nt, Artificial Sequence
  Description of Artificial Sequence: Synthetic oligonucleotide
aaucuuccuucua

SEQ ID NO: 106672 - RNA, 13 nt, Artificial Sequence
  Description of Artificial Sequence: Synthetic oligonucleotide
uugaaugcuucau

SEQ ID NO: 106673 - RNA, 13 nt, Artificial Sequence
  Description of Artificial Sequence: Synthetic oligonucleotide
ugaaugcuucaug

SEQ ID NO: 106674 - RNA, 13 nt, Artificial Sequence
  Description of Artificial Sequence: Synthetic oligonucleotide
aauucuacuuuga

SEQ ID NO: 106675 - RNA, 13 nt, Artificial Sequence
  Description of Artificial Sequence: Synthetic oligonucleotide
agcaacuacagac

SEQ ID NO: 106676 - RNA, 13 nt, Artificial Sequence
  Description of Artificial Sequence: Synthetic oligonucleotide
gaccaaggucaac

SEQ ID NO: 106677 - RNA, 13 nt, Artificial Sequence
  Description of Artificial Sequence: Synthetic oligonucleotide
cgacuaucucgac

SEQ ID NO: 106678 - RNA, 13 nt, Artificial Sequence
  Description of Artificial Sequence: Synthetic oligonucleotide
aaccuucccaaac

SEQ ID NO: 106679 - RNA, 14 nt, Artificial Sequence
  Description of Artificial Sequence: Synthetic oligonucleotide
ccaagcuuagaacu

SEQ ID NO: 106680 - RNA, 15 nt, Artificial Sequence
  Description of Artificial Sequence: Synthetic oligonucleotide
agcuuagaacuuuaa

SEQ ID NO: 106681 - RNA, 11 nt, Artificial Sequence
  Description of Artificial Sequence: Synthetic oligonucleotide
aagaccaccac

SEQ ID NO: 106682 - RNA, 14 nt, Artificial Sequence
  Description of Artificial Sequence: Synthetic oligonucleotide
gcgagaaauaaagu

SEQ ID NO: 106683 - RNA, 14 nt, Artificial Sequence
  Description of Artificial Sequence: Synthetic oligonucleotide
cgagaaauaaaguu

SEQ ID NO: 106684 - RNA, 12 nt, Artificial Sequence
  Description of Artificial Sequence: Synthetic oligonucleotide
aggaaaugaucc

SEQ ID NO: 106685 - RNA, 13 nt, Artificial Sequence
  Description of Artificial Sequence: Synthetic oligonucleotide
gaagaaaugaaac

SEQ ID NO: 106686 - RNA, 13 nt, Artificial Sequence
  Description of Artificial Sequence: Synthetic oligonucleotide
guuuccauccucc

SEQ ID NO: 106687 - RNA, 15 nt, Artificial Sequence
  Description of Artificial Sequence: Synthetic oligonucleotide
acugaaaaucuuuga

SEQ ID NO: 106688 - RNA, 11 nt, Artificial Sequence
  Description of Artificial Sequence: Synthetic oligonucleotide
ugccguucagg

SEQ ID NO: 106689 - RNA, 13 nt, Artificial Sequence
  Description of Artificial Sequence: Synthetic oligonucleotide
caggguccagaag

SEQ ID NO: 106690 - RNA, 13 nt, Artificial Sequence
  Description of Artificial Sequence: Synthetic oligonucleotide
ucaagacugcuug

SEQ ID NO: 106691 - RNA, 13 nt, Artificial Sequence
  Description of Artificial Sequence: Synthetic oligonucleotide
uccaugucuuugg

SEQ ID NO: 106692 - RNA, 11 nt, Artificial Sequence
  Description of Artificial Sequence: Synthetic oligonucleotide
gccugaaacac

SEQ ID NO: 106693 - RNA, 12 nt, Artificial Sequence
  Description of Artificial Sequence: Synthetic oligonucleotide
ucucuguaccuc

SEQ ID NO: 106694 - RNA, 12 nt, Artificial Sequence
  Description of Artificial Sequence: Synthetic oligonucleotide
agcaagacaaga

SEQ ID NO: 106695 - RNA, 13 nt, Artificial Sequence
  Description of Artificial Sequence: Synthetic oligonucleotide
gcaagacaagaaa

SEQ ID NO: 106696 - RNA, 12 nt, Artificial Sequence
  Description of Artificial Sequence: Synthetic oligonucleotide
uguacaagaucc

SEQ ID NO: 106697 - RNA, 12 nt, Artificial Sequence
  Description of Artificial Sequence: Synthetic oligonucleotide
cguacuugcaga

SEQ ID NO: 106698 - RNA, 13 nt, Artificial Sequence
  Description of Artificial Sequence: Synthetic oligonucleotide
cgaucgauacaga

SEQ ID NO: 106699 - RNA, 13 nt, Artificial Sequence
  Description of Artificial Sequence: Synthetic oligonucleotide
uauaaaaauaaau

SEQ ID NO: 106700 - RNA, 13 nt, Artificial Sequence
  Description of Artificial Sequence: Synthetic oligonucleotide
uaaaaauaaauau

SEQ ID NO: 106701 - RNA, 13 nt, Artificial Sequence
  Description of Artificial Sequence: Synthetic oligonucleotide
uuugacugcugug

SEQ ID NO: 106702 - RNA, 13 nt, Artificial Sequence
  Description of Artificial Sequence: Synthetic oligonucleotide
ggagaugagagac

SEQ ID NO: 106703 - RNA, 10 nt, Artificial Sequence
  Description of Artificial Sequence: Synthetic oligonucleotide
ucccacuugg

SEQ ID NO: 106704 - RNA, 10 nt, Artificial Sequence
  Description of Artificial Sequence: Synthetic oligonucleotide
guucacggcc

SEQ ID NO: 106705 - RNA, 12 nt, Artificial Sequence
  Description of Artificial Sequence: Synthetic oligonucleotide
accaucacacca

SEQ ID NO: 106706 - RNA, 10 nt, Artificial Sequence
  Description of Artificial Sequence: Synthetic oligonucleotide
cugcggguuu

SEQ ID NO: 106707 - RNA, 9 nt, Artificial Sequence
  Description of Artificial Sequence: Synthetic oligonucleotide
uccaguuug

SEQ ID NO: 106708 - RNA, 12 nt, Artificial Sequence
  Description of Artificial Sequence: Synthetic oligonucleotide
uuaaggacuucu

SEQ ID NO: 106709 - RNA, 12 nt, Artificial Sequence
  Description of Artificial Sequence: Synthetic oligonucleotide
agugggacagag

SEQ ID NO: 106710 - RNA, 13 nt, Artificial Sequence
  Description of Artificial Sequence: Synthetic oligonucleotide
auuuguuauugug

SEQ ID NO: 106711 - RNA, 12 nt, Artificial Sequence
  Description of Artificial Sequence: Synthetic oligonucleotide
ucaaaugcauuu

SEQ ID NO: 106712 - RNA, 9 nt, Artificial Sequence
  Description of Artificial Sequence: Synthetic oligonucleotide
aggaaagcc

SEQ ID NO: 106713 - RNA, 10 nt, Artificial Sequence
  Description of Artificial Sequence: Synthetic oligonucleotide
ggaaagcccu

SEQ ID NO: 106714 - RNA, 11 nt, Artificial Sequence
  Description of Artificial Sequence: Synthetic oligonucleotide
ccagcauggcc

SEQ ID NO: 106715 - RNA, 10 nt, Artificial Sequence
  Description of Artificial Sequence: Synthetic oligonucleotide
uucucccuga

SEQ ID NO: 106716 - RNA, 11 nt, Artificial Sequence
  Description of Artificial Sequence: Synthetic oligonucleotide
aagaagcccuu

SEQ ID NO: 106717 - RNA, 11 nt, Artificial Sequence
  Description of Artificial Sequence: Synthetic oligonucleotide
gaagcccuuca

SEQ ID NO: 106718 - RNA, 10 nt, Artificial Sequence
  Description of Artificial Sequence: Synthetic oligonucleotide
cccuucagcg

SEQ ID NO: 106719 - RNA, 10 nt, Artificial Sequence
  Description of Artificial Sequence: Synthetic oligonucleotide
cuucagcggc

SEQ ID NO: 106720 - RNA, 11 nt, Artificial Sequence
  Description of Artificial Sequence: Synthetic oligonucleotide
cagcggccagu

SEQ ID NO: 106721 - RNA, 11 nt, Artificial Sequence
  Description of Artificial Sequence: Synthetic oligonucleotide
gaaaagcuccg

SEQ ID NO: 106722 - RNA, 10 nt, Artificial Sequence
  Description of Artificial Sequence: Synthetic oligonucleotide
aaagcuccgg

SEQ ID NO: 106723 - RNA, 12 nt, Artificial Sequence
  Description of Artificial Sequence: Synthetic oligonucleotide
gucaacagucug

SEQ ID NO: 106724 - RNA, 12 nt, Artificial Sequence
  Description of Artificial Sequence: Synthetic oligonucleotide
agaguucaaaag

SEQ ID NO: 106725 - RNA, 12 nt, Artificial Sequence
  Description of Artificial Sequence: Synthetic oligonucleotide
gaguucaaaagc

SEQ ID NO: 106726 - RNA, 11 nt, Artificial Sequence
  Description of Artificial Sequence: Synthetic oligonucleotide
ucaaaagcccu

SEQ ID NO: 106727 - RNA, 11 nt, Artificial Sequence
  Description of Artificial Sequence: Synthetic oligonucleotide
caaaagcccuu

SEQ ID NO: 106728 - RNA, 11 nt, Artificial Sequence
  Description of Artificial Sequence: Synthetic oligonucleotide
aaagcccuuca

SEQ ID NO: 106729 - RNA, 11 nt, Artificial Sequence
  Description of Artificial Sequence: Synthetic oligonucleotide
aagcccuucag

SEQ ID NO: 106730 - RNA, 12 nt, Artificial Sequence
  Description of Artificial Sequence: Synthetic oligonucleotide
ugaagccgcucg

SEQ ID NO: 106731 - RNA, 11 nt, Artificial Sequence
  Description of Artificial Sequence: Synthetic oligonucleotide
acgccagucaa

SEQ ID NO: 106732 - RNA, 12 nt, Artificial Sequence
  Description of Artificial Sequence: Synthetic oligonucleotide
ucuuggugcgug

SEQ ID NO: 106733 - RNA, 13 nt, Artificial Sequence
  Description of Artificial Sequence: Synthetic oligonucleotide
uuggauucaucag

SEQ ID NO: 106734 - RNA, 12 nt, Artificial Sequence
  Description of Artificial Sequence: Synthetic oligonucleotide
ggaauaccuaag

SEQ ID NO: 106735 - RNA, 11 nt, Artificial Sequence
  Description of Artificial Sequence: Synthetic oligonucleotide
uuugaggcuca

SEQ ID NO: 106736 - RNA, 10 nt, Artificial Sequence
  Description of Artificial Sequence: Synthetic oligonucleotide
cuacaauugg

SEQ ID NO: 106737 - RNA, 11 nt, Artificial Sequence
  Description of Artificial Sequence: Synthetic oligonucleotide
aguuaggagcc

SEQ ID NO: 106738 - RNA, 12 nt, Artificial Sequence
  Description of Artificial Sequence: Synthetic oligonucleotide
gucaauauccac

SEQ ID NO: 106739 - RNA, 12 nt, Artificial Sequence
  Description of Artificial Sequence: Synthetic oligonucleotide
uguucagucaca

SEQ ID NO: 106740 - RNA, 11 nt, Artificial Sequence
  Description of Artificial Sequence: Synthetic oligonucleotide
cacacacauac

SEQ ID NO: 106741 - RNA, 11 nt, Artificial Sequence
  Description of Artificial Sequence: Synthetic oligonucleotide
uccuuuugcuu

SEQ ID NO: 106742 - RNA, 15 nt, Artificial Sequence
  Description of Artificial Sequence: Synthetic oligonucleotide
uuuaaaguaauuuuu

SEQ ID NO: 106743 - RNA, 12 nt, Artificial Sequence
  Description of Artificial Sequence: Synthetic oligonucleotide
aacagucaaugg

SEQ ID NO: 106744 - RNA, 12 nt, Artificial Sequence
  Description of Artificial Sequence: Synthetic oligonucleotide
cgacaaaccaau

SEQ ID NO: 106745 - RNA, 11 nt, Artificial Sequence
  Description of Artificial Sequence: Synthetic oligonucleotide
cugcuaccacu

SEQ ID NO: 106746 - RNA, 12 nt, Artificial Sequence
  Description of Artificial Sequence: Synthetic oligonucleotide
caagcggucuua

SEQ ID NO: 106747 - RNA, 12 nt, Artificial Sequence
  Description of Artificial Sequence: Synthetic oligonucleotide
gucuuaccggcu

SEQ ID NO: 106748 - RNA, 10 nt, Artificial Sequence
  Description of Artificial Sequence: Synthetic oligonucleotide
auggguuacc

SEQ ID NO: 106749 - RNA, 10 nt, Artificial Sequence
  Description of Artificial Sequence: Synthetic oligonucleotide
uuaccugcga

SEQ ID NO: 106750 - RNA, 11 nt, Artificial Sequence
  Description of Artificial Sequence: Synthetic oligonucleotide
aucuugcugag

SEQ ID NO: 106751 - RNA, 12 nt, Artificial Sequence
  Description of Artificial Sequence: Synthetic oligonucleotide
gcauaaaacagu

SEQ ID NO: 106752 - RNA, 11 nt, Artificial Sequence
  Description of Artificial Sequence: Synthetic oligonucleotide
uccuuuauccu

SEQ ID NO: 106753 - RNA, 11 nt, Artificial Sequence
  Description of Artificial Sequence: Synthetic oligonucleotide
aacgcaaguug

SEQ ID NO: 106754 - RNA, 12 nt, Artificial Sequence
  Description of Artificial Sequence: Synthetic oligonucleotide
aacugaaaccau

SEQ ID NO: 106755 - RNA, 13 nt, Artificial Sequence
  Description of Artificial Sequence: Synthetic oligonucleotide
cuuuguuaaauau

SEQ ID NO: 106756 - RNA, 13 nt, Artificial Sequence
  Description of Artificial Sequence: Synthetic oligonucleotide
uauauuaaaaguu

SEQ ID NO: 106757 - RNA, 12 nt, Artificial Sequence
  Description of Artificial Sequence: Synthetic oligonucleotide
uuuugacuuaac

SEQ ID NO: 106758 - RNA, 12 nt, Artificial Sequence
  Description of Artificial Sequence: Synthetic oligonucleotide
caaacucagcac

SEQ ID NO: 106759 - RNA, 10 nt, Artificial Sequence
  Description of Artificial Sequence: Synthetic oligonucleotide
gcugaccuca

SEQ ID NO: 106760 - RNA, 13 nt, Artificial Sequence
  Description of Artificial Sequence: Synthetic oligonucleotide
uuauucagaucgc

SEQ ID NO: 106761 - RNA, 12 nt, Artificial Sequence
  Description of Artificial Sequence: Synthetic oligonucleotide
ggguucugggau

SEQ ID NO: 106762 - RNA, 14 nt, Artificial Sequence
  Description of Artificial Sequence: Synthetic oligonucleotide
uauuggaaauuaug

SEQ ID NO: 106763 - RNA, 12 nt, Artificial Sequence
  Description of Artificial Sequence: Synthetic oligonucleotide
uggaagcacuag

SEQ ID NO: 106764 - RNA, 12 nt, Artificial Sequence
  Description of Artificial Sequence: Synthetic oligonucleotide
uuuuuaugugga

SEQ ID NO: 106765 - RNA, 11 nt, Artificial Sequence
  Description of Artificial Sequence: Synthetic oligonucleotide
gaauugguaga

SEQ ID NO: 106766 - RNA, 12 nt, Artificial Sequence
  Description of Artificial Sequence: Synthetic oligonucleotide
uagacuuggaga

SEQ ID NO: 106767 - RNA, 12 nt, Artificial Sequence
  Description of Artificial Sequence: Synthetic oligonucleotide
uacaguauucca

SEQ ID NO: 106768 - RNA, 14 nt, Artificial Sequence
  Description of Artificial Sequence: Synthetic oligonucleotide
cacugaugaauuaa

SEQ ID NO: 106769 - RNA, 11 nt, Artificial Sequence
  Description of Artificial Sequence: Synthetic oligonucleotide
cacaucaucac

SEQ ID NO: 106770 - RNA, 12 nt, Artificial Sequence
  Description of Artificial Sequence: Synthetic oligonucleotide
ucaccaaacaga

SEQ ID NO: 106771 - RNA, 11 nt, Artificial Sequence
  Description of Artificial Sequence: Synthetic oligonucleotide
gaacaugaugg

SEQ ID NO: 106772 - RNA, 11 nt, Artificial Sequence
  Description of Artificial Sequence: Synthetic oligonucleotide
auguagacugc

SEQ ID NO: 106773 - RNA, 12 nt, Artificial Sequence
  Description of Artificial Sequence: Synthetic oligonucleotide
gaucuauuuaug

SEQ ID NO: 106774 - RNA, 11 nt, Artificial Sequence
  Description of Artificial Sequence: Synthetic oligonucleotide
cacuauuauca

SEQ ID NO: 106775 - RNA, 10 nt, Artificial Sequence
  Description of Artificial Sequence: Synthetic oligonucleotide
ucaguucugc

SEQ ID NO: 106776 - RNA, 12 nt, Artificial Sequence
  Description of Artificial Sequence: Synthetic oligonucleotide
gauuaaaccuac

SEQ ID NO: 106777 - RNA, 12 nt, Artificial Sequence
  Description of Artificial Sequence: Synthetic oligonucleotide
uaaaauccuucu

SEQ ID NO: 106778 - RNA, 11 nt, Artificial Sequence
  Description of Artificial Sequence: Synthetic oligonucleotide
augcuguagac

SEQ ID NO: 106779 - RNA, 12 nt, Artificial Sequence
  Description of Artificial Sequence: Synthetic oligonucleotide
ugauaggaauag

SEQ ID NO: 106780 - RNA, 10 nt, Artificial Sequence
  Description of Artificial Sequence: Synthetic oligonucleotide
auggcccuga

SEQ ID NO: 106781 - RNA, 10 nt, Artificial Sequence
  Description of Artificial Sequence: Synthetic oligonucleotide
uccucaagca

SEQ ID NO: 106782 - RNA, 9 nt, Artificial Sequence
  Description of Artificial Sequence: Synthetic oligonucleotide
uucagccca

SEQ ID NO: 106783 - RNA, 10 nt, Artificial Sequence
  Description of Artificial Sequence: Synthetic oligonucleotide
cugcugaacc

SEQ ID NO: 106784 - RNA, 11 nt, Artificial Sequence
  Description of Artificial Sequence: Synthetic oligonucleotide
aguucucuuca

SEQ ID NO: 106785 - RNA, 10 nt, Artificial Sequence
  Description of Artificial Sequence: Synthetic oligonucleotide
cagccuagag

SEQ ID NO: 106786 - RNA, 12 nt, Artificial Sequence
  Description of Artificial Sequence: Synthetic oligonucleotide
ucugugaagugu

SEQ ID NO: 106787 - RNA, 13 nt, Artificial Sequence
  Description of Artificial Sequence: Synthetic oligonucleotide
gagaaaauuucaa

SEQ ID NO: 106788 - RNA, 10 nt, Artificial Sequence
  Description of Artificial Sequence: Synthetic oligonucleotide
auccuccuga

SEQ ID NO: 106789 - RNA, 11 nt, Artificial Sequence
  Description of Artificial Sequence: Synthetic oligonucleotide
ugacaucauau

SEQ ID NO: 106790 - RNA, 12 nt, Artificial Sequence
  Description of Artificial Sequence: Synthetic oligonucleotide
aucuucaucaua

SEQ ID NO: 106791 - RNA, 12 nt, Artificial Sequence
  Description of Artificial Sequence: Synthetic oligonucleotide
acuagcuauuaa

SEQ ID NO: 106792 - RNA, 13 nt, Artificial Sequence
  Description of Artificial Sequence: Synthetic oligonucleotide
cucuacuaaaaau

SEQ ID NO: 106793 - RNA, 11 nt, Artificial Sequence
  Description of Artificial Sequence: Synthetic oligonucleotide
cuaucucgccu

SEQ ID NO: 106794 - RNA, 12 nt, Artificial Sequence
  Description of Artificial Sequence: Synthetic oligonucleotide
uucgguccaguu

SEQ ID NO: 106795 - RNA, 10 nt, Artificial Sequence
  Description of Artificial Sequence: Synthetic oligonucleotide
auguagccgc

SEQ ID NO: 106796 - RNA, 11 nt, Artificial Sequence
  Description of Artificial Sequence: Synthetic oligonucleotide
gaggagacuug

SEQ ID NO: 106797 - RNA, 11 nt, Artificial Sequence
  Description of Artificial Sequence: Synthetic oligonucleotide
aguagugagga

SEQ ID NO: 106798 - RNA, 13 nt, Artificial Sequence
  Description of Artificial Sequence: Synthetic oligonucleotide
agaugaguacaaa

SEQ ID NO: 106799 - RNA, 12 nt, Artificial Sequence
  Description of Artificial Sequence: Synthetic oligonucleotide
uuguuaaugggc

SEQ ID NO: 106800 - RNA, 12 nt, Artificial Sequence
  Description of Artificial Sequence: Synthetic oligonucleotide
uuuuaauuuauu

SEQ ID NO: 106801 - RNA, 11 nt, Artificial Sequence
  Description of Artificial Sequence: Synthetic oligonucleotide
auuuaaauaug

SEQ ID NO: 106802 - RNA, 12 nt, Artificial Sequence
  Description of Artificial Sequence: Synthetic oligonucleotide
auccuuuguuuc

SEQ ID NO: 106803 - RNA, 13 nt, Artificial Sequence
  Description of Artificial Sequence: Synthetic oligonucleotide
gucuaaguguuug

SEQ ID NO: 106804 - RNA, 11 nt, Artificial Sequence
  Description of Artificial Sequence: Synthetic oligonucleotide
ccugugacaaa

SEQ ID NO: 106805 - RNA, 12 nt, Artificial Sequence
  Description of Artificial Sequence: Synthetic oligonucleotide
caggcugaauua

SEQ ID NO: 106806 - RNA, 13 nt, Artificial Sequence
  Description of Artificial Sequence: Synthetic oligonucleotide
ucauucuuacaau

SEQ ID NO: 106807 - RNA, 14 nt, Artificial Sequence
  Description of Artificial Sequence: Synthetic oligonucleotide
cauucuuacaauug

SEQ ID NO: 106808 - RNA, 11 nt, Artificial Sequence
  Description of Artificial Sequence: Synthetic oligonucleotide
agagaguguac

SEQ ID NO: 106809 - RNA, 11 nt, Artificial Sequence
  Description of Artificial Sequence: Synthetic oligonucleotide
gaacucagcag

SEQ ID NO: 106810 - RNA, 12 nt, Artificial Sequence
  Description of Artificial Sequence: Synthetic oligonucleotide
uuauuuucagua

SEQ ID NO: 106811 - RNA, 11 nt, Artificial Sequence
  Description of Artificial Sequence: Synthetic oligonucleotide
cuuaaauggaa

SEQ ID NO: 106812 - RNA, 12 nt, Artificial Sequence
  Description of Artificial Sequence: Synthetic oligonucleotide
gccuaaaauugu

SEQ ID NO: 106813 - RNA, 12 nt, Artificial Sequence
  Description of Artificial Sequence: Synthetic oligonucleotide
acuaacaucugg

SEQ ID NO: 106814 - RNA, 11 nt, Artificial Sequence
  Description of Artificial Sequence: Synthetic oligonucleotide
gacugugagcu

SEQ ID NO: 106815 - RNA, 13 nt, Artificial Sequence
  Description of Artificial Sequence: Synthetic oligonucleotide
gcuuuuuauuaau

SEQ ID NO: 106816 - RNA, 12 nt, Artificial Sequence
  Description of Artificial Sequence: Synthetic oligonucleotide
ucuucuuacauu

SEQ ID NO: 106817 - RNA, 14 nt, Artificial Sequence
  Description of Artificial Sequence: Synthetic oligonucleotide
auuuguaaaaaugu

SEQ ID NO: 106818 - RNA, 14 nt, Artificial Sequence
  Description of Artificial Sequence: Synthetic oligonucleotide
ucuuaauucauauu

SEQ ID NO: 106819 - RNA, 12 nt, Artificial Sequence
  Description of Artificial Sequence: Synthetic oligonucleotide
aacuaaucauga

SEQ ID NO: 106820 - RNA, 11 nt, Artificial Sequence
  Description of Artificial Sequence: Synthetic oligonucleotide
cugcucuuggg

SEQ ID NO: 106821 - RNA, 12 nt, Artificial Sequence
  Description of Artificial Sequence: Synthetic oligonucleotide
aguagcuuugag

SEQ ID NO: 106822 - RNA, 13 nt, Artificial Sequence
  Description of Artificial Sequence: Synthetic oligonucleotide
acguaauauuuca

SEQ ID NO: 106823 - RNA, 12 nt, Artificial Sequence
  Description of Artificial Sequence: Synthetic oligonucleotide
auucucuucacu

SEQ ID NO: 106824 - RNA, 13 nt, Artificial Sequence
  Description of Artificial Sequence: Synthetic oligonucleotide
uaaugcuaagaaa

SEQ ID NO: 106825 - RNA, 11 nt, Artificial Sequence
  Description of Artificial Sequence: Synthetic oligonucleotide
cugaaaaucaa

SEQ ID NO: 106826 - RNA, 13 nt, Artificial Sequence
  Description of Artificial Sequence: Synthetic oligonucleotide
auaugauuacuuu

SEQ ID NO: 106827 - RNA, 13 nt, Artificial Sequence
  Description of Artificial Sequence: Synthetic oligonucleotide
auuuuguucuaca

SEQ ID NO: 106828 - RNA, 11 nt, Artificial Sequence
  Description of Artificial Sequence: Synthetic oligonucleotide
ccgggacucuc

SEQ ID NO: 106829 - RNA, 13 nt, Artificial Sequence
  Description of Artificial Sequence: Synthetic oligonucleotide
cuuuaaaguaaag

SEQ ID NO: 106830 - RNA, 12 nt, Artificial Sequence
  Description of Artificial Sequence: Synthetic oligonucleotide
cuggaagccugg

SEQ ID NO: 106831 - RNA, 13 nt, Artificial Sequence
  Description of Artificial Sequence: Synthetic oligonucleotide
aaacaaaagagag

SEQ ID NO: 106832 - RNA, 12 nt, Artificial Sequence
  Description of Artificial Sequence: Synthetic oligonucleotide
ucaguuaugccg

SEQ ID NO: 106833 - RNA, 12 nt, Artificial Sequence
  Description of Artificial Sequence: Synthetic oligonucleotide
aaaagaagucca

SEQ ID NO: 106834 - RNA, 10 nt, Artificial Sequence
  Description of Artificial Sequence: Synthetic oligonucleotide
ggugagguua

SEQ ID NO: 106835 - RNA, 10 nt, Artificial Sequence
  Description of Artificial Sequence: Synthetic oligonucleotide
ggaagaggac

SEQ ID NO: 106836 - RNA, 12 nt, Artificial Sequence
  Description of Artificial Sequence: Synthetic oligonucleotide
agcaaguauugu

SEQ ID NO: 106837 - RNA, 11 nt, Artificial Sequence
  Description of Artificial Sequence: Synthetic oligonucleotide
uuguagcacuc

SEQ ID NO: 106838 - RNA, 13 nt, Artificial Sequence
  Description of Artificial Sequence: Synthetic oligonucleotide
caaaaccacaaau

SEQ ID NO: 106839 - RNA, 11 nt, Artificial Sequence
  Description of Artificial Sequence: Synthetic oligonucleotide
aagcccauaca

SEQ ID NO: 106840 - RNA, 10 nt, Artificial Sequence
  Description of Artificial Sequence: Synthetic oligonucleotide
gcccauacag

SEQ ID NO: 106841 - RNA, 11 nt, Artificial Sequence
  Description of Artificial Sequence: Synthetic oligonucleotide
agaaaccuucc

SEQ ID NO: 106842 - RNA, 9 nt, Artificial Sequence
  Description of Artificial Sequence: Synthetic oligonucleotide
uauaccuac

SEQ ID NO: 106843 - RNA, 12 nt, Artificial Sequence
  Description of Artificial Sequence: Synthetic oligonucleotide
ccaguuuucgga

SEQ ID NO: 106844 - RNA, 8 nt, Artificial Sequence
  Description of Artificial Sequence: Synthetic oligonucleotide
gaacaggg

SEQ ID NO: 106845 - RNA, 12 nt, Artificial Sequence
  Description of Artificial Sequence: Synthetic oligonucleotide
uaacuuuccagu

SEQ ID NO: 106846 - RNA, 13 nt, Artificial Sequence
  Description of Artificial Sequence: Synthetic oligonucleotide
aaguuugguuuug

SEQ ID NO: 106847 - RNA, 11 nt, Artificial Sequence
  Description of Artificial Sequence: Synthetic oligonucleotide
uucccacugua

SEQ ID NO: 106848 - RNA, 12 nt, Artificial Sequence
  Description of Artificial Sequence: Synthetic oligonucleotide
gauaccauauga

SEQ ID NO: 106849 - RNA, 10 nt, Artificial Sequence
  Description of Artificial Sequence: Synthetic oligonucleotide
acaugggcug

SEQ ID NO: 106850 - RNA, 12 nt, Artificial Sequence
  Description of Artificial Sequence: Synthetic oligonucleotide
aacuuuuucaua

SEQ ID NO: 106851 - RNA, 11 nt, Artificial Sequence
  Description of Artificial Sequence: Synthetic oligonucleotide
augaggccgga

SEQ ID NO: 106852 - RNA, 10 nt, Artificial Sequence
  Description of Artificial Sequence: Synthetic oligonucleotide
cugcauuugu

SEQ ID NO: 106853 - RNA, 12 nt, Artificial Sequence
  Description of Artificial Sequence: Synthetic oligonucleotide
auguuuacuacc

SEQ ID NO: 106854 - RNA, 14 nt, Artificial Sequence
  Description of Artificial Sequence: Synthetic oligonucleotide
auuuuuugaugaaa

SEQ ID NO: 106855 - RNA, 13 nt, Artificial Sequence
  Description of Artificial Sequence: Synthetic oligonucleotide
agugugugaauuu

SEQ ID NO: 106856 - RNA, 12 nt, Artificial Sequence
  Description of Artificial Sequence: Synthetic oligonucleotide
agcaauguaugu

SEQ ID NO: 106857 - RNA, 13 nt, Artificial Sequence
  Description of Artificial Sequence: Synthetic oligonucleotide
aagcacauauaua

SEQ ID NO: 106858 - RNA, 13 nt, Artificial Sequence
  Description of Artificial Sequence: Synthetic oligonucleotide
uaauaguuucucc

SEQ ID NO: 106859 - RNA, 12 nt, Artificial Sequence
  Description of Artificial Sequence: Synthetic oligonucleotide
guuucuccaaau

SEQ ID NO: 106860 - RNA, 12 nt, Artificial Sequence
  Description of Artificial Sequence: Synthetic oligonucleotide
acuuccuagaaa

SEQ ID NO: 106861 - RNA, 12 nt, Artificial Sequence
  Description of Artificial Sequence: Synthetic oligonucleotide
acaccauauaug

SEQ ID NO: 106862 - RNA, 13 nt, Artificial Sequence
  Description of Artificial Sequence: Synthetic oligonucleotide
uauaugaauggag

SEQ ID NO: 106863 - RNA, 12 nt, Artificial Sequence
  Description of Artificial Sequence: Synthetic oligonucleotide
cauuuacaggga

SEQ ID NO: 106864 - RNA, 12 nt, Artificial Sequence
  Description of Artificial Sequence: Synthetic oligonucleotide
auuuacagggac

SEQ ID NO: 106865 - RNA, 9 nt, Artificial Sequence
  Description of Artificial Sequence: Synthetic oligonucleotide
gggaccuga

SEQ ID NO: 106866 - RNA, 13 nt, Artificial Sequence
  Description of Artificial Sequence: Synthetic oligonucleotide
guuugacugcauc

SEQ ID NO: 106867 - RNA, 12 nt, Artificial Sequence
  Description of Artificial Sequence: Synthetic oligonucleotide
uugacugcaucg

SEQ ID NO: 106868 - RNA, 11 nt, Artificial Sequence
  Description of Artificial Sequence: Synthetic oligonucleotide
aguucacaggg

SEQ ID NO: 106869 - RNA, 12 nt, Artificial Sequence
  Description of Artificial Sequence: Synthetic oligonucleotide
gcaccucugucc

SEQ ID NO: 106870 - RNA, 14 nt, Artificial Sequence
  Description of Artificial Sequence: Synthetic oligonucleotide
guuugucuuuuuaa

SEQ ID NO: 106871 - RNA, 13 nt, Artificial Sequence
  Description of Artificial Sequence: Synthetic oligonucleotide
uugucuuuuuaag

SEQ ID NO: 106872 - RNA, 12 nt, Artificial Sequence
  Description of Artificial Sequence: Synthetic oligonucleotide
cuaaagguuguc

SEQ ID NO: 106873 - RNA, 11 nt, Artificial Sequence
  Description of Artificial Sequence: Synthetic oligonucleotide
agguugucgac

SEQ ID NO: 106874 - RNA, 12 nt, Artificial Sequence
  Description of Artificial Sequence: Synthetic oligonucleotide
ccuggcaauugu

SEQ ID NO: 106875 - RNA, 11 nt, Artificial Sequence
  Description of Artificial Sequence: Synthetic oligonucleotide
guggugcgagg

SEQ ID NO: 106876 - RNA, 12 nt, Artificial Sequence
  Description of Artificial Sequence: Synthetic oligonucleotide
gagacaugaaau

SEQ ID NO: 106877 - RNA, 12 nt, Artificial Sequence
  Description of Artificial Sequence: Synthetic oligonucleotide
uauauuucucca

SEQ ID NO: 106878 - RNA, 9 nt, Artificial Sequence
  Description of Artificial Sequence: Synthetic oligonucleotide
augaaggcu

SEQ ID NO: 106879 - RNA, 10 nt, Artificial Sequence
  Description of Artificial Sequence: Synthetic oligonucleotide
cuggaguggu

SEQ ID NO: 106880 - RNA, 10 nt, Artificial Sequence
  Description of Artificial Sequence: Synthetic oligonucleotide
ggaagagagg

SEQ ID NO: 106881 - RNA, 11 nt, Artificial Sequence
  Description of Artificial Sequence: Synthetic oligonucleotide
uugcaucgggc

SEQ ID NO: 106882 - RNA, 12 nt, Artificial Sequence
  Description of Artificial Sequence: Synthetic oligonucleotide
uauccuacugug

SEQ ID NO: 106883 - RNA, 12 nt, Artificial Sequence
  Description of Artificial Sequence: Synthetic oligonucleotide
ccuacuguguaa

SEQ ID NO: 106884 - RNA, 11 nt, Artificial Sequence
  Description of Artificial Sequence: Synthetic oligonucleotide
cuuguagugua

SEQ ID NO: 106885 - RNA, 12 nt, Artificial Sequence
  Description of Artificial Sequence: Synthetic oligonucleotide
cuuuguugauug

SEQ ID NO: 106886 - RNA, 13 nt, Artificial Sequence
  Description of Artificial Sequence: Synthetic oligonucleotide
uuguugauugaaa

SEQ ID NO: 106887 - RNA, 14 nt, Artificial Sequence
  Description of Artificial Sequence: Synthetic oligonucleotide
ucuuuuucuuccau

SEQ ID NO: 106888 - RNA, 12 nt, Artificial Sequence
  Description of Artificial Sequence: Synthetic oligonucleotide
aucuuccuucua

SEQ ID NO: 106889 - RNA, 12 nt, Artificial Sequence
  Description of Artificial Sequence: Synthetic oligonucleotide
ugaaugcuucau

SEQ ID NO: 106890 - RNA, 12 nt, Artificial Sequence
  Description of Artificial Sequence: Synthetic oligonucleotide
gaaugcuucaug

SEQ ID NO: 106891 - RNA, 12 nt, Artificial Sequence
  Description of Artificial Sequence: Synthetic oligonucleotide
auucuacuuuga

SEQ ID NO: 106892 - RNA, 12 nt, Artificial Sequence
  Description of Artificial Sequence: Synthetic oligonucleotide
gcaacuacagac

SEQ ID NO: 106893 - RNA, 12 nt, Artificial Sequence
  Description of Artificial Sequence: Synthetic oligonucleotide
accaaggucaac

SEQ ID NO: 106894 - RNA, 12 nt, Artificial Sequence
  Description of Artificial Sequence: Synthetic oligonucleotide
gacuaucucgac

SEQ ID NO: 106895 - RNA, 12 nt, Artificial Sequence
  Description of Artificial Sequence: Synthetic oligonucleotide
accuucccaaac

SEQ ID NO: 106896 - RNA, 13 nt, Artificial Sequence
  Description of Artificial Sequence: Synthetic oligonucleotide
caagcuuagaacu

SEQ ID NO: 106897 - RNA, 14 nt, Artificial Sequence
  Description of Artificial Sequence: Synthetic oligonucleotide
gcuuagaacuuuaa

SEQ ID NO: 106898 - RNA, 13 nt, Artificial Sequence
  Description of Artificial Sequence: Synthetic oligonucleotide
aacuuuaagcaac

SEQ ID NO: 106899 - RNA, 10 nt, Artificial Sequence
  Description of Artificial Sequence: Synthetic oligonucleotide
agaccaccac

SEQ ID NO: 106900 - RNA, 13 nt, Artificial Sequence
  Description of Artificial Sequence: Synthetic oligonucleotide
cgagaaauaaagu

SEQ ID NO: 106901 - RNA, 13 nt, Artificial Sequence
  Description of Artificial Sequence: Synthetic oligonucleotide
gagaaauaaaguu

SEQ ID NO: 106902 - RNA, 11 nt, Artificial Sequence
  Description of Artificial Sequence: Synthetic oligonucleotide
ggaaaugaucc

SEQ ID NO: 106903 - RNA, 12 nt, Artificial Sequence
  Description of Artificial Sequence: Synthetic oligonucleotide
aagaaaugaaac

SEQ ID NO: 106904 - RNA, 12 nt, Artificial Sequence
  Description of Artificial Sequence: Synthetic oligonucleotide
uuuccauccucc

SEQ ID NO: 106905 - RNA, 14 nt, Artificial Sequence
  Description of Artificial Sequence: Synthetic oligonucleotide
cugaaaaucuuuga

SEQ ID NO: 106906 - RNA, 10 nt, Artificial Sequence
  Description of Artificial Sequence: Synthetic oligonucleotide
gccguucagg

SEQ ID NO: 106907 - RNA, 12 nt, Artificial Sequence
  Description of Artificial Sequence: Synthetic oligonucleotide
aggguccagaag

SEQ ID NO: 106908 - RNA, 12 nt, Artificial Sequence
  Description of Artificial Sequence: Synthetic oligonucleotide
caagacugcuug

SEQ ID NO: 106909 - RNA, 12 nt, Artificial Sequence
  Description of Artificial Sequence: Synthetic oligonucleotide
ccaugucuuugg

SEQ ID NO: 106910 - RNA, 10 nt, Artificial Sequence
  Description of Artificial Sequence: Synthetic oligonucleotide
ccugaaacac

SEQ ID NO: 106911 - RNA, 11 nt, Artificial Sequence
  Description of Artificial Sequence: Synthetic oligonucleotide
cucuguaccuc

SEQ ID NO: 106912 - RNA, 11 nt, Artificial Sequence
  Description of Artificial Sequence: Synthetic oligonucleotide
gcaagacaaga

SEQ ID NO: 106913 - RNA, 12 nt, Artificial Sequence
  Description of Artificial Sequence: Synthetic oligonucleotide
caagacaagaaa

SEQ ID NO: 106914 - RNA, 11 nt, Artificial Sequence
  Description of Artificial Sequence: Synthetic oligonucleotide
guacaagaucc

SEQ ID NO: 106915 - RNA, 11 nt, Artificial Sequence
  Description of Artificial Sequence: Synthetic oligonucleotide
guacuugcaga

SEQ ID NO: 106916 - RNA, 12 nt, Artificial Sequence
  Description of Artificial Sequence: Synthetic oligonucleotide
gaucgauacaga

SEQ ID NO: 106917 - RNA, 12 nt, Artificial Sequence
  Description of Artificial Sequence: Synthetic oligonucleotide
auaaaaauaaau

SEQ ID NO: 106918 - RNA, 12 nt, Artificial Sequence
  Description of Artificial Sequence: Synthetic oligonucleotide
aaaaauaaauau

SEQ ID NO: 106919 - RNA, 12 nt, Artificial Sequence
  Description of Artificial Sequence: Synthetic oligonucleotide
uugacugcugug

SEQ ID NO: 106920 - RNA, 12 nt, Artificial Sequence
  Description of Artificial Sequence: Synthetic oligonucleotide
gagaugagagac

SEQ ID NO: 106921 - RNA, 9 nt, Artificial Sequence
  Description of Artificial Sequence: Synthetic oligonucleotide
cccacuugg

SEQ ID NO: 106922 - RNA, 4304 nt, Homo sapiens
cacacggacuacaggggaguuuuguugaaguugcaaaguccuggagccuccagagggcugucggcgcaguagcagcgagcagcagaguccgcacgcuccggcgaggggcagaagagcgcgagggagcgcggggcagcagaagcgagagccgagcgcggacccagccaggacccacagcccuccccagcugcccaggaagagccccagccauggaacaccagcuccugugcugcgaaguggaaaccauccgccgcgcguaccccgaugccaaccuccucaacgaccgggugcugcgggccaugcugaaggcggaggagaccugcgcgcccucgguguccuacuucaaaugugugcagaaggagguccugccguccaugcggaagaucgucgccaccuggaugcuggaggucugcgaggaacagaagugcgaggaggaggucuucccgcuggccaugaacuaccuggaccgcuuccugucgcuggagcccgugaaaaagagccgccugcagcugcugggggccacuugcauguucguggccucuaagaugaaggagaccaucccccugacggccgagaagcugugcaucuacaccgacaacuccauccggcccgaggagcugcugcaaauggagcugcuccuggugaacaagcucaaguggaaccuggccgcaaugaccccgcacgauuucauugaacacuuccucuccaaaaugccagaggcggaggagaacaaacagaucauccgcaaacacgcgcagaccuucguugcccucugugccacagaugugaaguucauuuccaauccgcccuccaugguggcagcggggagcgugguggccgcagugcaaggccugaaccugaggagccccaacaacuuccuguccuacuaccgccucacacgcuuccucuccagagugaucaagugugacccggacugccuccgggccugccaggagcagaucgaagcccugcuggagucaagccugcgccaggcccagcagaacauggaccccaaggccgccgaggaggaggaagaggaggaggaggagguggaccuggcuugcacacccaccgacgugcgggacguggacaucugagggcgccaggcaggcgggcgccaccgccacccgcagcgagggcggagccggccccaggugcuccccugacagucccuccucuccggagcauuuugauaccagaagggaaagcuucauucuccuuguuguugguuguuuuuuccuuugcucuuucccccuuccaucucugacuuaagcaaaagaaaaagauuacccaaaaacugucuuuaaaagagagagagagaaaaaaaaaauaguauuugcauaacccugagcggugggggaggaggguugugcuacagaugauagaggauuuuauaccccaauaaucaacucguuuuuauauuaauguacuuguuucucuguuguaagaauaggcauuaacacaaaggaggcgucucgggagaggauuagguuccauccuuuacguguuuaaaaaaaagcauaaaaacauuuuaaaaacauagaaaaauucagcaaaccauuuuuaaaguagaagaggguuuuagguagaaaaacauauucuugugcuuuuccugauaaagcacagcuguagugggguucuaggcaucucuguacuuugcuugcucauaugcauguagucacuuuauaagucauuguauguuauuauauuccguagguagauguguaaccucuucaccuuauucauggcugaagucaccucuugguuacaguagcguagcgugcccgugugcauguccuuugcgccugugaccaccaccccaacaaaccauccagugacaaaccauccaguggagguuugucgggcaccagccagcguagcagggucgggaaaggccaccugucccacuccuacgauacgcuacuauaaagagaagacgaaauagugacauaauauauucuauuuuuauacucuuccuauuuuuguagugaccuguuuaugagaugcugguuuucuacccaacggcccugcagccagcucacguccagguucaacccacagcuacuugguuuguguucuucuucauauucuaaaaccauuccauuuccaagcacuuucaguccaauagguguaggaaauagcgcuguuuuuguugugugugcagggagggcaguuuucuaauggaaugguuugggaauauccauguacuuguuugcaagcaggacuuugaggcaagugugggccacugugguggcaguggaggugggguguuugggaggcugcgugccagucaagaagaaaaagguuugcauucucacauugccaggaugauaaguuccuuuccuuuucuuuaaagaaguugaaguuuaggaauccuuuggugccaacugguguuugaaaguagggaccucagagguuuaccuagagaacaggugguuuuuaaggguuaucuuagauguuucacaccggaagguuuuuaaacacuaaaauauauaauuuauaguuaaggcuaaaaaguauauuuauugcagaggauguucauaaggccaguaugauuuauaaaugcaaucuccccuugauuuaaacacacagauacacacacacacacacacacacacaaaccuucugccuuugauguuacagauuuaauacaguuuauuuuuaaagauagauccuuuuauaggugagaaaaaaacaaucuggaagaaaaaaaccacacaaagacauugauucagccuguuuggcguuucccagagucaucugauuggacaggcaugggugcaaggaaaauuaggguacucaaccuaaguucgguuccgaugaauucuuauccccugccccuuccuuuaaaaaacuuagugacaaaauagacaauuugcacaucuuggcuauguaauucuuguaauuuuuauuuaggaaguguugaagggagguggcaagaguguggaggcugacgugugagggaggacaggcgggaggaggugugaggaggaggcucccgaggggaaggggcggugcccacaccggggacaggccgcagcuccauuuucuuauugcgcugcuaccguugacuuccaggcacgguuuggaaauauucacaucgcuucuguguaucucuuucacauuguuugcugcuauuggaggaucaguuuuuuguuuuacaaugucauauacugccauguacuaguuuuaguuuucucuuagaacauuguauuacagaugccuuuuuuguaguuuuuuuuuuuuuuaugugaucaauuuugacuuaaugugauuacugcucuauuccaaaaagguugcuguuucacaauaccucaugcuucacuuagccaugguggacccagcgggcagguucugccugcuuuggcgggcagacacgcgggcgcgaucccacacaggcuggcgggggccggccccgaggccgcgugcgugagaaccgcgccgguguccccagagaccaggcugugucccucuucucuucccugcgccugugaugcugggcacuucaucugaucgggggcguagcaucauaguaguuuuuacagcuguguuauucuuugcguguagcuauggaaguugcauaauuauuauuauuauuauuauaacaagugugucuuacgugccaccacggcguuguaccuguaggacucucauucgggaugauuggaauagcuucuggaauuuguucaaguuuuggguauguuuaaucuguuauguacuaguguucuguuuguuauuguuuuguuaauuacaccauaaugcuaauuuaaagagacuccaaaucucaaugaagccagcucacagugcugugugccccggucaccuagcaagcugccgaaccaaaagaauuugcaccccgcugcgggcccacgugguuggggcccugcccuggcagggucauccugugcucggaggccaucucgggcacaggcccaccccgccccaccccuccagaacacggcucacgcuuaccucaaccauccuggcugcggcgucugucugaaccacgcgggggccuugagggacgcuuugucugucgugauggggcaagggcacaaguccuggauguuguguguaucgagaggccaaaggcugguggcaagugcacggggcacagcggagucuguccugugacgcgcaagucugagggucugggcggcgggcggcugggucugugcauuucugguugcaccgcggcgcuucccagcaccaacauguaaccggcauguuuccagcagaagacaaaaagacaaacaugaaagucuagaaauaaaacugguaaaaccccaaaaaaaaaaaaaaaa

SEQ ID NO: 106923 - RNA, 19 nt, Artificial Sequence
  Description of Artificial Sequence: Synthetic oligonucleotide
cacacggacuacaggggag

SEQ ID NO: 106924 - RNA, 19 nt, Artificial Sequence
  Description of Artificial Sequence: Synthetic oligonucleotide
guuuuguugaaguugcaaa

SEQ ID NO: 106925 - RNA, 19 nt, Artificial Sequence
  Description of Artificial Sequence: Synthetic oligonucleotide
aguccuggagccuccagag

SEQ ID NO: 106926 - RNA, 19 nt, Artificial Sequence
  Description of Artificial Sequence: Synthetic oligonucleotide
gggcugucggcgcaguagc

SEQ ID NO: 106927 - RNA, 19 nt, Artificial Sequence
  Description of Artificial Sequence: Synthetic oligonucleotide
cagcgagcagcagaguccg

SEQ ID NO: 106928 - RNA, 19 nt, Artificial Sequence
  Description of Artificial Sequence: Synthetic oligonucleotide
gcacgcuccggcgaggggc

SEQ ID NO: 106929 - RNA, 19 nt, Artificial Sequence
  Description of Artificial Sequence: Synthetic oligonucleotide
cagaagagcgcgagggagc

SEQ ID NO: 106930 - RNA, 19 nt, Artificial Sequence
  Description of Artificial Sequence: Synthetic oligonucleotide
cgcggggcagcagaagcga

SEQ ID NO: 106931 - RNA, 19 nt, Artificial Sequence
  Description of Artificial Sequence: Synthetic oligonucleotide
agagccgagcgcggaccca

SEQ ID NO: 106932 - RNA, 19 nt, Artificial Sequence
  Description of Artificial Sequence: Synthetic oligonucleotide
agccaggacccacagcccu

SEQ ID NO: 106933 - RNA, 19 nt, Artificial Sequence
  Description of Artificial Sequence: Synthetic oligonucleotide
uccccagcugcccaggaag

SEQ ID NO: 106934 - RNA, 19 nt, Artificial Sequence
  Description of Artificial Sequence: Synthetic oligonucleotide
gagccccagccauggaaca

SEQ ID NO: 106935 - RNA, 19 nt, Artificial Sequence
  Description of Artificial Sequence: Synthetic oligonucleotide
accagcuccugugcugcga

SEQ ID NO: 106936 - RNA, 19 nt, Artificial Sequence
  Description of Artificial Sequence: Synthetic oligonucleotide
aaguggaaaccauccgccg

SEQ ID NO: 106937 - RNA, 19 nt, Artificial Sequence
  Description of Artificial Sequence: Synthetic oligonucleotide
gcgcguaccccgaugccaa

SEQ ID NO: 106938 - RNA, 19 nt, Artificial Sequence
  Description of Artificial Sequence: Synthetic oligonucleotide
accuccucaacgaccgggu

SEQ ID NO: 106939 - RNA, 19 nt, Artificial Sequence
  Description of Artificial Sequence: Synthetic oligonucleotide
ugcugcgggccaugcugaa

SEQ ID NO: 106940 - RNA, 19 nt, Artificial Sequence
  Description of Artificial Sequence: Synthetic oligonucleotide
aggcggaggagaccugcgc

SEQ ID NO: 106941 - RNA, 19 nt, Artificial Sequence
  Description of Artificial Sequence: Synthetic oligonucleotide
cgcccucgguguccuacuu

SEQ ID NO: 106942 - RNA, 19 nt, Artificial Sequence
  Description of Artificial Sequence: Synthetic oligonucleotide
ucaaaugugugcagaagga

SEQ ID NO: 106943 - RNA, 19 nt, Artificial Sequence
  Description of Artificial Sequence: Synthetic oligonucleotide
agguccugccguccaugcg

SEQ ID NO: 106944 - RNA, 19 nt, Artificial Sequence
  Description of Artificial Sequence: Synthetic oligonucleotide
ggaagaucgucgccaccug

SEQ ID NO: 106945 - RNA, 19 nt, Artificial Sequence
  Description of Artificial Sequence: Synthetic oligonucleotide
ggaugcuggaggucugcga

SEQ ID NO: 106946 - RNA, 19 nt, Artificial Sequence
  Description of Artificial Sequence: Synthetic oligonucleotide
aggaacagaagugcgagga

SEQ ID NO: 106947 - RNA, 19 nt, Artificial Sequence
  Description of Artificial Sequence: Synthetic oligonucleotide
aggaggucuucccgcuggc

SEQ ID NO: 106948 - RNA, 19 nt, Artificial Sequence
  Description of Artificial Sequence: Synthetic oligonucleotide
ccaugaacuaccuggaccg

SEQ ID NO: 106949 - RNA, 19 nt, Artificial Sequence
  Description of Artificial Sequence: Synthetic oligonucleotide
gcuuccugucgcuggagcc

SEQ ID NO: 106950 - RNA, 19 nt, Artificial Sequence
  Description of Artificial Sequence: Synthetic oligonucleotide
ccgugaaaaagagccgccu

SEQ ID NO: 106951 - RNA, 19 nt, Artificial Sequence
  Description of Artificial Sequence: Synthetic oligonucleotide
ugcagcugcugggggccac

SEQ ID NO: 106952 - RNA, 19 nt, Artificial Sequence
  Description of Artificial Sequence: Synthetic oligonucleotide
cuugcauguucguggccuc

SEQ ID NO: 106953 - RNA, 19 nt, Artificial Sequence
  Description of Artificial Sequence: Synthetic oligonucleotide
cuaagaugaaggagaccau

SEQ ID NO: 106954 - RNA, 19 nt, Artificial Sequence
  Description of Artificial Sequence: Synthetic oligonucleotide
ucccccugacggccgagaa

SEQ ID NO: 106955 - RNA, 19 nt, Artificial Sequence
  Description of Artificial Sequence: Synthetic oligonucleotide
agcugugcaucuacaccga

SEQ ID NO: 106956 - RNA, 19 nt, Artificial Sequence
  Description of Artificial Sequence: Synthetic oligonucleotide
acaacuccauccggcccga

SEQ ID NO: 106957 - RNA, 19 nt, Artificial Sequence
  Description of Artificial Sequence: Synthetic oligonucleotide
aggagcugcugcaaaugga

SEQ ID NO: 106958 - RNA, 19 nt, Artificial Sequence
  Description of Artificial Sequence: Synthetic oligonucleotide
agcugcuccuggugaacaa

SEQ ID NO: 106959 - RNA, 19 nt, Artificial Sequence
  Description of Artificial Sequence: Synthetic oligonucleotide
agcucaaguggaaccuggc

SEQ ID NO: 106960 - RNA, 19 nt, Artificial Sequence
  Description of Artificial Sequence: Synthetic oligonucleotide
ccgcaaugaccccgcacga

SEQ ID NO: 106961 - RNA, 19 nt, Artificial Sequence
  Description of Artificial Sequence: Synthetic oligonucleotide
auuucauugaacacuuccu

SEQ ID NO: 106962 - RNA, 19 nt, Artificial Sequence
  Description of Artificial Sequence: Synthetic oligonucleotide
ucuccaaaaugccagaggc

SEQ ID NO: 106963 - RNA, 19 nt, Artificial Sequence
  Description of Artificial Sequence: Synthetic oligonucleotide
cggaggagaacaaacagau

SEQ ID NO: 106964 - RNA, 19 nt, Artificial Sequence
  Description of Artificial Sequence: Synthetic oligonucleotide
ucauccgcaaacacgcgca

SEQ ID NO: 106965 - RNA, 19 nt, Artificial Sequence
  Description of Artificial Sequence: Synthetic oligonucleotide
agaccuucguugcccucug

SEQ ID NO: 106966 - RNA, 19 nt, Artificial Sequence
  Description of Artificial Sequence: Synthetic oligonucleotide
gugccacagaugugaaguu

SEQ ID NO: 106967 - RNA, 19 nt, Artificial Sequence
  Description of Artificial Sequence: Synthetic oligonucleotide
ucauuuccaauccgcccuc

SEQ ID NO: 106968 - RNA, 19 nt, Artificial Sequence
  Description of Artificial Sequence: Synthetic oligonucleotide
ccaugguggcagcggggag

SEQ ID NO: 106969 - RNA, 19 nt, Artificial Sequence
  Description of Artificial Sequence: Synthetic oligonucleotide
gcgugguggccgcagugca

SEQ ID NO: 106970 - RNA, 19 nt, Artificial Sequence
  Description of Artificial Sequence: Synthetic oligonucleotide
aaggccugaaccugaggag

SEQ ID NO: 106971 - RNA, 19 nt, Artificial Sequence
  Description of Artificial Sequence: Synthetic oligonucleotide
gccccaacaacuuccuguc

SEQ ID NO: 106972 - RNA, 19 nt, Artificial Sequence
  Description of Artificial Sequence: Synthetic oligonucleotide
ccuacuaccgccucacacg

SEQ ID NO: 106973 - RNA, 19 nt, Artificial Sequence
  Description of Artificial Sequence: Synthetic oligonucleotide
gcuuccucuccagagugau

SEQ ID NO: 106974 - RNA, 19 nt, Artificial Sequence
  Description of Artificial Sequence: Synthetic oligonucleotide
ucaagugugacccggacug

SEQ ID NO: 106975 - RNA, 19 nt, Artificial Sequence
  Description of Artificial Sequence: Synthetic oligonucleotide
gccuccgggccugccagga

SEQ ID NO: 106976 - RNA, 19 nt, Artificial Sequence
  Description of Artificial Sequence: Synthetic oligonucleotide
agcagaucgaagcccugcu

SEQ ID NO: 106977 - RNA, 19 nt, Artificial Sequence
  Description of Artificial Sequence: Synthetic oligonucleotide
uggagucaagccugcgcca

SEQ ID NO: 106978 - RNA, 19 nt, Artificial Sequence
  Description of Artificial Sequence: Synthetic oligonucleotide
aggcccagcagaacaugga

SEQ ID NO: 106979 - RNA, 19 nt, Artificial Sequence
  Description of Artificial Sequence: Synthetic oligonucleotide
accccaaggccgccgagga

SEQ ID NO: 106980 - RNA, 19 nt, Artificial Sequence
  Description of Artificial Sequence: Synthetic oligonucleotide
aggaggaagaggaggagga

SEQ ID NO: 106981 - RNA, 19 nt, Artificial Sequence
  Description of Artificial Sequence: Synthetic oligonucleotide
aggagguggaccuggcuug

SEQ ID NO: 106982 - RNA, 19 nt, Artificial Sequence
  Description of Artificial Sequence: Synthetic oligonucleotide
gcacacccaccgacgugcg

SEQ ID NO: 106983 - RNA, 19 nt, Artificial Sequence
  Description of Artificial Sequence: Synthetic oligonucleotide
gggacguggacaucugagg

SEQ ID NO: 106984 - RNA, 19 nt, Artificial Sequence
  Description of Artificial Sequence: Synthetic oligonucleotide
ggcgccaggcaggcgggcg

SEQ ID NO: 106985 - RNA, 19 nt, Artificial Sequence
  Description of Artificial Sequence: Synthetic oligonucleotide
gccaccgccacccgcagcg

SEQ ID NO: 106986 - RNA, 19 nt, Artificial Sequence
  Description of Artificial Sequence: Synthetic oligonucleotide
gagggcggagccggcccca

SEQ ID NO: 106987 - RNA, 19 nt, Artificial Sequence
  Description of Artificial Sequence: Synthetic oligonucleotide
aggugcuccccugacaguc

SEQ ID NO: 106988 - RNA, 19 nt, Artificial Sequence
  Description of Artificial Sequence: Synthetic oligonucleotide
cccuccucuccggagcauu

SEQ ID NO: 106989 - RNA, 19 nt, Artificial Sequence
  Description of Artificial Sequence: Synthetic oligonucleotide
uuugauaccagaagggaaa

SEQ ID NO: 106990 - RNA, 19 nt, Artificial Sequence
  Description of Artificial Sequence: Synthetic oligonucleotide
agcuucauucuccuuguug

SEQ ID NO: 106991 - RNA, 19 nt, Artificial Sequence
  Description of Artificial Sequence: Synthetic oligonucleotide
guugguuguuuuuuccuuu

SEQ ID NO: 106992 - RNA, 19 nt, Artificial Sequence
  Description of Artificial Sequence: Synthetic oligonucleotide
ugcucuuucccccuuccau

SEQ ID NO: 106993 - RNA, 19 nt, Artificial Sequence
  Description of Artificial Sequence: Synthetic oligonucleotide
ucucugacuuaagcaaaag

SEQ ID NO: 106994 - RNA, 19 nt, Artificial Sequence
  Description of Artificial Sequence: Synthetic oligonucleotide
gaaaaagauuacccaaaaa

SEQ ID NO: 106995 - RNA, 19 nt, Artificial Sequence
  Description of Artificial Sequence: Synthetic oligonucleotide
acugucuuuaaaagagaga

SEQ ID NO: 106996 - RNA, 19 nt, Artificial Sequence
  Description of Artificial Sequence: Synthetic oligonucleotide
guauuugcauaacccugag

SEQ ID NO: 106997 - RNA, 19 nt, Artificial Sequence
  Description of Artificial Sequence: Synthetic oligonucleotide
gcggugggggaggaggguu

SEQ ID NO: 106998 - RNA, 19 nt, Artificial Sequence
  Description of Artificial Sequence: Synthetic oligonucleotide
ugugcuacagaugauagag

SEQ ID NO: 106999 - RNA, 19 nt, Artificial Sequence
  Description of Artificial Sequence: Synthetic oligonucleotide
ggauuuuauaccccaauaa

SEQ ID NO: 107000 - RNA, 19 nt, Artificial Sequence
  Description of Artificial Sequence: Synthetic oligonucleotide
aucaacucguuuuuauauu

SEQ ID NO: 107001 - RNA, 19 nt, Artificial Sequence
  Description of Artificial Sequence: Synthetic oligonucleotide
uaauguacuuguuucucug

SEQ ID NO: 107002 - RNA, 19 nt, Artificial Sequence
  Description of Artificial Sequence: Synthetic oligonucleotide
guuguaagaauaggcauua

SEQ ID NO: 107003 - RNA, 19 nt, Artificial Sequence
  Description of Artificial Sequence: Synthetic oligonucleotide
aacacaaaggaggcgucuc

SEQ ID NO: 107004 - RNA, 19 nt, Artificial Sequence
  Description of Artificial Sequence: Synthetic oligonucleotide
cgggagaggauuagguucc

SEQ ID NO: 107005 - RNA, 19 nt, Artificial Sequence
  Description of Artificial Sequence: Synthetic oligonucleotide
cauccuuuacguguuuaaa

SEQ ID NO: 107006 - RNA, 19 nt, Artificial Sequence
  Description of Artificial Sequence: Synthetic oligonucleotide
aaaaaagcauaaaaacauu

SEQ ID NO: 107007 - RNA, 19 nt, Artificial Sequence
  Description of Artificial Sequence: Synthetic oligonucleotide
uuuaaaaacauagaaaaau

SEQ ID NO: 107008 - RNA, 19 nt, Artificial Sequence
  Description of Artificial Sequence: Synthetic oligonucleotide
uucagcaaaccauuuuuaa

SEQ ID NO: 107009 - RNA, 19 nt, Artificial Sequence
  Description of Artificial Sequence: Synthetic oligonucleotide
aaguagaagaggguuuuag

SEQ ID NO: 107010 - RNA, 19 nt, Artificial Sequence
  Description of Artificial Sequence: Synthetic oligonucleotide
gguagaaaaacauauucuu

SEQ ID NO: 107011 - RNA, 19 nt, Artificial Sequence
  Description of Artificial Sequence: Synthetic oligonucleotide
ugugcuuuuccugauaaag

SEQ ID NO: 107012 - RNA, 19 nt, Artificial Sequence
  Description of Artificial Sequence: Synthetic oligonucleotide
gcacagcuguagugggguu

SEQ ID NO: 107013 - RNA, 19 nt, Artificial Sequence
  Description of Artificial Sequence: Synthetic oligonucleotide
ucuaggcaucucuguacuu

SEQ ID NO: 107014 - RNA, 19 nt, Artificial Sequence
  Description of Artificial Sequence: Synthetic oligonucleotide
uugcuugcucauaugcaug

SEQ ID NO: 107015 - RNA, 19 nt, Artificial Sequence
  Description of Artificial Sequence: Synthetic oligonucleotide
guagucacuuuauaaguca

SEQ ID NO: 107016 - RNA, 19 nt, Artificial Sequence
  Description of Artificial Sequence: Synthetic oligonucleotide
auuguauguuauuauauuc

SEQ ID NO: 107017 - RNA, 19 nt, Artificial Sequence
  Description of Artificial Sequence: Synthetic oligonucleotide
ccguagguagauguguaac

SEQ ID NO: 107018 - RNA, 19 nt, Artificial Sequence
  Description of Artificial Sequence: Synthetic oligonucleotide
ccucuucaccuuauucaug

SEQ ID NO: 107019 - RNA, 19 nt, Artificial Sequence
  Description of Artificial Sequence: Synthetic oligonucleotide
ggcugaagucaccucuugg

SEQ ID NO: 107020 - RNA, 19 nt, Artificial Sequence
  Description of Artificial Sequence: Synthetic oligonucleotide
guuacaguagcguagcgug

SEQ ID NO: 107021 - RNA, 19 nt, Artificial Sequence
  Description of Artificial Sequence: Synthetic oligonucleotide
gcccgugugcauguccuuu

SEQ ID NO: 107022 - RNA, 19 nt, Artificial Sequence
  Description of Artificial Sequence: Synthetic oligonucleotide
ugcgccugugaccaccacc

SEQ ID NO: 107023 - RNA, 19 nt, Artificial Sequence
  Description of Artificial Sequence: Synthetic oligonucleotide
cccaacaaaccauccagug

SEQ ID NO: 107024 - RNA, 19 nt, Artificial Sequence
  Description of Artificial Sequence: Synthetic oligonucleotide
gacaaaccauccaguggag

SEQ ID NO: 107025 - RNA, 19 nt, Artificial Sequence
  Description of Artificial Sequence: Synthetic oligonucleotide
gguuugucgggcaccagcc

SEQ ID NO: 107026 - RNA, 19 nt, Artificial Sequence
  Description of Artificial Sequence: Synthetic oligonucleotide
cagcguagcagggucggga

SEQ ID NO: 107027 - RNA, 19 nt, Artificial Sequence
  Description of Artificial Sequence: Synthetic oligonucleotide
aaaggccaccugucccacu

SEQ ID NO: 107028 - RNA, 19 nt, Artificial Sequence
  Description of Artificial Sequence: Synthetic oligonucleotide
uccuacgauacgcuacuau

SEQ ID NO: 107029 - RNA, 19 nt, Artificial Sequence
  Description of Artificial Sequence: Synthetic oligonucleotide
uaaagagaagacgaaauag

SEQ ID NO: 107030 - RNA, 19 nt, Artificial Sequence
  Description of Artificial Sequence: Synthetic oligonucleotide
gugacauaauauauucuau

SEQ ID NO: 107031 - RNA, 19 nt, Artificial Sequence
  Description of Artificial Sequence: Synthetic oligonucleotide
uuuuuauacucuuccuauu

SEQ ID NO: 107032 - RNA, 19 nt, Artificial Sequence
  Description of Artificial Sequence: Synthetic oligonucleotide
uuuuguagugaccuguuua

SEQ ID NO: 107033 - RNA, 19 nt, Artificial Sequence
  Description of Artificial Sequence: Synthetic oligonucleotide
augagaugcugguuuucua

SEQ ID NO: 107034 - RNA, 19 nt, Artificial Sequence
  Description of Artificial Sequence: Synthetic oligonucleotide
acccaacggcccugcagcc

SEQ ID NO: 107035 - RNA, 19 nt, Artificial Sequence
  Description of Artificial Sequence: Synthetic oligonucleotide
cagcucacguccagguuca

SEQ ID NO: 107036 - RNA, 19 nt, Artificial Sequence
  Description of Artificial Sequence: Synthetic oligonucleotide
aacccacagcuacuugguu

SEQ ID NO: 107037 - RNA, 19 nt, Artificial Sequence
  Description of Artificial Sequence: Synthetic oligonucleotide
uuguguucuucuucauauu

SEQ ID NO: 107038 - RNA, 19 nt, Artificial Sequence
  Description of Artificial Sequence: Synthetic oligonucleotide
ucuaaaaccauuccauuuc

SEQ ID NO: 107039 - RNA, 19 nt, Artificial Sequence
  Description of Artificial Sequence: Synthetic oligonucleotide
ccaagcacuuucaguccaa

SEQ ID NO: 107040 - RNA, 19 nt, Artificial Sequence
  Description of Artificial Sequence: Synthetic oligonucleotide
auagguguaggaaauagcg

SEQ ID NO: 107041 - RNA, 19 nt, Artificial Sequence
  Description of Artificial Sequence: Synthetic oligonucleotide
gcuguuuuuguugugugug

SEQ ID NO: 107042 - RNA, 19 nt, Artificial Sequence
  Description of Artificial Sequence: Synthetic oligonucleotide
gcagggagggcaguuuucu

SEQ ID NO: 107043 - RNA, 19 nt, Artificial Sequence
  Description of Artificial Sequence: Synthetic oligonucleotide
uaauggaaugguuugggaa

SEQ ID NO: 107044 - RNA, 19 nt, Artificial Sequence
  Description of Artificial Sequence: Synthetic oligonucleotide
auauccauguacuuguuug

SEQ ID NO: 107045 - RNA, 19 nt, Artificial Sequence
  Description of Artificial Sequence: Synthetic oligonucleotide
gcaagcaggacuuugaggc

SEQ ID NO: 107046 - RNA, 19 nt, Artificial Sequence
  Description of Artificial Sequence: Synthetic oligonucleotide
caagugugggccacugugg

SEQ ID NO: 107047 - RNA, 19 nt, Artificial Sequence
  Description of Artificial Sequence: Synthetic oligonucleotide
guggcaguggagguggggu

SEQ ID NO: 107048 - RNA, 19 nt, Artificial Sequence
  Description of Artificial Sequence: Synthetic oligonucleotide
uguuugggaggcugcgugc

SEQ ID NO: 107049 - RNA, 19 nt, Artificial Sequence
  Description of Artificial Sequence: Synthetic oligonucleotide
ccagucaagaagaaaaagg

SEQ ID NO: 107050 - RNA, 19 nt, Artificial Sequence
  Description of Artificial Sequence: Synthetic oligonucleotide
guuugcauucucacauugc

SEQ ID NO: 107051 - RNA, 19 nt, Artificial Sequence
  Description of Artificial Sequence: Synthetic oligonucleotide
ccaggaugauaaguuccuu

SEQ ID NO: 107052 - RNA, 19 nt, Artificial Sequence
  Description of Artificial Sequence: Synthetic oligonucleotide
uuccuuuucuuuaaagaag

SEQ ID NO: 107053 - RNA, 19 nt, Artificial Sequence
  Description of Artificial Sequence: Synthetic oligonucleotide
guugaaguuuaggaauccu

SEQ ID NO: 107054 - RNA, 19 nt, Artificial Sequence
  Description of Artificial Sequence: Synthetic oligonucleotide
uuuggugccaacugguguu

SEQ ID NO: 107055 - RNA, 19 nt, Artificial Sequence
  Description of Artificial Sequence: Synthetic oligonucleotide
uugaaaguagggaccucag

SEQ ID NO: 107056 - RNA, 19 nt, Artificial Sequence
  Description of Artificial Sequence: Synthetic oligonucleotide
gagguuuaccuagagaaca

SEQ ID NO: 107057 - RNA, 19 nt, Artificial Sequence
  Description of Artificial Sequence: Synthetic oligonucleotide
aggugguuuuuaaggguua

SEQ ID NO: 107058 - RNA, 19 nt, Artificial Sequence
  Description of Artificial Sequence: Synthetic oligonucleotide
aucuuagauguuucacacc

SEQ ID NO: 107059 - RNA, 19 nt, Artificial Sequence
  Description of Artificial Sequence: Synthetic oligonucleotide
cggaagguuuuuaaacacu

SEQ ID NO: 107060 - RNA, 19 nt, Artificial Sequence
  Description of Artificial Sequence: Synthetic oligonucleotide
uaaaauauauaauuuauag

SEQ ID NO: 107061 - RNA, 19 nt, Artificial Sequence
  Description of Artificial Sequence: Synthetic oligonucleotide
guuaaggcuaaaaaguaua

SEQ ID NO: 107062 - RNA, 19 nt, Artificial Sequence
  Description of Artificial Sequence: Synthetic oligonucleotide
auuuauugcagaggauguu

SEQ ID NO: 107063 - RNA, 19 nt, Artificial Sequence
  Description of Artificial Sequence: Synthetic oligonucleotide
ucauaaggccaguaugauu

SEQ ID NO: 107064 - RNA, 19 nt, Artificial Sequence
  Description of Artificial Sequence: Synthetic oligonucleotide
uuauaaaugcaaucucccc

SEQ ID NO: 107065 - RNA, 19 nt, Artificial Sequence
  Description of Artificial Sequence: Synthetic oligonucleotide
cuugauuuaaacacacaga

SEQ ID NO: 107066 - RNA, 19 nt, Artificial Sequence
  Description of Artificial Sequence: Synthetic oligonucleotide
auacacacacacacacaca

SEQ ID NO: 107067 - RNA, 19 nt, Artificial Sequence
  Description of Artificial Sequence: Synthetic oligonucleotide
acacacacaaaccuucugc

SEQ ID NO: 107068 - RNA, 19 nt, Artificial Sequence
  Description of Artificial Sequence: Synthetic oligonucleotide
ccuuugauguuacagauuu

SEQ ID NO: 107069 - RNA, 19 nt, Artificial Sequence
  Description of Artificial Sequence: Synthetic oligonucleotide
uaauacaguuuauuuuuaa

SEQ ID NO: 107070 - RNA, 19 nt, Artificial Sequence
  Description of Artificial Sequence: Synthetic oligonucleotide
aagauagauccuuuuauag

SEQ ID NO: 107071 - RNA, 19 nt, Artificial Sequence
  Description of Artificial Sequence: Synthetic oligonucleotide
ggugagaaaaaaacaaucu

SEQ ID NO: 107072 - RNA, 19 nt, Artificial Sequence
  Description of Artificial Sequence: Synthetic oligonucleotide
uggaagaaaaaaaccacac

SEQ ID NO: 107073 - RNA, 19 nt, Artificial Sequence
  Description of Artificial Sequence: Synthetic oligonucleotide
caaagacauugauucagcc

SEQ ID NO: 107074 - RNA, 19 nt, Artificial Sequence
  Description of Artificial Sequence: Synthetic oligonucleotide
cuguuuggcguuucccaga

SEQ ID NO: 107075 - RNA, 19 nt, Artificial Sequence
  Description of Artificial Sequence: Synthetic oligonucleotide
agucaucugauuggacagg

SEQ ID NO: 107076 - RNA, 19 nt, Artificial Sequence
  Description of Artificial Sequence: Synthetic oligonucleotide
gcaugggugcaaggaaaau

SEQ ID NO: 107077 - RNA, 19 nt, Artificial Sequence
  Description of Artificial Sequence: Synthetic oligonucleotide
uuaggguacucaaccuaag

SEQ ID NO: 107078 - RNA, 19 nt, Artificial Sequence
  Description of Artificial Sequence: Synthetic oligonucleotide
guucgguuccgaugaauuc

SEQ ID NO: 107079 - RNA, 19 nt, Artificial Sequence
  Description of Artificial Sequence: Synthetic oligonucleotide
cuuauccccugccccuucc

SEQ ID NO: 107080 - RNA, 19 nt, Artificial Sequence
  Description of Artificial Sequence: Synthetic oligonucleotide
cuuuaaaaaacuuagugac

SEQ ID NO: 107081 - RNA, 19 nt, Artificial Sequence
  Description of Artificial Sequence: Synthetic oligonucleotide
caaaauagacaauuugcac

SEQ ID NO: 107082 - RNA, 19 nt, Artificial Sequence
  Description of Artificial Sequence: Synthetic oligonucleotide
caucuuggcuauguaauuc

SEQ ID NO: 107083 - RNA, 19 nt, Artificial Sequence
  Description of Artificial Sequence: Synthetic oligonucleotide
cuuguaauuuuuauuuagg

SEQ ID NO: 107084 - RNA, 19 nt, Artificial Sequence
  Description of Artificial Sequence: Synthetic oligonucleotide
gaaguguugaagggaggug

SEQ ID NO: 107085 - RNA, 19 nt, Artificial Sequence
  Description of Artificial Sequence: Synthetic oligonucleotide
ggcaagaguguggaggcug

SEQ ID NO: 107086 - RNA, 19 nt, Artificial Sequence
  Description of Artificial Sequence: Synthetic oligonucleotide
gacgugugagggaggacag

SEQ ID NO: 107087 - RNA, 19 nt, Artificial Sequence
  Description of Artificial Sequence: Synthetic oligonucleotide
ggcgggaggaggugugagg

SEQ ID NO: 107088 - RNA, 19 nt, Artificial Sequence
  Description of Artificial Sequence: Synthetic oligonucleotide
gaggaggcucccgagggga

SEQ ID NO: 107089 - RNA, 19 nt, Artificial Sequence
  Description of Artificial Sequence: Synthetic oligonucleotide
aaggggcggugcccacacc

SEQ ID NO: 107090 - RNA, 19 nt, Artificial Sequence
  Description of Artificial Sequence: Synthetic oligonucleotide
cggggacaggccgcagcuc

SEQ ID NO: 107091 - RNA, 19 nt, Artificial Sequence
  Description of Artificial Sequence: Synthetic oligonucleotide
ccauuuucuuauugcgcug

SEQ ID NO: 107092 - RNA, 19 nt, Artificial Sequence
  Description of Artificial Sequence: Synthetic oligonucleotide
gcuaccguugacuuccagg

SEQ ID NO: 107093 - RNA, 19 nt, Artificial Sequence
  Description of Artificial Sequence: Synthetic oligonucleotide
gcacgguuuggaaauauuc

SEQ ID NO: 107094 - RNA, 19 nt, Artificial Sequence
  Description of Artificial Sequence: Synthetic oligonucleotide
cacaucgcuucuguguauc

SEQ ID NO: 107095 - RNA, 19 nt, Artificial Sequence
  Description of Artificial Sequence: Synthetic oligonucleotide
cucuuucacauuguuugcu

SEQ ID NO: 107096 - RNA, 19 nt, Artificial Sequence
  Description of Artificial Sequence: Synthetic oligonucleotide
ugcuauuggaggaucaguu

SEQ ID NO: 107097 - RNA, 19 nt, Artificial Sequence
  Description of Artificial Sequence: Synthetic oligonucleotide
uuuuuguuuuacaauguca

SEQ ID NO: 107098 - RNA, 19 nt, Artificial Sequence
  Description of Artificial Sequence: Synthetic oligonucleotide
auauacugccauguacuag

SEQ ID NO: 107099 - RNA, 19 nt, Artificial Sequence
  Description of Artificial Sequence: Synthetic oligonucleotide
guuuuaguuuucucuuaga

SEQ ID NO: 107100 - RNA, 19 nt, Artificial Sequence
  Description of Artificial Sequence: Synthetic oligonucleotide
aacauuguauuacagaugc

SEQ ID NO: 107101 - RNA, 19 nt, Artificial Sequence
  Description of Artificial Sequence: Synthetic oligonucleotide
ccuuuuuuguaguuuuuuu

SEQ ID NO: 107102 - RNA, 19 nt, Artificial Sequence
  Description of Artificial Sequence: Synthetic oligonucleotide
uuuuuuuuaugugaucaau

SEQ ID NO: 107103 - RNA, 19 nt, Artificial Sequence
  Description of Artificial Sequence: Synthetic oligonucleotide
uuuugacuuaaugugauua

SEQ ID NO: 107104 - RNA, 19 nt, Artificial Sequence
  Description of Artificial Sequence: Synthetic oligonucleotide
acugcucuauuccaaaaag

SEQ ID NO: 107105 - RNA, 19 nt, Artificial Sequence
  Description of Artificial Sequence: Synthetic oligonucleotide
gguugcuguuucacaauac

SEQ ID NO: 107106 - RNA, 19 nt, Artificial Sequence
  Description of Artificial Sequence: Synthetic oligonucleotide
ccucaugcuucacuuagcc

SEQ ID NO: 107107 - RNA, 19 nt, Artificial Sequence
  Description of Artificial Sequence: Synthetic oligonucleotide
caugguggacccagcgggc

SEQ ID NO: 107108 - RNA, 19 nt, Artificial Sequence
  Description of Artificial Sequence: Synthetic oligonucleotide
cagguucugccugcuuugg

SEQ ID NO: 107109 - RNA, 19 nt, Artificial Sequence
  Description of Artificial Sequence: Synthetic oligonucleotide
gcgggcagacacgcgggcg

SEQ ID NO: 107110 - RNA, 19 nt, Artificial Sequence
  Description of Artificial Sequence: Synthetic oligonucleotide
gcgaucccacacaggcugg

SEQ ID NO: 107111 - RNA, 19 nt, Artificial Sequence
  Description of Artificial Sequence: Synthetic oligonucleotide
gcgggggccggccccgagg

SEQ ID NO: 107112 - RNA, 19 nt, Artificial Sequence
  Description of Artificial Sequence: Synthetic oligonucleotide
gccgcgugcgugagaaccg

SEQ ID NO: 107113 - RNA, 19 nt, Artificial Sequence
  Description of Artificial Sequence: Synthetic oligonucleotide
gcgccgguguccccagaga

SEQ ID NO: 107114 - RNA, 19 nt, Artificial Sequence
  Description of Artificial Sequence: Synthetic oligonucleotide
accaggcugugucccucuu

SEQ ID NO: 107115 - RNA, 19 nt, Artificial Sequence
  Description of Artificial Sequence: Synthetic oligonucleotide
ucucuucccugcgccugug

SEQ ID NO: 107116 - RNA, 19 nt, Artificial Sequence
  Description of Artificial Sequence: Synthetic oligonucleotide
gaugcugggcacuucaucu

SEQ ID NO: 107117 - RNA, 19 nt, Artificial Sequence
  Description of Artificial Sequence: Synthetic oligonucleotide
ugaucgggggcguagcauc

SEQ ID NO: 107118 - RNA, 19 nt, Artificial Sequence
  Description of Artificial Sequence: Synthetic oligonucleotide
cauaguaguuuuuacagcu

SEQ ID NO: 107119 - RNA, 19 nt, Artificial Sequence
  Description of Artificial Sequence: Synthetic oligonucleotide
uguguuauucuuugcgugu

SEQ ID NO: 107120 - RNA, 19 nt, Artificial Sequence
  Description of Artificial Sequence: Synthetic oligonucleotide
uagcuauggaaguugcaua

SEQ ID NO: 107121 - RNA, 19 nt, Artificial Sequence
  Description of Artificial Sequence: Synthetic oligonucleotide
aauuauuauuauuauuauu

SEQ ID NO: 107122 - RNA, 19 nt, Artificial Sequence
  Description of Artificial Sequence: Synthetic oligonucleotide
uauaacaagugugucuuac

SEQ ID NO: 107123 - RNA, 19 nt, Artificial Sequence
  Description of Artificial Sequence: Synthetic oligonucleotide
cgugccaccacggcguugu

SEQ ID NO: 107124 - RNA, 19 nt, Artificial Sequence
  Description of Artificial Sequence: Synthetic oligonucleotide
uaccuguaggacucucauu

SEQ ID NO: 107125 - RNA, 19 nt, Artificial Sequence
  Description of Artificial Sequence: Synthetic oligonucleotide
ucgggaugauuggaauagc

SEQ ID NO: 107126 - RNA, 19 nt, Artificial Sequence
  Description of Artificial Sequence: Synthetic oligonucleotide
cuucuggaauuuguucaag

SEQ ID NO: 107127 - RNA, 19 nt, Artificial Sequence
  Description of Artificial Sequence: Synthetic oligonucleotide
guuuuggguauguuuaauc

SEQ ID NO: 107128 - RNA, 19 nt, Artificial Sequence
  Description of Artificial Sequence: Synthetic oligonucleotide
cuguuauguacuaguguuc

SEQ ID NO: 107129 - RNA, 19 nt, Artificial Sequence
  Description of Artificial Sequence: Synthetic oligonucleotide
cuguuuguuauuguuuugu

SEQ ID NO: 107130 - RNA, 19 nt, Artificial Sequence
  Description of Artificial Sequence: Synthetic oligonucleotide
uuaauuacaccauaaugcu

SEQ ID NO: 107131 - RNA, 19 nt, Artificial Sequence
  Description of Artificial Sequence: Synthetic oligonucleotide
uaauuuaaagagacuccaa

SEQ ID NO: 107132 - RNA, 19 nt, Artificial Sequence
  Description of Artificial Sequence: Synthetic oligonucleotide
aaucucaaugaagccagcu

SEQ ID NO: 107133 - RNA, 19 nt, Artificial Sequence
  Description of Artificial Sequence: Synthetic oligonucleotide
ucacagugcugugugcccc

SEQ ID NO: 107134 - RNA, 19 nt, Artificial Sequence
  Description of Artificial Sequence: Synthetic oligonucleotide
cggucaccuagcaagcugc

SEQ ID NO: 107135 - RNA, 19 nt, Artificial Sequence
  Description of Artificial Sequence: Synthetic oligonucleotide
ccgaaccaaaagaauuugc

SEQ ID NO: 107136 - RNA, 19 nt, Artificial Sequence
  Description of Artificial Sequence: Synthetic oligonucleotide
caccccgcugcgggcccac

SEQ ID NO: 107137 - RNA, 19 nt, Artificial Sequence
  Description of Artificial Sequence: Synthetic oligonucleotide
cgugguuggggcccugccc

SEQ ID NO: 107138 - RNA, 19 nt, Artificial Sequence
  Description of Artificial Sequence: Synthetic oligonucleotide
cuggcagggucauccugug

SEQ ID NO: 107139 - RNA, 19 nt, Artificial Sequence
  Description of Artificial Sequence: Synthetic oligonucleotide
gcucggaggccaucucggg

SEQ ID NO: 107140 - RNA, 19 nt, Artificial Sequence
  Description of Artificial Sequence: Synthetic oligonucleotide
gcacaggcccaccccgccc

SEQ ID NO: 107141 - RNA, 19 nt, Artificial Sequence
  Description of Artificial Sequence: Synthetic oligonucleotide
ccaccccuccagaacacgg

SEQ ID NO: 107142 - RNA, 19 nt, Artificial Sequence
  Description of Artificial Sequence: Synthetic oligonucleotide
gcucacgcuuaccucaacc

SEQ ID NO: 107143 - RNA, 19 nt, Artificial Sequence
  Description of Artificial Sequence: Synthetic oligonucleotide
cauccuggcugcggcgucu

SEQ ID NO: 107144 - RNA, 19 nt, Artificial Sequence
  Description of Artificial Sequence: Synthetic oligonucleotide
ugucugaaccacgcggggg

SEQ ID NO: 107145 - RNA, 19 nt, Artificial Sequence
  Description of Artificial Sequence: Synthetic oligonucleotide
gccuugagggacgcuuugu

SEQ ID NO: 107146 - RNA, 19 nt, Artificial Sequence
  Description of Artificial Sequence: Synthetic oligonucleotide
ucugucgugauggggcaag

SEQ ID NO: 107147 - RNA, 19 nt, Artificial Sequence
  Description of Artificial Sequence: Synthetic oligonucleotide
gggcacaaguccuggaugu

SEQ ID NO: 107148 - RNA, 19 nt, Artificial Sequence
  Description of Artificial Sequence: Synthetic oligonucleotide
uuguguguaucgagaggcc

SEQ ID NO: 107149 - RNA, 19 nt, Artificial Sequence
  Description of Artificial Sequence: Synthetic oligonucleotide
caaaggcugguggcaagug

SEQ ID NO: 107150 - RNA, 19 nt, Artificial Sequence
  Description of Artificial Sequence: Synthetic oligonucleotide
gcacggggcacagcggagu

SEQ ID NO: 107151 - RNA, 19 nt, Artificial Sequence
  Description of Artificial Sequence: Synthetic oligonucleotide
ucuguccugugacgcgcaa

SEQ ID NO: 107152 - RNA, 19 nt, Artificial Sequence
  Description of Artificial Sequence: Synthetic oligonucleotide
agucugagggucugggcgg

SEQ ID NO: 107153 - RNA, 19 nt, Artificial Sequence
  Description of Artificial Sequence: Synthetic oligonucleotide
gcgggcggcugggucugug

SEQ ID NO: 107154 - RNA, 19 nt, Artificial Sequence
  Description of Artificial Sequence: Synthetic oligonucleotide
gcauuucugguugcaccgc

SEQ ID NO: 107155 - RNA, 19 nt, Artificial Sequence
  Description of Artificial Sequence: Synthetic oligonucleotide
cggcgcuucccagcaccaa

SEQ ID NO: 107156 - RNA, 19 nt, Artificial Sequence
  Description of Artificial Sequence: Synthetic oligonucleotide
acauguaaccggcauguuu

SEQ ID NO: 107157 - RNA, 19 nt, Artificial Sequence
  Description of Artificial Sequence: Synthetic oligonucleotide
uccagcagaagacaaaaag

SEQ ID NO: 107158 - RNA, 19 nt, Artificial Sequence
  Description of Artificial Sequence: Synthetic oligonucleotide
gacaaacaugaaagucuag

SEQ ID NO: 107159 - RNA, 19 nt, Artificial Sequence
  Description of Artificial Sequence: Synthetic oligonucleotide
gaaauaaaacugguaaaac

SEQ ID NO: 107160 - RNA, 25 nt, Artificial Sequence
  Description of Artificial Sequence: Synthetic oligonucleotide
cacacggacuacaggggaguuuugu

SEQ ID NO: 107161 - RNA, 25 nt, Artificial Sequence
  Description of Artificial Sequence: Synthetic oligonucleotide
uugaaguugcaaaguccuggagccu

SEQ ID NO: 107162 - RNA, 25 nt, Artificial Sequence
  Description of Artificial Sequence: Synthetic oligonucleotide
uccagagggcugucggcgcaguagc

SEQ ID NO: 107163 - RNA, 25 nt, Artificial Sequence
  Description of Artificial Sequence: Synthetic oligonucleotide
cagcgagcagcagaguccgcacgcu

SEQ ID NO: 107164 - RNA, 25 nt, Artificial Sequence
  Description of Artificial Sequence: Synthetic oligonucleotide
uccggcgaggggcagaagagcgcga

SEQ ID NO: 107165 - RNA, 25 nt, Artificial Sequence
  Description of Artificial Sequence: Synthetic oligonucleotide
agggagcgcggggcagcagaagcga

SEQ ID NO: 107166 - RNA, 25 nt, Artificial Sequence
  Description of Artificial Sequence: Synthetic oligonucleotide
agagccgagcgcggacccagccagg

SEQ ID NO: 107167 - RNA, 25 nt, Artificial Sequence
  Description of Artificial Sequence: Synthetic oligonucleotide
gacccacagcccuccccagcugccc

SEQ ID NO: 107168 - RNA, 25 nt, Artificial Sequence
  Description of Artificial Sequence: Synthetic oligonucleotide
caggaagagccccagccauggaaca

SEQ ID NO: 107169 - RNA, 25 nt, Artificial Sequence
  Description of Artificial Sequence: Synthetic oligonucleotide
accagcuccugugcugcgaagugga

SEQ ID NO: 107170 - RNA, 25 nt, Artificial Sequence
  Description of Artificial Sequence: Synthetic oligonucleotide
aaaccauccgccgcgcguaccccga

SEQ ID NO: 107171 - RNA, 25 nt, Artificial Sequence
  Description of Artificial Sequence: Synthetic oligonucleotide
augccaaccuccucaacgaccgggu

SEQ ID NO: 107172 - RNA, 25 nt, Artificial Sequence
  Description of Artificial Sequence: Synthetic oligonucleotide
ugcugcgggccaugcugaaggcgga

SEQ ID NO: 107173 - RNA, 25 nt, Artificial Sequence
  Description of Artificial Sequence: Synthetic oligonucleotide
aggagaccugcgcgcccucgguguc

SEQ ID NO: 107174 - RNA, 25 nt, Artificial Sequence
  Description of Artificial Sequence: Synthetic oligonucleotide
ccuacuucaaaugugugcagaagga

SEQ ID NO: 107175 - RNA, 25 nt, Artificial Sequence
  Description of Artificial Sequence: Synthetic oligonucleotide
agguccugccguccaugcggaagau

SEQ ID NO: 107176 - RNA, 25 nt, Artificial Sequence
  Description of Artificial Sequence: Synthetic oligonucleotide
ucgucgccaccuggaugcuggaggu

SEQ ID NO: 107177 - RNA, 25 nt, Artificial Sequence
  Description of Artificial Sequence: Synthetic oligonucleotide
ucugcgaggaacagaagugcgagga

SEQ ID NO: 107178 - RNA, 25 nt, Artificial Sequence
  Description of Artificial Sequence: Synthetic oligonucleotide
aggaggucuucccgcuggccaugaa

SEQ ID NO: 107179 - RNA, 25 nt, Artificial Sequence
  Description of Artificial Sequence: Synthetic oligonucleotide
acuaccuggaccgcuuccugucgcu

SEQ ID NO: 107180 - RNA, 25 nt, Artificial Sequence
  Description of Artificial Sequence: Synthetic oligonucleotide
uggagcccgugaaaaagagccgccu

SEQ ID NO: 107181 - RNA, 25 nt, Artificial Sequence
  Description of Artificial Sequence: Synthetic oligonucleotide
ugcagcugcugggggccacuugcau

SEQ ID NO: 107182 - RNA, 25 nt, Artificial Sequence
  Description of Artificial Sequence: Synthetic oligonucleotide
uguucguggccucuaagaugaagga

SEQ ID NO: 107183 - RNA, 25 nt, Artificial Sequence
  Description of Artificial Sequence: Synthetic oligonucleotide
agaccaucccccugacggccgagaa

SEQ ID NO: 107184 - RNA, 25 nt, Artificial Sequence
  Description of Artificial Sequence: Synthetic oligonucleotide
agcugugcaucuacaccgacaacuc

SEQ ID NO: 107185 - RNA, 25 nt, Artificial Sequence
  Description of Artificial Sequence: Synthetic oligonucleotide
ccauccggcccgaggagcugcugca

SEQ ID NO: 107186 - RNA, 25 nt, Artificial Sequence
  Description of Artificial Sequence: Synthetic oligonucleotide
aaauggagcugcuccuggugaacaa

SEQ ID NO: 107187 - RNA, 25 nt, Artificial Sequence
  Description of Artificial Sequence: Synthetic oligonucleotide
agcucaaguggaaccuggccgcaau

SEQ ID NO: 107188 - RNA, 25 nt, Artificial Sequence
  Description of Artificial Sequence: Synthetic oligonucleotide
ugaccccgcacgauuucauugaaca

SEQ ID NO: 107189 - RNA, 25 nt, Artificial Sequence
  Description of Artificial Sequence: Synthetic oligonucleotide
acuuccucuccaaaaugccagaggc

SEQ ID NO: 107190 - RNA, 25 nt, Artificial Sequence
  Description of Artificial Sequence: Synthetic oligonucleotide
cggaggagaacaaacagaucauccg

SEQ ID NO: 107191 - RNA, 25 nt, Artificial Sequence
  Description of Artificial Sequence: Synthetic oligonucleotide
gcaaacacgcgcagaccuucguugc

SEQ ID NO: 107192 - RNA, 25 nt, Artificial Sequence
  Description of Artificial Sequence: Synthetic oligonucleotide
cccucugugccacagaugugaaguu

SEQ ID NO: 107193 - RNA, 25 nt, Artificial Sequence
  Description of Artificial Sequence: Synthetic oligonucleotide
ucauuuccaauccgcccuccauggu

SEQ ID NO: 107194 - RNA, 25 nt, Artificial Sequence
  Description of Artificial Sequence: Synthetic oligonucleotide
uggcagcggggagcgugguggccgc

SEQ ID NO: 107195 - RNA, 25 nt, Artificial Sequence
  Description of Artificial Sequence: Synthetic oligonucleotide
cagugcaaggccugaaccugaggag

SEQ ID NO: 107196 - RNA, 25 nt, Artificial Sequence
  Description of Artificial Sequence: Synthetic oligonucleotide
gccccaacaacuuccuguccuacua

SEQ ID NO: 107197 - RNA, 25 nt, Artificial Sequence
  Description of Artificial Sequence: Synthetic oligonucleotide
accgccucacacgcuuccucuccag

SEQ ID NO: 107198 - RNA, 25 nt, Artificial Sequence
  Description of Artificial Sequence: Synthetic oligonucleotide
gagugaucaagugugacccggacug

SEQ ID NO: 107199 - RNA, 25 nt, Artificial Sequence
  Description of Artificial Sequence: Synthetic oligonucleotide
gccuccgggccugccaggagcagau

SEQ ID NO: 107200 - RNA, 25 nt, Artificial Sequence
  Description of Artificial Sequence: Synthetic oligonucleotide
ucgaagcccugcuggagucaagccu

SEQ ID NO: 107201 - RNA, 25 nt, Artificial Sequence
  Description of Artificial Sequence: Synthetic oligonucleotide
ugcgccaggcccagcagaacaugga

SEQ ID NO: 107202 - RNA, 25 nt, Artificial Sequence
  Description of Artificial Sequence: Synthetic oligonucleotide
accccaaggccgccgaggaggagga

SEQ ID NO: 107203 - RNA, 25 nt, Artificial Sequence
  Description of Artificial Sequence: Synthetic oligonucleotide
aagaggaggaggaggagguggaccu

SEQ ID NO: 107204 - RNA, 25 nt, Artificial Sequence
  Description of Artificial Sequence: Synthetic oligonucleotide
uggcuugcacacccaccgacgugcg

SEQ ID NO: 107205 - RNA, 25 nt, Artificial Sequence
  Description of Artificial Sequence: Synthetic oligonucleotide
gggacguggacaucugagggcgcca

SEQ ID NO: 107206 - RNA, 25 nt, Artificial Sequence
  Description of Artificial Sequence: Synthetic oligonucleotide
aggcaggcgggcgccaccgccaccc

SEQ ID NO: 107207 - RNA, 25 nt, Artificial Sequence
  Description of Artificial Sequence: Synthetic oligonucleotide
cgcagcgagggcggagccggcccca

SEQ ID NO: 107208 - RNA, 25 nt, Artificial Sequence
  Description of Artificial Sequence: Synthetic oligonucleotide
aggugcuccccugacagucccuccu

SEQ ID NO: 107209 - RNA, 25 nt, Artificial Sequence
  Description of Artificial Sequence: Synthetic oligonucleotide
ucuccggagcauuuugauaccagaa

SEQ ID NO: 107210 - RNA, 25 nt, Artificial Sequence
  Description of Artificial Sequence: Synthetic oligonucleotide
agggaaagcuucauucuccuuguug

SEQ ID NO: 107211 - RNA, 25 nt, Artificial Sequence
  Description of Artificial Sequence: Synthetic oligonucleotide
guugguuguuuuuuccuuugcucuu

SEQ ID NO: 107212 - RNA, 25 nt, Artificial Sequence
  Description of Artificial Sequence: Synthetic oligonucleotide
uucccccuuccaucucugacuuaag

SEQ ID NO: 107213 - RNA, 25 nt, Artificial Sequence
  Description of Artificial Sequence: Synthetic oligonucleotide
gcaaaagaaaaagauuacccaaaaa

SEQ ID NO: 107214 - RNA, 25 nt, Artificial Sequence
  Description of Artificial Sequence: Synthetic oligonucleotide
acugucuuuaaaagagagagagaga

SEQ ID NO: 107215 - RNA, 25 nt, Artificial Sequence
  Description of Artificial Sequence: Synthetic oligonucleotide
cccugagcggugggggaggaggguu

SEQ ID NO: 107216 - RNA, 25 nt, Artificial Sequence
  Description of Artificial Sequence: Synthetic oligonucleotide
ugugcuacagaugauagaggauuuu

SEQ ID NO: 107217 - RNA, 25 nt, Artificial Sequence
  Description of Artificial Sequence: Synthetic oligonucleotide
uauaccccaauaaucaacucguuuu

SEQ ID NO: 107218 - RNA, 25 nt, Artificial Sequence
  Description of Artificial Sequence: Synthetic oligonucleotide
uuauauuaauguacuuguuucucug

SEQ ID NO: 107219 - RNA, 25 nt, Artificial Sequence
  Description of Artificial Sequence: Synthetic oligonucleotide
guuguaagaauaggcauuaacacaa

SEQ ID NO: 107220 - RNA, 25 nt, Artificial Sequence
  Description of Artificial Sequence: Synthetic oligonucleotide
aaggaggcgucucgggagaggauua

SEQ ID NO: 107221 - RNA, 25 nt, Artificial Sequence
  Description of Artificial Sequence: Synthetic oligonucleotide
agguuccauccuuuacguguuuaaa

SEQ ID NO: 107222 - RNA, 25 nt, Artificial Sequence
  Description of Artificial Sequence: Synthetic oligonucleotide
aaaaaagcauaaaaacauuuuaaaa

SEQ ID NO: 107223 - RNA, 25 nt, Artificial Sequence
  Description of Artificial Sequence: Synthetic oligonucleotide
aacauagaaaaauucagcaaaccau

SEQ ID NO: 107224 - RNA, 25 nt, Artificial Sequence
  Description of Artificial Sequence: Synthetic oligonucleotide
uuuuuaaaguagaagaggguuuuag

SEQ ID NO: 107225 - RNA, 25 nt, Artificial Sequence
  Description of Artificial Sequence: Synthetic oligonucleotide
gguagaaaaacauauucuugugcuu

SEQ ID NO: 107226 - RNA, 25 nt, Artificial Sequence
  Description of Artificial Sequence: Synthetic oligonucleotide
uuuccugauaaagcacagcuguagu

SEQ ID NO: 107227 - RNA, 25 nt, Artificial Sequence
  Description of Artificial Sequence: Synthetic oligonucleotide
ugggguucuaggcaucucuguacuu

SEQ ID NO: 107228 - RNA, 25 nt, Artificial Sequence
  Description of Artificial Sequence: Synthetic oligonucleotide
uugcuugcucauaugcauguaguca

SEQ ID NO: 107229 - RNA, 25 nt, Artificial Sequence
  Description of Artificial Sequence: Synthetic oligonucleotide
acuuuauaagucauuguauguuauu

SEQ ID NO: 107230 - RNA, 25 nt, Artificial Sequence
  Description of Artificial Sequence: Synthetic oligonucleotide
uauauuccguagguagauguguaac

SEQ ID NO: 107231 - RNA, 25 nt, Artificial Sequence
  Description of Artificial Sequence: Synthetic oligonucleotide
ccucuucaccuuauucauggcugaa

SEQ ID NO: 107232 - RNA, 25 nt, Artificial Sequence
  Description of Artificial Sequence: Synthetic oligonucleotide
agucaccucuugguuacaguagcgu

SEQ ID NO: 107233 - RNA, 25 nt, Artificial Sequence
  Description of Artificial Sequence: Synthetic oligonucleotide
uagcgugcccgugugcauguccuuu

SEQ ID NO: 107234 - RNA, 25 nt, Artificial Sequence
  Description of Artificial Sequence: Synthetic oligonucleotide
ugcgccugugaccaccaccccaaca

SEQ ID NO: 107235 - RNA, 25 nt, Artificial Sequence
  Description of Artificial Sequence: Synthetic oligonucleotide
aaaccauccagugacaaaccaucca

SEQ ID NO: 107236 - RNA, 25 nt, Artificial Sequence
  Description of Artificial Sequence: Synthetic oligonucleotide
aguggagguuugucgggcaccagcc

SEQ ID NO: 107237 - RNA, 25 nt, Artificial Sequence
  Description of Artificial Sequence: Synthetic oligonucleotide
cagcguagcagggucgggaaaggcc

SEQ ID NO: 107238 - RNA, 25 nt, Artificial Sequence
  Description of Artificial Sequence: Synthetic oligonucleotide
caccugucccacuccuacgauacgc

SEQ ID NO: 107239 - RNA, 25 nt, Artificial Sequence
  Description of Artificial Sequence: Synthetic oligonucleotide
cuacuauaaagagaagacgaaauag

SEQ ID NO: 107240 - RNA, 25 nt, Artificial Sequence
  Description of Artificial Sequence: Synthetic oligonucleotide
gugacauaauauauucuauuuuuau

SEQ ID NO: 107241 - RNA, 25 nt, Artificial Sequence
  Description of Artificial Sequence: Synthetic oligonucleotide
uacucuuccuauuuuuguagugacc

SEQ ID NO: 107242 - RNA, 25 nt, Artificial Sequence
  Description of Artificial Sequence: Synthetic oligonucleotide
cuguuuaugagaugcugguuuucua

SEQ ID NO: 107243 - RNA, 25 nt, Artificial Sequence
  Description of Artificial Sequence: Synthetic oligonucleotide
acccaacggcccugcagccagcuca

SEQ ID NO: 107244 - RNA, 25 nt, Artificial Sequence
  Description of Artificial Sequence: Synthetic oligonucleotide
acguccagguucaacccacagcuac

SEQ ID NO: 107245 - RNA, 25 nt, Artificial Sequence
  Description of Artificial Sequence: Synthetic oligonucleotide
cuugguuuguguucuucuucauauu

SEQ ID NO: 107246 - RNA, 25 nt, Artificial Sequence
  Description of Artificial Sequence: Synthetic oligonucleotide
ucuaaaaccauuccauuuccaagca

SEQ ID NO: 107247 - RNA, 25 nt, Artificial Sequence
  Description of Artificial Sequence: Synthetic oligonucleotide
acuuucaguccaauagguguaggaa

SEQ ID NO: 107248 - RNA, 25 nt, Artificial Sequence
  Description of Artificial Sequence: Synthetic oligonucleotide
aauagcgcuguuuuuguugugugug

SEQ ID NO: 107249 - RNA, 25 nt, Artificial Sequence
  Description of Artificial Sequence: Synthetic oligonucleotide
gcagggagggcaguuuucuaaugga

SEQ ID NO: 107250 - RNA, 25 nt, Artificial Sequence
  Description of Artificial Sequence: Synthetic oligonucleotide
aaugguuugggaauauccauguacu

SEQ ID NO: 107251 - RNA, 25 nt, Artificial Sequence
  Description of Artificial Sequence: Synthetic oligonucleotide
uuguuugcaagcaggacuuugaggc

SEQ ID NO: 107252 - RNA, 25 nt, Artificial Sequence
  Description of Artificial Sequence: Synthetic oligonucleotide
caagugugggccacugugguggcag

SEQ ID NO: 107253 - RNA, 25 nt, Artificial Sequence
  Description of Artificial Sequence: Synthetic oligonucleotide
guggaggugggguguuugggaggcu

SEQ ID NO: 107254 - RNA, 25 nt, Artificial Sequence
  Description of Artificial Sequence: Synthetic oligonucleotide
ugcgugccagucaagaagaaaaagg

SEQ ID NO: 107255 - RNA, 25 nt, Artificial Sequence
  Description of Artificial Sequence: Synthetic oligonucleotide
guuugcauucucacauugccaggau

SEQ ID NO: 107256 - RNA, 25 nt, Artificial Sequence
  Description of Artificial Sequence: Synthetic oligonucleotide
ugauaaguuccuuuccuuuucuuua

SEQ ID NO: 107257 - RNA, 25 nt, Artificial Sequence
  Description of Artificial Sequence: Synthetic oligonucleotide
aaagaaguugaaguuuaggaauccu

SEQ ID NO: 107258 - RNA, 25 nt, Artificial Sequence
  Description of Artificial Sequence: Synthetic oligonucleotide
uuuggugccaacugguguuugaaag

SEQ ID NO: 107259 - RNA, 25 nt, Artificial Sequence
  Description of Artificial Sequence: Synthetic oligonucleotide
guagggaccucagagguuuaccuag

SEQ ID NO: 107260 - RNA, 25 nt, Artificial Sequence
  Description of Artificial Sequence: Synthetic oligonucleotide
gagaacaggugguuuuuaaggguua

SEQ ID NO: 107261 - RNA, 25 nt, Artificial Sequence
  Description of Artificial Sequence: Synthetic oligonucleotide
aucuuagauguuucacaccggaagg

SEQ ID NO: 107262 - RNA, 25 nt, Artificial Sequence
  Description of Artificial Sequence: Synthetic oligonucleotide
guuuuuaaacacuaaaauauauaau

SEQ ID NO: 107263 - RNA, 25 nt, Artificial Sequence
  Description of Artificial Sequence: Synthetic oligonucleotide
uuuauaguuaaggcuaaaaaguaua

SEQ ID NO: 107264 - RNA, 25 nt, Artificial Sequence
  Description of Artificial Sequence: Synthetic oligonucleotide
auuuauugcagaggauguucauaag

SEQ ID NO: 107265 - RNA, 25 nt, Artificial Sequence
  Description of Artificial Sequence: Synthetic oligonucleotide
ggccaguaugauuuauaaaugcaau

SEQ ID NO: 107266 - RNA, 25 nt, Artificial Sequence
  Description of Artificial Sequence: Synthetic oligonucleotide
ucuccccuugauuuaaacacacaga

SEQ ID NO: 107267 - RNA, 25 nt, Artificial Sequence
  Description of Artificial Sequence: Synthetic oligonucleotide
auacacacacacacacacacacaca

SEQ ID NO: 107268 - RNA, 25 nt, Artificial Sequence
  Description of Artificial Sequence: Synthetic oligonucleotide
acaaaccuucugccuuugauguuac

SEQ ID NO: 107269 - RNA, 25 nt, Artificial Sequence
  Description of Artificial Sequence: Synthetic oligonucleotide
cagauuuaauacaguuuauuuuuaa

SEQ ID NO: 107270 - RNA, 25 nt, Artificial Sequence
  Description of Artificial Sequence: Synthetic oligonucleotide
aagauagauccuuuuauaggugaga

SEQ ID NO: 107271 - RNA, 25 nt, Artificial Sequence
  Description of Artificial Sequence: Synthetic oligonucleotide
aaaaaaacaaucuggaagaaaaaaa

SEQ ID NO: 107272 - RNA, 25 nt, Artificial Sequence
  Description of Artificial Sequence: Synthetic oligonucleotide
accacacaaagacauugauucagcc

SEQ ID NO: 107273 - RNA, 25 nt, Artificial Sequence
  Description of Artificial Sequence: Synthetic oligonucleotide
cuguuuggcguuucccagagucauc

SEQ ID NO: 107274 - RNA, 25 nt, Artificial Sequence
  Description of Artificial Sequence: Synthetic oligonucleotide
cugauuggacaggcaugggugcaag

SEQ ID NO: 107275 - RNA, 25 nt, Artificial Sequence
  Description of Artificial Sequence: Synthetic oligonucleotide
ggaaaauuaggguacucaaccuaag

SEQ ID NO: 107276 - RNA, 25 nt, Artificial Sequence
  Description of Artificial Sequence: Synthetic oligonucleotide
guucgguuccgaugaauucuuaucc

SEQ ID NO: 107277 - RNA, 25 nt, Artificial Sequence
  Description of Artificial Sequence: Synthetic oligonucleotide
cccugccccuuccuuuaaaaaacuu

SEQ ID NO: 107278 - RNA, 25 nt, Artificial Sequence
  Description of Artificial Sequence: Synthetic oligonucleotide
uagugacaaaauagacaauuugcac

SEQ ID NO: 107279 - RNA, 25 nt, Artificial Sequence
  Description of Artificial Sequence: Synthetic oligonucleotide
caucuuggcuauguaauucuuguaa

SEQ ID NO: 107280 - RNA, 25 nt, Artificial Sequence
  Description of Artificial Sequence: Synthetic oligonucleotide
auuuuuauuuaggaaguguugaagg

SEQ ID NO: 107281 - RNA, 25 nt, Artificial Sequence
  Description of Artificial Sequence: Synthetic oligonucleotide
ggagguggcaagaguguggaggcug

SEQ ID NO: 107282 - RNA, 25 nt, Artificial Sequence
  Description of Artificial Sequence: Synthetic oligonucleotide
gacgugugagggaggacaggcggga

SEQ ID NO: 107283 - RNA, 25 nt, Artificial Sequence
  Description of Artificial Sequence: Synthetic oligonucleotide
aggaggugugaggaggaggcucccg

SEQ ID NO: 107284 - RNA, 25 nt, Artificial Sequence
  Description of Artificial Sequence: Synthetic oligonucleotide
gaggggaaggggcggugcccacacc

SEQ ID NO: 107285 - RNA, 25 nt, Artificial Sequence
  Description of Artificial Sequence: Synthetic oligonucleotide
cggggacaggccgcagcuccauuuu

SEQ ID NO: 107286 - RNA, 25 nt, Artificial Sequence
  Description of Artificial Sequence: Synthetic oligonucleotide
ucuuauugcgcugcuaccguugacu

SEQ ID NO: 107287 - RNA, 25 nt, Artificial Sequence
  Description of Artificial Sequence: Synthetic oligonucleotide
uuccaggcacgguuuggaaauauuc

SEQ ID NO: 107288 - RNA, 25 nt, Artificial Sequence
  Description of Artificial Sequence: Synthetic oligonucleotide
cacaucgcuucuguguaucucuuuc

SEQ ID NO: 107289 - RNA, 25 nt, Artificial Sequence
  Description of Artificial Sequence: Synthetic oligonucleotide
cacauuguuugcugcuauuggagga

SEQ ID NO: 107290 - RNA, 25 nt, Artificial Sequence
  Description of Artificial Sequence: Synthetic oligonucleotide
aucaguuuuuuguuuuacaauguca

SEQ ID NO: 107291 - RNA, 25 nt, Artificial Sequence
  Description of Artificial Sequence: Synthetic oligonucleotide
auauacugccauguacuaguuuuag

SEQ ID NO: 107292 - RNA, 25 nt, Artificial Sequence
  Description of Artificial Sequence: Synthetic oligonucleotide
guuuucucuuagaacauuguauuac

SEQ ID NO: 107293 - RNA, 25 nt, Artificial Sequence
  Description of Artificial Sequence: Synthetic oligonucleotide
cagaugccuuuuuuguaguuuuuuu

SEQ ID NO: 107294 - RNA, 25 nt, Artificial Sequence
  Description of Artificial Sequence: Synthetic oligonucleotide
uuuuuuuuaugugaucaauuuugac

SEQ ID NO: 107295 - RNA, 25 nt, Artificial Sequence
  Description of Artificial Sequence: Synthetic oligonucleotide
cuuaaugugauuacugcucuauucc

SEQ ID NO: 107296 - RNA, 25 nt, Artificial Sequence
  Description of Artificial Sequence: Synthetic oligonucleotide
caaaaagguugcuguuucacaauac

SEQ ID NO: 107297 - RNA, 25 nt, Artificial Sequence
  Description of Artificial Sequence: Synthetic oligonucleotide
ccucaugcuucacuuagccauggug

SEQ ID NO: 107298 - RNA, 25 nt, Artificial Sequence
  Description of Artificial Sequence: Synthetic oligonucleotide
ggacccagcgggcagguucugccug

SEQ ID NO: 107299 - RNA, 25 nt, Artificial Sequence
  Description of Artificial Sequence: Synthetic oligonucleotide
gcuuuggcgggcagacacgcgggcg

SEQ ID NO: 107300 - RNA, 25 nt, Artificial Sequence
  Description of Artificial Sequence: Synthetic oligonucleotide
gcgaucccacacaggcuggcggggg

SEQ ID NO: 107301 - RNA, 25 nt, Artificial Sequence
  Description of Artificial Sequence: Synthetic oligonucleotide
gccggccccgaggccgcgugcguga

SEQ ID NO: 107302 - RNA, 25 nt, Artificial Sequence
  Description of Artificial Sequence: Synthetic oligonucleotide
agaaccgcgccgguguccccagaga

SEQ ID NO: 107303 - RNA, 25 nt, Artificial Sequence
  Description of Artificial Sequence: Synthetic oligonucleotide
accaggcugugucccucuucucuuc

SEQ ID NO: 107304 - RNA, 25 nt, Artificial Sequence
  Description of Artificial Sequence: Synthetic oligonucleotide
cccugcgccugugaugcugggcacu

SEQ ID NO: 107305 - RNA, 25 nt, Artificial Sequence
  Description of Artificial Sequence: Synthetic oligonucleotide
uucaucugaucgggggcguagcauc

SEQ ID NO: 107306 - RNA, 25 nt, Artificial Sequence
  Description of Artificial Sequence: Synthetic oligonucleotide
cauaguaguuuuuacagcuguguua

SEQ ID NO: 107307 - RNA, 25 nt, Artificial Sequence
  Description of Artificial Sequence: Synthetic oligonucleotide
auucuuugcguguagcuauggaagu

SEQ ID NO: 107308 - RNA, 25 nt, Artificial Sequence
  Description of Artificial Sequence: Synthetic oligonucleotide
uugcauaauuauuauuauuauuauu

SEQ ID NO: 107309 - RNA, 25 nt, Artificial Sequence
  Description of Artificial Sequence: Synthetic oligonucleotide
uauaacaagugugucuuacgugcca

SEQ ID NO: 107310 - RNA, 25 nt, Artificial Sequence
  Description of Artificial Sequence: Synthetic oligonucleotide
accacggcguuguaccuguaggacu

SEQ ID NO: 107311 - RNA, 25 nt, Artificial Sequence
  Description of Artificial Sequence: Synthetic oligonucleotide
ucucauucgggaugauuggaauagc

SEQ ID NO: 107312 - RNA, 25 nt, Artificial Sequence
  Description of Artificial Sequence: Synthetic oligonucleotide
cuucuggaauuuguucaaguuuugg

SEQ ID NO: 107313 - RNA, 25 nt, Artificial Sequence
  Description of Artificial Sequence: Synthetic oligonucleotide
gguauguuuaaucuguuauguacua

SEQ ID NO: 107314 - RNA, 25 nt, Artificial Sequence
  Description of Artificial Sequence: Synthetic oligonucleotide
aguguucuguuuguuauuguuuugu

SEQ ID NO: 107315 - RNA, 25 nt, Artificial Sequence
  Description of Artificial Sequence: Synthetic oligonucleotide
uuaauuacaccauaaugcuaauuua

SEQ ID NO: 107316 - RNA, 25 nt, Artificial Sequence
  Description of Artificial Sequence: Synthetic oligonucleotide
aaagagacuccaaaucucaaugaag

SEQ ID NO: 107317 - RNA, 25 nt, Artificial Sequence
  Description of Artificial Sequence: Synthetic oligonucleotide
gccagcucacagugcugugugcccc

SEQ ID NO: 107318 - RNA, 25 nt, Artificial Sequence
  Description of Artificial Sequence: Synthetic oligonucleotide
cggucaccuagcaagcugccgaacc

SEQ ID NO: 107319 - RNA, 25 nt, Artificial Sequence
  Description of Artificial Sequence: Synthetic oligonucleotide
caaaagaauuugcaccccgcugcgg

SEQ ID NO: 107320 - RNA, 25 nt, Artificial Sequence
  Description of Artificial Sequence: Synthetic oligonucleotide
ggcccacgugguuggggcccugccc

SEQ ID NO: 107321 - RNA, 25 nt, Artificial Sequence
  Description of Artificial Sequence: Synthetic oligonucleotide
cuggcagggucauccugugcucgga

SEQ ID NO: 107322 - RNA, 25 nt, Artificial Sequence
  Description of Artificial Sequence: Synthetic oligonucleotide
aggccaucucgggcacaggcccacc

SEQ ID NO: 107323 - RNA, 25 nt, Artificial Sequence
  Description of Artificial Sequence: Synthetic oligonucleotide
cccgccccaccccuccagaacacgg

SEQ ID NO: 107324 - RNA, 25 nt, Artificial Sequence
  Description of Artificial Sequence: Synthetic oligonucleotide
gcucacgcuuaccucaaccauccug

SEQ ID NO: 107325 - RNA, 25 nt, Artificial Sequence
  Description of Artificial Sequence: Synthetic oligonucleotide
ggcugcggcgucugucugaaccacg

SEQ ID NO: 107326 - RNA, 25 nt, Artificial Sequence
  Description of Artificial Sequence: Synthetic oligonucleotide
gcgggggccuugagggacgcuuugu

SEQ ID NO: 107327 - RNA, 25 nt, Artificial Sequence
  Description of Artificial Sequence: Synthetic oligonucleotide
ucugucgugauggggcaagggcaca

SEQ ID NO: 107328 - RNA, 25 nt, Artificial Sequence
  Description of Artificial Sequence: Synthetic oligonucleotide
aaguccuggauguuguguguaucga

SEQ ID NO: 107329 - RNA, 25 nt, Artificial Sequence
  Description of Artificial Sequence: Synthetic oligonucleotide
agaggccaaaggcugguggcaagug

SEQ ID NO: 107330 - RNA, 25 nt, Artificial Sequence
  Description of Artificial Sequence: Synthetic oligonucleotide
gcacggggcacagcggagucugucc

SEQ ID NO: 107331 - RNA, 25 nt, Artificial Sequence
  Description of Artificial Sequence: Synthetic oligonucleotide
cugugacgcgcaagucugagggucu

SEQ ID NO: 107332 - RNA, 25 nt, Artificial Sequence
  Description of Artificial Sequence: Synthetic oligonucleotide
ugggcggcgggcggcugggucugug

SEQ ID NO: 107333 - RNA, 25 nt, Artificial Sequence
  Description of Artificial Sequence: Synthetic oligonucleotide
gcauuucugguugcaccgcggcgcu

SEQ ID NO: 107334 - RNA, 25 nt, Artificial Sequence
  Description of Artificial Sequence: Synthetic oligonucleotide
uucccagcaccaacauguaaccggc

SEQ ID NO: 107335 - RNA, 25 nt, Artificial Sequence
  Description of Artificial Sequence: Synthetic oligonucleotide
cauguuuccagcagaagacaaaaag

SEQ ID NO: 107336 - RNA, 25 nt, Artificial Sequence
  Description of Artificial Sequence: Synthetic oligonucleotide
gacaaacaugaaagucuagaaauaa

SEQ ID NO: 107337 - RNA, 25 nt, Artificial Sequence
  Description of Artificial Sequence: Synthetic oligonucleotide
aaacugguaaaaccccaaaaaaaaa

SEQ ID NO: 107338 - DNA, 21 bp, Artificial Sequence
  Description of Artificial Sequence: Synthetic oligonucleotide
  Description of Combined DNA/RNA Molecule: Synthetic oligonucleotide
cuacacaaaucagcgauuutt

SEQ ID NO: 107339 - DNA, 21 bp, Artificial Sequence
  Description of Artificial Sequence: Synthetic oligonucleotide
  Description of Combined DNA/RNA Molecule: Synthetic oligonucleotide
aaaucgcugauuuguguagtt

SEQ ID NO: 107340 - DNA, 25 bp, Artificial Sequence
  Description of Artificial Sequence: Synthetic oligonucleotide
  Description of Combined DNA/RNA Molecule: Synthetic oligonucleotide
cuacacaaaucagcgauuuccaugt

SEQ ID NO: 107341 - RNA, 27 nt, Artificial Sequence
  Description of Artificial Sequence: Synthetic oligonucleotide
acauggaaaucgcugauuuguguaguc

SEQ ID NO: 107342 - RNA, 13 nt, Artificial Sequence
  Description of Artificial Sequence: Synthetic oligonucleotide
cuacacaaaucag

SEQ ID NO: 107343 - DNA, 11 bp, Artificial Sequence
  Description of Artificial Sequence: Synthetic oligonucleotide
  Description of Combined DNA/RNA Molecule: Synthetic oligonucleotide
gauuuccaugt

SEQ ID NO: 107344 - DNA, 21 bp, Artificial Sequence
  Description of Artificial Sequence: Synthetic oligonucleotide
  Description of Combined DNA/RNA Molecule: Synthetic oligonucleotide
ggaucuuauuucuucggagtt

SEQ ID NO: 107345 - DNA, 21 bp, Artificial Sequence
  Description of Artificial Sequence: Synthetic oligonucleotide
  Description of Combined DNA/RNA Molecule: Synthetic oligonucleotide
cuccgaagaaauaagaucctt

SEQ ID NO: 107346 - RNA, 11 nt, Artificial Sequence
  Description of Artificial Sequence: Synthetic oligonucleotide
ggaucuuauuu

SEQ ID NO: 107347 - DNA, 10 bp, Artificial Sequence
  Description of Artificial Sequence: Synthetic oligonucleotide
  Description of Combined DNA/RNA Molecule: Synthetic oligonucleotide
cuucggagtt

SEQ ID NO: 107348 - RNA, 27 nt, Artificial Sequence
  Description of Artificial Sequence: Synthetic oligonucleotide
cauugucuccgaagaaauaagauccuu

SEQ ID NO: 107349 - RNA, 8 nt, Artificial Sequence
  Description of Artificial Sequence: Synthetic oligonucleotide
  modified_base (2): LNA-G
ggaucuua

SEQ ID NO: 107350 - DNA, 17 bp, Artificial Sequence
  Description of Artificial Sequence: Synthetic oligonucleotide
  Description of Combined DNA/RNA Molecule: Synthetic oligonucleotide
uuucuucggagacaatg

SEQ ID NO: 107351 - DNA, 16 bp, Artificial Sequence
  Description of Artificial Sequence: Synthetic oligonucleotide
  Description of Combined DNA/RNA Molecule: Synthetic oligonucleotide
uucuucggagacaatg

SEQ ID NO: 107352 - DNA, 15 bp, Artificial Sequence
  Description of Artificial Sequence: Synthetic oligonucleotide
  Description of Combined DNA/RNA Molecule: Synthetic oligonucleotide
ucuucggagacaatg

SEQ ID NO: 107353 - DNA, 14 bp, Artificial Sequence
  Description of Artificial Sequence: Synthetic oligonucleotide
  Description of Combined DNA/RNA Molecule: Synthetic oligonucleotide
cuucggagacaatg

SEQ ID NO: 107354 - DNA, 13 bp, Artificial Sequence
  Description of Artificial Sequence: Synthetic oligonucleotide
  Description of Combined DNA/RNA Molecule: Synthetic oligonucleotide
uucggagacaatg

SEQ ID NO: 107355 - DNA, 12 bp, Artificial Sequence
  Description of Artificial Sequence: Synthetic oligonucleotide
  Description of Combined DNA/RNA Molecule: Synthetic oligonucleotide
ucggagacaatg

SEQ ID NO: 107356 - DNA, 11 bp, Artificial Sequence
  Description of Artificial Sequence: Synthetic oligonucleotide
  Description of Combined DNA/RNA Molecule: Synthetic oligonucleotide
cggagacaatg

SEQ ID NO: 107357 - RNA, 9 nt, Artificial Sequence
  Description of Artificial Sequence: Synthetic oligonucleotide
  modified_base (2): LNA-G
ggaucuuau

SEQ ID NO: 107358 - RNA, 10 nt, Artificial Sequence
  Description of Artificial Sequence: Synthetic oligonucleotide
  modified_base (2): LNA-G
ggaucuuauu

SEQ ID NO: 107359 - RNA, 11 nt, Artificial Sequence
  Description of Artificial Sequence: Synthetic oligonucleotide
  modified_base (2): LNA-G
ggaucuuauuu

SEQ ID NO: 107360 - RNA, 12 nt, Artificial Sequence
  Description of Artificial Sequence: Synthetic oligonucleotide
  modified_base (2): LNA-G
ggaucuuauuuc

SEQ ID NO: 107361 - RNA, 8 nt, Artificial Sequence
  Description of Artificial Sequence: Synthetic oligonucleotide
  modified_base (3): LNA-A
cuacacaa

SEQ ID NO: 107362 - DNA, 13 bp, Artificial Sequence
  Description of Artificial Sequence: Synthetic oligonucleotide
  Description of Combined DNA/RNA Molecule: Synthetic oligonucleotide
  modified_base (8): LNA-A
aucagcgauuutt

SEQ ID NO: 107363 - DNA, 12 bp, Artificial Sequence
  Description of Artificial Sequence: Synthetic oligonucleotide
  Description of Combined DNA/RNA Molecule: Synthetic oligonucleotide
  modified_base (7): LNA-A
ucagcgauuutt

SEQ ID NO: 107364 - DNA, 11 bp, Artificial Sequence
  Description of Artificial Sequence: Synthetic oligonucleotide
  Description of Combined DNA/RNA Molecule: Synthetic oligonucleotide
  modified_base (6): LNA-A
cagcgauuutt

SEQ ID NO: 107365 - DNA, 10 bp, Artificial Sequence
  Description of Artificial Sequence: Synthetic oligonucleotide
  Description of Combined DNA/RNA Molecule: Synthetic oligonucleotide
  modified_base (5): LNA-A
agcgauuutt

SEQ ID NO: 107366 - DNA, 9 bp, Artificial Sequence
  Description of Artificial Sequence: Synthetic oligonucleotide
  Description of Combined DNA/RNA Molecule: Synthetic oligonucleotide
  modified_base (4): LNA-A
gcgauuutt

SEQ ID NO: 107367 - DNA, 8 bp, Artificial Sequence
  Description of Artificial Sequence: Synthetic oligonucleotide
  Description of Combined DNA/RNA Molecule: Synthetic oligonucleotide
  modified_base (3): LNA-A
cgauuutt

SEQ ID NO: 107368 - DNA, 7 bp, Artificial Sequence
  Description of Artificial Sequence: Synthetic oligonucleotide
  Description of Combined DNA/RNA Molecule: Synthetic oligonucleotide
  modified_base (2): LNA-A
gauuutt

SEQ ID NO: 107369 - RNA, 9 nt, Artificial Sequence
  Description of Artificial Sequence: Synthetic oligonucleotide
  modified_base (3): LNA-A
cuacacaaa

SEQ ID NO: 107370 - RNA, 10 nt, Artificial Sequence
  Description of Artificial Sequence: Synthetic oligonucleotide
  modified_base (3): LNA-A
cuacacaaau

SEQ ID NO: 107371 - RNA, 11 nt, Artificial Sequence
  Description of Artificial Sequence: Synthetic oligonucleotide
  modified_base (3): LNA-A
cuacacaaauc

SEQ ID NO: 107372 - RNA, 12 nt, Artificial Sequence
  Description of Artificial Sequence: Synthetic oligonucleotide
  modified_base (3): LNA-A
cuacacaaauca

SEQ ID NO: 107373 - RNA, 13 nt, Artificial Sequence
  Description of Artificial Sequence: Synthetic oligonucleotide
  modified_base (3): LNA-A
cuacacaaaucag

SEQ ID NO: 107374 - RNA, 14 nt, Artificial Sequence
  Description of Artificial Sequence: Synthetic oligonucleotide
  modified_base (3): LNA-A
cuacacaaaucagc

SEQ ID NO: 107375 - RNA, 13 nt, Artificial Sequence
  Description of Artificial Sequence: Synthetic oligonucleotide
  modified_base (2): LNA-G
ggaucuuauuucu

SEQ ID NO: 107376 - RNA, 14 nt, Artificial Sequence
  Description of Artificial Sequence: Synthetic oligonucleotide
  modified_base (2): LNA-G
ggaucuuauuucuu

SEQ ID NO: 107377 - RNA, 8 nt, Artificial Sequence
  Description of Artificial Sequence: Synthetic oligonucleotide
  modified_base (2): LNA-G
  modified_base (8): LNA-A
ggaucuua

SEQ ID NO: 107378 - RNA, 9 nt, Artificial Sequence
  Description of Artificial Sequence: Synthetic oligonucleotide
  modified_base (2): LNA-G
  modified_base (9): LNA-U
ggaucuuau

SEQ ID NO: 107379 - RNA, 10 nt, Artificial Sequence
  Description of Artificial Sequence: Synthetic oligonucleotide
  modified_base (2): LNA-G
  modified_base (10): LNA-U
ggaucuuauu

SEQ ID NO: 107380 - RNA, 11 nt, Artificial Sequence
  Description of Artificial Sequence: Synthetic oligonucleotide
  modified_base (2): LNA-G
  modified_base (11): LNA-U
ggaucuuauuu

SEQ ID NO: 107381 - RNA, 12 nt, Artificial Sequence
  Description of Artificial Sequence: Synthetic oligonucleotide
  modified_base (2): LNA-G
  modified_base (12): LNA-C
ggaucuuauuuc

SEQ ID NO: 107382 - RNA, 13 nt, Artificial Sequence
  Description of Artificial Sequence: Synthetic oligonucleotide
  modified_base (2): LNA-G
  modified_base (13): LNA-U
ggaucuuauuucu

SEQ ID NO: 107383 - RNA, 14 nt, Artificial Sequence
  Description of Artificial Sequence: Synthetic oligonucleotide
  modified_base (2): LNA-G
  modified_base (14): LNA-U
ggaucuuauuucuu

SEQ ID NO: 107384 - DNA, 13 bp, Artificial Sequence
  Description of Artificial Sequence: Synthetic oligonucleotide
  Description of Combined DNA/RNA Molecule: Synthetic oligonucleotide
  modified_base (8): LNA-G
uuucuucggagtt

SEQ ID NO: 107385 - DNA, 12 bp, Artificial Sequence
  Description of Artificial Sequence: Synthetic oligonucleotide
  Description of Combined DNA/RNA Molecule: Synthetic oligonucleotide
  modified_base (7): LNA-G
uucuucggagtt

SEQ ID NO: 107386 - DNA, 11 bp, Artificial Sequence
  Description of Artificial Sequence: Synthetic oligonucleotide
  Description of Combined DNA/RNA Molecule: Synthetic oligonucleotide
  modified_base (6): LNA-G
ucuucggagtt

SEQ ID NO: 107387 - DNA, 10 bp, Artificial Sequence
  Description of Artificial Sequence: Synthetic oligonucleotide
  Description of Combined DNA/RNA Molecule: Synthetic oligonucleotide
  modified_base (5): LNA-G
cuucggagtt

SEQ ID NO: 107388 - DNA, 9 bp, Artificial Sequence
  Description of Artificial Sequence: Synthetic oligonucleotide
  Description of Combined DNA/RNA Molecule: Synthetic oligonucleotide
  modified_base (4): LNA-G
uucggagtt

SEQ ID NO: 107389 - DNA, 8 bp, Artificial Sequence
  Description of Artificial Sequence: Synthetic oligonucleotide
  Description of Combined DNA/RNA Molecule: Synthetic oligonucleotide
  modified_base (3): LNA-G
ucggagtt

SEQ ID NO: 107390 - DNA, 7 bp, Artificial Sequence
  Description of Artificial Sequence: Synthetic oligonucleotide
  Description of Combined DNA/RNA Molecule: Synthetic oligonucleotide
  modified_base (2): LNA-G
cggagtt

SEQ ID NO: 107391 - DNA, 13 bp, Artificial Sequence
  Description of Artificial Sequence: Synthetic oligonucleotide
  Description of Combined DNA/RNA Molecule: Synthetic oligonucleotide
  modified_base (1): LNA-U
  modified_base (8): LNA-G
uuucuucggagtt

SEQ ID NO: 107392 - DNA, 12 bp, Artificial Sequence
  Description of Artificial Sequence: Synthetic oligonucleotide
  Description of Combined DNA/RNA Molecule: Synthetic oligonucleotide
  modified_base (1): LNA-U
  modified_base (7): LNA-G
uucuucggagtt

SEQ ID NO: 107393 - DNA, 11 bp, Artificial Sequence
  Description of Artificial Sequence: Synthetic oligonucleotide
  Description of Combined DNA/RNA Molecule: Synthetic oligonucleotide
  modified_base (1): LNA-U
  modified_base (6): LNA-G
ucuucggagtt

SEQ ID NO: 107394 - DNA, 10 bp, Artificial Sequence
  Description of Artificial Sequence: Synthetic oligonucleotide
  Description of Combined DNA/RNA Molecule: Synthetic oligonucleotide
  modified_base (1): LNA-C
  modified_base (5): LNA-G
cuucggagtt

SEQ ID NO: 107395 - DNA, 9 bp, Artificial Sequence
  Description of Artificial Sequence: Synthetic oligonucleotide
  Description of Combined DNA/RNA Molecule: Synthetic oligonucleotide
  modified_base (1): LNA-U
  modified_base (4): LNA-G
uucggagtt

SEQ ID NO: 107396 - DNA, 8 bp, Artificial Sequence
  Description of Artificial Sequence: Synthetic oligonucleotide
  Description of Combined DNA/RNA Molecule: Synthetic oligonucleotide
  modified_base (1): LNA-U
  modified_base (3): LNA-G
ucggagtt

SEQ ID NO: 107397 - DNA, 7 bp, Artificial Sequence
  Description of Artificial Sequence: Synthetic oligonucleotide
  Description of Combined DNA/RNA Molecule: Synthetic oligonucleotide
  modified_base (1): LNA-C
  modified_base (2): LNA-G
cggagtt

SEQ ID NO: 107398 - DNA, 21 bp, Artificial Sequence
  Description of Artificial Sequence: Synthetic oligonucleotide
  Description of Combined DNA/RNA Molecule: Synthetic oligonucleotide
  modified_base (2): LNA-G
  modified_base (16): LNA-G
ggaucuuauuucuucggagtt

SEQ ID NO: 107399 - DNA, 25 bp, Artificial Sequence
  Description of Artificial Sequence: Synthetic oligonucleotide
  Description of Combined DNA/RNA Molecule: Synthetic oligonucleotide
ggaucuuauuucuucggagacaatg

SEQ ID NO: 107400 - RNA, 25 nt, Artificial Sequence
  Description of Artificial Sequence: Synthetic oligonucleotide
uaagcagaguucaaaagcccuucag

SEQ ID NO: 107401 - RNA, 25 nt, Artificial Sequence
  Description of Artificial Sequence: Synthetic oligonucleotide
agcagaguucaaaagcccuucagcg

SEQ ID NO: 107402 - RNA, 25 nt, Artificial Sequence
  Description of Artificial Sequence: Synthetic oligonucleotide
cucagggucugagugaagccgcucg

SEQ ID NO: 107403 - RNA, 25 nt, Artificial Sequence
  Description of Artificial Sequence: Synthetic oligonucleotide
caagcaacuacaucacgccagucaa

SEQ ID NO: 107404 - RNA, 25 nt, Artificial Sequence
  Description of Artificial Sequence: Synthetic oligonucleotide
aucaauggcagcuucuuggugcgug

SEQ ID NO: 107405 - RNA, 25 nt, Artificial Sequence
  Description of Artificial Sequence: Synthetic oligonucleotide
uuccagcccacauuggauucaucag

SEQ ID NO: 107406 - RNA, 25 nt, Artificial Sequence
  Description of Artificial Sequence: Synthetic oligonucleotide
cagcugagaauguggaauaccuaag

SEQ ID NO: 107407 - RNA, 25 nt, Artificial Sequence
  Description of Artificial Sequence: Synthetic oligonucleotide
aacguaucuccuaauuugaggcuca

SEQ ID NO: 107408 - RNA, 25 nt, Artificial Sequence
  Description of Artificial Sequence: Synthetic oligonucleotide
ccuaaaauaauuucucuacaauugg

SEQ ID NO: 107409 - RNA, 25 nt, Artificial Sequence
  Description of Artificial Sequence: Synthetic oligonucleotide
uggaagauucagcuaguuaggagcc

SEQ ID NO: 107410 - RNA, 25 nt, Artificial Sequence
  Description of Artificial Sequence: Synthetic oligonucleotide
uuaaacucuccuagucaauauccac

SEQ ID NO: 107411 - RNA, 25 nt, Artificial Sequence
  Description of Artificial Sequence: Synthetic oligonucleotide
cagccuacaguuauguucagucaca

SEQ ID NO: 107412 - RNA, 25 nt, Artificial Sequence
  Description of Artificial Sequence: Synthetic oligonucleotide
guuauguucagucacacacacauac

SEQ ID NO: 107413 - RNA, 25 nt, Artificial Sequence
  Description of Artificial Sequence: Synthetic oligonucleotide
cacauacaaaauguuccuuuugcuu

SEQ ID NO: 107414 - RNA, 25 nt, Artificial Sequence
  Description of Artificial Sequence: Synthetic oligonucleotide
uccuuuugcuuuuaaaguaauuuuu

SEQ ID NO: 107415 - RNA, 25 nt, Artificial Sequence
  Description of Artificial Sequence: Synthetic oligonucleotide
ugaccugugaagcaacagucaaugg

SEQ ID NO: 107416 - RNA, 25 nt, Artificial Sequence
  Description of Artificial Sequence: Synthetic oligonucleotide
cuaucucacacaucgacaaaccaau

SEQ ID NO: 107417 - RNA, 25 nt, Artificial Sequence
  Description of Artificial Sequence: Synthetic oligonucleotide
uguccucaauuguacugcuaccacu

SEQ ID NO: 107418 - RNA, 25 nt, Artificial Sequence
  Description of Artificial Sequence: Synthetic oligonucleotide
aaaccguagcuggcaagcggucuua

SEQ ID NO: 107419 - RNA, 25 nt, Artificial Sequence
  Description of Artificial Sequence: Synthetic oligonucleotide
uagcuggcaagcggucuuaccggcu

SEQ ID NO: 107420 - RNA, 25 nt, Artificial Sequence
  Description of Artificial Sequence: Synthetic oligonucleotide
uuguaugguuaaaagauggguuacc

SEQ ID NO: 107421 - RNA, 25 nt, Artificial Sequence
  Description of Artificial Sequence: Synthetic oligonucleotide
ugguuaaaagauggguuaccugcga

SEQ ID NO: 107422 - RNA, 25 nt, Artificial Sequence
  Description of Artificial Sequence: Synthetic oligonucleotide
cagggaauuauacaaucuugcugag

SEQ ID NO: 107423 - RNA, 25 nt, Artificial Sequence
  Description of Artificial Sequence: Synthetic oligonucleotide
acaaucuugcugagcauaaaacagu

SEQ ID NO: 107424 - RNA, 25 nt, Artificial Sequence
  Description of Artificial Sequence: Synthetic oligonucleotide
ccaauaaugaagaguccuuuauccu

SEQ ID NO: 107425 - RNA, 25 nt, Artificial Sequence
  Description of Artificial Sequence: Synthetic oligonucleotide
acuuuggauguuccaacgcaaguug

SEQ ID NO: 107426 - RNA, 25 nt, Artificial Sequence
  Description of Artificial Sequence: Synthetic oligonucleotide
aaugcuuccacuaaacugaaaccau

SEQ ID NO: 107427 - RNA, 25 nt, Artificial Sequence
  Description of Artificial Sequence: Synthetic oligonucleotide
gagaaaguuugacuuuguuaaauau

SEQ ID NO: 107428 - RNA, 25 nt, Artificial Sequence
  Description of Artificial Sequence: Synthetic oligonucleotide
aaagaacuacuguauauuaaaaguu

SEQ ID NO: 107429 - RNA, 25 nt, Artificial Sequence
  Description of Artificial Sequence: Synthetic oligonucleotide
uuagaaauacggguuuugacuuaac

SEQ ID NO: 107430 - RNA, 25 nt, Artificial Sequence
  Description of Artificial Sequence: Synthetic oligonucleotide
aacauggguacagcaaacucagcac

SEQ ID NO: 107431 - RNA, 25 nt, Artificial Sequence
  Description of Artificial Sequence: Synthetic oligonucleotide
aaagacacagaagaugcugaccuca

SEQ ID NO: 107432 - RNA, 25 nt, Artificial Sequence
  Description of Artificial Sequence: Synthetic oligonucleotide
uaguagggagguuuauucagaucgc

SEQ ID NO: 107433 - RNA, 25 nt, Artificial Sequence
  Description of Artificial Sequence: Synthetic oligonucleotide
gccuucugcagcaggguucugggau

SEQ ID NO: 107434 - RNA, 25 nt, Artificial Sequence
  Description of Artificial Sequence: Synthetic oligonucleotide
ggucugguacauauuggaaauuaug

SEQ ID NO: 107435 - RNA, 25 nt, Artificial Sequence
  Description of Artificial Sequence: Synthetic oligonucleotide
cuaguccuuccgauggaagcacuag

SEQ ID NO: 107436 - RNA, 25 nt, Artificial Sequence
  Description of Artificial Sequence: Synthetic oligonucleotide
ccagugaauauuguuuuuaugugga

SEQ ID NO: 107437 - RNA, 25 nt, Artificial Sequence
  Description of Artificial Sequence: Synthetic oligonucleotide
augaauucaaguuggaauugguaga

SEQ ID NO: 107438 - RNA, 25 nt, Artificial Sequence
  Description of Artificial Sequence: Synthetic oligonucleotide
caggacacagauuuagacuuggaga

SEQ ID NO: 107439 - RNA, 25 nt, Artificial Sequence
  Description of Artificial Sequence: Synthetic oligonucleotide
cucaaagcacaguuacaguauucca

SEQ ID NO: 107440 - RNA, 25 nt, Artificial Sequence
  Description of Artificial Sequence: Synthetic oligonucleotide
accacugccaccacugaugaauuaa

SEQ ID NO: 107441 - RNA, 25 nt, Artificial Sequence
  Description of Artificial Sequence: Synthetic oligonucleotide
gaaacuacuagugccacaucaucac

SEQ ID NO: 107442 - RNA, 25 nt, Artificial Sequence
  Description of Artificial Sequence: Synthetic oligonucleotide
aagucggacagccucaccaaacaga

SEQ ID NO: 107443 - RNA, 25 nt, Artificial Sequence
  Description of Artificial Sequence: Synthetic oligonucleotide
gaaagcgaaaaauggaacaugaugg

SEQ ID NO: 107444 - RNA, 25 nt, Artificial Sequence
  Description of Artificial Sequence: Synthetic oligonucleotide
cccucugauuuagcauguagacugc

SEQ ID NO: 107445 - RNA, 25 nt, Artificial Sequence
  Description of Artificial Sequence: Synthetic oligonucleotide
ugagcuauuuaaggaucuauuuaug

SEQ ID NO: 107446 - RNA, 25 nt, Artificial Sequence
  Description of Artificial Sequence: Synthetic oligonucleotide
aaaaggugaaaaagcacuauuauca

SEQ ID NO: 107447 - RNA, 25 nt, Artificial Sequence
  Description of Artificial Sequence: Synthetic oligonucleotide
gaaaaagcacuauuaucaguucugc

SEQ ID NO: 107448 - RNA, 25 nt, Artificial Sequence
  Description of Artificial Sequence: Synthetic oligonucleotide
ggcugaaaagaaagauuaaaccuac

SEQ ID NO: 107449 - RNA, 25 nt, Artificial Sequence
  Description of Artificial Sequence: Synthetic oligonucleotide
uaaacccuuauaauaaaauccuucu

SEQ ID NO: 107450 - RNA, 25 nt, Artificial Sequence
  Description of Artificial Sequence: Synthetic oligonucleotide
cauacuauuagccaaugcuguagac

SEQ ID NO: 107451 - RNA, 25 nt, Artificial Sequence
  Description of Artificial Sequence: Synthetic oligonucleotide
gacagaagcauuuugauaggaauag

SEQ ID NO: 107452 - RNA, 25 nt, Artificial Sequence
  Description of Artificial Sequence: Synthetic oligonucleotide
agagcaaauaagauaauggcccuga

SEQ ID NO: 107453 - RNA, 25 nt, Artificial Sequence
  Description of Artificial Sequence: Synthetic oligonucleotide
ccaacauuuuucucuuccucaagca

SEQ ID NO: 107454 - RNA, 25 nt, Artificial Sequence
  Description of Artificial Sequence: Synthetic oligonucleotide
uuaaguaugagaaaaguucagccca

SEQ ID NO: 107455 - RNA, 25 nt, Artificial Sequence
  Description of Artificial Sequence: Synthetic oligonucleotide
caggaauaaagauggcugcugaacc

SEQ ID NO: 107456 - RNA, 25 nt, Artificial Sequence
  Description of Artificial Sequence: Synthetic oligonucleotide
aauuugaaugaccaaguucucuuca

SEQ ID NO: 107457 - RNA, 25 nt, Artificial Sequence
  Description of Artificial Sequence: Synthetic oligonucleotide
auguauaaagauagccagccuagag

SEQ ID NO: 107458 - RNA, 25 nt, Artificial Sequence
  Description of Artificial Sequence: Synthetic oligonucleotide
ggcuguaacuaucucugugaagugu

SEQ ID NO: 107459 - RNA, 25 nt, Artificial Sequence
  Description of Artificial Sequence: Synthetic oligonucleotide
ucugugaagugugagaaaauuucaa

SEQ ID NO: 107460 - RNA, 25 nt, Artificial Sequence
  Description of Artificial Sequence: Synthetic oligonucleotide
ccuuuaaggaaaugaauccuccuga

SEQ ID NO: 107461 - RNA, 25 nt, Artificial Sequence
  Description of Artificial Sequence: Synthetic oligonucleotide
aaggauacaaaaagugacaucauau

SEQ ID NO: 107462 - RNA, 25 nt, Artificial Sequence
  Description of Artificial Sequence: Synthetic oligonucleotide
agaugcaauuugaaucuucaucaua

SEQ ID NO: 107463 - RNA, 25 nt, Artificial Sequence
  Description of Artificial Sequence: Synthetic oligonucleotide
guucaaaacgaagacuagcuauuaa

SEQ ID NO: 107464 - RNA, 25 nt, Artificial Sequence
  Description of Artificial Sequence: Synthetic oligonucleotide
gugaaaccucaucucuacuaaaaau

SEQ ID NO: 107465 - RNA, 25 nt, Artificial Sequence
  Description of Artificial Sequence: Synthetic oligonucleotide
acgaaagagaagcucuaucucgccu

SEQ ID NO: 107466 - RNA, 25 nt, Artificial Sequence
  Description of Artificial Sequence: Synthetic oligonucleotide
cuccacaagcgccuucgguccaguu

SEQ ID NO: 107467 - RNA, 25 nt, Artificial Sequence
  Description of Artificial Sequence: Synthetic oligonucleotide
gagaagauuccaaagauguagccgc

SEQ ID NO: 107468 - RNA, 25 nt, Artificial Sequence
  Description of Artificial Sequence: Synthetic oligonucleotide
aaucuggauucaaugaggagacuug

SEQ ID NO: 107469 - RNA, 25 nt, Artificial Sequence
  Description of Artificial Sequence: Synthetic oligonucleotide
agaacagauuugagaguagugagga

SEQ ID NO: 107470 - RNA, 25 nt, Artificial Sequence
  Description of Artificial Sequence: Synthetic oligonucleotide
ccagagcugugcagaugaguacaaa

SEQ ID NO: 107471 - RNA, 25 nt, Artificial Sequence
  Description of Artificial Sequence: Synthetic oligonucleotide
ccucagauuguuguuguuaaugggc

SEQ ID NO: 107472 - RNA, 25 nt, Artificial Sequence
  Description of Artificial Sequence: Synthetic oligonucleotide
cuauuuuaauuauuuuuaauuuauu

SEQ ID NO: 107473 - RNA, 25 nt, Artificial Sequence
  Description of Artificial Sequence: Synthetic oligonucleotide
uuuaauuuauuaauauuuaaauaug

SEQ ID NO: 107474 - RNA, 25 nt, Artificial Sequence
  Description of Artificial Sequence: Synthetic oligonucleotide
augcaguuugaauauccuuuguuuc

SEQ ID NO: 107475 - RNA, 25 nt, Artificial Sequence
  Description of Artificial Sequence: Synthetic oligonucleotide
caugcugcuggcgucuaaguguuug

SEQ ID NO: 107476 - RNA, 25 nt, Artificial Sequence
  Description of Artificial Sequence: Synthetic oligonucleotide
agaugugcauuucaccugugacaaa

SEQ ID NO: 107477 - RNA, 25 nt, Artificial Sequence
  Description of Artificial Sequence: Synthetic oligonucleotide
ucaaaaccugugccaggcugaauua

SEQ ID NO: 107478 - RNA, 25 nt, Artificial Sequence
  Description of Artificial Sequence: Synthetic oligonucleotide
gaauguggguagucauucuuacaau

SEQ ID NO: 107479 - RNA, 25 nt, Artificial Sequence
  Description of Artificial Sequence: Synthetic oligonucleotide
auguggguagucauucuuacaauug

SEQ ID NO: 107480 - RNA, 25 nt, Artificial Sequence
  Description of Artificial Sequence: Synthetic oligonucleotide
ugaaaaugagcaucagagaguguac

SEQ ID NO: 107481 - RNA, 25 nt, Artificial Sequence
  Description of Artificial Sequence: Synthetic oligonucleotide
uugcuuuucauguagaacucagcag

SEQ ID NO: 107482 - RNA, 25 nt, Artificial Sequence
  Description of Artificial Sequence: Synthetic oligonucleotide
uguauuucuauauuuauuuucagua

SEQ ID NO: 107483 - RNA, 25 nt, Artificial Sequence
  Description of Artificial Sequence: Synthetic oligonucleotide
uuugauuaauguuucuuaaauggaa

SEQ ID NO: 107484 - RNA, 25 nt, Artificial Sequence
  Description of Artificial Sequence: Synthetic oligonucleotide
caacguguauagugccuaaaauugu

SEQ ID NO: 107485 - RNA, 25 nt, Artificial Sequence
  Description of Artificial Sequence: Synthetic oligonucleotide
cauauccuuggcuacuaacaucugg

SEQ ID NO: 107486 - RNA, 25 nt, Artificial Sequence
  Description of Artificial Sequence: Synthetic oligonucleotide
uacuaacaucuggagacugugagcu

SEQ ID NO: 107487 - RNA, 25 nt, Artificial Sequence
  Description of Artificial Sequence: Synthetic oligonucleotide
cauaaguugugugcuuuuuauuaau

SEQ ID NO: 107488 - RNA, 25 nt, Artificial Sequence
  Description of Artificial Sequence: Synthetic oligonucleotide
gcaucauuuuggcucuucuuacauu

SEQ ID NO: 107489 - RNA, 25 nt, Artificial Sequence
  Description of Artificial Sequence: Synthetic oligonucleotide
gcucuucuuacauuuguaaaaaugu

SEQ ID NO: 107490 - RNA, 25 nt, Artificial Sequence
  Description of Artificial Sequence: Synthetic oligonucleotide
agauuaggucaucuuaauucauauu

SEQ ID NO: 107491 - RNA, 25 nt, Artificial Sequence
  Description of Artificial Sequence: Synthetic oligonucleotide
auggaauugaaagaacuaaucauga

SEQ ID NO: 107492 - RNA, 25 nt, Artificial Sequence
  Description of Artificial Sequence: Synthetic oligonucleotide
cacacucauuccuucugcucuuggg

SEQ ID NO: 107493 - RNA, 25 nt, Artificial Sequence
  Description of Artificial Sequence: Synthetic oligonucleotide
uguagagguaaccaguagcuuugag

SEQ ID NO: 107494 - RNA, 25 nt, Artificial Sequence
  Description of Artificial Sequence: Synthetic oligonucleotide
caaccacaugccacguaauauuuca

SEQ ID NO: 107495 - RNA, 25 nt, Artificial Sequence
  Description of Artificial Sequence: Synthetic oligonucleotide
ucggaaacaaguuauucucuucacu

SEQ ID NO: 107496 - RNA, 25 nt, Artificial Sequence
  Description of Artificial Sequence: Synthetic oligonucleotide
acucccaauaacuaaugcuaagaaa

SEQ ID NO: 107497 - RNA, 25 nt, Artificial Sequence
  Description of Artificial Sequence: Synthetic oligonucleotide
aaugcuaagaaaugcugaaaaucaa

SEQ ID NO: 107498 - RNA, 25 nt, Artificial Sequence
  Description of Artificial Sequence: Synthetic oligonucleotide
gucuuucucuaaauaugauuacuuu

SEQ ID NO: 107499 - RNA, 25 nt, Artificial Sequence
  Description of Artificial Sequence: Synthetic oligonucleotide
ugaauuucaggcauuuuguucuaca

SEQ ID NO: 107500 - RNA, 25 nt, Artificial Sequence
  Description of Artificial Sequence: Synthetic oligonucleotide
cgauucccucucacccgggacucuc

SEQ ID NO: 107501 - RNA, 25 nt, Artificial Sequence
  Description of Artificial Sequence: Synthetic oligonucleotide
aggaaagugaaccuuuaaaguaaag

SEQ ID NO: 107502 - RNA, 25 nt, Artificial Sequence
  Description of Artificial Sequence: Synthetic oligonucleotide
gaggcugcaugcucuggaagccugg

SEQ ID NO: 107503 - RNA, 25 nt, Artificial Sequence
  Description of Artificial Sequence: Synthetic oligonucleotide
ucucugaacagaaaacaaaagagag

SEQ ID NO: 107504 - RNA, 25 nt, Artificial Sequence
  Description of Artificial Sequence: Synthetic oligonucleotide
aacuuggcuguaaucaguuaugccg

SEQ ID NO: 107505 - RNA, 25 nt, Artificial Sequence
  Description of Artificial Sequence: Synthetic oligonucleotide
agaagccaaaauuaaaagaagucca

SEQ ID NO: 107506 - RNA, 25 nt, Artificial Sequence
  Description of Artificial Sequence: Synthetic oligonucleotide
auuaaaagaaguccaggugagguua

SEQ ID NO: 107507 - RNA, 25 nt, Artificial Sequence
  Description of Artificial Sequence: Synthetic oligonucleotide
gaauccggauuaucgggaagaggac

SEQ ID NO: 107508 - RNA, 25 nt, Artificial Sequence
  Description of Artificial Sequence: Synthetic oligonucleotide
aaugugacaucaaagcaaguauugu

SEQ ID NO: 107509 - RNA, 25 nt, Artificial Sequence
  Description of Artificial Sequence: Synthetic oligonucleotide
caucaaagcaaguauuguagcacuc

SEQ ID NO: 107510 - RNA, 25 nt, Artificial Sequence
  Description of Artificial Sequence: Synthetic oligonucleotide
agagagagaaaacaaaaccacaaau

SEQ ID NO: 107511 - RNA, 25 nt, Artificial Sequence
  Description of Artificial Sequence: Synthetic oligonucleotide
ucgcuguaguauuuaagcccauaca

SEQ ID NO: 107512 - RNA, 25 nt, Artificial Sequence
  Description of Artificial Sequence: Synthetic oligonucleotide
cgcuguaguauuuaagcccauacag

SEQ ID NO: 107513 - RNA, 25 nt, Artificial Sequence
  Description of Artificial Sequence: Synthetic oligonucleotide
auuuaagcccauacagaaaccuucc

SEQ ID NO: 107514 - RNA, 25 nt, Artificial Sequence
  Description of Artificial Sequence: Synthetic oligonucleotide
auuaaaauaaacaugguauaccuac

SEQ ID NO: 107515 - RNA, 25 nt, Artificial Sequence
  Description of Artificial Sequence: Synthetic oligonucleotide
cuguucugaucggccaguuuucgga

SEQ ID NO: 107516 - RNA, 25 nt, Artificial Sequence
  Description of Artificial Sequence: Synthetic oligonucleotide
aaauaauuugaacuuuggaacaggg

SEQ ID NO: 107517 - RNA, 25 nt, Artificial Sequence
  Description of Artificial Sequence: Synthetic oligonucleotide
ugcgaccuuaauuuaacuuuccagu

SEQ ID NO: 107518 - RNA, 25 nt, Artificial Sequence
  Description of Artificial Sequence: Synthetic oligonucleotide
cugagaaagcuaaaguuugguuuug

SEQ ID NO: 107519 - RNA, 25 nt, Artificial Sequence
  Description of Artificial Sequence: Synthetic oligonucleotide
aguaaagaugcuacuucccacugua

SEQ ID NO: 107520 - RNA, 25 nt, Artificial Sequence
  Description of Artificial Sequence: Synthetic oligonucleotide
cugcuuaauugcugauaccauauga

SEQ ID NO: 107521 - RNA, 25 nt, Artificial Sequence
  Description of Artificial Sequence: Synthetic oligonucleotide
uaccauaugaaugaaacaugggcug

SEQ ID NO: 107522 - RNA, 25 nt, Artificial Sequence
  Description of Artificial Sequence: Synthetic oligonucleotide
aacuuucuuauccaacuuuuucaua

SEQ ID NO: 107523 - RNA, 25 nt, Artificial Sequence
  Description of Artificial Sequence: Synthetic oligonucleotide
ccuugcaugacaucaugaggccgga

SEQ ID NO: 107524 - RNA, 25 nt, Artificial Sequence
  Description of Artificial Sequence: Synthetic oligonucleotide
ugaauuuguauaugacugcauuugu

SEQ ID NO: 107525 - RNA, 25 nt, Artificial Sequence
  Description of Artificial Sequence: Synthetic oligonucleotide
gaauccuaguagaauguuuacuacc

SEQ ID NO: 107526 - RNA, 25 nt, Artificial Sequence
  Description of Artificial Sequence: Synthetic oligonucleotide
gaaagggaagaauuuuuugaugaaa

SEQ ID NO: 107527 - RNA, 25 nt, Artificial Sequence
  Description of Artificial Sequence: Synthetic oligonucleotide
uaucggcaugccagugugugaauuu

SEQ ID NO: 107528 - RNA, 25 nt, Artificial Sequence
  Description of Artificial Sequence: Synthetic oligonucleotide
caccucauaguagagcaauguaugu

SEQ ID NO: 107529 - RNA, 25 nt, Artificial Sequence
  Description of Artificial Sequence: Synthetic oligonucleotide
ccagaauugccaaagcacauauaua

SEQ ID NO: 107530 - RNA, 25 nt, Artificial Sequence
  Description of Artificial Sequence: Synthetic oligonucleotide
uggugaucuggguaauaguuucucc

SEQ ID NO: 107531 - RNA, 25 nt, Artificial Sequence
  Description of Artificial Sequence: Synthetic oligonucleotide
gaucuggguaauaguuucuccaaau

SEQ ID NO: 107532 - RNA, 25 nt, Artificial Sequence
  Description of Artificial Sequence: Synthetic oligonucleotide
ggaugugaugaauacuuccuagaaa

SEQ ID NO: 107533 - RNA, 25 nt, Artificial Sequence
  Description of Artificial Sequence: Synthetic oligonucleotide
cauuuccacagcuacaccauauaug

SEQ ID NO: 107534 - RNA, 25 nt, Artificial Sequence
  Description of Artificial Sequence: Synthetic oligonucleotide
acagcuacaccauauaugaauggag

SEQ ID NO: 107535 - RNA, 25 nt, Artificial Sequence
  Description of Artificial Sequence: Synthetic oligonucleotide
ugcaguucuuacacgagaagaagau

SEQ ID NO: 107536 - RNA, 25 nt, Artificial Sequence
  Description of Artificial Sequence: Synthetic oligonucleotide
acgagaagaagaucauuuacaggga

SEQ ID NO: 107537 - RNA, 25 nt, Artificial Sequence
  Description of Artificial Sequence: Synthetic oligonucleotide
cgagaagaagaucauuuacagggac

SEQ ID NO: 107538 - RNA, 25 nt, Artificial Sequence
  Description of Artificial Sequence: Synthetic oligonucleotide
aagaagaucauuuacagggaccuga

SEQ ID NO: 107539 - RNA, 25 nt, Artificial Sequence
  Description of Artificial Sequence: Synthetic oligonucleotide
agaggaagagguguuugacugcauc

SEQ ID NO: 107540 - RNA, 25 nt, Artificial Sequence
  Description of Artificial Sequence: Synthetic oligonucleotide
gaggaagagguguuugacugcaucg

SEQ ID NO: 107541 - RNA, 25 nt, Artificial Sequence
  Description of Artificial Sequence: Synthetic oligonucleotide
cuacuuugagggcgaguucacaggg

SEQ ID NO: 107542 - RNA, 25 nt, Artificial Sequence
  Description of Artificial Sequence: Synthetic oligonucleotide
agggcaucuccuggcaccucugucc

SEQ ID NO: 107543 - RNA, 25 nt, Artificial Sequence
  Description of Artificial Sequence: Synthetic oligonucleotide
ggagugauaugguuugucuuuuuaa

SEQ ID NO: 107544 - RNA, 25 nt, Artificial Sequence
  Description of Artificial Sequence: Synthetic oligonucleotide
gagugauaugguuugucuuuuuaag

SEQ ID NO: 107545 - RNA, 25 nt, Artificial Sequence
  Description of Artificial Sequence: Synthetic oligonucleotide
ugcaguaaagauccuaaagguuguc

SEQ ID NO: 107546 - RNA, 25 nt, Artificial Sequence
  Description of Artificial Sequence: Synthetic oligonucleotide
aguaaagauccuaaagguugucgac

SEQ ID NO: 107547 - RNA, 25 nt, Artificial Sequence
  Description of Artificial Sequence: Synthetic oligonucleotide
ugacaaaggacaaccuggcaauugu

SEQ ID NO: 107548 - RNA, 25 nt, Artificial Sequence
  Description of Artificial Sequence: Synthetic oligonucleotide
gcaauugugacccaguggugcgagg

SEQ ID NO: 107549 - RNA, 25 nt, Artificial Sequence
  Description of Artificial Sequence: Synthetic oligonucleotide
aacaucauccauagagacaugaaau

SEQ ID NO: 107550 - RNA, 25 nt, Artificial Sequence
  Description of Artificial Sequence: Synthetic oligonucleotide
ugaaauccaacaauauauuucucca

SEQ ID NO: 107551 - RNA, 25 nt, Artificial Sequence
  Description of Artificial Sequence: Synthetic oligonucleotide
aacaauauauuucuccaugaaggcu

SEQ ID NO: 107552 - RNA, 25 nt, Artificial Sequence
  Description of Artificial Sequence: Synthetic oligonucleotide
aacaguaaagucacgcuggaguggu

SEQ ID NO: 107553 - RNA, 25 nt, Artificial Sequence
  Description of Artificial Sequence: Synthetic oligonucleotide
ugugaagaaaguaaaggaagagagg

SEQ ID NO: 107554 - RNA, 25 nt, Artificial Sequence
  Description of Artificial Sequence: Synthetic oligonucleotide
cuuccgagccauccuugcaucgggc

SEQ ID NO: 107555 - RNA, 25 nt, Artificial Sequence
  Description of Artificial Sequence: Synthetic oligonucleotide
aauggagguugaauauccuacugug

SEQ ID NO: 107556 - RNA, 25 nt, Artificial Sequence
  Description of Artificial Sequence: Synthetic oligonucleotide
ggagguugaauauccuacuguguaa

SEQ ID NO: 107557 - RNA, 25 nt, Artificial Sequence
  Description of Artificial Sequence: Synthetic oligonucleotide
auuuugaguuuucccuuguagugua

SEQ ID NO: 107558 - RNA, 25 nt, Artificial Sequence
  Description of Artificial Sequence: Synthetic oligonucleotide
uauccuguuuguucuuuguugauug

SEQ ID NO: 107559 - RNA, 25 nt, Artificial Sequence
  Description of Artificial Sequence: Synthetic oligonucleotide
ccuguuuguucuuuguugauugaaa

SEQ ID NO: 107560 - RNA, 25 nt, Artificial Sequence
  Description of Artificial Sequence: Synthetic oligonucleotide
cucuacagccuucuuuuucuuccau

SEQ ID NO: 107561 - RNA, 25 nt, Artificial Sequence
  Description of Artificial Sequence: Synthetic oligonucleotide
ucuuccauagcuaaucuuccuucua

SEQ ID NO: 107562 - RNA, 25 nt, Artificial Sequence
  Description of Artificial Sequence: Synthetic oligonucleotide
auaaucuuccuguugaaugcuucau

SEQ ID NO: 107563 - RNA, 25 nt, Artificial Sequence
  Description of Artificial Sequence: Synthetic oligonucleotide
uaaucuuccuguugaaugcuucaug

SEQ ID NO: 107564 - RNA, 25 nt, Artificial Sequence
  Description of Artificial Sequence: Synthetic oligonucleotide
cuucaugacuugaauucuacuuuga

SEQ ID NO: 107565 - RNA, 25 nt, Artificial Sequence
  Description of Artificial Sequence: Synthetic oligonucleotide
aagagggagagaagcaacuacagac

SEQ ID NO: 107566 - RNA, 25 nt, Artificial Sequence
  Description of Artificial Sequence: Synthetic oligonucleotide
cgucuccuaccagaccaaggucaac

SEQ ID NO: 107567 - RNA, 25 nt, Artificial Sequence
  Description of Artificial Sequence: Synthetic oligonucleotide
gaucaaucggcccgacuaucucgac

SEQ ID NO: 107568 - RNA, 25 nt, Artificial Sequence
  Description of Artificial Sequence: Synthetic oligonucleotide
ggacgaacauccaaccuucccaaac

SEQ ID NO: 107569 - RNA, 25 nt, Artificial Sequence
  Description of Artificial Sequence: Synthetic oligonucleotide
agggucggaacccaagcuuagaacu

SEQ ID NO: 107570 - RNA, 25 nt, Artificial Sequence
  Description of Artificial Sequence: Synthetic oligonucleotide
ucggaacccaagcuuagaacuuuaa

SEQ ID NO: 107571 - RNA, 25 nt, Artificial Sequence
  Description of Artificial Sequence: Synthetic oligonucleotide
acccaagcuuagaacuuuaagcaac

SEQ ID NO: 107572 - RNA, 25 nt, Artificial Sequence
  Description of Artificial Sequence: Synthetic oligonucleotide
gaacuuuaagcaacaagaccaccac

SEQ ID NO: 107573 - RNA, 25 nt, Artificial Sequence
  Description of Artificial Sequence: Synthetic oligonucleotide
acuauucaguggcgagaaauaaagu

SEQ ID NO: 107574 - RNA, 25 nt, Artificial Sequence
  Description of Artificial Sequence: Synthetic oligonucleotide
cuauucaguggcgagaaauaaaguu

SEQ ID NO: 107575 - RNA, 25 nt, Artificial Sequence
  Description of Artificial Sequence: Synthetic oligonucleotide
aaacacagauaacaggaaaugaucc

SEQ ID NO: 107576 - RNA, 25 nt, Artificial Sequence
  Description of Artificial Sequence: Synthetic oligonucleotide
cuuaagaaaagagaagaaaugaaac

SEQ ID NO: 107577 - RNA, 25 nt, Artificial Sequence
  Description of Artificial Sequence: Synthetic oligonucleotide
cugaaggaguguguuuccauccucc

SEQ ID NO: 107578 - RNA, 25 nt, Artificial Sequence
  Description of Artificial Sequence: Synthetic oligonucleotide
ucaccgcgggacugaaaaucuuuga

SEQ ID NO: 107579 - RNA, 25 nt, Artificial Sequence
  Description of Artificial Sequence: Synthetic oligonucleotide
agcagaaauaagcgugccguucagg

SEQ ID NO: 107580 - RNA, 25 nt, Artificial Sequence
  Description of Artificial Sequence: Synthetic oligonucleotide
aagcgugccguucaggguccagaag

SEQ ID NO: 107581 - RNA, 25 nt, Artificial Sequence
  Description of Artificial Sequence: Synthetic oligonucleotide
agaaacagucacucaagacugcuug

SEQ ID NO: 107582 - RNA, 25 nt, Artificial Sequence
  Description of Artificial Sequence: Synthetic oligonucleotide
agaggaagaagguccaugucuuugg

SEQ ID NO: 107583 - RNA, 25 nt, Artificial Sequence
  Description of Artificial Sequence: Synthetic oligonucleotide
uguauucaaaauaugccugaaacac

SEQ ID NO: 107584 - RNA, 25 nt, Artificial Sequence
  Description of Artificial Sequence: Synthetic oligonucleotide
auuuuccucccuuucucuguaccuc

SEQ ID NO: 107585 - RNA, 25 nt, Artificial Sequence
  Description of Artificial Sequence: Synthetic oligonucleotide
caaagaaagauagagcaagacaaga

SEQ ID NO: 107586 - RNA, 25 nt, Artificial Sequence
  Description of Artificial Sequence: Synthetic oligonucleotide
aagaaagauagagcaagacaagaaa

SEQ ID NO: 107587 - RNA, 25 nt, Artificial Sequence
  Description of Artificial Sequence: Synthetic oligonucleotide
gaaagcauuuguuuguacaagaucc

SEQ ID NO: 107588 - RNA, 25 nt, Artificial Sequence
  Description of Artificial Sequence: Synthetic oligonucleotide
ugaguuaaacgaacguacuugcaga

SEQ ID NO: 107589 - RNA, 25 nt, Artificial Sequence
  Description of Artificial Sequence: Synthetic oligonucleotide
acugauacagaacgaucgauacaga

SEQ ID NO: 107590 - RNA, 25 nt, Artificial Sequence
  Description of Artificial Sequence: Synthetic oligonucleotide
auauuauauauauauaaaaauaaau

SEQ ID NO: 107591 - RNA, 25 nt, Artificial Sequence
  Description of Artificial Sequence: Synthetic oligonucleotide
auuauauauauauaaaaauaaauau

SEQ ID NO: 107592 - RNA, 25 nt, Artificial Sequence
  Description of Artificial Sequence: Synthetic oligonucleotide
ucacuggauguauuugacugcugug

SEQ ID NO: 107593 - RNA, 25 nt, Artificial Sequence
  Description of Artificial Sequence: Synthetic oligonucleotide
cagggaagaggaggagaugagagac

SEQ ID NO: 107594 - RNA, 25 nt, Artificial Sequence
  Description of Artificial Sequence: Synthetic oligonucleotide
augaucuuuuuuuugucccacuugg

SEQ ID NO: 107595 - RNA, 27 nt, Artificial Sequence
  Description of Artificial Sequence: Synthetic oligonucleotide
ggccgugaacuccucaucaaaauaccu

SEQ ID NO: 107596 - RNA, 27 nt, Artificial Sequence
  Description of Artificial Sequence: Synthetic oligonucleotide
uggugugauggugaucaucugggccgu

SEQ ID NO: 107597 - RNA, 27 nt, Artificial Sequence
  Description of Artificial Sequence: Synthetic oligonucleotide
aaacccgcaggauaguuuucuucccua

SEQ ID NO: 107598 - RNA, 27 nt, Artificial Sequence
  Description of Artificial Sequence: Synthetic oligonucleotide
caaacuggaugaaauaaauuaaaaccc

SEQ ID NO: 107599 - RNA, 27 nt, Artificial Sequence
  Description of Artificial Sequence: Synthetic oligonucleotide
agaaguccuuaacauuucccuacguga

SEQ ID NO: 107600 - RNA, 27 nt, Artificial Sequence
  Description of Artificial Sequence: Synthetic oligonucleotide
cucugucccacuggguaaacccuggcc

SEQ ID NO: 107601 - RNA, 27 nt, Artificial Sequence
  Description of Artificial Sequence: Synthetic oligonucleotide
cacaauaacaaauuuaaaccuugcucc

SEQ ID NO: 107602 - RNA, 27 nt, Artificial Sequence
  Description of Artificial Sequence: Synthetic oligonucleotide
aaaugcauuugaacaacauaauacaca

SEQ ID NO: 107603 - RNA, 27 nt, Artificial Sequence
  Description of Artificial Sequence: Synthetic oligonucleotide
ggcuuuccugucacaaagauuaaaaac

SEQ ID NO: 107604 - RNA, 27 nt, Artificial Sequence
  Description of Artificial Sequence: Synthetic oligonucleotide
agggcuuuccugucacaaagauuaaaa

SEQ ID NO: 107605 - RNA, 27 nt, Artificial Sequence
  Description of Artificial Sequence: Synthetic oligonucleotide
ggccaugcugggagacauaagcagcag

SEQ ID NO: 107606 - RNA, 27 nt, Artificial Sequence
  Description of Artificial Sequence: Synthetic oligonucleotide
ucagggagaagcuucugaaacacuucu

SEQ ID NO: 107607 - RNA, 27 nt, Artificial Sequence
  Description of Artificial Sequence: Synthetic oligonucleotide
aagggcuucuuccuuauugauggucag

SEQ ID NO: 107608 - RNA, 27 nt, Artificial Sequence
  Description of Artificial Sequence: Synthetic oligonucleotide
ugaagggcuucuuccuuauugaugguc

SEQ ID NO: 107609 - RNA, 27 nt, Artificial Sequence
  Description of Artificial Sequence: Synthetic oligonucleotide
cgcugaagggcuucuuccuuauugaug

SEQ ID NO: 107610 - RNA, 27 nt, Artificial Sequence
  Description of Artificial Sequence: Synthetic oligonucleotide
gccgcugaagggcuucuuccuuauuga

SEQ ID NO: 107611 - RNA, 27 nt, Artificial Sequence
  Description of Artificial Sequence: Synthetic oligonucleotide
acuggccgcugaagggcuucuuccuua

SEQ ID NO: 107612 - RNA, 27 nt, Artificial Sequence
  Description of Artificial Sequence: Synthetic oligonucleotide
cggagcuuuucaccuuuaguuaugcuu

SEQ ID NO: 107613 - RNA, 27 nt, Artificial Sequence
  Description of Artificial Sequence: Synthetic oligonucleotide
ccggagcuuuucaccuuuaguuaugcu

SEQ ID NO: 107614 - RNA, 27 nt, Artificial Sequence
  Description of Artificial Sequence: Synthetic oligonucleotide
cagacuguugacuggcgugauguaguu

SEQ ID NO: 107615 - RNA, 27 nt, Artificial Sequence
  Description of Artificial Sequence: Synthetic oligonucleotide
cuuuugaacucugcuuaaauccagugg

SEQ ID NO: 107616 - RNA, 27 nt, Artificial Sequence
  Description of Artificial Sequence: Synthetic oligonucleotide
gcuuuugaacucugcuuaaauccagug

SEQ ID NO: 107617 - RNA, 27 nt, Artificial Sequence
  Description of Artificial Sequence: Synthetic oligonucleotide
agggcuuuugaacucugcuuaaaucca

SEQ ID NO: 107618 - RNA, 27 nt, Artificial Sequence
  Description of Artificial Sequence: Synthetic oligonucleotide
aagggcuuuugaacucugcuuaaaucc

SEQ ID NO: 107619 - RNA, 27 nt, Artificial Sequence
  Description of Artificial Sequence: Synthetic oligonucleotide
ugaagggcuuuugaacucugcuuaaau

SEQ ID NO: 107620 - RNA, 27 nt, Artificial Sequence
  Description of Artificial Sequence: Synthetic oligonucleotide
cugaagggcuuuugaacucugcuuaaa

SEQ ID NO: 107621 - RNA, 27 nt, Artificial Sequence
  Description of Artificial Sequence: Synthetic oligonucleotide
cgcugaagggcuuuugaacucugcuua

SEQ ID NO: 107622 - RNA, 27 nt, Artificial Sequence
  Description of Artificial Sequence: Synthetic oligonucleotide
cgagcggcuucacucagacccugaggc

SEQ ID NO: 107623 - RNA, 27 nt, Artificial Sequence
  Description of Artificial Sequence: Synthetic oligonucleotide
uugacuggcgugauguaguugcuuggg

SEQ ID NO: 107624 - RNA, 27 nt, Artificial Sequence
  Description of Artificial Sequence: Synthetic oligonucleotide
cacgcaccaagaagcugccauugaucc

SEQ ID NO: 107625 - RNA, 27 nt, Artificial Sequence
  Description of Artificial Sequence: Synthetic oligonucleotide
cugaugaauccaaugugggcuggaauc

SEQ ID NO: 107626 - RNA, 27 nt, Artificial Sequence
  Description of Artificial Sequence: Synthetic oligonucleotide
cuuagguauuccacauucucagcugug

SEQ ID NO: 107627 - RNA, 27 nt, Artificial Sequence
  Description of Artificial Sequence: Synthetic oligonucleotide
ugagccucaaauuaggagauacguuuu

SEQ ID NO: 107628 - RNA, 27 nt, Artificial Sequence
  Description of Artificial Sequence: Synthetic oligonucleotide
ccaauuguagagaaauuauuuuaggaa

SEQ ID NO: 107629 - RNA, 27 nt, Artificial Sequence
  Description of Artificial Sequence: Synthetic oligonucleotide
ggcuccuaacuagcugaaucuuccaau

SEQ ID NO: 107630 - RNA, 27 nt, Artificial Sequence
  Description of Artificial Sequence: Synthetic oligonucleotide
guggauauugacuaggagaguuuaaaa

SEQ ID NO: 107631 - RNA, 27 nt, Artificial Sequence
  Description of Artificial Sequence: Synthetic oligonucleotide
ugugacugaacauaacuguaggcugaa

SEQ ID NO: 107632 - RNA, 27 nt, Artificial Sequence
  Description of Artificial Sequence: Synthetic oligonucleotide
guaugugugugugacugaacauaacug

SEQ ID NO: 107633 - RNA, 27 nt, Artificial Sequence
  Description of Artificial Sequence: Synthetic oligonucleotide
aagcaaaaggaacauuuuguaugugug

SEQ ID NO: 107634 - RNA, 27 nt, Artificial Sequence
  Description of Artificial Sequence: Synthetic oligonucleotide
aaaaauuacuuuaaaagcaaaaggaac

SEQ ID NO: 107635 - RNA, 27 nt, Artificial Sequence
  Description of Artificial Sequence: Synthetic oligonucleotide
ccauugacuguugcuucacaggucaga

SEQ ID NO: 107636 - RNA, 27 nt, Artificial Sequence
  Description of Artificial Sequence: Synthetic oligonucleotide
auugguuugucgaugugugagauaguu

SEQ ID NO: 107637 - RNA, 27 nt, Artificial Sequence
  Description of Artificial Sequence: Synthetic oligonucleotide
agugguagcaguacaauugaggacaag

SEQ ID NO: 107638 - RNA, 27 nt, Artificial Sequence
  Description of Artificial Sequence: Synthetic oligonucleotide
uaagaccgcuugccagcuacgguuuca

SEQ ID NO: 107639 - RNA, 27 nt, Artificial Sequence
  Description of Artificial Sequence: Synthetic oligonucleotide
agccgguaagaccgcuugccagcuacg

SEQ ID NO: 107640 - RNA, 27 nt, Artificial Sequence
  Description of Artificial Sequence: Synthetic oligonucleotide
gguaacccaucuuuuaaccauacaacu

SEQ ID NO: 107641 - RNA, 27 nt, Artificial Sequence
  Description of Artificial Sequence: Synthetic oligonucleotide
ucgcagguaacccaucuuuuaaccaua

SEQ ID NO: 107642 - RNA, 27 nt, Artificial Sequence
  Description of Artificial Sequence: Synthetic oligonucleotide
cucagcaagauuguauaauucccugca

SEQ ID NO: 107643 - RNA, 27 nt, Artificial Sequence
  Description of Artificial Sequence: Synthetic oligonucleotide
acuguuuuaugcucagcaagauuguau

SEQ ID NO: 107644 - RNA, 27 nt, Artificial Sequence
  Description of Artificial Sequence: Synthetic oligonucleotide
aggauaaaggacucuucauuauuggaa

SEQ ID NO: 107645 - RNA, 27 nt, Artificial Sequence
  Description of Artificial Sequence: Synthetic oligonucleotide
caacuugcguuggaacauccaaagugu

SEQ ID NO: 107646 - RNA, 27 nt, Artificial Sequence
  Description of Artificial Sequence: Synthetic oligonucleotide
augguuucaguuuaguggaagcauuua

SEQ ID NO: 107647 - RNA, 27 nt, Artificial Sequence
  Description of Artificial Sequence: Synthetic oligonucleotide
auauuuaacaaagucaaacuuucucac

SEQ ID NO: 107648 - RNA, 27 nt, Artificial Sequence
  Description of Artificial Sequence: Synthetic oligonucleotide
aacuuuuaauauacaguaguucuuuuc

SEQ ID NO: 107649 - RNA, 27 nt, Artificial Sequence
  Description of Artificial Sequence: Synthetic oligonucleotide
guuaagucaaaacccguauuucuaaag

SEQ ID NO: 107650 - RNA, 27 nt, Artificial Sequence
  Description of Artificial Sequence: Synthetic oligonucleotide
gugcugaguuugcuguacccauguuga

SEQ ID NO: 107651 - RNA, 27 nt, Artificial Sequence
  Description of Artificial Sequence: Synthetic oligonucleotide
ugaggucagcaucuucugugucuuuac

SEQ ID NO: 107652 - RNA, 27 nt, Artificial Sequence
  Description of Artificial Sequence: Synthetic oligonucleotide
gcgaucugaauaaaccucccuacuagc

SEQ ID NO: 107653 - RNA, 27 nt, Artificial Sequence
  Description of Artificial Sequence: Synthetic oligonucleotide
aucccagaacccugcugcagaaggcca

SEQ ID NO: 107654 - RNA, 27 nt, Artificial Sequence
  Description of Artificial Sequence: Synthetic oligonucleotide
cauaauuuccaauauguaccagaccuu

SEQ ID NO: 107655 - RNA, 27 nt, Artificial Sequence
  Description of Artificial Sequence: Synthetic oligonucleotide
cuagugcuuccaucggaaggacuaggu

SEQ ID NO: 107656 - RNA, 27 nt, Artificial Sequence
  Description of Artificial Sequence: Synthetic oligonucleotide
uccacauaaaaacaauauucacuggga

SEQ ID NO: 107657 - RNA, 27 nt, Artificial Sequence
  Description of Artificial Sequence: Synthetic oligonucleotide
ucuaccaauuccaacuugaauucauug

SEQ ID NO: 107658 - RNA, 27 nt, Artificial Sequence
  Description of Artificial Sequence: Synthetic oligonucleotide
ucuccaagucuaaaucuguguccugag

SEQ ID NO: 107659 - RNA, 27 nt, Artificial Sequence
  Description of Artificial Sequence: Synthetic oligonucleotide
uggaauacuguaacugugcuuugagga

SEQ ID NO: 107660 - RNA, 27 nt, Artificial Sequence
  Description of Artificial Sequence: Synthetic oligonucleotide
uuaauucaucagugguggcagugguag

SEQ ID NO: 107661 - RNA, 27 nt, Artificial Sequence
  Description of Artificial Sequence: Synthetic oligonucleotide
gugaugauguggcacuaguaguuucuu

SEQ ID NO: 107662 - RNA, 27 nt, Artificial Sequence
  Description of Artificial Sequence: Synthetic oligonucleotide
ucuguuuggugaggcuguccgacuuug

SEQ ID NO: 107663 - RNA, 27 nt, Artificial Sequence
  Description of Artificial Sequence: Synthetic oligonucleotide
ccaucauguuccauuuuucgcuuucuc

SEQ ID NO: 107664 - RNA, 27 nt, Artificial Sequence
  Description of Artificial Sequence: Synthetic oligonucleotide
gcagucuacaugcuaaaucagagggua

SEQ ID NO: 107665 - RNA, 27 nt, Artificial Sequence
  Description of Artificial Sequence: Synthetic oligonucleotide
cauaaauagauccuuaaauagcucaaa

SEQ ID NO: 107666 - RNA, 27 nt, Artificial Sequence
  Description of Artificial Sequence: Synthetic oligonucleotide
ugauaauagugcuuuuucaccuuuuuc

SEQ ID NO: 107667 - RNA, 27 nt, Artificial Sequence
  Description of Artificial Sequence: Synthetic oligonucleotide
gcagaacugauaauagugcuuuuucac

SEQ ID NO: 107668 - RNA, 27 nt, Artificial Sequence
  Description of Artificial Sequence: Synthetic oligonucleotide
guagguuuaaucuuucuuuucagccau

SEQ ID NO: 107669 - RNA, 27 nt, Artificial Sequence
  Description of Artificial Sequence: Synthetic oligonucleotide
agaaggauuuuauuauaaggguuuaau

SEQ ID NO: 107670 - RNA, 27 nt, Artificial Sequence
  Description of Artificial Sequence: Synthetic oligonucleotide
gucuacagcauuggcuaauaguaugaa

SEQ ID NO: 107671 - RNA, 27 nt, Artificial Sequence
  Description of Artificial Sequence: Synthetic oligonucleotide
cuauuccuaucaaaaugcuucugucua

SEQ ID NO: 107672 - RNA, 27 nt, Artificial Sequence
  Description of Artificial Sequence: Synthetic oligonucleotide
ucagggccauuaucuuauuugcucuau

SEQ ID NO: 107673 - RNA, 27 nt, Artificial Sequence
  Description of Artificial Sequence: Synthetic oligonucleotide
ugcuugaggaagagaaaaauguugguc

SEQ ID NO: 107674 - RNA, 27 nt, Artificial Sequence
  Description of Artificial Sequence: Synthetic oligonucleotide
ugggcugaacuuuucucauacuuaaag

SEQ ID NO: 107675 - RNA, 27 nt, Artificial Sequence
  Description of Artificial Sequence: Synthetic oligonucleotide
gguucagcagccaucuuuauuccugcg

SEQ ID NO: 107676 - RNA, 27 nt, Artificial Sequence
  Description of Artificial Sequence: Synthetic oligonucleotide
ugaagagaacuuggucauucaaauuuc

SEQ ID NO: 107677 - RNA, 27 nt, Artificial Sequence
  Description of Artificial Sequence: Synthetic oligonucleotide
cucuaggcuggcuaucuuuauacauac

SEQ ID NO: 107678 - RNA, 27 nt, Artificial Sequence
  Description of Artificial Sequence: Synthetic oligonucleotide
acacuucacagagauaguuacagccau

SEQ ID NO: 107679 - RNA, 27 nt, Artificial Sequence
  Description of Artificial Sequence: Synthetic oligonucleotide
uugaaauuuucucacacuucacagaga

SEQ ID NO: 107680 - RNA, 27 nt, Artificial Sequence
  Description of Artificial Sequence: Synthetic oligonucleotide
ucaggaggauucauuuccuuaaaggaa

SEQ ID NO: 107681 - RNA, 27 nt, Artificial Sequence
  Description of Artificial Sequence: Synthetic oligonucleotide
auaugaugucacuuuuuguauccuuga

SEQ ID NO: 107682 - RNA, 27 nt, Artificial Sequence
  Description of Artificial Sequence: Synthetic oligonucleotide
uaugaugaagauucaaauugcaucuua

SEQ ID NO: 107683 - RNA, 27 nt, Artificial Sequence
  Description of Artificial Sequence: Synthetic oligonucleotide
uuaauagcuagucuucguuuugaacag

SEQ ID NO: 107684 - RNA, 27 nt, Artificial Sequence
  Description of Artificial Sequence: Synthetic oligonucleotide
auuuuuaguagagaugagguuucacca

SEQ ID NO: 107685 - RNA, 27 nt, Artificial Sequence
  Description of Artificial Sequence: Synthetic oligonucleotide
aggcgagauagagcuucucuuucguuc

SEQ ID NO: 107686 - RNA, 27 nt, Artificial Sequence
  Description of Artificial Sequence: Synthetic oligonucleotide
aacuggaccgaaggcgcuuguggagaa

SEQ ID NO: 107687 - RNA, 27 nt, Artificial Sequence
  Description of Artificial Sequence: Synthetic oligonucleotide
gcggcuacaucuuuggaaucuucuccu

SEQ ID NO: 107688 - RNA, 27 nt, Artificial Sequence
  Description of Artificial Sequence: Synthetic oligonucleotide
caagucuccucauugaauccagauugg

SEQ ID NO: 107689 - RNA, 27 nt, Artificial Sequence
  Description of Artificial Sequence: Synthetic oligonucleotide
uccucacuacucucaaaucuguucugg

SEQ ID NO: 107690 - RNA, 27 nt, Artificial Sequence
  Description of Artificial Sequence: Synthetic oligonucleotide
uuuguacucaucugcacagcucuggcu

SEQ ID NO: 107691 - RNA, 27 nt, Artificial Sequence
  Description of Artificial Sequence: Synthetic oligonucleotide
gcccauuaacaacaacaaucugaggug

SEQ ID NO: 107692 - RNA, 27 nt, Artificial Sequence
  Description of Artificial Sequence: Synthetic oligonucleotide
aauaaauuaaaaauaauuaaaauagug

SEQ ID NO: 107693 - RNA, 27 nt, Artificial Sequence
  Description of Artificial Sequence: Synthetic oligonucleotide
cauauuuaaauauuaauaaauuaaaaa

SEQ ID NO: 107694 - RNA, 27 nt, Artificial Sequence
  Description of Artificial Sequence: Synthetic oligonucleotide
gaaacaaaggauauucaaacugcauag

SEQ ID NO: 107695 - RNA, 27 nt, Artificial Sequence
  Description of Artificial Sequence: Synthetic oligonucleotide
caaacacuuagacgccagcagcauggg

SEQ ID NO: 107696 - RNA, 27 nt, Artificial Sequence
  Description of Artificial Sequence: Synthetic oligonucleotide
uuugucacaggugaaaugcacaucuga

SEQ ID NO: 107697 - RNA, 27 nt, Artificial Sequence
  Description of Artificial Sequence: Synthetic oligonucleotide
uaauucagccuggcacagguuuugauc

SEQ ID NO: 107698 - RNA, 27 nt, Artificial Sequence
  Description of Artificial Sequence: Synthetic oligonucleotide
auuguaagaaugacuacccacauucac

SEQ ID NO: 107699 - RNA, 27 nt, Artificial Sequence
  Description of Artificial Sequence: Synthetic oligonucleotide
caauuguaagaaugacuacccacauuc

SEQ ID NO: 107700 - RNA, 27 nt, Artificial Sequence
  Description of Artificial Sequence: Synthetic oligonucleotide
guacacucucugaugcucauuuucaua

SEQ ID NO: 107701 - RNA, 27 nt, Artificial Sequence
  Description of Artificial Sequence: Synthetic oligonucleotide
cugcugaguucuacaugaaaagcaaau

SEQ ID NO: 107702 - RNA, 27 nt, Artificial Sequence
  Description of Artificial Sequence: Synthetic oligonucleotide
uacugaaaauaaauauagaaauacaac

SEQ ID NO: 107703 - RNA, 27 nt, Artificial Sequence
  Description of Artificial Sequence: Synthetic oligonucleotide
uuccauuuaagaaacauuaaucaaaac

SEQ ID NO: 107704 - RNA, 27 nt, Artificial Sequence
  Description of Artificial Sequence: Synthetic oligonucleotide
acaauuuuaggcacuauacacguuguu

SEQ ID NO: 107705 - RNA, 27 nt, Artificial Sequence
  Description of Artificial Sequence: Synthetic oligonucleotide
ccagauguuaguagccaaggauauggu

SEQ ID NO: 107706 - RNA, 27 nt, Artificial Sequence
  Description of Artificial Sequence: Synthetic oligonucleotide
agcucacagucuccagauguuaguagc

SEQ ID NO: 107707 - RNA, 27 nt, Artificial Sequence
  Description of Artificial Sequence: Synthetic oligonucleotide
auuaauaaaaagcacacaacuuauggc

SEQ ID NO: 107708 - RNA, 27 nt, Artificial Sequence
  Description of Artificial Sequence: Synthetic oligonucleotide
aauguaagaagagccaaaaugaugcau

SEQ ID NO: 107709 - RNA, 27 nt, Artificial Sequence
  Description of Artificial Sequence: Synthetic oligonucleotide
acauuuuuacaaauguaagaagagcca

SEQ ID NO: 107710 - RNA, 27 nt, Artificial Sequence
  Description of Artificial Sequence: Synthetic oligonucleotide
aauaugaauuaagaugaccuaaucugu

SEQ ID NO: 107711 - RNA, 27 nt, Artificial Sequence
  Description of Artificial Sequence: Synthetic oligonucleotide
ucaugauuaguucuuucaauuccaucc

SEQ ID NO: 107712 - RNA, 27 nt, Artificial Sequence
  Description of Artificial Sequence: Synthetic oligonucleotide
cccaagagcagaaggaaugagugugca

SEQ ID NO: 107713 - RNA, 27 nt, Artificial Sequence
  Description of Artificial Sequence: Synthetic oligonucleotide
cucaaagcuacugguuaccucuacacc

SEQ ID NO: 107714 - RNA, 27 nt, Artificial Sequence
  Description of Artificial Sequence: Synthetic oligonucleotide
ugaaauauuacguggcaugugguuggg

SEQ ID NO: 107715 - RNA, 27 nt, Artificial Sequence
  Description of Artificial Sequence: Synthetic oligonucleotide
agugaagagaauaacuuguuuccgaag

SEQ ID NO: 107716 - RNA, 27 nt, Artificial Sequence
  Description of Artificial Sequence: Synthetic oligonucleotide
uuucuuagcauuaguuauugggaguga

SEQ ID NO: 107717 - RNA, 27 nt, Artificial Sequence
  Description of Artificial Sequence: Synthetic oligonucleotide
uugauuuucagcauuucuuagcauuag

SEQ ID NO: 107718 - RNA, 27 nt, Artificial Sequence
  Description of Artificial Sequence: Synthetic oligonucleotide
aaaguaaucauauuuagagaaagacag

SEQ ID NO: 107719 - RNA, 27 nt, Artificial Sequence
  Description of Artificial Sequence: Synthetic oligonucleotide
uguagaacaaaaugccugaaauucagc

SEQ ID NO: 107720 - RNA, 27 nt, Artificial Sequence
  Description of Artificial Sequence: Synthetic oligonucleotide
gagagucccgggugagagggaaucgcc

SEQ ID NO: 107721 - RNA, 27 nt, Artificial Sequence
  Description of Artificial Sequence: Synthetic oligonucleotide
cuuuacuuuaaagguucacuuuccuug

SEQ ID NO: 107722 - RNA, 27 nt, Artificial Sequence
  Description of Artificial Sequence: Synthetic oligonucleotide
ccaggcuuccagagcaugcagccuccu

SEQ ID NO: 107723 - RNA, 27 nt, Artificial Sequence
  Description of Artificial Sequence: Synthetic oligonucleotide
cucucuuuuguuuucuguucagagaaa

SEQ ID NO: 107724 - RNA, 27 nt, Artificial Sequence
  Description of Artificial Sequence: Synthetic oligonucleotide
cggcauaacugauuacagccaaguuca

SEQ ID NO: 107725 - RNA, 27 nt, Artificial Sequence
  Description of Artificial Sequence: Synthetic oligonucleotide
uggacuucuuuuaauuuuggcuucuuc

SEQ ID NO: 107726 - RNA, 27 nt, Artificial Sequence
  Description of Artificial Sequence: Synthetic oligonucleotide
uaaccucaccuggacuucuuuuaauuu

SEQ ID NO: 107727 - RNA, 27 nt, Artificial Sequence
  Description of Artificial Sequence: Synthetic oligonucleotide
guccucuucccgauaauccggauucag

SEQ ID NO: 107728 - RNA, 27 nt, Artificial Sequence
  Description of Artificial Sequence: Synthetic oligonucleotide
acaauacuugcuuugaugucacauuaa

SEQ ID NO: 107729 - RNA, 27 nt, Artificial Sequence
  Description of Artificial Sequence: Synthetic oligonucleotide
gagugcuacaauacuugcuuugauguc

SEQ ID NO: 107730 - RNA, 27 nt, Artificial Sequence
  Description of Artificial Sequence: Synthetic oligonucleotide
auuugugguuuuguuuucucucucucu

SEQ ID NO: 107731 - RNA, 27 nt, Artificial Sequence
  Description of Artificial Sequence: Synthetic oligonucleotide
uguaugggcuuaaauacuacagcgagg

SEQ ID NO: 107732 - RNA, 27 nt, Artificial Sequence
  Description of Artificial Sequence: Synthetic oligonucleotide
cuguaugggcuuaaauacuacagcgag

SEQ ID NO: 107733 - RNA, 27 nt, Artificial Sequence
  Description of Artificial Sequence: Synthetic oligonucleotide
ggaagguuucuguaugggcuuaaauac

SEQ ID NO: 107734 - RNA, 27 nt, Artificial Sequence
  Description of Artificial Sequence: Synthetic oligonucleotide
guagguauaccauguuuauuuuaauac

SEQ ID NO: 107735 - RNA, 27 nt, Artificial Sequence
  Description of Artificial Sequence: Synthetic oligonucleotide
uccgaaaacuggccgaucagaacagcc

SEQ ID NO: 107736 - RNA, 27 nt, Artificial Sequence
  Description of Artificial Sequence: Synthetic oligonucleotide
cccuguuccaaaguucaaauuauuugu

SEQ ID NO: 107737 - RNA, 27 nt, Artificial Sequence
  Description of Artificial Sequence: Synthetic oligonucleotide
acuggaaaguuaaauuaaggucgcaau

SEQ ID NO: 107738 - RNA, 27 nt, Artificial Sequence
  Description of Artificial Sequence: Synthetic oligonucleotide
caaaaccaaacuuuagcuuucucagcc

SEQ ID NO: 107739 - RNA, 27 nt, Artificial Sequence
  Description of Artificial Sequence: Synthetic oligonucleotide
uacagugggaaguagcaucuuuacuuu

SEQ ID NO: 107740 - RNA, 27 nt, Artificial Sequence
  Description of Artificial Sequence: Synthetic oligonucleotide
ucauaugguaucagcaauuaagcagua

SEQ ID NO: 107741 - RNA, 27 nt, Artificial Sequence
  Description of Artificial Sequence: Synthetic oligonucleotide
cagcccauguuucauucauaugguauc

SEQ ID NO: 107742 - RNA, 27 nt, Artificial Sequence
  Description of Artificial Sequence: Synthetic oligonucleotide
uaugaaaaaguuggauaagaaaguugg

SEQ ID NO: 107743 - RNA, 27 nt, Artificial Sequence
  Description of Artificial Sequence: Synthetic oligonucleotide
uccggccucaugaugucaugcaaggcu

SEQ ID NO: 107744 - RNA, 27 nt, Artificial Sequence
  Description of Artificial Sequence: Synthetic oligonucleotide
acaaaugcagucauauacaaauucagg

SEQ ID NO: 107745 - RNA, 27 nt, Artificial Sequence
  Description of Artificial Sequence: Synthetic oligonucleotide
gguaguaaacauucuacuaggauucuu

SEQ ID NO: 107746 - RNA, 27 nt, Artificial Sequence
  Description of Artificial Sequence: Synthetic oligonucleotide
uuucaucaaaaaauucuucccuuucug

SEQ ID NO: 107747 - RNA, 27 nt, Artificial Sequence
  Description of Artificial Sequence: Synthetic oligonucleotide
aaauucacacacuggcaugccgauagc

SEQ ID NO: 107748 - RNA, 27 nt, Artificial Sequence
  Description of Artificial Sequence: Synthetic oligonucleotide
acauacauugcucuacuaugaggugaa

SEQ ID NO: 107749 - RNA, 27 nt, Artificial Sequence
  Description of Artificial Sequence: Synthetic oligonucleotide
uauauaugugcuuuggcaauucuggug

SEQ ID NO: 107750 - RNA, 27 nt, Artificial Sequence
  Description of Artificial Sequence: Synthetic oligonucleotide
ggagaaacuauuacccagaucaccacu

SEQ ID NO: 107751 - RNA, 27 nt, Artificial Sequence
  Description of Artificial Sequence: Synthetic oligonucleotide
auuuggagaaacuauuacccagaucac

SEQ ID NO: 107752 - RNA, 27 nt, Artificial Sequence
  Description of Artificial Sequence: Synthetic oligonucleotide
uuucuaggaaguauucaucacauccac

SEQ ID NO: 107753 - RNA, 27 nt, Artificial Sequence
  Description of Artificial Sequence: Synthetic oligonucleotide
cauauaugguguagcuguggaaaugcg

SEQ ID NO: 107754 - RNA, 27 nt, Artificial Sequence
  Description of Artificial Sequence: Synthetic oligonucleotide
cuccauucauauaugguguagcugugg

SEQ ID NO: 107755 - RNA, 27 nt, Artificial Sequence
  Description of Artificial Sequence: Synthetic oligonucleotide
aucuucuucucguguaagaacugcagc

SEQ ID NO: 107756 - RNA, 27 nt, Artificial Sequence
  Description of Artificial Sequence: Synthetic oligonucleotide
ucccuguaaaugaucuucuucucgugu

SEQ ID NO: 107757 - RNA, 27 nt, Artificial Sequence
  Description of Artificial Sequence: Synthetic oligonucleotide
gucccuguaaaugaucuucuucucgug

SEQ ID NO: 107758 - RNA, 27 nt, Artificial Sequence
  Description of Artificial Sequence: Synthetic oligonucleotide
ucaggucccuguaaaugaucuucuucu

SEQ ID NO: 107759 - RNA, 27 nt, Artificial Sequence
  Description of Artificial Sequence: Synthetic oligonucleotide
gaugcagucaaacaccucuuccucugu

SEQ ID NO: 107760 - RNA, 27 nt, Artificial Sequence
  Description of Artificial Sequence: Synthetic oligonucleotide
cgaugcagucaaacaccucuuccucug

SEQ ID NO: 107761 - RNA, 27 nt, Artificial Sequence
  Description of Artificial Sequence: Synthetic oligonucleotide
cccugugaacucgcccucaaaguagcg

SEQ ID NO: 107762 - RNA, 27 nt, Artificial Sequence
  Description of Artificial Sequence: Synthetic oligonucleotide
ggacagaggugccaggagaugcccuca

SEQ ID NO: 107763 - RNA, 27 nt, Artificial Sequence
  Description of Artificial Sequence: Synthetic oligonucleotide
uuaaaaagacaaaccauaucacuccuu

SEQ ID NO: 107764 - RNA, 27 nt, Artificial Sequence
  Description of Artificial Sequence: Synthetic oligonucleotide
cuuaaaaagacaaaccauaucacuccu

SEQ ID NO: 107765 - RNA, 27 nt, Artificial Sequence
  Description of Artificial Sequence: Synthetic oligonucleotide
gacaaccuuuaggaucuuuacugcaac

SEQ ID NO: 107766 - RNA, 27 nt, Artificial Sequence
  Description of Artificial Sequence: Synthetic oligonucleotide
gucgacaaccuuuaggaucuuuacugc

SEQ ID NO: 107767 - RNA, 27 nt, Artificial Sequence
  Description of Artificial Sequence: Synthetic oligonucleotide
acaauugccagguuguccuuugucaug

SEQ ID NO: 107768 - RNA, 27 nt, Artificial Sequence
  Description of Artificial Sequence: Synthetic oligonucleotide
ccucgcaccacugggucacaauugcca

SEQ ID NO: 107769 - RNA, 27 nt, Artificial Sequence
  Description of Artificial Sequence: Synthetic oligonucleotide
auuucaugucucuauggaugauguucu

SEQ ID NO: 107770 - RNA, 27 nt, Artificial Sequence
  Description of Artificial Sequence: Synthetic oligonucleotide
uggagaaauauauuguuggauuucaug

SEQ ID NO: 107771 - RNA, 27 nt, Artificial Sequence
  Description of Artificial Sequence: Synthetic oligonucleotide
agccuucauggagaaauauauuguugg

SEQ ID NO: 107772 - RNA, 27 nt, Artificial Sequence
  Description of Artificial Sequence: Synthetic oligonucleotide
accacuccagcgugacuuuacuguugc

SEQ ID NO: 107773 - RNA, 27 nt, Artificial Sequence
  Description of Artificial Sequence: Synthetic oligonucleotide
ccucucuuccuuuacuuucuucacaca

SEQ ID NO: 107774 - RNA, 27 nt, Artificial Sequence
  Description of Artificial Sequence: Synthetic oligonucleotide
gcccgaugcaaggauggcucggaagcg

SEQ ID NO: 107775 - RNA, 27 nt, Artificial Sequence
  Description of Artificial Sequence: Synthetic oligonucleotide
cacaguaggauauucaaccuccauuuc

SEQ ID NO: 107776 - RNA, 27 nt, Artificial Sequence
  Description of Artificial Sequence: Synthetic oligonucleotide
uuacacaguaggauauucaaccuccau

SEQ ID NO: 107777 - RNA, 27 nt, Artificial Sequence
  Description of Artificial Sequence: Synthetic oligonucleotide
uacacuacaagggaaaacucaaaaucu

SEQ ID NO: 107778 - RNA, 27 nt, Artificial Sequence
  Description of Artificial Sequence: Synthetic oligonucleotide
caaucaacaaagaacaaacaggauaaa

SEQ ID NO: 107779 - RNA, 27 nt, Artificial Sequence
  Description of Artificial Sequence: Synthetic oligonucleotide
uuucaaucaacaaagaacaaacaggau

SEQ ID NO: 107780 - RNA, 27 nt, Artificial Sequence
  Description of Artificial Sequence: Synthetic oligonucleotide
auggaagaaaaagaaggcuguagagaa

SEQ ID NO: 107781 - RNA, 27 nt, Artificial Sequence
  Description of Artificial Sequence: Synthetic oligonucleotide
uagaaggaagauuagcuauggaagaaa

SEQ ID NO: 107782 - RNA, 27 nt, Artificial Sequence
  Description of Artificial Sequence: Synthetic oligonucleotide
augaagcauucaacaggaagauuauuu

SEQ ID NO: 107783 - RNA, 27 nt, Artificial Sequence
  Description of Artificial Sequence: Synthetic oligonucleotide
caugaagcauucaacaggaagauuauu

SEQ ID NO: 107784 - RNA, 27 nt, Artificial Sequence
  Description of Artificial Sequence: Synthetic oligonucleotide
ucaaaguagaauucaagucaugaagca

SEQ ID NO: 107785 - RNA, 27 nt, Artificial Sequence
  Description of Artificial Sequence: Synthetic oligonucleotide
gucuguaguugcuucucucccucuuag

SEQ ID NO: 107786 - RNA, 27 nt, Artificial Sequence
  Description of Artificial Sequence: Synthetic oligonucleotide
guugaccuuggucugguaggagacggc

SEQ ID NO: 107787 - RNA, 27 nt, Artificial Sequence
  Description of Artificial Sequence: Synthetic oligonucleotide
gucgagauagucgggccgauugaucuc

SEQ ID NO: 107788 - RNA, 27 nt, Artificial Sequence
  Description of Artificial Sequence: Synthetic oligonucleotide
guuugggaagguuggauguucguccuc

SEQ ID NO: 107789 - RNA, 27 nt, Artificial Sequence
  Description of Artificial Sequence: Synthetic oligonucleotide
aguucuaagcuuggguuccgacccuaa

SEQ ID NO: 107790 - RNA, 27 nt, Artificial Sequence
  Description of Artificial Sequence: Synthetic oligonucleotide
uuaaaguucuaagcuuggguuccgacc

SEQ ID NO: 107791 - RNA, 27 nt, Artificial Sequence
  Description of Artificial Sequence: Synthetic oligonucleotide
guugcuuaaaguucuaagcuuggguuc

SEQ ID NO: 107792 - RNA, 27 nt, Artificial Sequence
  Description of Artificial Sequence: Synthetic oligonucleotide
gugguggucuuguugcuuaaaguucua

SEQ ID NO: 107793 - RNA, 27 nt, Artificial Sequence
  Description of Artificial Sequence: Synthetic oligonucleotide
acuuuauuucucgccacugaauaguag

SEQ ID NO: 107794 - RNA, 27 nt, Artificial Sequence
  Description of Artificial Sequence: Synthetic oligonucleotide
aacuuuauuucucgccacugaauagua

SEQ ID NO: 107795 - RNA, 27 nt, Artificial Sequence
  Description of Artificial Sequence: Synthetic oligonucleotide
ggaucauuuccuguuaucuguguuugu

SEQ ID NO: 107796 - RNA, 27 nt, Artificial Sequence
  Description of Artificial Sequence: Synthetic oligonucleotide
guuucauuucuucucuuuucuuaaggc

SEQ ID NO: 107797 - RNA, 27 nt, Artificial Sequence
  Description of Artificial Sequence: Synthetic oligonucleotide
ggaggauggaaacacacuccuucaguu

SEQ ID NO: 107798 - RNA, 27 nt, Artificial Sequence
  Description of Artificial Sequence: Synthetic oligonucleotide
ucaaagauuuucagucccgcggugaca

SEQ ID NO: 107799 - RNA, 27 nt, Artificial Sequence
  Description of Artificial Sequence: Synthetic oligonucleotide
ccugaacggcacgcuuauuucugcugu

SEQ ID NO: 107800 - RNA, 27 nt, Artificial Sequence
  Description of Artificial Sequence: Synthetic oligonucleotide
cuucuggacccugaacggcacgcuuau

SEQ ID NO: 107801 - RNA, 27 nt, Artificial Sequence
  Description of Artificial Sequence: Synthetic oligonucleotide
caagcagucuugagugacuguuucuuc

SEQ ID NO: 107802 - RNA, 27 nt, Artificial Sequence
  Description of Artificial Sequence: Synthetic oligonucleotide
ccaaagacauggaccuucuuccucuga

SEQ ID NO: 107803 - RNA, 27 nt, Artificial Sequence
  Description of Artificial Sequence: Synthetic oligonucleotide
guguuucaggcauauuuugaauacauc

SEQ ID NO: 107804 - RNA, 27 nt, Artificial Sequence
  Description of Artificial Sequence: Synthetic oligonucleotide
gagguacagagaaagggaggaaaauag

SEQ ID NO: 107805 - RNA, 27 nt, Artificial Sequence
  Description of Artificial Sequence: Synthetic oligonucleotide
ucuugucuugcucuaucuuucuuuggu

SEQ ID NO: 107806 - RNA, 27 nt, Artificial Sequence
  Description of Artificial Sequence: Synthetic oligonucleotide
uuucuugucuugcucuaucuuucuuug

SEQ ID NO: 107807 - RNA, 27 nt, Artificial Sequence
  Description of Artificial Sequence: Synthetic oligonucleotide
ggaucuuguacaaacaaaugcuuucuc

SEQ ID NO: 107808 - RNA, 27 nt, Artificial Sequence
  Description of Artificial Sequence: Synthetic oligonucleotide
ucugcaaguacguucguuuaacucaag

SEQ ID NO: 107809 - RNA, 27 nt, Artificial Sequence
  Description of Artificial Sequence: Synthetic oligonucleotide
ucuguaucgaucguucuguaucagucu

SEQ ID NO: 107810 - RNA, 27 nt, Artificial Sequence
  Description of Artificial Sequence: Synthetic oligonucleotide
auuuauuuuuauauauauauaauauau

SEQ ID NO: 107811 - RNA, 27 nt, Artificial Sequence
  Description of Artificial Sequence: Synthetic oligonucleotide
auauuuauuuuuauauauauauaauau

SEQ ID NO: 107812 - RNA, 27 nt, Artificial Sequence
  Description of Artificial Sequence: Synthetic oligonucleotide
cacagcagucaaauacauccagugaag

SEQ ID NO: 107813 - RNA, 27 nt, Artificial Sequence
  Description of Artificial Sequence: Synthetic oligonucleotide
gucucucaucuccuccucuucccuguc

SEQ ID NO: 107814 - RNA, 27 nt, Artificial Sequence
  Description of Artificial Sequence: Synthetic oligonucleotide
ccaagugggacaaaaaaaagaucaugc

SEQ ID NO: 107815 - RNA, 14 nt, Artificial Sequence
  Description of Artificial Sequence: Synthetic oligonucleotide
guauuuugaugagg

SEQ ID NO: 107816 - RNA, 12 nt, Artificial Sequence
  Description of Artificial Sequence: Synthetic oligonucleotide
ggcccagaugau

SEQ ID NO: 107817 - RNA, 14 nt, Artificial Sequence
  Description of Artificial Sequence: Synthetic oligonucleotide
gggaagaaaacuau

SEQ ID NO: 107818 - RNA, 15 nt, Artificial Sequence
  Description of Artificial Sequence: Synthetic oligonucleotide
guuuuaauuuauuuc

SEQ ID NO: 107819 - RNA, 12 nt, Artificial Sequence
  Description of Artificial Sequence: Synthetic oligonucleotide
acguagggaaau

SEQ ID NO: 107820 - RNA, 12 nt, Artificial Sequence
  Description of Artificial Sequence: Synthetic oligonucleotide
ccaggguuuacc

SEQ ID NO: 107821 - RNA, 11 nt, Artificial Sequence
  Description of Artificial Sequence: Synthetic oligonucleotide
agcaagguuua

SEQ ID NO: 107822 - RNA, 12 nt, Artificial Sequence
  Description of Artificial Sequence: Synthetic oligonucleotide
uguauuauguug

SEQ ID NO: 107823 - RNA, 15 nt, Artificial Sequence
  Description of Artificial Sequence: Synthetic oligonucleotide
uuuuaaucuuuguga

SEQ ID NO: 107824 - RNA, 14 nt, Artificial Sequence
  Description of Artificial Sequence: Synthetic oligonucleotide
uuaaucuuugugac

SEQ ID NO: 107825 - RNA, 13 nt, Artificial Sequence
  Description of Artificial Sequence: Synthetic oligonucleotide
gcugcuuaugucu

SEQ ID NO: 107826 - RNA, 14 nt, Artificial Sequence
  Description of Artificial Sequence: Synthetic oligonucleotide
aaguguuucagaag

SEQ ID NO: 107827 - RNA, 13 nt, Artificial Sequence
  Description of Artificial Sequence: Synthetic oligonucleotide
gaccaucaauaag

SEQ ID NO: 107828 - RNA, 13 nt, Artificial Sequence
  Description of Artificial Sequence: Synthetic oligonucleotide
ccaucaauaagga

SEQ ID NO: 107829 - RNA, 14 nt, Artificial Sequence
  Description of Artificial Sequence: Synthetic oligonucleotide
ucaauaaggaagaa

SEQ ID NO: 107830 - RNA, 14 nt, Artificial Sequence
  Description of Artificial Sequence: Synthetic oligonucleotide
aauaaggaagaagc

SEQ ID NO: 107831 - RNA, 13 nt, Artificial Sequence
  Description of Artificial Sequence: Synthetic oligonucleotide
aggaagaagcccu

SEQ ID NO: 107832 - RNA, 13 nt, Artificial Sequence
  Description of Artificial Sequence: Synthetic oligonucleotide
gcauaacuaaagg

SEQ ID NO: 107833 - RNA, 14 nt, Artificial Sequence
  Description of Artificial Sequence: Synthetic oligonucleotide
cauaacuaaaggug

SEQ ID NO: 107834 - RNA, 12 nt, Artificial Sequence
  Description of Artificial Sequence: Synthetic oligonucleotide
cuacaucacgcc

SEQ ID NO: 107835 - RNA, 12 nt, Artificial Sequence
  Description of Artificial Sequence: Synthetic oligonucleotide
acuggauuuaag

SEQ ID NO: 107836 - RNA, 12 nt, Artificial Sequence
  Description of Artificial Sequence: Synthetic oligonucleotide
cuggauuuaagc

SEQ ID NO: 107837 - RNA, 13 nt, Artificial Sequence
  Description of Artificial Sequence: Synthetic oligonucleotide
gauuuaagcagag

SEQ ID NO: 107838 - RNA, 13 nt, Artificial Sequence
  Description of Artificial Sequence: Synthetic oligonucleotide
auuuaagcagagu

SEQ ID NO: 107839 - RNA, 13 nt, Artificial Sequence
  Description of Artificial Sequence: Synthetic oligonucleotide
uuaagcagaguuc

SEQ ID NO: 107840 - RNA, 13 nt, Artificial Sequence
  Description of Artificial Sequence: Synthetic oligonucleotide
uaagcagaguuca

SEQ ID NO: 107841 - RNA, 14 nt, Artificial Sequence
  Description of Artificial Sequence: Synthetic oligonucleotide
agcagaguucaaaa

SEQ ID NO: 107842 - RNA, 12 nt, Artificial Sequence
  Description of Artificial Sequence: Synthetic oligonucleotide
cucagggucuga

SEQ ID NO: 107843 - RNA, 13 nt, Artificial Sequence
  Description of Artificial Sequence: Synthetic oligonucleotide
caagcaacuacau

SEQ ID NO: 107844 - RNA, 12 nt, Artificial Sequence
  Description of Artificial Sequence: Synthetic oligonucleotide
aucaauggcagc

SEQ ID NO: 107845 - RNA, 11 nt, Artificial Sequence
  Description of Artificial Sequence: Synthetic oligonucleotide
uuccagcccac

SEQ ID NO: 107846 - RNA, 12 nt, Artificial Sequence
  Description of Artificial Sequence: Synthetic oligonucleotide
cagcugagaaug

SEQ ID NO: 107847 - RNA, 13 nt, Artificial Sequence
  Description of Artificial Sequence: Synthetic oligonucleotide
aacguaucuccua

SEQ ID NO: 107848 - RNA, 14 nt, Artificial Sequence
  Description of Artificial Sequence: Synthetic oligonucleotide
ccuaaaauaauuuc

SEQ ID NO: 107849 - RNA, 13 nt, Artificial Sequence
  Description of Artificial Sequence: Synthetic oligonucleotide
uggaagauucagc

SEQ ID NO: 107850 - RNA, 12 nt, Artificial Sequence
  Description of Artificial Sequence: Synthetic oligonucleotide
uuaaacucuccu

SEQ ID NO: 107851 - RNA, 12 nt, Artificial Sequence
  Description of Artificial Sequence: Synthetic oligonucleotide
cagccuacaguu

SEQ ID NO: 107852 - RNA, 13 nt, Artificial Sequence
  Description of Artificial Sequence: Synthetic oligonucleotide
guuauguucaguc

SEQ ID NO: 107853 - RNA, 13 nt, Artificial Sequence
  Description of Artificial Sequence: Synthetic oligonucleotide
cacauacaaaaug

SEQ ID NO: 107854 - RNA, 9 nt, Artificial Sequence
  Description of Artificial Sequence: Synthetic oligonucleotide
uccuuuugc

SEQ ID NO: 107855 - RNA, 12 nt, Artificial Sequence
  Description of Artificial Sequence: Synthetic oligonucleotide
ugaccugugaag

SEQ ID NO: 107856 - RNA, 12 nt, Artificial Sequence
  Description of Artificial Sequence: Synthetic oligonucleotide
cuaucucacaca

SEQ ID NO: 107857 - RNA, 13 nt, Artificial Sequence
  Description of Artificial Sequence: Synthetic oligonucleotide
uguccucaauugu

SEQ ID NO: 107858 - RNA, 12 nt, Artificial Sequence
  Description of Artificial Sequence: Synthetic oligonucleotide
aaaccguagcug

SEQ ID NO: 107859 - RNA, 12 nt, Artificial Sequence
  Description of Artificial Sequence: Synthetic oligonucleotide
uagcuggcaagc

SEQ ID NO: 107860 - RNA, 14 nt, Artificial Sequence
  Description of Artificial Sequence: Synthetic oligonucleotide
uuguaugguuaaaa

SEQ ID NO: 107861 - RNA, 14 nt, Artificial Sequence
  Description of Artificial Sequence: Synthetic oligonucleotide
ugguuaaaagaugg

SEQ ID NO: 107862 - RNA, 13 nt, Artificial Sequence
  Description of Artificial Sequence: Synthetic oligonucleotide
cagggaauuauac

SEQ ID NO: 107863 - RNA, 12 nt, Artificial Sequence
  Description of Artificial Sequence: Synthetic oligonucleotide
acaaucuugcug

SEQ ID NO: 107864 - RNA, 13 nt, Artificial Sequence
  Description of Artificial Sequence: Synthetic oligonucleotide
ccaauaaugaaga

SEQ ID NO: 107865 - RNA, 13 nt, Artificial Sequence
  Description of Artificial Sequence: Synthetic oligonucleotide
acuuuggauguuc

SEQ ID NO: 107866 - RNA, 12 nt, Artificial Sequence
  Description of Artificial Sequence: Synthetic oligonucleotide
aaugcuuccacu

SEQ ID NO: 107867 - RNA, 11 nt, Artificial Sequence
  Description of Artificial Sequence: Synthetic oligonucleotide
gagaaaguuug

SEQ ID NO: 107868 - RNA, 11 nt, Artificial Sequence
  Description of Artificial Sequence: Synthetic oligonucleotide
aaagaacuacu

SEQ ID NO: 107869 - RNA, 12 nt, Artificial Sequence
  Description of Artificial Sequence: Synthetic oligonucleotide
uuagaaauacgg

SEQ ID NO: 107870 - RNA, 12 nt, Artificial Sequence
  Description of Artificial Sequence: Synthetic oligonucleotide
aacauggguaca

SEQ ID NO: 107871 - RNA, 14 nt, Artificial Sequence
  Description of Artificial Sequence: Synthetic oligonucleotide
aaagacacagaaga

SEQ ID NO: 107872 - RNA, 11 nt, Artificial Sequence
  Description of Artificial Sequence: Synthetic oligonucleotide
uaguagggagg

SEQ ID NO: 107873 - RNA, 12 nt, Artificial Sequence
  Description of Artificial Sequence: Synthetic oligonucleotide
gccuucugcagc

SEQ ID NO: 107874 - RNA, 10 nt, Artificial Sequence
  Description of Artificial Sequence: Synthetic oligonucleotide
ggucugguac

SEQ ID NO: 107875 - RNA, 12 nt, Artificial Sequence
  Description of Artificial Sequence: Synthetic oligonucleotide
cuaguccuuccg

SEQ ID NO: 107876 - RNA, 12 nt, Artificial Sequence
  Description of Artificial Sequence: Synthetic oligonucleotide
ccagugaauauu

SEQ ID NO: 107877 - RNA, 13 nt, Artificial Sequence
  Description of Artificial Sequence: Synthetic oligonucleotide
augaauucaaguu

SEQ ID NO: 107878 - RNA, 12 nt, Artificial Sequence
  Description of Artificial Sequence: Synthetic oligonucleotide
caggacacagau

SEQ ID NO: 107879 - RNA, 12 nt, Artificial Sequence
  Description of Artificial Sequence: Synthetic oligonucleotide
cucaaagcacag

SEQ ID NO: 107880 - RNA, 10 nt, Artificial Sequence
  Description of Artificial Sequence: Synthetic oligonucleotide
accacugcca

SEQ ID NO: 107881 - RNA, 13 nt, Artificial Sequence
  Description of Artificial Sequence: Synthetic oligonucleotide
gaaacuacuagug

SEQ ID NO: 107882 - RNA, 12 nt, Artificial Sequence
  Description of Artificial Sequence: Synthetic oligonucleotide
aagucggacagc

SEQ ID NO: 107883 - RNA, 13 nt, Artificial Sequence
  Description of Artificial Sequence: Synthetic oligonucleotide
gaaagcgaaaaau

SEQ ID NO: 107884 - RNA, 13 nt, Artificial Sequence
  Description of Artificial Sequence: Synthetic oligonucleotide
cccucugauuuag

SEQ ID NO: 107885 - RNA, 12 nt, Artificial Sequence
  Description of Artificial Sequence: Synthetic oligonucleotide
ugagcuauuuaa

SEQ ID NO: 107886 - RNA, 13 nt, Artificial Sequence
  Description of Artificial Sequence: Synthetic oligonucleotide
aaaaggugaaaaa

SEQ ID NO: 107887 - RNA, 14 nt, Artificial Sequence
  Description of Artificial Sequence: Synthetic oligonucleotide
gaaaaagcacuauu

SEQ ID NO: 107888 - RNA, 12 nt, Artificial Sequence
  Description of Artificial Sequence: Synthetic oligonucleotide
ggcugaaaagaa

SEQ ID NO: 107889 - RNA, 12 nt, Artificial Sequence
  Description of Artificial Sequence: Synthetic oligonucleotide
uaaacccuuaua

SEQ ID NO: 107890 - RNA, 13 nt, Artificial Sequence
  Description of Artificial Sequence: Synthetic oligonucleotide
cauacuauuagcc

SEQ ID NO: 107891 - RNA, 12 nt, Artificial Sequence
  Description of Artificial Sequence: Synthetic oligonucleotide
gacagaagcauu

SEQ ID NO: 107892 - RNA, 14 nt, Artificial Sequence
  Description of Artificial Sequence: Synthetic oligonucleotide
agagcaaauaagau

SEQ ID NO: 107893 - RNA, 14 nt, Artificial Sequence
  Description of Artificial Sequence: Synthetic oligonucleotide
ccaacauuuuucuc

SEQ ID NO: 107894 - RNA, 15 nt, Artificial Sequence
  Description of Artificial Sequence: Synthetic oligonucleotide
uuaaguaugagaaaa

SEQ ID NO: 107895 - RNA, 14 nt, Artificial Sequence
  Description of Artificial Sequence: Synthetic oligonucleotide
caggaauaaagaug

SEQ ID NO: 107896 - RNA, 13 nt, Artificial Sequence
  Description of Artificial Sequence: Synthetic oligonucleotide
aauuugaaugacc

SEQ ID NO: 107897 - RNA, 14 nt, Artificial Sequence
  Description of Artificial Sequence: Synthetic oligonucleotide
auguauaaagauag

SEQ ID NO: 107898 - RNA, 12 nt, Artificial Sequence
  Description of Artificial Sequence: Synthetic oligonucleotide
ggcuguaacuau

SEQ ID NO: 107899 - RNA, 11 nt, Artificial Sequence
  Description of Artificial Sequence: Synthetic oligonucleotide
ucugugaagug

SEQ ID NO: 107900 - RNA, 14 nt, Artificial Sequence
  Description of Artificial Sequence: Synthetic oligonucleotide
ccuuuaaggaaaug

SEQ ID NO: 107901 - RNA, 13 nt, Artificial Sequence
  Description of Artificial Sequence: Synthetic oligonucleotide
aaggauacaaaaa

SEQ ID NO: 107902 - RNA, 12 nt, Artificial Sequence
  Description of Artificial Sequence: Synthetic oligonucleotide
agaugcaauuug

SEQ ID NO: 107903 - RNA, 12 nt, Artificial Sequence
  Description of Artificial Sequence: Synthetic oligonucleotide
guucaaaacgaa

SEQ ID NO: 107904 - RNA, 11 nt, Artificial Sequence
  Description of Artificial Sequence: Synthetic oligonucleotide
gugaaaccuca

SEQ ID NO: 107905 - RNA, 13 nt, Artificial Sequence
  Description of Artificial Sequence: Synthetic oligonucleotide
acgaaagagaagc

SEQ ID NO: 107906 - RNA, 12 nt, Artificial Sequence
  Description of Artificial Sequence: Synthetic oligonucleotide
cuccacaagcgc

SEQ ID NO: 107907 - RNA, 14 nt, Artificial Sequence
  Description of Artificial Sequence: Synthetic oligonucleotide
gagaagauuccaaa

SEQ ID NO: 107908 - RNA, 13 nt, Artificial Sequence
  Description of Artificial Sequence: Synthetic oligonucleotide
aaucuggauucaa

SEQ ID NO: 107909 - RNA, 13 nt, Artificial Sequence
  Description of Artificial Sequence: Synthetic oligonucleotide
agaacagauuuga

SEQ ID NO: 107910 - RNA, 11 nt, Artificial Sequence
  Description of Artificial Sequence: Synthetic oligonucleotide
ccagagcugug

SEQ ID NO: 107911 - RNA, 12 nt, Artificial Sequence
  Description of Artificial Sequence: Synthetic oligonucleotide
ccucagauuguu

SEQ ID NO: 107912 - RNA, 12 nt, Artificial Sequence
  Description of Artificial Sequence: Synthetic oligonucleotide
cuauuuuaauua

SEQ ID NO: 107913 - RNA, 13 nt, Artificial Sequence
  Description of Artificial Sequence: Synthetic oligonucleotide
uuuaauuuauuaa

SEQ ID NO: 107914 - RNA, 12 nt, Artificial Sequence
  Description of Artificial Sequence: Synthetic oligonucleotide
augcaguuugaa

SEQ ID NO: 107915 - RNA, 11 nt, Artificial Sequence
  Description of Artificial Sequence: Synthetic oligonucleotide
caugcugcugg

SEQ ID NO: 107916 - RNA, 13 nt, Artificial Sequence
  Description of Artificial Sequence: Synthetic oligonucleotide
agaugugcauuuc

SEQ ID NO: 107917 - RNA, 12 nt, Artificial Sequence
  Description of Artificial Sequence: Synthetic oligonucleotide
ucaaaaccugug

SEQ ID NO: 107918 - RNA, 11 nt, Artificial Sequence
  Description of Artificial Sequence: Synthetic oligonucleotide
gaaugugggua

SEQ ID NO: 107919 - RNA, 10 nt, Artificial Sequence
  Description of Artificial Sequence: Synthetic oligonucleotide
auguggguag

SEQ ID NO: 107920 - RNA, 13 nt, Artificial Sequence
  Description of Artificial Sequence: Synthetic oligonucleotide
ugaaaaugagcau

SEQ ID NO: 107921 - RNA, 13 nt, Artificial Sequence
  Description of Artificial Sequence: Synthetic oligonucleotide
uugcuuuucaugu

SEQ ID NO: 107922 - RNA, 12 nt, Artificial Sequence
  Description of Artificial Sequence: Synthetic oligonucleotide
uguauuucuaua

SEQ ID NO: 107923 - RNA, 13 nt, Artificial Sequence
  Description of Artificial Sequence: Synthetic oligonucleotide
uuugauuaauguu

SEQ ID NO: 107924 - RNA, 12 nt, Artificial Sequence
  Description of Artificial Sequence: Synthetic oligonucleotide
caacguguauag

SEQ ID NO: 107925 - RNA, 12 nt, Artificial Sequence
  Description of Artificial Sequence: Synthetic oligonucleotide
cauauccuuggc

SEQ ID NO: 107926 - RNA, 13 nt, Artificial Sequence
  Description of Artificial Sequence: Synthetic oligonucleotide
uacuaacaucugg

SEQ ID NO: 107927 - RNA, 11 nt, Artificial Sequence
  Description of Artificial Sequence: Synthetic oligonucleotide
cauaaguugug

SEQ ID NO: 107928 - RNA, 12 nt, Artificial Sequence
  Description of Artificial Sequence: Synthetic oligonucleotide
gcaucauuuugg

SEQ ID NO: 107929 - RNA, 10 nt, Artificial Sequence
  Description of Artificial Sequence: Synthetic oligonucleotide
gcucuucuua

SEQ ID NO: 107930 - RNA, 10 nt, Artificial Sequence
  Description of Artificial Sequence: Synthetic oligonucleotide
agauuagguc

SEQ ID NO: 107931 - RNA, 12 nt, Artificial Sequence
  Description of Artificial Sequence: Synthetic oligonucleotide
auggaauugaaa

SEQ ID NO: 107932 - RNA, 13 nt, Artificial Sequence
  Description of Artificial Sequence: Synthetic oligonucleotide
cacacucauuccu

SEQ ID NO: 107933 - RNA, 12 nt, Artificial Sequence
  Description of Artificial Sequence: Synthetic oligonucleotide
uguagagguaac

SEQ ID NO: 107934 - RNA, 11 nt, Artificial Sequence
  Description of Artificial Sequence: Synthetic oligonucleotide
caaccacaugc

SEQ ID NO: 107935 - RNA, 12 nt, Artificial Sequence
  Description of Artificial Sequence: Synthetic oligonucleotide
ucggaaacaagu

SEQ ID NO: 107936 - RNA, 11 nt, Artificial Sequence
  Description of Artificial Sequence: Synthetic oligonucleotide
acucccaauaa

SEQ ID NO: 107937 - RNA, 13 nt, Artificial Sequence
  Description of Artificial Sequence: Synthetic oligonucleotide
aaugcuaagaaau

SEQ ID NO: 107938 - RNA, 11 nt, Artificial Sequence
  Description of Artificial Sequence: Synthetic oligonucleotide
gucuuucucua

SEQ ID NO: 107939 - RNA, 11 nt, Artificial Sequence
  Description of Artificial Sequence: Synthetic oligonucleotide
ugaauuucagg

SEQ ID NO: 107940 - RNA, 13 nt, Artificial Sequence
  Description of Artificial Sequence: Synthetic oligonucleotide
cgauucccucuca

SEQ ID NO: 107941 - RNA, 11 nt, Artificial Sequence
  Description of Artificial Sequence: Synthetic oligonucleotide
aggaaagugaa

SEQ ID NO: 107942 - RNA, 12 nt, Artificial Sequence
  Description of Artificial Sequence: Synthetic oligonucleotide
gaggcugcaugc

SEQ ID NO: 107943 - RNA, 11 nt, Artificial Sequence
  Description of Artificial Sequence: Synthetic oligonucleotide
ucucugaacag

SEQ ID NO: 107944 - RNA, 12 nt, Artificial Sequence
  Description of Artificial Sequence: Synthetic oligonucleotide
aacuuggcugua

SEQ ID NO: 107945 - RNA, 12 nt, Artificial Sequence
  Description of Artificial Sequence: Synthetic oligonucleotide
agaagccaaaau

SEQ ID NO: 107946 - RNA, 14 nt, Artificial Sequence
  Description of Artificial Sequence: Synthetic oligonucleotide
auuaaaagaagucc

SEQ ID NO: 107947 - RNA, 14 nt, Artificial Sequence
  Description of Artificial Sequence: Synthetic oligonucleotide
gaauccggauuauc

SEQ ID NO: 107948 - RNA, 12 nt, Artificial Sequence
  Description of Artificial Sequence: Synthetic oligonucleotide
aaugugacauca

SEQ ID NO: 107949 - RNA, 13 nt, Artificial Sequence
  Description of Artificial Sequence: Synthetic oligonucleotide
caucaaagcaagu

SEQ ID NO: 107950 - RNA, 11 nt, Artificial Sequence
  Description of Artificial Sequence: Synthetic oligonucleotide
agagagagaaa

SEQ ID NO: 107951 - RNA, 13 nt, Artificial Sequence
  Description of Artificial Sequence: Synthetic oligonucleotide
ucgcuguaguauu

SEQ ID NO: 107952 - RNA, 14 nt, Artificial Sequence
  Description of Artificial Sequence: Synthetic oligonucleotide
cgcuguaguauuua

SEQ ID NO: 107953 - RNA, 13 nt, Artificial Sequence
  Description of Artificial Sequence: Synthetic oligonucleotide
auuuaagcccaua

SEQ ID NO: 107954 - RNA, 15 nt, Artificial Sequence
  Description of Artificial Sequence: Synthetic oligonucleotide
auuaaaauaaacaug

SEQ ID NO: 107955 - RNA, 12 nt, Artificial Sequence
  Description of Artificial Sequence: Synthetic oligonucleotide
cuguucugaucg

SEQ ID NO: 107956 - RNA, 16 nt, Artificial Sequence
  Description of Artificial Sequence: Synthetic oligonucleotide
aaauaauuugaacuuu

SEQ ID NO: 107957 - RNA, 12 nt, Artificial Sequence
  Description of Artificial Sequence: Synthetic oligonucleotide
ugcgaccuuaau

SEQ ID NO: 107958 - RNA, 11 nt, Artificial Sequence
  Description of Artificial Sequence: Synthetic oligonucleotide
cugagaaagcu

SEQ ID NO: 107959 - RNA, 13 nt, Artificial Sequence
  Description of Artificial Sequence: Synthetic oligonucleotide
aguaaagaugcua

SEQ ID NO: 107960 - RNA, 12 nt, Artificial Sequence
  Description of Artificial Sequence: Synthetic oligonucleotide
cugcuuaauugc

SEQ ID NO: 107961 - RNA, 14 nt, Artificial Sequence
  Description of Artificial Sequence: Synthetic oligonucleotide
uaccauaugaauga

SEQ ID NO: 107962 - RNA, 12 nt, Artificial Sequence
  Description of Artificial Sequence: Synthetic oligonucleotide
aacuuucuuauc

SEQ ID NO: 107963 - RNA, 13 nt, Artificial Sequence
  Description of Artificial Sequence: Synthetic oligonucleotide
ccuugcaugacau

SEQ ID NO: 107964 - RNA, 14 nt, Artificial Sequence
  Description of Artificial Sequence: Synthetic oligonucleotide
ugaauuuguauaug

SEQ ID NO: 107965 - RNA, 12 nt, Artificial Sequence
  Description of Artificial Sequence: Synthetic oligonucleotide
gaauccuaguag

SEQ ID NO: 107966 - RNA, 10 nt, Artificial Sequence
  Description of Artificial Sequence: Synthetic oligonucleotide
gaaagggaag

SEQ ID NO: 107967 - RNA, 11 nt, Artificial Sequence
  Description of Artificial Sequence: Synthetic oligonucleotide
uaucggcaugc

SEQ ID NO: 107968 - RNA, 12 nt, Artificial Sequence
  Description of Artificial Sequence: Synthetic oligonucleotide
caccucauagua

SEQ ID NO: 107969 - RNA, 11 nt, Artificial Sequence
  Description of Artificial Sequence: Synthetic oligonucleotide
ccagaauugcc

SEQ ID NO: 107970 - RNA, 11 nt, Artificial Sequence
  Description of Artificial Sequence: Synthetic oligonucleotide
uggugaucugg

SEQ ID NO: 107971 - RNA, 12 nt, Artificial Sequence
  Description of Artificial Sequence: Synthetic oligonucleotide
gaucuggguaau

SEQ ID NO: 107972 - RNA, 12 nt, Artificial Sequence
  Description of Artificial Sequence: Synthetic oligonucleotide
ggaugugaugaa

SEQ ID NO: 107973 - RNA, 12 nt, Artificial Sequence
  Description of Artificial Sequence: Synthetic oligonucleotide
cauuuccacagc

SEQ ID NO: 107974 - RNA, 11 nt, Artificial Sequence
  Description of Artificial Sequence: Synthetic oligonucleotide
acagcuacacc

SEQ ID NO: 107975 - RNA, 12 nt, Artificial Sequence
  Description of Artificial Sequence: Synthetic oligonucleotide
ugcaguucuuac

SEQ ID NO: 107976 - RNA, 12 nt, Artificial Sequence
  Description of Artificial Sequence: Synthetic oligonucleotide
acgagaagaaga

SEQ ID NO: 107977 - RNA, 12 nt, Artificial Sequence
  Description of Artificial Sequence: Synthetic oligonucleotide
cgagaagaagau

SEQ ID NO: 107978 - RNA, 15 nt, Artificial Sequence
  Description of Artificial Sequence: Synthetic oligonucleotide
aagaagaucauuuac

SEQ ID NO: 107979 - RNA, 11 nt, Artificial Sequence
  Description of Artificial Sequence: Synthetic oligonucleotide
agaggaagagg

SEQ ID NO: 107980 - RNA, 12 nt, Artificial Sequence
  Description of Artificial Sequence: Synthetic oligonucleotide
gaggaagaggug

SEQ ID NO: 107981 - RNA, 13 nt, Artificial Sequence
  Description of Artificial Sequence: Synthetic oligonucleotide
cuacuuugagggc

SEQ ID NO: 107982 - RNA, 12 nt, Artificial Sequence
  Description of Artificial Sequence: Synthetic oligonucleotide
agggcaucuccu

SEQ ID NO: 107983 - RNA, 10 nt, Artificial Sequence
  Description of Artificial Sequence: Synthetic oligonucleotide
ggagugauau

SEQ ID NO: 107984 - RNA, 11 nt, Artificial Sequence
  Description of Artificial Sequence: Synthetic oligonucleotide
gagugauaugg

SEQ ID NO: 107985 - RNA, 12 nt, Artificial Sequence
  Description of Artificial Sequence: Synthetic oligonucleotide
ugcaguaaagau

SEQ ID NO: 107986 - RNA, 13 nt, Artificial Sequence
  Description of Artificial Sequence: Synthetic oligonucleotide
aguaaagauccua

SEQ ID NO: 107987 - RNA, 12 nt, Artificial Sequence
  Description of Artificial Sequence: Synthetic oligonucleotide
ugacaaaggaca

SEQ ID NO: 107988 - RNA, 13 nt, Artificial Sequence
  Description of Artificial Sequence: Synthetic oligonucleotide
gcaauugugaccc

SEQ ID NO: 107989 - RNA, 12 nt, Artificial Sequence
  Description of Artificial Sequence: Synthetic oligonucleotide
aacaucauccau

SEQ ID NO: 107990 - RNA, 12 nt, Artificial Sequence
  Description of Artificial Sequence: Synthetic oligonucleotide
ugaaauccaaca

SEQ ID NO: 107991 - RNA, 15 nt, Artificial Sequence
  Description of Artificial Sequence: Synthetic oligonucleotide
aacaauauauuucuc

SEQ ID NO: 107992 - RNA, 14 nt, Artificial Sequence
  Description of Artificial Sequence: Synthetic oligonucleotide
aacaguaaagucac

SEQ ID NO: 107993 - RNA, 14 nt, Artificial Sequence
  Description of Artificial Sequence: Synthetic oligonucleotide
ugugaagaaaguaa

SEQ ID NO: 107994 - RNA, 13 nt, Artificial Sequence
  Description of Artificial Sequence: Synthetic oligonucleotide
cuuccgagccauc

SEQ ID NO: 107995 - RNA, 12 nt, Artificial Sequence
  Description of Artificial Sequence: Synthetic oligonucleotide
aauggagguuga

SEQ ID NO: 107996 - RNA, 12 nt, Artificial Sequence
  Description of Artificial Sequence: Synthetic oligonucleotide
ggagguugaaua

SEQ ID NO: 107997 - RNA, 13 nt, Artificial Sequence
  Description of Artificial Sequence: Synthetic oligonucleotide
auuuugaguuuuc

SEQ ID NO: 107998 - RNA, 12 nt, Artificial Sequence
  Description of Artificial Sequence: Synthetic oligonucleotide
uauccuguuugu

SEQ ID NO: 107999 - RNA, 11 nt, Artificial Sequence
  Description of Artificial Sequence: Synthetic oligonucleotide
ccuguuuguuc

SEQ ID NO: 108000 - RNA, 10 nt, Artificial Sequence
  Description of Artificial Sequence: Synthetic oligonucleotide
cucuacagcc

SEQ ID NO: 108001 - RNA, 12 nt, Artificial Sequence
  Description of Artificial Sequence: Synthetic oligonucleotide
ucuuccauagcu

SEQ ID NO: 108002 - RNA, 12 nt, Artificial Sequence
  Description of Artificial Sequence: Synthetic oligonucleotide
auaaucuuccug

SEQ ID NO: 108003 - RNA, 12 nt, Artificial Sequence
  Description of Artificial Sequence: Synthetic oligonucleotide
uaaucuuccugu

SEQ ID NO: 108004 - RNA, 12 nt, Artificial Sequence
  Description of Artificial Sequence: Synthetic oligonucleotide
cuucaugacuug

SEQ ID NO: 108005 - RNA, 12 nt, Artificial Sequence
  Description of Artificial Sequence: Synthetic oligonucleotide
aagagggagaga

SEQ ID NO: 108006 - RNA, 12 nt, Artificial Sequence
  Description of Artificial Sequence: Synthetic oligonucleotide
cgucuccuacca

SEQ ID NO: 108007 - RNA, 12 nt, Artificial Sequence
  Description of Artificial Sequence: Synthetic oligonucleotide
gaucaaucggcc

SEQ ID NO: 108008 - RNA, 12 nt, Artificial Sequence
  Description of Artificial Sequence: Synthetic oligonucleotide
ggacgaacaucc

SEQ ID NO: 108009 - RNA, 11 nt, Artificial Sequence
  Description of Artificial Sequence: Synthetic oligonucleotide
agggucggaac

SEQ ID NO: 108010 - RNA, 10 nt, Artificial Sequence
  Description of Artificial Sequence: Synthetic oligonucleotide
ucggaaccca

SEQ ID NO: 108011 - RNA, 11 nt, Artificial Sequence
  Description of Artificial Sequence: Synthetic oligonucleotide
acccaagcuua

SEQ ID NO: 108012 - RNA, 14 nt, Artificial Sequence
  Description of Artificial Sequence: Synthetic oligonucleotide
gaacuuuaagcaac

SEQ ID NO: 108013 - RNA, 11 nt, Artificial Sequence
  Description of Artificial Sequence: Synthetic oligonucleotide
acuauucagug

SEQ ID NO: 108014 - RNA, 11 nt, Artificial Sequence
  Description of Artificial Sequence: Synthetic oligonucleotide
cuauucagugg

SEQ ID NO: 108015 - RNA, 13 nt, Artificial Sequence
  Description of Artificial Sequence: Synthetic oligonucleotide
aaacacagauaac

SEQ ID NO: 108016 - RNA, 12 nt, Artificial Sequence
  Description of Artificial Sequence: Synthetic oligonucleotide
cuuaagaaaaga

SEQ ID NO: 108017 - RNA, 12 nt, Artificial Sequence
  Description of Artificial Sequence: Synthetic oligonucleotide
cugaaggagugu

SEQ ID NO: 108018 - RNA, 10 nt, Artificial Sequence
  Description of Artificial Sequence: Synthetic oligonucleotide
ucaccgcggg

SEQ ID NO: 108019 - RNA, 14 nt, Artificial Sequence
  Description of Artificial Sequence: Synthetic oligonucleotide
agcagaaauaagcg

SEQ ID NO: 108020 - RNA, 12 nt, Artificial Sequence
  Description of Artificial Sequence: Synthetic oligonucleotide
aagcgugccguu

SEQ ID NO: 108021 - RNA, 12 nt, Artificial Sequence
  Description of Artificial Sequence: Synthetic oligonucleotide
agaaacagucac

SEQ ID NO: 108022 - RNA, 12 nt, Artificial Sequence
  Description of Artificial Sequence: Synthetic oligonucleotide
agaggaagaagg

SEQ ID NO: 108023 - RNA, 14 nt, Artificial Sequence
  Description of Artificial Sequence: Synthetic oligonucleotide
uguauucaaaauau

SEQ ID NO: 108024 - RNA, 13 nt, Artificial Sequence
  Description of Artificial Sequence: Synthetic oligonucleotide
auuuuccucccuu

SEQ ID NO: 108025 - RNA, 13 nt, Artificial Sequence
  Description of Artificial Sequence: Synthetic oligonucleotide
caaagaaagauag

SEQ ID NO: 108026 - RNA, 12 nt, Artificial Sequence
  Description of Artificial Sequence: Synthetic oligonucleotide
aagaaagauaga

SEQ ID NO: 108027 - RNA, 13 nt, Artificial Sequence
  Description of Artificial Sequence: Synthetic oligonucleotide
gaaagcauuuguu

SEQ ID NO: 108028 - RNA, 13 nt, Artificial Sequence
  Description of Artificial Sequence: Synthetic oligonucleotide
ugaguuaaacgaa

SEQ ID NO: 108029 - RNA, 12 nt, Artificial Sequence
  Description of Artificial Sequence: Synthetic oligonucleotide
acugauacagaa

SEQ ID NO: 108030 - RNA, 12 nt, Artificial Sequence
  Description of Artificial Sequence: Synthetic oligonucleotide
auauuauauaua

SEQ ID NO: 108031 - RNA, 12 nt, Artificial Sequence
  Description of Artificial Sequence: Synthetic oligonucleotide
auuauauauaua

SEQ ID NO: 108032 - RNA, 12 nt, Artificial Sequence
  Description of Artificial Sequence: Synthetic oligonucleotide
ucacuggaugua

SEQ ID NO: 108033 - RNA, 12 nt, Artificial Sequence
  Description of Artificial Sequence: Synthetic oligonucleotide
cagggaagagga

SEQ ID NO: 108034 - RNA, 15 nt, Artificial Sequence
  Description of Artificial Sequence: Synthetic oligonucleotide
augaucuuuuuuuug

SEQ ID NO: 108035 - RNA, 11 nt, Artificial Sequence
  Description of Artificial Sequence: Synthetic oligonucleotide
aguucacggcc

SEQ ID NO: 108036 - RNA, 13 nt, Artificial Sequence
  Description of Artificial Sequence: Synthetic oligonucleotide
caccaucacacca

SEQ ID NO: 108037 - RNA, 11 nt, Artificial Sequence
  Description of Artificial Sequence: Synthetic oligonucleotide
ccugcggguuu

SEQ ID NO: 108038 - RNA, 10 nt, Artificial Sequence
  Description of Artificial Sequence: Synthetic oligonucleotide
auccaguuug

SEQ ID NO: 108039 - RNA, 13 nt, Artificial Sequence
  Description of Artificial Sequence: Synthetic oligonucleotide
guuaaggacuucu

SEQ ID NO: 108040 - RNA, 13 nt, Artificial Sequence
  Description of Artificial Sequence: Synthetic oligonucleotide
cagugggacagag

SEQ ID NO: 108041 - RNA, 14 nt, Artificial Sequence
  Description of Artificial Sequence: Synthetic oligonucleotide
aauuuguuauugug

SEQ ID NO: 108042 - RNA, 13 nt, Artificial Sequence
  Description of Artificial Sequence: Synthetic oligonucleotide
uucaaaugcauuu

SEQ ID NO: 108043 - RNA, 10 nt, Artificial Sequence
  Description of Artificial Sequence: Synthetic oligonucleotide
caggaaagcc

SEQ ID NO: 108044 - RNA, 11 nt, Artificial Sequence
  Description of Artificial Sequence: Synthetic oligonucleotide
aggaaagcccu

SEQ ID NO: 108045 - RNA, 12 nt, Artificial Sequence
  Description of Artificial Sequence: Synthetic oligonucleotide
cccagcauggcc

SEQ ID NO: 108046 - RNA, 11 nt, Artificial Sequence
  Description of Artificial Sequence: Synthetic oligonucleotide
cuucucccuga

SEQ ID NO: 108047 - RNA, 12 nt, Artificial Sequence
  Description of Artificial Sequence: Synthetic oligonucleotide
gaagaagcccuu

SEQ ID NO: 108048 - RNA, 12 nt, Artificial Sequence
  Description of Artificial Sequence: Synthetic oligonucleotide
agaagcccuuca

SEQ ID NO: 108049 - RNA, 11 nt, Artificial Sequence
  Description of Artificial Sequence: Synthetic oligonucleotide
gcccuucagcg

SEQ ID NO: 108050 - RNA, 11 nt, Artificial Sequence
  Description of Artificial Sequence: Synthetic oligonucleotide
ccuucagcggc

SEQ ID NO: 108051 - RNA, 12 nt, Artificial Sequence
  Description of Artificial Sequence: Synthetic oligonucleotide
ucagcggccagu

SEQ ID NO: 108052 - RNA, 12 nt, Artificial Sequence
  Description of Artificial Sequence: Synthetic oligonucleotide
ugaaaagcuccg

SEQ ID NO: 108053 - RNA, 11 nt, Artificial Sequence
  Description of Artificial Sequence: Synthetic oligonucleotide
aaaagcuccgg

SEQ ID NO: 108054 - RNA, 13 nt, Artificial Sequence
  Description of Artificial Sequence: Synthetic oligonucleotide
agucaacagucug

SEQ ID NO: 108055 - RNA, 13 nt, Artificial Sequence
  Description of Artificial Sequence: Synthetic oligonucleotide
cagaguucaaaag

SEQ ID NO: 108056 - RNA, 13 nt, Artificial Sequence
  Description of Artificial Sequence: Synthetic oligonucleotide
agaguucaaaagc

SEQ ID NO: 108057 - RNA, 12 nt, Artificial Sequence
  Description of Artificial Sequence: Synthetic oligonucleotide
uucaaaagcccu

SEQ ID NO: 108058 - RNA, 12 nt, Artificial Sequence
  Description of Artificial Sequence: Synthetic oligonucleotide
ucaaaagcccuu

SEQ ID NO: 108059 - RNA, 12 nt, Artificial Sequence
  Description of Artificial Sequence: Synthetic oligonucleotide
aaaagcccuuca

SEQ ID NO: 108060 - RNA, 12 nt, Artificial Sequence
  Description of Artificial Sequence: Synthetic oligonucleotide
aaagcccuucag

SEQ ID NO: 108061 - RNA, 13 nt, Artificial Sequence
  Description of Artificial Sequence: Synthetic oligonucleotide
gugaagccgcucg

SEQ ID NO: 108062 - RNA, 12 nt, Artificial Sequence
  Description of Artificial Sequence: Synthetic oligonucleotide
cacgccagucaa

SEQ ID NO: 108063 - RNA, 13 nt, Artificial Sequence
  Description of Artificial Sequence: Synthetic oligonucleotide
uucuuggugcgug

SEQ ID NO: 108064 - RNA, 14 nt, Artificial Sequence
  Description of Artificial Sequence: Synthetic oligonucleotide
auuggauucaucag

SEQ ID NO: 108065 - RNA, 13 nt, Artificial Sequence
  Description of Artificial Sequence: Synthetic oligonucleotide
uggaauaccuaag

SEQ ID NO: 108066 - RNA, 12 nt, Artificial Sequence
  Description of Artificial Sequence: Synthetic oligonucleotide
auuugaggcuca

SEQ ID NO: 108067 - RNA, 11 nt, Artificial Sequence
  Description of Artificial Sequence: Synthetic oligonucleotide
ucuacaauugg

SEQ ID NO: 108068 - RNA, 12 nt, Artificial Sequence
  Description of Artificial Sequence: Synthetic oligonucleotide
uaguuaggagcc

SEQ ID NO: 108069 - RNA, 13 nt, Artificial Sequence
  Description of Artificial Sequence: Synthetic oligonucleotide
agucaauauccac

SEQ ID NO: 108070 - RNA, 13 nt, Artificial Sequence
  Description of Artificial Sequence: Synthetic oligonucleotide
auguucagucaca

SEQ ID NO: 108071 - RNA, 12 nt, Artificial Sequence
  Description of Artificial Sequence: Synthetic oligonucleotide
acacacacauac

SEQ ID NO: 108072 - RNA, 12 nt, Artificial Sequence
  Description of Artificial Sequence: Synthetic oligonucleotide
uuccuuuugcuu

SEQ ID NO: 108073 - RNA, 16 nt, Artificial Sequence
  Description of Artificial Sequence: Synthetic oligonucleotide
uuuuaaaguaauuuuu

SEQ ID NO: 108074 - RNA, 13 nt, Artificial Sequence
  Description of Artificial Sequence: Synthetic oligonucleotide
caacagucaaugg

SEQ ID NO: 108075 - RNA, 13 nt, Artificial Sequence
  Description of Artificial Sequence: Synthetic oligonucleotide
ucgacaaaccaau

SEQ ID NO: 108076 - RNA, 12 nt, Artificial Sequence
  Description of Artificial Sequence: Synthetic oligonucleotide
acugcuaccacu

SEQ ID NO: 108077 - RNA, 13 nt, Artificial Sequence
  Description of Artificial Sequence: Synthetic oligonucleotide
gcaagcggucuua

SEQ ID NO: 108078 - RNA, 13 nt, Artificial Sequence
  Description of Artificial Sequence: Synthetic oligonucleotide
ggucuuaccggcu

SEQ ID NO: 108079 - RNA, 11 nt, Artificial Sequence
  Description of Artificial Sequence: Synthetic oligonucleotide
gauggguuacc

SEQ ID NO: 108080 - RNA, 11 nt, Artificial Sequence
  Description of Artificial Sequence: Synthetic oligonucleotide
guuaccugcga

SEQ ID NO: 108081 - RNA, 12 nt, Artificial Sequence
  Description of Artificial Sequence: Synthetic oligonucleotide
aaucuugcugag

SEQ ID NO: 108082 - RNA, 13 nt, Artificial Sequence
  Description of Artificial Sequence: Synthetic oligonucleotide
agcauaaaacagu

SEQ ID NO: 108083 - RNA, 12 nt, Artificial Sequence
  Description of Artificial Sequence: Synthetic oligonucleotide
guccuuuauccu

SEQ ID NO: 108084 - RNA, 12 nt, Artificial Sequence
  Description of Artificial Sequence: Synthetic oligonucleotide
caacgcaaguug

SEQ ID NO: 108085 - RNA, 13 nt, Artificial Sequence
  Description of Artificial Sequence: Synthetic oligonucleotide
aaacugaaaccau

SEQ ID NO: 108086 - RNA, 14 nt, Artificial Sequence
  Description of Artificial Sequence: Synthetic oligonucleotide
acuuuguuaaauau

SEQ ID NO: 108087 - RNA, 14 nt, Artificial Sequence
  Description of Artificial Sequence: Synthetic oligonucleotide
guauauuaaaaguu

SEQ ID NO: 108088 - RNA, 13 nt, Artificial Sequence
  Description of Artificial Sequence: Synthetic oligonucleotide
guuuugacuuaac

SEQ ID NO: 108089 - RNA, 13 nt, Artificial Sequence
  Description of Artificial Sequence: Synthetic oligonucleotide
gcaaacucagcac

SEQ ID NO: 108090 - RNA, 11 nt, Artificial Sequence
  Description of Artificial Sequence: Synthetic oligonucleotide
ugcugaccuca

SEQ ID NO: 108091 - RNA, 14 nt, Artificial Sequence
  Description of Artificial Sequence: Synthetic oligonucleotide
uuuauucagaucgc

SEQ ID NO: 108092 - RNA, 13 nt, Artificial Sequence
  Description of Artificial Sequence: Synthetic oligonucleotide
aggguucugggau

SEQ ID NO: 108093 - RNA, 15 nt, Artificial Sequence
  Description of Artificial Sequence: Synthetic oligonucleotide
auauuggaaauuaug

SEQ ID NO: 108094 - RNA, 13 nt, Artificial Sequence
  Description of Artificial Sequence: Synthetic oligonucleotide
auggaagcacuag

SEQ ID NO: 108095 - RNA, 13 nt, Artificial Sequence
  Description of Artificial Sequence: Synthetic oligonucleotide
guuuuuaugugga

SEQ ID NO: 108096 - RNA, 12 nt, Artificial Sequence
  Description of Artificial Sequence: Synthetic oligonucleotide
ggaauugguaga

SEQ ID NO: 108097 - RNA, 13 nt, Artificial Sequence
  Description of Artificial Sequence: Synthetic oligonucleotide
uuagacuuggaga

SEQ ID NO: 108098 - RNA, 13 nt, Artificial Sequence
  Description of Artificial Sequence: Synthetic oligonucleotide
uuacaguauucca

SEQ ID NO: 108099 - RNA, 15 nt, Artificial Sequence
  Description of Artificial Sequence: Synthetic oligonucleotide
ccacugaugaauuaa

SEQ ID NO: 108100 - RNA, 12 nt, Artificial Sequence
  Description of Artificial Sequence: Synthetic oligonucleotide
ccacaucaucac

SEQ ID NO: 108101 - RNA, 13 nt, Artificial Sequence
  Description of Artificial Sequence: Synthetic oligonucleotide
cucaccaaacaga

SEQ ID NO: 108102 - RNA, 12 nt, Artificial Sequence
  Description of Artificial Sequence: Synthetic oligonucleotide
ggaacaugaugg

SEQ ID NO: 108103 - RNA, 12 nt, Artificial Sequence
  Description of Artificial Sequence: Synthetic oligonucleotide
cauguagacugc

SEQ ID NO: 108104 - RNA, 13 nt, Artificial Sequence
  Description of Artificial Sequence: Synthetic oligonucleotide
ggaucuauuuaug

SEQ ID NO: 108105 - RNA, 12 nt, Artificial Sequence
  Description of Artificial Sequence: Synthetic oligonucleotide
gcacuauuauca

SEQ ID NO: 108106 - RNA, 11 nt, Artificial Sequence
  Description of Artificial Sequence: Synthetic oligonucleotide
aucaguucugc

SEQ ID NO: 108107 - RNA, 13 nt, Artificial Sequence
  Description of Artificial Sequence: Synthetic oligonucleotide
agauuaaaccuac

SEQ ID NO: 108108 - RNA, 13 nt, Artificial Sequence
  Description of Artificial Sequence: Synthetic oligonucleotide
auaaaauccuucu

SEQ ID NO: 108109 - RNA, 12 nt, Artificial Sequence
  Description of Artificial Sequence: Synthetic oligonucleotide
aaugcuguagac

SEQ ID NO: 108110 - RNA, 13 nt, Artificial Sequence
  Description of Artificial Sequence: Synthetic oligonucleotide
uugauaggaauag

SEQ ID NO: 108111 - RNA, 11 nt, Artificial Sequence
  Description of Artificial Sequence: Synthetic oligonucleotide
aauggcccuga

SEQ ID NO: 108112 - RNA, 11 nt, Artificial Sequence
  Description of Artificial Sequence: Synthetic oligonucleotide
uuccucaagca

SEQ ID NO: 108113 - RNA, 10 nt, Artificial Sequence
  Description of Artificial Sequence: Synthetic oligonucleotide
guucagccca

SEQ ID NO: 108114 - RNA, 11 nt, Artificial Sequence
  Description of Artificial Sequence: Synthetic oligonucleotide
gcugcugaacc

SEQ ID NO: 108115 - RNA, 12 nt, Artificial Sequence
  Description of Artificial Sequence: Synthetic oligonucleotide
aaguucucuuca

SEQ ID NO: 108116 - RNA, 11 nt, Artificial Sequence
  Description of Artificial Sequence: Synthetic oligonucleotide
ccagccuagag

SEQ ID NO: 108117 - RNA, 13 nt, Artificial Sequence
  Description of Artificial Sequence: Synthetic oligonucleotide
cucugugaagugu

SEQ ID NO: 108118 - RNA, 14 nt, Artificial Sequence
  Description of Artificial Sequence: Synthetic oligonucleotide
ugagaaaauuucaa

SEQ ID NO: 108119 - RNA, 11 nt, Artificial Sequence
  Description of Artificial Sequence: Synthetic oligonucleotide
aauccuccuga

SEQ ID NO: 108120 - RNA, 12 nt, Artificial Sequence
  Description of Artificial Sequence: Synthetic oligonucleotide
gugacaucauau

SEQ ID NO: 108121 - RNA, 13 nt, Artificial Sequence
  Description of Artificial Sequence: Synthetic oligonucleotide
aaucuucaucaua

SEQ ID NO: 108122 - RNA, 13 nt, Artificial Sequence
  Description of Artificial Sequence: Synthetic oligonucleotide
gacuagcuauuaa

SEQ ID NO: 108123 - RNA, 14 nt, Artificial Sequence
  Description of Artificial Sequence: Synthetic oligonucleotide
ucucuacuaaaaau

SEQ ID NO: 108124 - RNA, 12 nt, Artificial Sequence
  Description of Artificial Sequence: Synthetic oligonucleotide
ucuaucucgccu

SEQ ID NO: 108125 - RNA, 13 nt, Artificial Sequence
  Description of Artificial Sequence: Synthetic oligonucleotide
cuucgguccaguu

SEQ ID NO: 108126 - RNA, 11 nt, Artificial Sequence
  Description of Artificial Sequence: Synthetic oligonucleotide
gauguagccgc

SEQ ID NO: 108127 - RNA, 12 nt, Artificial Sequence
  Description of Artificial Sequence: Synthetic oligonucleotide
ugaggagacuug

SEQ ID NO: 108128 - RNA, 12 nt, Artificial Sequence
  Description of Artificial Sequence: Synthetic oligonucleotide
gaguagugagga

SEQ ID NO: 108129 - RNA, 14 nt, Artificial Sequence
  Description of Artificial Sequence: Synthetic oligonucleotide
cagaugaguacaaa

SEQ ID NO: 108130 - RNA, 13 nt, Artificial Sequence
  Description of Artificial Sequence: Synthetic oligonucleotide
guuguuaaugggc

SEQ ID NO: 108131 - RNA, 13 nt, Artificial Sequence
  Description of Artificial Sequence: Synthetic oligonucleotide
uuuuuaauuuauu

SEQ ID NO: 108132 - RNA, 12 nt, Artificial Sequence
  Description of Artificial Sequence: Synthetic oligonucleotide
uauuuaaauaug

SEQ ID NO: 108133 - RNA, 13 nt, Artificial Sequence
  Description of Artificial Sequence: Synthetic oligonucleotide
uauccuuuguuuc

SEQ ID NO: 108134 - RNA, 14 nt, Artificial Sequence
  Description of Artificial Sequence: Synthetic oligonucleotide
cgucuaaguguuug

SEQ ID NO: 108135 - RNA, 12 nt, Artificial Sequence
  Description of Artificial Sequence: Synthetic oligonucleotide
accugugacaaa

SEQ ID NO: 108136 - RNA, 13 nt, Artificial Sequence
  Description of Artificial Sequence: Synthetic oligonucleotide
ccaggcugaauua

SEQ ID NO: 108137 - RNA, 14 nt, Artificial Sequence
  Description of Artificial Sequence: Synthetic oligonucleotide
gucauucuuacaau

SEQ ID NO: 108138 - RNA, 15 nt, Artificial Sequence
  Description of Artificial Sequence: Synthetic oligonucleotide
ucauucuuacaauug

SEQ ID NO: 108139 - RNA, 12 nt, Artificial Sequence
  Description of Artificial Sequence: Synthetic oligonucleotide
cagagaguguac

SEQ ID NO: 108140 - RNA, 12 nt, Artificial Sequence
  Description of Artificial Sequence: Synthetic oligonucleotide
agaacucagcag

SEQ ID NO: 108141 - RNA, 13 nt, Artificial Sequence
  Description of Artificial Sequence: Synthetic oligonucleotide
uuuauuuucagua

SEQ ID NO: 108142 - RNA, 12 nt, Artificial Sequence
  Description of Artificial Sequence: Synthetic oligonucleotide
ucuuaaauggaa

SEQ ID NO: 108143 - RNA, 13 nt, Artificial Sequence
  Description of Artificial Sequence: Synthetic oligonucleotide
ugccuaaaauugu

SEQ ID NO: 108144 - RNA, 12 nt, Artificial Sequence
  Description of Artificial Sequence: Synthetic oligonucleotide
agacugugagcu

SEQ ID NO: 108145 - RNA, 14 nt, Artificial Sequence
  Description of Artificial Sequence: Synthetic oligonucleotide
ugcuuuuuauuaau

SEQ ID NO: 108146 - RNA, 13 nt, Artificial Sequence
  Description of Artificial Sequence: Synthetic oligonucleotide
cucuucuuacauu

SEQ ID NO: 108147 - RNA, 15 nt, Artificial Sequence
  Description of Artificial Sequence: Synthetic oligonucleotide
cauuuguaaaaaugu

SEQ ID NO: 108148 - RNA, 15 nt, Artificial Sequence
  Description of Artificial Sequence: Synthetic oligonucleotide
aucuuaauucauauu

SEQ ID NO: 108149 - RNA, 13 nt, Artificial Sequence
  Description of Artificial Sequence: Synthetic oligonucleotide
gaacuaaucauga

SEQ ID NO: 108150 - RNA, 12 nt, Artificial Sequence
  Description of Artificial Sequence: Synthetic oligonucleotide
ucugcucuuggg

SEQ ID NO: 108151 - RNA, 13 nt, Artificial Sequence
  Description of Artificial Sequence: Synthetic oligonucleotide
caguagcuuugag

SEQ ID NO: 108152 - RNA, 14 nt, Artificial Sequence
  Description of Artificial Sequence: Synthetic oligonucleotide
cacguaauauuuca

SEQ ID NO: 108153 - RNA, 13 nt, Artificial Sequence
  Description of Artificial Sequence: Synthetic oligonucleotide
uauucucuucacu

SEQ ID NO: 108154 - RNA, 14 nt, Artificial Sequence
  Description of Artificial Sequence: Synthetic oligonucleotide
cuaaugcuaagaaa

SEQ ID NO: 108155 - RNA, 12 nt, Artificial Sequence
  Description of Artificial Sequence: Synthetic oligonucleotide
gcugaaaaucaa

SEQ ID NO: 108156 - RNA, 14 nt, Artificial Sequence
  Description of Artificial Sequence: Synthetic oligonucleotide
aauaugauuacuuu

SEQ ID NO: 108157 - RNA, 14 nt, Artificial Sequence
  Description of Artificial Sequence: Synthetic oligonucleotide
cauuuuguucuaca

SEQ ID NO: 108158 - RNA, 12 nt, Artificial Sequence
  Description of Artificial Sequence: Synthetic oligonucleotide
cccgggacucuc

SEQ ID NO: 108159 - RNA, 14 nt, Artificial Sequence
  Description of Artificial Sequence: Synthetic oligonucleotide
ccuuuaaaguaaag

SEQ ID NO: 108160 - RNA, 13 nt, Artificial Sequence
  Description of Artificial Sequence: Synthetic oligonucleotide
ucuggaagccugg

SEQ ID NO: 108161 - RNA, 14 nt, Artificial Sequence
  Description of Artificial Sequence: Synthetic oligonucleotide
aaaacaaaagagag

SEQ ID NO: 108162 - RNA, 13 nt, Artificial Sequence
  Description of Artificial Sequence: Synthetic oligonucleotide
aucaguuaugccg

SEQ ID NO: 108163 - RNA, 13 nt, Artificial Sequence
  Description of Artificial Sequence: Synthetic oligonucleotide
uaaaagaagucca

SEQ ID NO: 108164 - RNA, 11 nt, Artificial Sequence
  Description of Artificial Sequence: Synthetic oligonucleotide
aggugagguua

SEQ ID NO: 108165 - RNA, 11 nt, Artificial Sequence
  Description of Artificial Sequence: Synthetic oligonucleotide
gggaagaggac

SEQ ID NO: 108166 - RNA, 13 nt, Artificial Sequence
  Description of Artificial Sequence: Synthetic oligonucleotide
aagcaaguauugu

SEQ ID NO: 108167 - RNA, 12 nt, Artificial Sequence
  Description of Artificial Sequence: Synthetic oligonucleotide
auuguagcacuc

SEQ ID NO: 108168 - RNA, 14 nt, Artificial Sequence
  Description of Artificial Sequence: Synthetic oligonucleotide
acaaaaccacaaau

SEQ ID NO: 108169 - RNA, 12 nt, Artificial Sequence
  Description of Artificial Sequence: Synthetic oligonucleotide
uaagcccauaca

SEQ ID NO: 108170 - RNA, 11 nt, Artificial Sequence
  Description of Artificial Sequence: Synthetic oligonucleotide
agcccauacag

SEQ ID NO: 108171 - RNA, 12 nt, Artificial Sequence
  Description of Artificial Sequence: Synthetic oligonucleotide
cagaaaccuucc

SEQ ID NO: 108172 - RNA, 10 nt, Artificial Sequence
  Description of Artificial Sequence: Synthetic oligonucleotide
guauaccuac

SEQ ID NO: 108173 - RNA, 13 nt, Artificial Sequence
  Description of Artificial Sequence: Synthetic oligonucleotide
gccaguuuucgga

SEQ ID NO: 108174 - RNA, 9 nt, Artificial Sequence
  Description of Artificial Sequence: Synthetic oligonucleotide
ggaacaggg

SEQ ID NO: 108175 - RNA, 13 nt, Artificial Sequence
  Description of Artificial Sequence: Synthetic oligonucleotide
uuaacuuuccagu

SEQ ID NO: 108176 - RNA, 14 nt, Artificial Sequence
  Description of Artificial Sequence: Synthetic oligonucleotide
aaaguuugguuuug

SEQ ID NO: 108177 - RNA, 12 nt, Artificial Sequence
  Description of Artificial Sequence: Synthetic oligonucleotide
cuucccacugua

SEQ ID NO: 108178 - RNA, 13 nt, Artificial Sequence
  Description of Artificial Sequence: Synthetic oligonucleotide
ugauaccauauga

SEQ ID NO: 108179 - RNA, 11 nt, Artificial Sequence
  Description of Artificial Sequence: Synthetic oligonucleotide
aacaugggcug

SEQ ID NO: 108180 - RNA, 13 nt, Artificial Sequence
  Description of Artificial Sequence: Synthetic oligonucleotide
caacuuuuucaua

SEQ ID NO: 108181 - RNA, 12 nt, Artificial Sequence
  Description of Artificial Sequence: Synthetic oligonucleotide
caugaggccgga

SEQ ID NO: 108182 - RNA, 11 nt, Artificial Sequence
  Description of Artificial Sequence: Synthetic oligonucleotide
acugcauuugu

SEQ ID NO: 108183 - RNA, 13 nt, Artificial Sequence
  Description of Artificial Sequence: Synthetic oligonucleotide
aauguuuacuacc

SEQ ID NO: 108184 - RNA, 15 nt, Artificial Sequence
  Description of Artificial Sequence: Synthetic oligonucleotide
aauuuuuugaugaaa

SEQ ID NO: 108185 - RNA, 14 nt, Artificial Sequence
  Description of Artificial Sequence: Synthetic oligonucleotide
cagugugugaauuu

SEQ ID NO: 108186 - RNA, 13 nt, Artificial Sequence
  Description of Artificial Sequence: Synthetic oligonucleotide
gagcaauguaugu

SEQ ID NO: 108187 - RNA, 14 nt, Artificial Sequence
  Description of Artificial Sequence: Synthetic oligonucleotide
aaagcacauauaua

SEQ ID NO: 108188 - RNA, 14 nt, Artificial Sequence
  Description of Artificial Sequence: Synthetic oligonucleotide
guaauaguuucucc

SEQ ID NO: 108189 - RNA, 13 nt, Artificial Sequence
  Description of Artificial Sequence: Synthetic oligonucleotide
aguuucuccaaau

SEQ ID NO: 108190 - RNA, 13 nt, Artificial Sequence
  Description of Artificial Sequence: Synthetic oligonucleotide
uacuuccuagaaa

SEQ ID NO: 108191 - RNA, 13 nt, Artificial Sequence
  Description of Artificial Sequence: Synthetic oligonucleotide
uacaccauauaug

SEQ ID NO: 108192 - RNA, 14 nt, Artificial Sequence
  Description of Artificial Sequence: Synthetic oligonucleotide
auauaugaauggag

SEQ ID NO: 108193 - RNA, 13 nt, Artificial Sequence
  Description of Artificial Sequence: Synthetic oligonucleotide
acgagaagaagau

SEQ ID NO: 108194 - RNA, 13 nt, Artificial Sequence
  Description of Artificial Sequence: Synthetic oligonucleotide
ucauuuacaggga

SEQ ID NO: 108195 - RNA, 13 nt, Artificial Sequence
  Description of Artificial Sequence: Synthetic oligonucleotide
cauuuacagggac

SEQ ID NO: 108196 - RNA, 10 nt, Artificial Sequence
  Description of Artificial Sequence: Synthetic oligonucleotide
agggaccuga

SEQ ID NO: 108197 - RNA, 14 nt, Artificial Sequence
  Description of Artificial Sequence: Synthetic oligonucleotide
uguuugacugcauc

SEQ ID NO: 108198 - RNA, 13 nt, Artificial Sequence
  Description of Artificial Sequence: Synthetic oligonucleotide
uuugacugcaucg

SEQ ID NO: 108199 - RNA, 12 nt, Artificial Sequence
  Description of Artificial Sequence: Synthetic oligonucleotide
gaguucacaggg

SEQ ID NO: 108200 - RNA, 13 nt, Artificial Sequence
  Description of Artificial Sequence: Synthetic oligonucleotide
ggcaccucugucc

SEQ ID NO: 108201 - RNA, 15 nt, Artificial Sequence
  Description of Artificial Sequence: Synthetic oligonucleotide
gguuugucuuuuuaa

SEQ ID NO: 108202 - RNA, 14 nt, Artificial Sequence
  Description of Artificial Sequence: Synthetic oligonucleotide
uuugucuuuuuaag

SEQ ID NO: 108203 - RNA, 13 nt, Artificial Sequence
  Description of Artificial Sequence: Synthetic oligonucleotide
ccuaaagguuguc

SEQ ID NO: 108204 - RNA, 12 nt, Artificial Sequence
  Description of Artificial Sequence: Synthetic oligonucleotide
aagguugucgac

SEQ ID NO: 108205 - RNA, 13 nt, Artificial Sequence
  Description of Artificial Sequence: Synthetic oligonucleotide
accuggcaauugu

SEQ ID NO: 108206 - RNA, 12 nt, Artificial Sequence
  Description of Artificial Sequence: Synthetic oligonucleotide
aguggugcgagg

SEQ ID NO: 108207 - RNA, 13 nt, Artificial Sequence
  Description of Artificial Sequence: Synthetic oligonucleotide
agagacaugaaau

SEQ ID NO: 108208 - RNA, 13 nt, Artificial Sequence
  Description of Artificial Sequence: Synthetic oligonucleotide
auauauuucucca

SEQ ID NO: 108209 - RNA, 10 nt, Artificial Sequence
  Description of Artificial Sequence: Synthetic oligonucleotide
caugaaggcu

SEQ ID NO: 108210 - RNA, 11 nt, Artificial Sequence
  Description of Artificial Sequence: Synthetic oligonucleotide
gcuggaguggu

SEQ ID NO: 108211 - RNA, 11 nt, Artificial Sequence
  Description of Artificial Sequence: Synthetic oligonucleotide
aggaagagagg

SEQ ID NO: 108212 - RNA, 12 nt, Artificial Sequence
  Description of Artificial Sequence: Synthetic oligonucleotide
cuugcaucgggc

SEQ ID NO: 108213 - RNA, 13 nt, Artificial Sequence
  Description of Artificial Sequence: Synthetic oligonucleotide
auauccuacugug

SEQ ID NO: 108214 - RNA, 13 nt, Artificial Sequence
  Description of Artificial Sequence: Synthetic oligonucleotide
uccuacuguguaa

SEQ ID NO: 108215 - RNA, 12 nt, Artificial Sequence
  Description of Artificial Sequence: Synthetic oligonucleotide
ccuuguagugua

SEQ ID NO: 108216 - RNA, 13 nt, Artificial Sequence
  Description of Artificial Sequence: Synthetic oligonucleotide
ucuuuguugauug

SEQ ID NO: 108217 - RNA, 14 nt, Artificial Sequence
  Description of Artificial Sequence: Synthetic oligonucleotide
uuuguugauugaaa

SEQ ID NO: 108218 - RNA, 15 nt, Artificial Sequence
  Description of Artificial Sequence: Synthetic oligonucleotide
uucuuuuucuuccau

SEQ ID NO: 108219 - RNA, 13 nt, Artificial Sequence
  Description of Artificial Sequence: Synthetic oligonucleotide
aaucuuccuucua

SEQ ID NO: 108220 - RNA, 13 nt, Artificial Sequence
  Description of Artificial Sequence: Synthetic oligonucleotide
uugaaugcuucau

SEQ ID NO: 108221 - RNA, 13 nt, Artificial Sequence
  Description of Artificial Sequence: Synthetic oligonucleotide
ugaaugcuucaug

SEQ ID NO: 108222 - RNA, 13 nt, Artificial Sequence
  Description of Artificial Sequence: Synthetic oligonucleotide
aauucuacuuuga

SEQ ID NO: 108223 - RNA, 13 nt, Artificial Sequence
  Description of Artificial Sequence: Synthetic oligonucleotide
agcaacuacagac

SEQ ID NO: 108224 - RNA, 13 nt, Artificial Sequence
  Description of Artificial Sequence: Synthetic oligonucleotide
gaccaaggucaac

SEQ ID NO: 108225 - RNA, 13 nt, Artificial Sequence
  Description of Artificial Sequence: Synthetic oligonucleotide
cgacuaucucgac

SEQ ID NO: 108226 - RNA, 13 nt, Artificial Sequence
  Description of Artificial Sequence: Synthetic oligonucleotide
aaccuucccaaac

SEQ ID NO: 108227 - RNA, 14 nt, Artificial Sequence
  Description of Artificial Sequence: Synthetic oligonucleotide
ccaagcuuagaacu

SEQ ID NO: 108228 - RNA, 15 nt, Artificial Sequence
  Description of Artificial Sequence: Synthetic oligonucleotide
agcuuagaacuuuaa

SEQ ID NO: 108229 - RNA, 11 nt, Artificial Sequence
  Description of Artificial Sequence: Synthetic oligonucleotide
aagaccaccac

SEQ ID NO: 108230 - RNA, 14 nt, Artificial Sequence
  Description of Artificial Sequence: Synthetic oligonucleotide
gcgagaaauaaagu

SEQ ID NO: 108231 - RNA, 14 nt, Artificial Sequence
  Description of Artificial Sequence: Synthetic oligonucleotide
cgagaaauaaaguu

SEQ ID NO: 108232 - RNA, 12 nt, Artificial Sequence
  Description of Artificial Sequence: Synthetic oligonucleotide
aggaaaugaucc

SEQ ID NO: 108233 - RNA, 13 nt, Artificial Sequence
  Description of Artificial Sequence: Synthetic oligonucleotide
gaagaaaugaaac

SEQ ID NO: 108234 - RNA, 13 nt, Artificial Sequence
  Description of Artificial Sequence: Synthetic oligonucleotide
guuuccauccucc

SEQ ID NO: 108235 - RNA, 15 nt, Artificial Sequence
  Description of Artificial Sequence: Synthetic oligonucleotide
acugaaaaucuuuga

SEQ ID NO: 108236 - RNA, 11 nt, Artificial Sequence
  Description of Artificial Sequence: Synthetic oligonucleotide
ugccguucagg

SEQ ID NO: 108237 - RNA, 13 nt, Artificial Sequence
  Description of Artificial Sequence: Synthetic oligonucleotide
caggguccagaag

SEQ ID NO: 108238 - RNA, 13 nt, Artificial Sequence
  Description of Artificial Sequence: Synthetic oligonucleotide
ucaagacugcuug

SEQ ID NO: 108239 - RNA, 13 nt, Artificial Sequence
  Description of Artificial Sequence: Synthetic oligonucleotide
uccaugucuuugg

SEQ ID NO: 108240 - RNA, 11 nt, Artificial Sequence
  Description of Artificial Sequence: Synthetic oligonucleotide
gccugaaacac

SEQ ID NO: 108241 - RNA, 12 nt, Artificial Sequence
  Description of Artificial Sequence: Synthetic oligonucleotide
ucucuguaccuc

SEQ ID NO: 108242 - RNA, 12 nt, Artificial Sequence
  Description of Artificial Sequence: Synthetic oligonucleotide
agcaagacaaga

SEQ ID NO: 108243 - RNA, 13 nt, Artificial Sequence
  Description of Artificial Sequence: Synthetic oligonucleotide
gcaagacaagaaa

SEQ ID NO: 108244 - RNA, 12 nt, Artificial Sequence
  Description of Artificial Sequence: Synthetic oligonucleotide
uguacaagaucc

SEQ ID NO: 108245 - RNA, 12 nt, Artificial Sequence
  Description of Artificial Sequence: Synthetic oligonucleotide
cguacuugcaga

SEQ ID NO: 108246 - RNA, 13 nt, Artificial Sequence
  Description of Artificial Sequence: Synthetic oligonucleotide
cgaucgauacaga

SEQ ID NO: 108247 - RNA, 13 nt, Artificial Sequence
  Description of Artificial Sequence: Synthetic oligonucleotide
uauaaaaauaaau

SEQ ID NO: 108248 - RNA, 13 nt, Artificial Sequence
  Description of Artificial Sequence: Synthetic oligonucleotide
uaaaaauaaauau

SEQ ID NO: 108249 - RNA, 13 nt, Artificial Sequence
  Description of Artificial Sequence: Synthetic oligonucleotide
uuugacugcugug

SEQ ID NO: 108250 - RNA, 13 nt, Artificial Sequence
  Description of Artificial Sequence: Synthetic oligonucleotide
ggagaugagagac

SEQ ID NO: 108251 - RNA, 10 nt, Artificial Sequence
  Description of Artificial Sequence: Synthetic oligonucleotide
ucccacuugg

SEQ ID NO: 108252 - RNA, 10 nt, Artificial Sequence
  Description of Artificial Sequence: Synthetic oligonucleotide
guucacggcc

SEQ ID NO: 108253 - RNA, 12 nt, Artificial Sequence
  Description of Artificial Sequence: Synthetic oligonucleotide
accaucacacca

SEQ ID NO: 108254 - RNA, 10 nt, Artificial Sequence
  Description of Artificial Sequence: Synthetic oligonucleotide
cugcggguuu

SEQ ID NO: 108255 - RNA, 9 nt, Artificial Sequence
  Description of Artificial Sequence: Synthetic oligonucleotide
uccaguuug

SEQ ID NO: 108256 - RNA, 12 nt, Artificial Sequence
  Description of Artificial Sequence: Synthetic oligonucleotide
uuaaggacuucu

SEQ ID NO: 108257 - RNA, 12 nt, Artificial Sequence
  Description of Artificial Sequence: Synthetic oligonucleotide
agugggacagag

SEQ ID NO: 108258 - RNA, 13 nt, Artificial Sequence
  Description of Artificial Sequence: Synthetic oligonucleotide
auuuguuauugug

SEQ ID NO: 108259 - RNA, 12 nt, Artificial Sequence
  Description of Artificial Sequence: Synthetic oligonucleotide
ucaaaugcauuu

SEQ ID NO: 108260 - RNA, 9 nt, Artificial Sequence
  Description of Artificial Sequence: Synthetic oligonucleotide
aggaaagcc

SEQ ID NO: 108261 - RNA, 10 nt, Artificial Sequence
  Description of Artificial Sequence: Synthetic oligonucleotide
ggaaagcccu

SEQ ID NO: 108262 - RNA, 11 nt, Artificial Sequence
  Description of Artificial Sequence: Synthetic oligonucleotide
ccagcauggcc

SEQ ID NO: 108263 - RNA, 10 nt, Artificial Sequence
  Description of Artificial Sequence: Synthetic oligonucleotide
uucucccuga

SEQ ID NO: 108264 - RNA, 11 nt, Artificial Sequence
  Description of Artificial Sequence: Synthetic oligonucleotide
aagaagcccuu

SEQ ID NO: 108265 - RNA, 11 nt, Artificial Sequence
  Description of Artificial Sequence: Synthetic oligonucleotide
gaagcccuuca

SEQ ID NO: 108266 - RNA, 10 nt, Artificial Sequence
  Description of Artificial Sequence: Synthetic oligonucleotide
cccuucagcg

SEQ ID NO: 108267 - RNA, 10 nt, Artificial Sequence
  Description of Artificial Sequence: Synthetic oligonucleotide
cuucagcggc

SEQ ID NO: 108268 - RNA, 11 nt, Artificial Sequence
  Description of Artificial Sequence: Synthetic oligonucleotide
cagcggccagu

SEQ ID NO: 108269 - RNA, 11 nt, Artificial Sequence
  Description of Artificial Sequence: Synthetic oligonucleotide
gaaaagcuccg

SEQ ID NO: 108270 - RNA, 10 nt, Artificial Sequence
  Description of Artificial Sequence: Synthetic oligonucleotide
aaagcuccgg

SEQ ID NO: 108271 - RNA, 12 nt, Artificial Sequence
  Description of Artificial Sequence: Synthetic oligonucleotide
gucaacagucug

SEQ ID NO: 108272 - RNA, 12 nt, Artificial Sequence
  Description of Artificial Sequence: Synthetic oligonucleotide
agaguucaaaag

SEQ ID NO: 108273 - RNA, 12 nt, Artificial Sequence
  Description of Artificial Sequence: Synthetic oligonucleotide
gaguucaaaagc

SEQ ID NO: 108274 - RNA, 11 nt, Artificial Sequence
  Description of Artificial Sequence: Synthetic oligonucleotide
ucaaaagcccu

SEQ ID NO: 108275 - RNA, 11 nt, Artificial Sequence
  Description of Artificial Sequence: Synthetic oligonucleotide
caaaagcccuu

SEQ ID NO: 108276 - RNA, 11 nt, Artificial Sequence
  Description of Artificial Sequence: Synthetic oligonucleotide
aaagcccuuca

SEQ ID NO: 108277 - RNA, 11 nt, Artificial Sequence
  Description of Artificial Sequence: Synthetic oligonucleotide
aagcccuucag

SEQ ID NO: 108278 - RNA, 12 nt, Artificial Sequence
  Description of Artificial Sequence: Synthetic oligonucleotide
ugaagccgcucg

SEQ ID NO: 108279 - RNA, 11 nt, Artificial Sequence
  Description of Artificial Sequence: Synthetic oligonucleotide
acgccagucaa

SEQ ID NO: 108280 - RNA, 12 nt, Artificial Sequence
  Description of Artificial Sequence: Synthetic oligonucleotide
ucuuggugcgug

SEQ ID NO: 108281 - RNA, 13 nt, Artificial Sequence
  Description of Artificial Sequence: Synthetic oligonucleotide
uuggauucaucag

SEQ ID NO: 108282 - RNA, 12 nt, Artificial Sequence
  Description of Artificial Sequence: Synthetic oligonucleotide
ggaauaccuaag

SEQ ID NO: 108283 - RNA, 11 nt, Artificial Sequence
  Description of Artificial Sequence: Synthetic oligonucleotide
uuugaggcuca

SEQ ID NO: 108284 - RNA, 10 nt, Artificial Sequence
  Description of Artificial Sequence: Synthetic oligonucleotide
cuacaauugg

SEQ ID NO: 108285 - RNA, 11 nt, Artificial Sequence
  Description of Artificial Sequence: Synthetic oligonucleotide
aguuaggagcc

SEQ ID NO: 108286 - RNA, 12 nt, Artificial Sequence
  Description of Artificial Sequence: Synthetic oligonucleotide
gucaauauccac

SEQ ID NO: 108287 - RNA, 12 nt, Artificial Sequence
  Description of Artificial Sequence: Synthetic oligonucleotide
uguucagucaca

SEQ ID NO: 108288 - RNA, 11 nt, Artificial Sequence
  Description of Artificial Sequence: Synthetic oligonucleotide
cacacacauac

SEQ ID NO: 108289 - RNA, 11 nt, Artificial Sequence
  Description of Artificial Sequence: Synthetic oligonucleotide
uccuuuugcuu

SEQ ID NO: 108290 - RNA, 15 nt, Artificial Sequence
  Description of Artificial Sequence: Synthetic oligonucleotide
uuuaaaguaauuuuu

SEQ ID NO: 108291 - RNA, 12 nt, Artificial Sequence
  Description of Artificial Sequence: Synthetic oligonucleotide
aacagucaaugg

SEQ ID NO: 108292 - RNA, 12 nt, Artificial Sequence
  Description of Artificial Sequence: Synthetic oligonucleotide
cgacaaaccaau

SEQ ID NO: 108293 - RNA, 11 nt, Artificial Sequence
  Description of Artificial Sequence: Synthetic oligonucleotide
cugcuaccacu

SEQ ID NO: 108294 - RNA, 12 nt, Artificial Sequence
  Description of Artificial Sequence: Synthetic oligonucleotide
caagcggucuua

SEQ ID NO: 108295 - RNA, 12 nt, Artificial Sequence
  Description of Artificial Sequence: Synthetic oligonucleotide
gucuuaccggcu

SEQ ID NO: 108296 - RNA, 10 nt, Artificial Sequence
  Description of Artificial Sequence: Synthetic oligonucleotide
auggguuacc

SEQ ID NO: 108297 - RNA, 10 nt, Artificial Sequence
  Description of Artificial Sequence: Synthetic oligonucleotide
uuaccugcga

SEQ ID NO: 108298 - RNA, 11 nt, Artificial Sequence
  Description of Artificial Sequence: Synthetic oligonucleotide
aucuugcugag

SEQ ID NO: 108299 - RNA, 12 nt, Artificial Sequence
  Description of Artificial Sequence: Synthetic oligonucleotide
gcauaaaacagu

SEQ ID NO: 108300 - RNA, 11 nt, Artificial Sequence
  Description of Artificial Sequence: Synthetic oligonucleotide
uccuuuauccu

SEQ ID NO: 108301 - RNA, 11 nt, Artificial Sequence
  Description of Artificial Sequence: Synthetic oligonucleotide
aacgcaaguug

SEQ ID NO: 108302 - RNA, 12 nt, Artificial Sequence
  Description of Artificial Sequence: Synthetic oligonucleotide
aacugaaaccau

SEQ ID NO: 108303 - RNA, 13 nt, Artificial Sequence
  Description of Artificial Sequence: Synthetic oligonucleotide
cuuuguuaaauau

SEQ ID NO: 108304 - RNA, 13 nt, Artificial Sequence
  Description of Artificial Sequence: Synthetic oligonucleotide
uauauuaaaaguu

SEQ ID NO: 108305 - RNA, 12 nt, Artificial Sequence
  Description of Artificial Sequence: Synthetic oligonucleotide
uuuugacuuaac

SEQ ID NO: 108306 - RNA, 12 nt, Artificial Sequence
  Description of Artificial Sequence: Synthetic oligonucleotide
caaacucagcac

SEQ ID NO: 108307 - RNA, 10 nt, Artificial Sequence
  Description of Artificial Sequence: Synthetic oligonucleotide
gcugaccuca

SEQ ID NO: 108308 - RNA, 13 nt, Artificial Sequence
  Description of Artificial Sequence: Synthetic oligonucleotide
uuauucagaucgc

SEQ ID NO: 108309 - RNA, 12 nt, Artificial Sequence
  Description of Artificial Sequence: Synthetic oligonucleotide
ggguucugggau

SEQ ID NO: 108310 - RNA, 14 nt, Artificial Sequence
  Description of Artificial Sequence: Synthetic oligonucleotide
uauuggaaauuaug

SEQ ID NO: 108311 - RNA, 12 nt, Artificial Sequence
  Description of Artificial Sequence: Synthetic oligonucleotide
uggaagcacuag

SEQ ID NO: 108312 - RNA, 12 nt, Artificial Sequence
  Description of Artificial Sequence: Synthetic oligonucleotide
uuuuuaugugga

SEQ ID NO: 108313 - RNA, 11 nt, Artificial Sequence
  Description of Artificial Sequence: Synthetic oligonucleotide
gaauugguaga

SEQ ID NO: 108314 - RNA, 12 nt, Artificial Sequence
  Description of Artificial Sequence: Synthetic oligonucleotide
uagacuuggaga

SEQ ID NO: 108315 - RNA, 12 nt, Artificial Sequence
  Description of Artificial Sequence: Synthetic oligonucleotide
uacaguauucca

SEQ ID NO: 108316 - RNA, 14 nt, Artificial Sequence
  Description of Artificial Sequence: Synthetic oligonucleotide
cacugaugaauuaa

SEQ ID NO: 108317 - RNA, 11 nt, Artificial Sequence
  Description of Artificial Sequence: Synthetic oligonucleotide
cacaucaucac

SEQ ID NO: 108318 - RNA, 12 nt, Artificial Sequence
  Description of Artificial Sequence: Synthetic oligonucleotide
ucaccaaacaga

SEQ ID NO: 108319 - RNA, 11 nt, Artificial Sequence
  Description of Artificial Sequence: Synthetic oligonucleotide
gaacaugaugg

SEQ ID NO: 108320 - RNA, 11 nt, Artificial Sequence
  Description of Artificial Sequence: Synthetic oligonucleotide
auguagacugc

SEQ ID NO: 108321 - RNA, 12 nt, Artificial Sequence
  Description of Artificial Sequence: Synthetic oligonucleotide
gaucuauuuaug

SEQ ID NO: 108322 - RNA, 11 nt, Artificial Sequence
  Description of Artificial Sequence: Synthetic oligonucleotide
cacuauuauca

SEQ ID NO: 108323 - RNA, 10 nt, Artificial Sequence
  Description of Artificial Sequence: Synthetic oligonucleotide
ucaguucugc

SEQ ID NO: 108324 - RNA, 12 nt, Artificial Sequence
  Description of Artificial Sequence: Synthetic oligonucleotide
gauuaaaccuac

SEQ ID NO: 108325 - RNA, 12 nt, Artificial Sequence
  Description of Artificial Sequence: Synthetic oligonucleotide
uaaaauccuucu

SEQ ID NO: 108326 - RNA, 11 nt, Artificial Sequence
  Description of Artificial Sequence: Synthetic oligonucleotide
augcuguagac

SEQ ID NO: 108327 - RNA, 12 nt, Artificial Sequence
  Description of Artificial Sequence: Synthetic oligonucleotide
ugauaggaauag

SEQ ID NO: 108328 - RNA, 10 nt, Artificial Sequence
  Description of Artificial Sequence: Synthetic oligonucleotide
auggcccuga

SEQ ID NO: 108329 - RNA, 10 nt, Artificial Sequence
  Description of Artificial Sequence: Synthetic oligonucleotide
uccucaagca

SEQ ID NO: 108330 - RNA, 9 nt, Artificial Sequence
  Description of Artificial Sequence: Synthetic oligonucleotide
uucagccca

SEQ ID NO: 108331 - RNA, 10 nt, Artificial Sequence
  Description of Artificial Sequence: Synthetic oligonucleotide
cugcugaacc

SEQ ID NO: 108332 - RNA, 11 nt, Artificial Sequence
  Description of Artificial Sequence: Synthetic oligonucleotide
aguucucuuca

SEQ ID NO: 108333 - RNA, 10 nt, Artificial Sequence
  Description of Artificial Sequence: Synthetic oligonucleotide
cagccuagag

SEQ ID NO: 108334 - RNA, 12 nt, Artificial Sequence
  Description of Artificial Sequence: Synthetic oligonucleotide
ucugugaagugu

SEQ ID NO: 108335 - RNA, 13 nt, Artificial Sequence
  Description of Artificial Sequence: Synthetic oligonucleotide
gagaaaauuucaa

SEQ ID NO: 108336 - RNA, 10 nt, Artificial Sequence
  Description of Artificial Sequence: Synthetic oligonucleotide
auccuccuga

SEQ ID NO: 108337 - RNA, 11 nt, Artificial Sequence
  Description of Artificial Sequence: Synthetic oligonucleotide
ugacaucauau

SEQ ID NO: 108338 - RNA, 12 nt, Artificial Sequence
  Description of Artificial Sequence: Synthetic oligonucleotide
aucuucaucaua

SEQ ID NO: 108339 - RNA, 12 nt, Artificial Sequence
  Description of Artificial Sequence: Synthetic oligonucleotide
acuagcuauuaa

SEQ ID NO: 108340 - RNA, 13 nt, Artificial Sequence
  Description of Artificial Sequence: Synthetic oligonucleotide
cucuacuaaaaau

SEQ ID NO: 108341 - RNA, 11 nt, Artificial Sequence
  Description of Artificial Sequence: Synthetic oligonucleotide
cuaucucgccu

SEQ ID NO: 108342 - RNA, 12 nt, Artificial Sequence
  Description of Artificial Sequence: Synthetic oligonucleotide
uucgguccaguu

SEQ ID NO: 108343 - RNA, 10 nt, Artificial Sequence
  Description of Artificial Sequence: Synthetic oligonucleotide
auguagccgc

SEQ ID NO: 108344 - RNA, 11 nt, Artificial Sequence
  Description of Artificial Sequence: Synthetic oligonucleotide
gaggagacuug

SEQ ID NO: 108345 - RNA, 11 nt, Artificial Sequence
  Description of Artificial Sequence: Synthetic oligonucleotide
aguagugagga

SEQ ID NO: 108346 - RNA, 13 nt, Artificial Sequence
  Description of Artificial Sequence: Synthetic oligonucleotide
agaugaguacaaa

SEQ ID NO: 108347 - RNA, 12 nt, Artificial Sequence
  Description of Artificial Sequence: Synthetic oligonucleotide
uuguuaaugggc

SEQ ID NO: 108348 - RNA, 12 nt, Artificial Sequence
  Description of Artificial Sequence: Synthetic oligonucleotide
uuuuaauuuauu

SEQ ID NO: 108349 - RNA, 11 nt, Artificial Sequence
  Description of Artificial Sequence: Synthetic oligonucleotide
auuuaaauaug

SEQ ID NO: 108350 - RNA, 12 nt, Artificial Sequence
  Description of Artificial Sequence: Synthetic oligonucleotide
auccuuuguuuc

SEQ ID NO: 108351 - RNA, 13 nt, Artificial Sequence
  Description of Artificial Sequence: Synthetic oligonucleotide
gucuaaguguuug

SEQ ID NO: 108352 - RNA, 11 nt, Artificial Sequence
  Description of Artificial Sequence: Synthetic oligonucleotide
ccugugacaaa

SEQ ID NO: 108353 - RNA, 12 nt, Artificial Sequence
  Description of Artificial Sequence: Synthetic oligonucleotide
caggcugaauua

SEQ ID NO: 108354 - RNA, 13 nt, Artificial Sequence
  Description of Artificial Sequence: Synthetic oligonucleotide
ucauucuuacaau

SEQ ID NO: 108355 - RNA, 14 nt, Artificial Sequence
  Description of Artificial Sequence: Synthetic oligonucleotide
cauucuuacaauug

SEQ ID NO: 108356 - RNA, 11 nt, Artificial Sequence
  Description of Artificial Sequence: Synthetic oligonucleotide
agagaguguac

SEQ ID NO: 108357 - RNA, 11 nt, Artificial Sequence
  Description of Artificial Sequence: Synthetic oligonucleotide
gaacucagcag

SEQ ID NO: 108358 - RNA, 12 nt, Artificial Sequence
  Description of Artificial Sequence: Synthetic oligonucleotide
uuauuuucagua

SEQ ID NO: 108359 - RNA, 11 nt, Artificial Sequence
  Description of Artificial Sequence: Synthetic oligonucleotide
cuuaaauggaa

SEQ ID NO: 108360 - RNA, 12 nt, Artificial Sequence
  Description of Artificial Sequence: Synthetic oligonucleotide
gccuaaaauugu

SEQ ID NO: 108361 - RNA, 12 nt, Artificial Sequence
  Description of Artificial Sequence: Synthetic oligonucleotide
acuaacaucugg

SEQ ID NO: 108362 - RNA, 11 nt, Artificial Sequence
  Description of Artificial Sequence: Synthetic oligonucleotide
gacugugagcu

SEQ ID NO: 108363 - RNA, 13 nt, Artificial Sequence
  Description of Artificial Sequence: Synthetic oligonucleotide
gcuuuuuauuaau

SEQ ID NO: 108364 - RNA, 12 nt, Artificial Sequence
  Description of Artificial Sequence: Synthetic oligonucleotide
ucuucuuacauu

SEQ ID NO: 108365 - RNA, 14 nt, Artificial Sequence
  Description of Artificial Sequence: Synthetic oligonucleotide
auuuguaaaaaugu

SEQ ID NO: 108366 - RNA, 14 nt, Artificial Sequence
  Description of Artificial Sequence: Synthetic oligonucleotide
ucuuaauucauauu

SEQ ID NO: 108367 - RNA, 12 nt, Artificial Sequence
  Description of Artificial Sequence: Synthetic oligonucleotide
aacuaaucauga

SEQ ID NO: 108368 - RNA, 11 nt, Artificial Sequence
  Description of Artificial Sequence: Synthetic oligonucleotide
cugcucuuggg

SEQ ID NO: 108369 - RNA, 12 nt, Artificial Sequence
  Description of Artificial Sequence: Synthetic oligonucleotide
aguagcuuugag

SEQ ID NO: 108370 - RNA, 13 nt, Artificial Sequence
  Description of Artificial Sequence: Synthetic oligonucleotide
acguaauauuuca

SEQ ID NO: 108371 - RNA, 12 nt, Artificial Sequence
  Description of Artificial Sequence: Synthetic oligonucleotide
auucucuucacu

SEQ ID NO: 108372 - RNA, 13 nt, Artificial Sequence
  Description of Artificial Sequence: Synthetic oligonucleotide
uaaugcuaagaaa

SEQ ID NO: 108373 - RNA, 11 nt, Artificial Sequence
  Description of Artificial Sequence: Synthetic oligonucleotide
cugaaaaucaa

SEQ ID NO: 108374 - RNA, 13 nt, Artificial Sequence
  Description of Artificial Sequence: Synthetic oligonucleotide
auaugauuacuuu

SEQ ID NO: 108375 - RNA, 13 nt, Artificial Sequence
  Description of Artificial Sequence: Synthetic oligonucleotide
auuuuguucuaca

SEQ ID NO: 108376 - RNA, 11 nt, Artificial Sequence
  Description of Artificial Sequence: Synthetic oligonucleotide
ccgggacucuc

SEQ ID NO: 108377 - RNA, 13 nt, Artificial Sequence
  Description of Artificial Sequence: Synthetic oligonucleotide
cuuuaaaguaaag

SEQ ID NO: 108378 - RNA, 12 nt, Artificial Sequence
  Description of Artificial Sequence: Synthetic oligonucleotide
cuggaagccugg

SEQ ID NO: 108379 - RNA, 13 nt, Artificial Sequence
  Description of Artificial Sequence: Synthetic oligonucleotide
aaacaaaagagag

SEQ ID NO: 108380 - RNA, 12 nt, Artificial Sequence
  Description of Artificial Sequence: Synthetic oligonucleotide
ucaguuaugccg

SEQ ID NO: 108381 - RNA, 12 nt, Artificial Sequence
  Description of Artificial Sequence: Synthetic oligonucleotide
aaaagaagucca

SEQ ID NO: 108382 - RNA, 10 nt, Artificial Sequence
  Description of Artificial Sequence: Synthetic oligonucleotide
ggugagguua

SEQ ID NO: 108383 - RNA, 10 nt, Artificial Sequence
  Description of Artificial Sequence: Synthetic oligonucleotide
ggaagaggac

SEQ ID NO: 108384 - RNA, 12 nt, Artificial Sequence
  Description of Artificial Sequence: Synthetic oligonucleotide
agcaaguauugu

SEQ ID NO: 108385 - RNA, 11 nt, Artificial Sequence
  Description of Artificial Sequence: Synthetic oligonucleotide
uuguagcacuc

SEQ ID NO: 108386 - RNA, 13 nt, Artificial Sequence
  Description of Artificial Sequence: Synthetic oligonucleotide
caaaaccacaaau

SEQ ID NO: 108387 - RNA, 11 nt, Artificial Sequence
  Description of Artificial Sequence: Synthetic oligonucleotide
aagcccauaca

SEQ ID NO: 108388 - RNA, 10 nt, Artificial Sequence
  Description of Artificial Sequence: Synthetic oligonucleotide
gcccauacag

SEQ ID NO: 108389 - RNA, 11 nt, Artificial Sequence
  Description of Artificial Sequence: Synthetic oligonucleotide
agaaaccuucc

SEQ ID NO: 108390 - RNA, 9 nt, Artificial Sequence
  Description of Artificial Sequence: Synthetic oligonucleotide
uauaccuac

SEQ ID NO: 108391 - RNA, 12 nt, Artificial Sequence
  Description of Artificial Sequence: Synthetic oligonucleotide
ccaguuuucgga

SEQ ID NO: 108392 - RNA, 8 nt, Artificial Sequence
  Description of Artificial Sequence: Synthetic oligonucleotide
gaacaggg

SEQ ID NO: 108393 - RNA, 12 nt, Artificial Sequence
  Description of Artificial Sequence: Synthetic oligonucleotide
uaacuuuccagu

SEQ ID NO: 108394 - RNA, 13 nt, Artificial Sequence
  Description of Artificial Sequence: Synthetic oligonucleotide
aaguuugguuuug

SEQ ID NO: 108395 - RNA, 11 nt, Artificial Sequence
  Description of Artificial Sequence: Synthetic oligonucleotide
uucccacugua

SEQ ID NO: 108396 - RNA, 12 nt, Artificial Sequence
  Description of Artificial Sequence: Synthetic oligonucleotide
gauaccauauga

SEQ ID NO: 108397 - RNA, 10 nt, Artificial Sequence
  Description of Artificial Sequence: Synthetic oligonucleotide
acaugggcug

SEQ ID NO: 108398 - RNA, 12 nt, Artificial Sequence
  Description of Artificial Sequence: Synthetic oligonucleotide
aacuuuuucaua

SEQ ID NO: 108399 - RNA, 11 nt, Artificial Sequence
  Description of Artificial Sequence: Synthetic oligonucleotide
augaggccgga

SEQ ID NO: 108400 - RNA, 10 nt, Artificial Sequence
  Description of Artificial Sequence: Synthetic oligonucleotide
cugcauuugu

SEQ ID NO: 108401 - RNA, 12 nt, Artificial Sequence
  Description of Artificial Sequence: Synthetic oligonucleotide
auguuuacuacc

SEQ ID NO: 108402 - RNA, 14 nt, Artificial Sequence
  Description of Artificial Sequence: Synthetic oligonucleotide
auuuuuugaugaaa

SEQ ID NO: 108403 - RNA, 13 nt, Artificial Sequence
  Description of Artificial Sequence: Synthetic oligonucleotide
agugugugaauuu

SEQ ID NO: 108404 - RNA, 12 nt, Artificial Sequence
  Description of Artificial Sequence: Synthetic oligonucleotide
agcaauguaugu

SEQ ID NO: 108405 - RNA, 13 nt, Artificial Sequence
  Description of Artificial Sequence: Synthetic oligonucleotide
aagcacauauaua

SEQ ID NO: 108406 - RNA, 13 nt, Artificial Sequence
  Description of Artificial Sequence: Synthetic oligonucleotide
uaauaguuucucc

SEQ ID NO: 108407 - RNA, 12 nt, Artificial Sequence
  Description of Artificial Sequence: Synthetic oligonucleotide
guuucuccaaau

SEQ ID NO: 108408 - RNA, 12 nt, Artificial Sequence
  Description of Artificial Sequence: Synthetic oligonucleotide
acuuccuagaaa

SEQ ID NO: 108409 - RNA, 12 nt, Artificial Sequence
  Description of Artificial Sequence: Synthetic oligonucleotide
acaccauauaug

SEQ ID NO: 108410 - RNA, 13 nt, Artificial Sequence
  Description of Artificial Sequence: Synthetic oligonucleotide
uauaugaauggag

SEQ ID NO: 108411 - RNA, 12 nt, Artificial Sequence
  Description of Artificial Sequence: Synthetic oligonucleotide
cauuuacaggga

SEQ ID NO: 108412 - RNA, 12 nt, Artificial Sequence
  Description of Artificial Sequence: Synthetic oligonucleotide
auuuacagggac

SEQ ID NO: 108413 - RNA, 9 nt, Artificial Sequence
  Description of Artificial Sequence: Synthetic oligonucleotide
gggaccuga

SEQ ID NO: 108414 - RNA, 13 nt, Artificial Sequence
  Description of Artificial Sequence: Synthetic oligonucleotide
guuugacugcauc

SEQ ID NO: 108415 - RNA, 12 nt, Artificial Sequence
  Description of Artificial Sequence: Synthetic oligonucleotide
uugacugcaucg

SEQ ID NO: 108416 - RNA, 11 nt, Artificial Sequence
  Description of Artificial Sequence: Synthetic oligonucleotide
aguucacaggg

SEQ ID NO: 108417 - RNA, 12 nt, Artificial Sequence
  Description of Artificial Sequence: Synthetic oligonucleotide
gcaccucugucc

SEQ ID NO: 108418 - RNA, 14 nt, Artificial Sequence
  Description of Artificial Sequence: Synthetic oligonucleotide
guuugucuuuuuaa

SEQ ID NO: 108419 - RNA, 13 nt, Artificial Sequence
  Description of Artificial Sequence: Synthetic oligonucleotide
uugucuuuuuaag

SEQ ID NO: 108420 - RNA, 12 nt, Artificial Sequence
  Description of Artificial Sequence: Synthetic oligonucleotide
cuaaagguuguc

SEQ ID NO: 108421 - RNA, 11 nt, Artificial Sequence
  Description of Artificial Sequence: Synthetic oligonucleotide
agguugucgac

SEQ ID NO: 108422 - RNA, 12 nt, Artificial Sequence
  Description of Artificial Sequence: Synthetic oligonucleotide
ccuggcaauugu

SEQ ID NO: 108423 - RNA, 11 nt, Artificial Sequence
  Description of Artificial Sequence: Synthetic oligonucleotide
guggugcgagg

SEQ ID NO: 108424 - RNA, 12 nt, Artificial Sequence
  Description of Artificial Sequence: Synthetic oligonucleotide
gagacaugaaau

SEQ ID NO: 108425 - RNA, 12 nt, Artificial Sequence
  Description of Artificial Sequence: Synthetic oligonucleotide
uauauuucucca

SEQ ID NO: 108426 - RNA, 9 nt, Artificial Sequence
  Description of Artificial Sequence: Synthetic oligonucleotide
augaaggcu

SEQ ID NO: 108427 - RNA, 10 nt, Artificial Sequence
  Description of Artificial Sequence: Synthetic oligonucleotide
cuggaguggu

SEQ ID NO: 108428 - RNA, 10 nt, Artificial Sequence
  Description of Artificial Sequence: Synthetic oligonucleotide
ggaagagagg

SEQ ID NO: 108429 - RNA, 11 nt, Artificial Sequence
  Description of Artificial Sequence: Synthetic oligonucleotide
uugcaucgggc

SEQ ID NO: 108430 - RNA, 12 nt, Artificial Sequence
  Description of Artificial Sequence: Synthetic oligonucleotide
uauccuacugug

SEQ ID NO: 108431 - RNA, 12 nt, Artificial Sequence
  Description of Artificial Sequence: Synthetic oligonucleotide
ccuacuguguaa

SEQ ID NO: 108432 - RNA, 11 nt, Artificial Sequence
  Description of Artificial Sequence: Synthetic oligonucleotide
cuuguagugua

SEQ ID NO: 108433 - RNA, 12 nt, Artificial Sequence
  Description of Artificial Sequence: Synthetic oligonucleotide
cuuuguugauug

SEQ ID NO: 108434 - RNA, 13 nt, Artificial Sequence
  Description of Artificial Sequence: Synthetic oligonucleotide
uuguugauugaaa

SEQ ID NO: 108435 - RNA, 14 nt, Artificial Sequence
  Description of Artificial Sequence: Synthetic oligonucleotide
ucuuuuucuuccau

SEQ ID NO: 108436 - RNA, 12 nt, Artificial Sequence
  Description of Artificial Sequence: Synthetic oligonucleotide
aucuuccuucua

SEQ ID NO: 108437 - RNA, 12 nt, Artificial Sequence
  Description of Artificial Sequence: Synthetic oligonucleotide
ugaaugcuucau

SEQ ID NO: 108438 - RNA, 12 nt, Artificial Sequence
  Description of Artificial Sequence: Synthetic oligonucleotide
gaaugcuucaug

SEQ ID NO: 108439 - RNA, 12 nt, Artificial Sequence
  Description of Artificial Sequence: Synthetic oligonucleotide
auucuacuuuga

SEQ ID NO: 108440 - RNA, 12 nt, Artificial Sequence
  Description of Artificial Sequence: Synthetic oligonucleotide
gcaacuacagac

SEQ ID NO: 108441 - RNA, 12 nt, Artificial Sequence
  Description of Artificial Sequence: Synthetic oligonucleotide
accaaggucaac

SEQ ID NO: 108442 - RNA, 12 nt, Artificial Sequence
  Description of Artificial Sequence: Synthetic oligonucleotide
gacuaucucgac

SEQ ID NO: 108443 - RNA, 12 nt, Artificial Sequence
  Description of Artificial Sequence: Synthetic oligonucleotide
accuucccaaac

SEQ ID NO: 108444 - RNA, 13 nt, Artificial Sequence
  Description of Artificial Sequence: Synthetic oligonucleotide
caagcuuagaacu

SEQ ID NO: 108445 - RNA, 14 nt, Artificial Sequence
  Description of Artificial Sequence: Synthetic oligonucleotide
gcuuagaacuuuaa

SEQ ID NO: 108446 - RNA, 13 nt, Artificial Sequence
  Description of Artificial Sequence: Synthetic oligonucleotide
aacuuuaagcaac

SEQ ID NO: 108447 - RNA, 10 nt, Artificial Sequence
  Description of Artificial Sequence: Synthetic oligonucleotide
agaccaccac

SEQ ID NO: 108448 - RNA, 13 nt, Artificial Sequence
  Description of Artificial Sequence: Synthetic oligonucleotide
cgagaaauaaagu

SEQ ID NO: 108449 - RNA, 13 nt, Artificial Sequence
  Description of Artificial Sequence: Synthetic oligonucleotide
gagaaauaaaguu

SEQ ID NO: 108450 - RNA, 11 nt, Artificial Sequence
  Description of Artificial Sequence: Synthetic oligonucleotide
ggaaaugaucc

SEQ ID NO: 108451 - RNA, 12 nt, Artificial Sequence
  Description of Artificial Sequence: Synthetic oligonucleotide
aagaaaugaaac

SEQ ID NO: 108452 - RNA, 12 nt, Artificial Sequence
  Description of Artificial Sequence: Synthetic oligonucleotide
uuuccauccucc

SEQ ID NO: 108453 - RNA, 14 nt, Artificial Sequence
  Description of Artificial Sequence: Synthetic oligonucleotide
cugaaaaucuuuga

SEQ ID NO: 108454 - RNA, 10 nt, Artificial Sequence
  Description of Artificial Sequence: Synthetic oligonucleotide
gccguucagg

SEQ ID NO: 108455 - RNA, 12 nt, Artificial Sequence
  Description of Artificial Sequence: Synthetic oligonucleotide
aggguccagaag

SEQ ID NO: 108456 - RNA, 12 nt, Artificial Sequence
  Description of Artificial Sequence: Synthetic oligonucleotide
caagacugcuug

SEQ ID NO: 108457 - RNA, 12 nt, Artificial Sequence
  Description of Artificial Sequence: Synthetic oligonucleotide
ccaugucuuugg

SEQ ID NO: 108458 - RNA, 10 nt, Artificial Sequence
  Description of Artificial Sequence: Synthetic oligonucleotide
ccugaaacac

SEQ ID NO: 108459 - RNA, 11 nt, Artificial Sequence
  Description of Artificial Sequence: Synthetic oligonucleotide
cucuguaccuc

SEQ ID NO: 108460 - RNA, 11 nt, Artificial Sequence
  Description of Artificial Sequence: Synthetic oligonucleotide
gcaagacaaga

SEQ ID NO: 108461 - RNA, 12 nt, Artificial Sequence
  Description of Artificial Sequence: Synthetic oligonucleotide
caagacaagaaa

SEQ ID NO: 108462 - RNA, 11 nt, Artificial Sequence
  Description of Artificial Sequence: Synthetic oligonucleotide
guacaagaucc

SEQ ID NO: 108463 - RNA, 11 nt, Artificial Sequence
  Description of Artificial Sequence: Synthetic oligonucleotide
guacuugcaga

SEQ ID NO: 108464 - RNA, 12 nt, Artificial Sequence
  Description of Artificial Sequence: Synthetic oligonucleotide
gaucgauacaga

SEQ ID NO: 108465 - RNA, 12 nt, Artificial Sequence
  Description of Artificial Sequence: Synthetic oligonucleotide
auaaaaauaaau

SEQ ID NO: 108466 - RNA, 12 nt, Artificial Sequence
  Description of Artificial Sequence: Synthetic oligonucleotide
aaaaauaaauau

SEQ ID NO: 108467 - RNA, 12 nt, Artificial Sequence
  Description of Artificial Sequence: Synthetic oligonucleotide
uugacugcugug

SEQ ID NO: 108468 - RNA, 12 nt, Artificial Sequence
  Description of Artificial Sequence: Synthetic oligonucleotide
gagaugagagac

SEQ ID NO: 108469 - RNA, 9 nt, Artificial Sequence
  Description of Artificial Sequence: Synthetic oligonucleotide
cccacuugg

SEQ ID NO: 108470 - RNA, 2508 nt, Homo sapiens
ccuacccgcgcgcaggccaaguugcugaaucaauggagcccuccccaacccgggcguuccccagcgaggcuuccuucccauccuccugaccaccggggcuuuucgugagcucgucucugaucucgcgcaagagugacacacagguguucaaagacgcuucuggggagugagggaagcgguuuacgagugacuuggcuggagccucaggggcgggcacuggcacggaacacacccugaggccagcccuggcugcccaggcggagcugccucuucucccgcggguugguggacccgcucaguacggaguuggggaagcucuuucacuucggaggauugcucaacaaccaugcugggcaucuggacccuccuaccucugguucuuacgucuguugcuagauuaucguccaaaaguguuaaugcccaagugacugacaucaacuccaagggauuggaauugaggaagacuguuacuacaguugagacucagaacuuggaaggccugcaucaugauggccaauucugccauaagcccuguccuccagaugugaacauggaaucaucaaggaaugcacacucaccagcaacaccaagugcaaagaggaaggauccagaucuaacuugggguggcuuugucuucuucuuuugccaauuccacuaauuguuugggugaagagaaaggaaguacagaaaacaugcagaaagcacagaaaggaaaaccaagguucucaugaaucuccaaccuuaaauccugaaacaguggcaauaaauuuaucugauguugacuugaguaaauauaucaccacuauugcuggagucaugacacuaagucaaguuaaaggcuuuguucgaaagaauggugucaaugaagccaaaauagaugagaucaagaaugacaauguccaagacacagcagaacagaaaguucaacugcuucguaauuggcaucaacuucauggaaagaaagaagcguaugacacauugauuaaagaucucaaaaaagccaaucuuuguacucuugcagagaaaauucagacuaucauccucaaggacauuacuagugacucagaaaauucaaacuucagaaaugaaauccaaagcuuggucuagagugaaaaacaacaaauucaguucugaguauaugcaauuaguguuugaaaagauucuuaauagcuggcuguaaauacugcuugguuuuuuacuggguacauuuuaucauuuauuagcgcugaagagccaacauauuuguagauuuuuaauaucucaugauucugccuccaaggauguuuaaaaucuaguugggaaaacaaacuucaucaagaguaaaugcaguggcaugcuaaguacccaaauaggaguguaugcagaggaugaaagauuaagauuaugcucuggcaucuaacauaugauucuguaguaugaauguaaucaguguauguuaguacaaaugucuauccacaggcuaaccccacucuaugaaucaauagaagaagcuaugaccuuuugcugaaauaucaguuacugaacaggcaggccacuuugccucuaaauuaccucugauaauucuagagauuuuaccauauuucuaaacuuuguuuauaacucugagaagaucauauuuauguaaaguauauguauuugagugcagaauuuaaauaaggcucuaccucaaagaccuuugcacaguuuauuggugucauauuauacaauauuucaauugugaauucacauagaaaacauuaaauuauaauguuugacuauuauauauguguaugcauuuuacuggcucaaaacuaccuacuucuuucucaggcaucaaaagcauuuugagcaggagaguauuacuagagcuuugccaccucuccauuuuugccuuggugcucaucuuaauggccuaaugcacccccaaacauggaaauaucaccaaaaaauacuuaauaguccaccaaaaggcaagacugcccuuagaaauucuagccugguuuggagauacuaacugcucucagagaaaguagcuuugugacaugucaugaacccauguuugcaaucaaagaugauaaaauagauucuuauuuuucccccacccccgaaaauguucaauaaugucccauguaaaaccugcuacaaauggcagcuuauacauagcaaugguaaaaucaucaucuggauuuaggaauugcucuugucauacccccaaguuucuaagauuuaagauucuccuuacuacuauccuacguuuaaauaucuuugaaaguuuguauuaaaugugaauuuuaagaaauaauauuuauauuucuguaaauguaaacugugaagauaguuauaaacugaagcagauaccuggaaccaccuaaagaacuuccauuuauggaggauuuuuuugccccuuguguuuggaauuauaaaauauagguaaaaguacguaauuaaauaauguuuuugguaaaaaaaaaaaaaaaaaaaaaaaaaaaaaaaaaaaaaaaaaaaaaaaaaaaaaaaaaaaaaaaaaaa

SEQ ID NO: 108471 - RNA, 2445 nt, Homo sapiens
ccuacccgcgcgcaggccaaguugcugaaucaauggagcccuccccaacccgggcguuccccagcgaggcuuccuucccauccuccugaccaccggggcuuuucgugagcucgucucugaucucgcgcaagagugacacacagguguucaaagacgcuucuggggagugagggaagcgguuuacgagugacuuggcuggagccucaggggcgggcacuggcacggaacacacccugaggccagcccuggcugcccaggcggagcugccucuucucccgcggguugguggacccgcucaguacggaguuggggaagcucuuucacuucggaggauugcucaacaaccaugcugggcaucuggacccuccuaccucugguucuuacgucuguugcuagauuaucguccaaaaguguuaaugcccaagugacugacaucaacuccaagggauuggaauugaggaagacuguuacuacaguugagacucagaacuuggaaggccugcaucaugauggccaauucugccauaagcccuguccuccagaugugaacauggaaucaucaaggaaugcacacucaccagcaacaccaagugcaaagaggaagugaagagaaaggaaguacagaaaacaugcagaaagcacagaaaggaaaaccaagguucucaugaaucuccaaccuuaaauccugaaacaguggcaauaaauuuaucugauguugacuugaguaaauauaucaccacuauugcuggagucaugacacuaagucaaguuaaaggcuuuguucgaaagaauggugucaaugaagccaaaauagaugagaucaagaaugacaauguccaagacacagcagaacagaaaguucaacugcuucguaauuggcaucaacuucauggaaagaaagaagcguaugacacauugauuaaagaucucaaaaaagccaaucuuuguacucuugcagagaaaauucagacuaucauccucaaggacauuacuagugacucagaaaauucaaacuucagaaaugaaauccaaagcuuggucuagagugaaaaacaacaaauucaguucugaguauaugcaauuaguguuugaaaagauucuuaauagcuggcuguaaauacugcuugguuuuuuacuggguacauuuuaucauuuauuagcgcugaagagccaacauauuuguagauuuuuaauaucucaugauucugccuccaaggauguuuaaaaucuaguugggaaaacaaacuucaucaagaguaaaugcaguggcaugcuaaguacccaaauaggaguguaugcagaggaugaaagauuaagauuaugcucuggcaucuaacauaugauucuguaguaugaauguaaucaguguauguuaguacaaaugucuauccacaggcuaaccccacucuaugaaucaauagaagaagcuaugaccuuuugcugaaauaucaguuacugaacaggcaggccacuuugccucuaaauuaccucugauaauucuagagauuuuaccauauuucuaaacuuuguuuauaacucugagaagaucauauuuauguaaaguauauguauuugagugcagaauuuaaauaaggcucuaccucaaagaccuuugcacaguuuauuggugucauauuauacaauauuucaauugugaauucacauagaaaacauuaaauuauaauguuugacuauuauauauguguaugcauuuuacuggcucaaaacuaccuacuucuuucucaggcaucaaaagcauuuugagcaggagaguauuacuagagcuuugccaccucuccauuuuugccuuggugcucaucuuaauggccuaaugcacccccaaacauggaaauaucaccaaaaaauacuuaauaguccaccaaaaggcaagacugcccuuagaaauucuagccugguuuggagauacuaacugcucucagagaaaguagcuuugugacaugucaugaacccauguuugcaaucaaagaugauaaaauagauucuuauuuuucccccacccccgaaaauguucaauaaugucccauguaaaaccugcuacaaauggcagcuuauacauagcaaugguaaaaucaucaucuggauuuaggaauugcucuugucauacccccaaguuucuaagauuuaagauucuccuuacuacuauccuacguuuaaauaucuuugaaaguuuguauuaaaugugaauuuuaagaaauaauauuuauauuucuguaaauguaaacugugaagauaguuauaaacugaagcagauaccuggaaccaccuaaagaacuuccauuuauggaggauuuuuuugccccuuguguuuggaauuauaaaauauagguaaaaguacguaauuaaauaauguuuuugguaaaaaaaaaaaaaaaaaaaaaaaaaaaaaaaaaaaaaaaaaaaaaaaaaaaaaaaaaaaaaaaaaaa

SEQ ID NO: 108472 - RNA, 2583 nt, Homo sapiens
ccuacccgcgcgcaggccaaguugcugaaucaauggagcccuccccaacccgggcguuccccagcgaggcuuccuucccauccuccugaccaccggggcuuuucgugagcucgucucugaucucgcgcaagagugacacacagguguucaaagacgcuucuggggagugagggaagcgguuuacgagugacuuggcuggagccucaggggcgggcacuggcacggaacacacccugaggccagcccuggcugcccaggcggagcugccucuucucccgcggguugguggacccgcucaguacggaguuggggaagcucuuucacuucggaggauugcucaacaaccaugcugggcaucuggacccuccuaccucugguucuuacgucuguugcuagauuaucguccaaaaguguuaaugcccaagugacugacaucaacuccaagggauuggaauugaggaagacuguuacuacaguugagacucagaacuuggaaggccugcaucaugauggccaauucugccauaagcccuguccuccaggugaaaggaaagcuagggacugcacagucaauggggaugaaccagacugcgugcccugccaagaagggaaggaguacacagacaaagcccauuuuucuuccaaaugcagaagauguagauugugugaugaaggacaugaugugaacauggaaucaucaaggaaugcacacucaccagcaacaccaagugcaaagaggaagugaagagaaaggaaguacagaaaacaugcagaaagcacagaaaggaaaaccaagguucucaugaaucuccaaccuuaaauccugaaacaguggcaauaaauuuaucugauguugacuugaguaaauauaucaccacuauugcuggagucaugacacuaagucaaguuaaaggcuuuguucgaaagaauggugucaaugaagccaaaauagaugagaucaagaaugacaauguccaagacacagcagaacagaaaguucaacugcuucguaauuggcaucaacuucauggaaagaaagaagcguaugacacauugauuaaagaucucaaaaaagccaaucuuuguacucuugcagagaaaauucagacuaucauccucaaggacauuacuagugacucagaaaauucaaacuucagaaaugaaauccaaagcuuggucuagagugaaaaacaacaaauucaguucugaguauaugcaauuaguguuugaaaagauucuuaauagcuggcuguaaauacugcuugguuuuuuacuggguacauuuuaucauuuauuagcgcugaagagccaacauauuuguagauuuuuaauaucucaugauucugccuccaaggauguuuaaaaucuaguugggaaaacaaacuucaucaagaguaaaugcaguggcaugcuaaguacccaaauaggaguguaugcagaggaugaaagauuaagauuaugcucuggcaucuaacauaugauucuguaguaugaauguaaucaguguauguuaguacaaaugucuauccacaggcuaaccccacucuaugaaucaauagaagaagcuaugaccuuuugcugaaauaucaguuacugaacaggcaggccacuuugccucuaaauuaccucugauaauucuagagauuuuaccauauuucuaaacuuuguuuauaacucugagaagaucauauuuauguaaaguauauguauuugagugcagaauuuaaauaaggcucuaccucaaagaccuuugcacaguuuauuggugucauauuauacaauauuucaauugugaauucacauagaaaacauuaaauuauaauguuugacuauuauauauguguaugcauuuuacuggcucaaaacuaccuacuucuuucucaggcaucaaaagcauuuugagcaggagaguauuacuagagcuuugccaccucuccauuuuugccuuggugcucaucuuaauggccuaaugcacccccaaacauggaaauaucaccaaaaaauacuuaauaguccaccaaaaggcaagacugcccuuagaaauucuagccugguuuggagauacuaacugcucucagagaaaguagcuuugugacaugucaugaacccauguuugcaaucaaagaugauaaaauagauucuuauuuuucccccacccccgaaaauguucaauaaugucccauguaaaaccugcuacaaauggcagcuuauacauagcaaugguaaaaucaucaucuggauuuaggaauugcucuugucauacccccaaguuucuaagauuuaagauucuccuuacuacuauccuacguuuaaauaucuuugaaaguuuguauuaaaugugaauuuuaagaaauaauauuuauauuucuguaaauguaaacugugaagauaguuauaaacugaagcagauaccuggaaccaccuaaagaacuuccauuuauggaggauuuuuuugccccuuguguuuggaauuauaaaauauagguaaaaguacguaauuaaauaauguuuuugguaaaaaaaaaaaaaaaaaaaaaaaaaaaaaaaaaaaaaaaaaaaaaaaaaaaaaaaaaaaaaaaaaaa

SEQ ID NO: 108473 - RNA, 2563 nt, Homo sapiens
ccuacccgcgcgcaggccaaguugcugaaucaauggagcccuccccaacccgggcguuccccagcgaggcuuccuucccauccuccugaccaccggggcuuuucgugagcucgucucugaucucgcgcaagagugacacacagguguucaaagacgcuucuggggagugagggaagcgguuuacgagugacuuggcuggagccucaggggcgggcacuggcacggaacacacccugaggccagcccuggcugcccaggcggagcugccucuucucccgcggguugguggacccgcucaguacggaguuggggaagcucuuucacuucggaggauugcucaacaaccaugcugggcaucuggacccuccuaccucugguucuuacgucuguugcuagauuaucguccaaaaguguuaaugcccaagugacugacaucaacuccaagggauuggaauugaggaagacuguuacuacaguugagacucagaacuuggaaggccugcaucaugauggccaauucugccauaagcccuguccuccaggugaaaggaaagcuagggacugcacagucaauggggaugaaccagacugcgugcccugccaagaagggaaggaguacacagacaaagcccauuuuucuuccaaaugcagaagauguagauugugugaugaaggacaugaugugaacauggaaucaucaaggaaugcacacucaccagcaacaccaagugcaaagaggaaggauccagaucuaacuugggguggcuuugucuucuucuuuugccaauuccacuaauuguuuggggaaacaguggcaauaaauuuaucugauguugacuugaguaaauauaucaccacuauugcuggagucaugacacuaagucaaguuaaaggcuuuguucgaaagaauggugucaaugaagccaaaauagaugagaucaagaaugacaauguccaagacacagcagaacagaaaguucaacugcuucguaauuggcaucaacuucauggaaagaaagaagcguaugacacauugauuaaagaucucaaaaaagccaaucuuuguacucuugcagagaaaauucagacuaucauccucaaggacauuacuagugacucagaaaauucaaacuucagaaaugaaauccaaagcuuggucuagagugaaaaacaacaaauucaguucugaguauaugcaauuaguguuugaaaagauucuuaauagcuggcuguaaauacugcuugguuuuuuacuggguacauuuuaucauuuauuagcgcugaagagccaacauauuuguagauuuuuaauaucucaugauucugccuccaaggauguuuaaaaucuaguugggaaaacaaacuucaucaagaguaaaugcaguggcaugcuaaguacccaaauaggaguguaugcagaggaugaaagauuaagauuaugcucuggcaucuaacauaugauucuguaguaugaauguaaucaguguauguuaguacaaaugucuauccacaggcuaaccccacucuaugaaucaauagaagaagcuaugaccuuuugcugaaauaucaguuacugaacaggcaggccacuuugccucuaaauuaccucugauaauucuagagauuuuaccauauuucuaaacuuuguuuauaacucugagaagaucauauuuauguaaaguauauguauuugagugcagaauuuaaauaaggcucuaccucaaagaccuuugcacaguuuauuggugucauauuauacaauauuucaauugugaauucacauagaaaacauuaaauuauaauguuugacuauuauauauguguaugcauuuuacuggcucaaaacuaccuacuucuuucucaggcaucaaaagcauuuugagcaggagaguauuacuagagcuuugccaccucuccauuuuugccuuggugcucaucuuaauggccuaaugcacccccaaacauggaaauaucaccaaaaaauacuuaauaguccaccaaaaggcaagacugcccuuagaaauucuagccugguuuggagauacuaacugcucucagagaaaguagcuuugugacaugucaugaacccauguuugcaaucaaagaugauaaaauagauucuuauuuuucccccacccccgaaaauguucaauaaugucccauguaaaaccugcuacaaauggcagcuuauacauagcaaugguaaaaucaucaucuggauuuaggaauugcucuugucauacccccaaguuucuaagauuuaagauucuccuuacuacuauccuacguuuaaauaucuuugaaaguuuguauuaaaugugaauuuuaagaaauaauauuuauauuucuguaaauguaaacugugaagauaguuauaaacugaagcagauaccuggaaccaccuaaagaacuuccauuuauggaggauuuuuuugccccuuguguuuggaauuauaaaauauagguaaaaguacguaauuaaauaauguuuuugguaaaaaaaaaaaaaaaaaaaaaaaaaaaaaaaaaaaaaaaaaaaaaaaaaaaaaaaaaaaaaaaaaaa

SEQ ID NO: 108474 - RNA, 2646 nt, Homo sapiens
ccuacccgcgcgcaggccaaguugcugaaucaauggagcccuccccaacccgggcguuccccagcgaggcuuccuucccauccuccugaccaccggggcuuuucgugagcucgucucugaucucgcgcaagagugacacacagguguucaaagacgcuucuggggagugagggaagcgguuuacgagugacuuggcuggagccucaggggcgggcacuggcacggaacacacccugaggccagcccuggcugcccaggcggagcugccucuucucccgcggguugguggacccgcucaguacggaguuggggaagcucuuucacuucggaggauugcucaacaaccaugcugggcaucuggacccuccuaccucugguucuuacgucuguugcuagauuaucguccaaaaguguuaaugcccaagugacugacaucaacuccaagggauuggaauugaggaagacuguuacuacaguugagacucagaacuuggaaggccugcaucaugauggccaauucugccauaagcccuguccuccaggugaaaggaaagcuagggacugcacagucaauggggaugaaccagacugcgugcccugccaagaagggaaggaguacacagacaaagcccauuuuucuuccaaaugcagaagauguagauugugugaugaaggacaugaugugaacauggaaucaucaaggaaugcacacucaccagcaacaccaagugcaaagaggaaggauccagaucuaacuugggguggcuuugucuucuucuuuugccaauuccacuaauuguuugggugaagagaaaggaaguacagaaaacaugcagaaagcacagaaaggaaaaccaagguucucaugaaucuccaaccuuaaauccugaaacaguggcaauaaauuuaucugauguugacuugaguaaauauaucaccacuauugcuggagucaugacacuaagucaaguuaaaggcuuuguucgaaagaauggugucaaugaagccaaaauagaugagaucaagaaugacaauguccaagacacagcagaacagaaaguucaacugcuucguaauuggcaucaacuucauggaaagaaagaagcguaugacacauugauuaaagaucucaaaaaagccaaucuuuguacucuugcagagaaaauucagacuaucauccucaaggacauuacuagugacucagaaaauucaaacuucagaaaugaaauccaaagcuuggucuagagugaaaaacaacaaauucaguucugaguauaugcaauuaguguuugaaaagauucuuaauagcuggcuguaaauacugcuugguuuuuuacuggguacauuuuaucauuuauuagcgcugaagagccaacauauuuguagauuuuuaauaucucaugauucugccuccaaggauguuuaaaaucuaguugggaaaacaaacuucaucaagaguaaaugcaguggcaugcuaaguacccaaauaggaguguaugcagaggaugaaagauuaagauuaugcucuggcaucuaacauaugauucuguaguaugaauguaaucaguguauguuaguacaaaugucuauccacaggcuaaccccacucuaugaaucaauagaagaagcuaugaccuuuugcugaaauaucaguuacugaacaggcaggccacuuugccucuaaauuaccucugauaauucuagagauuuuaccauauuucuaaacuuuguuuauaacucugagaagaucauauuuauguaaaguauauguauuugagugcagaauuuaaauaaggcucuaccucaaagaccuuugcacaguuuauuggugucauauuauacaauauuucaauugugaauucacauagaaaacauuaaauuauaauguuugacuauuauauauguguaugcauuuuacuggcucaaaacuaccuacuucuuucucaggcaucaaaagcauuuugagcaggagaguauuacuagagcuuugccaccucuccauuuuugccuuggugcucaucuuaauggccuaaugcacccccaaacauggaaauaucaccaaaaaauacuuaauaguccaccaaaaggcaagacugcccuuagaaauucuagccugguuuggagauacuaacugcucucagagaaaguagcuuugugacaugucaugaacccauguuugcaaucaaagaugauaaaauagauucuuauuuuucccccacccccgaaaauguucaauaaugucccauguaaaaccugcuacaaauggcagcuuauacauagcaaugguaaaaucaucaucuggauuuaggaauugcucuugucauacccccaaguuucuaagauuuaagauucuccuuacuacuauccuacguuuaaauaucuuugaaaguuuguauuaaaugugaauuuuaagaaauaauauuuauauuucuguaaauguaaacugugaagauaguuauaaacugaagcagauaccuggaaccaccuaaagaacuuccauuuauggaggauuuuuuugccccuuguguuuggaauuauaaaauauagguaaaaguacguaauuaaauaauguuuuugguaaaaaaaaaaaaaaaaaaaaaaaaaaaaaaaaaaaaaaaaaaaaaaaaaaaaaaaaaaaaaaaaaaa

SEQ ID NO: 108475 - RNA, 2730 nt, Homo sapiens
ccuacccgcgcgcaggccaaguugcugaaucaauggagcccuccccaacccgggcguuccccagcgaggcuuccuucccauccuccugaccaccggggcuuuucgugagcucgucucugaucucgcgcaagagugacacacagguguucaaagacgcuucuggggagugagggaagcgguuuacgagugacuuggcuggagccucaggggcgggcacuggcacggaacacacccugaggccagcccuggcugcccaggcggagcugccucuucucccgcggguugguggacccgcucaguacggaguuggggaagcucuuucacuucggaggauugcucaacaaccaugcugggcaucuggacccuccuaccucugguucuuacgucuguugcuagauuaucguccaaaaguguuaaugcccaagugacugacaucaacuccaagggauuggaauugaggaagacuguuacuacaguugagacucagaacuuggaaggccugcaucaugauggccaauucugccauaagcccuguccuccaggugaaaggaaagcuagggacugcacagucaauggggaugaaccagacugcgugcccugccaagaagggaaggaguacacagacaaagcccauuuuucuuccaaaugcagaagauguagauugugugaugaaggacauggcuuagaaguggaaauaaacugcacccggacccagaauaccaagugcagauguaaaccaaacuuuuuuuguaacucuacuguaugugaacacugugacccuugcaccaaaugugaacauggaaucaucaaggaaugcacacucaccagcaacaccaagugcaaagaggaaggauccagaucuaacuugggguggcuuugucuucuucuuuugccaauuccacuaauuguuugggugaagagaaaggaaguacagaaaacaugcagaaagcacagaaaggaaaaccaagguucucaugaaucuccaaccuuaaauccuauguugacuugaguaaauauaucaccacuauugcuggagucaugacacuaagucaaguuaaaggcuuuguucgaaagaauggugucaaugaagccaaaauagaugagaucaagaaugacaauguccaagacacagcagaacagaaaguucaacugcuucguaauuggcaucaacuucauggaaagaaagaagcguaugacacauugauuaaagaucucaaaaaagccaaucuuuguacucuugcagagaaaauucagacuaucauccucaaggacauuacuagugacucagaaaauucaaacuucagaaaugaaauccaaagcuuggucuagagugaaaaacaacaaauucaguucugaguauaugcaauuaguguuugaaaagauucuuaauagcuggcuguaaauacugcuugguuuuuuacuggguacauuuuaucauuuauuagcgcugaagagccaacauauuuguagauuuuuaauaucucaugauucugccuccaaggauguuuaaaaucuaguugggaaaacaaacuucaucaagaguaaaugcaguggcaugcuaaguacccaaauaggaguguaugcagaggaugaaagauuaagauuaugcucuggcaucuaacauaugauucuguaguaugaauguaaucaguguauguuaguacaaaugucuauccacaggcuaaccccacucuaugaaucaauagaagaagcuaugaccuuuugcugaaauaucaguuacugaacaggcaggccacuuugccucuaaauuaccucugauaauucuagagauuuuaccauauuucuaaacuuuguuuauaacucugagaagaucauauuuauguaaaguauauguauuugagugcagaauuuaaauaaggcucuaccucaaagaccuuugcacaguuuauuggugucauauuauacaauauuucaauugugaauucacauagaaaacauuaaauuauaauguuugacuauuauauauguguaugcauuuuacuggcucaaaacuaccuacuucuuucucaggcaucaaaagcauuuugagcaggagaguauuacuagagcuuugccaccucuccauuuuugccuuggugcucaucuuaauggccuaaugcacccccaaacauggaaauaucaccaaaaaauacuuaauaguccaccaaaaggcaagacugcccuuagaaauucuagccugguuuggagauacuaacugcucucagagaaaguagcuuugugacaugucaugaacccauguuugcaaucaaagaugauaaaauagauucuuauuuuucccccacccccgaaaauguucaauaaugucccauguaaaaccugcuacaaauggcagcuuauacauagcaaugguaaaaucaucaucuggauuuaggaauugcucuugucauacccccaaguuucuaagauuuaagauucuccuuacuacuauccuacguuuaaauaucuuugaaaguuuguauuaaaugugaauuuuaagaaauaauauuuauauuucuguaaauguaaacugugaagauaguuauaaacugaagcagauaccuggaaccaccuaaagaacuuccauuuauggaggauuuuuuugccccuuguguuuggaauuauaaaauauagguaaaaguacguaauuaaauaauguuuuugguaaaaaaaaaaaaaaaaaaaaaaaaaaaaaaaaaaaaaaaaaaaaaaaaaaaaaaaaaaaaaaaaaaa

SEQ ID NO: 108476 - RNA, 2692 nt, Homo sapiens
ccuacccgcgcgcaggccaaguugcugaaucaauggagcccuccccaacccgggcguuccccagcgaggcuuccuucccauccuccugaccaccggggcuuuucgugagcucgucucugaucucgcgcaagagugacacacagguguucaaagacgcuucuggggagugagggaagcgguuuacgagugacuuggcuggagccucaggggcgggcacuggcacggaacacacccugaggccagcccuggcugcccaggcggagcugccucuucucccgcggguugguggacccgcucaguacggaguuggggaagcucuuucacuucggaggauugcucaacaaccaugcugggcaucuggacccuccuaccucugguucuuacgucuguugcuagauuaucguccaaaaguguuaaugcccaagugacugacaucaacuccaagggauuggaauugaggaagacuguuacuacaguugagacucagaacuuggaaggccugcaucaugauggccaauucugccauaagcccuguccuccaggugaaaggaaagcuagggacugcacagucaauggggaugaaccagacugcgugcccugccaagaagggaaggaguacacagacaaagcccauuuuucuuccaaaugcagaagauguagauugugugaugaaggacauggcuuagaaguggaaauaaacugcacccggacccagaauaccaagugcagauguaaaccaaacuuuuuuuguaacucuacuguaugugaacacugugacccuugcaccaaaugugaacauggaaucaucaaggaaugcacacucaccagcaacaccaagugcaaagaggaagugaagagaaaggaaguacagaaaacaugcagaaagcacagaaaggaaaaccaagguucucaugaaucuccaaccuuaaauccugaaacaguggcaauaaauuuaucugauguugacuugaguaaauauaucaccacuauugcuggagucaugacacuaagucaaguuaaaggcuuuguucgaaagaauggugucaaugaagccaaaauagaugagaucaagaaugacaauguccaagacacagcagaacagaaaguucaacugcuucguaauuggcaucaacuucauggaaagaaagaagcguaugacacauugauuaaagaucucaaaaaagccaaucuuuguacucuugcagagaaaauucagacuaucauccucaaggacauuacuagugacucagaaaauucaaacuucagaaaugaaauccaaagcuuggucuagagugaaaaacaacaaauucaguucugaguauaugcaauuaguguuugaaaagauucuuaauagcuggcuguaaauacugcuugguuuuuuacuggguacauuuuaucauuuauuagcgcugaagagccaacauauuuguagauuuuuaauaucucaugauucugccuccaaggauguuuaaaaucuaguugggaaaacaaacuucaucaagaguaaaugcaguggcaugcuaaguacccaaauaggaguguaugcagaggaugaaagauuaagauuaugcucuggcaucuaacauaugauucuguaguaugaauguaaucaguguauguuaguacaaaugucuauccacaggcuaaccccacucuaugaaucaauagaagaagcuaugaccuuuugcugaaauaucaguuacugaacaggcaggccacuuugccucuaaauuaccucugauaauucuagagauuuuaccauauuucuaaacuuuguuuauaacucugagaagaucauauuuauguaaaguauauguauuugagugcagaauuuaaauaaggcucuaccucaaagaccuuugcacaguuuauuggugucauauuauacaauauuucaauugugaauucacauagaaaacauuaaauuauaauguuugacuauuauauauguguaugcauuuuacuggcucaaaacuaccuacuucuuucucaggcaucaaaagcauuuugagcaggagaguauuacuagagcuuugccaccucuccauuuuugccuuggugcucaucuuaauggccuaaugcacccccaaacauggaaauaucaccaaaaaauacuuaauaguccaccaaaaggcaagacugcccuuagaaauucuagccugguuuggagauacuaacugcucucagagaaaguagcuuugugacaugucaugaacccauguuugcaaucaaagaugauaaaauagauucuuauuuuucccccacccccgaaaauguucaauaaugucccauguaaaaccugcuacaaauggcagcuuauacauagcaaugguaaaaucaucaucuggauuuaggaauugcucuugucauacccccaaguuucuaagauuuaagauucuccuuacuacuauccuacguuuaaauaucuuugaaaguuuguauuaaaugugaauuuuaagaaauaauauuuauauuucuguaaauguaaacugugaagauaguuauaaacugaagcagauaccuggaaccaccuaaagaacuuccauuuauggaggauuuuuuugccccuuguguuuggaauuauaaaauauagguaaaaguacguaauuaaauaauguuuuugguaaaaaaaaaaaaaaaaaaaaaaaaaaaaaaaaaaaaaaaaaaaaaaaaaaaaaaaaaaaaaaaaaaa

SEQ ID NO: 108477 - RNA, 2755 nt, Homo sapiens
ccuacccgcgcgcaggccaaguugcugaaucaauggagcccuccccaacccgggcguuccccagcgaggcuuccuucccauccuccugaccaccggggcuuuucgugagcucgucucugaucucgcgcaagagugacacacagguguucaaagacgcuucuggggagugagggaagcgguuuacgagugacuuggcuggagccucaggggcgggcacuggcacggaacacacccugaggccagcccuggcugcccaggcggagcugccucuucucccgcggguugguggacccgcucaguacggaguuggggaagcucuuucacuucggaggauugcucaacaaccaugcugggcaucuggacccuccuaccucugguucuuacgucuguugcuagauuaucguccaaaaguguuaaugcccaagugacugacaucaacuccaagggauuggaauugaggaagacuguuacuacaguugagacucagaacuuggaaggccugcaucaugauggccaauucugccauaagcccuguccuccaggugaaaggaaagcuagggacugcacagucaauggggaugaaccagacugcgugcccugccaagaagggaaggaguacacagacaaagcccauuuuucuuccaaaugcagaagauguagauugugugaugaaggacauggcuuagaaguggaaauaaacugcacccggacccagaauaccaagugcagauguaaaccaaacuuuuuuuguaacucuacuguaugugaacacugugacccuugcaccaaaugugaacauggaaucaucaaggaaugcacacucaccagcaacaccaagugcaaagaggaaggauccagaucuaacuugggguggcuuugucuucuucuuuugccaauuccacuaauuguuugggugaagagaaaggaaguacagaaaacaugcagaaagcacagaaaggaaaaccaagguucucaugaaucuccaaccuuaaauccugaaacaguggcaauaaauuuaucugauguugacuugaguaaauauaucaccacuauugcuggagucaugacacuaagucaaguuaaaggcuuuguucgaaagaauggugucaaugaagccaaaauagaugagaucaagaaugacaauguccaagacacagcagaacagaaaguucaacugcuucguaauuggcaucaacuucauggaaagaaagaagcguaugacacauugauuaaagaucucaaaaaagccaaucuuuguacucuugcagagaaaauucagacuaucauccucaaggacauuacuagugacucagaaaauucaaacuucagaaaugaaauccaaagcuuggucuagagugaaaaacaacaaauucaguucugaguauaugcaauuaguguuugaaaagauucuuaauagcuggcuguaaauacugcuugguuuuuuacuggguacauuuuaucauuuauuagcgcugaagagccaacauauuuguagauuuuuaauaucucaugauucugccuccaaggauguuuaaaaucuaguugggaaaacaaacuucaucaagaguaaaugcaguggcaugcuaaguacccaaauaggaguguaugcagaggaugaaagauuaagauuaugcucuggcaucuaacauaugauucuguaguaugaauguaaucaguguauguuaguacaaaugucuauccacaggcuaaccccacucuaugaaucaauagaagaagcuaugaccuuuugcugaaauaucaguuacugaacaggcaggccacuuugccucuaaauuaccucugauaauucuagagauuuuaccauauuucuaaacuuuguuuauaacucugagaagaucauauuuauguaaaguauauguauuugagugcagaauuuaaauaaggcucuaccucaaagaccuuugcacaguuuauuggugucauauuauacaauauuucaauugugaauucacauagaaaacauuaaauuauaauguuugacuauuauauauguguaugcauuuuacuggcucaaaacuaccuacuucuuucucaggcaucaaaagcauuuugagcaggagaguauuacuagagcuuugccaccucuccauuuuugccuuggugcucaucuuaauggccuaaugcacccccaaacauggaaauaucaccaaaaaauacuuaauaguccaccaaaaggcaagacugcccuuagaaauucuagccugguuuggagauacuaacugcucucagagaaaguagcuuugugacaugucaugaacccauguuugcaaucaaagaugauaaaauagauucuuauuuuucccccacccccgaaaauguucaauaaugucccauguaaaaccugcuacaaauggcagcuuauacauagcaaugguaaaaucaucaucuggauuuaggaauugcucuugucauacccccaaguuucuaagauuuaagauucuccuuacuacuauccuacguuuaaauaucuuugaaaguuuguauuaaaugugaauuuuaagaaauaauauuuauauuucuguaaauguaaacugugaagauaguuauaaacugaagcagauaccuggaaccaccuaaagaacuuccauuuauggaggauuuuuuugccccuuguguuuggaauuauaaaauauagguaaaaguacguaauuaaauaauguuuuugguaaaaaaaaaaaaaaaaaaaaaaaaaaaaaaaaaaaaaaaaaaaaaaaaaaaaaaaaaaaaaaaaaaa

SEQ ID NO: 108478 - RNA, 19 nt, Artificial Sequence
  Description of Artificial Sequence: Synthetic oligonucleotide
ccuacccgcgcgcaggcca

SEQ ID NO: 108479 - RNA, 19 nt, Artificial Sequence
  Description of Artificial Sequence: Synthetic oligonucleotide
aaguugcugaaucaaugga

SEQ ID NO: 108480 - RNA, 19 nt, Artificial Sequence
  Description of Artificial Sequence: Synthetic oligonucleotide
agcccuccccaacccgggc

SEQ ID NO: 108481 - RNA, 19 nt, Artificial Sequence
  Description of Artificial Sequence: Synthetic oligonucleotide
cguuccccagcgaggcuuc

SEQ ID NO: 108482 - RNA, 19 nt, Artificial Sequence
  Description of Artificial Sequence: Synthetic oligonucleotide
ccuucccauccuccugacc

SEQ ID NO: 108483 - RNA, 19 nt, Artificial Sequence
  Description of Artificial Sequence: Synthetic oligonucleotide
caccggggcuuuucgugag

SEQ ID NO: 108484 - RNA, 19 nt, Artificial Sequence
  Description of Artificial Sequence: Synthetic oligonucleotide
gcucgucucugaucucgcg

SEQ ID NO: 108485 - RNA, 19 nt, Artificial Sequence
  Description of Artificial Sequence: Synthetic oligonucleotide
gcaagagugacacacaggu

SEQ ID NO: 108486 - RNA, 19 nt, Artificial Sequence
  Description of Artificial Sequence: Synthetic oligonucleotide
uguucaaagacgcuucugg

SEQ ID NO: 108487 - RNA, 19 nt, Artificial Sequence
  Description of Artificial Sequence: Synthetic oligonucleotide
gggagugagggaagcgguu

SEQ ID NO: 108488 - RNA, 19 nt, Artificial Sequence
  Description of Artificial Sequence: Synthetic oligonucleotide
uuacgagugacuuggcugg

SEQ ID NO: 108489 - RNA, 19 nt, Artificial Sequence
  Description of Artificial Sequence: Synthetic oligonucleotide
gagccucaggggcgggcac

SEQ ID NO: 108490 - RNA, 19 nt, Artificial Sequence
  Description of Artificial Sequence: Synthetic oligonucleotide
cuggcacggaacacacccu

SEQ ID NO: 108491 - RNA, 19 nt, Artificial Sequence
  Description of Artificial Sequence: Synthetic oligonucleotide
ugaggccagcccuggcugc

SEQ ID NO: 108492 - RNA, 19 nt, Artificial Sequence
  Description of Artificial Sequence: Synthetic oligonucleotide
cccaggcggagcugccucu

SEQ ID NO: 108493 - RNA, 19 nt, Artificial Sequence
  Description of Artificial Sequence: Synthetic oligonucleotide
uucucccgcggguuggugg

SEQ ID NO: 108494 - RNA, 19 nt, Artificial Sequence
  Description of Artificial Sequence: Synthetic oligonucleotide
gacccgcucaguacggagu

SEQ ID NO: 108495 - RNA, 19 nt, Artificial Sequence
  Description of Artificial Sequence: Synthetic oligonucleotide
uuggggaagcucuuucacu

SEQ ID NO: 108496 - RNA, 19 nt, Artificial Sequence
  Description of Artificial Sequence: Synthetic oligonucleotide
uucggaggauugcucaaca

SEQ ID NO: 108497 - RNA, 19 nt, Artificial Sequence
  Description of Artificial Sequence: Synthetic oligonucleotide
aaccaugcugggcaucugg

SEQ ID NO: 108498 - RNA, 19 nt, Artificial Sequence
  Description of Artificial Sequence: Synthetic oligonucleotide
gacccuccuaccucugguu

SEQ ID NO: 108499 - RNA, 19 nt, Artificial Sequence
  Description of Artificial Sequence: Synthetic oligonucleotide
ucuuacgucuguugcuaga

SEQ ID NO: 108500 - RNA, 19 nt, Artificial Sequence
  Description of Artificial Sequence: Synthetic oligonucleotide
auuaucguccaaaaguguu

SEQ ID NO: 108501 - RNA, 19 nt, Artificial Sequence
  Description of Artificial Sequence: Synthetic oligonucleotide
uaaugcccaagugacugac

SEQ ID NO: 108502 - RNA, 19 nt, Artificial Sequence
  Description of Artificial Sequence: Synthetic oligonucleotide
caucaacuccaagggauug

SEQ ID NO: 108503 - RNA, 19 nt, Artificial Sequence
  Description of Artificial Sequence: Synthetic oligonucleotide
ggaauugaggaagacuguu

SEQ ID NO: 108504 - RNA, 19 nt, Artificial Sequence
  Description of Artificial Sequence: Synthetic oligonucleotide
uacuacaguugagacucag

SEQ ID NO: 108505 - RNA, 19 nt, Artificial Sequence
  Description of Artificial Sequence: Synthetic oligonucleotide
gaacuuggaaggccugcau

SEQ ID NO: 108506 - RNA, 19 nt, Artificial Sequence
  Description of Artificial Sequence: Synthetic oligonucleotide
ucaugauggccaauucugc

SEQ ID NO: 108507 - RNA, 19 nt, Artificial Sequence
  Description of Artificial Sequence: Synthetic oligonucleotide
ccauaagcccuguccucca

SEQ ID NO: 108508 - RNA, 19 nt, Artificial Sequence
  Description of Artificial Sequence: Synthetic oligonucleotide
aggugaaaggaaagcuagg

SEQ ID NO: 108509 - RNA, 19 nt, Artificial Sequence
  Description of Artificial Sequence: Synthetic oligonucleotide
ggacugcacagucaauggg

SEQ ID NO: 108510 - RNA, 19 nt, Artificial Sequence
  Description of Artificial Sequence: Synthetic oligonucleotide
ggaugaaccagacugcgug

SEQ ID NO: 108511 - RNA, 19 nt, Artificial Sequence
  Description of Artificial Sequence: Synthetic oligonucleotide
gcccugccaagaagggaag

SEQ ID NO: 108512 - RNA, 19 nt, Artificial Sequence
  Description of Artificial Sequence: Synthetic oligonucleotide
ggaguacacagacaaagcc

SEQ ID NO: 108513 - RNA, 19 nt, Artificial Sequence
  Description of Artificial Sequence: Synthetic oligonucleotide
ccauuuuucuuccaaaugc

SEQ ID NO: 108514 - RNA, 19 nt, Artificial Sequence
  Description of Artificial Sequence: Synthetic oligonucleotide
cagaagauguagauugugu

SEQ ID NO: 108515 - RNA, 19 nt, Artificial Sequence
  Description of Artificial Sequence: Synthetic oligonucleotide
ugaugaaggacaugaugug

SEQ ID NO: 108516 - RNA, 19 nt, Artificial Sequence
  Description of Artificial Sequence: Synthetic oligonucleotide
gaacauggaaucaucaagg

SEQ ID NO: 108517 - RNA, 19 nt, Artificial Sequence
  Description of Artificial Sequence: Synthetic oligonucleotide
gaaugcacacucaccagca

SEQ ID NO: 108518 - RNA, 19 nt, Artificial Sequence
  Description of Artificial Sequence: Synthetic oligonucleotide
aacaccaagugcaaagagg

SEQ ID NO: 108519 - RNA, 19 nt, Artificial Sequence
  Description of Artificial Sequence: Synthetic oligonucleotide
gaaggauccagaucuaacu

SEQ ID NO: 108520 - RNA, 19 nt, Artificial Sequence
  Description of Artificial Sequence: Synthetic oligonucleotide
uugggguggcuuugucuuc

SEQ ID NO: 108521 - RNA, 19 nt, Artificial Sequence
  Description of Artificial Sequence: Synthetic oligonucleotide
cuucuuuugccaauuccac

SEQ ID NO: 108522 - RNA, 19 nt, Artificial Sequence
  Description of Artificial Sequence: Synthetic oligonucleotide
cuaauuguuugggugaaga

SEQ ID NO: 108523 - RNA, 19 nt, Artificial Sequence
  Description of Artificial Sequence: Synthetic oligonucleotide
agaaaggaaguacagaaaa

SEQ ID NO: 108524 - RNA, 19 nt, Artificial Sequence
  Description of Artificial Sequence: Synthetic oligonucleotide
acaugcagaaagcacagaa

SEQ ID NO: 108525 - RNA, 19 nt, Artificial Sequence
  Description of Artificial Sequence: Synthetic oligonucleotide
aaggaaaaccaagguucuc

SEQ ID NO: 108526 - RNA, 19 nt, Artificial Sequence
  Description of Artificial Sequence: Synthetic oligonucleotide
caugaaucuccaaccuuaa

SEQ ID NO: 108527 - RNA, 19 nt, Artificial Sequence
  Description of Artificial Sequence: Synthetic oligonucleotide
aauccugaaacaguggcaa

SEQ ID NO: 108528 - RNA, 19 nt, Artificial Sequence
  Description of Artificial Sequence: Synthetic oligonucleotide
auaaauuuaucugauguug

SEQ ID NO: 108529 - RNA, 19 nt, Artificial Sequence
  Description of Artificial Sequence: Synthetic oligonucleotide
gacuugaguaaauauauca

SEQ ID NO: 108530 - RNA, 19 nt, Artificial Sequence
  Description of Artificial Sequence: Synthetic oligonucleotide
accacuauugcuggaguca

SEQ ID NO: 108531 - RNA, 19 nt, Artificial Sequence
  Description of Artificial Sequence: Synthetic oligonucleotide
augacacuaagucaaguua

SEQ ID NO: 108532 - RNA, 19 nt, Artificial Sequence
  Description of Artificial Sequence: Synthetic oligonucleotide
aaaggcuuuguucgaaaga

SEQ ID NO: 108533 - RNA, 19 nt, Artificial Sequence
  Description of Artificial Sequence: Synthetic oligonucleotide
aauggugucaaugaagcca

SEQ ID NO: 108534 - RNA, 19 nt, Artificial Sequence
  Description of Artificial Sequence: Synthetic oligonucleotide
aaaauagaugagaucaaga

SEQ ID NO: 108535 - RNA, 19 nt, Artificial Sequence
  Description of Artificial Sequence: Synthetic oligonucleotide
aaugacaauguccaagaca

SEQ ID NO: 108536 - RNA, 19 nt, Artificial Sequence
  Description of Artificial Sequence: Synthetic oligonucleotide
acagcagaacagaaaguuc

SEQ ID NO: 108537 - RNA, 19 nt, Artificial Sequence
  Description of Artificial Sequence: Synthetic oligonucleotide
caacugcuucguaauuggc

SEQ ID NO: 108538 - RNA, 19 nt, Artificial Sequence
  Description of Artificial Sequence: Synthetic oligonucleotide
caucaacuucauggaaaga

SEQ ID NO: 108539 - RNA, 19 nt, Artificial Sequence
  Description of Artificial Sequence: Synthetic oligonucleotide
aaagaagcguaugacacau

SEQ ID NO: 108540 - RNA, 19 nt, Artificial Sequence
  Description of Artificial Sequence: Synthetic oligonucleotide
uugauuaaagaucucaaaa

SEQ ID NO: 108541 - RNA, 19 nt, Artificial Sequence
  Description of Artificial Sequence: Synthetic oligonucleotide
aaagccaaucuuuguacuc

SEQ ID NO: 108542 - RNA, 19 nt, Artificial Sequence
  Description of Artificial Sequence: Synthetic oligonucleotide
cuugcagagaaaauucaga

SEQ ID NO: 108543 - RNA, 19 nt, Artificial Sequence
  Description of Artificial Sequence: Synthetic oligonucleotide
acuaucauccucaaggaca

SEQ ID NO: 108544 - RNA, 19 nt, Artificial Sequence
  Description of Artificial Sequence: Synthetic oligonucleotide
auuacuagugacucagaaa

SEQ ID NO: 108545 - RNA, 19 nt, Artificial Sequence
  Description of Artificial Sequence: Synthetic oligonucleotide
aauucaaacuucagaaaug

SEQ ID NO: 108546 - RNA, 19 nt, Artificial Sequence
  Description of Artificial Sequence: Synthetic oligonucleotide
gaaauccaaagcuuggucu

SEQ ID NO: 108547 - RNA, 19 nt, Artificial Sequence
  Description of Artificial Sequence: Synthetic oligonucleotide
uagagugaaaaacaacaaa

SEQ ID NO: 108548 - RNA, 19 nt, Artificial Sequence
  Description of Artificial Sequence: Synthetic oligonucleotide
auucaguucugaguauaug

SEQ ID NO: 108549 - RNA, 19 nt, Artificial Sequence
  Description of Artificial Sequence: Synthetic oligonucleotide
gcaauuaguguuugaaaag

SEQ ID NO: 108550 - RNA, 19 nt, Artificial Sequence
  Description of Artificial Sequence: Synthetic oligonucleotide
gauucuuaauagcuggcug

SEQ ID NO: 108551 - RNA, 19 nt, Artificial Sequence
  Description of Artificial Sequence: Synthetic oligonucleotide
guaaauacugcuugguuuu

SEQ ID NO: 108552 - RNA, 19 nt, Artificial Sequence
  Description of Artificial Sequence: Synthetic oligonucleotide
uuuacuggguacauuuuau

SEQ ID NO: 108553 - RNA, 19 nt, Artificial Sequence
  Description of Artificial Sequence: Synthetic oligonucleotide
ucauuuauuagcgcugaag

SEQ ID NO: 108554 - RNA, 19 nt, Artificial Sequence
  Description of Artificial Sequence: Synthetic oligonucleotide
gagccaacauauuuguaga

SEQ ID NO: 108555 - RNA, 19 nt, Artificial Sequence
  Description of Artificial Sequence: Synthetic oligonucleotide
auuuuuaauaucucaugau

SEQ ID NO: 108556 - RNA, 19 nt, Artificial Sequence
  Description of Artificial Sequence: Synthetic oligonucleotide
uucugccuccaaggauguu

SEQ ID NO: 108557 - RNA, 19 nt, Artificial Sequence
  Description of Artificial Sequence: Synthetic oligonucleotide
uuaaaaucuaguugggaaa

SEQ ID NO: 108558 - RNA, 19 nt, Artificial Sequence
  Description of Artificial Sequence: Synthetic oligonucleotide
aacaaacuucaucaagagu

SEQ ID NO: 108559 - RNA, 19 nt, Artificial Sequence
  Description of Artificial Sequence: Synthetic oligonucleotide
uaaaugcaguggcaugcua

SEQ ID NO: 108560 - RNA, 19 nt, Artificial Sequence
  Description of Artificial Sequence: Synthetic oligonucleotide
aaguacccaaauaggagug

SEQ ID NO: 108561 - RNA, 19 nt, Artificial Sequence
  Description of Artificial Sequence: Synthetic oligonucleotide
guaugcagaggaugaaaga

SEQ ID NO: 108562 - RNA, 19 nt, Artificial Sequence
  Description of Artificial Sequence: Synthetic oligonucleotide
auuaagauuaugcucuggc

SEQ ID NO: 108563 - RNA, 19 nt, Artificial Sequence
  Description of Artificial Sequence: Synthetic oligonucleotide
caucuaacauaugauucug

SEQ ID NO: 108564 - RNA, 19 nt, Artificial Sequence
  Description of Artificial Sequence: Synthetic oligonucleotide
guaguaugaauguaaucag

SEQ ID NO: 108565 - RNA, 19 nt, Artificial Sequence
  Description of Artificial Sequence: Synthetic oligonucleotide
guguauguuaguacaaaug

SEQ ID NO: 108566 - RNA, 19 nt, Artificial Sequence
  Description of Artificial Sequence: Synthetic oligonucleotide
gucuauccacaggcuaacc

SEQ ID NO: 108567 - RNA, 19 nt, Artificial Sequence
  Description of Artificial Sequence: Synthetic oligonucleotide
cccacucuaugaaucaaua

SEQ ID NO: 108568 - RNA, 19 nt, Artificial Sequence
  Description of Artificial Sequence: Synthetic oligonucleotide
agaagaagcuaugaccuuu

SEQ ID NO: 108569 - RNA, 19 nt, Artificial Sequence
  Description of Artificial Sequence: Synthetic oligonucleotide
uugcugaaauaucaguuac

SEQ ID NO: 108570 - RNA, 19 nt, Artificial Sequence
  Description of Artificial Sequence: Synthetic oligonucleotide
cugaacaggcaggccacuu

SEQ ID NO: 108571 - RNA, 19 nt, Artificial Sequence
  Description of Artificial Sequence: Synthetic oligonucleotide
uugccucuaaauuaccucu

SEQ ID NO: 108572 - RNA, 19 nt, Artificial Sequence
  Description of Artificial Sequence: Synthetic oligonucleotide
ugauaauucuagagauuuu

SEQ ID NO: 108573 - RNA, 19 nt, Artificial Sequence
  Description of Artificial Sequence: Synthetic oligonucleotide
uaccauauuucuaaacuuu

SEQ ID NO: 108574 - RNA, 19 nt, Artificial Sequence
  Description of Artificial Sequence: Synthetic oligonucleotide
uguuuauaacucugagaag

SEQ ID NO: 108575 - RNA, 19 nt, Artificial Sequence
  Description of Artificial Sequence: Synthetic oligonucleotide
gaucauauuuauguaaagu

SEQ ID NO: 108576 - RNA, 19 nt, Artificial Sequence
  Description of Artificial Sequence: Synthetic oligonucleotide
uauauguauuugagugcag

SEQ ID NO: 108577 - RNA, 19 nt, Artificial Sequence
  Description of Artificial Sequence: Synthetic oligonucleotide
gaauuuaaauaaggcucua

SEQ ID NO: 108578 - RNA, 19 nt, Artificial Sequence
  Description of Artificial Sequence: Synthetic oligonucleotide
accucaaagaccuuugcac

SEQ ID NO: 108579 - RNA, 19 nt, Artificial Sequence
  Description of Artificial Sequence: Synthetic oligonucleotide
caguuuauuggugucauau

SEQ ID NO: 108580 - RNA, 19 nt, Artificial Sequence
  Description of Artificial Sequence: Synthetic oligonucleotide
uuauacaauauuucaauug

SEQ ID NO: 108581 - RNA, 19 nt, Artificial Sequence
  Description of Artificial Sequence: Synthetic oligonucleotide
gugaauucacauagaaaac

SEQ ID NO: 108582 - RNA, 19 nt, Artificial Sequence
  Description of Artificial Sequence: Synthetic oligonucleotide
cauuaaauuauaauguuug

SEQ ID NO: 108583 - RNA, 19 nt, Artificial Sequence
  Description of Artificial Sequence: Synthetic oligonucleotide
gacuauuauauauguguau

SEQ ID NO: 108584 - RNA, 19 nt, Artificial Sequence
  Description of Artificial Sequence: Synthetic oligonucleotide
ugcauuuuacuggcucaaa

SEQ ID NO: 108585 - RNA, 19 nt, Artificial Sequence
  Description of Artificial Sequence: Synthetic oligonucleotide
aacuaccuacuucuuucuc

SEQ ID NO: 108586 - RNA, 19 nt, Artificial Sequence
  Description of Artificial Sequence: Synthetic oligonucleotide
caggcaucaaaagcauuuu

SEQ ID NO: 108587 - RNA, 19 nt, Artificial Sequence
  Description of Artificial Sequence: Synthetic oligonucleotide
ugagcaggagaguauuacu

SEQ ID NO: 108588 - RNA, 19 nt, Artificial Sequence
  Description of Artificial Sequence: Synthetic oligonucleotide
uagagcuuugccaccucuc

SEQ ID NO: 108589 - RNA, 19 nt, Artificial Sequence
  Description of Artificial Sequence: Synthetic oligonucleotide
ccauuuuugccuuggugcu

SEQ ID NO: 108590 - RNA, 19 nt, Artificial Sequence
  Description of Artificial Sequence: Synthetic oligonucleotide
ucaucuuaauggccuaaug

SEQ ID NO: 108591 - RNA, 19 nt, Artificial Sequence
  Description of Artificial Sequence: Synthetic oligonucleotide
gcacccccaaacauggaaa

SEQ ID NO: 108592 - RNA, 19 nt, Artificial Sequence
  Description of Artificial Sequence: Synthetic oligonucleotide
auaucaccaaaaaauacuu

SEQ ID NO: 108593 - RNA, 19 nt, Artificial Sequence
  Description of Artificial Sequence: Synthetic oligonucleotide
uaauaguccaccaaaaggc

SEQ ID NO: 108594 - RNA, 19 nt, Artificial Sequence
  Description of Artificial Sequence: Synthetic oligonucleotide
caagacugcccuuagaaau

SEQ ID NO: 108595 - RNA, 19 nt, Artificial Sequence
  Description of Artificial Sequence: Synthetic oligonucleotide
uucuagccugguuuggaga

SEQ ID NO: 108596 - RNA, 19 nt, Artificial Sequence
  Description of Artificial Sequence: Synthetic oligonucleotide
auacuaacugcucucagag

SEQ ID NO: 108597 - RNA, 19 nt, Artificial Sequence
  Description of Artificial Sequence: Synthetic oligonucleotide
gaaaguagcuuugugacau

SEQ ID NO: 108598 - RNA, 19 nt, Artificial Sequence
  Description of Artificial Sequence: Synthetic oligonucleotide
ugucaugaacccauguuug

SEQ ID NO: 108599 - RNA, 19 nt, Artificial Sequence
  Description of Artificial Sequence: Synthetic oligonucleotide
gcaaucaaagaugauaaaa

SEQ ID NO: 108600 - RNA, 19 nt, Artificial Sequence
  Description of Artificial Sequence: Synthetic oligonucleotide
auagauucuuauuuuuccc

SEQ ID NO: 108601 - RNA, 19 nt, Artificial Sequence
  Description of Artificial Sequence: Synthetic oligonucleotide
cccacccccgaaaauguuc

SEQ ID NO: 108602 - RNA, 19 nt, Artificial Sequence
  Description of Artificial Sequence: Synthetic oligonucleotide
caauaaugucccauguaaa

SEQ ID NO: 108603 - RNA, 19 nt, Artificial Sequence
  Description of Artificial Sequence: Synthetic oligonucleotide
aaccugcuacaaauggcag

SEQ ID NO: 108604 - RNA, 19 nt, Artificial Sequence
  Description of Artificial Sequence: Synthetic oligonucleotide
gcuuauacauagcaauggu

SEQ ID NO: 108605 - RNA, 19 nt, Artificial Sequence
  Description of Artificial Sequence: Synthetic oligonucleotide
uaaaaucaucaucuggauu

SEQ ID NO: 108606 - RNA, 19 nt, Artificial Sequence
  Description of Artificial Sequence: Synthetic oligonucleotide
uuaggaauugcucuuguca

SEQ ID NO: 108607 - RNA, 19 nt, Artificial Sequence
  Description of Artificial Sequence: Synthetic oligonucleotide
auacccccaaguuucuaag

SEQ ID NO: 108608 - RNA, 19 nt, Artificial Sequence
  Description of Artificial Sequence: Synthetic oligonucleotide
gauuuaagauucuccuuac

SEQ ID NO: 108609 - RNA, 19 nt, Artificial Sequence
  Description of Artificial Sequence: Synthetic oligonucleotide
cuacuauccuacguuuaaa

SEQ ID NO: 108610 - RNA, 19 nt, Artificial Sequence
  Description of Artificial Sequence: Synthetic oligonucleotide
auaucuuugaaaguuugua

SEQ ID NO: 108611 - RNA, 19 nt, Artificial Sequence
  Description of Artificial Sequence: Synthetic oligonucleotide
auuaaaugugaauuuuaag

SEQ ID NO: 108612 - RNA, 19 nt, Artificial Sequence
  Description of Artificial Sequence: Synthetic oligonucleotide
gaaauaauauuuauauuuc

SEQ ID NO: 108613 - RNA, 19 nt, Artificial Sequence
  Description of Artificial Sequence: Synthetic oligonucleotide
cuguaaauguaaacuguga

SEQ ID NO: 108614 - RNA, 19 nt, Artificial Sequence
  Description of Artificial Sequence: Synthetic oligonucleotide
aagauaguuauaaacugaa

SEQ ID NO: 108615 - RNA, 19 nt, Artificial Sequence
  Description of Artificial Sequence: Synthetic oligonucleotide
agcagauaccuggaaccac

SEQ ID NO: 108616 - RNA, 19 nt, Artificial Sequence
  Description of Artificial Sequence: Synthetic oligonucleotide
ccuaaagaacuuccauuua

SEQ ID NO: 108617 - RNA, 19 nt, Artificial Sequence
  Description of Artificial Sequence: Synthetic oligonucleotide
auggaggauuuuuuugccc

SEQ ID NO: 108618 - RNA, 19 nt, Artificial Sequence
  Description of Artificial Sequence: Synthetic oligonucleotide
ccuuguguuuggaauuaua

SEQ ID NO: 108619 - RNA, 19 nt, Artificial Sequence
  Description of Artificial Sequence: Synthetic oligonucleotide
aaaauauagguaaaaguac

SEQ ID NO: 108620 - RNA, 19 nt, Artificial Sequence
  Description of Artificial Sequence: Synthetic oligonucleotide
cguaauuaaauaauguuuu

SEQ ID NO: 108621 - RNA, 19 nt, Artificial Sequence
  Description of Artificial Sequence: Synthetic oligonucleotide
gaagugaagagaaaggaag

SEQ ID NO: 108622 - RNA, 19 nt, Artificial Sequence
  Description of Artificial Sequence: Synthetic oligonucleotide
guacagaaaacaugcagaa

SEQ ID NO: 108623 - RNA, 19 nt, Artificial Sequence
  Description of Artificial Sequence: Synthetic oligonucleotide
aagcacagaaaggaaaacc

SEQ ID NO: 108624 - RNA, 19 nt, Artificial Sequence
  Description of Artificial Sequence: Synthetic oligonucleotide
caagguucucaugaaucuc

SEQ ID NO: 108625 - RNA, 19 nt, Artificial Sequence
  Description of Artificial Sequence: Synthetic oligonucleotide
ccaaccuuaaauccugaaa

SEQ ID NO: 108626 - RNA, 19 nt, Artificial Sequence
  Description of Artificial Sequence: Synthetic oligonucleotide
acaguggcaauaaauuuau

SEQ ID NO: 108627 - RNA, 19 nt, Artificial Sequence
  Description of Artificial Sequence: Synthetic oligonucleotide
ucugauguugacuugagua

SEQ ID NO: 108628 - RNA, 19 nt, Artificial Sequence
  Description of Artificial Sequence: Synthetic oligonucleotide
aaauauaucaccacuauug

SEQ ID NO: 108629 - RNA, 19 nt, Artificial Sequence
  Description of Artificial Sequence: Synthetic oligonucleotide
gcuggagucaugacacuaa

SEQ ID NO: 108630 - RNA, 19 nt, Artificial Sequence
  Description of Artificial Sequence: Synthetic oligonucleotide
agucaaguuaaaggcuuug

SEQ ID NO: 108631 - RNA, 19 nt, Artificial Sequence
  Description of Artificial Sequence: Synthetic oligonucleotide
guucgaaagaaugguguca

SEQ ID NO: 108632 - RNA, 19 nt, Artificial Sequence
  Description of Artificial Sequence: Synthetic oligonucleotide
aaugaagccaaaauagaug

SEQ ID NO: 108633 - RNA, 19 nt, Artificial Sequence
  Description of Artificial Sequence: Synthetic oligonucleotide
gagaucaagaaugacaaug

SEQ ID NO: 108634 - RNA, 19 nt, Artificial Sequence
  Description of Artificial Sequence: Synthetic oligonucleotide
guccaagacacagcagaac

SEQ ID NO: 108635 - RNA, 19 nt, Artificial Sequence
  Description of Artificial Sequence: Synthetic oligonucleotide
cagaaaguucaacugcuuc

SEQ ID NO: 108636 - RNA, 19 nt, Artificial Sequence
  Description of Artificial Sequence: Synthetic oligonucleotide
cguaauuggcaucaacuuc

SEQ ID NO: 108637 - RNA, 19 nt, Artificial Sequence
  Description of Artificial Sequence: Synthetic oligonucleotide
cauggaaagaaagaagcgu

SEQ ID NO: 108638 - RNA, 19 nt, Artificial Sequence
  Description of Artificial Sequence: Synthetic oligonucleotide
uaugacacauugauuaaag

SEQ ID NO: 108639 - RNA, 19 nt, Artificial Sequence
  Description of Artificial Sequence: Synthetic oligonucleotide
gaucucaaaaaagccaauc

SEQ ID NO: 108640 - RNA, 19 nt, Artificial Sequence
  Description of Artificial Sequence: Synthetic oligonucleotide
cuuuguacucuugcagaga

SEQ ID NO: 108641 - RNA, 19 nt, Artificial Sequence
  Description of Artificial Sequence: Synthetic oligonucleotide
aaaauucagacuaucaucc

SEQ ID NO: 108642 - RNA, 19 nt, Artificial Sequence
  Description of Artificial Sequence: Synthetic oligonucleotide
cucaaggacauuacuagug

SEQ ID NO: 108643 - RNA, 19 nt, Artificial Sequence
  Description of Artificial Sequence: Synthetic oligonucleotide
gacucagaaaauucaaacu

SEQ ID NO: 108644 - RNA, 19 nt, Artificial Sequence
  Description of Artificial Sequence: Synthetic oligonucleotide
uucagaaaugaaauccaaa

SEQ ID NO: 108645 - RNA, 19 nt, Artificial Sequence
  Description of Artificial Sequence: Synthetic oligonucleotide
agcuuggucuagagugaaa

SEQ ID NO: 108646 - RNA, 19 nt, Artificial Sequence
  Description of Artificial Sequence: Synthetic oligonucleotide
aaacaacaaauucaguucu

SEQ ID NO: 108647 - RNA, 19 nt, Artificial Sequence
  Description of Artificial Sequence: Synthetic oligonucleotide
ugaguauaugcaauuagug

SEQ ID NO: 108648 - RNA, 19 nt, Artificial Sequence
  Description of Artificial Sequence: Synthetic oligonucleotide
guuugaaaagauucuuaau

SEQ ID NO: 108649 - RNA, 19 nt, Artificial Sequence
  Description of Artificial Sequence: Synthetic oligonucleotide
uagcuggcuguaaauacug

SEQ ID NO: 108650 - RNA, 19 nt, Artificial Sequence
  Description of Artificial Sequence: Synthetic oligonucleotide
gcuugguuuuuuacugggu

SEQ ID NO: 108651 - RNA, 19 nt, Artificial Sequence
  Description of Artificial Sequence: Synthetic oligonucleotide
uacauuuuaucauuuauua

SEQ ID NO: 108652 - RNA, 19 nt, Artificial Sequence
  Description of Artificial Sequence: Synthetic oligonucleotide
agcgcugaagagccaacau

SEQ ID NO: 108653 - RNA, 19 nt, Artificial Sequence
  Description of Artificial Sequence: Synthetic oligonucleotide
uauuuguagauuuuuaaua

SEQ ID NO: 108654 - RNA, 19 nt, Artificial Sequence
  Description of Artificial Sequence: Synthetic oligonucleotide
aucucaugauucugccucc

SEQ ID NO: 108655 - RNA, 19 nt, Artificial Sequence
  Description of Artificial Sequence: Synthetic oligonucleotide
caaggauguuuaaaaucua

SEQ ID NO: 108656 - RNA, 19 nt, Artificial Sequence
  Description of Artificial Sequence: Synthetic oligonucleotide
aguugggaaaacaaacuuc

SEQ ID NO: 108657 - RNA, 19 nt, Artificial Sequence
  Description of Artificial Sequence: Synthetic oligonucleotide
caucaagaguaaaugcagu

SEQ ID NO: 108658 - RNA, 19 nt, Artificial Sequence
  Description of Artificial Sequence: Synthetic oligonucleotide
uggcaugcuaaguacccaa

SEQ ID NO: 108659 - RNA, 19 nt, Artificial Sequence
  Description of Artificial Sequence: Synthetic oligonucleotide
aauaggaguguaugcagag

SEQ ID NO: 108660 - RNA, 19 nt, Artificial Sequence
  Description of Artificial Sequence: Synthetic oligonucleotide
ggaugaaagauuaagauua

SEQ ID NO: 108661 - RNA, 19 nt, Artificial Sequence
  Description of Artificial Sequence: Synthetic oligonucleotide
augcucuggcaucuaacau

SEQ ID NO: 108662 - RNA, 19 nt, Artificial Sequence
  Description of Artificial Sequence: Synthetic oligonucleotide
uaugauucuguaguaugaa

SEQ ID NO: 108663 - RNA, 19 nt, Artificial Sequence
  Description of Artificial Sequence: Synthetic oligonucleotide
auguaaucaguguauguua

SEQ ID NO: 108664 - RNA, 19 nt, Artificial Sequence
  Description of Artificial Sequence: Synthetic oligonucleotide
aguacaaaugucuauccac

SEQ ID NO: 108665 - RNA, 19 nt, Artificial Sequence
  Description of Artificial Sequence: Synthetic oligonucleotide
caggcuaaccccacucuau

SEQ ID NO: 108666 - RNA, 19 nt, Artificial Sequence
  Description of Artificial Sequence: Synthetic oligonucleotide
ugaaucaauagaagaagcu

SEQ ID NO: 108667 - RNA, 19 nt, Artificial Sequence
  Description of Artificial Sequence: Synthetic oligonucleotide
uaugaccuuuugcugaaau

SEQ ID NO: 108668 - RNA, 19 nt, Artificial Sequence
  Description of Artificial Sequence: Synthetic oligonucleotide
uaucaguuacugaacaggc

SEQ ID NO: 108669 - RNA, 19 nt, Artificial Sequence
  Description of Artificial Sequence: Synthetic oligonucleotide
caggccacuuugccucuaa

SEQ ID NO: 108670 - RNA, 19 nt, Artificial Sequence
  Description of Artificial Sequence: Synthetic oligonucleotide
aauuaccucugauaauucu

SEQ ID NO: 108671 - RNA, 19 nt, Artificial Sequence
  Description of Artificial Sequence: Synthetic oligonucleotide
uagagauuuuaccauauuu

SEQ ID NO: 108672 - RNA, 19 nt, Artificial Sequence
  Description of Artificial Sequence: Synthetic oligonucleotide
ucuaaacuuuguuuauaac

SEQ ID NO: 108673 - RNA, 19 nt, Artificial Sequence
  Description of Artificial Sequence: Synthetic oligonucleotide
cucugagaagaucauauuu

SEQ ID NO: 108674 - RNA, 19 nt, Artificial Sequence
  Description of Artificial Sequence: Synthetic oligonucleotide
uauguaaaguauauguauu

SEQ ID NO: 108675 - RNA, 19 nt, Artificial Sequence
  Description of Artificial Sequence: Synthetic oligonucleotide
uugagugcagaauuuaaau

SEQ ID NO: 108676 - RNA, 19 nt, Artificial Sequence
  Description of Artificial Sequence: Synthetic oligonucleotide
uaaggcucuaccucaaaga

SEQ ID NO: 108677 - RNA, 19 nt, Artificial Sequence
  Description of Artificial Sequence: Synthetic oligonucleotide
accuuugcacaguuuauug

SEQ ID NO: 108678 - RNA, 19 nt, Artificial Sequence
  Description of Artificial Sequence: Synthetic oligonucleotide
ggugucauauuauacaaua

SEQ ID NO: 108679 - RNA, 19 nt, Artificial Sequence
  Description of Artificial Sequence: Synthetic oligonucleotide
auuucaauugugaauucac

SEQ ID NO: 108680 - RNA, 19 nt, Artificial Sequence
  Description of Artificial Sequence: Synthetic oligonucleotide
cauagaaaacauuaaauua

SEQ ID NO: 108681 - RNA, 19 nt, Artificial Sequence
  Description of Artificial Sequence: Synthetic oligonucleotide
auaauguuugacuauuaua

SEQ ID NO: 108682 - RNA, 19 nt, Artificial Sequence
  Description of Artificial Sequence: Synthetic oligonucleotide
auauguguaugcauuuuac

SEQ ID NO: 108683 - RNA, 19 nt, Artificial Sequence
  Description of Artificial Sequence: Synthetic oligonucleotide
cuggcucaaaacuaccuac

SEQ ID NO: 108684 - RNA, 19 nt, Artificial Sequence
  Description of Artificial Sequence: Synthetic oligonucleotide
cuucuuucucaggcaucaa

SEQ ID NO: 108685 - RNA, 19 nt, Artificial Sequence
  Description of Artificial Sequence: Synthetic oligonucleotide
aaagcauuuugagcaggag

SEQ ID NO: 108686 - RNA, 19 nt, Artificial Sequence
  Description of Artificial Sequence: Synthetic oligonucleotide
gaguauuacuagagcuuug

SEQ ID NO: 108687 - RNA, 19 nt, Artificial Sequence
  Description of Artificial Sequence: Synthetic oligonucleotide
gccaccucuccauuuuugc

SEQ ID NO: 108688 - RNA, 19 nt, Artificial Sequence
  Description of Artificial Sequence: Synthetic oligonucleotide
ccuuggugcucaucuuaau

SEQ ID NO: 108689 - RNA, 19 nt, Artificial Sequence
  Description of Artificial Sequence: Synthetic oligonucleotide
uggccuaaugcacccccaa

SEQ ID NO: 108690 - RNA, 19 nt, Artificial Sequence
  Description of Artificial Sequence: Synthetic oligonucleotide
aacauggaaauaucaccaa

SEQ ID NO: 108691 - RNA, 19 nt, Artificial Sequence
  Description of Artificial Sequence: Synthetic oligonucleotide
aaaaauacuuaauagucca

SEQ ID NO: 108692 - RNA, 19 nt, Artificial Sequence
  Description of Artificial Sequence: Synthetic oligonucleotide
accaaaaggcaagacugcc

SEQ ID NO: 108693 - RNA, 19 nt, Artificial Sequence
  Description of Artificial Sequence: Synthetic oligonucleotide
ccuuagaaauucuagccug

SEQ ID NO: 108694 - RNA, 19 nt, Artificial Sequence
  Description of Artificial Sequence: Synthetic oligonucleotide
gguuuggagauacuaacug

SEQ ID NO: 108695 - RNA, 19 nt, Artificial Sequence
  Description of Artificial Sequence: Synthetic oligonucleotide
gcucucagagaaaguagcu

SEQ ID NO: 108696 - RNA, 19 nt, Artificial Sequence
  Description of Artificial Sequence: Synthetic oligonucleotide
uuugugacaugucaugaac

SEQ ID NO: 108697 - RNA, 19 nt, Artificial Sequence
  Description of Artificial Sequence: Synthetic oligonucleotide
cccauguuugcaaucaaag

SEQ ID NO: 108698 - RNA, 19 nt, Artificial Sequence
  Description of Artificial Sequence: Synthetic oligonucleotide
gaugauaaaauagauucuu

SEQ ID NO: 108699 - RNA, 19 nt, Artificial Sequence
  Description of Artificial Sequence: Synthetic oligonucleotide
uauuuuucccccacccccg

SEQ ID NO: 108700 - RNA, 19 nt, Artificial Sequence
  Description of Artificial Sequence: Synthetic oligonucleotide
gaaaauguucaauaauguc

SEQ ID NO: 108701 - RNA, 19 nt, Artificial Sequence
  Description of Artificial Sequence: Synthetic oligonucleotide
cccauguaaaaccugcuac

SEQ ID NO: 108702 - RNA, 19 nt, Artificial Sequence
  Description of Artificial Sequence: Synthetic oligonucleotide
caaauggcagcuuauacau

SEQ ID NO: 108703 - RNA, 19 nt, Artificial Sequence
  Description of Artificial Sequence: Synthetic oligonucleotide
uagcaaugguaaaaucauc

SEQ ID NO: 108704 - RNA, 19 nt, Artificial Sequence
  Description of Artificial Sequence: Synthetic oligonucleotide
caucuggauuuaggaauug

SEQ ID NO: 108705 - RNA, 19 nt, Artificial Sequence
  Description of Artificial Sequence: Synthetic oligonucleotide
gcucuugucauacccccaa

SEQ ID NO: 108706 - RNA, 19 nt, Artificial Sequence
  Description of Artificial Sequence: Synthetic oligonucleotide
aguuucuaagauuuaagau

SEQ ID NO: 108707 - RNA, 19 nt, Artificial Sequence
  Description of Artificial Sequence: Synthetic oligonucleotide
uucuccuuacuacuauccu

SEQ ID NO: 108708 - RNA, 19 nt, Artificial Sequence
  Description of Artificial Sequence: Synthetic oligonucleotide
uacguuuaaauaucuuuga

SEQ ID NO: 108709 - RNA, 19 nt, Artificial Sequence
  Description of Artificial Sequence: Synthetic oligonucleotide
aaaguuuguauuaaaugug

SEQ ID NO: 108710 - RNA, 19 nt, Artificial Sequence
  Description of Artificial Sequence: Synthetic oligonucleotide
gaauuuuaagaaauaauau

SEQ ID NO: 108711 - RNA, 19 nt, Artificial Sequence
  Description of Artificial Sequence: Synthetic oligonucleotide
uuuauauuucuguaaaugu

SEQ ID NO: 108712 - RNA, 19 nt, Artificial Sequence
  Description of Artificial Sequence: Synthetic oligonucleotide
uaaacugugaagauaguua

SEQ ID NO: 108713 - RNA, 19 nt, Artificial Sequence
  Description of Artificial Sequence: Synthetic oligonucleotide
auaaacugaagcagauacc

SEQ ID NO: 108714 - RNA, 19 nt, Artificial Sequence
  Description of Artificial Sequence: Synthetic oligonucleotide
cuggaaccaccuaaagaac

SEQ ID NO: 108715 - RNA, 19 nt, Artificial Sequence
  Description of Artificial Sequence: Synthetic oligonucleotide
cuuccauuuauggaggauu

SEQ ID NO: 108716 - RNA, 19 nt, Artificial Sequence
  Description of Artificial Sequence: Synthetic oligonucleotide
uuuuuugccccuuguguuu

SEQ ID NO: 108717 - RNA, 19 nt, Artificial Sequence
  Description of Artificial Sequence: Synthetic oligonucleotide
uggaauuauaaaauauagg

SEQ ID NO: 108718 - RNA, 19 nt, Artificial Sequence
  Description of Artificial Sequence: Synthetic oligonucleotide
guaaaaguacguaauuaaa

SEQ ID NO: 108719 - RNA, 19 nt, Artificial Sequence
  Description of Artificial Sequence: Synthetic oligonucleotide
auaauguuuuugguaaaaa

SEQ ID NO: 108720 - RNA, 19 nt, Artificial Sequence
  Description of Artificial Sequence: Synthetic oligonucleotide
agaugugaacauggaauca

SEQ ID NO: 108721 - RNA, 19 nt, Artificial Sequence
  Description of Artificial Sequence: Synthetic oligonucleotide
aucaaggaaugcacacuca

SEQ ID NO: 108722 - RNA, 19 nt, Artificial Sequence
  Description of Artificial Sequence: Synthetic oligonucleotide
accagcaacaccaagugca

SEQ ID NO: 108723 - RNA, 19 nt, Artificial Sequence
  Description of Artificial Sequence: Synthetic oligonucleotide
aaagaggaaggauccagau

SEQ ID NO: 108724 - RNA, 19 nt, Artificial Sequence
  Description of Artificial Sequence: Synthetic oligonucleotide
ucuaacuugggguggcuuu

SEQ ID NO: 108725 - RNA, 19 nt, Artificial Sequence
  Description of Artificial Sequence: Synthetic oligonucleotide
ugucuucuucuuuugccaa

SEQ ID NO: 108726 - RNA, 19 nt, Artificial Sequence
  Description of Artificial Sequence: Synthetic oligonucleotide
auuccacuaauuguuuggg

SEQ ID NO: 108727 - RNA, 19 nt, Artificial Sequence
  Description of Artificial Sequence: Synthetic oligonucleotide
gugaagagaaaggaaguac

SEQ ID NO: 108728 - RNA, 19 nt, Artificial Sequence
  Description of Artificial Sequence: Synthetic oligonucleotide
cagaaaacaugcagaaagc

SEQ ID NO: 108729 - RNA, 19 nt, Artificial Sequence
  Description of Artificial Sequence: Synthetic oligonucleotide
cacagaaaggaaaaccaag

SEQ ID NO: 108730 - RNA, 19 nt, Artificial Sequence
  Description of Artificial Sequence: Synthetic oligonucleotide
gguucucaugaaucuccaa

SEQ ID NO: 108731 - RNA, 19 nt, Artificial Sequence
  Description of Artificial Sequence: Synthetic oligonucleotide
accuuaaauccugaaacag

SEQ ID NO: 108732 - RNA, 19 nt, Artificial Sequence
  Description of Artificial Sequence: Synthetic oligonucleotide
guggcaauaaauuuaucug

SEQ ID NO: 108733 - RNA, 19 nt, Artificial Sequence
  Description of Artificial Sequence: Synthetic oligonucleotide
gauguugacuugaguaaau

SEQ ID NO: 108734 - RNA, 19 nt, Artificial Sequence
  Description of Artificial Sequence: Synthetic oligonucleotide
uauaucaccacuauugcug

SEQ ID NO: 108735 - RNA, 19 nt, Artificial Sequence
  Description of Artificial Sequence: Synthetic oligonucleotide
ggagucaugacacuaaguc

SEQ ID NO: 108736 - RNA, 19 nt, Artificial Sequence
  Description of Artificial Sequence: Synthetic oligonucleotide
caaguuaaaggcuuuguuc

SEQ ID NO: 108737 - RNA, 19 nt, Artificial Sequence
  Description of Artificial Sequence: Synthetic oligonucleotide
cgaaagaauggugucaaug

SEQ ID NO: 108738 - RNA, 19 nt, Artificial Sequence
  Description of Artificial Sequence: Synthetic oligonucleotide
gaagccaaaauagaugaga

SEQ ID NO: 108739 - RNA, 19 nt, Artificial Sequence
  Description of Artificial Sequence: Synthetic oligonucleotide
aucaagaaugacaaugucc

SEQ ID NO: 108740 - RNA, 19 nt, Artificial Sequence
  Description of Artificial Sequence: Synthetic oligonucleotide
caagacacagcagaacaga

SEQ ID NO: 108741 - RNA, 19 nt, Artificial Sequence
  Description of Artificial Sequence: Synthetic oligonucleotide
aaaguucaacugcuucgua

SEQ ID NO: 108742 - RNA, 19 nt, Artificial Sequence
  Description of Artificial Sequence: Synthetic oligonucleotide
aauuggcaucaacuucaug

SEQ ID NO: 108743 - RNA, 19 nt, Artificial Sequence
  Description of Artificial Sequence: Synthetic oligonucleotide
ggaaagaaagaagcguaug

SEQ ID NO: 108744 - RNA, 19 nt, Artificial Sequence
  Description of Artificial Sequence: Synthetic oligonucleotide
gacacauugauuaaagauc

SEQ ID NO: 108745 - RNA, 19 nt, Artificial Sequence
  Description of Artificial Sequence: Synthetic oligonucleotide
cucaaaaaagccaaucuuu

SEQ ID NO: 108746 - RNA, 19 nt, Artificial Sequence
  Description of Artificial Sequence: Synthetic oligonucleotide
uguacucuugcagagaaaa

SEQ ID NO: 108747 - RNA, 19 nt, Artificial Sequence
  Description of Artificial Sequence: Synthetic oligonucleotide
auucagacuaucauccuca

SEQ ID NO: 108748 - RNA, 19 nt, Artificial Sequence
  Description of Artificial Sequence: Synthetic oligonucleotide
aaggacauuacuagugacu

SEQ ID NO: 108749 - RNA, 19 nt, Artificial Sequence
  Description of Artificial Sequence: Synthetic oligonucleotide
ucagaaaauucaaacuuca

SEQ ID NO: 108750 - RNA, 19 nt, Artificial Sequence
  Description of Artificial Sequence: Synthetic oligonucleotide
agaaaugaaauccaaagcu

SEQ ID NO: 108751 - RNA, 19 nt, Artificial Sequence
  Description of Artificial Sequence: Synthetic oligonucleotide
uuggucuagagugaaaaac

SEQ ID NO: 108752 - RNA, 19 nt, Artificial Sequence
  Description of Artificial Sequence: Synthetic oligonucleotide
caacaaauucaguucugag

SEQ ID NO: 108753 - RNA, 19 nt, Artificial Sequence
  Description of Artificial Sequence: Synthetic oligonucleotide
guauaugcaauuaguguuu

SEQ ID NO: 108754 - RNA, 19 nt, Artificial Sequence
  Description of Artificial Sequence: Synthetic oligonucleotide
ugaaaagauucuuaauagc

SEQ ID NO: 108755 - RNA, 19 nt, Artificial Sequence
  Description of Artificial Sequence: Synthetic oligonucleotide
cuggcuguaaauacugcuu

SEQ ID NO: 108756 - RNA, 19 nt, Artificial Sequence
  Description of Artificial Sequence: Synthetic oligonucleotide
ugguuuuuuacuggguaca

SEQ ID NO: 108757 - RNA, 19 nt, Artificial Sequence
  Description of Artificial Sequence: Synthetic oligonucleotide
auuuuaucauuuauuagcg

SEQ ID NO: 108758 - RNA, 19 nt, Artificial Sequence
  Description of Artificial Sequence: Synthetic oligonucleotide
gcugaagagccaacauauu

SEQ ID NO: 108759 - RNA, 19 nt, Artificial Sequence
  Description of Artificial Sequence: Synthetic oligonucleotide
uuguagauuuuuaauaucu

SEQ ID NO: 108760 - RNA, 19 nt, Artificial Sequence
  Description of Artificial Sequence: Synthetic oligonucleotide
ucaugauucugccuccaag

SEQ ID NO: 108761 - RNA, 19 nt, Artificial Sequence
  Description of Artificial Sequence: Synthetic oligonucleotide
ggauguuuaaaaucuaguu

SEQ ID NO: 108762 - RNA, 19 nt, Artificial Sequence
  Description of Artificial Sequence: Synthetic oligonucleotide
ugggaaaacaaacuucauc

SEQ ID NO: 108763 - RNA, 19 nt, Artificial Sequence
  Description of Artificial Sequence: Synthetic oligonucleotide
caagaguaaaugcaguggc

SEQ ID NO: 108764 - RNA, 19 nt, Artificial Sequence
  Description of Artificial Sequence: Synthetic oligonucleotide
caugcuaaguacccaaaua

SEQ ID NO: 108765 - RNA, 19 nt, Artificial Sequence
  Description of Artificial Sequence: Synthetic oligonucleotide
aggaguguaugcagaggau

SEQ ID NO: 108766 - RNA, 19 nt, Artificial Sequence
  Description of Artificial Sequence: Synthetic oligonucleotide
ugaaagauuaagauuaugc

SEQ ID NO: 108767 - RNA, 19 nt, Artificial Sequence
  Description of Artificial Sequence: Synthetic oligonucleotide
cucuggcaucuaacauaug

SEQ ID NO: 108768 - RNA, 19 nt, Artificial Sequence
  Description of Artificial Sequence: Synthetic oligonucleotide
gauucuguaguaugaaugu

SEQ ID NO: 108769 - RNA, 19 nt, Artificial Sequence
  Description of Artificial Sequence: Synthetic oligonucleotide
uaaucaguguauguuagua

SEQ ID NO: 108770 - RNA, 19 nt, Artificial Sequence
  Description of Artificial Sequence: Synthetic oligonucleotide
acaaaugucuauccacagg

SEQ ID NO: 108771 - RNA, 19 nt, Artificial Sequence
  Description of Artificial Sequence: Synthetic oligonucleotide
gcuaaccccacucuaugaa

SEQ ID NO: 108772 - RNA, 19 nt, Artificial Sequence
  Description of Artificial Sequence: Synthetic oligonucleotide
aucaauagaagaagcuaug

SEQ ID NO: 108773 - RNA, 19 nt, Artificial Sequence
  Description of Artificial Sequence: Synthetic oligonucleotide
gaccuuuugcugaaauauc

SEQ ID NO: 108774 - RNA, 19 nt, Artificial Sequence
  Description of Artificial Sequence: Synthetic oligonucleotide
caguuacugaacaggcagg

SEQ ID NO: 108775 - RNA, 19 nt, Artificial Sequence
  Description of Artificial Sequence: Synthetic oligonucleotide
gccacuuugccucuaaauu

SEQ ID NO: 108776 - RNA, 19 nt, Artificial Sequence
  Description of Artificial Sequence: Synthetic oligonucleotide
uaccucugauaauucuaga

SEQ ID NO: 108777 - RNA, 19 nt, Artificial Sequence
  Description of Artificial Sequence: Synthetic oligonucleotide
agauuuuaccauauuucua

SEQ ID NO: 108778 - RNA, 19 nt, Artificial Sequence
  Description of Artificial Sequence: Synthetic oligonucleotide
aaacuuuguuuauaacucu

SEQ ID NO: 108779 - RNA, 19 nt, Artificial Sequence
  Description of Artificial Sequence: Synthetic oligonucleotide
ugagaagaucauauuuaug

SEQ ID NO: 108780 - RNA, 19 nt, Artificial Sequence
  Description of Artificial Sequence: Synthetic oligonucleotide
guaaaguauauguauuuga

SEQ ID NO: 108781 - RNA, 19 nt, Artificial Sequence
  Description of Artificial Sequence: Synthetic oligonucleotide
agugcagaauuuaaauaag

SEQ ID NO: 108782 - RNA, 19 nt, Artificial Sequence
  Description of Artificial Sequence: Synthetic oligonucleotide
ggcucuaccucaaagaccu

SEQ ID NO: 108783 - RNA, 19 nt, Artificial Sequence
  Description of Artificial Sequence: Synthetic oligonucleotide
uuugcacaguuuauuggug

SEQ ID NO: 108784 - RNA, 19 nt, Artificial Sequence
  Description of Artificial Sequence: Synthetic oligonucleotide
gucauauuauacaauauuu

SEQ ID NO: 108785 - RNA, 19 nt, Artificial Sequence
  Description of Artificial Sequence: Synthetic oligonucleotide
ucaauugugaauucacaua

SEQ ID NO: 108786 - RNA, 19 nt, Artificial Sequence
  Description of Artificial Sequence: Synthetic oligonucleotide
agaaaacauuaaauuauaa

SEQ ID NO: 108787 - RNA, 19 nt, Artificial Sequence
  Description of Artificial Sequence: Synthetic oligonucleotide
auguuugacuauuauauau

SEQ ID NO: 108788 - RNA, 19 nt, Artificial Sequence
  Description of Artificial Sequence: Synthetic oligonucleotide
uguguaugcauuuuacugg

SEQ ID NO: 108789 - RNA, 19 nt, Artificial Sequence
  Description of Artificial Sequence: Synthetic oligonucleotide
gcucaaaacuaccuacuuc

SEQ ID NO: 108790 - RNA, 19 nt, Artificial Sequence
  Description of Artificial Sequence: Synthetic oligonucleotide
cuuucucaggcaucaaaag

SEQ ID NO: 108791 - RNA, 19 nt, Artificial Sequence
  Description of Artificial Sequence: Synthetic oligonucleotide
gcauuuugagcaggagagu

SEQ ID NO: 108792 - RNA, 19 nt, Artificial Sequence
  Description of Artificial Sequence: Synthetic oligonucleotide
uauuacuagagcuuugcca

SEQ ID NO: 108793 - RNA, 19 nt, Artificial Sequence
  Description of Artificial Sequence: Synthetic oligonucleotide
accucuccauuuuugccuu

SEQ ID NO: 108794 - RNA, 19 nt, Artificial Sequence
  Description of Artificial Sequence: Synthetic oligonucleotide
uggugcucaucuuaauggc

SEQ ID NO: 108795 - RNA, 19 nt, Artificial Sequence
  Description of Artificial Sequence: Synthetic oligonucleotide
ccuaaugcacccccaaaca

SEQ ID NO: 108796 - RNA, 19 nt, Artificial Sequence
  Description of Artificial Sequence: Synthetic oligonucleotide
auggaaauaucaccaaaaa

SEQ ID NO: 108797 - RNA, 19 nt, Artificial Sequence
  Description of Artificial Sequence: Synthetic oligonucleotide
aauacuuaauaguccacca

SEQ ID NO: 108798 - RNA, 19 nt, Artificial Sequence
  Description of Artificial Sequence: Synthetic oligonucleotide
aaaaggcaagacugcccuu

SEQ ID NO: 108799 - RNA, 19 nt, Artificial Sequence
  Description of Artificial Sequence: Synthetic oligonucleotide
uagaaauucuagccugguu

SEQ ID NO: 108800 - RNA, 19 nt, Artificial Sequence
  Description of Artificial Sequence: Synthetic oligonucleotide
uuggagauacuaacugcuc

SEQ ID NO: 108801 - RNA, 19 nt, Artificial Sequence
  Description of Artificial Sequence: Synthetic oligonucleotide
cucagagaaaguagcuuug

SEQ ID NO: 108802 - RNA, 19 nt, Artificial Sequence
  Description of Artificial Sequence: Synthetic oligonucleotide
gugacaugucaugaaccca

SEQ ID NO: 108803 - RNA, 19 nt, Artificial Sequence
  Description of Artificial Sequence: Synthetic oligonucleotide
auguuugcaaucaaagaug

SEQ ID NO: 108804 - RNA, 19 nt, Artificial Sequence
  Description of Artificial Sequence: Synthetic oligonucleotide
gauaaaauagauucuuauu

SEQ ID NO: 108805 - RNA, 19 nt, Artificial Sequence
  Description of Artificial Sequence: Synthetic oligonucleotide
uuuucccccacccccgaaa

SEQ ID NO: 108806 - RNA, 19 nt, Artificial Sequence
  Description of Artificial Sequence: Synthetic oligonucleotide
aauguucaauaauguccca

SEQ ID NO: 108807 - RNA, 19 nt, Artificial Sequence
  Description of Artificial Sequence: Synthetic oligonucleotide
auguaaaaccugcuacaaa

SEQ ID NO: 108808 - RNA, 19 nt, Artificial Sequence
  Description of Artificial Sequence: Synthetic oligonucleotide
auggcagcuuauacauagc

SEQ ID NO: 108809 - RNA, 19 nt, Artificial Sequence
  Description of Artificial Sequence: Synthetic oligonucleotide
caaugguaaaaucaucauc

SEQ ID NO: 108810 - RNA, 19 nt, Artificial Sequence
  Description of Artificial Sequence: Synthetic oligonucleotide
cuggauuuaggaauugcuc

SEQ ID NO: 108811 - RNA, 19 nt, Artificial Sequence
  Description of Artificial Sequence: Synthetic oligonucleotide
cuugucauacccccaaguu

SEQ ID NO: 108812 - RNA, 19 nt, Artificial Sequence
  Description of Artificial Sequence: Synthetic oligonucleotide
uucuaagauuuaagauucu

SEQ ID NO: 108813 - RNA, 19 nt, Artificial Sequence
  Description of Artificial Sequence: Synthetic oligonucleotide
uccuuacuacuauccuacg

SEQ ID NO: 108814 - RNA, 19 nt, Artificial Sequence
  Description of Artificial Sequence: Synthetic oligonucleotide
guuuaaauaucuuugaaag

SEQ ID NO: 108815 - RNA, 19 nt, Artificial Sequence
  Description of Artificial Sequence: Synthetic oligonucleotide
guuuguauuaaaugugaau

SEQ ID NO: 108816 - RNA, 19 nt, Artificial Sequence
  Description of Artificial Sequence: Synthetic oligonucleotide
uuuuaagaaauaauauuua

SEQ ID NO: 108817 - RNA, 19 nt, Artificial Sequence
  Description of Artificial Sequence: Synthetic oligonucleotide
auauuucuguaaauguaaa

SEQ ID NO: 108818 - RNA, 19 nt, Artificial Sequence
  Description of Artificial Sequence: Synthetic oligonucleotide
acugugaagauaguuauaa

SEQ ID NO: 108819 - RNA, 19 nt, Artificial Sequence
  Description of Artificial Sequence: Synthetic oligonucleotide
aacugaagcagauaccugg

SEQ ID NO: 108820 - RNA, 19 nt, Artificial Sequence
  Description of Artificial Sequence: Synthetic oligonucleotide
gaaccaccuaaagaacuuc

SEQ ID NO: 108821 - RNA, 19 nt, Artificial Sequence
  Description of Artificial Sequence: Synthetic oligonucleotide
ccauuuauggaggauuuuu

SEQ ID NO: 108822 - RNA, 19 nt, Artificial Sequence
  Description of Artificial Sequence: Synthetic oligonucleotide
uuugccccuuguguuugga

SEQ ID NO: 108823 - RNA, 19 nt, Artificial Sequence
  Description of Artificial Sequence: Synthetic oligonucleotide
aauuauaaaauauagguaa

SEQ ID NO: 108824 - RNA, 19 nt, Artificial Sequence
  Description of Artificial Sequence: Synthetic oligonucleotide
aaaguacguaauuaaauaa

SEQ ID NO: 108825 - RNA, 19 nt, Artificial Sequence
  Description of Artificial Sequence: Synthetic oligonucleotide
auguuuuugguaaaaaaaa

SEQ ID NO: 108826 - RNA, 19 nt, Artificial Sequence
  Description of Artificial Sequence: Synthetic oligonucleotide
cuaauuguuuggggaaaca

SEQ ID NO: 108827 - RNA, 19 nt, Artificial Sequence
  Description of Artificial Sequence: Synthetic oligonucleotide
aguggcaauaaauuuaucu

SEQ ID NO: 108828 - RNA, 19 nt, Artificial Sequence
  Description of Artificial Sequence: Synthetic oligonucleotide
ugauguugacuugaguaaa

SEQ ID NO: 108829 - RNA, 19 nt, Artificial Sequence
  Description of Artificial Sequence: Synthetic oligonucleotide
auauaucaccacuauugcu

SEQ ID NO: 108830 - RNA, 19 nt, Artificial Sequence
  Description of Artificial Sequence: Synthetic oligonucleotide
uggagucaugacacuaagu

SEQ ID NO: 108831 - RNA, 19 nt, Artificial Sequence
  Description of Artificial Sequence: Synthetic oligonucleotide
ucaaguuaaaggcuuuguu

SEQ ID NO: 108832 - RNA, 19 nt, Artificial Sequence
  Description of Artificial Sequence: Synthetic oligonucleotide
ucgaaagaauggugucaau

SEQ ID NO: 108833 - RNA, 19 nt, Artificial Sequence
  Description of Artificial Sequence: Synthetic oligonucleotide
ugaagccaaaauagaugag

SEQ ID NO: 108834 - RNA, 19 nt, Artificial Sequence
  Description of Artificial Sequence: Synthetic oligonucleotide
gaucaagaaugacaauguc

SEQ ID NO: 108835 - RNA, 19 nt, Artificial Sequence
  Description of Artificial Sequence: Synthetic oligonucleotide
ccaagacacagcagaacag

SEQ ID NO: 108836 - RNA, 19 nt, Artificial Sequence
  Description of Artificial Sequence: Synthetic oligonucleotide
gaaaguucaacugcuucgu

SEQ ID NO: 108837 - RNA, 19 nt, Artificial Sequence
  Description of Artificial Sequence: Synthetic oligonucleotide
uaauuggcaucaacuucau

SEQ ID NO: 108838 - RNA, 19 nt, Artificial Sequence
  Description of Artificial Sequence: Synthetic oligonucleotide
uggaaagaaagaagcguau

SEQ ID NO: 108839 - RNA, 19 nt, Artificial Sequence
  Description of Artificial Sequence: Synthetic oligonucleotide
ugacacauugauuaaagau

SEQ ID NO: 108840 - RNA, 19 nt, Artificial Sequence
  Description of Artificial Sequence: Synthetic oligonucleotide
ucucaaaaaagccaaucuu

SEQ ID NO: 108841 - RNA, 19 nt, Artificial Sequence
  Description of Artificial Sequence: Synthetic oligonucleotide
uuguacucuugcagagaaa

SEQ ID NO: 108842 - RNA, 19 nt, Artificial Sequence
  Description of Artificial Sequence: Synthetic oligonucleotide
aauucagacuaucauccuc

SEQ ID NO: 108843 - RNA, 19 nt, Artificial Sequence
  Description of Artificial Sequence: Synthetic oligonucleotide
caaggacauuacuagugac

SEQ ID NO: 108844 - RNA, 19 nt, Artificial Sequence
  Description of Artificial Sequence: Synthetic oligonucleotide
cucagaaaauucaaacuuc

SEQ ID NO: 108845 - RNA, 19 nt, Artificial Sequence
  Description of Artificial Sequence: Synthetic oligonucleotide
cagaaaugaaauccaaagc

SEQ ID NO: 108846 - RNA, 19 nt, Artificial Sequence
  Description of Artificial Sequence: Synthetic oligonucleotide
cuuggucuagagugaaaaa

SEQ ID NO: 108847 - RNA, 19 nt, Artificial Sequence
  Description of Artificial Sequence: Synthetic oligonucleotide
acaacaaauucaguucuga

SEQ ID NO: 108848 - RNA, 19 nt, Artificial Sequence
  Description of Artificial Sequence: Synthetic oligonucleotide
aguauaugcaauuaguguu

SEQ ID NO: 108849 - RNA, 19 nt, Artificial Sequence
  Description of Artificial Sequence: Synthetic oligonucleotide
uugaaaagauucuuaauag

SEQ ID NO: 108850 - RNA, 19 nt, Artificial Sequence
  Description of Artificial Sequence: Synthetic oligonucleotide
gcuggcuguaaauacugcu

SEQ ID NO: 108851 - RNA, 19 nt, Artificial Sequence
  Description of Artificial Sequence: Synthetic oligonucleotide
uugguuuuuuacuggguac

SEQ ID NO: 108852 - RNA, 19 nt, Artificial Sequence
  Description of Artificial Sequence: Synthetic oligonucleotide
cauuuuaucauuuauuagc

SEQ ID NO: 108853 - RNA, 19 nt, Artificial Sequence
  Description of Artificial Sequence: Synthetic oligonucleotide
cgcugaagagccaacauau

SEQ ID NO: 108854 - RNA, 19 nt, Artificial Sequence
  Description of Artificial Sequence: Synthetic oligonucleotide
uuuguagauuuuuaauauc

SEQ ID NO: 108855 - RNA, 19 nt, Artificial Sequence
  Description of Artificial Sequence: Synthetic oligonucleotide
cucaugauucugccuccaa

SEQ ID NO: 108856 - RNA, 19 nt, Artificial Sequence
  Description of Artificial Sequence: Synthetic oligonucleotide
aggauguuuaaaaucuagu

SEQ ID NO: 108857 - RNA, 19 nt, Artificial Sequence
  Description of Artificial Sequence: Synthetic oligonucleotide
uugggaaaacaaacuucau

SEQ ID NO: 108858 - RNA, 19 nt, Artificial Sequence
  Description of Artificial Sequence: Synthetic oligonucleotide
ucaagaguaaaugcagugg

SEQ ID NO: 108859 - RNA, 19 nt, Artificial Sequence
  Description of Artificial Sequence: Synthetic oligonucleotide
gcaugcuaaguacccaaau

SEQ ID NO: 108860 - RNA, 19 nt, Artificial Sequence
  Description of Artificial Sequence: Synthetic oligonucleotide
uaggaguguaugcagagga

SEQ ID NO: 108861 - RNA, 19 nt, Artificial Sequence
  Description of Artificial Sequence: Synthetic oligonucleotide
augaaagauuaagauuaug

SEQ ID NO: 108862 - RNA, 19 nt, Artificial Sequence
  Description of Artificial Sequence: Synthetic oligonucleotide
gcucuggcaucuaacauau

SEQ ID NO: 108863 - RNA, 19 nt, Artificial Sequence
  Description of Artificial Sequence: Synthetic oligonucleotide
ugauucuguaguaugaaug

SEQ ID NO: 108864 - RNA, 19 nt, Artificial Sequence
  Description of Artificial Sequence: Synthetic oligonucleotide
guaaucaguguauguuagu

SEQ ID NO: 108865 - RNA, 19 nt, Artificial Sequence
  Description of Artificial Sequence: Synthetic oligonucleotide
uacaaaugucuauccacag

SEQ ID NO: 108866 - RNA, 19 nt, Artificial Sequence
  Description of Artificial Sequence: Synthetic oligonucleotide
ggcuaaccccacucuauga

SEQ ID NO: 108867 - RNA, 19 nt, Artificial Sequence
  Description of Artificial Sequence: Synthetic oligonucleotide
aaucaauagaagaagcuau

SEQ ID NO: 108868 - RNA, 19 nt, Artificial Sequence
  Description of Artificial Sequence: Synthetic oligonucleotide
ugaccuuuugcugaaauau

SEQ ID NO: 108869 - RNA, 19 nt, Artificial Sequence
  Description of Artificial Sequence: Synthetic oligonucleotide
ucaguuacugaacaggcag

SEQ ID NO: 108870 - RNA, 19 nt, Artificial Sequence
  Description of Artificial Sequence: Synthetic oligonucleotide
ggccacuuugccucuaaau

SEQ ID NO: 108871 - RNA, 19 nt, Artificial Sequence
  Description of Artificial Sequence: Synthetic oligonucleotide
uuaccucugauaauucuag

SEQ ID NO: 108872 - RNA, 19 nt, Artificial Sequence
  Description of Artificial Sequence: Synthetic oligonucleotide
gagauuuuaccauauuucu

SEQ ID NO: 108873 - RNA, 19 nt, Artificial Sequence
  Description of Artificial Sequence: Synthetic oligonucleotide
uaaacuuuguuuauaacuc

SEQ ID NO: 108874 - RNA, 19 nt, Artificial Sequence
  Description of Artificial Sequence: Synthetic oligonucleotide
cugagaagaucauauuuau

SEQ ID NO: 108875 - RNA, 19 nt, Artificial Sequence
  Description of Artificial Sequence: Synthetic oligonucleotide
uguaaaguauauguauuug

SEQ ID NO: 108876 - RNA, 19 nt, Artificial Sequence
  Description of Artificial Sequence: Synthetic oligonucleotide
gagugcagaauuuaaauaa

SEQ ID NO: 108877 - RNA, 19 nt, Artificial Sequence
  Description of Artificial Sequence: Synthetic oligonucleotide
aggcucuaccucaaagacc

SEQ ID NO: 108878 - RNA, 19 nt, Artificial Sequence
  Description of Artificial Sequence: Synthetic oligonucleotide
cuuugcacaguuuauuggu

SEQ ID NO: 108879 - RNA, 19 nt, Artificial Sequence
  Description of Artificial Sequence: Synthetic oligonucleotide
ugucauauuauacaauauu

SEQ ID NO: 108880 - RNA, 19 nt, Artificial Sequence
  Description of Artificial Sequence: Synthetic oligonucleotide
uucaauugugaauucacau

SEQ ID NO: 108881 - RNA, 19 nt, Artificial Sequence
  Description of Artificial Sequence: Synthetic oligonucleotide
uagaaaacauuaaauuaua

SEQ ID NO: 108882 - RNA, 19 nt, Artificial Sequence
  Description of Artificial Sequence: Synthetic oligonucleotide
aauguuugacuauuauaua

SEQ ID NO: 108883 - RNA, 19 nt, Artificial Sequence
  Description of Artificial Sequence: Synthetic oligonucleotide
auguguaugcauuuuacug

SEQ ID NO: 108884 - RNA, 19 nt, Artificial Sequence
  Description of Artificial Sequence: Synthetic oligonucleotide
ggcucaaaacuaccuacuu

SEQ ID NO: 108885 - RNA, 19 nt, Artificial Sequence
  Description of Artificial Sequence: Synthetic oligonucleotide
ucuuucucaggcaucaaaa

SEQ ID NO: 108886 - RNA, 19 nt, Artificial Sequence
  Description of Artificial Sequence: Synthetic oligonucleotide
agcauuuugagcaggagag

SEQ ID NO: 108887 - RNA, 19 nt, Artificial Sequence
  Description of Artificial Sequence: Synthetic oligonucleotide
guauuacuagagcuuugcc

SEQ ID NO: 108888 - RNA, 19 nt, Artificial Sequence
  Description of Artificial Sequence: Synthetic oligonucleotide
caccucuccauuuuugccu

SEQ ID NO: 108889 - RNA, 19 nt, Artificial Sequence
  Description of Artificial Sequence: Synthetic oligonucleotide
uuggugcucaucuuaaugg

SEQ ID NO: 108890 - RNA, 19 nt, Artificial Sequence
  Description of Artificial Sequence: Synthetic oligonucleotide
gccuaaugcacccccaaac

SEQ ID NO: 108891 - RNA, 19 nt, Artificial Sequence
  Description of Artificial Sequence: Synthetic oligonucleotide
cauggaaauaucaccaaaa

SEQ ID NO: 108892 - RNA, 19 nt, Artificial Sequence
  Description of Artificial Sequence: Synthetic oligonucleotide
aaauacuuaauaguccacc

SEQ ID NO: 108893 - RNA, 19 nt, Artificial Sequence
  Description of Artificial Sequence: Synthetic oligonucleotide
caaaaggcaagacugcccu

SEQ ID NO: 108894 - RNA, 19 nt, Artificial Sequence
  Description of Artificial Sequence: Synthetic oligonucleotide
uuagaaauucuagccuggu

SEQ ID NO: 108895 - RNA, 19 nt, Artificial Sequence
  Description of Artificial Sequence: Synthetic oligonucleotide
uuuggagauacuaacugcu

SEQ ID NO: 108896 - RNA, 19 nt, Artificial Sequence
  Description of Artificial Sequence: Synthetic oligonucleotide
ucucagagaaaguagcuuu

SEQ ID NO: 108897 - RNA, 19 nt, Artificial Sequence
  Description of Artificial Sequence: Synthetic oligonucleotide
ugugacaugucaugaaccc

SEQ ID NO: 108898 - RNA, 19 nt, Artificial Sequence
  Description of Artificial Sequence: Synthetic oligonucleotide
cauguuugcaaucaaagau

SEQ ID NO: 108899 - RNA, 19 nt, Artificial Sequence
  Description of Artificial Sequence: Synthetic oligonucleotide
ugauaaaauagauucuuau

SEQ ID NO: 108900 - RNA, 19 nt, Artificial Sequence
  Description of Artificial Sequence: Synthetic oligonucleotide
uuuuucccccacccccgaa

SEQ ID NO: 108901 - RNA, 19 nt, Artificial Sequence
  Description of Artificial Sequence: Synthetic oligonucleotide
aaauguucaauaauguccc

SEQ ID NO: 108902 - RNA, 19 nt, Artificial Sequence
  Description of Artificial Sequence: Synthetic oligonucleotide
cauguaaaaccugcuacaa

SEQ ID NO: 108903 - RNA, 19 nt, Artificial Sequence
  Description of Artificial Sequence: Synthetic oligonucleotide
aauggcagcuuauacauag

SEQ ID NO: 108904 - RNA, 19 nt, Artificial Sequence
  Description of Artificial Sequence: Synthetic oligonucleotide
gcaaugguaaaaucaucau

SEQ ID NO: 108905 - RNA, 19 nt, Artificial Sequence
  Description of Artificial Sequence: Synthetic oligonucleotide
ucuggauuuaggaauugcu

SEQ ID NO: 108906 - RNA, 19 nt, Artificial Sequence
  Description of Artificial Sequence: Synthetic oligonucleotide
ucuugucauacccccaagu

SEQ ID NO: 108907 - RNA, 19 nt, Artificial Sequence
  Description of Artificial Sequence: Synthetic oligonucleotide
uuucuaagauuuaagauuc

SEQ ID NO: 108908 - RNA, 19 nt, Artificial Sequence
  Description of Artificial Sequence: Synthetic oligonucleotide
cuccuuacuacuauccuac

SEQ ID NO: 108909 - RNA, 19 nt, Artificial Sequence
  Description of Artificial Sequence: Synthetic oligonucleotide
cguuuaaauaucuuugaaa

SEQ ID NO: 108910 - RNA, 19 nt, Artificial Sequence
  Description of Artificial Sequence: Synthetic oligonucleotide
aguuuguauuaaaugugaa

SEQ ID NO: 108911 - RNA, 19 nt, Artificial Sequence
  Description of Artificial Sequence: Synthetic oligonucleotide
auuuuaagaaauaauauuu

SEQ ID NO: 108912 - RNA, 19 nt, Artificial Sequence
  Description of Artificial Sequence: Synthetic oligonucleotide
uauauuucuguaaauguaa

SEQ ID NO: 108913 - RNA, 19 nt, Artificial Sequence
  Description of Artificial Sequence: Synthetic oligonucleotide
aacugugaagauaguuaua

SEQ ID NO: 108914 - RNA, 19 nt, Artificial Sequence
  Description of Artificial Sequence: Synthetic oligonucleotide
aaacugaagcagauaccug

SEQ ID NO: 108915 - RNA, 19 nt, Artificial Sequence
  Description of Artificial Sequence: Synthetic oligonucleotide
ggaaccaccuaaagaacuu

SEQ ID NO: 108916 - RNA, 19 nt, Artificial Sequence
  Description of Artificial Sequence: Synthetic oligonucleotide
uccauuuauggaggauuuu

SEQ ID NO: 108917 - RNA, 19 nt, Artificial Sequence
  Description of Artificial Sequence: Synthetic oligonucleotide
uuuugccccuuguguuugg

SEQ ID NO: 108918 - RNA, 19 nt, Artificial Sequence
  Description of Artificial Sequence: Synthetic oligonucleotide
gaauuauaaaauauaggua

SEQ ID NO: 108919 - RNA, 19 nt, Artificial Sequence
  Description of Artificial Sequence: Synthetic oligonucleotide
aaaaguacguaauuaaaua

SEQ ID NO: 108920 - RNA, 19 nt, Artificial Sequence
  Description of Artificial Sequence: Synthetic oligonucleotide
aauguuuuugguaaaaaaa

SEQ ID NO: 108921 - RNA, 19 nt, Artificial Sequence
  Description of Artificial Sequence: Synthetic oligonucleotide
ugaugaaggacauggcuua

SEQ ID NO: 108922 - RNA, 19 nt, Artificial Sequence
  Description of Artificial Sequence: Synthetic oligonucleotide
agaaguggaaauaaacugc

SEQ ID NO: 108923 - RNA, 19 nt, Artificial Sequence
  Description of Artificial Sequence: Synthetic oligonucleotide
cacccggacccagaauacc

SEQ ID NO: 108924 - RNA, 19 nt, Artificial Sequence
  Description of Artificial Sequence: Synthetic oligonucleotide
caagugcagauguaaacca

SEQ ID NO: 108925 - RNA, 19 nt, Artificial Sequence
  Description of Artificial Sequence: Synthetic oligonucleotide
aaacuuuuuuuguaacucu

SEQ ID NO: 108926 - RNA, 19 nt, Artificial Sequence
  Description of Artificial Sequence: Synthetic oligonucleotide
uacuguaugugaacacugu

SEQ ID NO: 108927 - RNA, 19 nt, Artificial Sequence
  Description of Artificial Sequence: Synthetic oligonucleotide
ugacccuugcaccaaaugu

SEQ ID NO: 108928 - RNA, 19 nt, Artificial Sequence
  Description of Artificial Sequence: Synthetic oligonucleotide
ugaacauggaaucaucaag

SEQ ID NO: 108929 - RNA, 19 nt, Artificial Sequence
  Description of Artificial Sequence: Synthetic oligonucleotide
ggaaugcacacucaccagc

SEQ ID NO: 108930 - RNA, 19 nt, Artificial Sequence
  Description of Artificial Sequence: Synthetic oligonucleotide
caacaccaagugcaaagag

SEQ ID NO: 108931 - RNA, 19 nt, Artificial Sequence
  Description of Artificial Sequence: Synthetic oligonucleotide
ggaaggauccagaucuaac

SEQ ID NO: 108932 - RNA, 19 nt, Artificial Sequence
  Description of Artificial Sequence: Synthetic oligonucleotide
cuugggguggcuuugucuu

SEQ ID NO: 108933 - RNA, 19 nt, Artificial Sequence
  Description of Artificial Sequence: Synthetic oligonucleotide
ucuucuuuugccaauucca

SEQ ID NO: 108934 - RNA, 19 nt, Artificial Sequence
  Description of Artificial Sequence: Synthetic oligonucleotide
acuaauuguuugggugaag

SEQ ID NO: 108935 - RNA, 19 nt, Artificial Sequence
  Description of Artificial Sequence: Synthetic oligonucleotide
gagaaaggaaguacagaaa

SEQ ID NO: 108936 - RNA, 19 nt, Artificial Sequence
  Description of Artificial Sequence: Synthetic oligonucleotide
aacaugcagaaagcacaga

SEQ ID NO: 108937 - RNA, 19 nt, Artificial Sequence
  Description of Artificial Sequence: Synthetic oligonucleotide
aaaggaaaaccaagguucu

SEQ ID NO: 108938 - RNA, 19 nt, Artificial Sequence
  Description of Artificial Sequence: Synthetic oligonucleotide
ucaugaaucuccaaccuua

SEQ ID NO: 108939 - RNA, 19 nt, Artificial Sequence
  Description of Artificial Sequence: Synthetic oligonucleotide
aaauccuauguugacuuga

SEQ ID NO: 108940 - RNA, 19 nt, Artificial Sequence
  Description of Artificial Sequence: Synthetic oligonucleotide
aguaaauauaucaccacua

SEQ ID NO: 108941 - RNA, 19 nt, Artificial Sequence
  Description of Artificial Sequence: Synthetic oligonucleotide
auugcuggagucaugacac

SEQ ID NO: 108942 - RNA, 19 nt, Artificial Sequence
  Description of Artificial Sequence: Synthetic oligonucleotide
cuaagucaaguuaaaggcu

SEQ ID NO: 108943 - RNA, 19 nt, Artificial Sequence
  Description of Artificial Sequence: Synthetic oligonucleotide
uuuguucgaaagaauggug

SEQ ID NO: 108944 - RNA, 19 nt, Artificial Sequence
  Description of Artificial Sequence: Synthetic oligonucleotide
gucaaugaagccaaaauag

SEQ ID NO: 108945 - RNA, 19 nt, Artificial Sequence
  Description of Artificial Sequence: Synthetic oligonucleotide
gaugagaucaagaaugaca

SEQ ID NO: 108946 - RNA, 19 nt, Artificial Sequence
  Description of Artificial Sequence: Synthetic oligonucleotide
aauguccaagacacagcag

SEQ ID NO: 108947 - RNA, 19 nt, Artificial Sequence
  Description of Artificial Sequence: Synthetic oligonucleotide
gaacagaaaguucaacugc

SEQ ID NO: 108948 - RNA, 19 nt, Artificial Sequence
  Description of Artificial Sequence: Synthetic oligonucleotide
cuucguaauuggcaucaac

SEQ ID NO: 108949 - RNA, 19 nt, Artificial Sequence
  Description of Artificial Sequence: Synthetic oligonucleotide
cuucauggaaagaaagaag

SEQ ID NO: 108950 - RNA, 19 nt, Artificial Sequence
  Description of Artificial Sequence: Synthetic oligonucleotide
gcguaugacacauugauua

SEQ ID NO: 108951 - RNA, 19 nt, Artificial Sequence
  Description of Artificial Sequence: Synthetic oligonucleotide
aaagaucucaaaaaagcca

SEQ ID NO: 108952 - RNA, 19 nt, Artificial Sequence
  Description of Artificial Sequence: Synthetic oligonucleotide
aaucuuuguacucuugcag

SEQ ID NO: 108953 - RNA, 19 nt, Artificial Sequence
  Description of Artificial Sequence: Synthetic oligonucleotide
gagaaaauucagacuauca

SEQ ID NO: 108954 - RNA, 19 nt, Artificial Sequence
  Description of Artificial Sequence: Synthetic oligonucleotide
auccucaaggacauuacua

SEQ ID NO: 108955 - RNA, 19 nt, Artificial Sequence
  Description of Artificial Sequence: Synthetic oligonucleotide
agugacucagaaaauucaa

SEQ ID NO: 108956 - RNA, 19 nt, Artificial Sequence
  Description of Artificial Sequence: Synthetic oligonucleotide
aacuucagaaaugaaaucc

SEQ ID NO: 108957 - RNA, 19 nt, Artificial Sequence
  Description of Artificial Sequence: Synthetic oligonucleotide
caaagcuuggucuagagug

SEQ ID NO: 108958 - RNA, 19 nt, Artificial Sequence
  Description of Artificial Sequence: Synthetic oligonucleotide
gaaaaacaacaaauucagu

SEQ ID NO: 108959 - RNA, 19 nt, Artificial Sequence
  Description of Artificial Sequence: Synthetic oligonucleotide
uucugaguauaugcaauua

SEQ ID NO: 108960 - RNA, 19 nt, Artificial Sequence
  Description of Artificial Sequence: Synthetic oligonucleotide
aguguuugaaaagauucuu

SEQ ID NO: 108961 - RNA, 19 nt, Artificial Sequence
  Description of Artificial Sequence: Synthetic oligonucleotide
uaauagcuggcuguaaaua

SEQ ID NO: 108962 - RNA, 19 nt, Artificial Sequence
  Description of Artificial Sequence: Synthetic oligonucleotide
acugcuugguuuuuuacug

SEQ ID NO: 108963 - RNA, 19 nt, Artificial Sequence
  Description of Artificial Sequence: Synthetic oligonucleotide
ggguacauuuuaucauuua

SEQ ID NO: 108964 - RNA, 19 nt, Artificial Sequence
  Description of Artificial Sequence: Synthetic oligonucleotide
auuagcgcugaagagccaa

SEQ ID NO: 108965 - RNA, 19 nt, Artificial Sequence
  Description of Artificial Sequence: Synthetic oligonucleotide
acauauuuguagauuuuua

SEQ ID NO: 108966 - RNA, 19 nt, Artificial Sequence
  Description of Artificial Sequence: Synthetic oligonucleotide
aauaucucaugauucugcc

SEQ ID NO: 108967 - RNA, 19 nt, Artificial Sequence
  Description of Artificial Sequence: Synthetic oligonucleotide
cuccaaggauguuuaaaau

SEQ ID NO: 108968 - RNA, 19 nt, Artificial Sequence
  Description of Artificial Sequence: Synthetic oligonucleotide
ucuaguugggaaaacaaac

SEQ ID NO: 108969 - RNA, 19 nt, Artificial Sequence
  Description of Artificial Sequence: Synthetic oligonucleotide
cuucaucaagaguaaaugc

SEQ ID NO: 108970 - RNA, 19 nt, Artificial Sequence
  Description of Artificial Sequence: Synthetic oligonucleotide
caguggcaugcuaaguacc

SEQ ID NO: 108971 - RNA, 19 nt, Artificial Sequence
  Description of Artificial Sequence: Synthetic oligonucleotide
ccaaauaggaguguaugca

SEQ ID NO: 108972 - RNA, 19 nt, Artificial Sequence
  Description of Artificial Sequence: Synthetic oligonucleotide
agaggaugaaagauuaaga

SEQ ID NO: 108973 - RNA, 19 nt, Artificial Sequence
  Description of Artificial Sequence: Synthetic oligonucleotide
auuaugcucuggcaucuaa

SEQ ID NO: 108974 - RNA, 19 nt, Artificial Sequence
  Description of Artificial Sequence: Synthetic oligonucleotide
acauaugauucuguaguau

SEQ ID NO: 108975 - RNA, 19 nt, Artificial Sequence
  Description of Artificial Sequence: Synthetic oligonucleotide
ugaauguaaucaguguaug

SEQ ID NO: 108976 - RNA, 19 nt, Artificial Sequence
  Description of Artificial Sequence: Synthetic oligonucleotide
guuaguacaaaugucuauc

SEQ ID NO: 108977 - RNA, 19 nt, Artificial Sequence
  Description of Artificial Sequence: Synthetic oligonucleotide
ccacaggcuaaccccacuc

SEQ ID NO: 108978 - RNA, 19 nt, Artificial Sequence
  Description of Artificial Sequence: Synthetic oligonucleotide
cuaugaaucaauagaagaa

SEQ ID NO: 108979 - RNA, 19 nt, Artificial Sequence
  Description of Artificial Sequence: Synthetic oligonucleotide
agcuaugaccuuuugcuga

SEQ ID NO: 108980 - RNA, 19 nt, Artificial Sequence
  Description of Artificial Sequence: Synthetic oligonucleotide
aaauaucaguuacugaaca

SEQ ID NO: 108981 - RNA, 19 nt, Artificial Sequence
  Description of Artificial Sequence: Synthetic oligonucleotide
aggcaggccacuuugccuc

SEQ ID NO: 108982 - RNA, 19 nt, Artificial Sequence
  Description of Artificial Sequence: Synthetic oligonucleotide
cuaaauuaccucugauaau

SEQ ID NO: 108983 - RNA, 19 nt, Artificial Sequence
  Description of Artificial Sequence: Synthetic oligonucleotide
uucuagagauuuuaccaua

SEQ ID NO: 108984 - RNA, 19 nt, Artificial Sequence
  Description of Artificial Sequence: Synthetic oligonucleotide
auuucuaaacuuuguuuau

SEQ ID NO: 108985 - RNA, 19 nt, Artificial Sequence
  Description of Artificial Sequence: Synthetic oligonucleotide
uaacucugagaagaucaua

SEQ ID NO: 108986 - RNA, 19 nt, Artificial Sequence
  Description of Artificial Sequence: Synthetic oligonucleotide
auuuauguaaaguauaugu

SEQ ID NO: 108987 - RNA, 19 nt, Artificial Sequence
  Description of Artificial Sequence: Synthetic oligonucleotide
uauuugagugcagaauuua

SEQ ID NO: 108988 - RNA, 19 nt, Artificial Sequence
  Description of Artificial Sequence: Synthetic oligonucleotide
aaauaaggcucuaccucaa

SEQ ID NO: 108989 - RNA, 19 nt, Artificial Sequence
  Description of Artificial Sequence: Synthetic oligonucleotide
aagaccuuugcacaguuua

SEQ ID NO: 108990 - RNA, 19 nt, Artificial Sequence
  Description of Artificial Sequence: Synthetic oligonucleotide
auuggugucauauuauaca

SEQ ID NO: 108991 - RNA, 19 nt, Artificial Sequence
  Description of Artificial Sequence: Synthetic oligonucleotide
aauauuucaauugugaauu

SEQ ID NO: 108992 - RNA, 19 nt, Artificial Sequence
  Description of Artificial Sequence: Synthetic oligonucleotide
ucacauagaaaacauuaaa

SEQ ID NO: 108993 - RNA, 19 nt, Artificial Sequence
  Description of Artificial Sequence: Synthetic oligonucleotide
auuauaauguuugacuauu

SEQ ID NO: 108994 - RNA, 19 nt, Artificial Sequence
  Description of Artificial Sequence: Synthetic oligonucleotide
uauauauguguaugcauuu

SEQ ID NO: 108995 - RNA, 19 nt, Artificial Sequence
  Description of Artificial Sequence: Synthetic oligonucleotide
uuacuggcucaaaacuacc

SEQ ID NO: 108996 - RNA, 19 nt, Artificial Sequence
  Description of Artificial Sequence: Synthetic oligonucleotide
cuacuucuuucucaggcau

SEQ ID NO: 108997 - RNA, 19 nt, Artificial Sequence
  Description of Artificial Sequence: Synthetic oligonucleotide
ucaaaagcauuuugagcag

SEQ ID NO: 108998 - RNA, 19 nt, Artificial Sequence
  Description of Artificial Sequence: Synthetic oligonucleotide
ggagaguauuacuagagcu

SEQ ID NO: 108999 - RNA, 19 nt, Artificial Sequence
  Description of Artificial Sequence: Synthetic oligonucleotide
uuugccaccucuccauuuu

SEQ ID NO: 109000 - RNA, 19 nt, Artificial Sequence
  Description of Artificial Sequence: Synthetic oligonucleotide
uugccuuggugcucaucuu

SEQ ID NO: 109001 - RNA, 19 nt, Artificial Sequence
  Description of Artificial Sequence: Synthetic oligonucleotide
uaauggccuaaugcacccc

SEQ ID NO: 109002 - RNA, 19 nt, Artificial Sequence
  Description of Artificial Sequence: Synthetic oligonucleotide
ccaaacauggaaauaucac

SEQ ID NO: 109003 - RNA, 19 nt, Artificial Sequence
  Description of Artificial Sequence: Synthetic oligonucleotide
ccaaaaaauacuuaauagu

SEQ ID NO: 109004 - RNA, 19 nt, Artificial Sequence
  Description of Artificial Sequence: Synthetic oligonucleotide
uccaccaaaaggcaagacu

SEQ ID NO: 109005 - RNA, 19 nt, Artificial Sequence
  Description of Artificial Sequence: Synthetic oligonucleotide
ugcccuuagaaauucuagc

SEQ ID NO: 109006 - RNA, 19 nt, Artificial Sequence
  Description of Artificial Sequence: Synthetic oligonucleotide
ccugguuuggagauacuaa

SEQ ID NO: 109007 - RNA, 19 nt, Artificial Sequence
  Description of Artificial Sequence: Synthetic oligonucleotide
acugcucucagagaaagua

SEQ ID NO: 109008 - RNA, 19 nt, Artificial Sequence
  Description of Artificial Sequence: Synthetic oligonucleotide
agcuuugugacaugucaug

SEQ ID NO: 109009 - RNA, 19 nt, Artificial Sequence
  Description of Artificial Sequence: Synthetic oligonucleotide
gaacccauguuugcaauca

SEQ ID NO: 109010 - RNA, 19 nt, Artificial Sequence
  Description of Artificial Sequence: Synthetic oligonucleotide
aaagaugauaaaauagauu

SEQ ID NO: 109011 - RNA, 19 nt, Artificial Sequence
  Description of Artificial Sequence: Synthetic oligonucleotide
ucuuauuuuucccccaccc

SEQ ID NO: 109012 - RNA, 19 nt, Artificial Sequence
  Description of Artificial Sequence: Synthetic oligonucleotide
cccgaaaauguucaauaau

SEQ ID NO: 109013 - RNA, 19 nt, Artificial Sequence
  Description of Artificial Sequence: Synthetic oligonucleotide
ugucccauguaaaaccugc

SEQ ID NO: 109014 - RNA, 19 nt, Artificial Sequence
  Description of Artificial Sequence: Synthetic oligonucleotide
cuacaaauggcagcuuaua

SEQ ID NO: 109015 - RNA, 19 nt, Artificial Sequence
  Description of Artificial Sequence: Synthetic oligonucleotide
acauagcaaugguaaaauc

SEQ ID NO: 109016 - RNA, 19 nt, Artificial Sequence
  Description of Artificial Sequence: Synthetic oligonucleotide
caucaucuggauuuaggaa

SEQ ID NO: 109017 - RNA, 19 nt, Artificial Sequence
  Description of Artificial Sequence: Synthetic oligonucleotide
auugcucuugucauacccc

SEQ ID NO: 109018 - RNA, 19 nt, Artificial Sequence
  Description of Artificial Sequence: Synthetic oligonucleotide
ccaaguuucuaagauuuaa

SEQ ID NO: 109019 - RNA, 19 nt, Artificial Sequence
  Description of Artificial Sequence: Synthetic oligonucleotide
agauucuccuuacuacuau

SEQ ID NO: 109020 - RNA, 19 nt, Artificial Sequence
  Description of Artificial Sequence: Synthetic oligonucleotide
uccuacguuuaaauaucuu

SEQ ID NO: 109021 - RNA, 19 nt, Artificial Sequence
  Description of Artificial Sequence: Synthetic oligonucleotide
uugaaaguuuguauuaaau

SEQ ID NO: 109022 - RNA, 19 nt, Artificial Sequence
  Description of Artificial Sequence: Synthetic oligonucleotide
ugugaauuuuaagaaauaa

SEQ ID NO: 109023 - RNA, 19 nt, Artificial Sequence
  Description of Artificial Sequence: Synthetic oligonucleotide
auauuuauauuucuguaaa

SEQ ID NO: 109024 - RNA, 19 nt, Artificial Sequence
  Description of Artificial Sequence: Synthetic oligonucleotide
auguaaacugugaagauag

SEQ ID NO: 109025 - RNA, 19 nt, Artificial Sequence
  Description of Artificial Sequence: Synthetic oligonucleotide
guuauaaacugaagcagau

SEQ ID NO: 109026 - RNA, 19 nt, Artificial Sequence
  Description of Artificial Sequence: Synthetic oligonucleotide
uaccuggaaccaccuaaag

SEQ ID NO: 109027 - RNA, 19 nt, Artificial Sequence
  Description of Artificial Sequence: Synthetic oligonucleotide
gaacuuccauuuauggagg

SEQ ID NO: 109028 - RNA, 19 nt, Artificial Sequence
  Description of Artificial Sequence: Synthetic oligonucleotide
gauuuuuuugccccuugug

SEQ ID NO: 109029 - RNA, 19 nt, Artificial Sequence
  Description of Artificial Sequence: Synthetic oligonucleotide
guuuggaauuauaaaauau

SEQ ID NO: 109030 - RNA, 19 nt, Artificial Sequence
  Description of Artificial Sequence: Synthetic oligonucleotide
uagguaaaaguacguaauu

SEQ ID NO: 109031 - RNA, 19 nt, Artificial Sequence
  Description of Artificial Sequence: Synthetic oligonucleotide
uaaauaauguuuuugguaa

SEQ ID NO: 109032 - RNA, 19 nt, Artificial Sequence
  Description of Artificial Sequence: Synthetic oligonucleotide
aaagaggaagugaagagaa

SEQ ID NO: 109033 - RNA, 19 nt, Artificial Sequence
  Description of Artificial Sequence: Synthetic oligonucleotide
aaggaaguacagaaaacau

SEQ ID NO: 109034 - RNA, 19 nt, Artificial Sequence
  Description of Artificial Sequence: Synthetic oligonucleotide
ugcagaaagcacagaaagg

SEQ ID NO: 109035 - RNA, 19 nt, Artificial Sequence
  Description of Artificial Sequence: Synthetic oligonucleotide
gaaaaccaagguucucaug

SEQ ID NO: 109036 - RNA, 19 nt, Artificial Sequence
  Description of Artificial Sequence: Synthetic oligonucleotide
gaaucuccaaccuuaaauc

SEQ ID NO: 109037 - RNA, 19 nt, Artificial Sequence
  Description of Artificial Sequence: Synthetic oligonucleotide
ccugaaacaguggcaauaa

SEQ ID NO: 109038 - RNA, 19 nt, Artificial Sequence
  Description of Artificial Sequence: Synthetic oligonucleotide
aauuuaucugauguugacu

SEQ ID NO: 109039 - RNA, 19 nt, Artificial Sequence
  Description of Artificial Sequence: Synthetic oligonucleotide
uugaguaaauauaucacca

SEQ ID NO: 109040 - RNA, 19 nt, Artificial Sequence
  Description of Artificial Sequence: Synthetic oligonucleotide
acuauugcuggagucauga

SEQ ID NO: 109041 - RNA, 19 nt, Artificial Sequence
  Description of Artificial Sequence: Synthetic oligonucleotide
acacuaagucaaguuaaag

SEQ ID NO: 109042 - RNA, 19 nt, Artificial Sequence
  Description of Artificial Sequence: Synthetic oligonucleotide
ggcuuuguucgaaagaaug

SEQ ID NO: 109043 - RNA, 19 nt, Artificial Sequence
  Description of Artificial Sequence: Synthetic oligonucleotide
ggugucaaugaagccaaaa

SEQ ID NO: 109044 - RNA, 19 nt, Artificial Sequence
  Description of Artificial Sequence: Synthetic oligonucleotide
auagaugagaucaagaaug

SEQ ID NO: 109045 - RNA, 19 nt, Artificial Sequence
  Description of Artificial Sequence: Synthetic oligonucleotide
gacaauguccaagacacag

SEQ ID NO: 109046 - RNA, 19 nt, Artificial Sequence
  Description of Artificial Sequence: Synthetic oligonucleotide
gcagaacagaaaguucaac

SEQ ID NO: 109047 - RNA, 19 nt, Artificial Sequence
  Description of Artificial Sequence: Synthetic oligonucleotide
cugcuucguaauuggcauc

SEQ ID NO: 109048 - RNA, 19 nt, Artificial Sequence
  Description of Artificial Sequence: Synthetic oligonucleotide
caacuucauggaaagaaag

SEQ ID NO: 109049 - RNA, 19 nt, Artificial Sequence
  Description of Artificial Sequence: Synthetic oligonucleotide
gaagcguaugacacauuga

SEQ ID NO: 109050 - RNA, 19 nt, Artificial Sequence
  Description of Artificial Sequence: Synthetic oligonucleotide
auuaaagaucucaaaaaag

SEQ ID NO: 109051 - RNA, 19 nt, Artificial Sequence
  Description of Artificial Sequence: Synthetic oligonucleotide
gccaaucuuuguacucuug

SEQ ID NO: 109052 - RNA, 19 nt, Artificial Sequence
  Description of Artificial Sequence: Synthetic oligonucleotide
gcagagaaaauucagacua

SEQ ID NO: 109053 - RNA, 19 nt, Artificial Sequence
  Description of Artificial Sequence: Synthetic oligonucleotide
aucauccucaaggacauua

SEQ ID NO: 109054 - RNA, 19 nt, Artificial Sequence
  Description of Artificial Sequence: Synthetic oligonucleotide
acuagugacucagaaaauu

SEQ ID NO: 109055 - RNA, 19 nt, Artificial Sequence
  Description of Artificial Sequence: Synthetic oligonucleotide
ucaaacuucagaaaugaaa

SEQ ID NO: 109056 - RNA, 19 nt, Artificial Sequence
  Description of Artificial Sequence: Synthetic oligonucleotide
auccaaagcuuggucuaga

SEQ ID NO: 109057 - RNA, 19 nt, Artificial Sequence
  Description of Artificial Sequence: Synthetic oligonucleotide
agugaaaaacaacaaauuc

SEQ ID NO: 109058 - RNA, 19 nt, Artificial Sequence
  Description of Artificial Sequence: Synthetic oligonucleotide
caguucugaguauaugcaa

SEQ ID NO: 109059 - RNA, 19 nt, Artificial Sequence
  Description of Artificial Sequence: Synthetic oligonucleotide
auuaguguuugaaaagauu

SEQ ID NO: 109060 - RNA, 19 nt, Artificial Sequence
  Description of Artificial Sequence: Synthetic oligonucleotide
ucuuaauagcuggcuguaa

SEQ ID NO: 109061 - RNA, 19 nt, Artificial Sequence
  Description of Artificial Sequence: Synthetic oligonucleotide
aauacugcuugguuuuuua

SEQ ID NO: 109062 - RNA, 19 nt, Artificial Sequence
  Description of Artificial Sequence: Synthetic oligonucleotide
acuggguacauuuuaucau

SEQ ID NO: 109063 - RNA, 19 nt, Artificial Sequence
  Description of Artificial Sequence: Synthetic oligonucleotide
uuuauuagcgcugaagagc

SEQ ID NO: 109064 - RNA, 19 nt, Artificial Sequence
  Description of Artificial Sequence: Synthetic oligonucleotide
ccaacauauuuguagauuu

SEQ ID NO: 109065 - RNA, 19 nt, Artificial Sequence
  Description of Artificial Sequence: Synthetic oligonucleotide
uuuaauaucucaugauucu

SEQ ID NO: 109066 - RNA, 19 nt, Artificial Sequence
  Description of Artificial Sequence: Synthetic oligonucleotide
ugccuccaaggauguuuaa

SEQ ID NO: 109067 - RNA, 19 nt, Artificial Sequence
  Description of Artificial Sequence: Synthetic oligonucleotide
aaaucuaguugggaaaaca

SEQ ID NO: 109068 - RNA, 19 nt, Artificial Sequence
  Description of Artificial Sequence: Synthetic oligonucleotide
aaacuucaucaagaguaaa

SEQ ID NO: 109069 - RNA, 19 nt, Artificial Sequence
  Description of Artificial Sequence: Synthetic oligonucleotide
augcaguggcaugcuaagu

SEQ ID NO: 109070 - RNA, 19 nt, Artificial Sequence
  Description of Artificial Sequence: Synthetic oligonucleotide
uacccaaauaggaguguau

SEQ ID NO: 109071 - RNA, 19 nt, Artificial Sequence
  Description of Artificial Sequence: Synthetic oligonucleotide
ugcagaggaugaaagauua

SEQ ID NO: 109072 - RNA, 19 nt, Artificial Sequence
  Description of Artificial Sequence: Synthetic oligonucleotide
aagauuaugcucuggcauc

SEQ ID NO: 109073 - RNA, 19 nt, Artificial Sequence
  Description of Artificial Sequence: Synthetic oligonucleotide
cuaacauaugauucuguag

SEQ ID NO: 109074 - RNA, 19 nt, Artificial Sequence
  Description of Artificial Sequence: Synthetic oligonucleotide
guaugaauguaaucagugu

SEQ ID NO: 109075 - RNA, 19 nt, Artificial Sequence
  Description of Artificial Sequence: Synthetic oligonucleotide
uauguuaguacaaaugucu

SEQ ID NO: 109076 - RNA, 19 nt, Artificial Sequence
  Description of Artificial Sequence: Synthetic oligonucleotide
uauccacaggcuaacccca

SEQ ID NO: 109077 - RNA, 19 nt, Artificial Sequence
  Description of Artificial Sequence: Synthetic oligonucleotide
acucuaugaaucaauagaa

SEQ ID NO: 109078 - RNA, 19 nt, Artificial Sequence
  Description of Artificial Sequence: Synthetic oligonucleotide
agaagcuaugaccuuuugc

SEQ ID NO: 109079 - RNA, 19 nt, Artificial Sequence
  Description of Artificial Sequence: Synthetic oligonucleotide
cugaaauaucaguuacuga

SEQ ID NO: 109080 - RNA, 19 nt, Artificial Sequence
  Description of Artificial Sequence: Synthetic oligonucleotide
aacaggcaggccacuuugc

SEQ ID NO: 109081 - RNA, 19 nt, Artificial Sequence
  Description of Artificial Sequence: Synthetic oligonucleotide
ccucuaaauuaccucugau

SEQ ID NO: 109082 - RNA, 19 nt, Artificial Sequence
  Description of Artificial Sequence: Synthetic oligonucleotide
uaauucuagagauuuuacc

SEQ ID NO: 109083 - RNA, 19 nt, Artificial Sequence
  Description of Artificial Sequence: Synthetic oligonucleotide
cauauuucuaaacuuuguu

SEQ ID NO: 109084 - RNA, 19 nt, Artificial Sequence
  Description of Artificial Sequence: Synthetic oligonucleotide
uuauaacucugagaagauc

SEQ ID NO: 109085 - RNA, 19 nt, Artificial Sequence
  Description of Artificial Sequence: Synthetic oligonucleotide
cauauuuauguaaaguaua

SEQ ID NO: 109086 - RNA, 19 nt, Artificial Sequence
  Description of Artificial Sequence: Synthetic oligonucleotide
auguauuugagugcagaau

SEQ ID NO: 109087 - RNA, 19 nt, Artificial Sequence
  Description of Artificial Sequence: Synthetic oligonucleotide
uuuaaauaaggcucuaccu

SEQ ID NO: 109088 - RNA, 19 nt, Artificial Sequence
  Description of Artificial Sequence: Synthetic oligonucleotide
ucaaagaccuuugcacagu

SEQ ID NO: 109089 - RNA, 19 nt, Artificial Sequence
  Description of Artificial Sequence: Synthetic oligonucleotide
uuuauuggugucauauuau

SEQ ID NO: 109090 - RNA, 19 nt, Artificial Sequence
  Description of Artificial Sequence: Synthetic oligonucleotide
uacaauauuucaauuguga

SEQ ID NO: 109091 - RNA, 19 nt, Artificial Sequence
  Description of Artificial Sequence: Synthetic oligonucleotide
aauucacauagaaaacauu

SEQ ID NO: 109092 - RNA, 19 nt, Artificial Sequence
  Description of Artificial Sequence: Synthetic oligonucleotide
uaaauuauaauguuugacu

SEQ ID NO: 109093 - RNA, 19 nt, Artificial Sequence
  Description of Artificial Sequence: Synthetic oligonucleotide
uauuauauauguguaugca

SEQ ID NO: 109094 - RNA, 19 nt, Artificial Sequence
  Description of Artificial Sequence: Synthetic oligonucleotide
auuuuacuggcucaaaacu

SEQ ID NO: 109095 - RNA, 19 nt, Artificial Sequence
  Description of Artificial Sequence: Synthetic oligonucleotide
uaccuacuucuuucucagg

SEQ ID NO: 109096 - RNA, 19 nt, Artificial Sequence
  Description of Artificial Sequence: Synthetic oligonucleotide
gcaucaaaagcauuuugag

SEQ ID NO: 109097 - RNA, 19 nt, Artificial Sequence
  Description of Artificial Sequence: Synthetic oligonucleotide
gcaggagaguauuacuaga

SEQ ID NO: 109098 - RNA, 19 nt, Artificial Sequence
  Description of Artificial Sequence: Synthetic oligonucleotide
agcuuugccaccucuccau

SEQ ID NO: 109099 - RNA, 19 nt, Artificial Sequence
  Description of Artificial Sequence: Synthetic oligonucleotide
uuuuugccuuggugcucau

SEQ ID NO: 109100 - RNA, 19 nt, Artificial Sequence
  Description of Artificial Sequence: Synthetic oligonucleotide
ucuuaauggccuaaugcac

SEQ ID NO: 109101 - RNA, 19 nt, Artificial Sequence
  Description of Artificial Sequence: Synthetic oligonucleotide
cccccaaacauggaaauau

SEQ ID NO: 109102 - RNA, 19 nt, Artificial Sequence
  Description of Artificial Sequence: Synthetic oligonucleotide
ucaccaaaaaauacuuaau

SEQ ID NO: 109103 - RNA, 19 nt, Artificial Sequence
  Description of Artificial Sequence: Synthetic oligonucleotide
uaguccaccaaaaggcaag

SEQ ID NO: 109104 - RNA, 19 nt, Artificial Sequence
  Description of Artificial Sequence: Synthetic oligonucleotide
gacugcccuuagaaauucu

SEQ ID NO: 109105 - RNA, 19 nt, Artificial Sequence
  Description of Artificial Sequence: Synthetic oligonucleotide
uagccugguuuggagauac

SEQ ID NO: 109106 - RNA, 19 nt, Artificial Sequence
  Description of Artificial Sequence: Synthetic oligonucleotide
cuaacugcucucagagaaa

SEQ ID NO: 109107 - RNA, 19 nt, Artificial Sequence
  Description of Artificial Sequence: Synthetic oligonucleotide
aguagcuuugugacauguc

SEQ ID NO: 109108 - RNA, 19 nt, Artificial Sequence
  Description of Artificial Sequence: Synthetic oligonucleotide
caugaacccauguuugcaa

SEQ ID NO: 109109 - RNA, 19 nt, Artificial Sequence
  Description of Artificial Sequence: Synthetic oligonucleotide
aucaaagaugauaaaauag

SEQ ID NO: 109110 - RNA, 19 nt, Artificial Sequence
  Description of Artificial Sequence: Synthetic oligonucleotide
gauucuuauuuuuccccca

SEQ ID NO: 109111 - RNA, 19 nt, Artificial Sequence
  Description of Artificial Sequence: Synthetic oligonucleotide
acccccgaaaauguucaau

SEQ ID NO: 109112 - RNA, 19 nt, Artificial Sequence
  Description of Artificial Sequence: Synthetic oligonucleotide
uaaugucccauguaaaacc

SEQ ID NO: 109113 - RNA, 19 nt, Artificial Sequence
  Description of Artificial Sequence: Synthetic oligonucleotide
cugcuacaaauggcagcuu

SEQ ID NO: 109114 - RNA, 19 nt, Artificial Sequence
  Description of Artificial Sequence: Synthetic oligonucleotide
uauacauagcaaugguaaa

SEQ ID NO: 109115 - RNA, 19 nt, Artificial Sequence
  Description of Artificial Sequence: Synthetic oligonucleotide
aaucaucaucuggauuuag

SEQ ID NO: 109116 - RNA, 19 nt, Artificial Sequence
  Description of Artificial Sequence: Synthetic oligonucleotide
ggaauugcucuugucauac

SEQ ID NO: 109117 - RNA, 19 nt, Artificial Sequence
  Description of Artificial Sequence: Synthetic oligonucleotide
cccccaaguuucuaagauu

SEQ ID NO: 109118 - RNA, 19 nt, Artificial Sequence
  Description of Artificial Sequence: Synthetic oligonucleotide
uuaagauucuccuuacuac

SEQ ID NO: 109119 - RNA, 19 nt, Artificial Sequence
  Description of Artificial Sequence: Synthetic oligonucleotide
cuauccuacguuuaaauau

SEQ ID NO: 109120 - RNA, 19 nt, Artificial Sequence
  Description of Artificial Sequence: Synthetic oligonucleotide
ucuuugaaaguuuguauua

SEQ ID NO: 109121 - RNA, 19 nt, Artificial Sequence
  Description of Artificial Sequence: Synthetic oligonucleotide
aaaugugaauuuuaagaaa

SEQ ID NO: 109122 - RNA, 19 nt, Artificial Sequence
  Description of Artificial Sequence: Synthetic oligonucleotide
auaauauuuauauuucugu

SEQ ID NO: 109123 - RNA, 19 nt, Artificial Sequence
  Description of Artificial Sequence: Synthetic oligonucleotide
uaaauguaaacugugaaga

SEQ ID NO: 109124 - RNA, 19 nt, Artificial Sequence
  Description of Artificial Sequence: Synthetic oligonucleotide
auaguuauaaacugaagca

SEQ ID NO: 109125 - RNA, 19 nt, Artificial Sequence
  Description of Artificial Sequence: Synthetic oligonucleotide
agauaccuggaaccaccua

SEQ ID NO: 109126 - RNA, 19 nt, Artificial Sequence
  Description of Artificial Sequence: Synthetic oligonucleotide
aaagaacuuccauuuaugg

SEQ ID NO: 109127 - RNA, 19 nt, Artificial Sequence
  Description of Artificial Sequence: Synthetic oligonucleotide
gaggauuuuuuugccccuu

SEQ ID NO: 109128 - RNA, 19 nt, Artificial Sequence
  Description of Artificial Sequence: Synthetic oligonucleotide
uguguuuggaauuauaaaa

SEQ ID NO: 109129 - RNA, 19 nt, Artificial Sequence
  Description of Artificial Sequence: Synthetic oligonucleotide
auauagguaaaaguacgua

SEQ ID NO: 109130 - RNA, 19 nt, Artificial Sequence
  Description of Artificial Sequence: Synthetic oligonucleotide
aauuaaauaauguuuuugg

SEQ ID NO: 109131 - RNA, 19 nt, Artificial Sequence
  Description of Artificial Sequence: Synthetic oligonucleotide
ggaagugaagagaaaggaa

SEQ ID NO: 109132 - RNA, 19 nt, Artificial Sequence
  Description of Artificial Sequence: Synthetic oligonucleotide
aguacagaaaacaugcaga

SEQ ID NO: 109133 - RNA, 19 nt, Artificial Sequence
  Description of Artificial Sequence: Synthetic oligonucleotide
aaagcacagaaaggaaaac

SEQ ID NO: 109134 - RNA, 19 nt, Artificial Sequence
  Description of Artificial Sequence: Synthetic oligonucleotide
ccaagguucucaugaaucu

SEQ ID NO: 109135 - RNA, 19 nt, Artificial Sequence
  Description of Artificial Sequence: Synthetic oligonucleotide
uccaaccuuaaauccugaa

SEQ ID NO: 109136 - RNA, 19 nt, Artificial Sequence
  Description of Artificial Sequence: Synthetic oligonucleotide
aacaguggcaauaaauuua

SEQ ID NO: 109137 - RNA, 19 nt, Artificial Sequence
  Description of Artificial Sequence: Synthetic oligonucleotide
aucugauguugacuugagu

SEQ ID NO: 109138 - RNA, 19 nt, Artificial Sequence
  Description of Artificial Sequence: Synthetic oligonucleotide
uaaauauaucaccacuauu

SEQ ID NO: 109139 - RNA, 19 nt, Artificial Sequence
  Description of Artificial Sequence: Synthetic oligonucleotide
ugcuggagucaugacacua

SEQ ID NO: 109140 - RNA, 19 nt, Artificial Sequence
  Description of Artificial Sequence: Synthetic oligonucleotide
aagucaaguuaaaggcuuu

SEQ ID NO: 109141 - RNA, 19 nt, Artificial Sequence
  Description of Artificial Sequence: Synthetic oligonucleotide
uguucgaaagaaugguguc

SEQ ID NO: 109142 - RNA, 19 nt, Artificial Sequence
  Description of Artificial Sequence: Synthetic oligonucleotide
caaugaagccaaaauagau

SEQ ID NO: 109143 - RNA, 19 nt, Artificial Sequence
  Description of Artificial Sequence: Synthetic oligonucleotide
ugagaucaagaaugacaau

SEQ ID NO: 109144 - RNA, 19 nt, Artificial Sequence
  Description of Artificial Sequence: Synthetic oligonucleotide
uguccaagacacagcagaa

SEQ ID NO: 109145 - RNA, 19 nt, Artificial Sequence
  Description of Artificial Sequence: Synthetic oligonucleotide
acagaaaguucaacugcuu

SEQ ID NO: 109146 - RNA, 19 nt, Artificial Sequence
  Description of Artificial Sequence: Synthetic oligonucleotide
ucguaauuggcaucaacuu

SEQ ID NO: 109147 - RNA, 19 nt, Artificial Sequence
  Description of Artificial Sequence: Synthetic oligonucleotide
ucauggaaagaaagaagcg

SEQ ID NO: 109148 - RNA, 19 nt, Artificial Sequence
  Description of Artificial Sequence: Synthetic oligonucleotide
guaugacacauugauuaaa

SEQ ID NO: 109149 - RNA, 19 nt, Artificial Sequence
  Description of Artificial Sequence: Synthetic oligonucleotide
agaucucaaaaaagccaau

SEQ ID NO: 109150 - RNA, 19 nt, Artificial Sequence
  Description of Artificial Sequence: Synthetic oligonucleotide
ucuuuguacucuugcagag

SEQ ID NO: 109151 - RNA, 19 nt, Artificial Sequence
  Description of Artificial Sequence: Synthetic oligonucleotide
gaaaauucagacuaucauc

SEQ ID NO: 109152 - RNA, 19 nt, Artificial Sequence
  Description of Artificial Sequence: Synthetic oligonucleotide
ccucaaggacauuacuagu

SEQ ID NO: 109153 - RNA, 19 nt, Artificial Sequence
  Description of Artificial Sequence: Synthetic oligonucleotide
ugacucagaaaauucaaac

SEQ ID NO: 109154 - RNA, 19 nt, Artificial Sequence
  Description of Artificial Sequence: Synthetic oligonucleotide
cuucagaaaugaaauccaa

SEQ ID NO: 109155 - RNA, 19 nt, Artificial Sequence
  Description of Artificial Sequence: Synthetic oligonucleotide
aagcuuggucuagagugaa

SEQ ID NO: 109156 - RNA, 19 nt, Artificial Sequence
  Description of Artificial Sequence: Synthetic oligonucleotide
aaaacaacaaauucaguuc

SEQ ID NO: 109157 - RNA, 19 nt, Artificial Sequence
  Description of Artificial Sequence: Synthetic oligonucleotide
cugaguauaugcaauuagu

SEQ ID NO: 109158 - RNA, 19 nt, Artificial Sequence
  Description of Artificial Sequence: Synthetic oligonucleotide
uguuugaaaagauucuuaa

SEQ ID NO: 109159 - RNA, 19 nt, Artificial Sequence
  Description of Artificial Sequence: Synthetic oligonucleotide
auagcuggcuguaaauacu

SEQ ID NO: 109160 - RNA, 19 nt, Artificial Sequence
  Description of Artificial Sequence: Synthetic oligonucleotide
ugcuugguuuuuuacuggg

SEQ ID NO: 109161 - RNA, 19 nt, Artificial Sequence
  Description of Artificial Sequence: Synthetic oligonucleotide
guacauuuuaucauuuauu

SEQ ID NO: 109162 - RNA, 19 nt, Artificial Sequence
  Description of Artificial Sequence: Synthetic oligonucleotide
uagcgcugaagagccaaca

SEQ ID NO: 109163 - RNA, 19 nt, Artificial Sequence
  Description of Artificial Sequence: Synthetic oligonucleotide
auauuuguagauuuuuaau

SEQ ID NO: 109164 - RNA, 19 nt, Artificial Sequence
  Description of Artificial Sequence: Synthetic oligonucleotide
uaucucaugauucugccuc

SEQ ID NO: 109165 - RNA, 19 nt, Artificial Sequence
  Description of Artificial Sequence: Synthetic oligonucleotide
ccaaggauguuuaaaaucu

SEQ ID NO: 109166 - RNA, 19 nt, Artificial Sequence
  Description of Artificial Sequence: Synthetic oligonucleotide
uaguugggaaaacaaacuu

SEQ ID NO: 109167 - RNA, 19 nt, Artificial Sequence
  Description of Artificial Sequence: Synthetic oligonucleotide
ucaucaagaguaaaugcag

SEQ ID NO: 109168 - RNA, 19 nt, Artificial Sequence
  Description of Artificial Sequence: Synthetic oligonucleotide
guggcaugcuaaguaccca

SEQ ID NO: 109169 - RNA, 19 nt, Artificial Sequence
  Description of Artificial Sequence: Synthetic oligonucleotide
aaauaggaguguaugcaga

SEQ ID NO: 109170 - RNA, 19 nt, Artificial Sequence
  Description of Artificial Sequence: Synthetic oligonucleotide
aggaugaaagauuaagauu

SEQ ID NO: 109171 - RNA, 19 nt, Artificial Sequence
  Description of Artificial Sequence: Synthetic oligonucleotide
uaugcucuggcaucuaaca

SEQ ID NO: 109172 - RNA, 19 nt, Artificial Sequence
  Description of Artificial Sequence: Synthetic oligonucleotide
auaugauucuguaguauga

SEQ ID NO: 109173 - RNA, 19 nt, Artificial Sequence
  Description of Artificial Sequence: Synthetic oligonucleotide
aauguaaucaguguauguu

SEQ ID NO: 109174 - RNA, 19 nt, Artificial Sequence
  Description of Artificial Sequence: Synthetic oligonucleotide
uaguacaaaugucuaucca

SEQ ID NO: 109175 - RNA, 19 nt, Artificial Sequence
  Description of Artificial Sequence: Synthetic oligonucleotide
acaggcuaaccccacucua

SEQ ID NO: 109176 - RNA, 19 nt, Artificial Sequence
  Description of Artificial Sequence: Synthetic oligonucleotide
augaaucaauagaagaagc

SEQ ID NO: 109177 - RNA, 19 nt, Artificial Sequence
  Description of Artificial Sequence: Synthetic oligonucleotide
cuaugaccuuuugcugaaa

SEQ ID NO: 109178 - RNA, 19 nt, Artificial Sequence
  Description of Artificial Sequence: Synthetic oligonucleotide
auaucaguuacugaacagg

SEQ ID NO: 109179 - RNA, 19 nt, Artificial Sequence
  Description of Artificial Sequence: Synthetic oligonucleotide
gcaggccacuuugccucua

SEQ ID NO: 109180 - RNA, 19 nt, Artificial Sequence
  Description of Artificial Sequence: Synthetic oligonucleotide
aaauuaccucugauaauuc

SEQ ID NO: 109181 - RNA, 19 nt, Artificial Sequence
  Description of Artificial Sequence: Synthetic oligonucleotide
cuagagauuuuaccauauu

SEQ ID NO: 109182 - RNA, 19 nt, Artificial Sequence
  Description of Artificial Sequence: Synthetic oligonucleotide
uucuaaacuuuguuuauaa

SEQ ID NO: 109183 - RNA, 19 nt, Artificial Sequence
  Description of Artificial Sequence: Synthetic oligonucleotide
acucugagaagaucauauu

SEQ ID NO: 109184 - RNA, 19 nt, Artificial Sequence
  Description of Artificial Sequence: Synthetic oligonucleotide
uuauguaaaguauauguau

SEQ ID NO: 109185 - RNA, 19 nt, Artificial Sequence
  Description of Artificial Sequence: Synthetic oligonucleotide
uuugagugcagaauuuaaa

SEQ ID NO: 109186 - RNA, 19 nt, Artificial Sequence
  Description of Artificial Sequence: Synthetic oligonucleotide
auaaggcucuaccucaaag

SEQ ID NO: 109187 - RNA, 19 nt, Artificial Sequence
  Description of Artificial Sequence: Synthetic oligonucleotide
gaccuuugcacaguuuauu

SEQ ID NO: 109188 - RNA, 19 nt, Artificial Sequence
  Description of Artificial Sequence: Synthetic oligonucleotide
uggugucauauuauacaau

SEQ ID NO: 109189 - RNA, 19 nt, Artificial Sequence
  Description of Artificial Sequence: Synthetic oligonucleotide
uauuucaauugugaauuca

SEQ ID NO: 109190 - RNA, 19 nt, Artificial Sequence
  Description of Artificial Sequence: Synthetic oligonucleotide
acauagaaaacauuaaauu

SEQ ID NO: 109191 - RNA, 19 nt, Artificial Sequence
  Description of Artificial Sequence: Synthetic oligonucleotide
uauaauguuugacuauuau

SEQ ID NO: 109192 - RNA, 19 nt, Artificial Sequence
  Description of Artificial Sequence: Synthetic oligonucleotide
uauauguguaugcauuuua

SEQ ID NO: 109193 - RNA, 19 nt, Artificial Sequence
  Description of Artificial Sequence: Synthetic oligonucleotide
acuggcucaaaacuaccua

SEQ ID NO: 109194 - RNA, 19 nt, Artificial Sequence
  Description of Artificial Sequence: Synthetic oligonucleotide
acuucuuucucaggcauca

SEQ ID NO: 109195 - RNA, 19 nt, Artificial Sequence
  Description of Artificial Sequence: Synthetic oligonucleotide
aaaagcauuuugagcagga

SEQ ID NO: 109196 - RNA, 19 nt, Artificial Sequence
  Description of Artificial Sequence: Synthetic oligonucleotide
agaguauuacuagagcuuu

SEQ ID NO: 109197 - RNA, 19 nt, Artificial Sequence
  Description of Artificial Sequence: Synthetic oligonucleotide
ugccaccucuccauuuuug

SEQ ID NO: 109198 - RNA, 19 nt, Artificial Sequence
  Description of Artificial Sequence: Synthetic oligonucleotide
gccuuggugcucaucuuaa

SEQ ID NO: 109199 - RNA, 19 nt, Artificial Sequence
  Description of Artificial Sequence: Synthetic oligonucleotide
auggccuaaugcaccccca

SEQ ID NO: 109200 - RNA, 19 nt, Artificial Sequence
  Description of Artificial Sequence: Synthetic oligonucleotide
aaacauggaaauaucacca

SEQ ID NO: 109201 - RNA, 19 nt, Artificial Sequence
  Description of Artificial Sequence: Synthetic oligonucleotide
aaaaaauacuuaauagucc

SEQ ID NO: 109202 - RNA, 19 nt, Artificial Sequence
  Description of Artificial Sequence: Synthetic oligonucleotide
caccaaaaggcaagacugc

SEQ ID NO: 109203 - RNA, 19 nt, Artificial Sequence
  Description of Artificial Sequence: Synthetic oligonucleotide
cccuuagaaauucuagccu

SEQ ID NO: 109204 - RNA, 19 nt, Artificial Sequence
  Description of Artificial Sequence: Synthetic oligonucleotide
ugguuuggagauacuaacu

SEQ ID NO: 109205 - RNA, 19 nt, Artificial Sequence
  Description of Artificial Sequence: Synthetic oligonucleotide
ugcucucagagaaaguagc

SEQ ID NO: 109206 - RNA, 19 nt, Artificial Sequence
  Description of Artificial Sequence: Synthetic oligonucleotide
cuuugugacaugucaugaa

SEQ ID NO: 109207 - RNA, 19 nt, Artificial Sequence
  Description of Artificial Sequence: Synthetic oligonucleotide
acccauguuugcaaucaaa

SEQ ID NO: 109208 - RNA, 19 nt, Artificial Sequence
  Description of Artificial Sequence: Synthetic oligonucleotide
agaugauaaaauagauucu

SEQ ID NO: 109209 - RNA, 19 nt, Artificial Sequence
  Description of Artificial Sequence: Synthetic oligonucleotide
uuauuuuucccccaccccc

SEQ ID NO: 109210 - RNA, 19 nt, Artificial Sequence
  Description of Artificial Sequence: Synthetic oligonucleotide
cgaaaauguucaauaaugu

SEQ ID NO: 109211 - RNA, 19 nt, Artificial Sequence
  Description of Artificial Sequence: Synthetic oligonucleotide
ucccauguaaaaccugcua

SEQ ID NO: 109212 - RNA, 19 nt, Artificial Sequence
  Description of Artificial Sequence: Synthetic oligonucleotide
acaaauggcagcuuauaca

SEQ ID NO: 109213 - RNA, 19 nt, Artificial Sequence
  Description of Artificial Sequence: Synthetic oligonucleotide
auagcaaugguaaaaucau

SEQ ID NO: 109214 - RNA, 19 nt, Artificial Sequence
  Description of Artificial Sequence: Synthetic oligonucleotide
ucaucuggauuuaggaauu

SEQ ID NO: 109215 - RNA, 19 nt, Artificial Sequence
  Description of Artificial Sequence: Synthetic oligonucleotide
ugcucuugucauaccccca

SEQ ID NO: 109216 - RNA, 19 nt, Artificial Sequence
  Description of Artificial Sequence: Synthetic oligonucleotide
aaguuucuaagauuuaaga

SEQ ID NO: 109217 - RNA, 19 nt, Artificial Sequence
  Description of Artificial Sequence: Synthetic oligonucleotide
auucuccuuacuacuaucc

SEQ ID NO: 109218 - RNA, 19 nt, Artificial Sequence
  Description of Artificial Sequence: Synthetic oligonucleotide
cuacguuuaaauaucuuug

SEQ ID NO: 109219 - RNA, 19 nt, Artificial Sequence
  Description of Artificial Sequence: Synthetic oligonucleotide
gaaaguuuguauuaaaugu

SEQ ID NO: 109220 - RNA, 19 nt, Artificial Sequence
  Description of Artificial Sequence: Synthetic oligonucleotide
ugaauuuuaagaaauaaua

SEQ ID NO: 109221 - RNA, 19 nt, Artificial Sequence
  Description of Artificial Sequence: Synthetic oligonucleotide
auuuauauuucuguaaaug

SEQ ID NO: 109222 - RNA, 19 nt, Artificial Sequence
  Description of Artificial Sequence: Synthetic oligonucleotide
guaaacugugaagauaguu

SEQ ID NO: 109223 - RNA, 19 nt, Artificial Sequence
  Description of Artificial Sequence: Synthetic oligonucleotide
uauaaacugaagcagauac

SEQ ID NO: 109224 - RNA, 19 nt, Artificial Sequence
  Description of Artificial Sequence: Synthetic oligonucleotide
ccuggaaccaccuaaagaa

SEQ ID NO: 109225 - RNA, 19 nt, Artificial Sequence
  Description of Artificial Sequence: Synthetic oligonucleotide
acuuccauuuauggaggau

SEQ ID NO: 109226 - RNA, 19 nt, Artificial Sequence
  Description of Artificial Sequence: Synthetic oligonucleotide
uuuuuuugccccuuguguu

SEQ ID NO: 109227 - RNA, 19 nt, Artificial Sequence
  Description of Artificial Sequence: Synthetic oligonucleotide
uuggaauuauaaaauauag

SEQ ID NO: 109228 - RNA, 19 nt, Artificial Sequence
  Description of Artificial Sequence: Synthetic oligonucleotide
gguaaaaguacguaauuaa

SEQ ID NO: 109229 - RNA, 19 nt, Artificial Sequence
  Description of Artificial Sequence: Synthetic oligonucleotide
aauaauguuuuugguaaaa

SEQ ID NO: 109230 - RNA, 19 nt, Artificial Sequence
  Description of Artificial Sequence: Synthetic oligonucleotide
aaauccugaaacaguggca

SEQ ID NO: 109231 - RNA, 19 nt, Artificial Sequence
  Description of Artificial Sequence: Synthetic oligonucleotide
aauaaauuuaucugauguu

SEQ ID NO: 109232 - RNA, 19 nt, Artificial Sequence
  Description of Artificial Sequence: Synthetic oligonucleotide
ugacuugaguaaauauauc

SEQ ID NO: 109233 - RNA, 19 nt, Artificial Sequence
  Description of Artificial Sequence: Synthetic oligonucleotide
caccacuauugcuggaguc

SEQ ID NO: 109234 - RNA, 19 nt, Artificial Sequence
  Description of Artificial Sequence: Synthetic oligonucleotide
caugacacuaagucaaguu

SEQ ID NO: 109235 - RNA, 19 nt, Artificial Sequence
  Description of Artificial Sequence: Synthetic oligonucleotide
uaaaggcuuuguucgaaag

SEQ ID NO: 109236 - RNA, 19 nt, Artificial Sequence
  Description of Artificial Sequence: Synthetic oligonucleotide
gaauggugucaaugaagcc

SEQ ID NO: 109237 - RNA, 19 nt, Artificial Sequence
  Description of Artificial Sequence: Synthetic oligonucleotide
caaaauagaugagaucaag

SEQ ID NO: 109238 - RNA, 19 nt, Artificial Sequence
  Description of Artificial Sequence: Synthetic oligonucleotide
gaaugacaauguccaagac

SEQ ID NO: 109239 - RNA, 19 nt, Artificial Sequence
  Description of Artificial Sequence: Synthetic oligonucleotide
cacagcagaacagaaaguu

SEQ ID NO: 109240 - RNA, 19 nt, Artificial Sequence
  Description of Artificial Sequence: Synthetic oligonucleotide
ucaacugcuucguaauugg

SEQ ID NO: 109241 - RNA, 19 nt, Artificial Sequence
  Description of Artificial Sequence: Synthetic oligonucleotide
gcaucaacuucauggaaag

SEQ ID NO: 109242 - RNA, 19 nt, Artificial Sequence
  Description of Artificial Sequence: Synthetic oligonucleotide
gaaagaagcguaugacaca

SEQ ID NO: 109243 - RNA, 19 nt, Artificial Sequence
  Description of Artificial Sequence: Synthetic oligonucleotide
auugauuaaagaucucaaa

SEQ ID NO: 109244 - RNA, 19 nt, Artificial Sequence
  Description of Artificial Sequence: Synthetic oligonucleotide
aaaagccaaucuuuguacu

SEQ ID NO: 109245 - RNA, 19 nt, Artificial Sequence
  Description of Artificial Sequence: Synthetic oligonucleotide
ucuugcagagaaaauucag

SEQ ID NO: 109246 - RNA, 19 nt, Artificial Sequence
  Description of Artificial Sequence: Synthetic oligonucleotide
gacuaucauccucaaggac

SEQ ID NO: 109247 - RNA, 19 nt, Artificial Sequence
  Description of Artificial Sequence: Synthetic oligonucleotide
cauuacuagugacucagaa

SEQ ID NO: 109248 - RNA, 19 nt, Artificial Sequence
  Description of Artificial Sequence: Synthetic oligonucleotide
aaauucaaacuucagaaau

SEQ ID NO: 109249 - RNA, 19 nt, Artificial Sequence
  Description of Artificial Sequence: Synthetic oligonucleotide
ugaaauccaaagcuugguc

SEQ ID NO: 109250 - RNA, 19 nt, Artificial Sequence
  Description of Artificial Sequence: Synthetic oligonucleotide
cuagagugaaaaacaacaa

SEQ ID NO: 109251 - RNA, 19 nt, Artificial Sequence
  Description of Artificial Sequence: Synthetic oligonucleotide
aauucaguucugaguauau

SEQ ID NO: 109252 - RNA, 19 nt, Artificial Sequence
  Description of Artificial Sequence: Synthetic oligonucleotide
ugcaauuaguguuugaaaa

SEQ ID NO: 109253 - RNA, 19 nt, Artificial Sequence
  Description of Artificial Sequence: Synthetic oligonucleotide
agauucuuaauagcuggcu

SEQ ID NO: 109254 - RNA, 19 nt, Artificial Sequence
  Description of Artificial Sequence: Synthetic oligonucleotide
uguaaauacugcuugguuu

SEQ ID NO: 109255 - RNA, 19 nt, Artificial Sequence
  Description of Artificial Sequence: Synthetic oligonucleotide
uuuuacuggguacauuuua

SEQ ID NO: 109256 - RNA, 19 nt, Artificial Sequence
  Description of Artificial Sequence: Synthetic oligonucleotide
aucauuuauuagcgcugaa

SEQ ID NO: 109257 - RNA, 19 nt, Artificial Sequence
  Description of Artificial Sequence: Synthetic oligonucleotide
agagccaacauauuuguag

SEQ ID NO: 109258 - RNA, 19 nt, Artificial Sequence
  Description of Artificial Sequence: Synthetic oligonucleotide
gauuuuuaauaucucauga

SEQ ID NO: 109259 - RNA, 19 nt, Artificial Sequence
  Description of Artificial Sequence: Synthetic oligonucleotide
auucugccuccaaggaugu

SEQ ID NO: 109260 - RNA, 19 nt, Artificial Sequence
  Description of Artificial Sequence: Synthetic oligonucleotide
uuuaaaaucuaguugggaa

SEQ ID NO: 109261 - RNA, 19 nt, Artificial Sequence
  Description of Artificial Sequence: Synthetic oligonucleotide
aaacaaacuucaucaagag

SEQ ID NO: 109262 - RNA, 19 nt, Artificial Sequence
  Description of Artificial Sequence: Synthetic oligonucleotide
guaaaugcaguggcaugcu

SEQ ID NO: 109263 - RNA, 19 nt, Artificial Sequence
  Description of Artificial Sequence: Synthetic oligonucleotide
uaaguacccaaauaggagu

SEQ ID NO: 109264 - RNA, 19 nt, Artificial Sequence
  Description of Artificial Sequence: Synthetic oligonucleotide
uguaugcagaggaugaaag

SEQ ID NO: 109265 - RNA, 19 nt, Artificial Sequence
  Description of Artificial Sequence: Synthetic oligonucleotide
gauuaagauuaugcucugg

SEQ ID NO: 109266 - RNA, 19 nt, Artificial Sequence
  Description of Artificial Sequence: Synthetic oligonucleotide
gcaucuaacauaugauucu

SEQ ID NO: 109267 - RNA, 19 nt, Artificial Sequence
  Description of Artificial Sequence: Synthetic oligonucleotide
uguaguaugaauguaauca

SEQ ID NO: 109268 - RNA, 19 nt, Artificial Sequence
  Description of Artificial Sequence: Synthetic oligonucleotide
aguguauguuaguacaaau

SEQ ID NO: 109269 - RNA, 19 nt, Artificial Sequence
  Description of Artificial Sequence: Synthetic oligonucleotide
ugucuauccacaggcuaac

SEQ ID NO: 109270 - RNA, 19 nt, Artificial Sequence
  Description of Artificial Sequence: Synthetic oligonucleotide
ccccacucuaugaaucaau

SEQ ID NO: 109271 - RNA, 19 nt, Artificial Sequence
  Description of Artificial Sequence: Synthetic oligonucleotide
uagaagaagcuaugaccuu

SEQ ID NO: 109272 - RNA, 19 nt, Artificial Sequence
  Description of Artificial Sequence: Synthetic oligonucleotide
uuugcugaaauaucaguua

SEQ ID NO: 109273 - RNA, 19 nt, Artificial Sequence
  Description of Artificial Sequence: Synthetic oligonucleotide
acugaacaggcaggccacu

SEQ ID NO: 109274 - RNA, 19 nt, Artificial Sequence
  Description of Artificial Sequence: Synthetic oligonucleotide
uuugccucuaaauuaccuc

SEQ ID NO: 109275 - RNA, 19 nt, Artificial Sequence
  Description of Artificial Sequence: Synthetic oligonucleotide
cugauaauucuagagauuu

SEQ ID NO: 109276 - RNA, 19 nt, Artificial Sequence
  Description of Artificial Sequence: Synthetic oligonucleotide
uuaccauauuucuaaacuu

SEQ ID NO: 109277 - RNA, 19 nt, Artificial Sequence
  Description of Artificial Sequence: Synthetic oligonucleotide
uuguuuauaacucugagaa

SEQ ID NO: 109278 - RNA, 19 nt, Artificial Sequence
  Description of Artificial Sequence: Synthetic oligonucleotide
agaucauauuuauguaaag

SEQ ID NO: 109279 - RNA, 19 nt, Artificial Sequence
  Description of Artificial Sequence: Synthetic oligonucleotide
guauauguauuugagugca

SEQ ID NO: 109280 - RNA, 19 nt, Artificial Sequence
  Description of Artificial Sequence: Synthetic oligonucleotide
agaauuuaaauaaggcucu

SEQ ID NO: 109281 - RNA, 19 nt, Artificial Sequence
  Description of Artificial Sequence: Synthetic oligonucleotide
uaccucaaagaccuuugca

SEQ ID NO: 109282 - RNA, 19 nt, Artificial Sequence
  Description of Artificial Sequence: Synthetic oligonucleotide
acaguuuauuggugucaua

SEQ ID NO: 109283 - RNA, 19 nt, Artificial Sequence
  Description of Artificial Sequence: Synthetic oligonucleotide
auuauacaauauuucaauu

SEQ ID NO: 109284 - RNA, 19 nt, Artificial Sequence
  Description of Artificial Sequence: Synthetic oligonucleotide
ugugaauucacauagaaaa

SEQ ID NO: 109285 - RNA, 19 nt, Artificial Sequence
  Description of Artificial Sequence: Synthetic oligonucleotide
acauuaaauuauaauguuu

SEQ ID NO: 109286 - RNA, 19 nt, Artificial Sequence
  Description of Artificial Sequence: Synthetic oligonucleotide
ugacuauuauauaugugua

SEQ ID NO: 109287 - RNA, 19 nt, Artificial Sequence
  Description of Artificial Sequence: Synthetic oligonucleotide
augcauuuuacuggcucaa

SEQ ID NO: 109288 - RNA, 19 nt, Artificial Sequence
  Description of Artificial Sequence: Synthetic oligonucleotide
aaacuaccuacuucuuucu

SEQ ID NO: 109289 - RNA, 19 nt, Artificial Sequence
  Description of Artificial Sequence: Synthetic oligonucleotide
ucaggcaucaaaagcauuu

SEQ ID NO: 109290 - RNA, 19 nt, Artificial Sequence
  Description of Artificial Sequence: Synthetic oligonucleotide
uugagcaggagaguauuac

SEQ ID NO: 109291 - RNA, 19 nt, Artificial Sequence
  Description of Artificial Sequence: Synthetic oligonucleotide
cuagagcuuugccaccucu

SEQ ID NO: 109292 - RNA, 19 nt, Artificial Sequence
  Description of Artificial Sequence: Synthetic oligonucleotide
uccauuuuugccuuggugc

SEQ ID NO: 109293 - RNA, 19 nt, Artificial Sequence
  Description of Artificial Sequence: Synthetic oligonucleotide
cucaucuuaauggccuaau

SEQ ID NO: 109294 - RNA, 19 nt, Artificial Sequence
  Description of Artificial Sequence: Synthetic oligonucleotide
ugcacccccaaacauggaa

SEQ ID NO: 109295 - RNA, 19 nt, Artificial Sequence
  Description of Artificial Sequence: Synthetic oligonucleotide
aauaucaccaaaaaauacu

SEQ ID NO: 109296 - RNA, 19 nt, Artificial Sequence
  Description of Artificial Sequence: Synthetic oligonucleotide
uuaauaguccaccaaaagg

SEQ ID NO: 109297 - RNA, 19 nt, Artificial Sequence
  Description of Artificial Sequence: Synthetic oligonucleotide
gcaagacugcccuuagaaa

SEQ ID NO: 109298 - RNA, 19 nt, Artificial Sequence
  Description of Artificial Sequence: Synthetic oligonucleotide
auucuagccugguuuggag

SEQ ID NO: 109299 - RNA, 19 nt, Artificial Sequence
  Description of Artificial Sequence: Synthetic oligonucleotide
gauacuaacugcucucaga

SEQ ID NO: 109300 - RNA, 19 nt, Artificial Sequence
  Description of Artificial Sequence: Synthetic oligonucleotide
agaaaguagcuuugugaca

SEQ ID NO: 109301 - RNA, 19 nt, Artificial Sequence
  Description of Artificial Sequence: Synthetic oligonucleotide
augucaugaacccauguuu

SEQ ID NO: 109302 - RNA, 19 nt, Artificial Sequence
  Description of Artificial Sequence: Synthetic oligonucleotide
ugcaaucaaagaugauaaa

SEQ ID NO: 109303 - RNA, 19 nt, Artificial Sequence
  Description of Artificial Sequence: Synthetic oligonucleotide
aauagauucuuauuuuucc

SEQ ID NO: 109304 - RNA, 19 nt, Artificial Sequence
  Description of Artificial Sequence: Synthetic oligonucleotide
ccccacccccgaaaauguu

SEQ ID NO: 109305 - RNA, 19 nt, Artificial Sequence
  Description of Artificial Sequence: Synthetic oligonucleotide
ucaauaaugucccauguaa

SEQ ID NO: 109306 - RNA, 19 nt, Artificial Sequence
  Description of Artificial Sequence: Synthetic oligonucleotide
aaaccugcuacaaauggca

SEQ ID NO: 109307 - RNA, 19 nt, Artificial Sequence
  Description of Artificial Sequence: Synthetic oligonucleotide
agcuuauacauagcaaugg

SEQ ID NO: 109308 - RNA, 19 nt, Artificial Sequence
  Description of Artificial Sequence: Synthetic oligonucleotide
guaaaaucaucaucuggau

SEQ ID NO: 109309 - RNA, 19 nt, Artificial Sequence
  Description of Artificial Sequence: Synthetic oligonucleotide
uuuaggaauugcucuuguc

SEQ ID NO: 109310 - RNA, 19 nt, Artificial Sequence
  Description of Artificial Sequence: Synthetic oligonucleotide
cauacccccaaguuucuaa

SEQ ID NO: 109311 - RNA, 19 nt, Artificial Sequence
  Description of Artificial Sequence: Synthetic oligonucleotide
agauuuaagauucuccuua

SEQ ID NO: 109312 - RNA, 19 nt, Artificial Sequence
  Description of Artificial Sequence: Synthetic oligonucleotide
acuacuauccuacguuuaa

SEQ ID NO: 109313 - RNA, 19 nt, Artificial Sequence
  Description of Artificial Sequence: Synthetic oligonucleotide
aauaucuuugaaaguuugu

SEQ ID NO: 109314 - RNA, 19 nt, Artificial Sequence
  Description of Artificial Sequence: Synthetic oligonucleotide
uauuaaaugugaauuuuaa

SEQ ID NO: 109315 - RNA, 19 nt, Artificial Sequence
  Description of Artificial Sequence: Synthetic oligonucleotide
agaaauaauauuuauauuu

SEQ ID NO: 109316 - RNA, 19 nt, Artificial Sequence
  Description of Artificial Sequence: Synthetic oligonucleotide
ucuguaaauguaaacugug

SEQ ID NO: 109317 - RNA, 19 nt, Artificial Sequence
  Description of Artificial Sequence: Synthetic oligonucleotide
gaagauaguuauaaacuga

SEQ ID NO: 109318 - RNA, 19 nt, Artificial Sequence
  Description of Artificial Sequence: Synthetic oligonucleotide
aagcagauaccuggaacca

SEQ ID NO: 109319 - RNA, 19 nt, Artificial Sequence
  Description of Artificial Sequence: Synthetic oligonucleotide
accuaaagaacuuccauuu

SEQ ID NO: 109320 - RNA, 19 nt, Artificial Sequence
  Description of Artificial Sequence: Synthetic oligonucleotide
uauggaggauuuuuuugcc

SEQ ID NO: 109321 - RNA, 19 nt, Artificial Sequence
  Description of Artificial Sequence: Synthetic oligonucleotide
cccuuguguuuggaauuau

SEQ ID NO: 109322 - RNA, 19 nt, Artificial Sequence
  Description of Artificial Sequence: Synthetic oligonucleotide
uaaaauauagguaaaagua

SEQ ID NO: 109323 - RNA, 19 nt, Artificial Sequence
  Description of Artificial Sequence: Synthetic oligonucleotide
acguaauuaaauaauguuu

SEQ ID NO: 109324 - RNA, 25 nt, Artificial Sequence
  Description of Artificial Sequence: Synthetic oligonucleotide
ccuacccgcgcgcaggccaaguugc

SEQ ID NO: 109325 - RNA, 25 nt, Artificial Sequence
  Description of Artificial Sequence: Synthetic oligonucleotide
cugaaucaauggagcccuccccaac

SEQ ID NO: 109326 - RNA, 25 nt, Artificial Sequence
  Description of Artificial Sequence: Synthetic oligonucleotide
cccgggcguuccccagcgaggcuuc

SEQ ID NO: 109327 - RNA, 25 nt, Artificial Sequence
  Description of Artificial Sequence: Synthetic oligonucleotide
ccuucccauccuccugaccaccggg

SEQ ID NO: 109328 - RNA, 25 nt, Artificial Sequence
  Description of Artificial Sequence: Synthetic oligonucleotide
ggcuuuucgugagcucgucucugau

SEQ ID NO: 109329 - RNA, 25 nt, Artificial Sequence
  Description of Artificial Sequence: Synthetic oligonucleotide
ucucgcgcaagagugacacacaggu

SEQ ID NO: 109330 - RNA, 25 nt, Artificial Sequence
  Description of Artificial Sequence: Synthetic oligonucleotide
uguucaaagacgcuucuggggagug

SEQ ID NO: 109331 - RNA, 25 nt, Artificial Sequence
  Description of Artificial Sequence: Synthetic oligonucleotide
gagggaagcgguuuacgagugacuu

SEQ ID NO: 109332 - RNA, 25 nt, Artificial Sequence
  Description of Artificial Sequence: Synthetic oligonucleotide
uggcuggagccucaggggcgggcac

SEQ ID NO: 109333 - RNA, 25 nt, Artificial Sequence
  Description of Artificial Sequence: Synthetic oligonucleotide
cuggcacggaacacacccugaggcc

SEQ ID NO: 109334 - RNA, 25 nt, Artificial Sequence
  Description of Artificial Sequence: Synthetic oligonucleotide
cagcccuggcugcccaggcggagcu

SEQ ID NO: 109335 - RNA, 25 nt, Artificial Sequence
  Description of Artificial Sequence: Synthetic oligonucleotide
ugccucuucucccgcggguuggugg

SEQ ID NO: 109336 - RNA, 25 nt, Artificial Sequence
  Description of Artificial Sequence: Synthetic oligonucleotide
gacccgcucaguacggaguugggga

SEQ ID NO: 109337 - RNA, 25 nt, Artificial Sequence
  Description of Artificial Sequence: Synthetic oligonucleotide
aagcucuuucacuucggaggauugc

SEQ ID NO: 109338 - RNA, 25 nt, Artificial Sequence
  Description of Artificial Sequence: Synthetic oligonucleotide
cucaacaaccaugcugggcaucugg

SEQ ID NO: 109339 - RNA, 25 nt, Artificial Sequence
  Description of Artificial Sequence: Synthetic oligonucleotide
gacccuccuaccucugguucuuacg

SEQ ID NO: 109340 - RNA, 25 nt, Artificial Sequence
  Description of Artificial Sequence: Synthetic oligonucleotide
gucuguugcuagauuaucguccaaa

SEQ ID NO: 109341 - RNA, 25 nt, Artificial Sequence
  Description of Artificial Sequence: Synthetic oligonucleotide
aaguguuaaugcccaagugacugac

SEQ ID NO: 109342 - RNA, 25 nt, Artificial Sequence
  Description of Artificial Sequence: Synthetic oligonucleotide
caucaacuccaagggauuggaauug

SEQ ID NO: 109343 - RNA, 25 nt, Artificial Sequence
  Description of Artificial Sequence: Synthetic oligonucleotide
gaggaagacuguuacuacaguugag

SEQ ID NO: 109344 - RNA, 25 nt, Artificial Sequence
  Description of Artificial Sequence: Synthetic oligonucleotide
gacucagaacuuggaaggccugcau

SEQ ID NO: 109345 - RNA, 25 nt, Artificial Sequence
  Description of Artificial Sequence: Synthetic oligonucleotide
ucaugauggccaauucugccauaag

SEQ ID NO: 109346 - RNA, 25 nt, Artificial Sequence
  Description of Artificial Sequence: Synthetic oligonucleotide
gcccuguccuccaggugaaaggaaa

SEQ ID NO: 109347 - RNA, 25 nt, Artificial Sequence
  Description of Artificial Sequence: Synthetic oligonucleotide
agcuagggacugcacagucaauggg

SEQ ID NO: 109348 - RNA, 25 nt, Artificial Sequence
  Description of Artificial Sequence: Synthetic oligonucleotide
ggaugaaccagacugcgugcccugc

SEQ ID NO: 109349 - RNA, 25 nt, Artificial Sequence
  Description of Artificial Sequence: Synthetic oligonucleotide
ccaagaagggaaggaguacacagac

SEQ ID NO: 109350 - RNA, 25 nt, Artificial Sequence
  Description of Artificial Sequence: Synthetic oligonucleotide
caaagcccauuuuucuuccaaaugc

SEQ ID NO: 109351 - RNA, 25 nt, Artificial Sequence
  Description of Artificial Sequence: Synthetic oligonucleotide
cagaagauguagauugugugaugaa

SEQ ID NO: 109352 - RNA, 25 nt, Artificial Sequence
  Description of Artificial Sequence: Synthetic oligonucleotide
aggacaugaugugaacauggaauca

SEQ ID NO: 109353 - RNA, 25 nt, Artificial Sequence
  Description of Artificial Sequence: Synthetic oligonucleotide
aucaaggaaugcacacucaccagca

SEQ ID NO: 109354 - RNA, 25 nt, Artificial Sequence
  Description of Artificial Sequence: Synthetic oligonucleotide
aacaccaagugcaaagaggaaggau

SEQ ID NO: 109355 - RNA, 25 nt, Artificial Sequence
  Description of Artificial Sequence: Synthetic oligonucleotide
uccagaucuaacuugggguggcuuu

SEQ ID NO: 109356 - RNA, 25 nt, Artificial Sequence
  Description of Artificial Sequence: Synthetic oligonucleotide
ugucuucuucuuuugccaauuccac

SEQ ID NO: 109357 - RNA, 25 nt, Artificial Sequence
  Description of Artificial Sequence: Synthetic oligonucleotide
cuaauuguuugggugaagagaaagg

SEQ ID NO: 109358 - RNA, 25 nt, Artificial Sequence
  Description of Artificial Sequence: Synthetic oligonucleotide
gaaguacagaaaacaugcagaaagc

SEQ ID NO: 109359 - RNA, 25 nt, Artificial Sequence
  Description of Artificial Sequence: Synthetic oligonucleotide
cacagaaaggaaaaccaagguucuc

SEQ ID NO: 109360 - RNA, 25 nt, Artificial Sequence
  Description of Artificial Sequence: Synthetic oligonucleotide
caugaaucuccaaccuuaaauccug

SEQ ID NO: 109361 - RNA, 25 nt, Artificial Sequence
  Description of Artificial Sequence: Synthetic oligonucleotide
gaaacaguggcaauaaauuuaucug

SEQ ID NO: 109362 - RNA, 25 nt, Artificial Sequence
  Description of Artificial Sequence: Synthetic oligonucleotide
gauguugacuugaguaaauauauca

SEQ ID NO: 109363 - RNA, 25 nt, Artificial Sequence
  Description of Artificial Sequence: Synthetic oligonucleotide
accacuauugcuggagucaugacac

SEQ ID NO: 109364 - RNA, 25 nt, Artificial Sequence
  Description of Artificial Sequence: Synthetic oligonucleotide
cuaagucaaguuaaaggcuuuguuc

SEQ ID NO: 109365 - RNA, 25 nt, Artificial Sequence
  Description of Artificial Sequence: Synthetic oligonucleotide
cgaaagaauggugucaaugaagcca

SEQ ID NO: 109366 - RNA, 25 nt, Artificial Sequence
  Description of Artificial Sequence: Synthetic oligonucleotide
aaaauagaugagaucaagaaugaca

SEQ ID NO: 109367 - RNA, 25 nt, Artificial Sequence
  Description of Artificial Sequence: Synthetic oligonucleotide
aauguccaagacacagcagaacaga

SEQ ID NO: 109368 - RNA, 25 nt, Artificial Sequence
  Description of Artificial Sequence: Synthetic oligonucleotide
aaaguucaacugcuucguaauuggc

SEQ ID NO: 109369 - RNA, 25 nt, Artificial Sequence
  Description of Artificial Sequence: Synthetic oligonucleotide
caucaacuucauggaaagaaagaag

SEQ ID NO: 109370 - RNA, 25 nt, Artificial Sequence
  Description of Artificial Sequence: Synthetic oligonucleotide
gcguaugacacauugauuaaagauc

SEQ ID NO: 109371 - RNA, 25 nt, Artificial Sequence
  Description of Artificial Sequence: Synthetic oligonucleotide
cucaaaaaagccaaucuuuguacuc

SEQ ID NO: 109372 - RNA, 25 nt, Artificial Sequence
  Description of Artificial Sequence: Synthetic oligonucleotide
cuugcagagaaaauucagacuauca

SEQ ID NO: 109373 - RNA, 25 nt, Artificial Sequence
  Description of Artificial Sequence: Synthetic oligonucleotide
auccucaaggacauuacuagugacu

SEQ ID NO: 109374 - RNA, 25 nt, Artificial Sequence
  Description of Artificial Sequence: Synthetic oligonucleotide
ucagaaaauucaaacuucagaaaug

SEQ ID NO: 109375 - RNA, 25 nt, Artificial Sequence
  Description of Artificial Sequence: Synthetic oligonucleotide
gaaauccaaagcuuggucuagagug

SEQ ID NO: 109376 - RNA, 25 nt, Artificial Sequence
  Description of Artificial Sequence: Synthetic oligonucleotide
gaaaaacaacaaauucaguucugag

SEQ ID NO: 109377 - RNA, 25 nt, Artificial Sequence
  Description of Artificial Sequence: Synthetic oligonucleotide
guauaugcaauuaguguuugaaaag

SEQ ID NO: 109378 - RNA, 25 nt, Artificial Sequence
  Description of Artificial Sequence: Synthetic oligonucleotide
gauucuuaauagcuggcuguaaaua

SEQ ID NO: 109379 - RNA, 25 nt, Artificial Sequence
  Description of Artificial Sequence: Synthetic oligonucleotide
acugcuugguuuuuuacuggguaca

SEQ ID NO: 109380 - RNA, 25 nt, Artificial Sequence
  Description of Artificial Sequence: Synthetic oligonucleotide
auuuuaucauuuauuagcgcugaag

SEQ ID NO: 109381 - RNA, 25 nt, Artificial Sequence
  Description of Artificial Sequence: Synthetic oligonucleotide
gagccaacauauuuguagauuuuua

SEQ ID NO: 109382 - RNA, 25 nt, Artificial Sequence
  Description of Artificial Sequence: Synthetic oligonucleotide
aauaucucaugauucugccuccaag

SEQ ID NO: 109383 - RNA, 25 nt, Artificial Sequence
  Description of Artificial Sequence: Synthetic oligonucleotide
ggauguuuaaaaucuaguugggaaa

SEQ ID NO: 109384 - RNA, 25 nt, Artificial Sequence
  Description of Artificial Sequence: Synthetic oligonucleotide
aacaaacuucaucaagaguaaaugc

SEQ ID NO: 109385 - RNA, 25 nt, Artificial Sequence
  Description of Artificial Sequence: Synthetic oligonucleotide
caguggcaugcuaaguacccaaaua

SEQ ID NO: 109386 - RNA, 25 nt, Artificial Sequence
  Description of Artificial Sequence: Synthetic oligonucleotide
aggaguguaugcagaggaugaaaga

SEQ ID NO: 109387 - RNA, 25 nt, Artificial Sequence
  Description of Artificial Sequence: Synthetic oligonucleotide
auuaagauuaugcucuggcaucuaa

SEQ ID NO: 109388 - RNA, 25 nt, Artificial Sequence
  Description of Artificial Sequence: Synthetic oligonucleotide
acauaugauucuguaguaugaaugu

SEQ ID NO: 109389 - RNA, 25 nt, Artificial Sequence
  Description of Artificial Sequence: Synthetic oligonucleotide
uaaucaguguauguuaguacaaaug

SEQ ID NO: 109390 - RNA, 25 nt, Artificial Sequence
  Description of Artificial Sequence: Synthetic oligonucleotide
gucuauccacaggcuaaccccacuc

SEQ ID NO: 109391 - RNA, 25 nt, Artificial Sequence
  Description of Artificial Sequence: Synthetic oligonucleotide
cuaugaaucaauagaagaagcuaug

SEQ ID NO: 109392 - RNA, 25 nt, Artificial Sequence
  Description of Artificial Sequence: Synthetic oligonucleotide
gaccuuuugcugaaauaucaguuac

SEQ ID NO: 109393 - RNA, 25 nt, Artificial Sequence
  Description of Artificial Sequence: Synthetic oligonucleotide
cugaacaggcaggccacuuugccuc

SEQ ID NO: 109394 - RNA, 25 nt, Artificial Sequence
  Description of Artificial Sequence: Synthetic oligonucleotide
cuaaauuaccucugauaauucuaga

SEQ ID NO: 109395 - RNA, 25 nt, Artificial Sequence
  Description of Artificial Sequence: Synthetic oligonucleotide
agauuuuaccauauuucuaaacuuu

SEQ ID NO: 109396 - RNA, 25 nt, Artificial Sequence
  Description of Artificial Sequence: Synthetic oligonucleotide
uguuuauaacucugagaagaucaua

SEQ ID NO: 109397 - RNA, 25 nt, Artificial Sequence
  Description of Artificial Sequence: Synthetic oligonucleotide
auuuauguaaaguauauguauuuga

SEQ ID NO: 109398 - RNA, 25 nt, Artificial Sequence
  Description of Artificial Sequence: Synthetic oligonucleotide
agugcagaauuuaaauaaggcucua

SEQ ID NO: 109399 - RNA, 25 nt, Artificial Sequence
  Description of Artificial Sequence: Synthetic oligonucleotide
accucaaagaccuuugcacaguuua

SEQ ID NO: 109400 - RNA, 25 nt, Artificial Sequence
  Description of Artificial Sequence: Synthetic oligonucleotide
auuggugucauauuauacaauauuu

SEQ ID NO: 109401 - RNA, 25 nt, Artificial Sequence
  Description of Artificial Sequence: Synthetic oligonucleotide
ucaauugugaauucacauagaaaac

SEQ ID NO: 109402 - RNA, 25 nt, Artificial Sequence
  Description of Artificial Sequence: Synthetic oligonucleotide
cauuaaauuauaauguuugacuauu

SEQ ID NO: 109403 - RNA, 25 nt, Artificial Sequence
  Description of Artificial Sequence: Synthetic oligonucleotide
uauauauguguaugcauuuuacugg

SEQ ID NO: 109404 - RNA, 25 nt, Artificial Sequence
  Description of Artificial Sequence: Synthetic oligonucleotide
gcucaaaacuaccuacuucuuucuc

SEQ ID NO: 109405 - RNA, 25 nt, Artificial Sequence
  Description of Artificial Sequence: Synthetic oligonucleotide
caggcaucaaaagcauuuugagcag

SEQ ID NO: 109406 - RNA, 25 nt, Artificial Sequence
  Description of Artificial Sequence: Synthetic oligonucleotide
ggagaguauuacuagagcuuugcca

SEQ ID NO: 109407 - RNA, 25 nt, Artificial Sequence
  Description of Artificial Sequence: Synthetic oligonucleotide
accucuccauuuuugccuuggugcu

SEQ ID NO: 109408 - RNA, 25 nt, Artificial Sequence
  Description of Artificial Sequence: Synthetic oligonucleotide
ucaucuuaauggccuaaugcacccc

SEQ ID NO: 109409 - RNA, 25 nt, Artificial Sequence
  Description of Artificial Sequence: Synthetic oligonucleotide
ccaaacauggaaauaucaccaaaaa

SEQ ID NO: 109410 - RNA, 25 nt, Artificial Sequence
  Description of Artificial Sequence: Synthetic oligonucleotide
aauacuuaauaguccaccaaaaggc

SEQ ID NO: 109411 - RNA, 25 nt, Artificial Sequence
  Description of Artificial Sequence: Synthetic oligonucleotide
caagacugcccuuagaaauucuagc

SEQ ID NO: 109412 - RNA, 25 nt, Artificial Sequence
  Description of Artificial Sequence: Synthetic oligonucleotide
ccugguuuggagauacuaacugcuc

SEQ ID NO: 109413 - RNA, 25 nt, Artificial Sequence
  Description of Artificial Sequence: Synthetic oligonucleotide
cucagagaaaguagcuuugugacau

SEQ ID NO: 109414 - RNA, 25 nt, Artificial Sequence
  Description of Artificial Sequence: Synthetic oligonucleotide
ugucaugaacccauguuugcaauca

SEQ ID NO: 109415 - RNA, 25 nt, Artificial Sequence
  Description of Artificial Sequence: Synthetic oligonucleotide
aaagaugauaaaauagauucuuauu

SEQ ID NO: 109416 - RNA, 25 nt, Artificial Sequence
  Description of Artificial Sequence: Synthetic oligonucleotide
uuuucccccacccccgaaaauguuc

SEQ ID NO: 109417 - RNA, 25 nt, Artificial Sequence
  Description of Artificial Sequence: Synthetic oligonucleotide
caauaaugucccauguaaaaccugc

SEQ ID NO: 109418 - RNA, 25 nt, Artificial Sequence
  Description of Artificial Sequence: Synthetic oligonucleotide
cuacaaauggcagcuuauacauagc

SEQ ID NO: 109419 - RNA, 25 nt, Artificial Sequence
  Description of Artificial Sequence: Synthetic oligonucleotide
caaugguaaaaucaucaucuggauu

SEQ ID NO: 109420 - RNA, 25 nt, Artificial Sequence
  Description of Artificial Sequence: Synthetic oligonucleotide
uuaggaauugcucuugucauacccc

SEQ ID NO: 109421 - RNA, 25 nt, Artificial Sequence
  Description of Artificial Sequence: Synthetic oligonucleotide
ccaaguuucuaagauuuaagauucu

SEQ ID NO: 109422 - RNA, 25 nt, Artificial Sequence
  Description of Artificial Sequence: Synthetic oligonucleotide
uccuuacuacuauccuacguuuaaa

SEQ ID NO: 109423 - RNA, 25 nt, Artificial Sequence
  Description of Artificial Sequence: Synthetic oligonucleotide
auaucuuugaaaguuuguauuaaau

SEQ ID NO: 109424 - RNA, 25 nt, Artificial Sequence
  Description of Artificial Sequence: Synthetic oligonucleotide
ugugaauuuuaagaaauaauauuua

SEQ ID NO: 109425 - RNA, 25 nt, Artificial Sequence
  Description of Artificial Sequence: Synthetic oligonucleotide
auauuucuguaaauguaaacuguga

SEQ ID NO: 109426 - RNA, 25 nt, Artificial Sequence
  Description of Artificial Sequence: Synthetic oligonucleotide
aagauaguuauaaacugaagcagau

SEQ ID NO: 109427 - RNA, 25 nt, Artificial Sequence
  Description of Artificial Sequence: Synthetic oligonucleotide
uaccuggaaccaccuaaagaacuuc

SEQ ID NO: 109428 - RNA, 25 nt, Artificial Sequence
  Description of Artificial Sequence: Synthetic oligonucleotide
ccauuuauggaggauuuuuuugccc

SEQ ID NO: 109429 - RNA, 25 nt, Artificial Sequence
  Description of Artificial Sequence: Synthetic oligonucleotide
ccuuguguuuggaauuauaaaauau

SEQ ID NO: 109430 - RNA, 25 nt, Artificial Sequence
  Description of Artificial Sequence: Synthetic oligonucleotide
uagguaaaaguacguaauuaaauaa

SEQ ID NO: 109431 - RNA, 25 nt, Artificial Sequence
  Description of Artificial Sequence: Synthetic oligonucleotide
aacaccaagugcaaagaggaaguga

SEQ ID NO: 109432 - RNA, 25 nt, Artificial Sequence
  Description of Artificial Sequence: Synthetic oligonucleotide
aagagaaaggaaguacagaaaacau

SEQ ID NO: 109433 - RNA, 25 nt, Artificial Sequence
  Description of Artificial Sequence: Synthetic oligonucleotide
ugcagaaagcacagaaaggaaaacc

SEQ ID NO: 109434 - RNA, 25 nt, Artificial Sequence
  Description of Artificial Sequence: Synthetic oligonucleotide
caagguucucaugaaucuccaaccu

SEQ ID NO: 109435 - RNA, 25 nt, Artificial Sequence
  Description of Artificial Sequence: Synthetic oligonucleotide
uuaaauccugaaacaguggcaauaa

SEQ ID NO: 109436 - RNA, 25 nt, Artificial Sequence
  Description of Artificial Sequence: Synthetic oligonucleotide
aauuuaucugauguugacuugagua

SEQ ID NO: 109437 - RNA, 25 nt, Artificial Sequence
  Description of Artificial Sequence: Synthetic oligonucleotide
aaauauaucaccacuauugcuggag

SEQ ID NO: 109438 - RNA, 25 nt, Artificial Sequence
  Description of Artificial Sequence: Synthetic oligonucleotide
gucaugacacuaagucaaguuaaag

SEQ ID NO: 109439 - RNA, 25 nt, Artificial Sequence
  Description of Artificial Sequence: Synthetic oligonucleotide
ggcuuuguucgaaagaaugguguca

SEQ ID NO: 109440 - RNA, 25 nt, Artificial Sequence
  Description of Artificial Sequence: Synthetic oligonucleotide
aaugaagccaaaauagaugagauca

SEQ ID NO: 109441 - RNA, 25 nt, Artificial Sequence
  Description of Artificial Sequence: Synthetic oligonucleotide
aagaaugacaauguccaagacacag

SEQ ID NO: 109442 - RNA, 25 nt, Artificial Sequence
  Description of Artificial Sequence: Synthetic oligonucleotide
gcagaacagaaaguucaacugcuuc

SEQ ID NO: 109443 - RNA, 25 nt, Artificial Sequence
  Description of Artificial Sequence: Synthetic oligonucleotide
cguaauuggcaucaacuucauggaa

SEQ ID NO: 109444 - RNA, 25 nt, Artificial Sequence
  Description of Artificial Sequence: Synthetic oligonucleotide
aagaaagaagcguaugacacauuga

SEQ ID NO: 109445 - RNA, 25 nt, Artificial Sequence
  Description of Artificial Sequence: Synthetic oligonucleotide
auuaaagaucucaaaaaagccaauc

SEQ ID NO: 109446 - RNA, 25 nt, Artificial Sequence
  Description of Artificial Sequence: Synthetic oligonucleotide
cuuuguacucuugcagagaaaauuc

SEQ ID NO: 109447 - RNA, 25 nt, Artificial Sequence
  Description of Artificial Sequence: Synthetic oligonucleotide
cagacuaucauccucaaggacauua

SEQ ID NO: 109448 - RNA, 25 nt, Artificial Sequence
  Description of Artificial Sequence: Synthetic oligonucleotide
acuagugacucagaaaauucaaacu

SEQ ID NO: 109449 - RNA, 25 nt, Artificial Sequence
  Description of Artificial Sequence: Synthetic oligonucleotide
uucagaaaugaaauccaaagcuugg

SEQ ID NO: 109450 - RNA, 25 nt, Artificial Sequence
  Description of Artificial Sequence: Synthetic oligonucleotide
gucuagagugaaaaacaacaaauuc

SEQ ID NO: 109451 - RNA, 25 nt, Artificial Sequence
  Description of Artificial Sequence: Synthetic oligonucleotide
caguucugaguauaugcaauuagug

SEQ ID NO: 109452 - RNA, 25 nt, Artificial Sequence
  Description of Artificial Sequence: Synthetic oligonucleotide
guuugaaaagauucuuaauagcugg

SEQ ID NO: 109453 - RNA, 25 nt, Artificial Sequence
  Description of Artificial Sequence: Synthetic oligonucleotide
gcuguaaauacugcuugguuuuuua

SEQ ID NO: 109454 - RNA, 25 nt, Artificial Sequence
  Description of Artificial Sequence: Synthetic oligonucleotide
acuggguacauuuuaucauuuauua

SEQ ID NO: 109455 - RNA, 25 nt, Artificial Sequence
  Description of Artificial Sequence: Synthetic oligonucleotide
agcgcugaagagccaacauauuugu

SEQ ID NO: 109456 - RNA, 25 nt, Artificial Sequence
  Description of Artificial Sequence: Synthetic oligonucleotide
uagauuuuuaauaucucaugauucu

SEQ ID NO: 109457 - RNA, 25 nt, Artificial Sequence
  Description of Artificial Sequence: Synthetic oligonucleotide
ugccuccaaggauguuuaaaaucua

SEQ ID NO: 109458 - RNA, 25 nt, Artificial Sequence
  Description of Artificial Sequence: Synthetic oligonucleotide
aguugggaaaacaaacuucaucaag

SEQ ID NO: 109459 - RNA, 25 nt, Artificial Sequence
  Description of Artificial Sequence: Synthetic oligonucleotide
gaguaaaugcaguggcaugcuaagu

SEQ ID NO: 109460 - RNA, 25 nt, Artificial Sequence
  Description of Artificial Sequence: Synthetic oligonucleotide
uacccaaauaggaguguaugcagag

SEQ ID NO: 109461 - RNA, 25 nt, Artificial Sequence
  Description of Artificial Sequence: Synthetic oligonucleotide
ggaugaaagauuaagauuaugcucu

SEQ ID NO: 109462 - RNA, 25 nt, Artificial Sequence
  Description of Artificial Sequence: Synthetic oligonucleotide
uggcaucuaacauaugauucuguag

SEQ ID NO: 109463 - RNA, 25 nt, Artificial Sequence
  Description of Artificial Sequence: Synthetic oligonucleotide
guaugaauguaaucaguguauguua

SEQ ID NO: 109464 - RNA, 25 nt, Artificial Sequence
  Description of Artificial Sequence: Synthetic oligonucleotide
aguacaaaugucuauccacaggcua

SEQ ID NO: 109465 - RNA, 25 nt, Artificial Sequence
  Description of Artificial Sequence: Synthetic oligonucleotide
aaccccacucuaugaaucaauagaa

SEQ ID NO: 109466 - RNA, 25 nt, Artificial Sequence
  Description of Artificial Sequence: Synthetic oligonucleotide
agaagcuaugaccuuuugcugaaau

SEQ ID NO: 109467 - RNA, 25 nt, Artificial Sequence
  Description of Artificial Sequence: Synthetic oligonucleotide
uaucaguuacugaacaggcaggcca

SEQ ID NO: 109468 - RNA, 25 nt, Artificial Sequence
  Description of Artificial Sequence: Synthetic oligonucleotide
acuuugccucuaaauuaccucugau

SEQ ID NO: 109469 - RNA, 25 nt, Artificial Sequence
  Description of Artificial Sequence: Synthetic oligonucleotide
uaauucuagagauuuuaccauauuu

SEQ ID NO: 109470 - RNA, 25 nt, Artificial Sequence
  Description of Artificial Sequence: Synthetic oligonucleotide
ucuaaacuuuguuuauaacucugag

SEQ ID NO: 109471 - RNA, 25 nt, Artificial Sequence
  Description of Artificial Sequence: Synthetic oligonucleotide
gaagaucauauuuauguaaaguaua

SEQ ID NO: 109472 - RNA, 25 nt, Artificial Sequence
  Description of Artificial Sequence: Synthetic oligonucleotide
auguauuugagugcagaauuuaaau

SEQ ID NO: 109473 - RNA, 25 nt, Artificial Sequence
  Description of Artificial Sequence: Synthetic oligonucleotide
uaaggcucuaccucaaagaccuuug

SEQ ID NO: 109474 - RNA, 25 nt, Artificial Sequence
  Description of Artificial Sequence: Synthetic oligonucleotide
gcacaguuuauuggugucauauuau

SEQ ID NO: 109475 - RNA, 25 nt, Artificial Sequence
  Description of Artificial Sequence: Synthetic oligonucleotide
uacaauauuucaauugugaauucac

SEQ ID NO: 109476 - RNA, 25 nt, Artificial Sequence
  Description of Artificial Sequence: Synthetic oligonucleotide
cauagaaaacauuaaauuauaaugu

SEQ ID NO: 109477 - RNA, 25 nt, Artificial Sequence
  Description of Artificial Sequence: Synthetic oligonucleotide
uuugacuauuauauauguguaugca

SEQ ID NO: 109478 - RNA, 25 nt, Artificial Sequence
  Description of Artificial Sequence: Synthetic oligonucleotide
auuuuacuggcucaaaacuaccuac

SEQ ID NO: 109479 - RNA, 25 nt, Artificial Sequence
  Description of Artificial Sequence: Synthetic oligonucleotide
cuucuuucucaggcaucaaaagcau

SEQ ID NO: 109480 - RNA, 25 nt, Artificial Sequence
  Description of Artificial Sequence: Synthetic oligonucleotide
uuuugagcaggagaguauuacuaga

SEQ ID NO: 109481 - RNA, 25 nt, Artificial Sequence
  Description of Artificial Sequence: Synthetic oligonucleotide
agcuuugccaccucuccauuuuugc

SEQ ID NO: 109482 - RNA, 25 nt, Artificial Sequence
  Description of Artificial Sequence: Synthetic oligonucleotide
ccuuggugcucaucuuaauggccua

SEQ ID NO: 109483 - RNA, 25 nt, Artificial Sequence
  Description of Artificial Sequence: Synthetic oligonucleotide
aaugcacccccaaacauggaaauau

SEQ ID NO: 109484 - RNA, 25 nt, Artificial Sequence
  Description of Artificial Sequence: Synthetic oligonucleotide
ucaccaaaaaauacuuaauagucca

SEQ ID NO: 109485 - RNA, 25 nt, Artificial Sequence
  Description of Artificial Sequence: Synthetic oligonucleotide
accaaaaggcaagacugcccuuaga

SEQ ID NO: 109486 - RNA, 25 nt, Artificial Sequence
  Description of Artificial Sequence: Synthetic oligonucleotide
aaauucuagccugguuuggagauac

SEQ ID NO: 109487 - RNA, 25 nt, Artificial Sequence
  Description of Artificial Sequence: Synthetic oligonucleotide
cuaacugcucucagagaaaguagcu

SEQ ID NO: 109488 - RNA, 25 nt, Artificial Sequence
  Description of Artificial Sequence: Synthetic oligonucleotide
uuugugacaugucaugaacccaugu

SEQ ID NO: 109489 - RNA, 25 nt, Artificial Sequence
  Description of Artificial Sequence: Synthetic oligonucleotide
uuugcaaucaaagaugauaaaauag

SEQ ID NO: 109490 - RNA, 25 nt, Artificial Sequence
  Description of Artificial Sequence: Synthetic oligonucleotide
gauucuuauuuuucccccacccccg

SEQ ID NO: 109491 - RNA, 25 nt, Artificial Sequence
  Description of Artificial Sequence: Synthetic oligonucleotide
gaaaauguucaauaaugucccaugu

SEQ ID NO: 109492 - RNA, 25 nt, Artificial Sequence
  Description of Artificial Sequence: Synthetic oligonucleotide
uaaaaccugcuacaaauggcagcuu

SEQ ID NO: 109493 - RNA, 25 nt, Artificial Sequence
  Description of Artificial Sequence: Synthetic oligonucleotide
uauacauagcaaugguaaaaucauc

SEQ ID NO: 109494 - RNA, 25 nt, Artificial Sequence
  Description of Artificial Sequence: Synthetic oligonucleotide
caucuggauuuaggaauugcucuug

SEQ ID NO: 109495 - RNA, 25 nt, Artificial Sequence
  Description of Artificial Sequence: Synthetic oligonucleotide
gucauacccccaaguuucuaagauu

SEQ ID NO: 109496 - RNA, 25 nt, Artificial Sequence
  Description of Artificial Sequence: Synthetic oligonucleotide
uuaagauucuccuuacuacuauccu

SEQ ID NO: 109497 - RNA, 25 nt, Artificial Sequence
  Description of Artificial Sequence: Synthetic oligonucleotide
uacguuuaaauaucuuugaaaguuu

SEQ ID NO: 109498 - RNA, 25 nt, Artificial Sequence
  Description of Artificial Sequence: Synthetic oligonucleotide
uguauuaaaugugaauuuuaagaaa

SEQ ID NO: 109499 - RNA, 25 nt, Artificial Sequence
  Description of Artificial Sequence: Synthetic oligonucleotide
auaauauuuauauuucuguaaaugu

SEQ ID NO: 109500 - RNA, 25 nt, Artificial Sequence
  Description of Artificial Sequence: Synthetic oligonucleotide
uaaacugugaagauaguuauaaacu

SEQ ID NO: 109501 - RNA, 25 nt, Artificial Sequence
  Description of Artificial Sequence: Synthetic oligonucleotide
ugaagcagauaccuggaaccaccua

SEQ ID NO: 109502 - RNA, 25 nt, Artificial Sequence
  Description of Artificial Sequence: Synthetic oligonucleotide
aaagaacuuccauuuauggaggauu

SEQ ID NO: 109503 - RNA, 25 nt, Artificial Sequence
  Description of Artificial Sequence: Synthetic oligonucleotide
uuuuuugccccuuguguuuggaauu

SEQ ID NO: 109504 - RNA, 25 nt, Artificial Sequence
  Description of Artificial Sequence: Synthetic oligonucleotide
uauaaaauauagguaaaaguacgua

SEQ ID NO: 109505 - RNA, 25 nt, Artificial Sequence
  Description of Artificial Sequence: Synthetic oligonucleotide
aauuaaauaauguuuuugguaaaaa

SEQ ID NO: 109506 - RNA, 25 nt, Artificial Sequence
  Description of Artificial Sequence: Synthetic oligonucleotide
gcccuguccuccagaugugaacaug

SEQ ID NO: 109507 - RNA, 25 nt, Artificial Sequence
  Description of Artificial Sequence: Synthetic oligonucleotide
ggaaucaucaaggaaugcacacuca

SEQ ID NO: 109508 - RNA, 25 nt, Artificial Sequence
  Description of Artificial Sequence: Synthetic oligonucleotide
accagcaacaccaagugcaaagagg

SEQ ID NO: 109509 - RNA, 25 nt, Artificial Sequence
  Description of Artificial Sequence: Synthetic oligonucleotide
gaaggauccagaucuaacuuggggu

SEQ ID NO: 109510 - RNA, 25 nt, Artificial Sequence
  Description of Artificial Sequence: Synthetic oligonucleotide
uggcuuugucuucuucuuuugccaa

SEQ ID NO: 109511 - RNA, 25 nt, Artificial Sequence
  Description of Artificial Sequence: Synthetic oligonucleotide
auuccacuaauuguuugggugaaga

SEQ ID NO: 109512 - RNA, 25 nt, Artificial Sequence
  Description of Artificial Sequence: Synthetic oligonucleotide
agaaaggaaguacagaaaacaugca

SEQ ID NO: 109513 - RNA, 25 nt, Artificial Sequence
  Description of Artificial Sequence: Synthetic oligonucleotide
agaaagcacagaaaggaaaaccaag

SEQ ID NO: 109514 - RNA, 25 nt, Artificial Sequence
  Description of Artificial Sequence: Synthetic oligonucleotide
gguucucaugaaucuccaaccuuaa

SEQ ID NO: 109515 - RNA, 25 nt, Artificial Sequence
  Description of Artificial Sequence: Synthetic oligonucleotide
aauccugaaacaguggcaauaaauu

SEQ ID NO: 109516 - RNA, 25 nt, Artificial Sequence
  Description of Artificial Sequence: Synthetic oligonucleotide
uuaucugauguugacuugaguaaau

SEQ ID NO: 109517 - RNA, 25 nt, Artificial Sequence
  Description of Artificial Sequence: Synthetic oligonucleotide
uauaucaccacuauugcuggaguca

SEQ ID NO: 109518 - RNA, 25 nt, Artificial Sequence
  Description of Artificial Sequence: Synthetic oligonucleotide
augacacuaagucaaguuaaaggcu

SEQ ID NO: 109519 - RNA, 25 nt, Artificial Sequence
  Description of Artificial Sequence: Synthetic oligonucleotide
uuuguucgaaagaauggugucaaug

SEQ ID NO: 109520 - RNA, 25 nt, Artificial Sequence
  Description of Artificial Sequence: Synthetic oligonucleotide
gaagccaaaauagaugagaucaaga

SEQ ID NO: 109521 - RNA, 25 nt, Artificial Sequence
  Description of Artificial Sequence: Synthetic oligonucleotide
aaugacaauguccaagacacagcag

SEQ ID NO: 109522 - RNA, 25 nt, Artificial Sequence
  Description of Artificial Sequence: Synthetic oligonucleotide
gaacagaaaguucaacugcuucgua

SEQ ID NO: 109523 - RNA, 25 nt, Artificial Sequence
  Description of Artificial Sequence: Synthetic oligonucleotide
aauuggcaucaacuucauggaaaga

SEQ ID NO: 109524 - RNA, 25 nt, Artificial Sequence
  Description of Artificial Sequence: Synthetic oligonucleotide
aaagaagcguaugacacauugauua

SEQ ID NO: 109525 - RNA, 25 nt, Artificial Sequence
  Description of Artificial Sequence: Synthetic oligonucleotide
aaagaucucaaaaaagccaaucuuu

SEQ ID NO: 109526 - RNA, 25 nt, Artificial Sequence
  Description of Artificial Sequence: Synthetic oligonucleotide
uguacucuugcagagaaaauucaga

SEQ ID NO: 109527 - RNA, 25 nt, Artificial Sequence
  Description of Artificial Sequence: Synthetic oligonucleotide
acuaucauccucaaggacauuacua

SEQ ID NO: 109528 - RNA, 25 nt, Artificial Sequence
  Description of Artificial Sequence: Synthetic oligonucleotide
agugacucagaaaauucaaacuuca

SEQ ID NO: 109529 - RNA, 25 nt, Artificial Sequence
  Description of Artificial Sequence: Synthetic oligonucleotide
agaaaugaaauccaaagcuuggucu

SEQ ID NO: 109530 - RNA, 25 nt, Artificial Sequence
  Description of Artificial Sequence: Synthetic oligonucleotide
uagagugaaaaacaacaaauucagu

SEQ ID NO: 109531 - RNA, 25 nt, Artificial Sequence
  Description of Artificial Sequence: Synthetic oligonucleotide
uucugaguauaugcaauuaguguuu

SEQ ID NO: 109532 - RNA, 25 nt, Artificial Sequence
  Description of Artificial Sequence: Synthetic oligonucleotide
ugaaaagauucuuaauagcuggcug

SEQ ID NO: 109533 - RNA, 25 nt, Artificial Sequence
  Description of Artificial Sequence: Synthetic oligonucleotide
guaaauacugcuugguuuuuuacug

SEQ ID NO: 109534 - RNA, 25 nt, Artificial Sequence
  Description of Artificial Sequence: Synthetic oligonucleotide
ggguacauuuuaucauuuauuagcg

SEQ ID NO: 109535 - RNA, 25 nt, Artificial Sequence
  Description of Artificial Sequence: Synthetic oligonucleotide
gcugaagagccaacauauuuguaga

SEQ ID NO: 109536 - RNA, 25 nt, Artificial Sequence
  Description of Artificial Sequence: Synthetic oligonucleotide
auuuuuaauaucucaugauucugcc

SEQ ID NO: 109537 - RNA, 25 nt, Artificial Sequence
  Description of Artificial Sequence: Synthetic oligonucleotide
cuccaaggauguuuaaaaucuaguu

SEQ ID NO: 109538 - RNA, 25 nt, Artificial Sequence
  Description of Artificial Sequence: Synthetic oligonucleotide
ugggaaaacaaacuucaucaagagu

SEQ ID NO: 109539 - RNA, 25 nt, Artificial Sequence
  Description of Artificial Sequence: Synthetic oligonucleotide
uaaaugcaguggcaugcuaaguacc

SEQ ID NO: 109540 - RNA, 25 nt, Artificial Sequence
  Description of Artificial Sequence: Synthetic oligonucleotide
ccaaauaggaguguaugcagaggau

SEQ ID NO: 109541 - RNA, 25 nt, Artificial Sequence
  Description of Artificial Sequence: Synthetic oligonucleotide
ugaaagauuaagauuaugcucuggc

SEQ ID NO: 109542 - RNA, 25 nt, Artificial Sequence
  Description of Artificial Sequence: Synthetic oligonucleotide
caucuaacauaugauucuguaguau

SEQ ID NO: 109543 - RNA, 25 nt, Artificial Sequence
  Description of Artificial Sequence: Synthetic oligonucleotide
ugaauguaaucaguguauguuagua

SEQ ID NO: 109544 - RNA, 25 nt, Artificial Sequence
  Description of Artificial Sequence: Synthetic oligonucleotide
acaaaugucuauccacaggcuaacc

SEQ ID NO: 109545 - RNA, 25 nt, Artificial Sequence
  Description of Artificial Sequence: Synthetic oligonucleotide
cccacucuaugaaucaauagaagaa

SEQ ID NO: 109546 - RNA, 25 nt, Artificial Sequence
  Description of Artificial Sequence: Synthetic oligonucleotide
agcuaugaccuuuugcugaaauauc

SEQ ID NO: 109547 - RNA, 25 nt, Artificial Sequence
  Description of Artificial Sequence: Synthetic oligonucleotide
caguuacugaacaggcaggccacuu

SEQ ID NO: 109548 - RNA, 25 nt, Artificial Sequence
  Description of Artificial Sequence: Synthetic oligonucleotide
uugccucuaaauuaccucugauaau

SEQ ID NO: 109549 - RNA, 25 nt, Artificial Sequence
  Description of Artificial Sequence: Synthetic oligonucleotide
uucuagagauuuuaccauauuucua

SEQ ID NO: 109550 - RNA, 25 nt, Artificial Sequence
  Description of Artificial Sequence: Synthetic oligonucleotide
aaacuuuguuuauaacucugagaag

SEQ ID NO: 109551 - RNA, 25 nt, Artificial Sequence
  Description of Artificial Sequence: Synthetic oligonucleotide
gaucauauuuauguaaaguauaugu

SEQ ID NO: 109552 - RNA, 25 nt, Artificial Sequence
  Description of Artificial Sequence: Synthetic oligonucleotide
uauuugagugcagaauuuaaauaag

SEQ ID NO: 109553 - RNA, 25 nt, Artificial Sequence
  Description of Artificial Sequence: Synthetic oligonucleotide
ggcucuaccucaaagaccuuugcac

SEQ ID NO: 109554 - RNA, 25 nt, Artificial Sequence
  Description of Artificial Sequence: Synthetic oligonucleotide
caguuuauuggugucauauuauaca

SEQ ID NO: 109555 - RNA, 25 nt, Artificial Sequence
  Description of Artificial Sequence: Synthetic oligonucleotide
aauauuucaauugugaauucacaua

SEQ ID NO: 109556 - RNA, 25 nt, Artificial Sequence
  Description of Artificial Sequence: Synthetic oligonucleotide
agaaaacauuaaauuauaauguuug

SEQ ID NO: 109557 - RNA, 25 nt, Artificial Sequence
  Description of Artificial Sequence: Synthetic oligonucleotide
gacuauuauauauguguaugcauuu

SEQ ID NO: 109558 - RNA, 25 nt, Artificial Sequence
  Description of Artificial Sequence: Synthetic oligonucleotide
uuacuggcucaaaacuaccuacuuc

SEQ ID NO: 109559 - RNA, 25 nt, Artificial Sequence
  Description of Artificial Sequence: Synthetic oligonucleotide
cuuucucaggcaucaaaagcauuuu

SEQ ID NO: 109560 - RNA, 25 nt, Artificial Sequence
  Description of Artificial Sequence: Synthetic oligonucleotide
ugagcaggagaguauuacuagagcu

SEQ ID NO: 109561 - RNA, 25 nt, Artificial Sequence
  Description of Artificial Sequence: Synthetic oligonucleotide
uuugccaccucuccauuuuugccuu

SEQ ID NO: 109562 - RNA, 25 nt, Artificial Sequence
  Description of Artificial Sequence: Synthetic oligonucleotide
uggugcucaucuuaauggccuaaug

SEQ ID NO: 109563 - RNA, 25 nt, Artificial Sequence
  Description of Artificial Sequence: Synthetic oligonucleotide
gcacccccaaacauggaaauaucac

SEQ ID NO: 109564 - RNA, 25 nt, Artificial Sequence
  Description of Artificial Sequence: Synthetic oligonucleotide
ccaaaaaauacuuaauaguccacca

SEQ ID NO: 109565 - RNA, 25 nt, Artificial Sequence
  Description of Artificial Sequence: Synthetic oligonucleotide
aaaaggcaagacugcccuuagaaau

SEQ ID NO: 109566 - RNA, 25 nt, Artificial Sequence
  Description of Artificial Sequence: Synthetic oligonucleotide
uucuagccugguuuggagauacuaa

SEQ ID NO: 109567 - RNA, 25 nt, Artificial Sequence
  Description of Artificial Sequence: Synthetic oligonucleotide
acugcucucagagaaaguagcuuug

SEQ ID NO: 109568 - RNA, 25 nt, Artificial Sequence
  Description of Artificial Sequence: Synthetic oligonucleotide
gugacaugucaugaacccauguuug

SEQ ID NO: 109569 - RNA, 25 nt, Artificial Sequence
  Description of Artificial Sequence: Synthetic oligonucleotide
gcaaucaaagaugauaaaauagauu

SEQ ID NO: 109570 - RNA, 25 nt, Artificial Sequence
  Description of Artificial Sequence: Synthetic oligonucleotide
ucuuauuuuucccccacccccgaaa

SEQ ID NO: 109571 - RNA, 25 nt, Artificial Sequence
  Description of Artificial Sequence: Synthetic oligonucleotide
aauguucaauaaugucccauguaaa

SEQ ID NO: 109572 - RNA, 25 nt, Artificial Sequence
  Description of Artificial Sequence: Synthetic oligonucleotide
aaccugcuacaaauggcagcuuaua

SEQ ID NO: 109573 - RNA, 25 nt, Artificial Sequence
  Description of Artificial Sequence: Synthetic oligonucleotide
acauagcaaugguaaaaucaucauc

SEQ ID NO: 109574 - RNA, 25 nt, Artificial Sequence
  Description of Artificial Sequence: Synthetic oligonucleotide
cuggauuuaggaauugcucuuguca

SEQ ID NO: 109575 - RNA, 25 nt, Artificial Sequence
  Description of Artificial Sequence: Synthetic oligonucleotide
auacccccaaguuucuaagauuuaa

SEQ ID NO: 109576 - RNA, 25 nt, Artificial Sequence
  Description of Artificial Sequence: Synthetic oligonucleotide
agauucuccuuacuacuauccuacg

SEQ ID NO: 109577 - RNA, 25 nt, Artificial Sequence
  Description of Artificial Sequence: Synthetic oligonucleotide
guuuaaauaucuuugaaaguuugua

SEQ ID NO: 109578 - RNA, 25 nt, Artificial Sequence
  Description of Artificial Sequence: Synthetic oligonucleotide
auuaaaugugaauuuuaagaaauaa

SEQ ID NO: 109579 - RNA, 25 nt, Artificial Sequence
  Description of Artificial Sequence: Synthetic oligonucleotide
auauuuauauuucuguaaauguaaa

SEQ ID NO: 109580 - RNA, 25 nt, Artificial Sequence
  Description of Artificial Sequence: Synthetic oligonucleotide
acugugaagauaguuauaaacugaa

SEQ ID NO: 109581 - RNA, 25 nt, Artificial Sequence
  Description of Artificial Sequence: Synthetic oligonucleotide
agcagauaccuggaaccaccuaaag

SEQ ID NO: 109582 - RNA, 25 nt, Artificial Sequence
  Description of Artificial Sequence: Synthetic oligonucleotide
gaacuuccauuuauggaggauuuuu

SEQ ID NO: 109583 - RNA, 25 nt, Artificial Sequence
  Description of Artificial Sequence: Synthetic oligonucleotide
uuugccccuuguguuuggaauuaua

SEQ ID NO: 109584 - RNA, 25 nt, Artificial Sequence
  Description of Artificial Sequence: Synthetic oligonucleotide
aaaauauagguaaaaguacguaauu

SEQ ID NO: 109585 - RNA, 25 nt, Artificial Sequence
  Description of Artificial Sequence: Synthetic oligonucleotide
uaaauaauguuuuugguaaaaaaaa

SEQ ID NO: 109586 - RNA, 25 nt, Artificial Sequence
  Description of Artificial Sequence: Synthetic oligonucleotide
cuaauuguuuggggaaacaguggca

SEQ ID NO: 109587 - RNA, 25 nt, Artificial Sequence
  Description of Artificial Sequence: Synthetic oligonucleotide
aauaaauuuaucugauguugacuug

SEQ ID NO: 109588 - RNA, 25 nt, Artificial Sequence
  Description of Artificial Sequence: Synthetic oligonucleotide
gaguaaauauaucaccacuauugcu

SEQ ID NO: 109589 - RNA, 25 nt, Artificial Sequence
  Description of Artificial Sequence: Synthetic oligonucleotide
uggagucaugacacuaagucaaguu

SEQ ID NO: 109590 - RNA, 25 nt, Artificial Sequence
  Description of Artificial Sequence: Synthetic oligonucleotide
uaaaggcuuuguucgaaagaauggu

SEQ ID NO: 109591 - RNA, 25 nt, Artificial Sequence
  Description of Artificial Sequence: Synthetic oligonucleotide
ugucaaugaagccaaaauagaugag

SEQ ID NO: 109592 - RNA, 25 nt, Artificial Sequence
  Description of Artificial Sequence: Synthetic oligonucleotide
gaucaagaaugacaauguccaagac

SEQ ID NO: 109593 - RNA, 25 nt, Artificial Sequence
  Description of Artificial Sequence: Synthetic oligonucleotide
cacagcagaacagaaaguucaacug

SEQ ID NO: 109594 - RNA, 25 nt, Artificial Sequence
  Description of Artificial Sequence: Synthetic oligonucleotide
gcuucguaauuggcaucaacuucau

SEQ ID NO: 109595 - RNA, 25 nt, Artificial Sequence
  Description of Artificial Sequence: Synthetic oligonucleotide
uggaaagaaagaagcguaugacaca

SEQ ID NO: 109596 - RNA, 25 nt, Artificial Sequence
  Description of Artificial Sequence: Synthetic oligonucleotide
auugauuaaagaucucaaaaaagcc

SEQ ID NO: 109597 - RNA, 25 nt, Artificial Sequence
  Description of Artificial Sequence: Synthetic oligonucleotide
caaucuuuguacucuugcagagaaa

SEQ ID NO: 109598 - RNA, 25 nt, Artificial Sequence
  Description of Artificial Sequence: Synthetic oligonucleotide
aauucagacuaucauccucaaggac

SEQ ID NO: 109599 - RNA, 25 nt, Artificial Sequence
  Description of Artificial Sequence: Synthetic oligonucleotide
cauuacuagugacucagaaaauuca

SEQ ID NO: 109600 - RNA, 25 nt, Artificial Sequence
  Description of Artificial Sequence: Synthetic oligonucleotide
aaacuucagaaaugaaauccaaagc

SEQ ID NO: 109601 - RNA, 25 nt, Artificial Sequence
  Description of Artificial Sequence: Synthetic oligonucleotide
cuuggucuagagugaaaaacaacaa

SEQ ID NO: 109602 - RNA, 25 nt, Artificial Sequence
  Description of Artificial Sequence: Synthetic oligonucleotide
aauucaguucugaguauaugcaauu

SEQ ID NO: 109603 - RNA, 25 nt, Artificial Sequence
  Description of Artificial Sequence: Synthetic oligonucleotide
uaguguuugaaaagauucuuaauag

SEQ ID NO: 109604 - RNA, 25 nt, Artificial Sequence
  Description of Artificial Sequence: Synthetic oligonucleotide
gcuggcuguaaauacugcuugguuu

SEQ ID NO: 109605 - RNA, 25 nt, Artificial Sequence
  Description of Artificial Sequence: Synthetic oligonucleotide
uuuuacuggguacauuuuaucauuu

SEQ ID NO: 109606 - RNA, 25 nt, Artificial Sequence
  Description of Artificial Sequence: Synthetic oligonucleotide
uauuagcgcugaagagccaacauau

SEQ ID NO: 109607 - RNA, 25 nt, Artificial Sequence
  Description of Artificial Sequence: Synthetic oligonucleotide
uuuguagauuuuuaauaucucauga

SEQ ID NO: 109608 - RNA, 25 nt, Artificial Sequence
  Description of Artificial Sequence: Synthetic oligonucleotide
auucugccuccaaggauguuuaaaa

SEQ ID NO: 109609 - RNA, 25 nt, Artificial Sequence
  Description of Artificial Sequence: Synthetic oligonucleotide
aucuaguugggaaaacaaacuucau

SEQ ID NO: 109610 - RNA, 25 nt, Artificial Sequence
  Description of Artificial Sequence: Synthetic oligonucleotide
ucaagaguaaaugcaguggcaugcu

SEQ ID NO: 109611 - RNA, 25 nt, Artificial Sequence
  Description of Artificial Sequence: Synthetic oligonucleotide
uaaguacccaaauaggaguguaugc

SEQ ID NO: 109612 - RNA, 25 nt, Artificial Sequence
  Description of Artificial Sequence: Synthetic oligonucleotide
cagaggaugaaagauuaagauuaug

SEQ ID NO: 109613 - RNA, 25 nt, Artificial Sequence
  Description of Artificial Sequence: Synthetic oligonucleotide
gcucuggcaucuaacauaugauucu

SEQ ID NO: 109614 - RNA, 25 nt, Artificial Sequence
  Description of Artificial Sequence: Synthetic oligonucleotide
uguaguaugaauguaaucaguguau

SEQ ID NO: 109615 - RNA, 25 nt, Artificial Sequence
  Description of Artificial Sequence: Synthetic oligonucleotide
uguuaguacaaaugucuauccacag

SEQ ID NO: 109616 - RNA, 25 nt, Artificial Sequence
  Description of Artificial Sequence: Synthetic oligonucleotide
ggcuaaccccacucuaugaaucaau

SEQ ID NO: 109617 - RNA, 25 nt, Artificial Sequence
  Description of Artificial Sequence: Synthetic oligonucleotide
uagaagaagcuaugaccuuuugcug

SEQ ID NO: 109618 - RNA, 25 nt, Artificial Sequence
  Description of Artificial Sequence: Synthetic oligonucleotide
gaaauaucaguuacugaacaggcag

SEQ ID NO: 109619 - RNA, 25 nt, Artificial Sequence
  Description of Artificial Sequence: Synthetic oligonucleotide
ggccacuuugccucuaaauuaccuc

SEQ ID NO: 109620 - RNA, 25 nt, Artificial Sequence
  Description of Artificial Sequence: Synthetic oligonucleotide
cugauaauucuagagauuuuaccau

SEQ ID NO: 109621 - RNA, 25 nt, Artificial Sequence
  Description of Artificial Sequence: Synthetic oligonucleotide
uauuucuaaacuuuguuuauaacuc

SEQ ID NO: 109622 - RNA, 25 nt, Artificial Sequence
  Description of Artificial Sequence: Synthetic oligonucleotide
cugagaagaucauauuuauguaaag

SEQ ID NO: 109623 - RNA, 25 nt, Artificial Sequence
  Description of Artificial Sequence: Synthetic oligonucleotide
guauauguauuugagugcagaauuu

SEQ ID NO: 109624 - RNA, 25 nt, Artificial Sequence
  Description of Artificial Sequence: Synthetic oligonucleotide
uaaauaaggcucuaccucaaagacc

SEQ ID NO: 109625 - RNA, 25 nt, Artificial Sequence
  Description of Artificial Sequence: Synthetic oligonucleotide
cuuugcacaguuuauuggugucaua

SEQ ID NO: 109626 - RNA, 25 nt, Artificial Sequence
  Description of Artificial Sequence: Synthetic oligonucleotide
auuauacaauauuucaauugugaau

SEQ ID NO: 109627 - RNA, 25 nt, Artificial Sequence
  Description of Artificial Sequence: Synthetic oligonucleotide
uucacauagaaaacauuaaauuaua

SEQ ID NO: 109628 - RNA, 25 nt, Artificial Sequence
  Description of Artificial Sequence: Synthetic oligonucleotide
aauguuugacuauuauauaugugua

SEQ ID NO: 109629 - RNA, 25 nt, Artificial Sequence
  Description of Artificial Sequence: Synthetic oligonucleotide
augcauuuuacuggcucaaaacuac

SEQ ID NO: 109630 - RNA, 25 nt, Artificial Sequence
  Description of Artificial Sequence: Synthetic oligonucleotide
ccuacuucuuucucaggcaucaaaa

SEQ ID NO: 109631 - RNA, 25 nt, Artificial Sequence
  Description of Artificial Sequence: Synthetic oligonucleotide
agcauuuugagcaggagaguauuac

SEQ ID NO: 109632 - RNA, 25 nt, Artificial Sequence
  Description of Artificial Sequence: Synthetic oligonucleotide
cuagagcuuugccaccucuccauuu

SEQ ID NO: 109633 - RNA, 25 nt, Artificial Sequence
  Description of Artificial Sequence: Synthetic oligonucleotide
uuugccuuggugcucaucuuaaugg

SEQ ID NO: 109634 - RNA, 25 nt, Artificial Sequence
  Description of Artificial Sequence: Synthetic oligonucleotide
gccuaaugcacccccaaacauggaa

SEQ ID NO: 109635 - RNA, 25 nt, Artificial Sequence
  Description of Artificial Sequence: Synthetic oligonucleotide
aauaucaccaaaaaauacuuaauag

SEQ ID NO: 109636 - RNA, 25 nt, Artificial Sequence
  Description of Artificial Sequence: Synthetic oligonucleotide
guccaccaaaaggcaagacugcccu

SEQ ID NO: 109637 - RNA, 25 nt, Artificial Sequence
  Description of Artificial Sequence: Synthetic oligonucleotide
uuagaaauucuagccugguuuggag

SEQ ID NO: 109638 - RNA, 25 nt, Artificial Sequence
  Description of Artificial Sequence: Synthetic oligonucleotide
gauacuaacugcucucagagaaagu

SEQ ID NO: 109639 - RNA, 25 nt, Artificial Sequence
  Description of Artificial Sequence: Synthetic oligonucleotide
uagcuuugugacaugucaugaaccc

SEQ ID NO: 109640 - RNA, 25 nt, Artificial Sequence
  Description of Artificial Sequence: Synthetic oligonucleotide
cauguuugcaaucaaagaugauaaa

SEQ ID NO: 109641 - RNA, 25 nt, Artificial Sequence
  Description of Artificial Sequence: Synthetic oligonucleotide
aauagauucuuauuuuucccccacc

SEQ ID NO: 109642 - RNA, 25 nt, Artificial Sequence
  Description of Artificial Sequence: Synthetic oligonucleotide
ccccgaaaauguucaauaauguccc

SEQ ID NO: 109643 - RNA, 25 nt, Artificial Sequence
  Description of Artificial Sequence: Synthetic oligonucleotide
cauguaaaaccugcuacaaauggca

SEQ ID NO: 109644 - RNA, 25 nt, Artificial Sequence
  Description of Artificial Sequence: Synthetic oligonucleotide
agcuuauacauagcaaugguaaaau

SEQ ID NO: 109645 - RNA, 25 nt, Artificial Sequence
  Description of Artificial Sequence: Synthetic oligonucleotide
ucaucaucuggauuuaggaauugcu

SEQ ID NO: 109646 - RNA, 25 nt, Artificial Sequence
  Description of Artificial Sequence: Synthetic oligonucleotide
ucuugucauacccccaaguuucuaa

SEQ ID NO: 109647 - RNA, 25 nt, Artificial Sequence
  Description of Artificial Sequence: Synthetic oligonucleotide
agauuuaagauucuccuuacuacua

SEQ ID NO: 109648 - RNA, 25 nt, Artificial Sequence
  Description of Artificial Sequence: Synthetic oligonucleotide
auccuacguuuaaauaucuuugaaa

SEQ ID NO: 109649 - RNA, 25 nt, Artificial Sequence
  Description of Artificial Sequence: Synthetic oligonucleotide
aguuuguauuaaaugugaauuuuaa

SEQ ID NO: 109650 - RNA, 25 nt, Artificial Sequence
  Description of Artificial Sequence: Synthetic oligonucleotide
agaaauaauauuuauauuucuguaa

SEQ ID NO: 109651 - RNA, 25 nt, Artificial Sequence
  Description of Artificial Sequence: Synthetic oligonucleotide
aauguaaacugugaagauaguuaua

SEQ ID NO: 109652 - RNA, 25 nt, Artificial Sequence
  Description of Artificial Sequence: Synthetic oligonucleotide
aaacugaagcagauaccuggaacca

SEQ ID NO: 109653 - RNA, 25 nt, Artificial Sequence
  Description of Artificial Sequence: Synthetic oligonucleotide
accuaaagaacuuccauuuauggag

SEQ ID NO: 109654 - RNA, 25 nt, Artificial Sequence
  Description of Artificial Sequence: Synthetic oligonucleotide
ggauuuuuuugccccuuguguuugg

SEQ ID NO: 109655 - RNA, 25 nt, Artificial Sequence
  Description of Artificial Sequence: Synthetic oligonucleotide
gaauuauaaaauauagguaaaagua

SEQ ID NO: 109656 - RNA, 25 nt, Artificial Sequence
  Description of Artificial Sequence: Synthetic oligonucleotide
acguaauuaaauaauguuuuuggua

SEQ ID NO: 109657 - RNA, 25 nt, Artificial Sequence
  Description of Artificial Sequence: Synthetic oligonucleotide
aggacauggcuuagaaguggaaaua

SEQ ID NO: 109658 - RNA, 25 nt, Artificial Sequence
  Description of Artificial Sequence: Synthetic oligonucleotide
aaacugcacccggacccagaauacc

SEQ ID NO: 109659 - RNA, 25 nt, Artificial Sequence
  Description of Artificial Sequence: Synthetic oligonucleotide
caagugcagauguaaaccaaacuuu

SEQ ID NO: 109660 - RNA, 25 nt, Artificial Sequence
  Description of Artificial Sequence: Synthetic oligonucleotide
uuuuuguaacucuacuguaugugaa

SEQ ID NO: 109661 - RNA, 25 nt, Artificial Sequence
  Description of Artificial Sequence: Synthetic oligonucleotide
acacugugacccuugcaccaaaugu

SEQ ID NO: 109662 - RNA, 25 nt, Artificial Sequence
  Description of Artificial Sequence: Synthetic oligonucleotide
ugaacauggaaucaucaaggaaugc

SEQ ID NO: 109663 - RNA, 25 nt, Artificial Sequence
  Description of Artificial Sequence: Synthetic oligonucleotide
cacacucaccagcaacaccaagugc

SEQ ID NO: 109664 - RNA, 25 nt, Artificial Sequence
  Description of Artificial Sequence: Synthetic oligonucleotide
caaagaggaaggauccagaucuaac

SEQ ID NO: 109665 - RNA, 25 nt, Artificial Sequence
  Description of Artificial Sequence: Synthetic oligonucleotide
cuugggguggcuuugucuucuucuu

SEQ ID NO: 109666 - RNA, 25 nt, Artificial Sequence
  Description of Artificial Sequence: Synthetic oligonucleotide
uuugccaauuccacuaauuguuugg

SEQ ID NO: 109667 - RNA, 25 nt, Artificial Sequence
  Description of Artificial Sequence: Synthetic oligonucleotide
ggugaagagaaaggaaguacagaaa

SEQ ID NO: 109668 - RNA, 25 nt, Artificial Sequence
  Description of Artificial Sequence: Synthetic oligonucleotide
aacaugcagaaagcacagaaaggaa

SEQ ID NO: 109669 - RNA, 25 nt, Artificial Sequence
  Description of Artificial Sequence: Synthetic oligonucleotide
aaaccaagguucucaugaaucucca

SEQ ID NO: 109670 - RNA, 25 nt, Artificial Sequence
  Description of Artificial Sequence: Synthetic oligonucleotide
aaccuuaaauccuauguugacuuga

SEQ ID NO: 109671 - RNA, 25 nt, Artificial Sequence
  Description of Artificial Sequence: Synthetic oligonucleotide
aguaaauauaucaccacuauugcug

SEQ ID NO: 109672 - RNA, 25 nt, Artificial Sequence
  Description of Artificial Sequence: Synthetic oligonucleotide
ggagucaugacacuaagucaaguua

SEQ ID NO: 109673 - RNA, 25 nt, Artificial Sequence
  Description of Artificial Sequence: Synthetic oligonucleotide
aaaggcuuuguucgaaagaauggug

SEQ ID NO: 109674 - RNA, 25 nt, Artificial Sequence
  Description of Artificial Sequence: Synthetic oligonucleotide
gucaaugaagccaaaauagaugaga

SEQ ID NO: 109675 - RNA, 25 nt, Artificial Sequence
  Description of Artificial Sequence: Synthetic oligonucleotide
aucaagaaugacaauguccaagaca

SEQ ID NO: 109676 - RNA, 25 nt, Artificial Sequence
  Description of Artificial Sequence: Synthetic oligonucleotide
acagcagaacagaaaguucaacugc

SEQ ID NO: 109677 - RNA, 25 nt, Artificial Sequence
  Description of Artificial Sequence: Synthetic oligonucleotide
cuucguaauuggcaucaacuucaug

SEQ ID NO: 109678 - RNA, 25 nt, Artificial Sequence
  Description of Artificial Sequence: Synthetic oligonucleotide
ggaaagaaagaagcguaugacacau

SEQ ID NO: 109679 - RNA, 25 nt, Artificial Sequence
  Description of Artificial Sequence: Synthetic oligonucleotide
uugauuaaagaucucaaaaaagcca

SEQ ID NO: 109680 - RNA, 25 nt, Artificial Sequence
  Description of Artificial Sequence: Synthetic oligonucleotide
aaucuuuguacucuugcagagaaaa

SEQ ID NO: 109681 - RNA, 25 nt, Artificial Sequence
  Description of Artificial Sequence: Synthetic oligonucleotide
auucagacuaucauccucaaggaca

SEQ ID NO: 109682 - RNA, 25 nt, Artificial Sequence
  Description of Artificial Sequence: Synthetic oligonucleotide
auuacuagugacucagaaaauucaa

SEQ ID NO: 109683 - RNA, 25 nt, Artificial Sequence
  Description of Artificial Sequence: Synthetic oligonucleotide
aacuucagaaaugaaauccaaagcu

SEQ ID NO: 109684 - RNA, 25 nt, Artificial Sequence
  Description of Artificial Sequence: Synthetic oligonucleotide
uuggucuagagugaaaaacaacaaa

SEQ ID NO: 109685 - RNA, 25 nt, Artificial Sequence
  Description of Artificial Sequence: Synthetic oligonucleotide
auucaguucugaguauaugcaauua

SEQ ID NO: 109686 - RNA, 25 nt, Artificial Sequence
  Description of Artificial Sequence: Synthetic oligonucleotide
aguguuugaaaagauucuuaauagc

SEQ ID NO: 109687 - RNA, 25 nt, Artificial Sequence
  Description of Artificial Sequence: Synthetic oligonucleotide
cuggcuguaaauacugcuugguuuu

SEQ ID NO: 109688 - RNA, 25 nt, Artificial Sequence
  Description of Artificial Sequence: Synthetic oligonucleotide
uuuacuggguacauuuuaucauuua

SEQ ID NO: 109689 - RNA, 25 nt, Artificial Sequence
  Description of Artificial Sequence: Synthetic oligonucleotide
auuagcgcugaagagccaacauauu

SEQ ID NO: 109690 - RNA, 25 nt, Artificial Sequence
  Description of Artificial Sequence: Synthetic oligonucleotide
uuguagauuuuuaauaucucaugau

SEQ ID NO: 109691 - RNA, 25 nt, Artificial Sequence
  Description of Artificial Sequence: Synthetic oligonucleotide
uucugccuccaaggauguuuaaaau

SEQ ID NO: 109692 - RNA, 25 nt, Artificial Sequence
  Description of Artificial Sequence: Synthetic oligonucleotide
ucuaguugggaaaacaaacuucauc

SEQ ID NO: 109693 - RNA, 25 nt, Artificial Sequence
  Description of Artificial Sequence: Synthetic oligonucleotide
caagaguaaaugcaguggcaugcua

SEQ ID NO: 109694 - RNA, 25 nt, Artificial Sequence
  Description of Artificial Sequence: Synthetic oligonucleotide
aaguacccaaauaggaguguaugca

SEQ ID NO: 109695 - RNA, 25 nt, Artificial Sequence
  Description of Artificial Sequence: Synthetic oligonucleotide
agaggaugaaagauuaagauuaugc

SEQ ID NO: 109696 - RNA, 25 nt, Artificial Sequence
  Description of Artificial Sequence: Synthetic oligonucleotide
cucuggcaucuaacauaugauucug

SEQ ID NO: 109697 - RNA, 25 nt, Artificial Sequence
  Description of Artificial Sequence: Synthetic oligonucleotide
guaguaugaauguaaucaguguaug

SEQ ID NO: 109698 - RNA, 25 nt, Artificial Sequence
  Description of Artificial Sequence: Synthetic oligonucleotide
guuaguacaaaugucuauccacagg

SEQ ID NO: 109699 - RNA, 25 nt, Artificial Sequence
  Description of Artificial Sequence: Synthetic oligonucleotide
gcuaaccccacucuaugaaucaaua

SEQ ID NO: 109700 - RNA, 25 nt, Artificial Sequence
  Description of Artificial Sequence: Synthetic oligonucleotide
agaagaagcuaugaccuuuugcuga

SEQ ID NO: 109701 - RNA, 25 nt, Artificial Sequence
  Description of Artificial Sequence: Synthetic oligonucleotide
aaauaucaguuacugaacaggcagg

SEQ ID NO: 109702 - RNA, 25 nt, Artificial Sequence
  Description of Artificial Sequence: Synthetic oligonucleotide
gccacuuugccucuaaauuaccucu

SEQ ID NO: 109703 - RNA, 25 nt, Artificial Sequence
  Description of Artificial Sequence: Synthetic oligonucleotide
ugauaauucuagagauuuuaccaua

SEQ ID NO: 109704 - RNA, 25 nt, Artificial Sequence
  Description of Artificial Sequence: Synthetic oligonucleotide
auuucuaaacuuuguuuauaacucu

SEQ ID NO: 109705 - RNA, 25 nt, Artificial Sequence
  Description of Artificial Sequence: Synthetic oligonucleotide
ugagaagaucauauuuauguaaagu

SEQ ID NO: 109706 - RNA, 25 nt, Artificial Sequence
  Description of Artificial Sequence: Synthetic oligonucleotide
uauauguauuugagugcagaauuua

SEQ ID NO: 109707 - RNA, 25 nt, Artificial Sequence
  Description of Artificial Sequence: Synthetic oligonucleotide
aaauaaggcucuaccucaaagaccu

SEQ ID NO: 109708 - RNA, 25 nt, Artificial Sequence
  Description of Artificial Sequence: Synthetic oligonucleotide
uuugcacaguuuauuggugucauau

SEQ ID NO: 109709 - RNA, 25 nt, Artificial Sequence
  Description of Artificial Sequence: Synthetic oligonucleotide
uuauacaauauuucaauugugaauu

SEQ ID NO: 109710 - RNA, 25 nt, Artificial Sequence
  Description of Artificial Sequence: Synthetic oligonucleotide
ucacauagaaaacauuaaauuauaa

SEQ ID NO: 109711 - RNA, 25 nt, Artificial Sequence
  Description of Artificial Sequence: Synthetic oligonucleotide
auguuugacuauuauauauguguau

SEQ ID NO: 109712 - RNA, 25 nt, Artificial Sequence
  Description of Artificial Sequence: Synthetic oligonucleotide
ugcauuuuacuggcucaaaacuacc

SEQ ID NO: 109713 - RNA, 25 nt, Artificial Sequence
  Description of Artificial Sequence: Synthetic oligonucleotide
cuacuucuuucucaggcaucaaaag

SEQ ID NO: 109714 - RNA, 25 nt, Artificial Sequence
  Description of Artificial Sequence: Synthetic oligonucleotide
gcauuuugagcaggagaguauuacu

SEQ ID NO: 109715 - RNA, 25 nt, Artificial Sequence
  Description of Artificial Sequence: Synthetic oligonucleotide
uagagcuuugccaccucuccauuuu

SEQ ID NO: 109716 - RNA, 25 nt, Artificial Sequence
  Description of Artificial Sequence: Synthetic oligonucleotide
uugccuuggugcucaucuuaauggc

SEQ ID NO: 109717 - RNA, 25 nt, Artificial Sequence
  Description of Artificial Sequence: Synthetic oligonucleotide
ccuaaugcacccccaaacauggaaa

SEQ ID NO: 109718 - RNA, 25 nt, Artificial Sequence
  Description of Artificial Sequence: Synthetic oligonucleotide
auaucaccaaaaaauacuuaauagu

SEQ ID NO: 109719 - RNA, 25 nt, Artificial Sequence
  Description of Artificial Sequence: Synthetic oligonucleotide
uccaccaaaaggcaagacugcccuu

SEQ ID NO: 109720 - RNA, 25 nt, Artificial Sequence
  Description of Artificial Sequence: Synthetic oligonucleotide
uagaaauucuagccugguuuggaga

SEQ ID NO: 109721 - RNA, 25 nt, Artificial Sequence
  Description of Artificial Sequence: Synthetic oligonucleotide
auacuaacugcucucagagaaagua

SEQ ID NO: 109722 - RNA, 25 nt, Artificial Sequence
  Description of Artificial Sequence: Synthetic oligonucleotide
agcuuugugacaugucaugaaccca

SEQ ID NO: 109723 - RNA, 25 nt, Artificial Sequence
  Description of Artificial Sequence: Synthetic oligonucleotide
auguuugcaaucaaagaugauaaaa

SEQ ID NO: 109724 - RNA, 25 nt, Artificial Sequence
  Description of Artificial Sequence: Synthetic oligonucleotide
auagauucuuauuuuucccccaccc

SEQ ID NO: 109725 - RNA, 25 nt, Artificial Sequence
  Description of Artificial Sequence: Synthetic oligonucleotide
cccgaaaauguucaauaauguccca

SEQ ID NO: 109726 - RNA, 25 nt, Artificial Sequence
  Description of Artificial Sequence: Synthetic oligonucleotide
auguaaaaccugcuacaaauggcag

SEQ ID NO: 109727 - RNA, 25 nt, Artificial Sequence
  Description of Artificial Sequence: Synthetic oligonucleotide
gcuuauacauagcaaugguaaaauc

SEQ ID NO: 109728 - RNA, 25 nt, Artificial Sequence
  Description of Artificial Sequence: Synthetic oligonucleotide
caucaucuggauuuaggaauugcuc

SEQ ID NO: 109729 - RNA, 25 nt, Artificial Sequence
  Description of Artificial Sequence: Synthetic oligonucleotide
cuugucauacccccaaguuucuaag

SEQ ID NO: 109730 - RNA, 25 nt, Artificial Sequence
  Description of Artificial Sequence: Synthetic oligonucleotide
gauuuaagauucuccuuacuacuau

SEQ ID NO: 109731 - RNA, 25 nt, Artificial Sequence
  Description of Artificial Sequence: Synthetic oligonucleotide
uccuacguuuaaauaucuuugaaag

SEQ ID NO: 109732 - RNA, 25 nt, Artificial Sequence
  Description of Artificial Sequence: Synthetic oligonucleotide
guuuguauuaaaugugaauuuuaag

SEQ ID NO: 109733 - RNA, 25 nt, Artificial Sequence
  Description of Artificial Sequence: Synthetic oligonucleotide
gaaauaauauuuauauuucuguaaa

SEQ ID NO: 109734 - RNA, 25 nt, Artificial Sequence
  Description of Artificial Sequence: Synthetic oligonucleotide
auguaaacugugaagauaguuauaa

SEQ ID NO: 109735 - RNA, 25 nt, Artificial Sequence
  Description of Artificial Sequence: Synthetic oligonucleotide
aacugaagcagauaccuggaaccac

SEQ ID NO: 109736 - RNA, 25 nt, Artificial Sequence
  Description of Artificial Sequence: Synthetic oligonucleotide
ccuaaagaacuuccauuuauggagg

SEQ ID NO: 109737 - RNA, 25 nt, Artificial Sequence
  Description of Artificial Sequence: Synthetic oligonucleotide
gauuuuuuugccccuuguguuugga

SEQ ID NO: 109738 - RNA, 25 nt, Artificial Sequence
  Description of Artificial Sequence: Synthetic oligonucleotide
aauuauaaaauauagguaaaaguac

SEQ ID NO: 109739 - RNA, 25 nt, Artificial Sequence
  Description of Artificial Sequence: Synthetic oligonucleotide
cguaauuaaauaauguuuuugguaa

SEQ ID NO: 109740 - RNA, 25 nt, Artificial Sequence
  Description of Artificial Sequence: Synthetic oligonucleotide
gaagugaagagaaaggaaguacaga

SEQ ID NO: 109741 - RNA, 25 nt, Artificial Sequence
  Description of Artificial Sequence: Synthetic oligonucleotide
aaaacaugcagaaagcacagaaagg

SEQ ID NO: 109742 - RNA, 25 nt, Artificial Sequence
  Description of Artificial Sequence: Synthetic oligonucleotide
gaaaaccaagguucucaugaaucuc

SEQ ID NO: 109743 - RNA, 25 nt, Artificial Sequence
  Description of Artificial Sequence: Synthetic oligonucleotide
ccaaccuuaaauccugaaacagugg

SEQ ID NO: 109744 - RNA, 25 nt, Artificial Sequence
  Description of Artificial Sequence: Synthetic oligonucleotide
gcaauaaauuuaucugauguugacu

SEQ ID NO: 109745 - RNA, 25 nt, Artificial Sequence
  Description of Artificial Sequence: Synthetic oligonucleotide
uugaguaaauauaucaccacuauug

SEQ ID NO: 109746 - RNA, 25 nt, Artificial Sequence
  Description of Artificial Sequence: Synthetic oligonucleotide
gcuggagucaugacacuaagucaag

SEQ ID NO: 109747 - RNA, 25 nt, Artificial Sequence
  Description of Artificial Sequence: Synthetic oligonucleotide
guuaaaggcuuuguucgaaagaaug

SEQ ID NO: 109748 - RNA, 25 nt, Artificial Sequence
  Description of Artificial Sequence: Synthetic oligonucleotide
ggugucaaugaagccaaaauagaug

SEQ ID NO: 109749 - RNA, 25 nt, Artificial Sequence
  Description of Artificial Sequence: Synthetic oligonucleotide
gagaucaagaaugacaauguccaag

SEQ ID NO: 109750 - RNA, 25 nt, Artificial Sequence
  Description of Artificial Sequence: Synthetic oligonucleotide
gacacagcagaacagaaaguucaac

SEQ ID NO: 109751 - RNA, 25 nt, Artificial Sequence
  Description of Artificial Sequence: Synthetic oligonucleotide
cugcuucguaauuggcaucaacuuc

SEQ ID NO: 109752 - RNA, 25 nt, Artificial Sequence
  Description of Artificial Sequence: Synthetic oligonucleotide
cauggaaagaaagaagcguaugaca

SEQ ID NO: 109753 - RNA, 25 nt, Artificial Sequence
  Description of Artificial Sequence: Synthetic oligonucleotide
acauugauuaaagaucucaaaaaag

SEQ ID NO: 109754 - RNA, 25 nt, Artificial Sequence
  Description of Artificial Sequence: Synthetic oligonucleotide
gccaaucuuuguacucuugcagaga

SEQ ID NO: 109755 - RNA, 25 nt, Artificial Sequence
  Description of Artificial Sequence: Synthetic oligonucleotide
aaaauucagacuaucauccucaagg

SEQ ID NO: 109756 - RNA, 25 nt, Artificial Sequence
  Description of Artificial Sequence: Synthetic oligonucleotide
gacauuacuagugacucagaaaauu

SEQ ID NO: 109757 - RNA, 25 nt, Artificial Sequence
  Description of Artificial Sequence: Synthetic oligonucleotide
ucaaacuucagaaaugaaauccaaa

SEQ ID NO: 109758 - RNA, 25 nt, Artificial Sequence
  Description of Artificial Sequence: Synthetic oligonucleotide
agcuuggucuagagugaaaaacaac

SEQ ID NO: 109759 - RNA, 25 nt, Artificial Sequence
  Description of Artificial Sequence: Synthetic oligonucleotide
caaauucaguucugaguauaugcaa

SEQ ID NO: 109760 - RNA, 25 nt, Artificial Sequence
  Description of Artificial Sequence: Synthetic oligonucleotide
auuaguguuugaaaagauucuuaau

SEQ ID NO: 109761 - RNA, 25 nt, Artificial Sequence
  Description of Artificial Sequence: Synthetic oligonucleotide
uagcuggcuguaaauacugcuuggu

SEQ ID NO: 109762 - RNA, 25 nt, Artificial Sequence
  Description of Artificial Sequence: Synthetic oligonucleotide
uuuuuuacuggguacauuuuaucau

SEQ ID NO: 109763 - RNA, 25 nt, Artificial Sequence
  Description of Artificial Sequence: Synthetic oligonucleotide
uuuauuagcgcugaagagccaacau

SEQ ID NO: 109764 - RNA, 25 nt, Artificial Sequence
  Description of Artificial Sequence: Synthetic oligonucleotide
uauuuguagauuuuuaauaucucau

SEQ ID NO: 109765 - RNA, 25 nt, Artificial Sequence
  Description of Artificial Sequence: Synthetic oligonucleotide
ugauucugccuccaaggauguuuaa

SEQ ID NO: 109766 - RNA, 25 nt, Artificial Sequence
  Description of Artificial Sequence: Synthetic oligonucleotide
aaaucuaguugggaaaacaaacuuc

SEQ ID NO: 109767 - RNA, 25 nt, Artificial Sequence
  Description of Artificial Sequence: Synthetic oligonucleotide
caucaagaguaaaugcaguggcaug

SEQ ID NO: 109768 - RNA, 25 nt, Artificial Sequence
  Description of Artificial Sequence: Synthetic oligonucleotide
gcuaaguacccaaauaggaguguau

SEQ ID NO: 109769 - RNA, 25 nt, Artificial Sequence
  Description of Artificial Sequence: Synthetic oligonucleotide
ugcagaggaugaaagauuaagauua

SEQ ID NO: 109770 - RNA, 25 nt, Artificial Sequence
  Description of Artificial Sequence: Synthetic oligonucleotide
augcucuggcaucuaacauaugauu

SEQ ID NO: 109771 - RNA, 25 nt, Artificial Sequence
  Description of Artificial Sequence: Synthetic oligonucleotide
ucuguaguaugaauguaaucagugu

SEQ ID NO: 109772 - RNA, 25 nt, Artificial Sequence
  Description of Artificial Sequence: Synthetic oligonucleotide
uauguuaguacaaaugucuauccac

SEQ ID NO: 109773 - RNA, 25 nt, Artificial Sequence
  Description of Artificial Sequence: Synthetic oligonucleotide
caggcuaaccccacucuaugaauca

SEQ ID NO: 109774 - RNA, 25 nt, Artificial Sequence
  Description of Artificial Sequence: Synthetic oligonucleotide
aauagaagaagcuaugaccuuuugc

SEQ ID NO: 109775 - RNA, 25 nt, Artificial Sequence
  Description of Artificial Sequence: Synthetic oligonucleotide
cugaaauaucaguuacugaacaggc

SEQ ID NO: 109776 - RNA, 25 nt, Artificial Sequence
  Description of Artificial Sequence: Synthetic oligonucleotide
caggccacuuugccucuaaauuacc

SEQ ID NO: 109777 - RNA, 25 nt, Artificial Sequence
  Description of Artificial Sequence: Synthetic oligonucleotide
cucugauaauucuagagauuuuacc

SEQ ID NO: 109778 - RNA, 25 nt, Artificial Sequence
  Description of Artificial Sequence: Synthetic oligonucleotide
cauauuucuaaacuuuguuuauaac

SEQ ID NO: 109779 - RNA, 25 nt, Artificial Sequence
  Description of Artificial Sequence: Synthetic oligonucleotide
cucugagaagaucauauuuauguaa

SEQ ID NO: 109780 - RNA, 25 nt, Artificial Sequence
  Description of Artificial Sequence: Synthetic oligonucleotide
aaguauauguauuugagugcagaau

SEQ ID NO: 109781 - RNA, 25 nt, Artificial Sequence
  Description of Artificial Sequence: Synthetic oligonucleotide
uuuaaauaaggcucuaccucaaaga

SEQ ID NO: 109782 - RNA, 25 nt, Artificial Sequence
  Description of Artificial Sequence: Synthetic oligonucleotide
accuuugcacaguuuauugguguca

SEQ ID NO: 109783 - RNA, 25 nt, Artificial Sequence
  Description of Artificial Sequence: Synthetic oligonucleotide
auauuauacaauauuucaauuguga

SEQ ID NO: 109784 - RNA, 25 nt, Artificial Sequence
  Description of Artificial Sequence: Synthetic oligonucleotide
aauucacauagaaaacauuaaauua

SEQ ID NO: 109785 - RNA, 25 nt, Artificial Sequence
  Description of Artificial Sequence: Synthetic oligonucleotide
auaauguuugacuauuauauaugug

SEQ ID NO: 109786 - RNA, 25 nt, Artificial Sequence
  Description of Artificial Sequence: Synthetic oligonucleotide
guaugcauuuuacuggcucaaaacu

SEQ ID NO: 109787 - RNA, 25 nt, Artificial Sequence
  Description of Artificial Sequence: Synthetic oligonucleotide
uaccuacuucuuucucaggcaucaa

SEQ ID NO: 109788 - RNA, 25 nt, Artificial Sequence
  Description of Artificial Sequence: Synthetic oligonucleotide
aaagcauuuugagcaggagaguauu

SEQ ID NO: 109789 - RNA, 25 nt, Artificial Sequence
  Description of Artificial Sequence: Synthetic oligonucleotide
uacuagagcuuugccaccucuccau

SEQ ID NO: 109790 - RNA, 25 nt, Artificial Sequence
  Description of Artificial Sequence: Synthetic oligonucleotide
uuuuugccuuggugcucaucuuaau

SEQ ID NO: 109791 - RNA, 25 nt, Artificial Sequence
  Description of Artificial Sequence: Synthetic oligonucleotide
uggccuaaugcacccccaaacaugg

SEQ ID NO: 109792 - RNA, 25 nt, Artificial Sequence
  Description of Artificial Sequence: Synthetic oligonucleotide
gaaauaucaccaaaaaauacuuaau

SEQ ID NO: 109793 - RNA, 25 nt, Artificial Sequence
  Description of Artificial Sequence: Synthetic oligonucleotide
uaguccaccaaaaggcaagacugcc

SEQ ID NO: 109794 - RNA, 25 nt, Artificial Sequence
  Description of Artificial Sequence: Synthetic oligonucleotide
ccuuagaaauucuagccugguuugg

SEQ ID NO: 109795 - RNA, 25 nt, Artificial Sequence
  Description of Artificial Sequence: Synthetic oligonucleotide
gagauacuaacugcucucagagaaa

SEQ ID NO: 109796 - RNA, 25 nt, Artificial Sequence
  Description of Artificial Sequence: Synthetic oligonucleotide
aguagcuuugugacaugucaugaac

SEQ ID NO: 109797 - RNA, 25 nt, Artificial Sequence
  Description of Artificial Sequence: Synthetic oligonucleotide
cccauguuugcaaucaaagaugaua

SEQ ID NO: 109798 - RNA, 25 nt, Artificial Sequence
  Description of Artificial Sequence: Synthetic oligonucleotide
aaaauagauucuuauuuuuccccca

SEQ ID NO: 109799 - RNA, 25 nt, Artificial Sequence
  Description of Artificial Sequence: Synthetic oligonucleotide
acccccgaaaauguucaauaauguc

SEQ ID NO: 109800 - RNA, 25 nt, Artificial Sequence
  Description of Artificial Sequence: Synthetic oligonucleotide
cccauguaaaaccugcuacaaaugg

SEQ ID NO: 109801 - RNA, 25 nt, Artificial Sequence
  Description of Artificial Sequence: Synthetic oligonucleotide
gcagcuuauacauagcaaugguaaa

SEQ ID NO: 109802 - RNA, 25 nt, Artificial Sequence
  Description of Artificial Sequence: Synthetic oligonucleotide
aaucaucaucuggauuuaggaauug

SEQ ID NO: 109803 - RNA, 25 nt, Artificial Sequence
  Description of Artificial Sequence: Synthetic oligonucleotide
gcucuugucauacccccaaguuucu

SEQ ID NO: 109804 - RNA, 25 nt, Artificial Sequence
  Description of Artificial Sequence: Synthetic oligonucleotide
uaagauuuaagauucuccuuacuac

SEQ ID NO: 109805 - RNA, 25 nt, Artificial Sequence
  Description of Artificial Sequence: Synthetic oligonucleotide
cuauccuacguuuaaauaucuuuga

SEQ ID NO: 109806 - RNA, 25 nt, Artificial Sequence
  Description of Artificial Sequence: Synthetic oligonucleotide
aaaguuuguauuaaaugugaauuuu

SEQ ID NO: 109807 - RNA, 25 nt, Artificial Sequence
  Description of Artificial Sequence: Synthetic oligonucleotide
uaagaaauaauauuuauauuucugu

SEQ ID NO: 109808 - RNA, 25 nt, Artificial Sequence
  Description of Artificial Sequence: Synthetic oligonucleotide
uaaauguaaacugugaagauaguua

SEQ ID NO: 109809 - RNA, 25 nt, Artificial Sequence
  Description of Artificial Sequence: Synthetic oligonucleotide
auaaacugaagcagauaccuggaac

SEQ ID NO: 109810 - RNA, 25 nt, Artificial Sequence
  Description of Artificial Sequence: Synthetic oligonucleotide
ccaccuaaagaacuuccauuuaugg

SEQ ID NO: 109811 - RNA, 25 nt, Artificial Sequence
  Description of Artificial Sequence: Synthetic oligonucleotide
gaggauuuuuuugccccuuguguuu

SEQ ID NO: 109812 - RNA, 25 nt, Artificial Sequence
  Description of Artificial Sequence: Synthetic oligonucleotide
uggaauuauaaaauauagguaaaag

SEQ ID NO: 109813 - RNA, 25 nt, Artificial Sequence
  Description of Artificial Sequence: Synthetic oligonucleotide
guacguaauuaaauaauguuuuugg

SEQ ID NO: 109814 - RNA, 25 nt, Artificial Sequence
  Description of Artificial Sequence: Synthetic oligonucleotide
caaagaggaagugaagagaaaggaa

SEQ ID NO: 109815 - RNA, 25 nt, Artificial Sequence
  Description of Artificial Sequence: Synthetic oligonucleotide
aguacagaaaacaugcagaaagcac

SEQ ID NO: 109816 - RNA, 25 nt, Artificial Sequence
  Description of Artificial Sequence: Synthetic oligonucleotide
cagaaaggaaaaccaagguucucau

SEQ ID NO: 109817 - RNA, 25 nt, Artificial Sequence
  Description of Artificial Sequence: Synthetic oligonucleotide
ugaaucuccaaccuuaaauccugaa

SEQ ID NO: 109818 - RNA, 25 nt, Artificial Sequence
  Description of Artificial Sequence: Synthetic oligonucleotide
aacaguggcaauaaauuuaucugau

SEQ ID NO: 109819 - RNA, 25 nt, Artificial Sequence
  Description of Artificial Sequence: Synthetic oligonucleotide
uguugacuugaguaaauauaucacc

SEQ ID NO: 109820 - RNA, 25 nt, Artificial Sequence
  Description of Artificial Sequence: Synthetic oligonucleotide
cacuauugcuggagucaugacacua

SEQ ID NO: 109821 - RNA, 25 nt, Artificial Sequence
  Description of Artificial Sequence: Synthetic oligonucleotide
aagucaaguuaaaggcuuuguucga

SEQ ID NO: 109822 - RNA, 25 nt, Artificial Sequence
  Description of Artificial Sequence: Synthetic oligonucleotide
aaagaauggugucaaugaagccaaa

SEQ ID NO: 109823 - RNA, 25 nt, Artificial Sequence
  Description of Artificial Sequence: Synthetic oligonucleotide
aauagaugagaucaagaaugacaau

SEQ ID NO: 109824 - RNA, 25 nt, Artificial Sequence
  Description of Artificial Sequence: Synthetic oligonucleotide
uguccaagacacagcagaacagaaa

SEQ ID NO: 109825 - RNA, 25 nt, Artificial Sequence
  Description of Artificial Sequence: Synthetic oligonucleotide
aguucaacugcuucguaauuggcau

SEQ ID NO: 109826 - RNA, 25 nt, Artificial Sequence
  Description of Artificial Sequence: Synthetic oligonucleotide
ucaacuucauggaaagaaagaagcg

SEQ ID NO: 109827 - RNA, 25 nt, Artificial Sequence
  Description of Artificial Sequence: Synthetic oligonucleotide
guaugacacauugauuaaagaucuc

SEQ ID NO: 109828 - RNA, 25 nt, Artificial Sequence
  Description of Artificial Sequence: Synthetic oligonucleotide
caaaaaagccaaucuuuguacucuu

SEQ ID NO: 109829 - RNA, 25 nt, Artificial Sequence
  Description of Artificial Sequence: Synthetic oligonucleotide
ugcagagaaaauucagacuaucauc

SEQ ID NO: 109830 - RNA, 25 nt, Artificial Sequence
  Description of Artificial Sequence: Synthetic oligonucleotide
ccucaaggacauuacuagugacuca

SEQ ID NO: 109831 - RNA, 25 nt, Artificial Sequence
  Description of Artificial Sequence: Synthetic oligonucleotide
agaaaauucaaacuucagaaaugaa

SEQ ID NO: 109832 - RNA, 25 nt, Artificial Sequence
  Description of Artificial Sequence: Synthetic oligonucleotide
aauccaaagcuuggucuagagugaa

SEQ ID NO: 109833 - RNA, 25 nt, Artificial Sequence
  Description of Artificial Sequence: Synthetic oligonucleotide
aaaacaacaaauucaguucugagua

SEQ ID NO: 109834 - RNA, 25 nt, Artificial Sequence
  Description of Artificial Sequence: Synthetic oligonucleotide
auaugcaauuaguguuugaaaagau

SEQ ID NO: 109835 - RNA, 25 nt, Artificial Sequence
  Description of Artificial Sequence: Synthetic oligonucleotide
uucuuaauagcuggcuguaaauacu

SEQ ID NO: 109836 - RNA, 25 nt, Artificial Sequence
  Description of Artificial Sequence: Synthetic oligonucleotide
ugcuugguuuuuuacuggguacauu

SEQ ID NO: 109837 - RNA, 25 nt, Artificial Sequence
  Description of Artificial Sequence: Synthetic oligonucleotide
uuuaucauuuauuagcgcugaagag

SEQ ID NO: 109838 - RNA, 25 nt, Artificial Sequence
  Description of Artificial Sequence: Synthetic oligonucleotide
gccaacauauuuguagauuuuuaau

SEQ ID NO: 109839 - RNA, 25 nt, Artificial Sequence
  Description of Artificial Sequence: Synthetic oligonucleotide
uaucucaugauucugccuccaagga

SEQ ID NO: 109840 - RNA, 25 nt, Artificial Sequence
  Description of Artificial Sequence: Synthetic oligonucleotide
auguuuaaaaucuaguugggaaaac

SEQ ID NO: 109841 - RNA, 25 nt, Artificial Sequence
  Description of Artificial Sequence: Synthetic oligonucleotide
caaacuucaucaagaguaaaugcag

SEQ ID NO: 109842 - RNA, 25 nt, Artificial Sequence
  Description of Artificial Sequence: Synthetic oligonucleotide
guggcaugcuaaguacccaaauagg

SEQ ID NO: 109843 - RNA, 25 nt, Artificial Sequence
  Description of Artificial Sequence: Synthetic oligonucleotide
gaguguaugcagaggaugaaagauu

SEQ ID NO: 109844 - RNA, 25 nt, Artificial Sequence
  Description of Artificial Sequence: Synthetic oligonucleotide
uaagauuaugcucuggcaucuaaca

SEQ ID NO: 109845 - RNA, 25 nt, Artificial Sequence
  Description of Artificial Sequence: Synthetic oligonucleotide
auaugauucuguaguaugaauguaa

SEQ ID NO: 109846 - RNA, 25 nt, Artificial Sequence
  Description of Artificial Sequence: Synthetic oligonucleotide
aucaguguauguuaguacaaauguc

SEQ ID NO: 109847 - RNA, 25 nt, Artificial Sequence
  Description of Artificial Sequence: Synthetic oligonucleotide
cuauccacaggcuaaccccacucua

SEQ ID NO: 109848 - RNA, 25 nt, Artificial Sequence
  Description of Artificial Sequence: Synthetic oligonucleotide
augaaucaauagaagaagcuaugac

SEQ ID NO: 109849 - RNA, 25 nt, Artificial Sequence
  Description of Artificial Sequence: Synthetic oligonucleotide
ccuuuugcugaaauaucaguuacug

SEQ ID NO: 109850 - RNA, 25 nt, Artificial Sequence
  Description of Artificial Sequence: Synthetic oligonucleotide
gaacaggcaggccacuuugccucua

SEQ ID NO: 109851 - RNA, 25 nt, Artificial Sequence
  Description of Artificial Sequence: Synthetic oligonucleotide
aaauuaccucugauaauucuagaga

SEQ ID NO: 109852 - RNA, 25 nt, Artificial Sequence
  Description of Artificial Sequence: Synthetic oligonucleotide
auuuuaccauauuucuaaacuuugu

SEQ ID NO: 109853 - RNA, 25 nt, Artificial Sequence
  Description of Artificial Sequence: Synthetic oligonucleotide
uuuauaacucugagaagaucauauu

SEQ ID NO: 109854 - RNA, 25 nt, Artificial Sequence
  Description of Artificial Sequence: Synthetic oligonucleotide
uuauguaaaguauauguauuugagu

SEQ ID NO: 109855 - RNA, 25 nt, Artificial Sequence
  Description of Artificial Sequence: Synthetic oligonucleotide
ugcagaauuuaaauaaggcucuacc

SEQ ID NO: 109856 - RNA, 25 nt, Artificial Sequence
  Description of Artificial Sequence: Synthetic oligonucleotide
cucaaagaccuuugcacaguuuauu

SEQ ID NO: 109857 - RNA, 25 nt, Artificial Sequence
  Description of Artificial Sequence: Synthetic oligonucleotide
uggugucauauuauacaauauuuca

SEQ ID NO: 109858 - RNA, 25 nt, Artificial Sequence
  Description of Artificial Sequence: Synthetic oligonucleotide
aauugugaauucacauagaaaacau

SEQ ID NO: 109859 - RNA, 25 nt, Artificial Sequence
  Description of Artificial Sequence: Synthetic oligonucleotide
uuaaauuauaauguuugacuauuau

SEQ ID NO: 109860 - RNA, 25 nt, Artificial Sequence
  Description of Artificial Sequence: Synthetic oligonucleotide
uauauguguaugcauuuuacuggcu

SEQ ID NO: 109861 - RNA, 25 nt, Artificial Sequence
  Description of Artificial Sequence: Synthetic oligonucleotide
ucaaaacuaccuacuucuuucucag

SEQ ID NO: 109862 - RNA, 25 nt, Artificial Sequence
  Description of Artificial Sequence: Synthetic oligonucleotide
ggcaucaaaagcauuuugagcagga

SEQ ID NO: 109863 - RNA, 25 nt, Artificial Sequence
  Description of Artificial Sequence: Synthetic oligonucleotide
agaguauuacuagagcuuugccacc

SEQ ID NO: 109864 - RNA, 25 nt, Artificial Sequence
  Description of Artificial Sequence: Synthetic oligonucleotide
cucuccauuuuugccuuggugcuca

SEQ ID NO: 109865 - RNA, 25 nt, Artificial Sequence
  Description of Artificial Sequence: Synthetic oligonucleotide
aucuuaauggccuaaugcaccccca

SEQ ID NO: 109866 - RNA, 25 nt, Artificial Sequence
  Description of Artificial Sequence: Synthetic oligonucleotide
aaacauggaaauaucaccaaaaaau

SEQ ID NO: 109867 - RNA, 25 nt, Artificial Sequence
  Description of Artificial Sequence: Synthetic oligonucleotide
uacuuaauaguccaccaaaaggcaa

SEQ ID NO: 109868 - RNA, 25 nt, Artificial Sequence
  Description of Artificial Sequence: Synthetic oligonucleotide
agacugcccuuagaaauucuagccu

SEQ ID NO: 109869 - RNA, 25 nt, Artificial Sequence
  Description of Artificial Sequence: Synthetic oligonucleotide
ugguuuggagauacuaacugcucuc

SEQ ID NO: 109870 - RNA, 25 nt, Artificial Sequence
  Description of Artificial Sequence: Synthetic oligonucleotide
cagagaaaguagcuuugugacaugu

SEQ ID NO: 109871 - RNA, 25 nt, Artificial Sequence
  Description of Artificial Sequence: Synthetic oligonucleotide
ucaugaacccauguuugcaaucaaa

SEQ ID NO: 109872 - RNA, 25 nt, Artificial Sequence
  Description of Artificial Sequence: Synthetic oligonucleotide
agaugauaaaauagauucuuauuuu

SEQ ID NO: 109873 - RNA, 25 nt, Artificial Sequence
  Description of Artificial Sequence: Synthetic oligonucleotide
uucccccacccccgaaaauguucaa

SEQ ID NO: 109874 - RNA, 25 nt, Artificial Sequence
  Description of Artificial Sequence: Synthetic oligonucleotide
auaaugucccauguaaaaccugcua

SEQ ID NO: 109875 - RNA, 25 nt, Artificial Sequence
  Description of Artificial Sequence: Synthetic oligonucleotide
acaaauggcagcuuauacauagcaa

SEQ ID NO: 109876 - RNA, 25 nt, Artificial Sequence
  Description of Artificial Sequence: Synthetic oligonucleotide
augguaaaaucaucaucuggauuua

SEQ ID NO: 109877 - RNA, 25 nt, Artificial Sequence
  Description of Artificial Sequence: Synthetic oligonucleotide
aggaauugcucuugucauaccccca

SEQ ID NO: 109878 - RNA, 25 nt, Artificial Sequence
  Description of Artificial Sequence: Synthetic oligonucleotide
aaguuucuaagauuuaagauucucc

SEQ ID NO: 109879 - RNA, 25 nt, Artificial Sequence
  Description of Artificial Sequence: Synthetic oligonucleotide
cuuacuacuauccuacguuuaaaua

SEQ ID NO: 109880 - RNA, 25 nt, Artificial Sequence
  Description of Artificial Sequence: Synthetic oligonucleotide
aucuuugaaaguuuguauuaaaugu

SEQ ID NO: 109881 - RNA, 25 nt, Artificial Sequence
  Description of Artificial Sequence: Synthetic oligonucleotide
ugaauuuuaagaaauaauauuuaua

SEQ ID NO: 109882 - RNA, 25 nt, Artificial Sequence
  Description of Artificial Sequence: Synthetic oligonucleotide
auuucuguaaauguaaacugugaag

SEQ ID NO: 109883 - RNA, 25 nt, Artificial Sequence
  Description of Artificial Sequence: Synthetic oligonucleotide
gauaguuauaaacugaagcagauac

SEQ ID NO: 109884 - RNA, 25 nt, Artificial Sequence
  Description of Artificial Sequence: Synthetic oligonucleotide
ccuggaaccaccuaaagaacuucca

SEQ ID NO: 109885 - RNA, 25 nt, Artificial Sequence
  Description of Artificial Sequence: Synthetic oligonucleotide
auuuauggaggauuuuuuugccccu

SEQ ID NO: 109886 - RNA, 25 nt, Artificial Sequence
  Description of Artificial Sequence: Synthetic oligonucleotide
uuguguuuggaauuauaaaauauag

SEQ ID NO: 109887 - RNA, 25 nt, Artificial Sequence
  Description of Artificial Sequence: Synthetic oligonucleotide
gguaaaaguacguaauuaaauaaug

SEQ ID NO: 109888 - RNA, 25 nt, Artificial Sequence
  Description of Artificial Sequence: Synthetic oligonucleotide
aaccuuaaauccugaaacaguggca

SEQ ID NO: 109889 - DNA, 21 bp, Artificial Sequence
  Description of Artificial Sequence: Synthetic oligonucleotide
  Description of Combined DNA/RNA Molecule: Synthetic oligonucleotide
cuacacaaaucagcgauuutt

SEQ ID NO: 109890 - DNA, 21 bp, Artificial Sequence
  Description of Artificial Sequence: Synthetic oligonucleotide
  Description of Combined DNA/RNA Molecule: Synthetic oligonucleotide
aaaucgcugauuuguguagtt

SEQ ID NO: 109891 - DNA, 25 bp, Artificial Sequence
  Description of Artificial Sequence: Synthetic oligonucleotide
  Description of Combined DNA/RNA Molecule: Synthetic oligonucleotide
cuacacaaaucagcgauuuccaugt

SEQ ID NO: 109892 - RNA, 27 nt, Artificial Sequence
  Description of Artificial Sequence: Synthetic oligonucleotide
acauggaaaucgcugauuuguguaguc

SEQ ID NO: 109893 - RNA, 13 nt, Artificial Sequence
  Description of Artificial Sequence: Synthetic oligonucleotide
cuacacaaaucag

SEQ ID NO: 109894 - DNA, 11 bp, Artificial Sequence
  Description of Artificial Sequence: Synthetic oligonucleotide
  Description of Combined DNA/RNA Molecule: Synthetic oligonucleotide
gauuuccaugt

SEQ ID NO: 109895 - DNA, 21 bp, Artificial Sequence
  Description of Artificial Sequence: Synthetic oligonucleotide
  Description of Combined DNA/RNA Molecule: Synthetic oligonucleotide
ggaucuuauuucuucggagtt

SEQ ID NO: 109896 - DNA, 21 bp, Artificial Sequence
  Description of Artificial Sequence: Synthetic oligonucleotide
  Description of Combined DNA/RNA Molecule: Synthetic oligonucleotide
cuccgaagaaauaagaucctt

SEQ ID NO: 109897 - RNA, 11 nt, Artificial Sequence
  Description of Artificial Sequence: Synthetic oligonucleotide
ggaucuuauuu

SEQ ID NO: 109898 - DNA, 10 bp, Artificial Sequence
  Description of Artificial Sequence: Synthetic oligonucleotide
  Description of Combined DNA/RNA Molecule: Synthetic oligonucleotide
cuucggagtt

SEQ ID NO: 109899 - RNA, 27 nt, Artificial Sequence
  Description of Artificial Sequence: Synthetic oligonucleotide
cauugucuccgaagaaauaagauccuu

SEQ ID NO: 109900 - RNA, 8 nt, Artificial Sequence
  Description of Artificial Sequence: Synthetic oligonucleotide
  modified_base (2): LNA-G
ggaucuua

SEQ ID NO: 109901 - DNA, 17 bp, Artificial Sequence
  Description of Artificial Sequence: Synthetic oligonucleotide
  Description of Combined DNA/RNA Molecule: Synthetic oligonucleotide
uuucuucggagacaatg

SEQ ID NO: 109902 - DNA, 16 bp, Artificial Sequence
  Description of Artificial Sequence: Synthetic oligonucleotide
  Description of Combined DNA/RNA Molecule: Synthetic oligonucleotide
uucuucggagacaatg

SEQ ID NO: 109903 - DNA, 15 bp, Artificial Sequence
  Description of Artificial Sequence: Synthetic oligonucleotide
  Description of Combined DNA/RNA Molecule: Synthetic oligonucleotide
ucuucggagacaatg

SEQ ID NO: 109904 - DNA, 14 bp, Artificial Sequence
  Description of Artificial Sequence: Synthetic oligonucleotide
  Description of Combined DNA/RNA Molecule: Synthetic oligonucleotide
cuucggagacaatg

SEQ ID NO: 109905 - DNA, 13 bp, Artificial Sequence
  Description of Artificial Sequence: Synthetic oligonucleotide
  Description of Combined DNA/RNA Molecule: Synthetic oligonucleotide
uucggagacaatg

SEQ ID NO: 109906 - DNA, 12 bp, Artificial Sequence
  Description of Artificial Sequence: Synthetic oligonucleotide
  Description of Combined DNA/RNA Molecule: Synthetic oligonucleotide
ucggagacaatg

SEQ ID NO: 109907 - DNA, 11 bp, Artificial Sequence
  Description of Artificial Sequence: Synthetic oligonucleotide
  Description of Combined DNA/RNA Molecule: Synthetic oligonucleotide
cggagacaatg

SEQ ID NO: 109908 - RNA, 9 nt, Artificial Sequence
  Description of Artificial Sequence: Synthetic oligonucleotide
  modified_base (2): LNA-G
ggaucuuau

SEQ ID NO: 109909 - RNA, 10 nt, Artificial Sequence
  Description of Artificial Sequence: Synthetic oligonucleotide
  modified_base (2): LNA-G
ggaucuuauu

SEQ ID NO: 109910 - RNA, 11 nt, Artificial Sequence
  Description of Artificial Sequence: Synthetic oligonucleotide
  modified_base (2): LNA-G
ggaucuuauuu

SEQ ID NO: 109911 - RNA, 12 nt, Artificial Sequence
  Description of Artificial Sequence: Synthetic oligonucleotide
  modified_base (2): LNA-G
ggaucuuauuuc

SEQ ID NO: 109912 - RNA, 8 nt, Artificial Sequence
  Description of Artificial Sequence: Synthetic oligonucleotide
  modified_base (3): LNA-A
cuacacaa

SEQ ID NO: 109913 - DNA, 13 bp, Artificial Sequence
  Description of Artificial Sequence: Synthetic oligonucleotide
  Description of Combined DNA/RNA Molecule: Synthetic oligonucleotide
  modified_base (8): LNA-A
aucagcgauuutt

SEQ ID NO: 109914 - DNA, 12 bp, Artificial Sequence
  Description of Artificial Sequence: Synthetic oligonucleotide
  Description of Combined DNA/RNA Molecule: Synthetic oligonucleotide
  modified_base (7): LNA-A
ucagcgauuutt

SEQ ID NO: 109915 - DNA, 11 bp, Artificial Sequence
  Description of Artificial Sequence: Synthetic oligonucleotide
  Description of Combined DNA/RNA Molecule: Synthetic oligonucleotide
  modified_base (6): LNA-A
cagcgauuutt

SEQ ID NO: 109916 - DNA, 10 bp, Artificial Sequence
  Description of Artificial Sequence: Synthetic oligonucleotide
  Description of Combined DNA/RNA Molecule: Synthetic oligonucleotide
  modified_base (5): LNA-A
agcgauuutt

SEQ ID NO: 109917 - DNA, 9 bp, Artificial Sequence
  Description of Artificial Sequence: Synthetic oligonucleotide
  Description of Combined DNA/RNA Molecule: Synthetic oligonucleotide
  modified_base (4): LNA-A
gcgauuutt

SEQ ID NO: 109918 - DNA, 8 bp, Artificial Sequence
  Description of Artificial Sequence: Synthetic oligonucleotide
  Description of Combined DNA/RNA Molecule: Synthetic oligonucleotide
  modified_base (3): LNA-A
cgauuutt

SEQ ID NO: 109919 - DNA, 7 bp, Artificial Sequence
  Description of Artificial Sequence: Synthetic oligonucleotide
  Description of Combined DNA/RNA Molecule: Synthetic oligonucleotide
  modified_base (2): LNA-A
gauuutt

SEQ ID NO: 109920 - RNA, 9 nt, Artificial Sequence
  Description of Artificial Sequence: Synthetic oligonucleotide
  modified_base (3): LNA-A
cuacacaaa

SEQ ID NO: 109921 - RNA, 10 nt, Artificial Sequence
  Description of Artificial Sequence: Synthetic oligonucleotide
  modified_base (3): LNA-A
cuacacaaau

SEQ ID NO: 109922 - RNA, 11 nt, Artificial Sequence
  Description of Artificial Sequence: Synthetic oligonucleotide
  modified_base (3): LNA-A
cuacacaaauc

SEQ ID NO: 109923 - RNA, 12 nt, Artificial Sequence
  Description of Artificial Sequence: Synthetic oligonucleotide
  modified_base (3): LNA-A
cuacacaaauca

SEQ ID NO: 109924 - RNA, 13 nt, Artificial Sequence
  Description of Artificial Sequence: Synthetic oligonucleotide
  modified_base (3): LNA-A
cuacacaaaucag

SEQ ID NO: 109925 - RNA, 14 nt, Artificial Sequence
  Description of Artificial Sequence: Synthetic oligonucleotide
  modified_base (3): LNA-A
cuacacaaaucagc

SEQ ID NO: 109926 - RNA, 13 nt, Artificial Sequence
  Description of Artificial Sequence: Synthetic oligonucleotide
  modified_base (2): LNA-G
ggaucuuauuucu

SEQ ID NO: 109927 - RNA, 14 nt, Artificial Sequence
  Description of Artificial Sequence: Synthetic oligonucleotide
  modified_base (2): LNA-G
ggaucuuauuucuu

SEQ ID NO: 109928 - RNA, 8 nt, Artificial Sequence
  Description of Artificial Sequence: Synthetic oligonucleotide
  modified_base (2): LNA-G
  modified_base (8): LNA-A
ggaucuua

SEQ ID NO: 109929 - RNA, 9 nt, Artificial Sequence
  Description of Artificial Sequence: Synthetic oligonucleotide
  modified_base (2): LNA-G
  modified_base (9): LNA-U
ggaucuuau

SEQ ID NO: 109930 - RNA, 10 nt, Artificial Sequence
  Description of Artificial Sequence: Synthetic oligonucleotide
  modified_base (2): LNA-G
  modified_base (10): LNA-U
ggaucuuauu

SEQ ID NO: 109931 - RNA, 11 nt, Artificial Sequence
  Description of Artificial Sequence: Synthetic oligonucleotide
  modified_base (2): LNA-G
  modified_base (11): LNA-U
ggaucuuauuu

SEQ ID NO: 109932 - RNA, 12 nt, Artificial Sequence
  Description of Artificial Sequence: Synthetic oligonucleotide
  modified_base (2): LNA-G
  modified_base (12): LNA-C
ggaucuuauuuc

SEQ ID NO: 109933 - RNA, 13 nt, Artificial Sequence
  Description of Artificial Sequence: Synthetic oligonucleotide
  modified_base (2): LNA-G
  modified_base (13): LNA-U
ggaucuuauuucu

SEQ ID NO: 109934 - RNA, 14 nt, Artificial Sequence
  Description of Artificial Sequence: Synthetic oligonucleotide
  modified_base (2): LNA-G
  modified_base (14): LNA-U
ggaucuuauuucuu

SEQ ID NO: 109935 - DNA, 13 bp, Artificial Sequence
  Description of Artificial Sequence: Synthetic oligonucleotide
  Description of Combined DNA/RNA Molecule: Synthetic oligonucleotide
  modified_base (8): LNA-G
uuucuucggagtt

SEQ ID NO: 109936 - DNA, 12 bp, Artificial Sequence
  Description of Artificial Sequence: Synthetic oligonucleotide
  Description of Combined DNA/RNA Molecule: Synthetic oligonucleotide
  modified_base (7): LNA-G
uucuucggagtt

SEQ ID NO: 109937 - DNA, 11 bp, Artificial Sequence
  Description of Artificial Sequence: Synthetic oligonucleotide
  Description of Combined DNA/RNA Molecule: Synthetic oligonucleotide
  modified_base (6): LNA-G
ucuucggagtt

SEQ ID NO: 109938 - DNA, 10 bp, Artificial Sequence
  Description of Artificial Sequence: Synthetic oligonucleotide
  Description of Combined DNA/RNA Molecule: Synthetic oligonucleotide
  modified_base (5): LNA-G
cuucggagtt

SEQ ID NO: 109939 - DNA, 9 bp, Artificial Sequence
  Description of Artificial Sequence: Synthetic oligonucleotide
  Description of Combined DNA/RNA Molecule: Synthetic oligonucleotide
  modified_base (4): LNA-G
uucggagtt

SEQ ID NO: 109940 - DNA, 8 bp, Artificial Sequence
  Description of Artificial Sequence: Synthetic oligonucleotide
  Description of Combined DNA/RNA Molecule: Synthetic oligonucleotide
  modified_base (3): LNA-G
ucggagtt

SEQ ID NO: 109941 - DNA, 7 bp, Artificial Sequence
  Description of Artificial Sequence: Synthetic oligonucleotide
  Description of Combined DNA/RNA Molecule: Synthetic oligonucleotide
  modified_base (2): LNA-G
cggagtt

SEQ ID NO: 109942 - DNA, 13 bp, Artificial Sequence
  Description of Artificial Sequence: Synthetic oligonucleotide
  Description of Combined DNA/RNA Molecule: Synthetic oligonucleotide
  modified_base (1): LNA-U
  modified_base (8): LNA-G
uuucuucggagtt

SEQ ID NO: 109943 - DNA, 12 bp, Artificial Sequence
  Description of Artificial Sequence: Synthetic oligonucleotide
  Description of Combined DNA/RNA Molecule: Synthetic oligonucleotide
  modified_base (1): LNA-U
  modified_base (7): LNA-G
uucuucggagtt

SEQ ID NO: 109944 - DNA, 11 bp, Artificial Sequence
  Description of Artificial Sequence: Synthetic oligonucleotide
  Description of Combined DNA/RNA Molecule: Synthetic oligonucleotide
  modified_base (1): LNA-U
  modified_base (6): LNA-G
ucuucggagtt

SEQ ID NO: 109945 - DNA, 10 bp, Artificial Sequence
  Description of Artificial Sequence: Synthetic oligonucleotide
  Description of Combined DNA/RNA Molecule: Synthetic oligonucleotide
  modified_base (1): LNA-C
  modified_base (5): LNA-G
cuucggagtt

SEQ ID NO: 109946 - DNA, 9 bp, Artificial Sequence
  Description of Artificial Sequence: Synthetic oligonucleotide
  Description of Combined DNA/RNA Molecule: Synthetic oligonucleotide
  modified_base (1): LNA-U
  modified_base (4): LNA-G
uucggagtt

SEQ ID NO: 109947 - DNA, 8 bp, Artificial Sequence
  Description of Artificial Sequence: Synthetic oligonucleotide
  Description of Combined DNA/RNA Molecule: Synthetic oligonucleotide
  modified_base (1): LNA-U
  modified_base (3): LNA-G
ucggagtt

SEQ ID NO: 109948 - DNA, 7 bp, Artificial Sequence
  Description of Artificial Sequence: Synthetic oligonucleotide
  Description of Combined DNA/RNA Molecule: Synthetic oligonucleotide
  modified_base (1): LNA-C
  modified_base (2): LNA-G
cggagtt

SEQ ID NO: 109949 - DNA, 21 bp, Artificial Sequence
  Description of Artificial Sequence: Synthetic oligonucleotide
  Description of Combined DNA/RNA Molecule: Synthetic oligonucleotide
  modified_base (2): LNA-G
  modified_base (16): LNA-G
ggaucuuauuucuucggagtt

SEQ ID NO: 109950 - DNA, 25 bp, Artificial Sequence
  Description of Artificial Sequence: Synthetic oligonucleotide
  Description of Combined DNA/RNA Molecule: Synthetic oligonucleotide
ggaucuuauuucuucggagacaatg

SEQ ID NO: 109951 - RNA, 25 nt, Artificial Sequence
  Description of Artificial Sequence: Synthetic oligonucleotide
uuaagcagaguucaaaagcccuuca

SEQ ID NO: 109952 - RNA, 25 nt, Artificial Sequence
  Description of Artificial Sequence: Synthetic oligonucleotide
uaagcagaguucaaaagcccuucag

SEQ ID NO: 109953 - RNA, 25 nt, Artificial Sequence
  Description of Artificial Sequence: Synthetic oligonucleotide
agcagaguucaaaagcccuucagcg

SEQ ID NO: 109954 - RNA, 25 nt, Artificial Sequence
  Description of Artificial Sequence: Synthetic oligonucleotide
cucagggucugagugaagccgcucg

SEQ ID NO: 109955 - RNA, 25 nt, Artificial Sequence
  Description of Artificial Sequence: Synthetic oligonucleotide
caagcaacuacaucacgccagucaa

SEQ ID NO: 109956 - RNA, 25 nt, Artificial Sequence
  Description of Artificial Sequence: Synthetic oligonucleotide
aucaauggcagcuucuuggugcgug

SEQ ID NO: 109957 - RNA, 25 nt, Artificial Sequence
  Description of Artificial Sequence: Synthetic oligonucleotide
uuccagcccacauuggauucaucag

SEQ ID NO: 109958 - RNA, 25 nt, Artificial Sequence
  Description of Artificial Sequence: Synthetic oligonucleotide
cagcugagaauguggaauaccuaag

SEQ ID NO: 109959 - RNA, 25 nt, Artificial Sequence
  Description of Artificial Sequence: Synthetic oligonucleotide
aacguaucuccuaauuugaggcuca

SEQ ID NO: 109960 - RNA, 25 nt, Artificial Sequence
  Description of Artificial Sequence: Synthetic oligonucleotide
ccuaaaauaauuucucuacaauugg

SEQ ID NO: 109961 - RNA, 25 nt, Artificial Sequence
  Description of Artificial Sequence: Synthetic oligonucleotide
uggaagauucagcuaguuaggagcc

SEQ ID NO: 109962 - RNA, 25 nt, Artificial Sequence
  Description of Artificial Sequence: Synthetic oligonucleotide
uuaaacucuccuagucaauauccac

SEQ ID NO: 109963 - RNA, 25 nt, Artificial Sequence
  Description of Artificial Sequence: Synthetic oligonucleotide
cagccuacaguuauguucagucaca

SEQ ID NO: 109964 - RNA, 25 nt, Artificial Sequence
  Description of Artificial Sequence: Synthetic oligonucleotide
guuauguucagucacacacacauac

SEQ ID NO: 109965 - RNA, 25 nt, Artificial Sequence
  Description of Artificial Sequence: Synthetic oligonucleotide
cacauacaaaauguuccuuuugcuu

SEQ ID NO: 109966 - RNA, 25 nt, Artificial Sequence
  Description of Artificial Sequence: Synthetic oligonucleotide
uccuuuugcuuuuaaaguaauuuuu

SEQ ID NO: 109967 - RNA, 25 nt, Artificial Sequence
  Description of Artificial Sequence: Synthetic oligonucleotide
ugaccugugaagcaacagucaaugg

SEQ ID NO: 109968 - RNA, 25 nt, Artificial Sequence
  Description of Artificial Sequence: Synthetic oligonucleotide
cuaucucacacaucgacaaaccaau

SEQ ID NO: 109969 - RNA, 25 nt, Artificial Sequence
  Description of Artificial Sequence: Synthetic oligonucleotide
uguccucaauuguacugcuaccacu

SEQ ID NO: 109970 - RNA, 25 nt, Artificial Sequence
  Description of Artificial Sequence: Synthetic oligonucleotide
aaaccguagcuggcaagcggucuua

SEQ ID NO: 109971 - RNA, 25 nt, Artificial Sequence
  Description of Artificial Sequence: Synthetic oligonucleotide
uagcuggcaagcggucuuaccggcu

SEQ ID NO: 109972 - RNA, 25 nt, Artificial Sequence
  Description of Artificial Sequence: Synthetic oligonucleotide
uuguaugguuaaaagauggguuacc

SEQ ID NO: 109973 - RNA, 25 nt, Artificial Sequence
  Description of Artificial Sequence: Synthetic oligonucleotide
ugguuaaaagauggguuaccugcga

SEQ ID NO: 109974 - RNA, 25 nt, Artificial Sequence
  Description of Artificial Sequence: Synthetic oligonucleotide
cagggaauuauacaaucuugcugag

SEQ ID NO: 109975 - RNA, 25 nt, Artificial Sequence
  Description of Artificial Sequence: Synthetic oligonucleotide
acaaucuugcugagcauaaaacagu

SEQ ID NO: 109976 - RNA, 25 nt, Artificial Sequence
  Description of Artificial Sequence: Synthetic oligonucleotide
ccaauaaugaagaguccuuuauccu

SEQ ID NO: 109977 - RNA, 25 nt, Artificial Sequence
  Description of Artificial Sequence: Synthetic oligonucleotide
acuuuggauguuccaacgcaaguug

SEQ ID NO: 109978 - RNA, 25 nt, Artificial Sequence
  Description of Artificial Sequence: Synthetic oligonucleotide
aaugcuuccacuaaacugaaaccau

SEQ ID NO: 109979 - RNA, 25 nt, Artificial Sequence
  Description of Artificial Sequence: Synthetic oligonucleotide
gagaaaguuugacuuuguuaaauau

SEQ ID NO: 109980 - RNA, 25 nt, Artificial Sequence
  Description of Artificial Sequence: Synthetic oligonucleotide
aaagaacuacuguauauuaaaaguu

SEQ ID NO: 109981 - RNA, 25 nt, Artificial Sequence
  Description of Artificial Sequence: Synthetic oligonucleotide
uuagaaauacggguuuugacuuaac

SEQ ID NO: 109982 - RNA, 25 nt, Artificial Sequence
  Description of Artificial Sequence: Synthetic oligonucleotide
aacauggguacagcaaacucagcac

SEQ ID NO: 109983 - RNA, 25 nt, Artificial Sequence
  Description of Artificial Sequence: Synthetic oligonucleotide
aaagacacagaagaugcugaccuca

SEQ ID NO: 109984 - RNA, 25 nt, Artificial Sequence
  Description of Artificial Sequence: Synthetic oligonucleotide
uaguagggagguuuauucagaucgc

SEQ ID NO: 109985 - RNA, 25 nt, Artificial Sequence
  Description of Artificial Sequence: Synthetic oligonucleotide
gccuucugcagcaggguucugggau

SEQ ID NO: 109986 - RNA, 25 nt, Artificial Sequence
  Description of Artificial Sequence: Synthetic oligonucleotide
ggucugguacauauuggaaauuaug

SEQ ID NO: 109987 - RNA, 25 nt, Artificial Sequence
  Description of Artificial Sequence: Synthetic oligonucleotide
cuaguccuuccgauggaagcacuag

SEQ ID NO: 109988 - RNA, 25 nt, Artificial Sequence
  Description of Artificial Sequence: Synthetic oligonucleotide
ccagugaauauuguuuuuaugugga

SEQ ID NO: 109989 - RNA, 25 nt, Artificial Sequence
  Description of Artificial Sequence: Synthetic oligonucleotide
augaauucaaguuggaauugguaga

SEQ ID NO: 109990 - RNA, 25 nt, Artificial Sequence
  Description of Artificial Sequence: Synthetic oligonucleotide
caggacacagauuuagacuuggaga

SEQ ID NO: 109991 - RNA, 25 nt, Artificial Sequence
  Description of Artificial Sequence: Synthetic oligonucleotide
cucaaagcacaguuacaguauucca

SEQ ID NO: 109992 - RNA, 25 nt, Artificial Sequence
  Description of Artificial Sequence: Synthetic oligonucleotide
accacugccaccacugaugaauuaa

SEQ ID NO: 109993 - RNA, 25 nt, Artificial Sequence
  Description of Artificial Sequence: Synthetic oligonucleotide
gaaacuacuagugccacaucaucac

SEQ ID NO: 109994 - RNA, 25 nt, Artificial Sequence
  Description of Artificial Sequence: Synthetic oligonucleotide
aagucggacagccucaccaaacaga

SEQ ID NO: 109995 - RNA, 25 nt, Artificial Sequence
  Description of Artificial Sequence: Synthetic oligonucleotide
gaaagcgaaaaauggaacaugaugg

SEQ ID NO: 109996 - RNA, 25 nt, Artificial Sequence
  Description of Artificial Sequence: Synthetic oligonucleotide
cccucugauuuagcauguagacugc

SEQ ID NO: 109997 - RNA, 25 nt, Artificial Sequence
  Description of Artificial Sequence: Synthetic oligonucleotide
ugagcuauuuaaggaucuauuuaug

SEQ ID NO: 109998 - RNA, 25 nt, Artificial Sequence
  Description of Artificial Sequence: Synthetic oligonucleotide
aaaaggugaaaaagcacuauuauca

SEQ ID NO: 109999 - RNA, 25 nt, Artificial Sequence
  Description of Artificial Sequence: Synthetic oligonucleotide
gaaaaagcacuauuaucaguucugc

SEQ ID NO: 110000 - RNA, 25 nt, Artificial Sequence
  Description of Artificial Sequence: Synthetic oligonucleotide
ggcugaaaagaaagauuaaaccuac

SEQ ID NO: 110001 - RNA, 25 nt, Artificial Sequence
  Description of Artificial Sequence: Synthetic oligonucleotide
uaaacccuuauaauaaaauccuucu

SEQ ID NO: 110002 - RNA, 25 nt, Artificial Sequence
  Description of Artificial Sequence: Synthetic oligonucleotide
cauacuauuagccaaugcuguagac

SEQ ID NO: 110003 - RNA, 25 nt, Artificial Sequence
  Description of Artificial Sequence: Synthetic oligonucleotide
gacagaagcauuuugauaggaauag

SEQ ID NO: 110004 - RNA, 25 nt, Artificial Sequence
  Description of Artificial Sequence: Synthetic oligonucleotide
agagcaaauaagauaauggcccuga

SEQ ID NO: 110005 - RNA, 25 nt, Artificial Sequence
  Description of Artificial Sequence: Synthetic oligonucleotide
ccaacauuuuucucuuccucaagca

SEQ ID NO: 110006 - RNA, 25 nt, Artificial Sequence
  Description of Artificial Sequence: Synthetic oligonucleotide
uuaaguaugagaaaaguucagccca

SEQ ID NO: 110007 - RNA, 25 nt, Artificial Sequence
  Description of Artificial Sequence: Synthetic oligonucleotide
caggaauaaagauggcugcugaacc

SEQ ID NO: 110008 - RNA, 25 nt, Artificial Sequence
  Description of Artificial Sequence: Synthetic oligonucleotide
aauuugaaugaccaaguucucuuca

SEQ ID NO: 110009 - RNA, 25 nt, Artificial Sequence
  Description of Artificial Sequence: Synthetic oligonucleotide
auguauaaagauagccagccuagag

SEQ ID NO: 110010 - RNA, 25 nt, Artificial Sequence
  Description of Artificial Sequence: Synthetic oligonucleotide
ggcuguaacuaucucugugaagugu

SEQ ID NO: 110011 - RNA, 25 nt, Artificial Sequence
  Description of Artificial Sequence: Synthetic oligonucleotide
ucugugaagugugagaaaauuucaa

SEQ ID NO: 110012 - RNA, 25 nt, Artificial Sequence
  Description of Artificial Sequence: Synthetic oligonucleotide
ccuuuaaggaaaugaauccuccuga

SEQ ID NO: 110013 - RNA, 25 nt, Artificial Sequence
  Description of Artificial Sequence: Synthetic oligonucleotide
aaggauacaaaaagugacaucauau

SEQ ID NO: 110014 - RNA, 25 nt, Artificial Sequence
  Description of Artificial Sequence: Synthetic oligonucleotide
agaugcaauuugaaucuucaucaua

SEQ ID NO: 110015 - RNA, 25 nt, Artificial Sequence
  Description of Artificial Sequence: Synthetic oligonucleotide
guucaaaacgaagacuagcuauuaa

SEQ ID NO: 110016 - RNA, 25 nt, Artificial Sequence
  Description of Artificial Sequence: Synthetic oligonucleotide
gugaaaccucaucucuacuaaaaau

SEQ ID NO: 110017 - RNA, 25 nt, Artificial Sequence
  Description of Artificial Sequence: Synthetic oligonucleotide
acgaaagagaagcucuaucucgccu

SEQ ID NO: 110018 - RNA, 25 nt, Artificial Sequence
  Description of Artificial Sequence: Synthetic oligonucleotide
cuccacaagcgccuucgguccaguu

SEQ ID NO: 110019 - RNA, 25 nt, Artificial Sequence
  Description of Artificial Sequence: Synthetic oligonucleotide
gagaagauuccaaagauguagccgc

SEQ ID NO: 110020 - RNA, 25 nt, Artificial Sequence
  Description of Artificial Sequence: Synthetic oligonucleotide
aaucuggauucaaugaggagacuug

SEQ ID NO: 110021 - RNA, 25 nt, Artificial Sequence
  Description of Artificial Sequence: Synthetic oligonucleotide
agaacagauuugagaguagugagga

SEQ ID NO: 110022 - RNA, 25 nt, Artificial Sequence
  Description of Artificial Sequence: Synthetic oligonucleotide
ccagagcugugcagaugaguacaaa

SEQ ID NO: 110023 - RNA, 25 nt, Artificial Sequence
  Description of Artificial Sequence: Synthetic oligonucleotide
ccucagauuguuguuguuaaugggc

SEQ ID NO: 110024 - RNA, 25 nt, Artificial Sequence
  Description of Artificial Sequence: Synthetic oligonucleotide
cuauuuuaauuauuuuuaauuuauu

SEQ ID NO: 110025 - RNA, 25 nt, Artificial Sequence
  Description of Artificial Sequence: Synthetic oligonucleotide
uuuaauuuauuaauauuuaaauaug

SEQ ID NO: 110026 - RNA, 25 nt, Artificial Sequence
  Description of Artificial Sequence: Synthetic oligonucleotide
augcaguuugaauauccuuuguuuc

SEQ ID NO: 110027 - RNA, 25 nt, Artificial Sequence
  Description of Artificial Sequence: Synthetic oligonucleotide
caugcugcuggcgucuaaguguuug

SEQ ID NO: 110028 - RNA, 25 nt, Artificial Sequence
  Description of Artificial Sequence: Synthetic oligonucleotide
agaugugcauuucaccugugacaaa

SEQ ID NO: 110029 - RNA, 25 nt, Artificial Sequence
  Description of Artificial Sequence: Synthetic oligonucleotide
ucaaaaccugugccaggcugaauua

SEQ ID NO: 110030 - RNA, 25 nt, Artificial Sequence
  Description of Artificial Sequence: Synthetic oligonucleotide
gaauguggguagucauucuuacaau

SEQ ID NO: 110031 - RNA, 25 nt, Artificial Sequence
  Description of Artificial Sequence: Synthetic oligonucleotide
auguggguagucauucuuacaauug

SEQ ID NO: 110032 - RNA, 25 nt, Artificial Sequence
  Description of Artificial Sequence: Synthetic oligonucleotide
ugaaaaugagcaucagagaguguac

SEQ ID NO: 110033 - RNA, 25 nt, Artificial Sequence
  Description of Artificial Sequence: Synthetic oligonucleotide
uugcuuuucauguagaacucagcag

SEQ ID NO: 110034 - RNA, 25 nt, Artificial Sequence
  Description of Artificial Sequence: Synthetic oligonucleotide
uguauuucuauauuuauuuucagua

SEQ ID NO: 110035 - RNA, 25 nt, Artificial Sequence
  Description of Artificial Sequence: Synthetic oligonucleotide
uuugauuaauguuucuuaaauggaa

SEQ ID NO: 110036 - RNA, 25 nt, Artificial Sequence
  Description of Artificial Sequence: Synthetic oligonucleotide
caacguguauagugccuaaaauugu

SEQ ID NO: 110037 - RNA, 25 nt, Artificial Sequence
  Description of Artificial Sequence: Synthetic oligonucleotide
cauauccuuggcuacuaacaucugg

SEQ ID NO: 110038 - RNA, 25 nt, Artificial Sequence
  Description of Artificial Sequence: Synthetic oligonucleotide
uacuaacaucuggagacugugagcu

SEQ ID NO: 110039 - RNA, 25 nt, Artificial Sequence
  Description of Artificial Sequence: Synthetic oligonucleotide
cauaaguugugugcuuuuuauuaau

SEQ ID NO: 110040 - RNA, 25 nt, Artificial Sequence
  Description of Artificial Sequence: Synthetic oligonucleotide
gcaucauuuuggcucuucuuacauu

SEQ ID NO: 110041 - RNA, 25 nt, Artificial Sequence
  Description of Artificial Sequence: Synthetic oligonucleotide
gcucuucuuacauuuguaaaaaugu

SEQ ID NO: 110042 - RNA, 25 nt, Artificial Sequence
  Description of Artificial Sequence: Synthetic oligonucleotide
agauuaggucaucuuaauucauauu

SEQ ID NO: 110043 - RNA, 25 nt, Artificial Sequence
  Description of Artificial Sequence: Synthetic oligonucleotide
auggaauugaaagaacuaaucauga

SEQ ID NO: 110044 - RNA, 25 nt, Artificial Sequence
  Description of Artificial Sequence: Synthetic oligonucleotide
cacacucauuccuucugcucuuggg

SEQ ID NO: 110045 - RNA, 25 nt, Artificial Sequence
  Description of Artificial Sequence: Synthetic oligonucleotide
uguagagguaaccaguagcuuugag

SEQ ID NO: 110046 - RNA, 25 nt, Artificial Sequence
  Description of Artificial Sequence: Synthetic oligonucleotide
caaccacaugccacguaauauuuca

SEQ ID NO: 110047 - RNA, 25 nt, Artificial Sequence
  Description of Artificial Sequence: Synthetic oligonucleotide
ucggaaacaaguuauucucuucacu

SEQ ID NO: 110048 - RNA, 25 nt, Artificial Sequence
  Description of Artificial Sequence: Synthetic oligonucleotide
acucccaauaacuaaugcuaagaaa

SEQ ID NO: 110049 - RNA, 25 nt, Artificial Sequence
  Description of Artificial Sequence: Synthetic oligonucleotide
aaugcuaagaaaugcugaaaaucaa

SEQ ID NO: 110050 - RNA, 25 nt, Artificial Sequence
  Description of Artificial Sequence: Synthetic oligonucleotide
gucuuucucuaaauaugauuacuuu

SEQ ID NO: 110051 - RNA, 25 nt, Artificial Sequence
  Description of Artificial Sequence: Synthetic oligonucleotide
ugaauuucaggcauuuuguucuaca

SEQ ID NO: 110052 - RNA, 25 nt, Artificial Sequence
  Description of Artificial Sequence: Synthetic oligonucleotide
cgauucccucucacccgggacucuc

SEQ ID NO: 110053 - RNA, 25 nt, Artificial Sequence
  Description of Artificial Sequence: Synthetic oligonucleotide
aggaaagugaaccuuuaaaguaaag

SEQ ID NO: 110054 - RNA, 25 nt, Artificial Sequence
  Description of Artificial Sequence: Synthetic oligonucleotide
gaggcugcaugcucuggaagccugg

SEQ ID NO: 110055 - RNA, 25 nt, Artificial Sequence
  Description of Artificial Sequence: Synthetic oligonucleotide
ucucugaacagaaaacaaaagagag

SEQ ID NO: 110056 - RNA, 25 nt, Artificial Sequence
  Description of Artificial Sequence: Synthetic oligonucleotide
aacuuggcuguaaucaguuaugccg

SEQ ID NO: 110057 - RNA, 25 nt, Artificial Sequence
  Description of Artificial Sequence: Synthetic oligonucleotide
agaagccaaaauuaaaagaagucca

SEQ ID NO: 110058 - RNA, 25 nt, Artificial Sequence
  Description of Artificial Sequence: Synthetic oligonucleotide
auuaaaagaaguccaggugagguua

SEQ ID NO: 110059 - RNA, 25 nt, Artificial Sequence
  Description of Artificial Sequence: Synthetic oligonucleotide
gaauccggauuaucgggaagaggac

SEQ ID NO: 110060 - RNA, 25 nt, Artificial Sequence
  Description of Artificial Sequence: Synthetic oligonucleotide
aaugugacaucaaagcaaguauugu

SEQ ID NO: 110061 - RNA, 25 nt, Artificial Sequence
  Description of Artificial Sequence: Synthetic oligonucleotide
caucaaagcaaguauuguagcacuc

SEQ ID NO: 110062 - RNA, 25 nt, Artificial Sequence
  Description of Artificial Sequence: Synthetic oligonucleotide
agagagagaaaacaaaaccacaaau

SEQ ID NO: 110063 - RNA, 25 nt, Artificial Sequence
  Description of Artificial Sequence: Synthetic oligonucleotide
ucgcuguaguauuuaagcccauaca

SEQ ID NO: 110064 - RNA, 25 nt, Artificial Sequence
  Description of Artificial Sequence: Synthetic oligonucleotide
cgcuguaguauuuaagcccauacag

SEQ ID NO: 110065 - RNA, 25 nt, Artificial Sequence
  Description of Artificial Sequence: Synthetic oligonucleotide
auuuaagcccauacagaaaccuucc

SEQ ID NO: 110066 - RNA, 25 nt, Artificial Sequence
  Description of Artificial Sequence: Synthetic oligonucleotide
auuaaaauaaacaugguauaccuac

SEQ ID NO: 110067 - RNA, 25 nt, Artificial Sequence
  Description of Artificial Sequence: Synthetic oligonucleotide
cuguucugaucggccaguuuucgga

SEQ ID NO: 110068 - RNA, 25 nt, Artificial Sequence
  Description of Artificial Sequence: Synthetic oligonucleotide
aaauaauuugaacuuuggaacaggg

SEQ ID NO: 110069 - RNA, 25 nt, Artificial Sequence
  Description of Artificial Sequence: Synthetic oligonucleotide
ugcgaccuuaauuuaacuuuccagu

SEQ ID NO: 110070 - RNA, 25 nt, Artificial Sequence
  Description of Artificial Sequence: Synthetic oligonucleotide
cugagaaagcuaaaguuugguuuug

SEQ ID NO: 110071 - RNA, 25 nt, Artificial Sequence
  Description of Artificial Sequence: Synthetic oligonucleotide
aguaaagaugcuacuucccacugua

SEQ ID NO: 110072 - RNA, 25 nt, Artificial Sequence
  Description of Artificial Sequence: Synthetic oligonucleotide
cugcuuaauugcugauaccauauga

SEQ ID NO: 110073 - RNA, 25 nt, Artificial Sequence
  Description of Artificial Sequence: Synthetic oligonucleotide
uaccauaugaaugaaacaugggcug

SEQ ID NO: 110074 - RNA, 25 nt, Artificial Sequence
  Description of Artificial Sequence: Synthetic oligonucleotide
aacuuucuuauccaacuuuuucaua

SEQ ID NO: 110075 - RNA, 25 nt, Artificial Sequence
  Description of Artificial Sequence: Synthetic oligonucleotide
ccuugcaugacaucaugaggccgga

SEQ ID NO: 110076 - RNA, 25 nt, Artificial Sequence
  Description of Artificial Sequence: Synthetic oligonucleotide
ugaauuuguauaugacugcauuugu

SEQ ID NO: 110077 - RNA, 25 nt, Artificial Sequence
  Description of Artificial Sequence: Synthetic oligonucleotide
gaauccuaguagaauguuuacuacc

SEQ ID NO: 110078 - RNA, 25 nt, Artificial Sequence
  Description of Artificial Sequence: Synthetic oligonucleotide
gaaagggaagaauuuuuugaugaaa

SEQ ID NO: 110079 - RNA, 25 nt, Artificial Sequence
  Description of Artificial Sequence: Synthetic oligonucleotide
uaucggcaugccagugugugaauuu

SEQ ID NO: 110080 - RNA, 25 nt, Artificial Sequence
  Description of Artificial Sequence: Synthetic oligonucleotide
caccucauaguagagcaauguaugu

SEQ ID NO: 110081 - RNA, 25 nt, Artificial Sequence
  Description of Artificial Sequence: Synthetic oligonucleotide
ccagaauugccaaagcacauauaua

SEQ ID NO: 110082 - RNA, 25 nt, Artificial Sequence
  Description of Artificial Sequence: Synthetic oligonucleotide
uggugaucuggguaauaguuucucc

SEQ ID NO: 110083 - RNA, 25 nt, Artificial Sequence
  Description of Artificial Sequence: Synthetic oligonucleotide
gaucuggguaauaguuucuccaaau

SEQ ID NO: 110084 - RNA, 25 nt, Artificial Sequence
  Description of Artificial Sequence: Synthetic oligonucleotide
ggaugugaugaauacuuccuagaaa

SEQ ID NO: 110085 - RNA, 25 nt, Artificial Sequence
  Description of Artificial Sequence: Synthetic oligonucleotide
cauuuccacagcuacaccauauaug

SEQ ID NO: 110086 - RNA, 25 nt, Artificial Sequence
  Description of Artificial Sequence: Synthetic oligonucleotide
acagcuacaccauauaugaauggag

SEQ ID NO: 110087 - RNA, 25 nt, Artificial Sequence
  Description of Artificial Sequence: Synthetic oligonucleotide
ugcaguucuuacacgagaagaagau

SEQ ID NO: 110088 - RNA, 25 nt, Artificial Sequence
  Description of Artificial Sequence: Synthetic oligonucleotide
acgagaagaagaucauuuacaggga

SEQ ID NO: 110089 - RNA, 25 nt, Artificial Sequence
  Description of Artificial Sequence: Synthetic oligonucleotide
cgagaagaagaucauuuacagggac

SEQ ID NO: 110090 - RNA, 25 nt, Artificial Sequence
  Description of Artificial Sequence: Synthetic oligonucleotide
aagaagaucauuuacagggaccuga

SEQ ID NO: 110091 - RNA, 25 nt, Artificial Sequence
  Description of Artificial Sequence: Synthetic oligonucleotide
agaggaagagguguuugacugcauc

SEQ ID NO: 110092 - RNA, 25 nt, Artificial Sequence
  Description of Artificial Sequence: Synthetic oligonucleotide
gaggaagagguguuugacugcaucg

SEQ ID NO: 110093 - RNA, 25 nt, Artificial Sequence
  Description of Artificial Sequence: Synthetic oligonucleotide
cuacuuugagggcgaguucacaggg

SEQ ID NO: 110094 - RNA, 25 nt, Artificial Sequence
  Description of Artificial Sequence: Synthetic oligonucleotide
agggcaucuccuggcaccucugucc

SEQ ID NO: 110095 - RNA, 25 nt, Artificial Sequence
  Description of Artificial Sequence: Synthetic oligonucleotide
ggagugauaugguuugucuuuuuaa

SEQ ID NO: 110096 - RNA, 25 nt, Artificial Sequence
  Description of Artificial Sequence: Synthetic oligonucleotide
gagugauaugguuugucuuuuuaag

SEQ ID NO: 110097 - RNA, 25 nt, Artificial Sequence
  Description of Artificial Sequence: Synthetic oligonucleotide
ugcaguaaagauccuaaagguuguc

SEQ ID NO: 110098 - RNA, 25 nt, Artificial Sequence
  Description of Artificial Sequence: Synthetic oligonucleotide
aguaaagauccuaaagguugucgac

SEQ ID NO: 110099 - RNA, 25 nt, Artificial Sequence
  Description of Artificial Sequence: Synthetic oligonucleotide
ugacaaaggacaaccuggcaauugu

SEQ ID NO: 110100 - RNA, 25 nt, Artificial Sequence
  Description of Artificial Sequence: Synthetic oligonucleotide
gcaauugugacccaguggugcgagg

SEQ ID NO: 110101 - RNA, 25 nt, Artificial Sequence
  Description of Artificial Sequence: Synthetic oligonucleotide
aacaucauccauagagacaugaaau

SEQ ID NO: 110102 - RNA, 25 nt, Artificial Sequence
  Description of Artificial Sequence: Synthetic oligonucleotide
ugaaauccaacaauauauuucucca

SEQ ID NO: 110103 - RNA, 25 nt, Artificial Sequence
  Description of Artificial Sequence: Synthetic oligonucleotide
aacaauauauuucuccaugaaggcu

SEQ ID NO: 110104 - RNA, 25 nt, Artificial Sequence
  Description of Artificial Sequence: Synthetic oligonucleotide
aacaguaaagucacgcuggaguggu

SEQ ID NO: 110105 - RNA, 25 nt, Artificial Sequence
  Description of Artificial Sequence: Synthetic oligonucleotide
ugugaagaaaguaaaggaagagagg

SEQ ID NO: 110106 - RNA, 25 nt, Artificial Sequence
  Description of Artificial Sequence: Synthetic oligonucleotide
cuuccgagccauccuugcaucgggc

SEQ ID NO: 110107 - RNA, 25 nt, Artificial Sequence
  Description of Artificial Sequence: Synthetic oligonucleotide
aauggagguugaauauccuacugug

SEQ ID NO: 110108 - RNA, 25 nt, Artificial Sequence
  Description of Artificial Sequence: Synthetic oligonucleotide
ggagguugaauauccuacuguguaa

SEQ ID NO: 110109 - RNA, 25 nt, Artificial Sequence
  Description of Artificial Sequence: Synthetic oligonucleotide
auuuugaguuuucccuuguagugua

SEQ ID NO: 110110 - RNA, 25 nt, Artificial Sequence
  Description of Artificial Sequence: Synthetic oligonucleotide
uauccuguuuguucuuuguugauug

SEQ ID NO: 110111 - RNA, 25 nt, Artificial Sequence
  Description of Artificial Sequence: Synthetic oligonucleotide
ccuguuuguucuuuguugauugaaa

SEQ ID NO: 110112 - RNA, 25 nt, Artificial Sequence
  Description of Artificial Sequence: Synthetic oligonucleotide
cucuacagccuucuuuuucuuccau

SEQ ID NO: 110113 - RNA, 25 nt, Artificial Sequence
  Description of Artificial Sequence: Synthetic oligonucleotide
ucuuccauagcuaaucuuccuucua

SEQ ID NO: 110114 - RNA, 25 nt, Artificial Sequence
  Description of Artificial Sequence: Synthetic oligonucleotide
auaaucuuccuguugaaugcuucau

SEQ ID NO: 110115 - RNA, 25 nt, Artificial Sequence
  Description of Artificial Sequence: Synthetic oligonucleotide
uaaucuuccuguugaaugcuucaug

SEQ ID NO: 110116 - RNA, 25 nt, Artificial Sequence
  Description of Artificial Sequence: Synthetic oligonucleotide
cuucaugacuugaauucuacuuuga

SEQ ID NO: 110117 - RNA, 25 nt, Artificial Sequence
  Description of Artificial Sequence: Synthetic oligonucleotide
aagagggagagaagcaacuacagac

SEQ ID NO: 110118 - RNA, 25 nt, Artificial Sequence
  Description of Artificial Sequence: Synthetic oligonucleotide
cgucuccuaccagaccaaggucaac

SEQ ID NO: 110119 - RNA, 25 nt, Artificial Sequence
  Description of Artificial Sequence: Synthetic oligonucleotide
gaucaaucggcccgacuaucucgac

SEQ ID NO: 110120 - RNA, 25 nt, Artificial Sequence
  Description of Artificial Sequence: Synthetic oligonucleotide
ggacgaacauccaaccuucccaaac

SEQ ID NO: 110121 - RNA, 25 nt, Artificial Sequence
  Description of Artificial Sequence: Synthetic oligonucleotide
agggucggaacccaagcuuagaacu

SEQ ID NO: 110122 - RNA, 25 nt, Artificial Sequence
  Description of Artificial Sequence: Synthetic oligonucleotide
ucggaacccaagcuuagaacuuuaa

SEQ ID NO: 110123 - RNA, 25 nt, Artificial Sequence
  Description of Artificial Sequence: Synthetic oligonucleotide
acccaagcuuagaacuuuaagcaac

SEQ ID NO: 110124 - RNA, 25 nt, Artificial Sequence
  Description of Artificial Sequence: Synthetic oligonucleotide
gaacuuuaagcaacaagaccaccac

SEQ ID NO: 110125 - RNA, 25 nt, Artificial Sequence
  Description of Artificial Sequence: Synthetic oligonucleotide
acuauucaguggcgagaaauaaagu

SEQ ID NO: 110126 - RNA, 25 nt, Artificial Sequence
  Description of Artificial Sequence: Synthetic oligonucleotide
cuauucaguggcgagaaauaaaguu

SEQ ID NO: 110127 - RNA, 25 nt, Artificial Sequence
  Description of Artificial Sequence: Synthetic oligonucleotide
aaacacagauaacaggaaaugaucc

SEQ ID NO: 110128 - RNA, 25 nt, Artificial Sequence
  Description of Artificial Sequence: Synthetic oligonucleotide
cuuaagaaaagagaagaaaugaaac

SEQ ID NO: 110129 - RNA, 25 nt, Artificial Sequence
  Description of Artificial Sequence: Synthetic oligonucleotide
cugaaggaguguguuuccauccucc

SEQ ID NO: 110130 - RNA, 25 nt, Artificial Sequence
  Description of Artificial Sequence: Synthetic oligonucleotide
ucaccgcgggacugaaaaucuuuga

SEQ ID NO: 110131 - RNA, 25 nt, Artificial Sequence
  Description of Artificial Sequence: Synthetic oligonucleotide
agcagaaauaagcgugccguucagg

SEQ ID NO: 110132 - RNA, 25 nt, Artificial Sequence
  Description of Artificial Sequence: Synthetic oligonucleotide
aagcgugccguucaggguccagaag

SEQ ID NO: 110133 - RNA, 25 nt, Artificial Sequence
  Description of Artificial Sequence: Synthetic oligonucleotide
agaaacagucacucaagacugcuug

SEQ ID NO: 110134 - RNA, 25 nt, Artificial Sequence
  Description of Artificial Sequence: Synthetic oligonucleotide
agaggaagaagguccaugucuuugg

SEQ ID NO: 110135 - RNA, 25 nt, Artificial Sequence
  Description of Artificial Sequence: Synthetic oligonucleotide
uguauucaaaauaugccugaaacac

SEQ ID NO: 110136 - RNA, 25 nt, Artificial Sequence
  Description of Artificial Sequence: Synthetic oligonucleotide
auuuuccucccuuucucuguaccuc

SEQ ID NO: 110137 - RNA, 25 nt, Artificial Sequence
  Description of Artificial Sequence: Synthetic oligonucleotide
caaagaaagauagagcaagacaaga

SEQ ID NO: 110138 - RNA, 25 nt, Artificial Sequence
  Description of Artificial Sequence: Synthetic oligonucleotide
aagaaagauagagcaagacaagaaa

SEQ ID NO: 110139 - RNA, 25 nt, Artificial Sequence
  Description of Artificial Sequence: Synthetic oligonucleotide
gaaagcauuuguuuguacaagaucc

SEQ ID NO: 110140 - RNA, 25 nt, Artificial Sequence
  Description of Artificial Sequence: Synthetic oligonucleotide
ugaguuaaacgaacguacuugcaga

SEQ ID NO: 110141 - RNA, 25 nt, Artificial Sequence
  Description of Artificial Sequence: Synthetic oligonucleotide
acugauacagaacgaucgauacaga

SEQ ID NO: 110142 - RNA, 25 nt, Artificial Sequence
  Description of Artificial Sequence: Synthetic oligonucleotide
auauuauauauauauaaaaauaaau

SEQ ID NO: 110143 - RNA, 25 nt, Artificial Sequence
  Description of Artificial Sequence: Synthetic oligonucleotide
auuauauauauauaaaaauaaauau

SEQ ID NO: 110144 - RNA, 25 nt, Artificial Sequence
  Description of Artificial Sequence: Synthetic oligonucleotide
ucacuggauguauuugacugcugug

SEQ ID NO: 110145 - RNA, 25 nt, Artificial Sequence
  Description of Artificial Sequence: Synthetic oligonucleotide
cagggaagaggaggagaugagagac

SEQ ID NO: 110146 - RNA, 25 nt, Artificial Sequence
  Description of Artificial Sequence: Synthetic oligonucleotide
augaucuuuuuuuugucccacuugg

SEQ ID NO: 110147 - RNA, 27 nt, Artificial Sequence
  Description of Artificial Sequence: Synthetic oligonucleotide
ggccgugaacuccucaucaaaauaccu

SEQ ID NO: 110148 - RNA, 27 nt, Artificial Sequence
  Description of Artificial Sequence: Synthetic oligonucleotide
uggugugauggugaucaucugggccgu

SEQ ID NO: 110149 - RNA, 27 nt, Artificial Sequence
  Description of Artificial Sequence: Synthetic oligonucleotide
aaacccgcaggauaguuuucuucccua

SEQ ID NO: 110150 - RNA, 27 nt, Artificial Sequence
  Description of Artificial Sequence: Synthetic oligonucleotide
caaacuggaugaaauaaauuaaaaccc

SEQ ID NO: 110151 - RNA, 27 nt, Artificial Sequence
  Description of Artificial Sequence: Synthetic oligonucleotide
agaaguccuuaacauuucccuacguga

SEQ ID NO: 110152 - RNA, 27 nt, Artificial Sequence
  Description of Artificial Sequence: Synthetic oligonucleotide
cucugucccacuggguaaacccuggcc

SEQ ID NO: 110153 - RNA, 27 nt, Artificial Sequence
  Description of Artificial Sequence: Synthetic oligonucleotide
cacaauaacaaauuuaaaccuugcucc

SEQ ID NO: 110154 - RNA, 27 nt, Artificial Sequence
  Description of Artificial Sequence: Synthetic oligonucleotide
aaaugcauuugaacaacauaauacaca

SEQ ID NO: 110155 - RNA, 27 nt, Artificial Sequence
  Description of Artificial Sequence: Synthetic oligonucleotide
ggcuuuccugucacaaagauuaaaaac

SEQ ID NO: 110156 - RNA, 27 nt, Artificial Sequence
  Description of Artificial Sequence: Synthetic oligonucleotide
agggcuuuccugucacaaagauuaaaa

SEQ ID NO: 110157 - RNA, 27 nt, Artificial Sequence
  Description of Artificial Sequence: Synthetic oligonucleotide
ggccaugcugggagacauaagcagcag

SEQ ID NO: 110158 - RNA, 27 nt, Artificial Sequence
  Description of Artificial Sequence: Synthetic oligonucleotide
ucagggagaagcuucugaaacacuucu

SEQ ID NO: 110159 - RNA, 27 nt, Artificial Sequence
  Description of Artificial Sequence: Synthetic oligonucleotide
aagggcuucuuccuuauugauggucag

SEQ ID NO: 110160 - RNA, 27 nt, Artificial Sequence
  Description of Artificial Sequence: Synthetic oligonucleotide
ugaagggcuucuuccuuauugaugguc

SEQ ID NO: 110161 - RNA, 27 nt, Artificial Sequence
  Description of Artificial Sequence: Synthetic oligonucleotide
cgcugaagggcuucuuccuuauugaug

SEQ ID NO: 110162 - RNA, 27 nt, Artificial Sequence
  Description of Artificial Sequence: Synthetic oligonucleotide
gccgcugaagggcuucuuccuuauuga

SEQ ID NO: 110163 - RNA, 27 nt, Artificial Sequence
  Description of Artificial Sequence: Synthetic oligonucleotide
acuggccgcugaagggcuucuuccuua

SEQ ID NO: 110164 - RNA, 27 nt, Artificial Sequence
  Description of Artificial Sequence: Synthetic oligonucleotide
cggagcuuuucaccuuuaguuaugcuu

SEQ ID NO: 110165 - RNA, 27 nt, Artificial Sequence
  Description of Artificial Sequence: Synthetic oligonucleotide
ccggagcuuuucaccuuuaguuaugcu

SEQ ID NO: 110166 - RNA, 27 nt, Artificial Sequence
  Description of Artificial Sequence: Synthetic oligonucleotide
cagacuguugacuggcgugauguaguu

SEQ ID NO: 110167 - RNA, 27 nt, Artificial Sequence
  Description of Artificial Sequence: Synthetic oligonucleotide
cuuuugaacucugcuuaaauccagugg

SEQ ID NO: 110168 - RNA, 27 nt, Artificial Sequence
  Description of Artificial Sequence: Synthetic oligonucleotide
gcuuuugaacucugcuuaaauccagug

SEQ ID NO: 110169 - RNA, 27 nt, Artificial Sequence
  Description of Artificial Sequence: Synthetic oligonucleotide
agggcuuuugaacucugcuuaaaucca

SEQ ID NO: 110170 - RNA, 27 nt, Artificial Sequence
  Description of Artificial Sequence: Synthetic oligonucleotide
aagggcuuuugaacucugcuuaaaucc

SEQ ID NO: 110171 - RNA, 27 nt, Artificial Sequence
  Description of Artificial Sequence: Synthetic oligonucleotide
ugaagggcuuuugaacucugcuuaaau

SEQ ID NO: 110172 - RNA, 27 nt, Artificial Sequence
  Description of Artificial Sequence: Synthetic oligonucleotide
cugaagggcuuuugaacucugcuuaaa

SEQ ID NO: 110173 - RNA, 27 nt, Artificial Sequence
  Description of Artificial Sequence: Synthetic oligonucleotide
cgcugaagggcuuuugaacucugcuua

SEQ ID NO: 110174 - RNA, 27 nt, Artificial Sequence
  Description of Artificial Sequence: Synthetic oligonucleotide
cgagcggcuucacucagacccugaggc

SEQ ID NO: 110175 - RNA, 27 nt, Artificial Sequence
  Description of Artificial Sequence: Synthetic oligonucleotide
uugacuggcgugauguaguugcuuggg

SEQ ID NO: 110176 - RNA, 27 nt, Artificial Sequence
  Description of Artificial Sequence: Synthetic oligonucleotide
cacgcaccaagaagcugccauugaucc

SEQ ID NO: 110177 - RNA, 27 nt, Artificial Sequence
  Description of Artificial Sequence: Synthetic oligonucleotide
cugaugaauccaaugugggcuggaauc

SEQ ID NO: 110178 - RNA, 27 nt, Artificial Sequence
  Description of Artificial Sequence: Synthetic oligonucleotide
cuuagguauuccacauucucagcugug

SEQ ID NO: 110179 - RNA, 27 nt, Artificial Sequence
  Description of Artificial Sequence: Synthetic oligonucleotide
ugagccucaaauuaggagauacguuuu

SEQ ID NO: 110180 - RNA, 27 nt, Artificial Sequence
  Description of Artificial Sequence: Synthetic oligonucleotide
ccaauuguagagaaauuauuuuaggaa

SEQ ID NO: 110181 - RNA, 27 nt, Artificial Sequence
  Description of Artificial Sequence: Synthetic oligonucleotide
ggcuccuaacuagcugaaucuuccaau

SEQ ID NO: 110182 - RNA, 27 nt, Artificial Sequence
  Description of Artificial Sequence: Synthetic oligonucleotide
guggauauugacuaggagaguuuaaaa

SEQ ID NO: 110183 - RNA, 27 nt, Artificial Sequence
  Description of Artificial Sequence: Synthetic oligonucleotide
ugugacugaacauaacuguaggcugaa

SEQ ID NO: 110184 - RNA, 27 nt, Artificial Sequence
  Description of Artificial Sequence: Synthetic oligonucleotide
guaugugugugugacugaacauaacug

SEQ ID NO: 110185 - RNA, 27 nt, Artificial Sequence
  Description of Artificial Sequence: Synthetic oligonucleotide
aagcaaaaggaacauuuuguaugugug

SEQ ID NO: 110186 - RNA, 27 nt, Artificial Sequence
  Description of Artificial Sequence: Synthetic oligonucleotide
aaaaauuacuuuaaaagcaaaaggaac

SEQ ID NO: 110187 - RNA, 27 nt, Artificial Sequence
  Description of Artificial Sequence: Synthetic oligonucleotide
ccauugacuguugcuucacaggucaga

SEQ ID NO: 110188 - RNA, 27 nt, Artificial Sequence
  Description of Artificial Sequence: Synthetic oligonucleotide
auugguuugucgaugugugagauaguu

SEQ ID NO: 110189 - RNA, 27 nt, Artificial Sequence
  Description of Artificial Sequence: Synthetic oligonucleotide
agugguagcaguacaauugaggacaag

SEQ ID NO: 110190 - RNA, 27 nt, Artificial Sequence
  Description of Artificial Sequence: Synthetic oligonucleotide
uaagaccgcuugccagcuacgguuuca

SEQ ID NO: 110191 - RNA, 27 nt, Artificial Sequence
  Description of Artificial Sequence: Synthetic oligonucleotide
agccgguaagaccgcuugccagcuacg

SEQ ID NO: 110192 - RNA, 27 nt, Artificial Sequence
  Description of Artificial Sequence: Synthetic oligonucleotide
gguaacccaucuuuuaaccauacaacu

SEQ ID NO: 110193 - RNA, 27 nt, Artificial Sequence
  Description of Artificial Sequence: Synthetic oligonucleotide
ucgcagguaacccaucuuuuaaccaua

SEQ ID NO: 110194 - RNA, 27 nt, Artificial Sequence
  Description of Artificial Sequence: Synthetic oligonucleotide
cucagcaagauuguauaauucccugca

SEQ ID NO: 110195 - RNA, 27 nt, Artificial Sequence
  Description of Artificial Sequence: Synthetic oligonucleotide
acuguuuuaugcucagcaagauuguau

SEQ ID NO: 110196 - RNA, 27 nt, Artificial Sequence
  Description of Artificial Sequence: Synthetic oligonucleotide
aggauaaaggacucuucauuauuggaa

SEQ ID NO: 110197 - RNA, 27 nt, Artificial Sequence
  Description of Artificial Sequence: Synthetic oligonucleotide
caacuugcguuggaacauccaaagugu

SEQ ID NO: 110198 - RNA, 27 nt, Artificial Sequence
  Description of Artificial Sequence: Synthetic oligonucleotide
augguuucaguuuaguggaagcauuua

SEQ ID NO: 110199 - RNA, 27 nt, Artificial Sequence
  Description of Artificial Sequence: Synthetic oligonucleotide
auauuuaacaaagucaaacuuucucac

SEQ ID NO: 110200 - RNA, 27 nt, Artificial Sequence
  Description of Artificial Sequence: Synthetic oligonucleotide
aacuuuuaauauacaguaguucuuuuc

SEQ ID NO: 110201 - RNA, 27 nt, Artificial Sequence
  Description of Artificial Sequence: Synthetic oligonucleotide
guuaagucaaaacccguauuucuaaag

SEQ ID NO: 110202 - RNA, 27 nt, Artificial Sequence
  Description of Artificial Sequence: Synthetic oligonucleotide
gugcugaguuugcuguacccauguuga

SEQ ID NO: 110203 - RNA, 27 nt, Artificial Sequence
  Description of Artificial Sequence: Synthetic oligonucleotide
ugaggucagcaucuucugugucuuuac

SEQ ID NO: 110204 - RNA, 27 nt, Artificial Sequence
  Description of Artificial Sequence: Synthetic oligonucleotide
gcgaucugaauaaaccucccuacuagc

SEQ ID NO: 110205 - RNA, 27 nt, Artificial Sequence
  Description of Artificial Sequence: Synthetic oligonucleotide
aucccagaacccugcugcagaaggcca

SEQ ID NO: 110206 - RNA, 27 nt, Artificial Sequence
  Description of Artificial Sequence: Synthetic oligonucleotide
cauaauuuccaauauguaccagaccuu

SEQ ID NO: 110207 - RNA, 27 nt, Artificial Sequence
  Description of Artificial Sequence: Synthetic oligonucleotide
cuagugcuuccaucggaaggacuaggu

SEQ ID NO: 110208 - RNA, 27 nt, Artificial Sequence
  Description of Artificial Sequence: Synthetic oligonucleotide
uccacauaaaaacaauauucacuggga

SEQ ID NO: 110209 - RNA, 27 nt, Artificial Sequence
  Description of Artificial Sequence: Synthetic oligonucleotide
ucuaccaauuccaacuugaauucauug

SEQ ID NO: 110210 - RNA, 27 nt, Artificial Sequence
  Description of Artificial Sequence: Synthetic oligonucleotide
ucuccaagucuaaaucuguguccugag

SEQ ID NO: 110211 - RNA, 27 nt, Artificial Sequence
  Description of Artificial Sequence: Synthetic oligonucleotide
uggaauacuguaacugugcuuugagga

SEQ ID NO: 110212 - RNA, 27 nt, Artificial Sequence
  Description of Artificial Sequence: Synthetic oligonucleotide
uuaauucaucagugguggcagugguag

SEQ ID NO: 110213 - RNA, 27 nt, Artificial Sequence
  Description of Artificial Sequence: Synthetic oligonucleotide
gugaugauguggcacuaguaguuucuu

SEQ ID NO: 110214 - RNA, 27 nt, Artificial Sequence
  Description of Artificial Sequence: Synthetic oligonucleotide
ucuguuuggugaggcuguccgacuuug

SEQ ID NO: 110215 - RNA, 27 nt, Artificial Sequence
  Description of Artificial Sequence: Synthetic oligonucleotide
ccaucauguuccauuuuucgcuuucuc

SEQ ID NO: 110216 - RNA, 27 nt, Artificial Sequence
  Description of Artificial Sequence: Synthetic oligonucleotide
gcagucuacaugcuaaaucagagggua

SEQ ID NO: 110217 - RNA, 27 nt, Artificial Sequence
  Description of Artificial Sequence: Synthetic oligonucleotide
cauaaauagauccuuaaauagcucaaa

SEQ ID NO: 110218 - RNA, 27 nt, Artificial Sequence
  Description of Artificial Sequence: Synthetic oligonucleotide
ugauaauagugcuuuuucaccuuuuuc

SEQ ID NO: 110219 - RNA, 27 nt, Artificial Sequence
  Description of Artificial Sequence: Synthetic oligonucleotide
gcagaacugauaauagugcuuuuucac

SEQ ID NO: 110220 - RNA, 27 nt, Artificial Sequence
  Description of Artificial Sequence: Synthetic oligonucleotide
guagguuuaaucuuucuuuucagccau

SEQ ID NO: 110221 - RNA, 27 nt, Artificial Sequence
  Description of Artificial Sequence: Synthetic oligonucleotide
agaaggauuuuauuauaaggguuuaau

SEQ ID NO: 110222 - RNA, 27 nt, Artificial Sequence
  Description of Artificial Sequence: Synthetic oligonucleotide
gucuacagcauuggcuaauaguaugaa

SEQ ID NO: 110223 - RNA, 27 nt, Artificial Sequence
  Description of Artificial Sequence: Synthetic oligonucleotide
cuauuccuaucaaaaugcuucugucua

SEQ ID NO: 110224 - RNA, 27 nt, Artificial Sequence
  Description of Artificial Sequence: Synthetic oligonucleotide
ucagggccauuaucuuauuugcucuau

SEQ ID NO: 110225 - RNA, 27 nt, Artificial Sequence
  Description of Artificial Sequence: Synthetic oligonucleotide
ugcuugaggaagagaaaaauguugguc

SEQ ID NO: 110226 - RNA, 27 nt, Artificial Sequence
  Description of Artificial Sequence: Synthetic oligonucleotide
ugggcugaacuuuucucauacuuaaag

SEQ ID NO: 110227 - RNA, 27 nt, Artificial Sequence
  Description of Artificial Sequence: Synthetic oligonucleotide
gguucagcagccaucuuuauuccugcg

SEQ ID NO: 110228 - RNA, 27 nt, Artificial Sequence
  Description of Artificial Sequence: Synthetic oligonucleotide
ugaagagaacuuggucauucaaauuuc

SEQ ID NO: 110229 - RNA, 27 nt, Artificial Sequence
  Description of Artificial Sequence: Synthetic oligonucleotide
cucuaggcuggcuaucuuuauacauac

SEQ ID NO: 110230 - RNA, 27 nt, Artificial Sequence
  Description of Artificial Sequence: Synthetic oligonucleotide
acacuucacagagauaguuacagccau

SEQ ID NO: 110231 - RNA, 27 nt, Artificial Sequence
  Description of Artificial Sequence: Synthetic oligonucleotide
uugaaauuuucucacacuucacagaga

SEQ ID NO: 110232 - RNA, 27 nt, Artificial Sequence
  Description of Artificial Sequence: Synthetic oligonucleotide
ucaggaggauucauuuccuuaaaggaa

SEQ ID NO: 110233 - RNA, 27 nt, Artificial Sequence
  Description of Artificial Sequence: Synthetic oligonucleotide
auaugaugucacuuuuuguauccuuga

SEQ ID NO: 110234 - RNA, 27 nt, Artificial Sequence
  Description of Artificial Sequence: Synthetic oligonucleotide
uaugaugaagauucaaauugcaucuua

SEQ ID NO: 110235 - RNA, 27 nt, Artificial Sequence
  Description of Artificial Sequence: Synthetic oligonucleotide
uuaauagcuagucuucguuuugaacag

SEQ ID NO: 110236 - RNA, 27 nt, Artificial Sequence
  Description of Artificial Sequence: Synthetic oligonucleotide
auuuuuaguagagaugagguuucacca

SEQ ID NO: 110237 - RNA, 27 nt, Artificial Sequence
  Description of Artificial Sequence: Synthetic oligonucleotide
aggcgagauagagcuucucuuucguuc

SEQ ID NO: 110238 - RNA, 27 nt, Artificial Sequence
  Description of Artificial Sequence: Synthetic oligonucleotide
aacuggaccgaaggcgcuuguggagaa

SEQ ID NO: 110239 - RNA, 27 nt, Artificial Sequence
  Description of Artificial Sequence: Synthetic oligonucleotide
gcggcuacaucuuuggaaucuucuccu

SEQ ID NO: 110240 - RNA, 27 nt, Artificial Sequence
  Description of Artificial Sequence: Synthetic oligonucleotide
caagucuccucauugaauccagauugg

SEQ ID NO: 110241 - RNA, 27 nt, Artificial Sequence
  Description of Artificial Sequence: Synthetic oligonucleotide
uccucacuacucucaaaucuguucugg

SEQ ID NO: 110242 - RNA, 27 nt, Artificial Sequence
  Description of Artificial Sequence: Synthetic oligonucleotide
uuuguacucaucugcacagcucuggcu

SEQ ID NO: 110243 - RNA, 27 nt, Artificial Sequence
  Description of Artificial Sequence: Synthetic oligonucleotide
gcccauuaacaacaacaaucugaggug

SEQ ID NO: 110244 - RNA, 27 nt, Artificial Sequence
  Description of Artificial Sequence: Synthetic oligonucleotide
aauaaauuaaaaauaauuaaaauagug

SEQ ID NO: 110245 - RNA, 27 nt, Artificial Sequence
  Description of Artificial Sequence: Synthetic oligonucleotide
cauauuuaaauauuaauaaauuaaaaa

SEQ ID NO: 110246 - RNA, 27 nt, Artificial Sequence
  Description of Artificial Sequence: Synthetic oligonucleotide
gaaacaaaggauauucaaacugcauag

SEQ ID NO: 110247 - RNA, 27 nt, Artificial Sequence
  Description of Artificial Sequence: Synthetic oligonucleotide
caaacacuuagacgccagcagcauggg

SEQ ID NO: 110248 - RNA, 27 nt, Artificial Sequence
  Description of Artificial Sequence: Synthetic oligonucleotide
uuugucacaggugaaaugcacaucuga

SEQ ID NO: 110249 - RNA, 27 nt, Artificial Sequence
  Description of Artificial Sequence: Synthetic oligonucleotide
uaauucagccuggcacagguuuugauc

SEQ ID NO: 110250 - RNA, 27 nt, Artificial Sequence
  Description of Artificial Sequence: Synthetic oligonucleotide
auuguaagaaugacuacccacauucac

SEQ ID NO: 110251 - RNA, 27 nt, Artificial Sequence
  Description of Artificial Sequence: Synthetic oligonucleotide
caauuguaagaaugacuacccacauuc

SEQ ID NO: 110252 - RNA, 27 nt, Artificial Sequence
  Description of Artificial Sequence: Synthetic oligonucleotide
guacacucucugaugcucauuuucaua

SEQ ID NO: 110253 - RNA, 27 nt, Artificial Sequence
  Description of Artificial Sequence: Synthetic oligonucleotide
cugcugaguucuacaugaaaagcaaau

SEQ ID NO: 110254 - RNA, 27 nt, Artificial Sequence
  Description of Artificial Sequence: Synthetic oligonucleotide
uacugaaaauaaauauagaaauacaac

SEQ ID NO: 110255 - RNA, 27 nt, Artificial Sequence
  Description of Artificial Sequence: Synthetic oligonucleotide
uuccauuuaagaaacauuaaucaaaac

SEQ ID NO: 110256 - RNA, 27 nt, Artificial Sequence
  Description of Artificial Sequence: Synthetic oligonucleotide
acaauuuuaggcacuauacacguuguu

SEQ ID NO: 110257 - RNA, 27 nt, Artificial Sequence
  Description of Artificial Sequence: Synthetic oligonucleotide
ccagauguuaguagccaaggauauggu

SEQ ID NO: 110258 - RNA, 27 nt, Artificial Sequence
  Description of Artificial Sequence: Synthetic oligonucleotide
agcucacagucuccagauguuaguagc

SEQ ID NO: 110259 - RNA, 27 nt, Artificial Sequence
  Description of Artificial Sequence: Synthetic oligonucleotide
auuaauaaaaagcacacaacuuauggc

SEQ ID NO: 110260 - RNA, 27 nt, Artificial Sequence
  Description of Artificial Sequence: Synthetic oligonucleotide
aauguaagaagagccaaaaugaugcau

SEQ ID NO: 110261 - RNA, 27 nt, Artificial Sequence
  Description of Artificial Sequence: Synthetic oligonucleotide
acauuuuuacaaauguaagaagagcca

SEQ ID NO: 110262 - RNA, 27 nt, Artificial Sequence
  Description of Artificial Sequence: Synthetic oligonucleotide
aauaugaauuaagaugaccuaaucugu

SEQ ID NO: 110263 - RNA, 27 nt, Artificial Sequence
  Description of Artificial Sequence: Synthetic oligonucleotide
ucaugauuaguucuuucaauuccaucc

SEQ ID NO: 110264 - RNA, 27 nt, Artificial Sequence
  Description of Artificial Sequence: Synthetic oligonucleotide
cccaagagcagaaggaaugagugugca

SEQ ID NO: 110265 - RNA, 27 nt, Artificial Sequence
  Description of Artificial Sequence: Synthetic oligonucleotide
cucaaagcuacugguuaccucuacacc

SEQ ID NO: 110266 - RNA, 27 nt, Artificial Sequence
  Description of Artificial Sequence: Synthetic oligonucleotide
ugaaauauuacguggcaugugguuggg

SEQ ID NO: 110267 - RNA, 27 nt, Artificial Sequence
  Description of Artificial Sequence: Synthetic oligonucleotide
agugaagagaauaacuuguuuccgaag

SEQ ID NO: 110268 - RNA, 27 nt, Artificial Sequence
  Description of Artificial Sequence: Synthetic oligonucleotide
uuucuuagcauuaguuauugggaguga

SEQ ID NO: 110269 - RNA, 27 nt, Artificial Sequence
  Description of Artificial Sequence: Synthetic oligonucleotide
uugauuuucagcauuucuuagcauuag

SEQ ID NO: 110270 - RNA, 27 nt, Artificial Sequence
  Description of Artificial Sequence: Synthetic oligonucleotide
aaaguaaucauauuuagagaaagacag

SEQ ID NO: 110271 - RNA, 27 nt, Artificial Sequence
  Description of Artificial Sequence: Synthetic oligonucleotide
uguagaacaaaaugccugaaauucagc

SEQ ID NO: 110272 - RNA, 27 nt, Artificial Sequence
  Description of Artificial Sequence: Synthetic oligonucleotide
gagagucccgggugagagggaaucgcc

SEQ ID NO: 110273 - RNA, 27 nt, Artificial Sequence
  Description of Artificial Sequence: Synthetic oligonucleotide
cuuuacuuuaaagguucacuuuccuug

SEQ ID NO: 110274 - RNA, 27 nt, Artificial Sequence
  Description of Artificial Sequence: Synthetic oligonucleotide
ccaggcuuccagagcaugcagccuccu

SEQ ID NO: 110275 - RNA, 27 nt, Artificial Sequence
  Description of Artificial Sequence: Synthetic oligonucleotide
cucucuuuuguuuucuguucagagaaa

SEQ ID NO: 110276 - RNA, 27 nt, Artificial Sequence
  Description of Artificial Sequence: Synthetic oligonucleotide
cggcauaacugauuacagccaaguuca

SEQ ID NO: 110277 - RNA, 27 nt, Artificial Sequence
  Description of Artificial Sequence: Synthetic oligonucleotide
uggacuucuuuuaauuuuggcuucuuc

SEQ ID NO: 110278 - RNA, 27 nt, Artificial Sequence
  Description of Artificial Sequence: Synthetic oligonucleotide
uaaccucaccuggacuucuuuuaauuu

SEQ ID NO: 110279 - RNA, 27 nt, Artificial Sequence
  Description of Artificial Sequence: Synthetic oligonucleotide
guccucuucccgauaauccggauucag

SEQ ID NO: 110280 - RNA, 27 nt, Artificial Sequence
  Description of Artificial Sequence: Synthetic oligonucleotide
acaauacuugcuuugaugucacauuaa

SEQ ID NO: 110281 - RNA, 27 nt, Artificial Sequence
  Description of Artificial Sequence: Synthetic oligonucleotide
gagugcuacaauacuugcuuugauguc

SEQ ID NO: 110282 - RNA, 27 nt, Artificial Sequence
  Description of Artificial Sequence: Synthetic oligonucleotide
auuugugguuuuguuuucucucucucu

SEQ ID NO: 110283 - RNA, 27 nt, Artificial Sequence
  Description of Artificial Sequence: Synthetic oligonucleotide
uguaugggcuuaaauacuacagcgagg

SEQ ID NO: 110284 - RNA, 27 nt, Artificial Sequence
  Description of Artificial Sequence: Synthetic oligonucleotide
cuguaugggcuuaaauacuacagcgag

SEQ ID NO: 110285 - RNA, 27 nt, Artificial Sequence
  Description of Artificial Sequence: Synthetic oligonucleotide
ggaagguuucuguaugggcuuaaauac

SEQ ID NO: 110286 - RNA, 27 nt, Artificial Sequence
  Description of Artificial Sequence: Synthetic oligonucleotide
guagguauaccauguuuauuuuaauac

SEQ ID NO: 110287 - RNA, 27 nt, Artificial Sequence
  Description of Artificial Sequence: Synthetic oligonucleotide
uccgaaaacuggccgaucagaacagcc

SEQ ID NO: 110288 - RNA, 27 nt, Artificial Sequence
  Description of Artificial Sequence: Synthetic oligonucleotide
cccuguuccaaaguucaaauuauuugu

SEQ ID NO: 110289 - RNA, 27 nt, Artificial Sequence
  Description of Artificial Sequence: Synthetic oligonucleotide
acuggaaaguuaaauuaaggucgcaau

SEQ ID NO: 110290 - RNA, 27 nt, Artificial Sequence
  Description of Artificial Sequence: Synthetic oligonucleotide
caaaaccaaacuuuagcuuucucagcc

SEQ ID NO: 110291 - RNA, 27 nt, Artificial Sequence
  Description of Artificial Sequence: Synthetic oligonucleotide
uacagugggaaguagcaucuuuacuuu

SEQ ID NO: 110292 - RNA, 27 nt, Artificial Sequence
  Description of Artificial Sequence: Synthetic oligonucleotide
ucauaugguaucagcaauuaagcagua

SEQ ID NO: 110293 - RNA, 27 nt, Artificial Sequence
  Description of Artificial Sequence: Synthetic oligonucleotide
cagcccauguuucauucauaugguauc

SEQ ID NO: 110294 - RNA, 27 nt, Artificial Sequence
  Description of Artificial Sequence: Synthetic oligonucleotide
uaugaaaaaguuggauaagaaaguugg

SEQ ID NO: 110295 - RNA, 27 nt, Artificial Sequence
  Description of Artificial Sequence: Synthetic oligonucleotide
uccggccucaugaugucaugcaaggcu

SEQ ID NO: 110296 - RNA, 27 nt, Artificial Sequence
  Description of Artificial Sequence: Synthetic oligonucleotide
acaaaugcagucauauacaaauucagg

SEQ ID NO: 110297 - RNA, 27 nt, Artificial Sequence
  Description of Artificial Sequence: Synthetic oligonucleotide
gguaguaaacauucuacuaggauucuu

SEQ ID NO: 110298 - RNA, 27 nt, Artificial Sequence
  Description of Artificial Sequence: Synthetic oligonucleotide
uuucaucaaaaaauucuucccuuucug

SEQ ID NO: 110299 - RNA, 27 nt, Artificial Sequence
  Description of Artificial Sequence: Synthetic oligonucleotide
aaauucacacacuggcaugccgauagc

SEQ ID NO: 110300 - RNA, 27 nt, Artificial Sequence
  Description of Artificial Sequence: Synthetic oligonucleotide
acauacauugcucuacuaugaggugaa

SEQ ID NO: 110301 - RNA, 27 nt, Artificial Sequence
  Description of Artificial Sequence: Synthetic oligonucleotide
uauauaugugcuuuggcaauucuggug

SEQ ID NO: 110302 - RNA, 27 nt, Artificial Sequence
  Description of Artificial Sequence: Synthetic oligonucleotide
ggagaaacuauuacccagaucaccacu

SEQ ID NO: 110303 - RNA, 27 nt, Artificial Sequence
  Description of Artificial Sequence: Synthetic oligonucleotide
auuuggagaaacuauuacccagaucac

SEQ ID NO: 110304 - RNA, 27 nt, Artificial Sequence
  Description of Artificial Sequence: Synthetic oligonucleotide
uuucuaggaaguauucaucacauccac

SEQ ID NO: 110305 - RNA, 27 nt, Artificial Sequence
  Description of Artificial Sequence: Synthetic oligonucleotide
cauauaugguguagcuguggaaaugcg

SEQ ID NO: 110306 - RNA, 27 nt, Artificial Sequence
  Description of Artificial Sequence: Synthetic oligonucleotide
cuccauucauauaugguguagcugugg

SEQ ID NO: 110307 - RNA, 27 nt, Artificial Sequence
  Description of Artificial Sequence: Synthetic oligonucleotide
aucuucuucucguguaagaacugcagc

SEQ ID NO: 110308 - RNA, 27 nt, Artificial Sequence
  Description of Artificial Sequence: Synthetic oligonucleotide
ucccuguaaaugaucuucuucucgugu

SEQ ID NO: 110309 - RNA, 27 nt, Artificial Sequence
  Description of Artificial Sequence: Synthetic oligonucleotide
gucccuguaaaugaucuucuucucgug

SEQ ID NO: 110310 - RNA, 27 nt, Artificial Sequence
  Description of Artificial Sequence: Synthetic oligonucleotide
ucaggucccuguaaaugaucuucuucu

SEQ ID NO: 110311 - RNA, 27 nt, Artificial Sequence
  Description of Artificial Sequence: Synthetic oligonucleotide
gaugcagucaaacaccucuuccucugu

SEQ ID NO: 110312 - RNA, 27 nt, Artificial Sequence
  Description of Artificial Sequence: Synthetic oligonucleotide
cgaugcagucaaacaccucuuccucug

SEQ ID NO: 110313 - RNA, 27 nt, Artificial Sequence
  Description of Artificial Sequence: Synthetic oligonucleotide
cccugugaacucgcccucaaaguagcg

SEQ ID NO: 110314 - RNA, 27 nt, Artificial Sequence
  Description of Artificial Sequence: Synthetic oligonucleotide
ggacagaggugccaggagaugcccuca

SEQ ID NO: 110315 - RNA, 27 nt, Artificial Sequence
  Description of Artificial Sequence: Synthetic oligonucleotide
uuaaaaagacaaaccauaucacuccuu

SEQ ID NO: 110316 - RNA, 27 nt, Artificial Sequence
  Description of Artificial Sequence: Synthetic oligonucleotide
cuuaaaaagacaaaccauaucacuccu

SEQ ID NO: 110317 - RNA, 27 nt, Artificial Sequence
  Description of Artificial Sequence: Synthetic oligonucleotide
gacaaccuuuaggaucuuuacugcaac

SEQ ID NO: 110318 - RNA, 27 nt, Artificial Sequence
  Description of Artificial Sequence: Synthetic oligonucleotide
gucgacaaccuuuaggaucuuuacugc

SEQ ID NO: 110319 - RNA, 27 nt, Artificial Sequence
  Description of Artificial Sequence: Synthetic oligonucleotide
acaauugccagguuguccuuugucaug

SEQ ID NO: 110320 - RNA, 27 nt, Artificial Sequence
  Description of Artificial Sequence: Synthetic oligonucleotide
ccucgcaccacugggucacaauugcca

SEQ ID NO: 110321 - RNA, 27 nt, Artificial Sequence
  Description of Artificial Sequence: Synthetic oligonucleotide
auuucaugucucuauggaugauguucu

SEQ ID NO: 110322 - RNA, 27 nt, Artificial Sequence
  Description of Artificial Sequence: Synthetic oligonucleotide
uggagaaauauauuguuggauuucaug

SEQ ID NO: 110323 - RNA, 27 nt, Artificial Sequence
  Description of Artificial Sequence: Synthetic oligonucleotide
agccuucauggagaaauauauuguugg

SEQ ID NO: 110324 - RNA, 27 nt, Artificial Sequence
  Description of Artificial Sequence: Synthetic oligonucleotide
accacuccagcgugacuuuacuguugc

SEQ ID NO: 110325 - RNA, 27 nt, Artificial Sequence
  Description of Artificial Sequence: Synthetic oligonucleotide
ccucucuuccuuuacuuucuucacaca

SEQ ID NO: 110326 - RNA, 27 nt, Artificial Sequence
  Description of Artificial Sequence: Synthetic oligonucleotide
gcccgaugcaaggauggcucggaagcg

SEQ ID NO: 110327 - RNA, 27 nt, Artificial Sequence
  Description of Artificial Sequence: Synthetic oligonucleotide
cacaguaggauauucaaccuccauuuc

SEQ ID NO: 110328 - RNA, 27 nt, Artificial Sequence
  Description of Artificial Sequence: Synthetic oligonucleotide
uuacacaguaggauauucaaccuccau

SEQ ID NO: 110329 - RNA, 27 nt, Artificial Sequence
  Description of Artificial Sequence: Synthetic oligonucleotide
uacacuacaagggaaaacucaaaaucu

SEQ ID NO: 110330 - RNA, 27 nt, Artificial Sequence
  Description of Artificial Sequence: Synthetic oligonucleotide
caaucaacaaagaacaaacaggauaaa

SEQ ID NO: 110331 - RNA, 27 nt, Artificial Sequence
  Description of Artificial Sequence: Synthetic oligonucleotide
uuucaaucaacaaagaacaaacaggau

SEQ ID NO: 110332 - RNA, 27 nt, Artificial Sequence
  Description of Artificial Sequence: Synthetic oligonucleotide
auggaagaaaaagaaggcuguagagaa

SEQ ID NO: 110333 - RNA, 27 nt, Artificial Sequence
  Description of Artificial Sequence: Synthetic oligonucleotide
uagaaggaagauuagcuauggaagaaa

SEQ ID NO: 110334 - RNA, 27 nt, Artificial Sequence
  Description of Artificial Sequence: Synthetic oligonucleotide
augaagcauucaacaggaagauuauuu

SEQ ID NO: 110335 - RNA, 27 nt, Artificial Sequence
  Description of Artificial Sequence: Synthetic oligonucleotide
caugaagcauucaacaggaagauuauu

SEQ ID NO: 110336 - RNA, 27 nt, Artificial Sequence
  Description of Artificial Sequence: Synthetic oligonucleotide
ucaaaguagaauucaagucaugaagca

SEQ ID NO: 110337 - RNA, 27 nt, Artificial Sequence
  Description of Artificial Sequence: Synthetic oligonucleotide
gucuguaguugcuucucucccucuuag

SEQ ID NO: 110338 - RNA, 27 nt, Artificial Sequence
  Description of Artificial Sequence: Synthetic oligonucleotide
guugaccuuggucugguaggagacggc

SEQ ID NO: 110339 - RNA, 27 nt, Artificial Sequence
  Description of Artificial Sequence: Synthetic oligonucleotide
gucgagauagucgggccgauugaucuc

SEQ ID NO: 110340 - RNA, 27 nt, Artificial Sequence
  Description of Artificial Sequence: Synthetic oligonucleotide
guuugggaagguuggauguucguccuc

SEQ ID NO: 110341 - RNA, 27 nt, Artificial Sequence
  Description of Artificial Sequence: Synthetic oligonucleotide
aguucuaagcuuggguuccgacccuaa

SEQ ID NO: 110342 - RNA, 27 nt, Artificial Sequence
  Description of Artificial Sequence: Synthetic oligonucleotide
uuaaaguucuaagcuuggguuccgacc

SEQ ID NO: 110343 - RNA, 27 nt, Artificial Sequence
  Description of Artificial Sequence: Synthetic oligonucleotide
guugcuuaaaguucuaagcuuggguuc

SEQ ID NO: 110344 - RNA, 27 nt, Artificial Sequence
  Description of Artificial Sequence: Synthetic oligonucleotide
gugguggucuuguugcuuaaaguucua

SEQ ID NO: 110345 - RNA, 27 nt, Artificial Sequence
  Description of Artificial Sequence: Synthetic oligonucleotide
acuuuauuucucgccacugaauaguag

SEQ ID NO: 110346 - RNA, 27 nt, Artificial Sequence
  Description of Artificial Sequence: Synthetic oligonucleotide
aacuuuauuucucgccacugaauagua

SEQ ID NO: 110347 - RNA, 27 nt, Artificial Sequence
  Description of Artificial Sequence: Synthetic oligonucleotide
ggaucauuuccuguuaucuguguuugu

SEQ ID NO: 110348 - RNA, 27 nt, Artificial Sequence
  Description of Artificial Sequence: Synthetic oligonucleotide
guuucauuucuucucuuuucuuaaggc

SEQ ID NO: 110349 - RNA, 27 nt, Artificial Sequence
  Description of Artificial Sequence: Synthetic oligonucleotide
ggaggauggaaacacacuccuucaguu

SEQ ID NO: 110350 - RNA, 27 nt, Artificial Sequence
  Description of Artificial Sequence: Synthetic oligonucleotide
ucaaagauuuucagucccgcggugaca

SEQ ID NO: 110351 - RNA, 27 nt, Artificial Sequence
  Description of Artificial Sequence: Synthetic oligonucleotide
ccugaacggcacgcuuauuucugcugu

SEQ ID NO: 110352 - RNA, 27 nt, Artificial Sequence
  Description of Artificial Sequence: Synthetic oligonucleotide
cuucuggacccugaacggcacgcuuau

SEQ ID NO: 110353 - RNA, 27 nt, Artificial Sequence
  Description of Artificial Sequence: Synthetic oligonucleotide
caagcagucuugagugacuguuucuuc

SEQ ID NO: 110354 - RNA, 27 nt, Artificial Sequence
  Description of Artificial Sequence: Synthetic oligonucleotide
ccaaagacauggaccuucuuccucuga

SEQ ID NO: 110355 - RNA, 27 nt, Artificial Sequence
  Description of Artificial Sequence: Synthetic oligonucleotide
guguuucaggcauauuuugaauacauc

SEQ ID NO: 110356 - RNA, 27 nt, Artificial Sequence
  Description of Artificial Sequence: Synthetic oligonucleotide
gagguacagagaaagggaggaaaauag

SEQ ID NO: 110357 - RNA, 27 nt, Artificial Sequence
  Description of Artificial Sequence: Synthetic oligonucleotide
ucuugucuugcucuaucuuucuuuggu

SEQ ID NO: 110358 - RNA, 27 nt, Artificial Sequence
  Description of Artificial Sequence: Synthetic oligonucleotide
uuucuugucuugcucuaucuuucuuug

SEQ ID NO: 110359 - RNA, 27 nt, Artificial Sequence
  Description of Artificial Sequence: Synthetic oligonucleotide
ggaucuuguacaaacaaaugcuuucuc

SEQ ID NO: 110360 - RNA, 27 nt, Artificial Sequence
  Description of Artificial Sequence: Synthetic oligonucleotide
ucugcaaguacguucguuuaacucaag

SEQ ID NO: 110361 - RNA, 27 nt, Artificial Sequence
  Description of Artificial Sequence: Synthetic oligonucleotide
ucuguaucgaucguucuguaucagucu

SEQ ID NO: 110362 - RNA, 27 nt, Artificial Sequence
  Description of Artificial Sequence: Synthetic oligonucleotide
auuuauuuuuauauauauauaauauau

SEQ ID NO: 110363 - RNA, 27 nt, Artificial Sequence
  Description of Artificial Sequence: Synthetic oligonucleotide
auauuuauuuuuauauauauauaauau

SEQ ID NO: 110364 - RNA, 27 nt, Artificial Sequence
  Description of Artificial Sequence: Synthetic oligonucleotide
cacagcagucaaauacauccagugaag

SEQ ID NO: 110365 - RNA, 27 nt, Artificial Sequence
  Description of Artificial Sequence: Synthetic oligonucleotide
gucucucaucuccuccucuucccuguc

SEQ ID NO: 110366 - RNA, 27 nt, Artificial Sequence
  Description of Artificial Sequence: Synthetic oligonucleotide
ccaagugggacaaaaaaaagaucaugc

SEQ ID NO: 110367 - RNA, 14 nt, Artificial Sequence
  Description of Artificial Sequence: Synthetic oligonucleotide
guauuuugaugagg

SEQ ID NO: 110368 - RNA, 12 nt, Artificial Sequence
  Description of Artificial Sequence: Synthetic oligonucleotide
ggcccagaugau

SEQ ID NO: 110369 - RNA, 14 nt, Artificial Sequence
  Description of Artificial Sequence: Synthetic oligonucleotide
gggaagaaaacuau

SEQ ID NO: 110370 - RNA, 15 nt, Artificial Sequence
  Description of Artificial Sequence: Synthetic oligonucleotide
guuuuaauuuauuuc

SEQ ID NO: 110371 - RNA, 12 nt, Artificial Sequence
  Description of Artificial Sequence: Synthetic oligonucleotide
acguagggaaau

SEQ ID NO: 110372 - RNA, 12 nt, Artificial Sequence
  Description of Artificial Sequence: Synthetic oligonucleotide
ccaggguuuacc

SEQ ID NO: 110373 - RNA, 11 nt, Artificial Sequence
  Description of Artificial Sequence: Synthetic oligonucleotide
agcaagguuua

SEQ ID NO: 110374 - RNA, 12 nt, Artificial Sequence
  Description of Artificial Sequence: Synthetic oligonucleotide
uguauuauguug

SEQ ID NO: 110375 - RNA, 15 nt, Artificial Sequence
  Description of Artificial Sequence: Synthetic oligonucleotide
uuuuaaucuuuguga

SEQ ID NO: 110376 - RNA, 14 nt, Artificial Sequence
  Description of Artificial Sequence: Synthetic oligonucleotide
uuaaucuuugugac

SEQ ID NO: 110377 - RNA, 13 nt, Artificial Sequence
  Description of Artificial Sequence: Synthetic oligonucleotide
gcugcuuaugucu

SEQ ID NO: 110378 - RNA, 14 nt, Artificial Sequence
  Description of Artificial Sequence: Synthetic oligonucleotide
aaguguuucagaag

SEQ ID NO: 110379 - RNA, 13 nt, Artificial Sequence
  Description of Artificial Sequence: Synthetic oligonucleotide
gaccaucaauaag

SEQ ID NO: 110380 - RNA, 13 nt, Artificial Sequence
  Description of Artificial Sequence: Synthetic oligonucleotide
ccaucaauaagga

SEQ ID NO: 110381 - RNA, 14 nt, Artificial Sequence
  Description of Artificial Sequence: Synthetic oligonucleotide
ucaauaaggaagaa

SEQ ID NO: 110382 - RNA, 14 nt, Artificial Sequence
  Description of Artificial Sequence: Synthetic oligonucleotide
aauaaggaagaagc

SEQ ID NO: 110383 - RNA, 13 nt, Artificial Sequence
  Description of Artificial Sequence: Synthetic oligonucleotide
aggaagaagcccu

SEQ ID NO: 110384 - RNA, 13 nt, Artificial Sequence
  Description of Artificial Sequence: Synthetic oligonucleotide
gcauaacuaaagg

SEQ ID NO: 110385 - RNA, 14 nt, Artificial Sequence
  Description of Artificial Sequence: Synthetic oligonucleotide
cauaacuaaaggug

SEQ ID NO: 110386 - RNA, 12 nt, Artificial Sequence
  Description of Artificial Sequence: Synthetic oligonucleotide
cuacaucacgcc

SEQ ID NO: 110387 - RNA, 12 nt, Artificial Sequence
  Description of Artificial Sequence: Synthetic oligonucleotide
acuggauuuaag

SEQ ID NO: 110388 - RNA, 12 nt, Artificial Sequence
  Description of Artificial Sequence: Synthetic oligonucleotide
cuggauuuaagc

SEQ ID NO: 110389 - RNA, 13 nt, Artificial Sequence
  Description of Artificial Sequence: Synthetic oligonucleotide
gauuuaagcagag

SEQ ID NO: 110390 - RNA, 13 nt, Artificial Sequence
  Description of Artificial Sequence: Synthetic oligonucleotide
auuuaagcagagu

SEQ ID NO: 110391 - RNA, 13 nt, Artificial Sequence
  Description of Artificial Sequence: Synthetic oligonucleotide
uuaagcagaguuc

SEQ ID NO: 110392 - RNA, 13 nt, Artificial Sequence
  Description of Artificial Sequence: Synthetic oligonucleotide
uaagcagaguuca

SEQ ID NO: 110393 - RNA, 14 nt, Artificial Sequence
  Description of Artificial Sequence: Synthetic oligonucleotide
agcagaguucaaaa

SEQ ID NO: 110394 - RNA, 12 nt, Artificial Sequence
  Description of Artificial Sequence: Synthetic oligonucleotide
cucagggucuga

SEQ ID NO: 110395 - RNA, 13 nt, Artificial Sequence
  Description of Artificial Sequence: Synthetic oligonucleotide
caagcaacuacau

SEQ ID NO: 110396 - RNA, 12 nt, Artificial Sequence
  Description of Artificial Sequence: Synthetic oligonucleotide
aucaauggcagc

SEQ ID NO: 110397 - RNA, 11 nt, Artificial Sequence
  Description of Artificial Sequence: Synthetic oligonucleotide
uuccagcccac

SEQ ID NO: 110398 - RNA, 12 nt, Artificial Sequence
  Description of Artificial Sequence: Synthetic oligonucleotide
cagcugagaaug

SEQ ID NO: 110399 - RNA, 13 nt, Artificial Sequence
  Description of Artificial Sequence: Synthetic oligonucleotide
aacguaucuccua

SEQ ID NO: 110400 - RNA, 14 nt, Artificial Sequence
  Description of Artificial Sequence: Synthetic oligonucleotide
ccuaaaauaauuuc

SEQ ID NO: 110401 - RNA, 13 nt, Artificial Sequence
  Description of Artificial Sequence: Synthetic oligonucleotide
uggaagauucagc

SEQ ID NO: 110402 - RNA, 12 nt, Artificial Sequence
  Description of Artificial Sequence: Synthetic oligonucleotide
uuaaacucuccu

SEQ ID NO: 110403 - RNA, 12 nt, Artificial Sequence
  Description of Artificial Sequence: Synthetic oligonucleotide
cagccuacaguu

SEQ ID NO: 110404 - RNA, 13 nt, Artificial Sequence
  Description of Artificial Sequence: Synthetic oligonucleotide
guuauguucaguc

SEQ ID NO: 110405 - RNA, 13 nt, Artificial Sequence
  Description of Artificial Sequence: Synthetic oligonucleotide
cacauacaaaaug

SEQ ID NO: 110406 - RNA, 9 nt, Artificial Sequence
  Description of Artificial Sequence: Synthetic oligonucleotide
uccuuuugc

SEQ ID NO: 110407 - RNA, 12 nt, Artificial Sequence
  Description of Artificial Sequence: Synthetic oligonucleotide
ugaccugugaag

SEQ ID NO: 110408 - RNA, 12 nt, Artificial Sequence
  Description of Artificial Sequence: Synthetic oligonucleotide
cuaucucacaca

SEQ ID NO: 110409 - RNA, 13 nt, Artificial Sequence
  Description of Artificial Sequence: Synthetic oligonucleotide
uguccucaauugu

SEQ ID NO: 110410 - RNA, 12 nt, Artificial Sequence
  Description of Artificial Sequence: Synthetic oligonucleotide
aaaccguagcug

SEQ ID NO: 110411 - RNA, 12 nt, Artificial Sequence
  Description of Artificial Sequence: Synthetic oligonucleotide
uagcuggcaagc

SEQ ID NO: 110412 - RNA, 14 nt, Artificial Sequence
  Description of Artificial Sequence: Synthetic oligonucleotide
uuguaugguuaaaa

SEQ ID NO: 110413 - RNA, 14 nt, Artificial Sequence
  Description of Artificial Sequence: Synthetic oligonucleotide
ugguuaaaagaugg

SEQ ID NO: 110414 - RNA, 13 nt, Artificial Sequence
  Description of Artificial Sequence: Synthetic oligonucleotide
cagggaauuauac

SEQ ID NO: 110415 - RNA, 12 nt, Artificial Sequence
  Description of Artificial Sequence: Synthetic oligonucleotide
acaaucuugcug

SEQ ID NO: 110416 - RNA, 13 nt, Artificial Sequence
  Description of Artificial Sequence: Synthetic oligonucleotide
ccaauaaugaaga

SEQ ID NO: 110417 - RNA, 13 nt, Artificial Sequence
  Description of Artificial Sequence: Synthetic oligonucleotide
acuuuggauguuc

SEQ ID NO: 110418 - RNA, 12 nt, Artificial Sequence
  Description of Artificial Sequence: Synthetic oligonucleotide
aaugcuuccacu

SEQ ID NO: 110419 - RNA, 11 nt, Artificial Sequence
  Description of Artificial Sequence: Synthetic oligonucleotide
gagaaaguuug

SEQ ID NO: 110420 - RNA, 11 nt, Artificial Sequence
  Description of Artificial Sequence: Synthetic oligonucleotide
aaagaacuacu

SEQ ID NO: 110421 - RNA, 12 nt, Artificial Sequence
  Description of Artificial Sequence: Synthetic oligonucleotide
uuagaaauacgg

SEQ ID NO: 110422 - RNA, 12 nt, Artificial Sequence
  Description of Artificial Sequence: Synthetic oligonucleotide
aacauggguaca

SEQ ID NO: 110423 - RNA, 14 nt, Artificial Sequence
  Description of Artificial Sequence: Synthetic oligonucleotide
aaagacacagaaga

SEQ ID NO: 110424 - RNA, 11 nt, Artificial Sequence
  Description of Artificial Sequence: Synthetic oligonucleotide
uaguagggagg

SEQ ID NO: 110425 - RNA, 12 nt, Artificial Sequence
  Description of Artificial Sequence: Synthetic oligonucleotide
gccuucugcagc

SEQ ID NO: 110426 - RNA, 10 nt, Artificial Sequence
  Description of Artificial Sequence: Synthetic oligonucleotide
ggucugguac

SEQ ID NO: 110427 - RNA, 12 nt, Artificial Sequence
  Description of Artificial Sequence: Synthetic oligonucleotide
cuaguccuuccg

SEQ ID NO: 110428 - RNA, 12 nt, Artificial Sequence
  Description of Artificial Sequence: Synthetic oligonucleotide
ccagugaauauu

SEQ ID NO: 110429 - RNA, 13 nt, Artificial Sequence
  Description of Artificial Sequence: Synthetic oligonucleotide
augaauucaaguu

SEQ ID NO: 110430 - RNA, 12 nt, Artificial Sequence
  Description of Artificial Sequence: Synthetic oligonucleotide
caggacacagau

SEQ ID NO: 110431 - RNA, 12 nt, Artificial Sequence
  Description of Artificial Sequence: Synthetic oligonucleotide
cucaaagcacag

SEQ ID NO: 110432 - RNA, 10 nt, Artificial Sequence
  Description of Artificial Sequence: Synthetic oligonucleotide
accacugcca

SEQ ID NO: 110433 - RNA, 13 nt, Artificial Sequence
  Description of Artificial Sequence: Synthetic oligonucleotide
gaaacuacuagug

SEQ ID NO: 110434 - RNA, 12 nt, Artificial Sequence
  Description of Artificial Sequence: Synthetic oligonucleotide
aagucggacagc

SEQ ID NO: 110435 - RNA, 13 nt, Artificial Sequence
  Description of Artificial Sequence: Synthetic oligonucleotide
gaaagcgaaaaau

SEQ ID NO: 110436 - RNA, 13 nt, Artificial Sequence
  Description of Artificial Sequence: Synthetic oligonucleotide
cccucugauuuag

SEQ ID NO: 110437 - RNA, 12 nt, Artificial Sequence
  Description of Artificial Sequence: Synthetic oligonucleotide
ugagcuauuuaa

SEQ ID NO: 110438 - RNA, 13 nt, Artificial Sequence
  Description of Artificial Sequence: Synthetic oligonucleotide
aaaaggugaaaaa

SEQ ID NO: 110439 - RNA, 14 nt, Artificial Sequence
  Description of Artificial Sequence: Synthetic oligonucleotide
gaaaaagcacuauu

SEQ ID NO: 110440 - RNA, 12 nt, Artificial Sequence
  Description of Artificial Sequence: Synthetic oligonucleotide
ggcugaaaagaa

SEQ ID NO: 110441 - RNA, 12 nt, Artificial Sequence
  Description of Artificial Sequence: Synthetic oligonucleotide
uaaacccuuaua

SEQ ID NO: 110442 - RNA, 13 nt, Artificial Sequence
  Description of Artificial Sequence: Synthetic oligonucleotide
cauacuauuagcc

SEQ ID NO: 110443 - RNA, 12 nt, Artificial Sequence
  Description of Artificial Sequence: Synthetic oligonucleotide
gacagaagcauu

SEQ ID NO: 110444 - RNA, 14 nt, Artificial Sequence
  Description of Artificial Sequence: Synthetic oligonucleotide
agagcaaauaagau

SEQ ID NO: 110445 - RNA, 14 nt, Artificial Sequence
  Description of Artificial Sequence: Synthetic oligonucleotide
ccaacauuuuucuc

SEQ ID NO: 110446 - RNA, 15 nt, Artificial Sequence
  Description of Artificial Sequence: Synthetic oligonucleotide
uuaaguaugagaaaa

SEQ ID NO: 110447 - RNA, 14 nt, Artificial Sequence
  Description of Artificial Sequence: Synthetic oligonucleotide
caggaauaaagaug

SEQ ID NO: 110448 - RNA, 13 nt, Artificial Sequence
  Description of Artificial Sequence: Synthetic oligonucleotide
aauuugaaugacc

SEQ ID NO: 110449 - RNA, 14 nt, Artificial Sequence
  Description of Artificial Sequence: Synthetic oligonucleotide
auguauaaagauag

SEQ ID NO: 110450 - RNA, 12 nt, Artificial Sequence
  Description of Artificial Sequence: Synthetic oligonucleotide
ggcuguaacuau

SEQ ID NO: 110451 - RNA, 11 nt, Artificial Sequence
  Description of Artificial Sequence: Synthetic oligonucleotide
ucugugaagug

SEQ ID NO: 110452 - RNA, 14 nt, Artificial Sequence
  Description of Artificial Sequence: Synthetic oligonucleotide
ccuuuaaggaaaug

SEQ ID NO: 110453 - RNA, 13 nt, Artificial Sequence
  Description of Artificial Sequence: Synthetic oligonucleotide
aaggauacaaaaa

SEQ ID NO: 110454 - RNA, 12 nt, Artificial Sequence
  Description of Artificial Sequence: Synthetic oligonucleotide
agaugcaauuug

SEQ ID NO: 110455 - RNA, 12 nt, Artificial Sequence
  Description of Artificial Sequence: Synthetic oligonucleotide
guucaaaacgaa

SEQ ID NO: 110456 - RNA, 11 nt, Artificial Sequence
  Description of Artificial Sequence: Synthetic oligonucleotide
gugaaaccuca

SEQ ID NO: 110457 - RNA, 13 nt, Artificial Sequence
  Description of Artificial Sequence: Synthetic oligonucleotide
acgaaagagaagc

SEQ ID NO: 110458 - RNA, 12 nt, Artificial Sequence
  Description of Artificial Sequence: Synthetic oligonucleotide
cuccacaagcgc

SEQ ID NO: 110459 - RNA, 14 nt, Artificial Sequence
  Description of Artificial Sequence: Synthetic oligonucleotide
gagaagauuccaaa

SEQ ID NO: 110460 - RNA, 13 nt, Artificial Sequence
  Description of Artificial Sequence: Synthetic oligonucleotide
aaucuggauucaa

SEQ ID NO: 110461 - RNA, 13 nt, Artificial Sequence
  Description of Artificial Sequence: Synthetic oligonucleotide
agaacagauuuga

SEQ ID NO: 110462 - RNA, 11 nt, Artificial Sequence
  Description of Artificial Sequence: Synthetic oligonucleotide
ccagagcugug

SEQ ID NO: 110463 - RNA, 12 nt, Artificial Sequence
  Description of Artificial Sequence: Synthetic oligonucleotide
ccucagauuguu

SEQ ID NO: 110464 - RNA, 12 nt, Artificial Sequence
  Description of Artificial Sequence: Synthetic oligonucleotide
cuauuuuaauua

SEQ ID NO: 110465 - RNA, 13 nt, Artificial Sequence
  Description of Artificial Sequence: Synthetic oligonucleotide
uuuaauuuauuaa

SEQ ID NO: 110466 - RNA, 12 nt, Artificial Sequence
  Description of Artificial Sequence: Synthetic oligonucleotide
augcaguuugaa

SEQ ID NO: 110467 - RNA, 11 nt, Artificial Sequence
  Description of Artificial Sequence: Synthetic oligonucleotide
caugcugcugg

SEQ ID NO: 110468 - RNA, 13 nt, Artificial Sequence
  Description of Artificial Sequence: Synthetic oligonucleotide
agaugugcauuuc

SEQ ID NO: 110469 - RNA, 12 nt, Artificial Sequence
  Description of Artificial Sequence: Synthetic oligonucleotide
ucaaaaccugug

SEQ ID NO: 110470 - RNA, 11 nt, Artificial Sequence
  Description of Artificial Sequence: Synthetic oligonucleotide
gaaugugggua

SEQ ID NO: 110471 - RNA, 10 nt, Artificial Sequence
  Description of Artificial Sequence: Synthetic oligonucleotide
auguggguag

SEQ ID NO: 110472 - RNA, 13 nt, Artificial Sequence
  Description of Artificial Sequence: Synthetic oligonucleotide
ugaaaaugagcau

SEQ ID NO: 110473 - RNA, 13 nt, Artificial Sequence
  Description of Artificial Sequence: Synthetic oligonucleotide
uugcuuuucaugu

SEQ ID NO: 110474 - RNA, 12 nt, Artificial Sequence
  Description of Artificial Sequence: Synthetic oligonucleotide
uguauuucuaua

SEQ ID NO: 110475 - RNA, 13 nt, Artificial Sequence
  Description of Artificial Sequence: Synthetic oligonucleotide
uuugauuaauguu

SEQ ID NO: 110476 - RNA, 12 nt, Artificial Sequence
  Description of Artificial Sequence: Synthetic oligonucleotide
caacguguauag

SEQ ID NO: 110477 - RNA, 12 nt, Artificial Sequence
  Description of Artificial Sequence: Synthetic oligonucleotide
cauauccuuggc

SEQ ID NO: 110478 - RNA, 13 nt, Artificial Sequence
  Description of Artificial Sequence: Synthetic oligonucleotide
uacuaacaucugg

SEQ ID NO: 110479 - RNA, 11 nt, Artificial Sequence
  Description of Artificial Sequence: Synthetic oligonucleotide
cauaaguugug

SEQ ID NO: 110480 - RNA, 12 nt, Artificial Sequence
  Description of Artificial Sequence: Synthetic oligonucleotide
gcaucauuuugg

SEQ ID NO: 110481 - RNA, 10 nt, Artificial Sequence
  Description of Artificial Sequence: Synthetic oligonucleotide
gcucuucuua

SEQ ID NO: 110482 - RNA, 10 nt, Artificial Sequence
  Description of Artificial Sequence: Synthetic oligonucleotide
agauuagguc

SEQ ID NO: 110483 - RNA, 12 nt, Artificial Sequence
  Description of Artificial Sequence: Synthetic oligonucleotide
auggaauugaaa

SEQ ID NO: 110484 - RNA, 13 nt, Artificial Sequence
  Description of Artificial Sequence: Synthetic oligonucleotide
cacacucauuccu

SEQ ID NO: 110485 - RNA, 12 nt, Artificial Sequence
  Description of Artificial Sequence: Synthetic oligonucleotide
uguagagguaac

SEQ ID NO: 110486 - RNA, 11 nt, Artificial Sequence
  Description of Artificial Sequence: Synthetic oligonucleotide
caaccacaugc

SEQ ID NO: 110487 - RNA, 12 nt, Artificial Sequence
  Description of Artificial Sequence: Synthetic oligonucleotide
ucggaaacaagu

SEQ ID NO: 110488 - RNA, 11 nt, Artificial Sequence
  Description of Artificial Sequence: Synthetic oligonucleotide
acucccaauaa

SEQ ID NO: 110489 - RNA, 13 nt, Artificial Sequence
  Description of Artificial Sequence: Synthetic oligonucleotide
aaugcuaagaaau

SEQ ID NO: 110490 - RNA, 11 nt, Artificial Sequence
  Description of Artificial Sequence: Synthetic oligonucleotide
gucuuucucua

SEQ ID NO: 110491 - RNA, 11 nt, Artificial Sequence
  Description of Artificial Sequence: Synthetic oligonucleotide
ugaauuucagg

SEQ ID NO: 110492 - RNA, 13 nt, Artificial Sequence
  Description of Artificial Sequence: Synthetic oligonucleotide
cgauucccucuca

SEQ ID NO: 110493 - RNA, 11 nt, Artificial Sequence
  Description of Artificial Sequence: Synthetic oligonucleotide
aggaaagugaa

SEQ ID NO: 110494 - RNA, 12 nt, Artificial Sequence
  Description of Artificial Sequence: Synthetic oligonucleotide
gaggcugcaugc

SEQ ID NO: 110495 - RNA, 11 nt, Artificial Sequence
  Description of Artificial Sequence: Synthetic oligonucleotide
ucucugaacag

SEQ ID NO: 110496 - RNA, 12 nt, Artificial Sequence
  Description of Artificial Sequence: Synthetic oligonucleotide
aacuuggcugua

SEQ ID NO: 110497 - RNA, 12 nt, Artificial Sequence
  Description of Artificial Sequence: Synthetic oligonucleotide
agaagccaaaau

SEQ ID NO: 110498 - RNA, 14 nt, Artificial Sequence
  Description of Artificial Sequence: Synthetic oligonucleotide
auuaaaagaagucc

SEQ ID NO: 110499 - RNA, 14 nt, Artificial Sequence
  Description of Artificial Sequence: Synthetic oligonucleotide
gaauccggauuauc

SEQ ID NO: 110500 - RNA, 12 nt, Artificial Sequence
  Description of Artificial Sequence: Synthetic oligonucleotide
aaugugacauca

SEQ ID NO: 110501 - RNA, 13 nt, Artificial Sequence
  Description of Artificial Sequence: Synthetic oligonucleotide
caucaaagcaagu

SEQ ID NO: 110502 - RNA, 11 nt, Artificial Sequence
  Description of Artificial Sequence: Synthetic oligonucleotide
agagagagaaa

SEQ ID NO: 110503 - RNA, 13 nt, Artificial Sequence
  Description of Artificial Sequence: Synthetic oligonucleotide
ucgcuguaguauu

SEQ ID NO: 110504 - RNA, 14 nt, Artificial Sequence
  Description of Artificial Sequence: Synthetic oligonucleotide
cgcuguaguauuua

SEQ ID NO: 110505 - RNA, 13 nt, Artificial Sequence
  Description of Artificial Sequence: Synthetic oligonucleotide
auuuaagcccaua

SEQ ID NO: 110506 - RNA, 15 nt, Artificial Sequence
  Description of Artificial Sequence: Synthetic oligonucleotide
auuaaaauaaacaug

SEQ ID NO: 110507 - RNA, 12 nt, Artificial Sequence
  Description of Artificial Sequence: Synthetic oligonucleotide
cuguucugaucg

SEQ ID NO: 110508 - RNA, 16 nt, Artificial Sequence
  Description of Artificial Sequence: Synthetic oligonucleotide
aaauaauuugaacuuu

SEQ ID NO: 110509 - RNA, 12 nt, Artificial Sequence
  Description of Artificial Sequence: Synthetic oligonucleotide
ugcgaccuuaau

SEQ ID NO: 110510 - RNA, 11 nt, Artificial Sequence
  Description of Artificial Sequence: Synthetic oligonucleotide
cugagaaagcu

SEQ ID NO: 110511 - RNA, 13 nt, Artificial Sequence
  Description of Artificial Sequence: Synthetic oligonucleotide
aguaaagaugcua

SEQ ID NO: 110512 - RNA, 12 nt, Artificial Sequence
  Description of Artificial Sequence: Synthetic oligonucleotide
cugcuuaauugc

SEQ ID NO: 110513 - RNA, 14 nt, Artificial Sequence
  Description of Artificial Sequence: Synthetic oligonucleotide
uaccauaugaauga

SEQ ID NO: 110514 - RNA, 12 nt, Artificial Sequence
  Description of Artificial Sequence: Synthetic oligonucleotide
aacuuucuuauc

SEQ ID NO: 110515 - RNA, 13 nt, Artificial Sequence
  Description of Artificial Sequence: Synthetic oligonucleotide
ccuugcaugacau

SEQ ID NO: 110516 - RNA, 14 nt, Artificial Sequence
  Description of Artificial Sequence: Synthetic oligonucleotide
ugaauuuguauaug

SEQ ID NO: 110517 - RNA, 12 nt, Artificial Sequence
  Description of Artificial Sequence: Synthetic oligonucleotide
gaauccuaguag

SEQ ID NO: 110518 - RNA, 10 nt, Artificial Sequence
  Description of Artificial Sequence: Synthetic oligonucleotide
gaaagggaag

SEQ ID NO: 110519 - RNA, 11 nt, Artificial Sequence
  Description of Artificial Sequence: Synthetic oligonucleotide
uaucggcaugc

SEQ ID NO: 110520 - RNA, 12 nt, Artificial Sequence
  Description of Artificial Sequence: Synthetic oligonucleotide
caccucauagua

SEQ ID NO: 110521 - RNA, 11 nt, Artificial Sequence
  Description of Artificial Sequence: Synthetic oligonucleotide
ccagaauugcc

SEQ ID NO: 110522 - RNA, 11 nt, Artificial Sequence
  Description of Artificial Sequence: Synthetic oligonucleotide
uggugaucugg

SEQ ID NO: 110523 - RNA, 12 nt, Artificial Sequence
  Description of Artificial Sequence: Synthetic oligonucleotide
gaucuggguaau

SEQ ID NO: 110524 - RNA, 12 nt, Artificial Sequence
  Description of Artificial Sequence: Synthetic oligonucleotide
ggaugugaugaa

SEQ ID NO: 110525 - RNA, 12 nt, Artificial Sequence
  Description of Artificial Sequence: Synthetic oligonucleotide
cauuuccacagc

SEQ ID NO: 110526 - RNA, 11 nt, Artificial Sequence
  Description of Artificial Sequence: Synthetic oligonucleotide
acagcuacacc

SEQ ID NO: 110527 - RNA, 12 nt, Artificial Sequence
  Description of Artificial Sequence: Synthetic oligonucleotide
ugcaguucuuac

SEQ ID NO: 110528 - RNA, 12 nt, Artificial Sequence
  Description of Artificial Sequence: Synthetic oligonucleotide
acgagaagaaga

SEQ ID NO: 110529 - RNA, 12 nt, Artificial Sequence
  Description of Artificial Sequence: Synthetic oligonucleotide
cgagaagaagau

SEQ ID NO: 110530 - RNA, 15 nt, Artificial Sequence
  Description of Artificial Sequence: Synthetic oligonucleotide
aagaagaucauuuac

SEQ ID NO: 110531 - RNA, 11 nt, Artificial Sequence
  Description of Artificial Sequence: Synthetic oligonucleotide
agaggaagagg

SEQ ID NO: 110532 - RNA, 12 nt, Artificial Sequence
  Description of Artificial Sequence: Synthetic oligonucleotide
gaggaagaggug

SEQ ID NO: 110533 - RNA, 13 nt, Artificial Sequence
  Description of Artificial Sequence: Synthetic oligonucleotide
cuacuuugagggc

SEQ ID NO: 110534 - RNA, 12 nt, Artificial Sequence
  Description of Artificial Sequence: Synthetic oligonucleotide
agggcaucuccu

SEQ ID NO: 110535 - RNA, 10 nt, Artificial Sequence
  Description of Artificial Sequence: Synthetic oligonucleotide
ggagugauau

SEQ ID NO: 110536 - RNA, 11 nt, Artificial Sequence
  Description of Artificial Sequence: Synthetic oligonucleotide
gagugauaugg

SEQ ID NO: 110537 - RNA, 12 nt, Artificial Sequence
  Description of Artificial Sequence: Synthetic oligonucleotide
ugcaguaaagau

SEQ ID NO: 110538 - RNA, 13 nt, Artificial Sequence
  Description of Artificial Sequence: Synthetic oligonucleotide
aguaaagauccua

SEQ ID NO: 110539 - RNA, 12 nt, Artificial Sequence
  Description of Artificial Sequence: Synthetic oligonucleotide
ugacaaaggaca

SEQ ID NO: 110540 - RNA, 13 nt, Artificial Sequence
  Description of Artificial Sequence: Synthetic oligonucleotide
gcaauugugaccc

SEQ ID NO: 110541 - RNA, 12 nt, Artificial Sequence
  Description of Artificial Sequence: Synthetic oligonucleotide
aacaucauccau

SEQ ID NO: 110542 - RNA, 12 nt, Artificial Sequence
  Description of Artificial Sequence: Synthetic oligonucleotide
ugaaauccaaca

SEQ ID NO: 110543 - RNA, 15 nt, Artificial Sequence
  Description of Artificial Sequence: Synthetic oligonucleotide
aacaauauauuucuc

SEQ ID NO: 110544 - RNA, 14 nt, Artificial Sequence
  Description of Artificial Sequence: Synthetic oligonucleotide
aacaguaaagucac

SEQ ID NO: 110545 - RNA, 14 nt, Artificial Sequence
  Description of Artificial Sequence: Synthetic oligonucleotide
ugugaagaaaguaa

SEQ ID NO: 110546 - RNA, 13 nt, Artificial Sequence
  Description of Artificial Sequence: Synthetic oligonucleotide
cuuccgagccauc

SEQ ID NO: 110547 - RNA, 12 nt, Artificial Sequence
  Description of Artificial Sequence: Synthetic oligonucleotide
aauggagguuga

SEQ ID NO: 110548 - RNA, 12 nt, Artificial Sequence
  Description of Artificial Sequence: Synthetic oligonucleotide
ggagguugaaua

SEQ ID NO: 110549 - RNA, 13 nt, Artificial Sequence
  Description of Artificial Sequence: Synthetic oligonucleotide
auuuugaguuuuc

SEQ ID NO: 110550 - RNA, 12 nt, Artificial Sequence
  Description of Artificial Sequence: Synthetic oligonucleotide
uauccuguuugu

SEQ ID NO: 110551 - RNA, 11 nt, Artificial Sequence
  Description of Artificial Sequence: Synthetic oligonucleotide
ccuguuuguuc

SEQ ID NO: 110552 - RNA, 10 nt, Artificial Sequence
  Description of Artificial Sequence: Synthetic oligonucleotide
cucuacagcc

SEQ ID NO: 110553 - RNA, 12 nt, Artificial Sequence
  Description of Artificial Sequence: Synthetic oligonucleotide
ucuuccauagcu

SEQ ID NO: 110554 - RNA, 12 nt, Artificial Sequence
  Description of Artificial Sequence: Synthetic oligonucleotide
auaaucuuccug

SEQ ID NO: 110555 - RNA, 12 nt, Artificial Sequence
  Description of Artificial Sequence: Synthetic oligonucleotide
uaaucuuccugu

SEQ ID NO: 110556 - RNA, 12 nt, Artificial Sequence
  Description of Artificial Sequence: Synthetic oligonucleotide
cuucaugacuug

SEQ ID NO: 110557 - RNA, 12 nt, Artificial Sequence
  Description of Artificial Sequence: Synthetic oligonucleotide
aagagggagaga

SEQ ID NO: 110558 - RNA, 12 nt, Artificial Sequence
  Description of Artificial Sequence: Synthetic oligonucleotide
cgucuccuacca

SEQ ID NO: 110559 - RNA, 12 nt, Artificial Sequence
  Description of Artificial Sequence: Synthetic oligonucleotide
gaucaaucggcc

SEQ ID NO: 110560 - RNA, 12 nt, Artificial Sequence
  Description of Artificial Sequence: Synthetic oligonucleotide
ggacgaacaucc

SEQ ID NO: 110561 - RNA, 11 nt, Artificial Sequence
  Description of Artificial Sequence: Synthetic oligonucleotide
agggucggaac

SEQ ID NO: 110562 - RNA, 10 nt, Artificial Sequence
  Description of Artificial Sequence: Synthetic oligonucleotide
ucggaaccca

SEQ ID NO: 110563 - RNA, 11 nt, Artificial Sequence
  Description of Artificial Sequence: Synthetic oligonucleotide
acccaagcuua

SEQ ID NO: 110564 - RNA, 14 nt, Artificial Sequence
  Description of Artificial Sequence: Synthetic oligonucleotide
gaacuuuaagcaac

SEQ ID NO: 110565 - RNA, 11 nt, Artificial Sequence
  Description of Artificial Sequence: Synthetic oligonucleotide
acuauucagug

SEQ ID NO: 110566 - RNA, 11 nt, Artificial Sequence
  Description of Artificial Sequence: Synthetic oligonucleotide
cuauucagugg

SEQ ID NO: 110567 - RNA, 13 nt, Artificial Sequence
  Description of Artificial Sequence: Synthetic oligonucleotide
aaacacagauaac

SEQ ID NO: 110568 - RNA, 12 nt, Artificial Sequence
  Description of Artificial Sequence: Synthetic oligonucleotide
cuuaagaaaaga

SEQ ID NO: 110569 - RNA, 12 nt, Artificial Sequence
  Description of Artificial Sequence: Synthetic oligonucleotide
cugaaggagugu

SEQ ID NO: 110570 - RNA, 10 nt, Artificial Sequence
  Description of Artificial Sequence: Synthetic oligonucleotide
ucaccgcggg

SEQ ID NO: 110571 - RNA, 14 nt, Artificial Sequence
  Description of Artificial Sequence: Synthetic oligonucleotide
agcagaaauaagcg

SEQ ID NO: 110572 - RNA, 12 nt, Artificial Sequence
  Description of Artificial Sequence: Synthetic oligonucleotide
aagcgugccguu

SEQ ID NO: 110573 - RNA, 12 nt, Artificial Sequence
  Description of Artificial Sequence: Synthetic oligonucleotide
agaaacagucac

SEQ ID NO: 110574 - RNA, 12 nt, Artificial Sequence
  Description of Artificial Sequence: Synthetic oligonucleotide
agaggaagaagg

SEQ ID NO: 110575 - RNA, 14 nt, Artificial Sequence
  Description of Artificial Sequence: Synthetic oligonucleotide
uguauucaaaauau

SEQ ID NO: 110576 - RNA, 13 nt, Artificial Sequence
  Description of Artificial Sequence: Synthetic oligonucleotide
auuuuccucccuu

SEQ ID NO: 110577 - RNA, 13 nt, Artificial Sequence
  Description of Artificial Sequence: Synthetic oligonucleotide
caaagaaagauag

SEQ ID NO: 110578 - RNA, 12 nt, Artificial Sequence
  Description of Artificial Sequence: Synthetic oligonucleotide
aagaaagauaga

SEQ ID NO: 110579 - RNA, 13 nt, Artificial Sequence
  Description of Artificial Sequence: Synthetic oligonucleotide
gaaagcauuuguu

SEQ ID NO: 110580 - RNA, 13 nt, Artificial Sequence
  Description of Artificial Sequence: Synthetic oligonucleotide
ugaguuaaacgaa

SEQ ID NO: 110581 - RNA, 12 nt, Artificial Sequence
  Description of Artificial Sequence: Synthetic oligonucleotide
acugauacagaa

SEQ ID NO: 110582 - RNA, 12 nt, Artificial Sequence
  Description of Artificial Sequence: Synthetic oligonucleotide
auauuauauaua

SEQ ID NO: 110583 - RNA, 12 nt, Artificial Sequence
  Description of Artificial Sequence: Synthetic oligonucleotide
auuauauauaua

SEQ ID NO: 110584 - RNA, 12 nt, Artificial Sequence
  Description of Artificial Sequence: Synthetic oligonucleotide
ucacuggaugua

SEQ ID NO: 110585 - RNA, 12 nt, Artificial Sequence
  Description of Artificial Sequence: Synthetic oligonucleotide
cagggaagagga

SEQ ID NO: 110586 - RNA, 15 nt, Artificial Sequence
  Description of Artificial Sequence: Synthetic oligonucleotide
augaucuuuuuuuug

SEQ ID NO: 110587 - RNA, 11 nt, Artificial Sequence
  Description of Artificial Sequence: Synthetic oligonucleotide
aguucacggcc

SEQ ID NO: 110588 - RNA, 13 nt, Artificial Sequence
  Description of Artificial Sequence: Synthetic oligonucleotide
caccaucacacca

SEQ ID NO: 110589 - RNA, 11 nt, Artificial Sequence
  Description of Artificial Sequence: Synthetic oligonucleotide
ccugcggguuu

SEQ ID NO: 110590 - RNA, 10 nt, Artificial Sequence
  Description of Artificial Sequence: Synthetic oligonucleotide
auccaguuug

SEQ ID NO: 110591 - RNA, 13 nt, Artificial Sequence
  Description of Artificial Sequence: Synthetic oligonucleotide
guuaaggacuucu

SEQ ID NO: 110592 - RNA, 13 nt, Artificial Sequence
  Description of Artificial Sequence: Synthetic oligonucleotide
cagugggacagag

SEQ ID NO: 110593 - RNA, 14 nt, Artificial Sequence
  Description of Artificial Sequence: Synthetic oligonucleotide
aauuuguuauugug

SEQ ID NO: 110594 - RNA, 13 nt, Artificial Sequence
  Description of Artificial Sequence: Synthetic oligonucleotide
uucaaaugcauuu

SEQ ID NO: 110595 - RNA, 10 nt, Artificial Sequence
  Description of Artificial Sequence: Synthetic oligonucleotide
caggaaagcc

SEQ ID NO: 110596 - RNA, 11 nt, Artificial Sequence
  Description of Artificial Sequence: Synthetic oligonucleotide
aggaaagcccu

SEQ ID NO: 110597 - RNA, 12 nt, Artificial Sequence
  Description of Artificial Sequence: Synthetic oligonucleotide
cccagcauggcc

SEQ ID NO: 110598 - RNA, 11 nt, Artificial Sequence
  Description of Artificial Sequence: Synthetic oligonucleotide
cuucucccuga

SEQ ID NO: 110599 - RNA, 12 nt, Artificial Sequence
  Description of Artificial Sequence: Synthetic oligonucleotide
gaagaagcccuu

SEQ ID NO: 110600 - RNA, 12 nt, Artificial Sequence
  Description of Artificial Sequence: Synthetic oligonucleotide
agaagcccuuca

SEQ ID NO: 110601 - RNA, 11 nt, Artificial Sequence
  Description of Artificial Sequence: Synthetic oligonucleotide
gcccuucagcg

SEQ ID NO: 110602 - RNA, 11 nt, Artificial Sequence
  Description of Artificial Sequence: Synthetic oligonucleotide
ccuucagcggc

SEQ ID NO: 110603 - RNA, 12 nt, Artificial Sequence
  Description of Artificial Sequence: Synthetic oligonucleotide
ucagcggccagu

SEQ ID NO: 110604 - RNA, 12 nt, Artificial Sequence
  Description of Artificial Sequence: Synthetic oligonucleotide
ugaaaagcuccg

SEQ ID NO: 110605 - RNA, 11 nt, Artificial Sequence
  Description of Artificial Sequence: Synthetic oligonucleotide
aaaagcuccgg

SEQ ID NO: 110606 - RNA, 13 nt, Artificial Sequence
  Description of Artificial Sequence: Synthetic oligonucleotide
agucaacagucug

SEQ ID NO: 110607 - RNA, 13 nt, Artificial Sequence
  Description of Artificial Sequence: Synthetic oligonucleotide
cagaguucaaaag

SEQ ID NO: 110608 - RNA, 13 nt, Artificial Sequence
  Description of Artificial Sequence: Synthetic oligonucleotide
agaguucaaaagc

SEQ ID NO: 110609 - RNA, 12 nt, Artificial Sequence
  Description of Artificial Sequence: Synthetic oligonucleotide
uucaaaagcccu

SEQ ID NO: 110610 - RNA, 12 nt, Artificial Sequence
  Description of Artificial Sequence: Synthetic oligonucleotide
ucaaaagcccuu

SEQ ID NO: 110611 - RNA, 12 nt, Artificial Sequence
  Description of Artificial Sequence: Synthetic oligonucleotide
aaaagcccuuca

SEQ ID NO: 110612 - RNA, 12 nt, Artificial Sequence
  Description of Artificial Sequence: Synthetic oligonucleotide
aaagcccuucag

SEQ ID NO: 110613 - RNA, 13 nt, Artificial Sequence
  Description of Artificial Sequence: Synthetic oligonucleotide
gugaagccgcucg

SEQ ID NO: 110614 - RNA, 12 nt, Artificial Sequence
  Description of Artificial Sequence: Synthetic oligonucleotide
cacgccagucaa

SEQ ID NO: 110615 - RNA, 13 nt, Artificial Sequence
  Description of Artificial Sequence: Synthetic oligonucleotide
uucuuggugcgug

SEQ ID NO: 110616 - RNA, 14 nt, Artificial Sequence
  Description of Artificial Sequence: Synthetic oligonucleotide
auuggauucaucag

SEQ ID NO: 110617 - RNA, 13 nt, Artificial Sequence
  Description of Artificial Sequence: Synthetic oligonucleotide
uggaauaccuaag

SEQ ID NO: 110618 - RNA, 12 nt, Artificial Sequence
  Description of Artificial Sequence: Synthetic oligonucleotide
auuugaggcuca

SEQ ID NO: 110619 - RNA, 11 nt, Artificial Sequence
  Description of Artificial Sequence: Synthetic oligonucleotide
ucuacaauugg

SEQ ID NO: 110620 - RNA, 12 nt, Artificial Sequence
  Description of Artificial Sequence: Synthetic oligonucleotide
uaguuaggagcc

SEQ ID NO: 110621 - RNA, 13 nt, Artificial Sequence
  Description of Artificial Sequence: Synthetic oligonucleotide
agucaauauccac

SEQ ID NO: 110622 - RNA, 13 nt, Artificial Sequence
  Description of Artificial Sequence: Synthetic oligonucleotide
auguucagucaca

SEQ ID NO: 110623 - RNA, 12 nt, Artificial Sequence
  Description of Artificial Sequence: Synthetic oligonucleotide
acacacacauac

SEQ ID NO: 110624 - RNA, 12 nt, Artificial Sequence
  Description of Artificial Sequence: Synthetic oligonucleotide
uuccuuuugcuu

SEQ ID NO: 110625 - RNA, 16 nt, Artificial Sequence
  Description of Artificial Sequence: Synthetic oligonucleotide
uuuuaaaguaauuuuu

SEQ ID NO: 110626 - RNA, 13 nt, Artificial Sequence
  Description of Artificial Sequence: Synthetic oligonucleotide
caacagucaaugg

SEQ ID NO: 110627 - RNA, 13 nt, Artificial Sequence
  Description of Artificial Sequence: Synthetic oligonucleotide
ucgacaaaccaau

SEQ ID NO: 110628 - RNA, 12 nt, Artificial Sequence
  Description of Artificial Sequence: Synthetic oligonucleotide
acugcuaccacu

SEQ ID NO: 110629 - RNA, 13 nt, Artificial Sequence
  Description of Artificial Sequence: Synthetic oligonucleotide
gcaagcggucuua

SEQ ID NO: 110630 - RNA, 13 nt, Artificial Sequence
  Description of Artificial Sequence: Synthetic oligonucleotide
ggucuuaccggcu

SEQ ID NO: 110631 - RNA, 11 nt, Artificial Sequence
  Description of Artificial Sequence: Synthetic oligonucleotide
gauggguuacc

SEQ ID NO: 110632 - RNA, 11 nt, Artificial Sequence
  Description of Artificial Sequence: Synthetic oligonucleotide
guuaccugcga

SEQ ID NO: 110633 - RNA, 12 nt, Artificial Sequence
  Description of Artificial Sequence: Synthetic oligonucleotide
aaucuugcugag

SEQ ID NO: 110634 - RNA, 13 nt, Artificial Sequence
  Description of Artificial Sequence: Synthetic oligonucleotide
agcauaaaacagu

SEQ ID NO: 110635 - RNA, 12 nt, Artificial Sequence
  Description of Artificial Sequence: Synthetic oligonucleotide
guccuuuauccu

SEQ ID NO: 110636 - RNA, 12 nt, Artificial Sequence
  Description of Artificial Sequence: Synthetic oligonucleotide
caacgcaaguug

SEQ ID NO: 110637 - RNA, 13 nt, Artificial Sequence
  Description of Artificial Sequence: Synthetic oligonucleotide
aaacugaaaccau

SEQ ID NO: 110638 - RNA, 14 nt, Artificial Sequence
  Description of Artificial Sequence: Synthetic oligonucleotide
acuuuguuaaauau

SEQ ID NO: 110639 - RNA, 14 nt, Artificial Sequence
  Description of Artificial Sequence: Synthetic oligonucleotide
guauauuaaaaguu

SEQ ID NO: 110640 - RNA, 13 nt, Artificial Sequence
  Description of Artificial Sequence: Synthetic oligonucleotide
guuuugacuuaac

SEQ ID NO: 110641 - RNA, 13 nt, Artificial Sequence
  Description of Artificial Sequence: Synthetic oligonucleotide
gcaaacucagcac

SEQ ID NO: 110642 - RNA, 11 nt, Artificial Sequence
  Description of Artificial Sequence: Synthetic oligonucleotide
ugcugaccuca

SEQ ID NO: 110643 - RNA, 14 nt, Artificial Sequence
  Description of Artificial Sequence: Synthetic oligonucleotide
uuuauucagaucgc

SEQ ID NO: 110644 - RNA, 13 nt, Artificial Sequence
  Description of Artificial Sequence: Synthetic oligonucleotide
aggguucugggau

SEQ ID NO: 110645 - RNA, 15 nt, Artificial Sequence
  Description of Artificial Sequence: Synthetic oligonucleotide
auauuggaaauuaug

SEQ ID NO: 110646 - RNA, 13 nt, Artificial Sequence
  Description of Artificial Sequence: Synthetic oligonucleotide
auggaagcacuag

SEQ ID NO: 110647 - RNA, 13 nt, Artificial Sequence
  Description of Artificial Sequence: Synthetic oligonucleotide
guuuuuaugugga

SEQ ID NO: 110648 - RNA, 12 nt, Artificial Sequence
  Description of Artificial Sequence: Synthetic oligonucleotide
ggaauugguaga

SEQ ID NO: 110649 - RNA, 13 nt, Artificial Sequence
  Description of Artificial Sequence: Synthetic oligonucleotide
uuagacuuggaga

SEQ ID NO: 110650 - RNA, 13 nt, Artificial Sequence
  Description of Artificial Sequence: Synthetic oligonucleotide
uuacaguauucca

SEQ ID NO: 110651 - RNA, 15 nt, Artificial Sequence
  Description of Artificial Sequence: Synthetic oligonucleotide
ccacugaugaauuaa

SEQ ID NO: 110652 - RNA, 12 nt, Artificial Sequence
  Description of Artificial Sequence: Synthetic oligonucleotide
ccacaucaucac

SEQ ID NO: 110653 - RNA, 13 nt, Artificial Sequence
  Description of Artificial Sequence: Synthetic oligonucleotide
cucaccaaacaga

SEQ ID NO: 110654 - RNA, 12 nt, Artificial Sequence
  Description of Artificial Sequence: Synthetic oligonucleotide
ggaacaugaugg

SEQ ID NO: 110655 - RNA, 12 nt, Artificial Sequence
  Description of Artificial Sequence: Synthetic oligonucleotide
cauguagacugc

SEQ ID NO: 110656 - RNA, 13 nt, Artificial Sequence
  Description of Artificial Sequence: Synthetic oligonucleotide
ggaucuauuuaug

SEQ ID NO: 110657 - RNA, 12 nt, Artificial Sequence
  Description of Artificial Sequence: Synthetic oligonucleotide
gcacuauuauca

SEQ ID NO: 110658 - RNA, 11 nt, Artificial Sequence
  Description of Artificial Sequence: Synthetic oligonucleotide
aucaguucugc

SEQ ID NO: 110659 - RNA, 13 nt, Artificial Sequence
  Description of Artificial Sequence: Synthetic oligonucleotide
agauuaaaccuac

SEQ ID NO: 110660 - RNA, 13 nt, Artificial Sequence
  Description of Artificial Sequence: Synthetic oligonucleotide
auaaaauccuucu

SEQ ID NO: 110661 - RNA, 12 nt, Artificial Sequence
  Description of Artificial Sequence: Synthetic oligonucleotide
aaugcuguagac

SEQ ID NO: 110662 - RNA, 13 nt, Artificial Sequence
  Description of Artificial Sequence: Synthetic oligonucleotide
uugauaggaauag

SEQ ID NO: 110663 - RNA, 11 nt, Artificial Sequence
  Description of Artificial Sequence: Synthetic oligonucleotide
aauggcccuga

SEQ ID NO: 110664 - RNA, 11 nt, Artificial Sequence
  Description of Artificial Sequence: Synthetic oligonucleotide
uuccucaagca

SEQ ID NO: 110665 - RNA, 10 nt, Artificial Sequence
  Description of Artificial Sequence: Synthetic oligonucleotide
guucagccca

SEQ ID NO: 110666 - RNA, 11 nt, Artificial Sequence
  Description of Artificial Sequence: Synthetic oligonucleotide
gcugcugaacc

SEQ ID NO: 110667 - RNA, 12 nt, Artificial Sequence
  Description of Artificial Sequence: Synthetic oligonucleotide
aaguucucuuca

SEQ ID NO: 110668 - RNA, 11 nt, Artificial Sequence
  Description of Artificial Sequence: Synthetic oligonucleotide
ccagccuagag

SEQ ID NO: 110669 - RNA, 13 nt, Artificial Sequence
  Description of Artificial Sequence: Synthetic oligonucleotide
cucugugaagugu

SEQ ID NO: 110670 - RNA, 14 nt, Artificial Sequence
  Description of Artificial Sequence: Synthetic oligonucleotide
ugagaaaauuucaa

SEQ ID NO: 110671 - RNA, 11 nt, Artificial Sequence
  Description of Artificial Sequence: Synthetic oligonucleotide
aauccuccuga

SEQ ID NO: 110672 - RNA, 12 nt, Artificial Sequence
  Description of Artificial Sequence: Synthetic oligonucleotide
gugacaucauau

SEQ ID NO: 110673 - RNA, 13 nt, Artificial Sequence
  Description of Artificial Sequence: Synthetic oligonucleotide
aaucuucaucaua

SEQ ID NO: 110674 - RNA, 13 nt, Artificial Sequence
  Description of Artificial Sequence: Synthetic oligonucleotide
gacuagcuauuaa

SEQ ID NO: 110675 - RNA, 14 nt, Artificial Sequence
  Description of Artificial Sequence: Synthetic oligonucleotide
ucucuacuaaaaau

SEQ ID NO: 110676 - RNA, 12 nt, Artificial Sequence
  Description of Artificial Sequence: Synthetic oligonucleotide
ucuaucucgccu

SEQ ID NO: 110677 - RNA, 13 nt, Artificial Sequence
  Description of Artificial Sequence: Synthetic oligonucleotide
cuucgguccaguu

SEQ ID NO: 110678 - RNA, 11 nt, Artificial Sequence
  Description of Artificial Sequence: Synthetic oligonucleotide
gauguagccgc

SEQ ID NO: 110679 - RNA, 12 nt, Artificial Sequence
  Description of Artificial Sequence: Synthetic oligonucleotide
ugaggagacuug

SEQ ID NO: 110680 - RNA, 12 nt, Artificial Sequence
  Description of Artificial Sequence: Synthetic oligonucleotide
gaguagugagga

SEQ ID NO: 110681 - RNA, 14 nt, Artificial Sequence
  Description of Artificial Sequence: Synthetic oligonucleotide
cagaugaguacaaa

SEQ ID NO: 110682 - RNA, 13 nt, Artificial Sequence
  Description of Artificial Sequence: Synthetic oligonucleotide
guuguuaaugggc

SEQ ID NO: 110683 - RNA, 13 nt, Artificial Sequence
  Description of Artificial Sequence: Synthetic oligonucleotide
uuuuuaauuuauu

SEQ ID NO: 110684 - RNA, 12 nt, Artificial Sequence
  Description of Artificial Sequence: Synthetic oligonucleotide
uauuuaaauaug

SEQ ID NO: 110685 - RNA, 13 nt, Artificial Sequence
  Description of Artificial Sequence: Synthetic oligonucleotide
uauccuuuguuuc

SEQ ID NO: 110686 - RNA, 14 nt, Artificial Sequence
  Description of Artificial Sequence: Synthetic oligonucleotide
cgucuaaguguuug

SEQ ID NO: 110687 - RNA, 12 nt, Artificial Sequence
  Description of Artificial Sequence: Synthetic oligonucleotide
accugugacaaa

SEQ ID NO: 110688 - RNA, 13 nt, Artificial Sequence
  Description of Artificial Sequence: Synthetic oligonucleotide
ccaggcugaauua

SEQ ID NO: 110689 - RNA, 14 nt, Artificial Sequence
  Description of Artificial Sequence: Synthetic oligonucleotide
gucauucuuacaau

SEQ ID NO: 110690 - RNA, 15 nt, Artificial Sequence
  Description of Artificial Sequence: Synthetic oligonucleotide
ucauucuuacaauug

SEQ ID NO: 110691 - RNA, 12 nt, Artificial Sequence
  Description of Artificial Sequence: Synthetic oligonucleotide
cagagaguguac

SEQ ID NO: 110692 - RNA, 12 nt, Artificial Sequence
  Description of Artificial Sequence: Synthetic oligonucleotide
agaacucagcag

SEQ ID NO: 110693 - RNA, 13 nt, Artificial Sequence
  Description of Artificial Sequence: Synthetic oligonucleotide
uuuauuuucagua

SEQ ID NO: 110694 - RNA, 12 nt, Artificial Sequence
  Description of Artificial Sequence: Synthetic oligonucleotide
ucuuaaauggaa

SEQ ID NO: 110695 - RNA, 13 nt, Artificial Sequence
  Description of Artificial Sequence: Synthetic oligonucleotide
ugccuaaaauugu

SEQ ID NO: 110696 - RNA, 12 nt, Artificial Sequence
  Description of Artificial Sequence: Synthetic oligonucleotide
agacugugagcu

SEQ ID NO: 110697 - RNA, 14 nt, Artificial Sequence
  Description of Artificial Sequence: Synthetic oligonucleotide
ugcuuuuuauuaau

SEQ ID NO: 110698 - RNA, 13 nt, Artificial Sequence
  Description of Artificial Sequence: Synthetic oligonucleotide
cucuucuuacauu

SEQ ID NO: 110699 - RNA, 15 nt, Artificial Sequence
  Description of Artificial Sequence: Synthetic oligonucleotide
cauuuguaaaaaugu

SEQ ID NO: 110700 - RNA, 15 nt, Artificial Sequence
  Description of Artificial Sequence: Synthetic oligonucleotide
aucuuaauucauauu

SEQ ID NO: 110701 - RNA, 13 nt, Artificial Sequence
  Description of Artificial Sequence: Synthetic oligonucleotide
gaacuaaucauga

SEQ ID NO: 110702 - RNA, 12 nt, Artificial Sequence
  Description of Artificial Sequence: Synthetic oligonucleotide
ucugcucuuggg

SEQ ID NO: 110703 - RNA, 13 nt, Artificial Sequence
  Description of Artificial Sequence: Synthetic oligonucleotide
caguagcuuugag

SEQ ID NO: 110704 - RNA, 14 nt, Artificial Sequence
  Description of Artificial Sequence: Synthetic oligonucleotide
cacguaauauuuca

SEQ ID NO: 110705 - RNA, 13 nt, Artificial Sequence
  Description of Artificial Sequence: Synthetic oligonucleotide
uauucucuucacu

SEQ ID NO: 110706 - RNA, 14 nt, Artificial Sequence
  Description of Artificial Sequence: Synthetic oligonucleotide
cuaaugcuaagaaa

SEQ ID NO: 110707 - RNA, 12 nt, Artificial Sequence
  Description of Artificial Sequence: Synthetic oligonucleotide
gcugaaaaucaa

SEQ ID NO: 110708 - RNA, 14 nt, Artificial Sequence
  Description of Artificial Sequence: Synthetic oligonucleotide
aauaugauuacuuu

SEQ ID NO: 110709 - RNA, 14 nt, Artificial Sequence
  Description of Artificial Sequence: Synthetic oligonucleotide
cauuuuguucuaca

SEQ ID NO: 110710 - RNA, 12 nt, Artificial Sequence
  Description of Artificial Sequence: Synthetic oligonucleotide
cccgggacucuc

SEQ ID NO: 110711 - RNA, 14 nt, Artificial Sequence
  Description of Artificial Sequence: Synthetic oligonucleotide
ccuuuaaaguaaag

SEQ ID NO: 110712 - RNA, 13 nt, Artificial Sequence
  Description of Artificial Sequence: Synthetic oligonucleotide
ucuggaagccugg

SEQ ID NO: 110713 - RNA, 14 nt, Artificial Sequence
  Description of Artificial Sequence: Synthetic oligonucleotide
aaaacaaaagagag

SEQ ID NO: 110714 - RNA, 13 nt, Artificial Sequence
  Description of Artificial Sequence: Synthetic oligonucleotide
aucaguuaugccg

SEQ ID NO: 110715 - RNA, 13 nt, Artificial Sequence
  Description of Artificial Sequence: Synthetic oligonucleotide
uaaaagaagucca

SEQ ID NO: 110716 - RNA, 11 nt, Artificial Sequence
  Description of Artificial Sequence: Synthetic oligonucleotide
aggugagguua

SEQ ID NO: 110717 - RNA, 11 nt, Artificial Sequence
  Description of Artificial Sequence: Synthetic oligonucleotide
gggaagaggac

SEQ ID NO: 110718 - RNA, 13 nt, Artificial Sequence
  Description of Artificial Sequence: Synthetic oligonucleotide
aagcaaguauugu

SEQ ID NO: 110719 - RNA, 12 nt, Artificial Sequence
  Description of Artificial Sequence: Synthetic oligonucleotide
auuguagcacuc

SEQ ID NO: 110720 - RNA, 14 nt, Artificial Sequence
  Description of Artificial Sequence: Synthetic oligonucleotide
acaaaaccacaaau

SEQ ID NO: 110721 - RNA, 12 nt, Artificial Sequence
  Description of Artificial Sequence: Synthetic oligonucleotide
uaagcccauaca

SEQ ID NO: 110722 - RNA, 11 nt, Artificial Sequence
  Description of Artificial Sequence: Synthetic oligonucleotide
agcccauacag

SEQ ID NO: 110723 - RNA, 12 nt, Artificial Sequence
  Description of Artificial Sequence: Synthetic oligonucleotide
cagaaaccuucc

SEQ ID NO: 110724 - RNA, 10 nt, Artificial Sequence
  Description of Artificial Sequence: Synthetic oligonucleotide
guauaccuac

SEQ ID NO: 110725 - RNA, 13 nt, Artificial Sequence
  Description of Artificial Sequence: Synthetic oligonucleotide
gccaguuuucgga

SEQ ID NO: 110726 - RNA, 9 nt, Artificial Sequence
  Description of Artificial Sequence: Synthetic oligonucleotide
ggaacaggg

SEQ ID NO: 110727 - RNA, 13 nt, Artificial Sequence
  Description of Artificial Sequence: Synthetic oligonucleotide
uuaacuuuccagu

SEQ ID NO: 110728 - RNA, 14 nt, Artificial Sequence
  Description of Artificial Sequence: Synthetic oligonucleotide
aaaguuugguuuug

SEQ ID NO: 110729 - RNA, 12 nt, Artificial Sequence
  Description of Artificial Sequence: Synthetic oligonucleotide
cuucccacugua

SEQ ID NO: 110730 - RNA, 13 nt, Artificial Sequence
  Description of Artificial Sequence: Synthetic oligonucleotide
ugauaccauauga

SEQ ID NO: 110731 - RNA, 11 nt, Artificial Sequence
  Description of Artificial Sequence: Synthetic oligonucleotide
aacaugggcug

SEQ ID NO: 110732 - RNA, 13 nt, Artificial Sequence
  Description of Artificial Sequence: Synthetic oligonucleotide
caacuuuuucaua

SEQ ID NO: 110733 - RNA, 12 nt, Artificial Sequence
  Description of Artificial Sequence: Synthetic oligonucleotide
caugaggccgga

SEQ ID NO: 110734 - RNA, 11 nt, Artificial Sequence
  Description of Artificial Sequence: Synthetic oligonucleotide
acugcauuugu

SEQ ID NO: 110735 - RNA, 13 nt, Artificial Sequence
  Description of Artificial Sequence: Synthetic oligonucleotide
aauguuuacuacc

SEQ ID NO: 110736 - RNA, 15 nt, Artificial Sequence
  Description of Artificial Sequence: Synthetic oligonucleotide
aauuuuuugaugaaa

SEQ ID NO: 110737 - RNA, 14 nt, Artificial Sequence
  Description of Artificial Sequence: Synthetic oligonucleotide
cagugugugaauuu

SEQ ID NO: 110738 - RNA, 13 nt, Artificial Sequence
  Description of Artificial Sequence: Synthetic oligonucleotide
gagcaauguaugu

SEQ ID NO: 110739 - RNA, 14 nt, Artificial Sequence
  Description of Artificial Sequence: Synthetic oligonucleotide
aaagcacauauaua

SEQ ID NO: 110740 - RNA, 14 nt, Artificial Sequence
  Description of Artificial Sequence: Synthetic oligonucleotide
guaauaguuucucc

SEQ ID NO: 110741 - RNA, 13 nt, Artificial Sequence
  Description of Artificial Sequence: Synthetic oligonucleotide
aguuucuccaaau

SEQ ID NO: 110742 - RNA, 13 nt, Artificial Sequence
  Description of Artificial Sequence: Synthetic oligonucleotide
uacuuccuagaaa

SEQ ID NO: 110743 - RNA, 13 nt, Artificial Sequence
  Description of Artificial Sequence: Synthetic oligonucleotide
uacaccauauaug

SEQ ID NO: 110744 - RNA, 14 nt, Artificial Sequence
  Description of Artificial Sequence: Synthetic oligonucleotide
auauaugaauggag

SEQ ID NO: 110745 - RNA, 13 nt, Artificial Sequence
  Description of Artificial Sequence: Synthetic oligonucleotide
acgagaagaagau

SEQ ID NO: 110746 - RNA, 13 nt, Artificial Sequence
  Description of Artificial Sequence: Synthetic oligonucleotide
ucauuuacaggga

SEQ ID NO: 110747 - RNA, 13 nt, Artificial Sequence
  Description of Artificial Sequence: Synthetic oligonucleotide
cauuuacagggac

SEQ ID NO: 110748 - RNA, 10 nt, Artificial Sequence
  Description of Artificial Sequence: Synthetic oligonucleotide
agggaccuga

SEQ ID NO: 110749 - RNA, 14 nt, Artificial Sequence
  Description of Artificial Sequence: Synthetic oligonucleotide
uguuugacugcauc

SEQ ID NO: 110750 - RNA, 13 nt, Artificial Sequence
  Description of Artificial Sequence: Synthetic oligonucleotide
uuugacugcaucg

SEQ ID NO: 110751 - RNA, 12 nt, Artificial Sequence
  Description of Artificial Sequence: Synthetic oligonucleotide
gaguucacaggg

SEQ ID NO: 110752 - RNA, 13 nt, Artificial Sequence
  Description of Artificial Sequence: Synthetic oligonucleotide
ggcaccucugucc

SEQ ID NO: 110753 - RNA, 15 nt, Artificial Sequence
  Description of Artificial Sequence: Synthetic oligonucleotide
gguuugucuuuuuaa

SEQ ID NO: 110754 - RNA, 14 nt, Artificial Sequence
  Description of Artificial Sequence: Synthetic oligonucleotide
uuugucuuuuuaag

SEQ ID NO: 110755 - RNA, 13 nt, Artificial Sequence
  Description of Artificial Sequence: Synthetic oligonucleotide
ccuaaagguuguc

SEQ ID NO: 110756 - RNA, 12 nt, Artificial Sequence
  Description of Artificial Sequence: Synthetic oligonucleotide
aagguugucgac

SEQ ID NO: 110757 - RNA, 13 nt, Artificial Sequence
  Description of Artificial Sequence: Synthetic oligonucleotide
accuggcaauugu

SEQ ID NO: 110758 - RNA, 12 nt, Artificial Sequence
  Description of Artificial Sequence: Synthetic oligonucleotide
aguggugcgagg

SEQ ID NO: 110759 - RNA, 13 nt, Artificial Sequence
  Description of Artificial Sequence: Synthetic oligonucleotide
agagacaugaaau

SEQ ID NO: 110760 - RNA, 13 nt, Artificial Sequence
  Description of Artificial Sequence: Synthetic oligonucleotide
auauauuucucca

SEQ ID NO: 110761 - RNA, 10 nt, Artificial Sequence
  Description of Artificial Sequence: Synthetic oligonucleotide
caugaaggcu

SEQ ID NO: 110762 - RNA, 11 nt, Artificial Sequence
  Description of Artificial Sequence: Synthetic oligonucleotide
gcuggaguggu

SEQ ID NO: 110763 - RNA, 11 nt, Artificial Sequence
  Description of Artificial Sequence: Synthetic oligonucleotide
aggaagagagg

SEQ ID NO: 110764 - RNA, 12 nt, Artificial Sequence
  Description of Artificial Sequence: Synthetic oligonucleotide
cuugcaucgggc

SEQ ID NO: 110765 - RNA, 13 nt, Artificial Sequence
  Description of Artificial Sequence: Synthetic oligonucleotide
auauccuacugug

SEQ ID NO: 110766 - RNA, 13 nt, Artificial Sequence
  Description of Artificial Sequence: Synthetic oligonucleotide
uccuacuguguaa

SEQ ID NO: 110767 - RNA, 12 nt, Artificial Sequence
  Description of Artificial Sequence: Synthetic oligonucleotide
ccuuguagugua

SEQ ID NO: 110768 - RNA, 13 nt, Artificial Sequence
  Description of Artificial Sequence: Synthetic oligonucleotide
ucuuuguugauug

SEQ ID NO: 110769 - RNA, 14 nt, Artificial Sequence
  Description of Artificial Sequence: Synthetic oligonucleotide
uuuguugauugaaa

SEQ ID NO: 110770 - RNA, 15 nt, Artificial Sequence
  Description of Artificial Sequence: Synthetic oligonucleotide
uucuuuuucuuccau

SEQ ID NO: 110771 - RNA, 13 nt, Artificial Sequence
  Description of Artificial Sequence: Synthetic oligonucleotide
aaucuuccuucua

SEQ ID NO: 110772 - RNA, 13 nt, Artificial Sequence
  Description of Artificial Sequence: Synthetic oligonucleotide
uugaaugcuucau

SEQ ID NO: 110773 - RNA, 13 nt, Artificial Sequence
  Description of Artificial Sequence: Synthetic oligonucleotide
ugaaugcuucaug

SEQ ID NO: 110774 - RNA, 13 nt, Artificial Sequence
  Description of Artificial Sequence: Synthetic oligonucleotide
aauucuacuuuga

SEQ ID NO: 110775 - RNA, 13 nt, Artificial Sequence
  Description of Artificial Sequence: Synthetic oligonucleotide
agcaacuacagac

SEQ ID NO: 110776 - RNA, 13 nt, Artificial Sequence
  Description of Artificial Sequence: Synthetic oligonucleotide
gaccaaggucaac

SEQ ID NO: 110777 - RNA, 13 nt, Artificial Sequence
  Description of Artificial Sequence: Synthetic oligonucleotide
cgacuaucucgac

SEQ ID NO: 110778 - RNA, 13 nt, Artificial Sequence
  Description of Artificial Sequence: Synthetic oligonucleotide
aaccuucccaaac

SEQ ID NO: 110779 - RNA, 14 nt, Artificial Sequence
  Description of Artificial Sequence: Synthetic oligonucleotide
ccaagcuuagaacu

SEQ ID NO: 110780 - RNA, 15 nt, Artificial Sequence
  Description of Artificial Sequence: Synthetic oligonucleotide
agcuuagaacuuuaa

SEQ ID NO: 110781 - RNA, 11 nt, Artificial Sequence
  Description of Artificial Sequence: Synthetic oligonucleotide
aagaccaccac

SEQ ID NO: 110782 - RNA, 14 nt, Artificial Sequence
  Description of Artificial Sequence: Synthetic oligonucleotide
gcgagaaauaaagu

SEQ ID NO: 110783 - RNA, 14 nt, Artificial Sequence
  Description of Artificial Sequence: Synthetic oligonucleotide
cgagaaauaaaguu

SEQ ID NO: 110784 - RNA, 12 nt, Artificial Sequence
  Description of Artificial Sequence: Synthetic oligonucleotide
aggaaaugaucc

SEQ ID NO: 110785 - RNA, 13 nt, Artificial Sequence
  Description of Artificial Sequence: Synthetic oligonucleotide
gaagaaaugaaac

SEQ ID NO: 110786 - RNA, 13 nt, Artificial Sequence
  Description of Artificial Sequence: Synthetic oligonucleotide
guuuccauccucc

SEQ ID NO: 110787 - RNA, 15 nt, Artificial Sequence
  Description of Artificial Sequence: Synthetic oligonucleotide
acugaaaaucuuuga

SEQ ID NO: 110788 - RNA, 11 nt, Artificial Sequence
  Description of Artificial Sequence: Synthetic oligonucleotide
ugccguucagg

SEQ ID NO: 110789 - RNA, 13 nt, Artificial Sequence
  Description of Artificial Sequence: Synthetic oligonucleotide
caggguccagaag

SEQ ID NO: 110790 - RNA, 13 nt, Artificial Sequence
  Description of Artificial Sequence: Synthetic oligonucleotide
ucaagacugcuug

SEQ ID NO: 110791 - RNA, 13 nt, Artificial Sequence
  Description of Artificial Sequence: Synthetic oligonucleotide
uccaugucuuugg

SEQ ID NO: 110792 - RNA, 11 nt, Artificial Sequence
  Description of Artificial Sequence: Synthetic oligonucleotide
gccugaaacac

SEQ ID NO: 110793 - RNA, 12 nt, Artificial Sequence
  Description of Artificial Sequence: Synthetic oligonucleotide
ucucuguaccuc

SEQ ID NO: 110794 - RNA, 12 nt, Artificial Sequence
  Description of Artificial Sequence: Synthetic oligonucleotide
agcaagacaaga

SEQ ID NO: 110795 - RNA, 13 nt, Artificial Sequence
  Description of Artificial Sequence: Synthetic oligonucleotide
gcaagacaagaaa

SEQ ID NO: 110796 - RNA, 12 nt, Artificial Sequence
  Description of Artificial Sequence: Synthetic oligonucleotide
uguacaagaucc

SEQ ID NO: 110797 - RNA, 12 nt, Artificial Sequence
  Description of Artificial Sequence: Synthetic oligonucleotide
cguacuugcaga

SEQ ID NO: 110798 - RNA, 13 nt, Artificial Sequence
  Description of Artificial Sequence: Synthetic oligonucleotide
cgaucgauacaga

SEQ ID NO: 110799 - RNA, 13 nt, Artificial Sequence
  Description of Artificial Sequence: Synthetic oligonucleotide
uauaaaaauaaau

SEQ ID NO: 110800 - RNA, 13 nt, Artificial Sequence
  Description of Artificial Sequence: Synthetic oligonucleotide
uaaaaauaaauau

SEQ ID NO: 110801 - RNA, 13 nt, Artificial Sequence
  Description of Artificial Sequence: Synthetic oligonucleotide
uuugacugcugug

SEQ ID NO: 110802 - RNA, 13 nt, Artificial Sequence
  Description of Artificial Sequence: Synthetic oligonucleotide
ggagaugagagac

SEQ ID NO: 110803 - RNA, 10 nt, Artificial Sequence
  Description of Artificial Sequence: Synthetic oligonucleotide
ucccacuugg

SEQ ID NO: 110804 - RNA, 10 nt, Artificial Sequence
  Description of Artificial Sequence: Synthetic oligonucleotide
guucacggcc

SEQ ID NO: 110805 - RNA, 12 nt, Artificial Sequence
  Description of Artificial Sequence: Synthetic oligonucleotide
accaucacacca

SEQ ID NO: 110806 - RNA, 10 nt, Artificial Sequence
  Description of Artificial Sequence: Synthetic oligonucleotide
cugcggguuu

SEQ ID NO: 110807 - RNA, 9 nt, Artificial Sequence
  Description of Artificial Sequence: Synthetic oligonucleotide
uccaguuug

SEQ ID NO: 110808 - RNA, 12 nt, Artificial Sequence
  Description of Artificial Sequence: Synthetic oligonucleotide
uuaaggacuucu

SEQ ID NO: 110809 - RNA, 12 nt, Artificial Sequence
  Description of Artificial Sequence: Synthetic oligonucleotide
agugggacagag

SEQ ID NO: 110810 - RNA, 13 nt, Artificial Sequence
  Description of Artificial Sequence: Synthetic oligonucleotide
auuuguuauugug

SEQ ID NO: 110811 - RNA, 12 nt, Artificial Sequence
  Description of Artificial Sequence: Synthetic oligonucleotide
ucaaaugcauuu

SEQ ID NO: 110812 - RNA, 9 nt, Artificial Sequence
  Description of Artificial Sequence: Synthetic oligonucleotide
aggaaagcc

SEQ ID NO: 110813 - RNA, 10 nt, Artificial Sequence
  Description of Artificial Sequence: Synthetic oligonucleotide
ggaaagcccu

SEQ ID NO: 110814 - RNA, 11 nt, Artificial Sequence
  Description of Artificial Sequence: Synthetic oligonucleotide
ccagcauggcc

SEQ ID NO: 110815 - RNA, 10 nt, Artificial Sequence
  Description of Artificial Sequence: Synthetic oligonucleotide
uucucccuga

SEQ ID NO: 110816 - RNA, 11 nt, Artificial Sequence
  Description of Artificial Sequence: Synthetic oligonucleotide
aagaagcccuu

SEQ ID NO: 110817 - RNA, 11 nt, Artificial Sequence
  Description of Artificial Sequence: Synthetic oligonucleotide
gaagcccuuca

SEQ ID NO: 110818 - RNA, 10 nt, Artificial Sequence
  Description of Artificial Sequence: Synthetic oligonucleotide
cccuucagcg

SEQ ID NO: 110819 - RNA, 10 nt, Artificial Sequence
  Description of Artificial Sequence: Synthetic oligonucleotide
cuucagcggc

SEQ ID NO: 110820 - RNA, 11 nt, Artificial Sequence
  Description of Artificial Sequence: Synthetic oligonucleotide
cagcggccagu

SEQ ID NO: 110821 - RNA, 11 nt, Artificial Sequence
  Description of Artificial Sequence: Synthetic oligonucleotide
gaaaagcuccg

SEQ ID NO: 110822 - RNA, 10 nt, Artificial Sequence
  Description of Artificial Sequence: Synthetic oligonucleotide
aaagcuccgg

SEQ ID NO: 110823 - RNA, 12 nt, Artificial Sequence
  Description of Artificial Sequence: Synthetic oligonucleotide
gucaacagucug

SEQ ID NO: 110824 - RNA, 12 nt, Artificial Sequence
  Description of Artificial Sequence: Synthetic oligonucleotide
agaguucaaaag

SEQ ID NO: 110825 - RNA, 12 nt, Artificial Sequence
  Description of Artificial Sequence: Synthetic oligonucleotide
gaguucaaaagc

SEQ ID NO: 110826 - RNA, 11 nt, Artificial Sequence
  Description of Artificial Sequence: Synthetic oligonucleotide
ucaaaagcccu

SEQ ID NO: 110827 - RNA, 11 nt, Artificial Sequence
  Description of Artificial Sequence: Synthetic oligonucleotide
caaaagcccuu

SEQ ID NO: 110828 - RNA, 11 nt, Artificial Sequence
  Description of Artificial Sequence: Synthetic oligonucleotide
aaagcccuuca

SEQ ID NO: 110829 - RNA, 11 nt, Artificial Sequence
  Description of Artificial Sequence: Synthetic oligonucleotide
aagcccuucag

SEQ ID NO: 110830 - RNA, 12 nt, Artificial Sequence
  Description of Artificial Sequence: Synthetic oligonucleotide
ugaagccgcucg

SEQ ID NO: 110831 - RNA, 11 nt, Artificial Sequence
  Description of Artificial Sequence: Synthetic oligonucleotide
acgccagucaa

SEQ ID NO: 110832 - RNA, 12 nt, Artificial Sequence
  Description of Artificial Sequence: Synthetic oligonucleotide
ucuuggugcgug

SEQ ID NO: 110833 - RNA, 13 nt, Artificial Sequence
  Description of Artificial Sequence: Synthetic oligonucleotide
uuggauucaucag

SEQ ID NO: 110834 - RNA, 12 nt, Artificial Sequence
  Description of Artificial Sequence: Synthetic oligonucleotide
ggaauaccuaag

SEQ ID NO: 110835 - RNA, 11 nt, Artificial Sequence
  Description of Artificial Sequence: Synthetic oligonucleotide
uuugaggcuca

SEQ ID NO: 110836 - RNA, 10 nt, Artificial Sequence
  Description of Artificial Sequence: Synthetic oligonucleotide
cuacaauugg

SEQ ID NO: 110837 - RNA, 11 nt, Artificial Sequence
  Description of Artificial Sequence: Synthetic oligonucleotide
aguuaggagcc

SEQ ID NO: 110838 - RNA, 12 nt, Artificial Sequence
  Description of Artificial Sequence: Synthetic oligonucleotide
gucaauauccac

SEQ ID NO: 110839 - RNA, 12 nt, Artificial Sequence
  Description of Artificial Sequence: Synthetic oligonucleotide
uguucagucaca

SEQ ID NO: 110840 - RNA, 11 nt, Artificial Sequence
  Description of Artificial Sequence: Synthetic oligonucleotide
cacacacauac

SEQ ID NO: 110841 - RNA, 11 nt, Artificial Sequence
  Description of Artificial Sequence: Synthetic oligonucleotide
uccuuuugcuu

SEQ ID NO: 110842 - RNA, 15 nt, Artificial Sequence
  Description of Artificial Sequence: Synthetic oligonucleotide
uuuaaaguaauuuuu

SEQ ID NO: 110843 - RNA, 12 nt, Artificial Sequence
  Description of Artificial Sequence: Synthetic oligonucleotide
aacagucaaugg

SEQ ID NO: 110844 - RNA, 12 nt, Artificial Sequence
  Description of Artificial Sequence: Synthetic oligonucleotide
cgacaaaccaau

SEQ ID NO: 110845 - RNA, 11 nt, Artificial Sequence
  Description of Artificial Sequence: Synthetic oligonucleotide
cugcuaccacu

SEQ ID NO: 110846 - RNA, 12 nt, Artificial Sequence
  Description of Artificial Sequence: Synthetic oligonucleotide
caagcggucuua

SEQ ID NO: 110847 - RNA, 12 nt, Artificial Sequence
  Description of Artificial Sequence: Synthetic oligonucleotide
gucuuaccggcu

SEQ ID NO: 110848 - RNA, 10 nt, Artificial Sequence
  Description of Artificial Sequence: Synthetic oligonucleotide
auggguuacc

SEQ ID NO: 110849 - RNA, 10 nt, Artificial Sequence
  Description of Artificial Sequence: Synthetic oligonucleotide
uuaccugcga

SEQ ID NO: 110850 - RNA, 11 nt, Artificial Sequence
  Description of Artificial Sequence: Synthetic oligonucleotide
aucuugcugag

SEQ ID NO: 110851 - RNA, 12 nt, Artificial Sequence
  Description of Artificial Sequence: Synthetic oligonucleotide
gcauaaaacagu

SEQ ID NO: 110852 - RNA, 11 nt, Artificial Sequence
  Description of Artificial Sequence: Synthetic oligonucleotide
uccuuuauccu

SEQ ID NO: 110853 - RNA, 11 nt, Artificial Sequence
  Description of Artificial Sequence: Synthetic oligonucleotide
aacgcaaguug

SEQ ID NO: 110854 - RNA, 12 nt, Artificial Sequence
  Description of Artificial Sequence: Synthetic oligonucleotide
aacugaaaccau

SEQ ID NO: 110855 - RNA, 13 nt, Artificial Sequence
  Description of Artificial Sequence: Synthetic oligonucleotide
cuuuguuaaauau

SEQ ID NO: 110856 - RNA, 13 nt, Artificial Sequence
  Description of Artificial Sequence: Synthetic oligonucleotide
uauauuaaaaguu

SEQ ID NO: 110857 - RNA, 12 nt, Artificial Sequence
  Description of Artificial Sequence: Synthetic oligonucleotide
uuuugacuuaac

SEQ ID NO: 110858 - RNA, 12 nt, Artificial Sequence
  Description of Artificial Sequence: Synthetic oligonucleotide
caaacucagcac

SEQ ID NO: 110859 - RNA, 10 nt, Artificial Sequence
  Description of Artificial Sequence: Synthetic oligonucleotide
gcugaccuca

SEQ ID NO: 110860 - RNA, 13 nt, Artificial Sequence
  Description of Artificial Sequence: Synthetic oligonucleotide
uuauucagaucgc

SEQ ID NO: 110861 - RNA, 12 nt, Artificial Sequence
  Description of Artificial Sequence: Synthetic oligonucleotide
ggguucugggau

SEQ ID NO: 110862 - RNA, 14 nt, Artificial Sequence
  Description of Artificial Sequence: Synthetic oligonucleotide
uauuggaaauuaug

SEQ ID NO: 110863 - RNA, 12 nt, Artificial Sequence
  Description of Artificial Sequence: Synthetic oligonucleotide
uggaagcacuag

SEQ ID NO: 110864 - RNA, 12 nt, Artificial Sequence
  Description of Artificial Sequence: Synthetic oligonucleotide
uuuuuaugugga

SEQ ID NO: 110865 - RNA, 11 nt, Artificial Sequence
  Description of Artificial Sequence: Synthetic oligonucleotide
gaauugguaga

SEQ ID NO: 110866 - RNA, 12 nt, Artificial Sequence
  Description of Artificial Sequence: Synthetic oligonucleotide
uagacuuggaga

SEQ ID NO: 110867 - RNA, 12 nt, Artificial Sequence
  Description of Artificial Sequence: Synthetic oligonucleotide
uacaguauucca

SEQ ID NO: 110868 - RNA, 14 nt, Artificial Sequence
  Description of Artificial Sequence: Synthetic oligonucleotide
cacugaugaauuaa

SEQ ID NO: 110869 - RNA, 11 nt, Artificial Sequence
  Description of Artificial Sequence: Synthetic oligonucleotide
cacaucaucac

SEQ ID NO: 110870 - RNA, 12 nt, Artificial Sequence
  Description of Artificial Sequence: Synthetic oligonucleotide
ucaccaaacaga

SEQ ID NO: 110871 - RNA, 11 nt, Artificial Sequence
  Description of Artificial Sequence: Synthetic oligonucleotide
gaacaugaugg

SEQ ID NO: 110872 - RNA, 11 nt, Artificial Sequence
  Description of Artificial Sequence: Synthetic oligonucleotide
auguagacugc

SEQ ID NO: 110873 - RNA, 12 nt, Artificial Sequence
  Description of Artificial Sequence: Synthetic oligonucleotide
gaucuauuuaug

SEQ ID NO: 110874 - RNA, 11 nt, Artificial Sequence
  Description of Artificial Sequence: Synthetic oligonucleotide
cacuauuauca

SEQ ID NO: 110875 - RNA, 10 nt, Artificial Sequence
  Description of Artificial Sequence: Synthetic oligonucleotide
ucaguucugc

SEQ ID NO: 110876 - RNA, 12 nt, Artificial Sequence
  Description of Artificial Sequence: Synthetic oligonucleotide
gauuaaaccuac

SEQ ID NO: 110877 - RNA, 12 nt, Artificial Sequence
  Description of Artificial Sequence: Synthetic oligonucleotide
uaaaauccuucu

SEQ ID NO: 110878 - RNA, 11 nt, Artificial Sequence
  Description of Artificial Sequence: Synthetic oligonucleotide
augcuguagac

SEQ ID NO: 110879 - RNA, 12 nt, Artificial Sequence
  Description of Artificial Sequence: Synthetic oligonucleotide
ugauaggaauag

SEQ ID NO: 110880 - RNA, 10 nt, Artificial Sequence
  Description of Artificial Sequence: Synthetic oligonucleotide
auggcccuga

SEQ ID NO: 110881 - RNA, 10 nt, Artificial Sequence
  Description of Artificial Sequence: Synthetic oligonucleotide
uccucaagca

SEQ ID NO: 110882 - RNA, 9 nt, Artificial Sequence
  Description of Artificial Sequence: Synthetic oligonucleotide
uucagccca

SEQ ID NO: 110883 - RNA, 10 nt, Artificial Sequence
  Description of Artificial Sequence: Synthetic oligonucleotide
cugcugaacc

SEQ ID NO: 110884 - RNA, 11 nt, Artificial Sequence
  Description of Artificial Sequence: Synthetic oligonucleotide
aguucucuuca

SEQ ID NO: 110885 - RNA, 10 nt, Artificial Sequence
  Description of Artificial Sequence: Synthetic oligonucleotide
cagccuagag

SEQ ID NO: 110886 - RNA, 12 nt, Artificial Sequence
  Description of Artificial Sequence: Synthetic oligonucleotide
ucugugaagugu

SEQ ID NO: 110887 - RNA, 13 nt, Artificial Sequence
  Description of Artificial Sequence: Synthetic oligonucleotide
gagaaaauuucaa

SEQ ID NO: 110888 - RNA, 10 nt, Artificial Sequence
  Description of Artificial Sequence: Synthetic oligonucleotide
auccuccuga

SEQ ID NO: 110889 - RNA, 11 nt, Artificial Sequence
  Description of Artificial Sequence: Synthetic oligonucleotide
ugacaucauau

SEQ ID NO: 110890 - RNA, 12 nt, Artificial Sequence
  Description of Artificial Sequence: Synthetic oligonucleotide
aucuucaucaua

SEQ ID NO: 110891 - RNA, 12 nt, Artificial Sequence
  Description of Artificial Sequence: Synthetic oligonucleotide
acuagcuauuaa

SEQ ID NO: 110892 - RNA, 13 nt, Artificial Sequence
  Description of Artificial Sequence: Synthetic oligonucleotide
cucuacuaaaaau

SEQ ID NO: 110893 - RNA, 11 nt, Artificial Sequence
  Description of Artificial Sequence: Synthetic oligonucleotide
cuaucucgccu

SEQ ID NO: 110894 - RNA, 12 nt, Artificial Sequence
  Description of Artificial Sequence: Synthetic oligonucleotide
uucgguccaguu

SEQ ID NO: 110895 - RNA, 10 nt, Artificial Sequence
  Description of Artificial Sequence: Synthetic oligonucleotide
auguagccgc

SEQ ID NO: 110896 - RNA, 11 nt, Artificial Sequence
  Description of Artificial Sequence: Synthetic oligonucleotide
gaggagacuug

SEQ ID NO: 110897 - RNA, 11 nt, Artificial Sequence
  Description of Artificial Sequence: Synthetic oligonucleotide
aguagugagga

SEQ ID NO: 110898 - RNA, 13 nt, Artificial Sequence
  Description of Artificial Sequence: Synthetic oligonucleotide
agaugaguacaaa

SEQ ID NO: 110899 - RNA, 12 nt, Artificial Sequence
  Description of Artificial Sequence: Synthetic oligonucleotide
uuguuaaugggc

SEQ ID NO: 110900 - RNA, 12 nt, Artificial Sequence
  Description of Artificial Sequence: Synthetic oligonucleotide
uuuuaauuuauu

SEQ ID NO: 110901 - RNA, 11 nt, Artificial Sequence
  Description of Artificial Sequence: Synthetic oligonucleotide
auuuaaauaug

SEQ ID NO: 110902 - RNA, 12 nt, Artificial Sequence
  Description of Artificial Sequence: Synthetic oligonucleotide
auccuuuguuuc

SEQ ID NO: 110903 - RNA, 13 nt, Artificial Sequence
  Description of Artificial Sequence: Synthetic oligonucleotide
gucuaaguguuug

SEQ ID NO: 110904 - RNA, 11 nt, Artificial Sequence
  Description of Artificial Sequence: Synthetic oligonucleotide
ccugugacaaa

SEQ ID NO: 110905 - RNA, 12 nt, Artificial Sequence
  Description of Artificial Sequence: Synthetic oligonucleotide
caggcugaauua

SEQ ID NO: 110906 - RNA, 13 nt, Artificial Sequence
  Description of Artificial Sequence: Synthetic oligonucleotide
ucauucuuacaau

SEQ ID NO: 110907 - RNA, 14 nt, Artificial Sequence
  Description of Artificial Sequence: Synthetic oligonucleotide
cauucuuacaauug

SEQ ID NO: 110908 - RNA, 11 nt, Artificial Sequence
  Description of Artificial Sequence: Synthetic oligonucleotide
agagaguguac

SEQ ID NO: 110909 - RNA, 11 nt, Artificial Sequence
  Description of Artificial Sequence: Synthetic oligonucleotide
gaacucagcag

SEQ ID NO: 110910 - RNA, 12 nt, Artificial Sequence
  Description of Artificial Sequence: Synthetic oligonucleotide
uuauuuucagua

SEQ ID NO: 110911 - RNA, 11 nt, Artificial Sequence
  Description of Artificial Sequence: Synthetic oligonucleotide
cuuaaauggaa

SEQ ID NO: 110912 - RNA, 12 nt, Artificial Sequence
  Description of Artificial Sequence: Synthetic oligonucleotide
gccuaaaauugu

SEQ ID NO: 110913 - RNA, 12 nt, Artificial Sequence
  Description of Artificial Sequence: Synthetic oligonucleotide
acuaacaucugg

SEQ ID NO: 110914 - RNA, 11 nt, Artificial Sequence
  Description of Artificial Sequence: Synthetic oligonucleotide
gacugugagcu

SEQ ID NO: 110915 - RNA, 13 nt, Artificial Sequence
  Description of Artificial Sequence: Synthetic oligonucleotide
gcuuuuuauuaau

SEQ ID NO: 110916 - RNA, 12 nt, Artificial Sequence
  Description of Artificial Sequence: Synthetic oligonucleotide
ucuucuuacauu

SEQ ID NO: 110917 - RNA, 14 nt, Artificial Sequence
  Description of Artificial Sequence: Synthetic oligonucleotide
auuuguaaaaaugu

SEQ ID NO: 110918 - RNA, 14 nt, Artificial Sequence
  Description of Artificial Sequence: Synthetic oligonucleotide
ucuuaauucauauu

SEQ ID NO: 110919 - RNA, 12 nt, Artificial Sequence
  Description of Artificial Sequence: Synthetic oligonucleotide
aacuaaucauga

SEQ ID NO: 110920 - RNA, 11 nt, Artificial Sequence
  Description of Artificial Sequence: Synthetic oligonucleotide
cugcucuuggg

SEQ ID NO: 110921 - RNA, 12 nt, Artificial Sequence
  Description of Artificial Sequence: Synthetic oligonucleotide
aguagcuuugag

SEQ ID NO: 110922 - RNA, 13 nt, Artificial Sequence
  Description of Artificial Sequence: Synthetic oligonucleotide
acguaauauuuca

SEQ ID NO: 110923 - RNA, 12 nt, Artificial Sequence
  Description of Artificial Sequence: Synthetic oligonucleotide
auucucuucacu

SEQ ID NO: 110924 - RNA, 13 nt, Artificial Sequence
  Description of Artificial Sequence: Synthetic oligonucleotide
uaaugcuaagaaa

SEQ ID NO: 110925 - RNA, 11 nt, Artificial Sequence
  Description of Artificial Sequence: Synthetic oligonucleotide
cugaaaaucaa

SEQ ID NO: 110926 - RNA, 13 nt, Artificial Sequence
  Description of Artificial Sequence: Synthetic oligonucleotide
auaugauuacuuu

SEQ ID NO: 110927 - RNA, 13 nt, Artificial Sequence
  Description of Artificial Sequence: Synthetic oligonucleotide
auuuuguucuaca

SEQ ID NO: 110928 - RNA, 11 nt, Artificial Sequence
  Description of Artificial Sequence: Synthetic oligonucleotide
ccgggacucuc

SEQ ID NO: 110929 - RNA, 13 nt, Artificial Sequence
  Description of Artificial Sequence: Synthetic oligonucleotide
cuuuaaaguaaag

SEQ ID NO: 110930 - RNA, 12 nt, Artificial Sequence
  Description of Artificial Sequence: Synthetic oligonucleotide
cuggaagccugg

SEQ ID NO: 110931 - RNA, 13 nt, Artificial Sequence
  Description of Artificial Sequence: Synthetic oligonucleotide
aaacaaaagagag

SEQ ID NO: 110932 - RNA, 12 nt, Artificial Sequence
  Description of Artificial Sequence: Synthetic oligonucleotide
ucaguuaugccg

SEQ ID NO: 110933 - RNA, 12 nt, Artificial Sequence
  Description of Artificial Sequence: Synthetic oligonucleotide
aaaagaagucca

SEQ ID NO: 110934 - RNA, 10 nt, Artificial Sequence
  Description of Artificial Sequence: Synthetic oligonucleotide
ggugagguua

SEQ ID NO: 110935 - RNA, 10 nt, Artificial Sequence
  Description of Artificial Sequence: Synthetic oligonucleotide
ggaagaggac

SEQ ID NO: 110936 - RNA, 12 nt, Artificial Sequence
  Description of Artificial Sequence: Synthetic oligonucleotide
agcaaguauugu

SEQ ID NO: 110937 - RNA, 11 nt, Artificial Sequence
  Description of Artificial Sequence: Synthetic oligonucleotide
uuguagcacuc

SEQ ID NO: 110938 - RNA, 13 nt, Artificial Sequence
  Description of Artificial Sequence: Synthetic oligonucleotide
caaaaccacaaau

SEQ ID NO: 110939 - RNA, 11 nt, Artificial Sequence
  Description of Artificial Sequence: Synthetic oligonucleotide
aagcccauaca

SEQ ID NO: 110940 - RNA, 10 nt, Artificial Sequence
  Description of Artificial Sequence: Synthetic oligonucleotide
gcccauacag

SEQ ID NO: 110941 - RNA, 11 nt, Artificial Sequence
  Description of Artificial Sequence: Synthetic oligonucleotide
agaaaccuucc

SEQ ID NO: 110942 - RNA, 9 nt, Artificial Sequence
  Description of Artificial Sequence: Synthetic oligonucleotide
uauaccuac

SEQ ID NO: 110943 - RNA, 12 nt, Artificial Sequence
  Description of Artificial Sequence: Synthetic oligonucleotide
ccaguuuucgga

SEQ ID NO: 110944 - RNA, 8 nt, Artificial Sequence
  Description of Artificial Sequence: Synthetic oligonucleotide
gaacaggg

SEQ ID NO: 110945 - RNA, 12 nt, Artificial Sequence
  Description of Artificial Sequence: Synthetic oligonucleotide
uaacuuuccagu

SEQ ID NO: 110946 - RNA, 13 nt, Artificial Sequence
  Description of Artificial Sequence: Synthetic oligonucleotide
aaguuugguuuug

SEQ ID NO: 110947 - RNA, 11 nt, Artificial Sequence
  Description of Artificial Sequence: Synthetic oligonucleotide
uucccacugua

SEQ ID NO: 110948 - RNA, 12 nt, Artificial Sequence
  Description of Artificial Sequence: Synthetic oligonucleotide
gauaccauauga

SEQ ID NO: 110949 - RNA, 10 nt, Artificial Sequence
  Description of Artificial Sequence: Synthetic oligonucleotide
acaugggcug

SEQ ID NO: 110950 - RNA, 12 nt, Artificial Sequence
  Description of Artificial Sequence: Synthetic oligonucleotide
aacuuuuucaua

SEQ ID NO: 110951 - RNA, 11 nt, Artificial Sequence
  Description of Artificial Sequence: Synthetic oligonucleotide
augaggccgga

SEQ ID NO: 110952 - RNA, 10 nt, Artificial Sequence
  Description of Artificial Sequence: Synthetic oligonucleotide
cugcauuugu

SEQ ID NO: 110953 - RNA, 12 nt, Artificial Sequence
  Description of Artificial Sequence: Synthetic oligonucleotide
auguuuacuacc

SEQ ID NO: 110954 - RNA, 14 nt, Artificial Sequence
  Description of Artificial Sequence: Synthetic oligonucleotide
auuuuuugaugaaa

SEQ ID NO: 110955 - RNA, 13 nt, Artificial Sequence
  Description of Artificial Sequence: Synthetic oligonucleotide
agugugugaauuu

SEQ ID NO: 110956 - RNA, 12 nt, Artificial Sequence
  Description of Artificial Sequence: Synthetic oligonucleotide
agcaauguaugu

SEQ ID NO: 110957 - RNA, 13 nt, Artificial Sequence
  Description of Artificial Sequence: Synthetic oligonucleotide
aagcacauauaua

SEQ ID NO: 110958 - RNA, 13 nt, Artificial Sequence
  Description of Artificial Sequence: Synthetic oligonucleotide
uaauaguuucucc

SEQ ID NO: 110959 - RNA, 12 nt, Artificial Sequence
  Description of Artificial Sequence: Synthetic oligonucleotide
guuucuccaaau

SEQ ID NO: 110960 - RNA, 12 nt, Artificial Sequence
  Description of Artificial Sequence: Synthetic oligonucleotide
acuuccuagaaa

SEQ ID NO: 110961 - RNA, 12 nt, Artificial Sequence
  Description of Artificial Sequence: Synthetic oligonucleotide
acaccauauaug

SEQ ID NO: 110962 - RNA, 13 nt, Artificial Sequence
  Description of Artificial Sequence: Synthetic oligonucleotide
uauaugaauggag

SEQ ID NO: 110963 - RNA, 12 nt, Artificial Sequence
  Description of Artificial Sequence: Synthetic oligonucleotide
cauuuacaggga

SEQ ID NO: 110964 - RNA, 12 nt, Artificial Sequence
  Description of Artificial Sequence: Synthetic oligonucleotide
auuuacagggac

SEQ ID NO: 110965 - RNA, 9 nt, Artificial Sequence
  Description of Artificial Sequence: Synthetic oligonucleotide
gggaccuga

SEQ ID NO: 110966 - RNA, 13 nt, Artificial Sequence
  Description of Artificial Sequence: Synthetic oligonucleotide
guuugacugcauc

SEQ ID NO: 110967 - RNA, 12 nt, Artificial Sequence
  Description of Artificial Sequence: Synthetic oligonucleotide
uugacugcaucg

SEQ ID NO: 110968 - RNA, 11 nt, Artificial Sequence
  Description of Artificial Sequence: Synthetic oligonucleotide
aguucacaggg

SEQ ID NO: 110969 - RNA, 12 nt, Artificial Sequence
  Description of Artificial Sequence: Synthetic oligonucleotide
gcaccucugucc

SEQ ID NO: 110970 - RNA, 14 nt, Artificial Sequence
  Description of Artificial Sequence: Synthetic oligonucleotide
guuugucuuuuuaa

SEQ ID NO: 110971 - RNA, 13 nt, Artificial Sequence
  Description of Artificial Sequence: Synthetic oligonucleotide
uugucuuuuuaag

SEQ ID NO: 110972 - RNA, 12 nt, Artificial Sequence
  Description of Artificial Sequence: Synthetic oligonucleotide
cuaaagguuguc

SEQ ID NO: 110973 - RNA, 11 nt, Artificial Sequence
  Description of Artificial Sequence: Synthetic oligonucleotide
agguugucgac

SEQ ID NO: 110974 - RNA, 12 nt, Artificial Sequence
  Description of Artificial Sequence: Synthetic oligonucleotide
ccuggcaauugu

SEQ ID NO: 110975 - RNA, 11 nt, Artificial Sequence
  Description of Artificial Sequence: Synthetic oligonucleotide
guggugcgagg

SEQ ID NO: 110976 - RNA, 12 nt, Artificial Sequence
  Description of Artificial Sequence: Synthetic oligonucleotide
gagacaugaaau

SEQ ID NO: 110977 - RNA, 12 nt, Artificial Sequence
  Description of Artificial Sequence: Synthetic oligonucleotide
uauauuucucca

SEQ ID NO: 110978 - RNA, 9 nt, Artificial Sequence
  Description of Artificial Sequence: Synthetic oligonucleotide
augaaggcu

SEQ ID NO: 110979 - RNA, 10 nt, Artificial Sequence
  Description of Artificial Sequence: Synthetic oligonucleotide
cuggaguggu

SEQ ID NO: 110980 - RNA, 10 nt, Artificial Sequence
  Description of Artificial Sequence: Synthetic oligonucleotide
ggaagagagg

SEQ ID NO: 110981 - RNA, 11 nt, Artificial Sequence
  Description of Artificial Sequence: Synthetic oligonucleotide
uugcaucgggc

SEQ ID NO: 110982 - RNA, 12 nt, Artificial Sequence
  Description of Artificial Sequence: Synthetic oligonucleotide
uauccuacugug

SEQ ID NO: 110983 - RNA, 12 nt, Artificial Sequence
  Description of Artificial Sequence: Synthetic oligonucleotide
ccuacuguguaa

SEQ ID NO: 110984 - RNA, 11 nt, Artificial Sequence
  Description of Artificial Sequence: Synthetic oligonucleotide
cuuguagugua

SEQ ID NO: 110985 - RNA, 12 nt, Artificial Sequence
  Description of Artificial Sequence: Synthetic oligonucleotide
cuuuguugauug

SEQ ID NO: 110986 - RNA, 13 nt, Artificial Sequence
  Description of Artificial Sequence: Synthetic oligonucleotide
uuguugauugaaa

SEQ ID NO: 110987 - RNA, 14 nt, Artificial Sequence
  Description of Artificial Sequence: Synthetic oligonucleotide
ucuuuuucuuccau

SEQ ID NO: 110988 - RNA, 12 nt, Artificial Sequence
  Description of Artificial Sequence: Synthetic oligonucleotide
aucuuccuucua

SEQ ID NO: 110989 - RNA, 12 nt, Artificial Sequence
  Description of Artificial Sequence: Synthetic oligonucleotide
ugaaugcuucau

SEQ ID NO: 110990 - RNA, 12 nt, Artificial Sequence
  Description of Artificial Sequence: Synthetic oligonucleotide
gaaugcuucaug

SEQ ID NO: 110991 - RNA, 12 nt, Artificial Sequence
  Description of Artificial Sequence: Synthetic oligonucleotide
auucuacuuuga

SEQ ID NO: 110992 - RNA, 12 nt, Artificial Sequence
  Description of Artificial Sequence: Synthetic oligonucleotide
gcaacuacagac

SEQ ID NO: 110993 - RNA, 12 nt, Artificial Sequence
  Description of Artificial Sequence: Synthetic oligonucleotide
accaaggucaac

SEQ ID NO: 110994 - RNA, 12 nt, Artificial Sequence
  Description of Artificial Sequence: Synthetic oligonucleotide
gacuaucucgac

SEQ ID NO: 110995 - RNA, 12 nt, Artificial Sequence
  Description of Artificial Sequence: Synthetic oligonucleotide
accuucccaaac

SEQ ID NO: 110996 - RNA, 13 nt, Artificial Sequence
  Description of Artificial Sequence: Synthetic oligonucleotide
caagcuuagaacu

SEQ ID NO: 110997 - RNA, 14 nt, Artificial Sequence
  Description of Artificial Sequence: Synthetic oligonucleotide
gcuuagaacuuuaa

SEQ ID NO: 110998 - RNA, 13 nt, Artificial Sequence
  Description of Artificial Sequence: Synthetic oligonucleotide
aacuuuaagcaac

SEQ ID NO: 110999 - RNA, 10 nt, Artificial Sequence
  Description of Artificial Sequence: Synthetic oligonucleotide
agaccaccac

SEQ ID NO: 111000 - RNA, 13 nt, Artificial Sequence
  Description of Artificial Sequence: Synthetic oligonucleotide
cgagaaauaaagu

SEQ ID NO: 111001 - RNA, 13 nt, Artificial Sequence
  Description of Artificial Sequence: Synthetic oligonucleotide
gagaaauaaaguu

SEQ ID NO: 111002 - RNA, 11 nt, Artificial Sequence
  Description of Artificial Sequence: Synthetic oligonucleotide
ggaaaugaucc

SEQ ID NO: 111003 - RNA, 12 nt, Artificial Sequence
  Description of Artificial Sequence: Synthetic oligonucleotide
aagaaaugaaac

SEQ ID NO: 111004 - RNA, 12 nt, Artificial Sequence
  Description of Artificial Sequence: Synthetic oligonucleotide
uuuccauccucc

SEQ ID NO: 111005 - RNA, 14 nt, Artificial Sequence
  Description of Artificial Sequence: Synthetic oligonucleotide
cugaaaaucuuuga

SEQ ID NO: 111006 - RNA, 10 nt, Artificial Sequence
  Description of Artificial Sequence: Synthetic oligonucleotide
gccguucagg

SEQ ID NO: 111007 - RNA, 12 nt, Artificial Sequence
  Description of Artificial Sequence: Synthetic oligonucleotide
aggguccagaag

SEQ ID NO: 111008 - RNA, 12 nt, Artificial Sequence
  Description of Artificial Sequence: Synthetic oligonucleotide
caagacugcuug

SEQ ID NO: 111009 - RNA, 12 nt, Artificial Sequence
  Description of Artificial Sequence: Synthetic oligonucleotide
ccaugucuuugg

SEQ ID NO: 111010 - RNA, 10 nt, Artificial Sequence
  Description of Artificial Sequence: Synthetic oligonucleotide
ccugaaacac

SEQ ID NO: 111011 - RNA, 11 nt, Artificial Sequence
  Description of Artificial Sequence: Synthetic oligonucleotide
cucuguaccuc

SEQ ID NO: 111012 - RNA, 11 nt, Artificial Sequence
  Description of Artificial Sequence: Synthetic oligonucleotide
gcaagacaaga

SEQ ID NO: 111013 - RNA, 12 nt, Artificial Sequence
  Description of Artificial Sequence: Synthetic oligonucleotide
caagacaagaaa

SEQ ID NO: 111014 - RNA, 11 nt, Artificial Sequence
  Description of Artificial Sequence: Synthetic oligonucleotide
guacaagaucc

SEQ ID NO: 111015 - RNA, 11 nt, Artificial Sequence
  Description of Artificial Sequence: Synthetic oligonucleotide
guacuugcaga

SEQ ID NO: 111016 - RNA, 12 nt, Artificial Sequence
  Description of Artificial Sequence: Synthetic oligonucleotide
gaucgauacaga

SEQ ID NO: 111017 - RNA, 12 nt, Artificial Sequence
  Description of Artificial Sequence: Synthetic oligonucleotide
auaaaaauaaau

SEQ ID NO: 111018 - RNA, 12 nt, Artificial Sequence
  Description of Artificial Sequence: Synthetic oligonucleotide
aaaaauaaauau

SEQ ID NO: 111019 - RNA, 12 nt, Artificial Sequence
  Description of Artificial Sequence: Synthetic oligonucleotide
uugacugcugug

SEQ ID NO: 111020 - RNA, 12 nt, Artificial Sequence
  Description of Artificial Sequence: Synthetic oligonucleotide
gagaugagagac

SEQ ID NO: 111021 - RNA, 9 nt, Artificial Sequence
  Description of Artificial Sequence: Synthetic oligonucleotide
cccacuugg

SEQ ID NO: 111022 - RNA, 1355 nt, Homo sapiens
ggauggccggagcuggcgcccugguucuggagguaaccgguuacugagggcgagaagcgccacccggaggcucuagccugacaaaugcuugcugaccugggccagagcucuucccuuacgcaagucucagccggucgucgcgacguucgcccgcucgcucugaggcuccugaagccgaaaccagcuagacuuuccuccuucccgccugccuguagcggcguuguugccacuccgccaccauguucgaggcgcgccugguccagggcuccauccucaagaagguguuggaggcacucaaggaccucaucaacgaggccugcugggauauuagcuccagcgguguaaaccugcagagcauggacucgucccacgucucuuuggugcagcucacccugcggucugagggcuucgacaccuaccgcugcgaccgcaaccuggccaugggcgugaaccucaccaguauguccaaaauacuaaaaugcgccggcaaugaagauaucauuacacuaagggccgaagauaacgcggauaccuuggcgcuaguauuugaagcaccaaaccaggagaaaguuucagacuaugaaaugaaguugauggauuuagauguugaacaacuuggaauuccagaacaggaguacagcuguguaguaaagaugccuucuggugaauuugcacguauaugccgagaucucagccauauuggagaugcuguuguaauuuccugugcaaaagacggagugaaauuuucugcaaguggagaacuuggaaauggaaacauuaaauugucacagacaaguaaugucgauaaagaggaggaagcuguuaccauagagaugaaugaaccaguucaacuaacuuuugcacugagguaccugaacuucuuuacaaaagccacuccacucucuucaacggugacacucaguaugucugcagauguaccccuuguuguagaguauaaaauugcggauaugggacacuuaaaauacuacuuggcucccaagaucgaggaugaagaaggaucuuaggcauucuuaaaauucaagaaaauaaaacuaagcucuuugagaacugcuucuaagaugccagcauauacugaagucuuuucugucaccaaauuuguaccucuaaguacauauguagauauuguuuucuguaaauaaccuauuuuuuucucuauucucugcaauuuguuuaaagaauaaaguccaaagucagaucuggucuaguuaaccuagaaguauuuuugucucuuagaaauacuugugauuuuuauaauacaaaagggucuugacucuaaaugcaguuuuaagaauuguuuuugaauuuaaauaaaguuacuugaauuucaaacauca

SEQ ID NO: 111023 - RNA, 1319 nt, Homo sapiens
aacgcggcgcagggugagagcgcgcgcuugcggacgcggcggcauuaaacgguugcaggcguagcagaguggucguugucuuucuaggucucagccggucgucgcgacguucgcccgcucgcucugaggcuccugaagccgaaaccagcuagacuuuccuccuucccgccugccuguagcggcguuguugccacuccgccaccauguucgaggcgcgccugguccagggcuccauccucaagaagguguuggaggcacucaaggaccucaucaacgaggccugcugggauauuagcuccagcgguguaaaccugcagagcauggacucgucccacgucucuuuggugcagcucacccugcggucugagggcuucgacaccuaccgcugcgaccgcaaccuggccaugggcgugaaccucaccaguauguccaaaauacuaaaaugcgccggcaaugaagauaucauuacacuaagggccgaagauaacgcggauaccuuggcgcuaguauuugaagcaccaaaccaggagaaaguuucagacuaugaaaugaaguugauggauuuagauguugaacaacuuggaauuccagaacaggaguacagcuguguaguaaagaugccuucuggugaauuugcacguauaugccgagaucucagccauauuggagaugcuguuguaauuuccugugcaaaagacggagugaaauuuucugcaaguggagaacuuggaaauggaaacauuaaauugucacagacaaguaaugucgauaaagaggaggaagcuguuaccauagagaugaaugaaccaguucaacuaacuuuugcacugagguaccugaacuucuuuacaaaagccacuccacucucuucaacggugacacucaguaugucugcagauguaccccuuguuguagaguauaaaauugcggauaugggacacuuaaaauacuacuuggcucccaagaucgaggaugaagaaggaucuuaggcauucuuaaaauucaagaaaauaaaacuaagcucuuugagaacugcuucuaagaugccagcauauacugaagucuuuucugucaccaaauuuguaccucuaaguacauauguagauauuguuuucuguaaauaaccuauuuuuuucucuauucucugcaauuuguuuaaagaauaaaguccaaagucagaucuggucuaguuaaccuagaaguauuuuugucucuuagaaauacuugugauuuuuauaauacaaaagggucuugacucuaaaugcaguuuuaagaauuguuuuugaauuuaaauaaaguuacuugaauuucaaacauca

SEQ ID NO: 111024 - RNA, 19 nt, Artificial Sequence
  Description of Artificial Sequence: Synthetic oligonucleotide
ggauggccggagcuggcgc

SEQ ID NO: 111025 - RNA, 19 nt, Artificial Sequence
  Description of Artificial Sequence: Synthetic oligonucleotide
cccugguucuggagguaac

SEQ ID NO: 111026 - RNA, 19 nt, Artificial Sequence
  Description of Artificial Sequence: Synthetic oligonucleotide
ccgguuacugagggcgaga

SEQ ID NO: 111027 - RNA, 19 nt, Artificial Sequence
  Description of Artificial Sequence: Synthetic oligonucleotide
aagcgccacccggaggcuc

SEQ ID NO: 111028 - RNA, 19 nt, Artificial Sequence
  Description of Artificial Sequence: Synthetic oligonucleotide
cuagccugacaaaugcuug

SEQ ID NO: 111029 - RNA, 19 nt, Artificial Sequence
  Description of Artificial Sequence: Synthetic oligonucleotide
gcugaccugggccagagcu

SEQ ID NO: 111030 - RNA, 19 nt, Artificial Sequence
  Description of Artificial Sequence: Synthetic oligonucleotide
ucuucccuuacgcaagucu

SEQ ID NO: 111031 - RNA, 19 nt, Artificial Sequence
  Description of Artificial Sequence: Synthetic oligonucleotide
ucagccggucgucgcgacg

SEQ ID NO: 111032 - RNA, 19 nt, Artificial Sequence
  Description of Artificial Sequence: Synthetic oligonucleotide
guucgcccgcucgcucuga

SEQ ID NO: 111033 - RNA, 19 nt, Artificial Sequence
  Description of Artificial Sequence: Synthetic oligonucleotide
aggcuccugaagccgaaac

SEQ ID NO: 111034 - RNA, 19 nt, Artificial Sequence
  Description of Artificial Sequence: Synthetic oligonucleotide
ccagcuagacuuuccuccu

SEQ ID NO: 111035 - RNA, 19 nt, Artificial Sequence
  Description of Artificial Sequence: Synthetic oligonucleotide
uucccgccugccuguagcg

SEQ ID NO: 111036 - RNA, 19 nt, Artificial Sequence
  Description of Artificial Sequence: Synthetic oligonucleotide
ggcguuguugccacuccgc

SEQ ID NO: 111037 - RNA, 19 nt, Artificial Sequence
  Description of Artificial Sequence: Synthetic oligonucleotide
ccaccauguucgaggcgcg

SEQ ID NO: 111038 - RNA, 19 nt, Artificial Sequence
  Description of Artificial Sequence: Synthetic oligonucleotide
gccugguccagggcuccau

SEQ ID NO: 111039 - RNA, 19 nt, Artificial Sequence
  Description of Artificial Sequence: Synthetic oligonucleotide
uccucaagaagguguugga

SEQ ID NO: 111040 - RNA, 19 nt, Artificial Sequence
  Description of Artificial Sequence: Synthetic oligonucleotide
aggcacucaaggaccucau

SEQ ID NO: 111041 - RNA, 19 nt, Artificial Sequence
  Description of Artificial Sequence: Synthetic oligonucleotide
ucaacgaggccugcuggga

SEQ ID NO: 111042 - RNA, 19 nt, Artificial Sequence
  Description of Artificial Sequence: Synthetic oligonucleotide
auauuagcuccagcggugu

SEQ ID NO: 111043 - RNA, 19 nt, Artificial Sequence
  Description of Artificial Sequence: Synthetic oligonucleotide
uaaaccugcagagcaugga

SEQ ID NO: 111044 - RNA, 19 nt, Artificial Sequence
  Description of Artificial Sequence: Synthetic oligonucleotide
acucgucccacgucucuuu

SEQ ID NO: 111045 - RNA, 19 nt, Artificial Sequence
  Description of Artificial Sequence: Synthetic oligonucleotide
uggugcagcucacccugcg

SEQ ID NO: 111046 - RNA, 19 nt, Artificial Sequence
  Description of Artificial Sequence: Synthetic oligonucleotide
ggucugagggcuucgacac

SEQ ID NO: 111047 - RNA, 19 nt, Artificial Sequence
  Description of Artificial Sequence: Synthetic oligonucleotide
ccuaccgcugcgaccgcaa

SEQ ID NO: 111048 - RNA, 19 nt, Artificial Sequence
  Description of Artificial Sequence: Synthetic oligonucleotide
accuggccaugggcgugaa

SEQ ID NO: 111049 - RNA, 19 nt, Artificial Sequence
  Description of Artificial Sequence: Synthetic oligonucleotide
accucaccaguauguccaa

SEQ ID NO: 111050 - RNA, 19 nt, Artificial Sequence
  Description of Artificial Sequence: Synthetic oligonucleotide
aaauacuaaaaugcgccgg

SEQ ID NO: 111051 - RNA, 19 nt, Artificial Sequence
  Description of Artificial Sequence: Synthetic oligonucleotide
gcaaugaagauaucauuac

SEQ ID NO: 111052 - RNA, 19 nt, Artificial Sequence
  Description of Artificial Sequence: Synthetic oligonucleotide
cacuaagggccgaagauaa

SEQ ID NO: 111053 - RNA, 19 nt, Artificial Sequence
  Description of Artificial Sequence: Synthetic oligonucleotide
acgcggauaccuuggcgcu

SEQ ID NO: 111054 - RNA, 19 nt, Artificial Sequence
  Description of Artificial Sequence: Synthetic oligonucleotide
uaguauuugaagcaccaaa

SEQ ID NO: 111055 - RNA, 19 nt, Artificial Sequence
  Description of Artificial Sequence: Synthetic oligonucleotide
accaggagaaaguuucaga

SEQ ID NO: 111056 - RNA, 19 nt, Artificial Sequence
  Description of Artificial Sequence: Synthetic oligonucleotide
acuaugaaaugaaguugau

SEQ ID NO: 111057 - RNA, 19 nt, Artificial Sequence
  Description of Artificial Sequence: Synthetic oligonucleotide
uggauuuagauguugaaca

SEQ ID NO: 111058 - RNA, 19 nt, Artificial Sequence
  Description of Artificial Sequence: Synthetic oligonucleotide
aacuuggaauuccagaaca

SEQ ID NO: 111059 - RNA, 19 nt, Artificial Sequence
  Description of Artificial Sequence: Synthetic oligonucleotide
aggaguacagcuguguagu

SEQ ID NO: 111060 - RNA, 19 nt, Artificial Sequence
  Description of Artificial Sequence: Synthetic oligonucleotide
uaaagaugccuucugguga

SEQ ID NO: 111061 - RNA, 19 nt, Artificial Sequence
  Description of Artificial Sequence: Synthetic oligonucleotide
aauuugcacguauaugccg

SEQ ID NO: 111062 - RNA, 19 nt, Artificial Sequence
  Description of Artificial Sequence: Synthetic oligonucleotide
gagaucucagccauauugg

SEQ ID NO: 111063 - RNA, 19 nt, Artificial Sequence
  Description of Artificial Sequence: Synthetic oligonucleotide
gagaugcuguuguaauuuc

SEQ ID NO: 111064 - RNA, 19 nt, Artificial Sequence
  Description of Artificial Sequence: Synthetic oligonucleotide
ccugugcaaaagacggagu

SEQ ID NO: 111065 - RNA, 19 nt, Artificial Sequence
  Description of Artificial Sequence: Synthetic oligonucleotide
ugaaauuuucugcaagugg

SEQ ID NO: 111066 - RNA, 19 nt, Artificial Sequence
  Description of Artificial Sequence: Synthetic oligonucleotide
gagaacuuggaaauggaaa

SEQ ID NO: 111067 - RNA, 19 nt, Artificial Sequence
  Description of Artificial Sequence: Synthetic oligonucleotide
acauuaaauugucacagac

SEQ ID NO: 111068 - RNA, 19 nt, Artificial Sequence
  Description of Artificial Sequence: Synthetic oligonucleotide
caaguaaugucgauaaaga

SEQ ID NO: 111069 - RNA, 19 nt, Artificial Sequence
  Description of Artificial Sequence: Synthetic oligonucleotide
aggaggaagcuguuaccau

SEQ ID NO: 111070 - RNA, 19 nt, Artificial Sequence
  Description of Artificial Sequence: Synthetic oligonucleotide
uagagaugaaugaaccagu

SEQ ID NO: 111071 - RNA, 19 nt, Artificial Sequence
  Description of Artificial Sequence: Synthetic oligonucleotide
uucaacuaacuuuugcacu

SEQ ID NO: 111072 - RNA, 19 nt, Artificial Sequence
  Description of Artificial Sequence: Synthetic oligonucleotide
ugagguaccugaacuucuu

SEQ ID NO: 111073 - RNA, 19 nt, Artificial Sequence
  Description of Artificial Sequence: Synthetic oligonucleotide
uuacaaaagccacuccacu

SEQ ID NO: 111074 - RNA, 19 nt, Artificial Sequence
  Description of Artificial Sequence: Synthetic oligonucleotide
ucucuucaacggugacacu

SEQ ID NO: 111075 - RNA, 19 nt, Artificial Sequence
  Description of Artificial Sequence: Synthetic oligonucleotide
ucaguaugucugcagaugu

SEQ ID NO: 111076 - RNA, 19 nt, Artificial Sequence
  Description of Artificial Sequence: Synthetic oligonucleotide
uaccccuuguuguagagua

SEQ ID NO: 111077 - RNA, 19 nt, Artificial Sequence
  Description of Artificial Sequence: Synthetic oligonucleotide
auaaaauugcggauauggg

SEQ ID NO: 111078 - RNA, 19 nt, Artificial Sequence
  Description of Artificial Sequence: Synthetic oligonucleotide
gacacuuaaaauacuacuu

SEQ ID NO: 111079 - RNA, 19 nt, Artificial Sequence
  Description of Artificial Sequence: Synthetic oligonucleotide
uggcucccaagaucgagga

SEQ ID NO: 111080 - RNA, 19 nt, Artificial Sequence
  Description of Artificial Sequence: Synthetic oligonucleotide
augaagaaggaucuuaggc

SEQ ID NO: 111081 - RNA, 19 nt, Artificial Sequence
  Description of Artificial Sequence: Synthetic oligonucleotide
cauucuuaaaauucaagaa

SEQ ID NO: 111082 - RNA, 19 nt, Artificial Sequence
  Description of Artificial Sequence: Synthetic oligonucleotide
aaauaaaacuaagcucuuu

SEQ ID NO: 111083 - RNA, 19 nt, Artificial Sequence
  Description of Artificial Sequence: Synthetic oligonucleotide
ugagaacugcuucuaagau

SEQ ID NO: 111084 - RNA, 19 nt, Artificial Sequence
  Description of Artificial Sequence: Synthetic oligonucleotide
ugccagcauauacugaagu

SEQ ID NO: 111085 - RNA, 19 nt, Artificial Sequence
  Description of Artificial Sequence: Synthetic oligonucleotide
ucuuuucugucaccaaauu

SEQ ID NO: 111086 - RNA, 19 nt, Artificial Sequence
  Description of Artificial Sequence: Synthetic oligonucleotide
uuguaccucuaaguacaua

SEQ ID NO: 111087 - RNA, 19 nt, Artificial Sequence
  Description of Artificial Sequence: Synthetic oligonucleotide
auguagauauuguuuucug

SEQ ID NO: 111088 - RNA, 19 nt, Artificial Sequence
  Description of Artificial Sequence: Synthetic oligonucleotide
guaaauaaccuauuuuuuu

SEQ ID NO: 111089 - RNA, 19 nt, Artificial Sequence
  Description of Artificial Sequence: Synthetic oligonucleotide
ucucuauucucugcaauuu

SEQ ID NO: 111090 - RNA, 19 nt, Artificial Sequence
  Description of Artificial Sequence: Synthetic oligonucleotide
uguuuaaagaauaaagucc

SEQ ID NO: 111091 - RNA, 19 nt, Artificial Sequence
  Description of Artificial Sequence: Synthetic oligonucleotide
caaagucagaucuggucua

SEQ ID NO: 111092 - RNA, 19 nt, Artificial Sequence
  Description of Artificial Sequence: Synthetic oligonucleotide
aguuaaccuagaaguauuu

SEQ ID NO: 111093 - RNA, 19 nt, Artificial Sequence
  Description of Artificial Sequence: Synthetic oligonucleotide
uuugucucuuagaaauacu

SEQ ID NO: 111094 - RNA, 19 nt, Artificial Sequence
  Description of Artificial Sequence: Synthetic oligonucleotide
uugugauuuuuauaauaca

SEQ ID NO: 111095 - RNA, 19 nt, Artificial Sequence
  Description of Artificial Sequence: Synthetic oligonucleotide
aaaagggucuugacucuaa

SEQ ID NO: 111096 - RNA, 19 nt, Artificial Sequence
  Description of Artificial Sequence: Synthetic oligonucleotide
aaugcaguuuuaagaauug

SEQ ID NO: 111097 - RNA, 19 nt, Artificial Sequence
  Description of Artificial Sequence: Synthetic oligonucleotide
guuuuugaauuuaaauaaa

SEQ ID NO: 111098 - RNA, 19 nt, Artificial Sequence
  Description of Artificial Sequence: Synthetic oligonucleotide
aguuacuugaauuucaaac

SEQ ID NO: 111099 - RNA, 19 nt, Artificial Sequence
  Description of Artificial Sequence: Synthetic oligonucleotide
acuugaauuucaaacauca

SEQ ID NO: 111100 - RNA, 19 nt, Artificial Sequence
  Description of Artificial Sequence: Synthetic oligonucleotide
aacgcggcgcagggugaga

SEQ ID NO: 111101 - RNA, 19 nt, Artificial Sequence
  Description of Artificial Sequence: Synthetic oligonucleotide
agcgcgcgcuugcggacgc

SEQ ID NO: 111102 - RNA, 19 nt, Artificial Sequence
  Description of Artificial Sequence: Synthetic oligonucleotide
cggcggcauuaaacgguug

SEQ ID NO: 111103 - RNA, 19 nt, Artificial Sequence
  Description of Artificial Sequence: Synthetic oligonucleotide
gcaggcguagcagaguggu

SEQ ID NO: 111104 - RNA, 19 nt, Artificial Sequence
  Description of Artificial Sequence: Synthetic oligonucleotide
ucguugucuuucuaggucu

SEQ ID NO: 111105 - RNA, 25 nt, Artificial Sequence
  Description of Artificial Sequence: Synthetic oligonucleotide
ggauggccggagcuggcgcccuggu

SEQ ID NO: 111106 - RNA, 25 nt, Artificial Sequence
  Description of Artificial Sequence: Synthetic oligonucleotide
uucuggagguaaccgguuacugagg

SEQ ID NO: 111107 - RNA, 25 nt, Artificial Sequence
  Description of Artificial Sequence: Synthetic oligonucleotide
ggcgagaagcgccacccggaggcuc

SEQ ID NO: 111108 - RNA, 25 nt, Artificial Sequence
  Description of Artificial Sequence: Synthetic oligonucleotide
cuagccugacaaaugcuugcugacc

SEQ ID NO: 111109 - RNA, 25 nt, Artificial Sequence
  Description of Artificial Sequence: Synthetic oligonucleotide
cugggccagagcucuucccuuacgc

SEQ ID NO: 111110 - RNA, 25 nt, Artificial Sequence
  Description of Artificial Sequence: Synthetic oligonucleotide
caagucucagccggucgucgcgacg

SEQ ID NO: 111111 - RNA, 25 nt, Artificial Sequence
  Description of Artificial Sequence: Synthetic oligonucleotide
guucgcccgcucgcucugaggcucc

SEQ ID NO: 111112 - RNA, 25 nt, Artificial Sequence
  Description of Artificial Sequence: Synthetic oligonucleotide
cugaagccgaaaccagcuagacuuu

SEQ ID NO: 111113 - RNA, 25 nt, Artificial Sequence
  Description of Artificial Sequence: Synthetic oligonucleotide
uccuccuucccgccugccuguagcg

SEQ ID NO: 111114 - RNA, 25 nt, Artificial Sequence
  Description of Artificial Sequence: Synthetic oligonucleotide
ggcguuguugccacuccgccaccau

SEQ ID NO: 111115 - RNA, 25 nt, Artificial Sequence
  Description of Artificial Sequence: Synthetic oligonucleotide
uguucgaggcgcgccugguccaggg

SEQ ID NO: 111116 - RNA, 25 nt, Artificial Sequence
  Description of Artificial Sequence: Synthetic oligonucleotide
gcuccauccucaagaagguguugga

SEQ ID NO: 111117 - RNA, 25 nt, Artificial Sequence
  Description of Artificial Sequence: Synthetic oligonucleotide
aggcacucaaggaccucaucaacga

SEQ ID NO: 111118 - RNA, 25 nt, Artificial Sequence
  Description of Artificial Sequence: Synthetic oligonucleotide
aggccugcugggauauuagcuccag

SEQ ID NO: 111119 - RNA, 25 nt, Artificial Sequence
  Description of Artificial Sequence: Synthetic oligonucleotide
gcgguguaaaccugcagagcaugga

SEQ ID NO: 111120 - RNA, 25 nt, Artificial Sequence
  Description of Artificial Sequence: Synthetic oligonucleotide
acucgucccacgucucuuuggugca

SEQ ID NO: 111121 - RNA, 25 nt, Artificial Sequence
  Description of Artificial Sequence: Synthetic oligonucleotide
agcucacccugcggucugagggcuu

SEQ ID NO: 111122 - RNA, 25 nt, Artificial Sequence
  Description of Artificial Sequence: Synthetic oligonucleotide
ucgacaccuaccgcugcgaccgcaa

SEQ ID NO: 111123 - RNA, 25 nt, Artificial Sequence
  Description of Artificial Sequence: Synthetic oligonucleotide
accuggccaugggcgugaaccucac

SEQ ID NO: 111124 - RNA, 25 nt, Artificial Sequence
  Description of Artificial Sequence: Synthetic oligonucleotide
ccaguauguccaaaauacuaaaaug

SEQ ID NO: 111125 - RNA, 25 nt, Artificial Sequence
  Description of Artificial Sequence: Synthetic oligonucleotide
gcgccggcaaugaagauaucauuac

SEQ ID NO: 111126 - RNA, 25 nt, Artificial Sequence
  Description of Artificial Sequence: Synthetic oligonucleotide
cacuaagggccgaagauaacgcgga

SEQ ID NO: 111127 - RNA, 25 nt, Artificial Sequence
  Description of Artificial Sequence: Synthetic oligonucleotide
auaccuuggcgcuaguauuugaagc

SEQ ID NO: 111128 - RNA, 25 nt, Artificial Sequence
  Description of Artificial Sequence: Synthetic oligonucleotide
caccaaaccaggagaaaguuucaga

SEQ ID NO: 111129 - RNA, 25 nt, Artificial Sequence
  Description of Artificial Sequence: Synthetic oligonucleotide
acuaugaaaugaaguugauggauuu

SEQ ID NO: 111130 - RNA, 25 nt, Artificial Sequence
  Description of Artificial Sequence: Synthetic oligonucleotide
uagauguugaacaacuuggaauucc

SEQ ID NO: 111131 - RNA, 25 nt, Artificial Sequence
  Description of Artificial Sequence: Synthetic oligonucleotide
cagaacaggaguacagcuguguagu

SEQ ID NO: 111132 - RNA, 25 nt, Artificial Sequence
  Description of Artificial Sequence: Synthetic oligonucleotide
uaaagaugccuucuggugaauuugc

SEQ ID NO: 111133 - RNA, 25 nt, Artificial Sequence
  Description of Artificial Sequence: Synthetic oligonucleotide
cacguauaugccgagaucucagcca

SEQ ID NO: 111134 - RNA, 25 nt, Artificial Sequence
  Description of Artificial Sequence: Synthetic oligonucleotide
auauuggagaugcuguuguaauuuc

SEQ ID NO: 111135 - RNA, 25 nt, Artificial Sequence
  Description of Artificial Sequence: Synthetic oligonucleotide
ccugugcaaaagacggagugaaauu

SEQ ID NO: 111136 - RNA, 25 nt, Artificial Sequence
  Description of Artificial Sequence: Synthetic oligonucleotide
uuucugcaaguggagaacuuggaaa

SEQ ID NO: 111137 - RNA, 25 nt, Artificial Sequence
  Description of Artificial Sequence: Synthetic oligonucleotide
auggaaacauuaaauugucacagac

SEQ ID NO: 111138 - RNA, 25 nt, Artificial Sequence
  Description of Artificial Sequence: Synthetic oligonucleotide
caaguaaugucgauaaagaggagga

SEQ ID NO: 111139 - RNA, 25 nt, Artificial Sequence
  Description of Artificial Sequence: Synthetic oligonucleotide
aagcuguuaccauagagaugaauga

SEQ ID NO: 111140 - RNA, 25 nt, Artificial Sequence
  Description of Artificial Sequence: Synthetic oligonucleotide
aaccaguucaacuaacuuuugcacu

SEQ ID NO: 111141 - RNA, 25 nt, Artificial Sequence
  Description of Artificial Sequence: Synthetic oligonucleotide
ugagguaccugaacuucuuuacaaa

SEQ ID NO: 111142 - RNA, 25 nt, Artificial Sequence
  Description of Artificial Sequence: Synthetic oligonucleotide
aagccacuccacucucuucaacggu

SEQ ID NO: 111143 - RNA, 25 nt, Artificial Sequence
  Description of Artificial Sequence: Synthetic oligonucleotide
ugacacucaguaugucugcagaugu

SEQ ID NO: 111144 - RNA, 25 nt, Artificial Sequence
  Description of Artificial Sequence: Synthetic oligonucleotide
uaccccuuguuguagaguauaaaau

SEQ ID NO: 111145 - RNA, 25 nt, Artificial Sequence
  Description of Artificial Sequence: Synthetic oligonucleotide
uugcggauaugggacacuuaaaaua

SEQ ID NO: 111146 - RNA, 25 nt, Artificial Sequence
  Description of Artificial Sequence: Synthetic oligonucleotide
acuacuuggcucccaagaucgagga

SEQ ID NO: 111147 - RNA, 25 nt, Artificial Sequence
  Description of Artificial Sequence: Synthetic oligonucleotide
augaagaaggaucuuaggcauucuu

SEQ ID NO: 111148 - RNA, 25 nt, Artificial Sequence
  Description of Artificial Sequence: Synthetic oligonucleotide
uaaaauucaagaaaauaaaacuaag

SEQ ID NO: 111149 - RNA, 25 nt, Artificial Sequence
  Description of Artificial Sequence: Synthetic oligonucleotide
gcucuuugagaacugcuucuaagau

SEQ ID NO: 111150 - RNA, 25 nt, Artificial Sequence
  Description of Artificial Sequence: Synthetic oligonucleotide
ugccagcauauacugaagucuuuuc

SEQ ID NO: 111151 - RNA, 25 nt, Artificial Sequence
  Description of Artificial Sequence: Synthetic oligonucleotide
cugucaccaaauuuguaccucuaag

SEQ ID NO: 111152 - RNA, 25 nt, Artificial Sequence
  Description of Artificial Sequence: Synthetic oligonucleotide
guacauauguagauauuguuuucug

SEQ ID NO: 111153 - RNA, 25 nt, Artificial Sequence
  Description of Artificial Sequence: Synthetic oligonucleotide
guaaauaaccuauuuuuuucucuau

SEQ ID NO: 111154 - RNA, 25 nt, Artificial Sequence
  Description of Artificial Sequence: Synthetic oligonucleotide
uucucugcaauuuguuuaaagaaua

SEQ ID NO: 111155 - RNA, 25 nt, Artificial Sequence
  Description of Artificial Sequence: Synthetic oligonucleotide
aaaguccaaagucagaucuggucua

SEQ ID NO: 111156 - RNA, 25 nt, Artificial Sequence
  Description of Artificial Sequence: Synthetic oligonucleotide
aguuaaccuagaaguauuuuugucu

SEQ ID NO: 111157 - RNA, 25 nt, Artificial Sequence
  Description of Artificial Sequence: Synthetic oligonucleotide
ucuuagaaauacuugugauuuuuau

SEQ ID NO: 111158 - RNA, 25 nt, Artificial Sequence
  Description of Artificial Sequence: Synthetic oligonucleotide
uaauacaaaagggucuugacucuaa

SEQ ID NO: 111159 - RNA, 25 nt, Artificial Sequence
  Description of Artificial Sequence: Synthetic oligonucleotide
aaugcaguuuuaagaauuguuuuug

SEQ ID NO: 111160 - RNA, 25 nt, Artificial Sequence
  Description of Artificial Sequence: Synthetic oligonucleotide
gaauuuaaauaaaguuacuugaauu

SEQ ID NO: 111161 - RNA, 25 nt, Artificial Sequence
  Description of Artificial Sequence: Synthetic oligonucleotide
aaaguuacuugaauuucaaacauca

SEQ ID NO: 111162 - RNA, 25 nt, Artificial Sequence
  Description of Artificial Sequence: Synthetic oligonucleotide
aacgcggcgcagggugagagcgcgc

SEQ ID NO: 111163 - RNA, 25 nt, Artificial Sequence
  Description of Artificial Sequence: Synthetic oligonucleotide
cgcuugcggacgcggcggcauuaaa

SEQ ID NO: 111164 - RNA, 25 nt, Artificial Sequence
  Description of Artificial Sequence: Synthetic oligonucleotide
acgguugcaggcguagcagaguggu

SEQ ID NO: 111165 - RNA, 25 nt, Artificial Sequence
  Description of Artificial Sequence: Synthetic oligonucleotide
ucguugucuuucuaggucucagccg

SEQ ID NO: 111166 - RNA, 25 nt, Artificial Sequence
  Description of Artificial Sequence: Synthetic oligonucleotide
ggucgucgcgacguucgcccgcucg

SEQ ID NO: 111167 - RNA, 25 nt, Artificial Sequence
  Description of Artificial Sequence: Synthetic oligonucleotide
gcucugaggcuccugaagccgaaac

SEQ ID NO: 111168 - RNA, 25 nt, Artificial Sequence
  Description of Artificial Sequence: Synthetic oligonucleotide
ccagcuagacuuuccuccuucccgc

SEQ ID NO: 111169 - RNA, 25 nt, Artificial Sequence
  Description of Artificial Sequence: Synthetic oligonucleotide
ccugccuguagcggcguuguugcca

SEQ ID NO: 111170 - RNA, 25 nt, Artificial Sequence
  Description of Artificial Sequence: Synthetic oligonucleotide
acuccgccaccauguucgaggcgcg

SEQ ID NO: 111171 - RNA, 25 nt, Artificial Sequence
  Description of Artificial Sequence: Synthetic oligonucleotide
gccugguccagggcuccauccucaa

SEQ ID NO: 111172 - RNA, 25 nt, Artificial Sequence
  Description of Artificial Sequence: Synthetic oligonucleotide
agaagguguuggaggcacucaagga

SEQ ID NO: 111173 - RNA, 25 nt, Artificial Sequence
  Description of Artificial Sequence: Synthetic oligonucleotide
accucaucaacgaggccugcuggga

SEQ ID NO: 111174 - RNA, 25 nt, Artificial Sequence
  Description of Artificial Sequence: Synthetic oligonucleotide
auauuagcuccagcgguguaaaccu

SEQ ID NO: 111175 - RNA, 25 nt, Artificial Sequence
  Description of Artificial Sequence: Synthetic oligonucleotide
ugcagagcauggacucgucccacgu

SEQ ID NO: 111176 - RNA, 25 nt, Artificial Sequence
  Description of Artificial Sequence: Synthetic oligonucleotide
ucucuuuggugcagcucacccugcg

SEQ ID NO: 111177 - RNA, 25 nt, Artificial Sequence
  Description of Artificial Sequence: Synthetic oligonucleotide
ggucugagggcuucgacaccuaccg

SEQ ID NO: 111178 - RNA, 25 nt, Artificial Sequence
  Description of Artificial Sequence: Synthetic oligonucleotide
gcugcgaccgcaaccuggccauggg

SEQ ID NO: 111179 - RNA, 25 nt, Artificial Sequence
  Description of Artificial Sequence: Synthetic oligonucleotide
gcgugaaccucaccaguauguccaa

SEQ ID NO: 111180 - RNA, 25 nt, Artificial Sequence
  Description of Artificial Sequence: Synthetic oligonucleotide
aaauacuaaaaugcgccggcaauga

SEQ ID NO: 111181 - RNA, 25 nt, Artificial Sequence
  Description of Artificial Sequence: Synthetic oligonucleotide
aagauaucauuacacuaagggccga

SEQ ID NO: 111182 - RNA, 25 nt, Artificial Sequence
  Description of Artificial Sequence: Synthetic oligonucleotide
aagauaacgcggauaccuuggcgcu

SEQ ID NO: 111183 - RNA, 25 nt, Artificial Sequence
  Description of Artificial Sequence: Synthetic oligonucleotide
uaguauuugaagcaccaaaccagga

SEQ ID NO: 111184 - RNA, 25 nt, Artificial Sequence
  Description of Artificial Sequence: Synthetic oligonucleotide
agaaaguuucagacuaugaaaugaa

SEQ ID NO: 111185 - RNA, 25 nt, Artificial Sequence
  Description of Artificial Sequence: Synthetic oligonucleotide
aguugauggauuuagauguugaaca

SEQ ID NO: 111186 - RNA, 25 nt, Artificial Sequence
  Description of Artificial Sequence: Synthetic oligonucleotide
aacuuggaauuccagaacaggagua

SEQ ID NO: 111187 - RNA, 25 nt, Artificial Sequence
  Description of Artificial Sequence: Synthetic oligonucleotide
acagcuguguaguaaagaugccuuc

SEQ ID NO: 111188 - RNA, 25 nt, Artificial Sequence
  Description of Artificial Sequence: Synthetic oligonucleotide
cuggugaauuugcacguauaugccg

SEQ ID NO: 111189 - RNA, 25 nt, Artificial Sequence
  Description of Artificial Sequence: Synthetic oligonucleotide
gagaucucagccauauuggagaugc

SEQ ID NO: 111190 - RNA, 25 nt, Artificial Sequence
  Description of Artificial Sequence: Synthetic oligonucleotide
cuguuguaauuuccugugcaaaaga

SEQ ID NO: 111191 - RNA, 25 nt, Artificial Sequence
  Description of Artificial Sequence: Synthetic oligonucleotide
acggagugaaauuuucugcaagugg

SEQ ID NO: 111192 - RNA, 25 nt, Artificial Sequence
  Description of Artificial Sequence: Synthetic oligonucleotide
gagaacuuggaaauggaaacauuaa

SEQ ID NO: 111193 - RNA, 25 nt, Artificial Sequence
  Description of Artificial Sequence: Synthetic oligonucleotide
aauugucacagacaaguaaugucga

SEQ ID NO: 111194 - RNA, 25 nt, Artificial Sequence
  Description of Artificial Sequence: Synthetic oligonucleotide
auaaagaggaggaagcuguuaccau

SEQ ID NO: 111195 - RNA, 25 nt, Artificial Sequence
  Description of Artificial Sequence: Synthetic oligonucleotide
uagagaugaaugaaccaguucaacu

SEQ ID NO: 111196 - RNA, 25 nt, Artificial Sequence
  Description of Artificial Sequence: Synthetic oligonucleotide
uaacuuuugcacugagguaccugaa

SEQ ID NO: 111197 - RNA, 25 nt, Artificial Sequence
  Description of Artificial Sequence: Synthetic oligonucleotide
acuucuuuacaaaagccacuccacu

SEQ ID NO: 111198 - RNA, 25 nt, Artificial Sequence
  Description of Artificial Sequence: Synthetic oligonucleotide
ucucuucaacggugacacucaguau

SEQ ID NO: 111199 - RNA, 25 nt, Artificial Sequence
  Description of Artificial Sequence: Synthetic oligonucleotide
ugucugcagauguaccccuuguugu

SEQ ID NO: 111200 - RNA, 25 nt, Artificial Sequence
  Description of Artificial Sequence: Synthetic oligonucleotide
uagaguauaaaauugcggauauggg

SEQ ID NO: 111201 - RNA, 25 nt, Artificial Sequence
  Description of Artificial Sequence: Synthetic oligonucleotide
gacacuuaaaauacuacuuggcucc

SEQ ID NO: 111202 - RNA, 25 nt, Artificial Sequence
  Description of Artificial Sequence: Synthetic oligonucleotide
ccaagaucgaggaugaagaaggauc

SEQ ID NO: 111203 - RNA, 25 nt, Artificial Sequence
  Description of Artificial Sequence: Synthetic oligonucleotide
cuuaggcauucuuaaaauucaagaa

SEQ ID NO: 111204 - RNA, 25 nt, Artificial Sequence
  Description of Artificial Sequence: Synthetic oligonucleotide
aaauaaaacuaagcucuuugagaac

SEQ ID NO: 111205 - RNA, 25 nt, Artificial Sequence
  Description of Artificial Sequence: Synthetic oligonucleotide
cugcuucuaagaugccagcauauac

SEQ ID NO: 111206 - RNA, 25 nt, Artificial Sequence
  Description of Artificial Sequence: Synthetic oligonucleotide
cugaagucuuuucugucaccaaauu

SEQ ID NO: 111207 - RNA, 25 nt, Artificial Sequence
  Description of Artificial Sequence: Synthetic oligonucleotide
uuguaccucuaaguacauauguaga

SEQ ID NO: 111208 - RNA, 25 nt, Artificial Sequence
  Description of Artificial Sequence: Synthetic oligonucleotide
auauuguuuucuguaaauaaccuau

SEQ ID NO: 111209 - RNA, 25 nt, Artificial Sequence
  Description of Artificial Sequence: Synthetic oligonucleotide
uuuuuuucucuauucucugcaauuu

SEQ ID NO: 111210 - RNA, 25 nt, Artificial Sequence
  Description of Artificial Sequence: Synthetic oligonucleotide
uguuuaaagaauaaaguccaaaguc

SEQ ID NO: 111211 - RNA, 25 nt, Artificial Sequence
  Description of Artificial Sequence: Synthetic oligonucleotide
cagaucuggucuaguuaaccuagaa

SEQ ID NO: 111212 - RNA, 25 nt, Artificial Sequence
  Description of Artificial Sequence: Synthetic oligonucleotide
aguauuuuugucucuuagaaauacu

SEQ ID NO: 111213 - RNA, 25 nt, Artificial Sequence
  Description of Artificial Sequence: Synthetic oligonucleotide
uugugauuuuuauaauacaaaaggg

SEQ ID NO: 111214 - RNA, 25 nt, Artificial Sequence
  Description of Artificial Sequence: Synthetic oligonucleotide
gucuugacucuaaaugcaguuuuaa

SEQ ID NO: 111215 - RNA, 25 nt, Artificial Sequence
  Description of Artificial Sequence: Synthetic oligonucleotide
agaauuguuuuugaauuuaaauaaa

SEQ ID NO: 111216 - DNA, 21 bp, Artificial Sequence
  Description of Artificial Sequence: Synthetic oligonucleotide
  Description of Combined DNA/RNA Molecule: Synthetic oligonucleotide
cuacacaaaucagcgauuutt

SEQ ID NO: 111217 - DNA, 21 bp, Artificial Sequence
  Description of Artificial Sequence: Synthetic oligonucleotide
  Description of Combined DNA/RNA Molecule: Synthetic oligonucleotide
aaaucgcugauuuguguagtt

SEQ ID NO: 111218 - DNA, 25 bp, Artificial Sequence
  Description of Artificial Sequence: Synthetic oligonucleotide
  Description of Combined DNA/RNA Molecule: Synthetic oligonucleotide
cuacacaaaucagcgauuuccaugt

SEQ ID NO: 111219 - RNA, 27 nt, Artificial Sequence
  Description of Artificial Sequence: Synthetic oligonucleotide
acauggaaaucgcugauuuguguaguc

SEQ ID NO: 111220 - RNA, 13 nt, Artificial Sequence
  Description of Artificial Sequence: Synthetic oligonucleotide
cuacacaaaucag

SEQ ID NO: 111221 - DNA, 11 bp, Artificial Sequence
  Description of Artificial Sequence: Synthetic oligonucleotide
  Description of Combined DNA/RNA Molecule: Synthetic oligonucleotide
gauuuccaugt

SEQ ID NO: 111222 - DNA, 21 bp, Artificial Sequence
  Description of Artificial Sequence: Synthetic oligonucleotide
  Description of Combined DNA/RNA Molecule: Synthetic oligonucleotide
ggaucuuauuucuucggagtt

SEQ ID NO: 111223 - DNA, 21 bp, Artificial Sequence
  Description of Artificial Sequence: Synthetic oligonucleotide
  Description of Combined DNA/RNA Molecule: Synthetic oligonucleotide
cuccgaagaaauaagaucctt

SEQ ID NO: 111224 - RNA, 11 nt, Artificial Sequence
  Description of Artificial Sequence: Synthetic oligonucleotide
ggaucuuauuu

SEQ ID NO: 111225 - DNA, 10 bp, Artificial Sequence
  Description of Artificial Sequence: Synthetic oligonucleotide
  Description of Combined DNA/RNA Molecule: Synthetic oligonucleotide
cuucggagtt

SEQ ID NO: 111226 - RNA, 27 nt, Artificial Sequence
  Description of Artificial Sequence: Synthetic oligonucleotide
cauugucuccgaagaaauaagauccuu

SEQ ID NO: 111227 - RNA, 8 nt, Artificial Sequence
  Description of Artificial Sequence: Synthetic oligonucleotide
  modified_base (2): LNA-G
ggaucuua

SEQ ID NO: 111228 - DNA, 17 bp, Artificial Sequence
  Description of Artificial Sequence: Synthetic oligonucleotide
  Description of Combined DNA/RNA Molecule: Synthetic oligonucleotide
uuucuucggagacaatg

SEQ ID NO: 111229 - DNA, 16 bp, Artificial Sequence
  Description of Artificial Sequence: Synthetic oligonucleotide
  Description of Combined DNA/RNA Molecule: Synthetic oligonucleotide
uucuucggagacaatg

SEQ ID NO: 111230 - DNA, 15 bp, Artificial Sequence
  Description of Artificial Sequence: Synthetic oligonucleotide
  Description of Combined DNA/RNA Molecule: Synthetic oligonucleotide
ucuucggagacaatg

SEQ ID NO: 111231 - DNA, 14 bp, Artificial Sequence
  Description of Artificial Sequence: Synthetic oligonucleotide
  Description of Combined DNA/RNA Molecule: Synthetic oligonucleotide
cuucggagacaatg

SEQ ID NO: 111232 - DNA, 13 bp, Artificial Sequence
  Description of Artificial Sequence: Synthetic oligonucleotide
  Description of Combined DNA/RNA Molecule: Synthetic oligonucleotide
uucggagacaatg

SEQ ID NO: 111233 - DNA, 12 bp, Artificial Sequence
  Description of Artificial Sequence: Synthetic oligonucleotide
  Description of Combined DNA/RNA Molecule: Synthetic oligonucleotide
ucggagacaatg

SEQ ID NO: 111234 - DNA, 11 bp, Artificial Sequence
  Description of Artificial Sequence: Synthetic oligonucleotide
  Description of Combined DNA/RNA Molecule: Synthetic oligonucleotide
cggagacaatg

SEQ ID NO: 111235 - RNA, 9 nt, Artificial Sequence
  Description of Artificial Sequence: Synthetic oligonucleotide
  modified_base (2): LNA-G
ggaucuuau

SEQ ID NO: 111236 - RNA, 10 nt, Artificial Sequence
  Description of Artificial Sequence: Synthetic oligonucleotide
  modified_base (2): LNA-G
ggaucuuauu

SEQ ID NO: 111237 - RNA, 11 nt, Artificial Sequence
  Description of Artificial Sequence: Synthetic oligonucleotide
  modified_base (2): LNA-G
ggaucuuauuu

SEQ ID NO: 111238 - RNA, 12 nt, Artificial Sequence
  Description of Artificial Sequence: Synthetic oligonucleotide
  modified_base (2): LNA-G
ggaucuuauuuc

SEQ ID NO: 111239 - RNA, 8 nt, Artificial Sequence
  Description of Artificial Sequence: Synthetic oligonucleotide
  modified_base (3): LNA-A
cuacacaa

SEQ ID NO: 111240 - DNA, 13 bp, Artificial Sequence
  Description of Artificial Sequence: Synthetic oligonucleotide
  Description of Combined DNA/RNA Molecule: Synthetic oligonucleotide
  modified_base (8): LNA-A
aucagcgauuutt

SEQ ID NO: 111241 - DNA, 12 bp, Artificial Sequence
  Description of Artificial Sequence: Synthetic oligonucleotide
  Description of Combined DNA/RNA Molecule: Synthetic oligonucleotide
  modified_base (7): LNA-A
ucagcgauuutt

SEQ ID NO: 111242 - DNA, 11 bp, Artificial Sequence
  Description of Artificial Sequence: Synthetic oligonucleotide
  Description of Combined DNA/RNA Molecule: Synthetic oligonucleotide
  modified_base (6): LNA-A
cagcgauuutt

SEQ ID NO: 111243 - DNA, 10 bp, Artificial Sequence
  Description of Artificial Sequence: Synthetic oligonucleotide
  Description of Combined DNA/RNA Molecule: Synthetic oligonucleotide
  modified_base (5): LNA-A
agcgauuutt

SEQ ID NO: 111244 - DNA, 9 bp, Artificial Sequence
  Description of Artificial Sequence: Synthetic oligonucleotide
  Description of Combined DNA/RNA Molecule: Synthetic oligonucleotide
  modified_base (4): LNA-A
gcgauuutt

SEQ ID NO: 111245 - DNA, 8 bp, Artificial Sequence
  Description of Artificial Sequence: Synthetic oligonucleotide
  Description of Combined DNA/RNA Molecule: Synthetic oligonucleotide
  modified_base (3): LNA-A
cgauuutt

SEQ ID NO: 111246 - DNA, 7 bp, Artificial Sequence
  Description of Artificial Sequence: Synthetic oligonucleotide
  Description of Combined DNA/RNA Molecule: Synthetic oligonucleotide
  modified_base (2): LNA-A
gauuutt

SEQ ID NO: 111247 - RNA, 9 nt, Artificial Sequence
  Description of Artificial Sequence: Synthetic oligonucleotide
  modified_base (3): LNA-A
cuacacaaa

SEQ ID NO: 111248 - RNA, 10 nt, Artificial Sequence
  Description of Artificial Sequence: Synthetic oligonucleotide
  modified_base (3): LNA-A
cuacacaaau

SEQ ID NO: 111249 - RNA, 11 nt, Artificial Sequence
  Description of Artificial Sequence: Synthetic oligonucleotide
  modified_base (3): LNA-A
cuacacaaauc

SEQ ID NO: 111250 - RNA, 12 nt, Artificial Sequence
  Description of Artificial Sequence: Synthetic oligonucleotide
  modified_base (3): LNA-A
cuacacaaauca

SEQ ID NO: 111251 - RNA, 13 nt, Artificial Sequence
  Description of Artificial Sequence: Synthetic oligonucleotide
  modified_base (3): LNA-A
cuacacaaaucag

SEQ ID NO: 111252 - RNA, 14 nt, Artificial Sequence
  Description of Artificial Sequence: Synthetic oligonucleotide
  modified_base (3): LNA-A
cuacacaaaucagc

SEQ ID NO: 111253 - RNA, 13 nt, Artificial Sequence
  Description of Artificial Sequence: Synthetic oligonucleotide
  modified_base (2): LNA-G
ggaucuuauuucu

SEQ ID NO: 111254 - RNA, 14 nt, Artificial Sequence
  Description of Artificial Sequence: Synthetic oligonucleotide
  modified_base (2): LNA-G
ggaucuuauuucuu

SEQ ID NO: 111255 - RNA, 8 nt, Artificial Sequence
  Description of Artificial Sequence: Synthetic oligonucleotide
  modified_base (2): LNA-G
  modified_base (8): LNA-A
ggaucuua

SEQ ID NO: 111256 - RNA, 9 nt, Artificial Sequence
  Description of Artificial Sequence: Synthetic oligonucleotide
  modified_base (2): LNA-G
  modified_base (9): LNA-U
ggaucuuau

SEQ ID NO: 111257 - RNA, 10 nt, Artificial Sequence
  Description of Artificial Sequence: Synthetic oligonucleotide
  modified_base (2): LNA-G
  modified_base (10): LNA-U
ggaucuuauu

SEQ ID NO: 111258 - RNA, 11 nt, Artificial Sequence
  Description of Artificial Sequence: Synthetic oligonucleotide
  modified_base (2): LNA-G
  modified_base (11): LNA-U
ggaucuuauuu

SEQ ID NO: 111259 - RNA, 12 nt, Artificial Sequence
  Description of Artificial Sequence: Synthetic oligonucleotide
  modified_base (2): LNA-G
  modified_base (12): LNA-C
ggaucuuauuuc

SEQ ID NO: 111260 - RNA, 13 nt, Artificial Sequence
  Description of Artificial Sequence: Synthetic oligonucleotide
  modified_base (2): LNA-G
  modified_base (13): LNA-U
ggaucuuauuucu

SEQ ID NO: 111261 - RNA, 14 nt, Artificial Sequence
  Description of Artificial Sequence: Synthetic oligonucleotide
  modified_base (2): LNA-G
  modified_base (14): LNA-U
ggaucuuauuucuu

SEQ ID NO: 111262 - DNA, 13 bp, Artificial Sequence
  Description of Artificial Sequence: Synthetic oligonucleotide
  Description of Combined DNA/RNA Molecule: Synthetic oligonucleotide
  modified_base (8): LNA-G
uuucuucggagtt

SEQ ID NO: 111263 - DNA, 12 bp, Artificial Sequence
  Description of Artificial Sequence: Synthetic oligonucleotide
  Description of Combined DNA/RNA Molecule: Synthetic oligonucleotide
  modified_base (7): LNA-G
uucuucggagtt

SEQ ID NO: 111264 - DNA, 11 bp, Artificial Sequence
  Description of Artificial Sequence: Synthetic oligonucleotide
  Description of Combined DNA/RNA Molecule: Synthetic oligonucleotide
  modified_base (6): LNA-G
ucuucggagtt

SEQ ID NO: 111265 - DNA, 10 bp, Artificial Sequence
  Description of Artificial Sequence: Synthetic oligonucleotide
  Description of Combined DNA/RNA Molecule: Synthetic oligonucleotide
  modified_base (5): LNA-G
cuucggagtt

SEQ ID NO: 111266 - DNA, 9 bp, Artificial Sequence
  Description of Artificial Sequence: Synthetic oligonucleotide
  Description of Combined DNA/RNA Molecule: Synthetic oligonucleotide
  modified_base (4): LNA-G
uucggagtt

SEQ ID NO: 111267 - DNA, 8 bp, Artificial Sequence
  Description of Artificial Sequence: Synthetic oligonucleotide
  Description of Combined DNA/RNA Molecule: Synthetic oligonucleotide
  modified_base (3): LNA-G
ucggagtt

SEQ ID NO: 111268 - DNA, 7 bp, Artificial Sequence
  Description of Artificial Sequence: Synthetic oligonucleotide
  Description of Combined DNA/RNA Molecule: Synthetic oligonucleotide
  modified_base (2): LNA-G
cggagtt

SEQ ID NO: 111269 - DNA, 13 bp, Artificial Sequence
  Description of Artificial Sequence: Synthetic oligonucleotide
  Description of Combined DNA/RNA Molecule: Synthetic oligonucleotide
  modified_base (1): LNA-U
  modified_base (8): LNA-G
uuucuucggagtt

SEQ ID NO: 111270 - DNA, 12 bp, Artificial Sequence
  Description of Artificial Sequence: Synthetic oligonucleotide
  Description of Combined DNA/RNA Molecule: Synthetic oligonucleotide
  modified_base (1): LNA-U
  modified_base (7): LNA-G
uucuucggagtt

SEQ ID NO: 111271 - DNA, 11 bp, Artificial Sequence
  Description of Artificial Sequence: Synthetic oligonucleotide
  Description of Combined DNA/RNA Molecule: Synthetic oligonucleotide
  modified_base (1): LNA-U
  modified_base (6): LNA-G
ucuucggagtt

SEQ ID NO: 111272 - DNA, 10 bp, Artificial Sequence
  Description of Artificial Sequence: Synthetic oligonucleotide
  Description of Combined DNA/RNA Molecule: Synthetic oligonucleotide
  modified_base (1): LNA-C
  modified_base (5): LNA-G
cuucggagtt

SEQ ID NO: 111273 - DNA, 9 bp, Artificial Sequence
  Description of Artificial Sequence: Synthetic oligonucleotide
  Description of Combined DNA/RNA Molecule: Synthetic oligonucleotide
  modified_base (1): LNA-U
  modified_base (4): LNA-G
uucggagtt

SEQ ID NO: 111274 - DNA, 8 bp, Artificial Sequence
  Description of Artificial Sequence: Synthetic oligonucleotide
  Description of Combined DNA/RNA Molecule: Synthetic oligonucleotide
  modified_base (1): LNA-U
  modified_base (3): LNA-G
ucggagtt

SEQ ID NO: 111275 - DNA, 7 bp, Artificial Sequence
  Description of Artificial Sequence: Synthetic oligonucleotide
  Description of Combined DNA/RNA Molecule: Synthetic oligonucleotide
  modified_base (1): LNA-C
  modified_base (2): LNA-G
cggagtt

SEQ ID NO: 111276 - DNA, 21 bp, Artificial Sequence
  Description of Artificial Sequence: Synthetic oligonucleotide
  Description of Combined DNA/RNA Molecule: Synthetic oligonucleotide
  modified_base (2): LNA-G
  modified_base (16): LNA-G
ggaucuuauuucuucggagtt

SEQ ID NO: 111277 - DNA, 25 bp, Artificial Sequence
  Description of Artificial Sequence: Synthetic oligonucleotide
  Description of Combined DNA/RNA Molecule: Synthetic oligonucleotide
ggaucuuauuucuucggagacaatg

SEQ ID NO: 111278 - RNA, 25 nt, Artificial Sequence
  Description of Artificial Sequence: Synthetic oligonucleotide
guauuuugaugaggaguucacggcc

SEQ ID NO: 111279 - RNA, 25 nt, Artificial Sequence
  Description of Artificial Sequence: Synthetic oligonucleotide
ggcccagaugaucaccaucacacca

SEQ ID NO: 111280 - RNA, 25 nt, Artificial Sequence
  Description of Artificial Sequence: Synthetic oligonucleotide
gggaagaaaacuauccugcggguuu

SEQ ID NO: 111281 - RNA, 25 nt, Artificial Sequence
  Description of Artificial Sequence: Synthetic oligonucleotide
guuuuaauuuauuucauccaguuug

SEQ ID NO: 111282 - RNA, 25 nt, Artificial Sequence
  Description of Artificial Sequence: Synthetic oligonucleotide
acguagggaaauguuaaggacuucu

SEQ ID NO: 111283 - RNA, 25 nt, Artificial Sequence
  Description of Artificial Sequence: Synthetic oligonucleotide
ccaggguuuacccagugggacagag

SEQ ID NO: 111284 - RNA, 25 nt, Artificial Sequence
  Description of Artificial Sequence: Synthetic oligonucleotide
agcaagguuuaaauuuguuauugug

SEQ ID NO: 111285 - RNA, 25 nt, Artificial Sequence
  Description of Artificial Sequence: Synthetic oligonucleotide
uguauuauguuguucaaaugcauuu

SEQ ID NO: 111286 - RNA, 25 nt, Artificial Sequence
  Description of Artificial Sequence: Synthetic oligonucleotide
uuuuaaucuuugugacaggaaagcc

SEQ ID NO: 111287 - RNA, 25 nt, Artificial Sequence
  Description of Artificial Sequence: Synthetic oligonucleotide
uuaaucuuugugacaggaaagcccu

SEQ ID NO: 111288 - RNA, 25 nt, Artificial Sequence
  Description of Artificial Sequence: Synthetic oligonucleotide
gcugcuuaugucucccagcauggcc

SEQ ID NO: 111289 - RNA, 25 nt, Artificial Sequence
  Description of Artificial Sequence: Synthetic oligonucleotide
aaguguuucagaagcuucucccuga

SEQ ID NO: 111290 - RNA, 25 nt, Artificial Sequence
  Description of Artificial Sequence: Synthetic oligonucleotide
gaccaucaauaaggaagaagcccuu

SEQ ID NO: 111291 - RNA, 25 nt, Artificial Sequence
  Description of Artificial Sequence: Synthetic oligonucleotide
ccaucaauaaggaagaagcccuuca

SEQ ID NO: 111292 - RNA, 25 nt, Artificial Sequence
  Description of Artificial Sequence: Synthetic oligonucleotide
ucaauaaggaagaagcccuucagcg

SEQ ID NO: 111293 - RNA, 25 nt, Artificial Sequence
  Description of Artificial Sequence: Synthetic oligonucleotide
aauaaggaagaagcccuucagcggc

SEQ ID NO: 111294 - RNA, 25 nt, Artificial Sequence
  Description of Artificial Sequence: Synthetic oligonucleotide
aggaagaagcccuucagcggccagu

SEQ ID NO: 111295 - RNA, 25 nt, Artificial Sequence
  Description of Artificial Sequence: Synthetic oligonucleotide
gcauaacuaaaggugaaaagcuccg

SEQ ID NO: 111296 - RNA, 25 nt, Artificial Sequence
  Description of Artificial Sequence: Synthetic oligonucleotide
cauaacuaaaggugaaaagcuccgg

SEQ ID NO: 111297 - RNA, 25 nt, Artificial Sequence
  Description of Artificial Sequence: Synthetic oligonucleotide
cuacaucacgccagucaacagucug

SEQ ID NO: 111298 - RNA, 25 nt, Artificial Sequence
  Description of Artificial Sequence: Synthetic oligonucleotide
acuggauuuaagcagaguucaaaag

SEQ ID NO: 111299 - RNA, 25 nt, Artificial Sequence
  Description of Artificial Sequence: Synthetic oligonucleotide
cuggauuuaagcagaguucaaaagc

SEQ ID NO: 111300 - RNA, 25 nt, Artificial Sequence
  Description of Artificial Sequence: Synthetic oligonucleotide
gauuuaagcagaguucaaaagcccu

SEQ ID NO: 111301 - RNA, 25 nt, Artificial Sequence
  Description of Artificial Sequence: Synthetic oligonucleotide
auuuaagcagaguucaaaagcccuu

SEQ ID NO: 111302 - RNA, 25 nt, Artificial Sequence
  Description of Artificial Sequence: Synthetic oligonucleotide
uuaagcagaguucaaaagcccuuca

SEQ ID NO: 111303 - RNA, 25 nt, Artificial Sequence
  Description of Artificial Sequence: Synthetic oligonucleotide
uaagcagaguucaaaagcccuucag

SEQ ID NO: 111304 - RNA, 25 nt, Artificial Sequence
  Description of Artificial Sequence: Synthetic oligonucleotide
agcagaguucaaaagcccuucagcg

SEQ ID NO: 111305 - RNA, 25 nt, Artificial Sequence
  Description of Artificial Sequence: Synthetic oligonucleotide
cucagggucugagugaagccgcucg

SEQ ID NO: 111306 - RNA, 25 nt, Artificial Sequence
  Description of Artificial Sequence: Synthetic oligonucleotide
caagcaacuacaucacgccagucaa

SEQ ID NO: 111307 - RNA, 25 nt, Artificial Sequence
  Description of Artificial Sequence: Synthetic oligonucleotide
aucaauggcagcuucuuggugcgug

SEQ ID NO: 111308 - RNA, 25 nt, Artificial Sequence
  Description of Artificial Sequence: Synthetic oligonucleotide
uuccagcccacauuggauucaucag

SEQ ID NO: 111309 - RNA, 25 nt, Artificial Sequence
  Description of Artificial Sequence: Synthetic oligonucleotide
cagcugagaauguggaauaccuaag

SEQ ID NO: 111310 - RNA, 25 nt, Artificial Sequence
  Description of Artificial Sequence: Synthetic oligonucleotide
aacguaucuccuaauuugaggcuca

SEQ ID NO: 111311 - RNA, 25 nt, Artificial Sequence
  Description of Artificial Sequence: Synthetic oligonucleotide
ccuaaaauaauuucucuacaauugg

SEQ ID NO: 111312 - RNA, 25 nt, Artificial Sequence
  Description of Artificial Sequence: Synthetic oligonucleotide
uggaagauucagcuaguuaggagcc

SEQ ID NO: 111313 - RNA, 25 nt, Artificial Sequence
  Description of Artificial Sequence: Synthetic oligonucleotide
uuaaacucuccuagucaauauccac

SEQ ID NO: 111314 - RNA, 25 nt, Artificial Sequence
  Description of Artificial Sequence: Synthetic oligonucleotide
cagccuacaguuauguucagucaca

SEQ ID NO: 111315 - RNA, 25 nt, Artificial Sequence
  Description of Artificial Sequence: Synthetic oligonucleotide
guuauguucagucacacacacauac

SEQ ID NO: 111316 - RNA, 25 nt, Artificial Sequence
  Description of Artificial Sequence: Synthetic oligonucleotide
cacauacaaaauguuccuuuugcuu

SEQ ID NO: 111317 - RNA, 25 nt, Artificial Sequence
  Description of Artificial Sequence: Synthetic oligonucleotide
uccuuuugcuuuuaaaguaauuuuu

SEQ ID NO: 111318 - RNA, 25 nt, Artificial Sequence
  Description of Artificial Sequence: Synthetic oligonucleotide
ugaccugugaagcaacagucaaugg

SEQ ID NO: 111319 - RNA, 25 nt, Artificial Sequence
  Description of Artificial Sequence: Synthetic oligonucleotide
cuaucucacacaucgacaaaccaau

SEQ ID NO: 111320 - RNA, 25 nt, Artificial Sequence
  Description of Artificial Sequence: Synthetic oligonucleotide
uguccucaauuguacugcuaccacu

SEQ ID NO: 111321 - RNA, 25 nt, Artificial Sequence
  Description of Artificial Sequence: Synthetic oligonucleotide
aaaccguagcuggcaagcggucuua

SEQ ID NO: 111322 - RNA, 25 nt, Artificial Sequence
  Description of Artificial Sequence: Synthetic oligonucleotide
uagcuggcaagcggucuuaccggcu

SEQ ID NO: 111323 - RNA, 25 nt, Artificial Sequence
  Description of Artificial Sequence: Synthetic oligonucleotide
uuguaugguuaaaagauggguuacc

SEQ ID NO: 111324 - RNA, 25 nt, Artificial Sequence
  Description of Artificial Sequence: Synthetic oligonucleotide
ugguuaaaagauggguuaccugcga

SEQ ID NO: 111325 - RNA, 25 nt, Artificial Sequence
  Description of Artificial Sequence: Synthetic oligonucleotide
cagggaauuauacaaucuugcugag

SEQ ID NO: 111326 - RNA, 25 nt, Artificial Sequence
  Description of Artificial Sequence: Synthetic oligonucleotide
acaaucuugcugagcauaaaacagu

SEQ ID NO: 111327 - RNA, 25 nt, Artificial Sequence
  Description of Artificial Sequence: Synthetic oligonucleotide
ccaauaaugaagaguccuuuauccu

SEQ ID NO: 111328 - RNA, 25 nt, Artificial Sequence
  Description of Artificial Sequence: Synthetic oligonucleotide
acuuuggauguuccaacgcaaguug

SEQ ID NO: 111329 - RNA, 25 nt, Artificial Sequence
  Description of Artificial Sequence: Synthetic oligonucleotide
aaugcuuccacuaaacugaaaccau

SEQ ID NO: 111330 - RNA, 25 nt, Artificial Sequence
  Description of Artificial Sequence: Synthetic oligonucleotide
gagaaaguuugacuuuguuaaauau

SEQ ID NO: 111331 - RNA, 25 nt, Artificial Sequence
  Description of Artificial Sequence: Synthetic oligonucleotide
aaagaacuacuguauauuaaaaguu

SEQ ID NO: 111332 - RNA, 25 nt, Artificial Sequence
  Description of Artificial Sequence: Synthetic oligonucleotide
uuagaaauacggguuuugacuuaac

SEQ ID NO: 111333 - RNA, 25 nt, Artificial Sequence
  Description of Artificial Sequence: Synthetic oligonucleotide
aacauggguacagcaaacucagcac

SEQ ID NO: 111334 - RNA, 25 nt, Artificial Sequence
  Description of Artificial Sequence: Synthetic oligonucleotide
aaagacacagaagaugcugaccuca

SEQ ID NO: 111335 - RNA, 25 nt, Artificial Sequence
  Description of Artificial Sequence: Synthetic oligonucleotide
uaguagggagguuuauucagaucgc

SEQ ID NO: 111336 - RNA, 25 nt, Artificial Sequence
  Description of Artificial Sequence: Synthetic oligonucleotide
gccuucugcagcaggguucugggau

SEQ ID NO: 111337 - RNA, 25 nt, Artificial Sequence
  Description of Artificial Sequence: Synthetic oligonucleotide
ggucugguacauauuggaaauuaug

SEQ ID NO: 111338 - RNA, 25 nt, Artificial Sequence
  Description of Artificial Sequence: Synthetic oligonucleotide
cuaguccuuccgauggaagcacuag

SEQ ID NO: 111339 - RNA, 25 nt, Artificial Sequence
  Description of Artificial Sequence: Synthetic oligonucleotide
ccagugaauauuguuuuuaugugga

SEQ ID NO: 111340 - RNA, 25 nt, Artificial Sequence
  Description of Artificial Sequence: Synthetic oligonucleotide
augaauucaaguuggaauugguaga

SEQ ID NO: 111341 - RNA, 25 nt, Artificial Sequence
  Description of Artificial Sequence: Synthetic oligonucleotide
caggacacagauuuagacuuggaga

SEQ ID NO: 111342 - RNA, 25 nt, Artificial Sequence
  Description of Artificial Sequence: Synthetic oligonucleotide
cucaaagcacaguuacaguauucca

SEQ ID NO: 111343 - RNA, 25 nt, Artificial Sequence
  Description of Artificial Sequence: Synthetic oligonucleotide
accacugccaccacugaugaauuaa

SEQ ID NO: 111344 - RNA, 25 nt, Artificial Sequence
  Description of Artificial Sequence: Synthetic oligonucleotide
gaaacuacuagugccacaucaucac

SEQ ID NO: 111345 - RNA, 25 nt, Artificial Sequence
  Description of Artificial Sequence: Synthetic oligonucleotide
aagucggacagccucaccaaacaga

SEQ ID NO: 111346 - RNA, 25 nt, Artificial Sequence
  Description of Artificial Sequence: Synthetic oligonucleotide
gaaagcgaaaaauggaacaugaugg

SEQ ID NO: 111347 - RNA, 25 nt, Artificial Sequence
  Description of Artificial Sequence: Synthetic oligonucleotide
cccucugauuuagcauguagacugc

SEQ ID NO: 111348 - RNA, 25 nt, Artificial Sequence
  Description of Artificial Sequence: Synthetic oligonucleotide
ugagcuauuuaaggaucuauuuaug

SEQ ID NO: 111349 - RNA, 25 nt, Artificial Sequence
  Description of Artificial Sequence: Synthetic oligonucleotide
aaaaggugaaaaagcacuauuauca

SEQ ID NO: 111350 - RNA, 25 nt, Artificial Sequence
  Description of Artificial Sequence: Synthetic oligonucleotide
gaaaaagcacuauuaucaguucugc

SEQ ID NO: 111351 - RNA, 25 nt, Artificial Sequence
  Description of Artificial Sequence: Synthetic oligonucleotide
ggcugaaaagaaagauuaaaccuac

SEQ ID NO: 111352 - RNA, 25 nt, Artificial Sequence
  Description of Artificial Sequence: Synthetic oligonucleotide
uaaacccuuauaauaaaauccuucu

SEQ ID NO: 111353 - RNA, 25 nt, Artificial Sequence
  Description of Artificial Sequence: Synthetic oligonucleotide
cauacuauuagccaaugcuguagac

SEQ ID NO: 111354 - RNA, 25 nt, Artificial Sequence
  Description of Artificial Sequence: Synthetic oligonucleotide
gacagaagcauuuugauaggaauag

SEQ ID NO: 111355 - RNA, 25 nt, Artificial Sequence
  Description of Artificial Sequence: Synthetic oligonucleotide
agagcaaauaagauaauggcccuga

SEQ ID NO: 111356 - RNA, 25 nt, Artificial Sequence
  Description of Artificial Sequence: Synthetic oligonucleotide
ccaacauuuuucucuuccucaagca

SEQ ID NO: 111357 - RNA, 25 nt, Artificial Sequence
  Description of Artificial Sequence: Synthetic oligonucleotide
uuaaguaugagaaaaguucagccca

SEQ ID NO: 111358 - RNA, 25 nt, Artificial Sequence
  Description of Artificial Sequence: Synthetic oligonucleotide
caggaauaaagauggcugcugaacc

SEQ ID NO: 111359 - RNA, 25 nt, Artificial Sequence
  Description of Artificial Sequence: Synthetic oligonucleotide
aauuugaaugaccaaguucucuuca

SEQ ID NO: 111360 - RNA, 25 nt, Artificial Sequence
  Description of Artificial Sequence: Synthetic oligonucleotide
auguauaaagauagccagccuagag

SEQ ID NO: 111361 - RNA, 25 nt, Artificial Sequence
  Description of Artificial Sequence: Synthetic oligonucleotide
ggcuguaacuaucucugugaagugu

SEQ ID NO: 111362 - RNA, 25 nt, Artificial Sequence
  Description of Artificial Sequence: Synthetic oligonucleotide
ucugugaagugugagaaaauuucaa

SEQ ID NO: 111363 - RNA, 25 nt, Artificial Sequence
  Description of Artificial Sequence: Synthetic oligonucleotide
ccuuuaaggaaaugaauccuccuga

SEQ ID NO: 111364 - RNA, 25 nt, Artificial Sequence
  Description of Artificial Sequence: Synthetic oligonucleotide
aaggauacaaaaagugacaucauau

SEQ ID NO: 111365 - RNA, 25 nt, Artificial Sequence
  Description of Artificial Sequence: Synthetic oligonucleotide
agaugcaauuugaaucuucaucaua

SEQ ID NO: 111366 - RNA, 25 nt, Artificial Sequence
  Description of Artificial Sequence: Synthetic oligonucleotide
guucaaaacgaagacuagcuauuaa

SEQ ID NO: 111367 - RNA, 25 nt, Artificial Sequence
  Description of Artificial Sequence: Synthetic oligonucleotide
gugaaaccucaucucuacuaaaaau

SEQ ID NO: 111368 - RNA, 25 nt, Artificial Sequence
  Description of Artificial Sequence: Synthetic oligonucleotide
acgaaagagaagcucuaucucgccu

SEQ ID NO: 111369 - RNA, 25 nt, Artificial Sequence
  Description of Artificial Sequence: Synthetic oligonucleotide
cuccacaagcgccuucgguccaguu

SEQ ID NO: 111370 - RNA, 25 nt, Artificial Sequence
  Description of Artificial Sequence: Synthetic oligonucleotide
gagaagauuccaaagauguagccgc

SEQ ID NO: 111371 - RNA, 25 nt, Artificial Sequence
  Description of Artificial Sequence: Synthetic oligonucleotide
aaucuggauucaaugaggagacuug

SEQ ID NO: 111372 - RNA, 25 nt, Artificial Sequence
  Description of Artificial Sequence: Synthetic oligonucleotide
agaacagauuugagaguagugagga

SEQ ID NO: 111373 - RNA, 25 nt, Artificial Sequence
  Description of Artificial Sequence: Synthetic oligonucleotide
ccagagcugugcagaugaguacaaa

SEQ ID NO: 111374 - RNA, 25 nt, Artificial Sequence
  Description of Artificial Sequence: Synthetic oligonucleotide
ccucagauuguuguuguuaaugggc

SEQ ID NO: 111375 - RNA, 25 nt, Artificial Sequence
  Description of Artificial Sequence: Synthetic oligonucleotide
cuauuuuaauuauuuuuaauuuauu

SEQ ID NO: 111376 - RNA, 25 nt, Artificial Sequence
  Description of Artificial Sequence: Synthetic oligonucleotide
uuuaauuuauuaauauuuaaauaug

SEQ ID NO: 111377 - RNA, 25 nt, Artificial Sequence
  Description of Artificial Sequence: Synthetic oligonucleotide
augcaguuugaauauccuuuguuuc

SEQ ID NO: 111378 - RNA, 25 nt, Artificial Sequence
  Description of Artificial Sequence: Synthetic oligonucleotide
caugcugcuggcgucuaaguguuug

SEQ ID NO: 111379 - RNA, 25 nt, Artificial Sequence
  Description of Artificial Sequence: Synthetic oligonucleotide
agaugugcauuucaccugugacaaa

SEQ ID NO: 111380 - RNA, 25 nt, Artificial Sequence
  Description of Artificial Sequence: Synthetic oligonucleotide
ucaaaaccugugccaggcugaauua

SEQ ID NO: 111381 - RNA, 25 nt, Artificial Sequence
  Description of Artificial Sequence: Synthetic oligonucleotide
gaauguggguagucauucuuacaau

SEQ ID NO: 111382 - RNA, 25 nt, Artificial Sequence
  Description of Artificial Sequence: Synthetic oligonucleotide
auguggguagucauucuuacaauug

SEQ ID NO: 111383 - RNA, 25 nt, Artificial Sequence
  Description of Artificial Sequence: Synthetic oligonucleotide
ugaaaaugagcaucagagaguguac

SEQ ID NO: 111384 - RNA, 25 nt, Artificial Sequence
  Description of Artificial Sequence: Synthetic oligonucleotide
uugcuuuucauguagaacucagcag

SEQ ID NO: 111385 - RNA, 25 nt, Artificial Sequence
  Description of Artificial Sequence: Synthetic oligonucleotide
uguauuucuauauuuauuuucagua

SEQ ID NO: 111386 - RNA, 25 nt, Artificial Sequence
  Description of Artificial Sequence: Synthetic oligonucleotide
uuugauuaauguuucuuaaauggaa

SEQ ID NO: 111387 - RNA, 25 nt, Artificial Sequence
  Description of Artificial Sequence: Synthetic oligonucleotide
caacguguauagugccuaaaauugu

SEQ ID NO: 111388 - RNA, 25 nt, Artificial Sequence
  Description of Artificial Sequence: Synthetic oligonucleotide
cauauccuuggcuacuaacaucugg

SEQ ID NO: 111389 - RNA, 25 nt, Artificial Sequence
  Description of Artificial Sequence: Synthetic oligonucleotide
uacuaacaucuggagacugugagcu

SEQ ID NO: 111390 - RNA, 25 nt, Artificial Sequence
  Description of Artificial Sequence: Synthetic oligonucleotide
cauaaguugugugcuuuuuauuaau

SEQ ID NO: 111391 - RNA, 25 nt, Artificial Sequence
  Description of Artificial Sequence: Synthetic oligonucleotide
gcaucauuuuggcucuucuuacauu

SEQ ID NO: 111392 - RNA, 25 nt, Artificial Sequence
  Description of Artificial Sequence: Synthetic oligonucleotide
gcucuucuuacauuuguaaaaaugu

SEQ ID NO: 111393 - RNA, 25 nt, Artificial Sequence
  Description of Artificial Sequence: Synthetic oligonucleotide
agauuaggucaucuuaauucauauu

SEQ ID NO: 111394 - RNA, 25 nt, Artificial Sequence
  Description of Artificial Sequence: Synthetic oligonucleotide
auggaauugaaagaacuaaucauga

SEQ ID NO: 111395 - RNA, 25 nt, Artificial Sequence
  Description of Artificial Sequence: Synthetic oligonucleotide
cacacucauuccuucugcucuuggg

SEQ ID NO: 111396 - RNA, 25 nt, Artificial Sequence
  Description of Artificial Sequence: Synthetic oligonucleotide
uguagagguaaccaguagcuuugag

SEQ ID NO: 111397 - RNA, 25 nt, Artificial Sequence
  Description of Artificial Sequence: Synthetic oligonucleotide
caaccacaugccacguaauauuuca

SEQ ID NO: 111398 - RNA, 25 nt, Artificial Sequence
  Description of Artificial Sequence: Synthetic oligonucleotide
ucggaaacaaguuauucucuucacu

SEQ ID NO: 111399 - RNA, 25 nt, Artificial Sequence
  Description of Artificial Sequence: Synthetic oligonucleotide
acucccaauaacuaaugcuaagaaa

SEQ ID NO: 111400 - RNA, 25 nt, Artificial Sequence
  Description of Artificial Sequence: Synthetic oligonucleotide
aaugcuaagaaaugcugaaaaucaa

SEQ ID NO: 111401 - RNA, 25 nt, Artificial Sequence
  Description of Artificial Sequence: Synthetic oligonucleotide
gucuuucucuaaauaugauuacuuu

SEQ ID NO: 111402 - RNA, 25 nt, Artificial Sequence
  Description of Artificial Sequence: Synthetic oligonucleotide
ugaauuucaggcauuuuguucuaca

SEQ ID NO: 111403 - RNA, 25 nt, Artificial Sequence
  Description of Artificial Sequence: Synthetic oligonucleotide
cgauucccucucacccgggacucuc

SEQ ID NO: 111404 - RNA, 25 nt, Artificial Sequence
  Description of Artificial Sequence: Synthetic oligonucleotide
aggaaagugaaccuuuaaaguaaag

SEQ ID NO: 111405 - RNA, 25 nt, Artificial Sequence
  Description of Artificial Sequence: Synthetic oligonucleotide
gaggcugcaugcucuggaagccugg

SEQ ID NO: 111406 - RNA, 25 nt, Artificial Sequence
  Description of Artificial Sequence: Synthetic oligonucleotide
ucucugaacagaaaacaaaagagag

SEQ ID NO: 111407 - RNA, 25 nt, Artificial Sequence
  Description of Artificial Sequence: Synthetic oligonucleotide
aacuuggcuguaaucaguuaugccg

SEQ ID NO: 111408 - RNA, 25 nt, Artificial Sequence
  Description of Artificial Sequence: Synthetic oligonucleotide
agaagccaaaauuaaaagaagucca

SEQ ID NO: 111409 - RNA, 25 nt, Artificial Sequence
  Description of Artificial Sequence: Synthetic oligonucleotide
auuaaaagaaguccaggugagguua

SEQ ID NO: 111410 - RNA, 25 nt, Artificial Sequence
  Description of Artificial Sequence: Synthetic oligonucleotide
gaauccggauuaucgggaagaggac

SEQ ID NO: 111411 - RNA, 25 nt, Artificial Sequence
  Description of Artificial Sequence: Synthetic oligonucleotide
aaugugacaucaaagcaaguauugu

SEQ ID NO: 111412 - RNA, 25 nt, Artificial Sequence
  Description of Artificial Sequence: Synthetic oligonucleotide
caucaaagcaaguauuguagcacuc

SEQ ID NO: 111413 - RNA, 25 nt, Artificial Sequence
  Description of Artificial Sequence: Synthetic oligonucleotide
agagagagaaaacaaaaccacaaau

SEQ ID NO: 111414 - RNA, 25 nt, Artificial Sequence
  Description of Artificial Sequence: Synthetic oligonucleotide
ucgcuguaguauuuaagcccauaca

SEQ ID NO: 111415 - RNA, 25 nt, Artificial Sequence
  Description of Artificial Sequence: Synthetic oligonucleotide
cgcuguaguauuuaagcccauacag

SEQ ID NO: 111416 - RNA, 25 nt, Artificial Sequence
  Description of Artificial Sequence: Synthetic oligonucleotide
auuuaagcccauacagaaaccuucc

SEQ ID NO: 111417 - RNA, 25 nt, Artificial Sequence
  Description of Artificial Sequence: Synthetic oligonucleotide
auuaaaauaaacaugguauaccuac

SEQ ID NO: 111418 - RNA, 25 nt, Artificial Sequence
  Description of Artificial Sequence: Synthetic oligonucleotide
cuguucugaucggccaguuuucgga

SEQ ID NO: 111419 - RNA, 25 nt, Artificial Sequence
  Description of Artificial Sequence: Synthetic oligonucleotide
aaauaauuugaacuuuggaacaggg

SEQ ID NO: 111420 - RNA, 25 nt, Artificial Sequence
  Description of Artificial Sequence: Synthetic oligonucleotide
ugcgaccuuaauuuaacuuuccagu

SEQ ID NO: 111421 - RNA, 25 nt, Artificial Sequence
  Description of Artificial Sequence: Synthetic oligonucleotide
cugagaaagcuaaaguuugguuuug

SEQ ID NO: 111422 - RNA, 25 nt, Artificial Sequence
  Description of Artificial Sequence: Synthetic oligonucleotide
aguaaagaugcuacuucccacugua

SEQ ID NO: 111423 - RNA, 25 nt, Artificial Sequence
  Description of Artificial Sequence: Synthetic oligonucleotide
cugcuuaauugcugauaccauauga

SEQ ID NO: 111424 - RNA, 25 nt, Artificial Sequence
  Description of Artificial Sequence: Synthetic oligonucleotide
uaccauaugaaugaaacaugggcug

SEQ ID NO: 111425 - RNA, 25 nt, Artificial Sequence
  Description of Artificial Sequence: Synthetic oligonucleotide
aacuuucuuauccaacuuuuucaua

SEQ ID NO: 111426 - RNA, 25 nt, Artificial Sequence
  Description of Artificial Sequence: Synthetic oligonucleotide
ccuugcaugacaucaugaggccgga

SEQ ID NO: 111427 - RNA, 25 nt, Artificial Sequence
  Description of Artificial Sequence: Synthetic oligonucleotide
ugaauuuguauaugacugcauuugu

SEQ ID NO: 111428 - RNA, 25 nt, Artificial Sequence
  Description of Artificial Sequence: Synthetic oligonucleotide
gaauccuaguagaauguuuacuacc

SEQ ID NO: 111429 - RNA, 25 nt, Artificial Sequence
  Description of Artificial Sequence: Synthetic oligonucleotide
gaaagggaagaauuuuuugaugaaa

SEQ ID NO: 111430 - RNA, 25 nt, Artificial Sequence
  Description of Artificial Sequence: Synthetic oligonucleotide
uaucggcaugccagugugugaauuu

SEQ ID NO: 111431 - RNA, 25 nt, Artificial Sequence
  Description of Artificial Sequence: Synthetic oligonucleotide
caccucauaguagagcaauguaugu

SEQ ID NO: 111432 - RNA, 25 nt, Artificial Sequence
  Description of Artificial Sequence: Synthetic oligonucleotide
ccagaauugccaaagcacauauaua

SEQ ID NO: 111433 - RNA, 25 nt, Artificial Sequence
  Description of Artificial Sequence: Synthetic oligonucleotide
uggugaucuggguaauaguuucucc

SEQ ID NO: 111434 - RNA, 25 nt, Artificial Sequence
  Description of Artificial Sequence: Synthetic oligonucleotide
gaucuggguaauaguuucuccaaau

SEQ ID NO: 111435 - RNA, 25 nt, Artificial Sequence
  Description of Artificial Sequence: Synthetic oligonucleotide
ggaugugaugaauacuuccuagaaa

SEQ ID NO: 111436 - RNA, 25 nt, Artificial Sequence
  Description of Artificial Sequence: Synthetic oligonucleotide
cauuuccacagcuacaccauauaug

SEQ ID NO: 111437 - RNA, 25 nt, Artificial Sequence
  Description of Artificial Sequence: Synthetic oligonucleotide
acagcuacaccauauaugaauggag

SEQ ID NO: 111438 - RNA, 25 nt, Artificial Sequence
  Description of Artificial Sequence: Synthetic oligonucleotide
ugcaguucuuacacgagaagaagau

SEQ ID NO: 111439 - RNA, 25 nt, Artificial Sequence
  Description of Artificial Sequence: Synthetic oligonucleotide
acgagaagaagaucauuuacaggga

SEQ ID NO: 111440 - RNA, 25 nt, Artificial Sequence
  Description of Artificial Sequence: Synthetic oligonucleotide
cgagaagaagaucauuuacagggac

SEQ ID NO: 111441 - RNA, 25 nt, Artificial Sequence
  Description of Artificial Sequence: Synthetic oligonucleotide
aagaagaucauuuacagggaccuga

SEQ ID NO: 111442 - RNA, 25 nt, Artificial Sequence
  Description of Artificial Sequence: Synthetic oligonucleotide
agaggaagagguguuugacugcauc

SEQ ID NO: 111443 - RNA, 25 nt, Artificial Sequence
  Description of Artificial Sequence: Synthetic oligonucleotide
gaggaagagguguuugacugcaucg

SEQ ID NO: 111444 - RNA, 25 nt, Artificial Sequence
  Description of Artificial Sequence: Synthetic oligonucleotide
cuacuuugagggcgaguucacaggg

SEQ ID NO: 111445 - RNA, 25 nt, Artificial Sequence
  Description of Artificial Sequence: Synthetic oligonucleotide
agggcaucuccuggcaccucugucc

SEQ ID NO: 111446 - RNA, 25 nt, Artificial Sequence
  Description of Artificial Sequence: Synthetic oligonucleotide
ggagugauaugguuugucuuuuuaa

SEQ ID NO: 111447 - RNA, 25 nt, Artificial Sequence
  Description of Artificial Sequence: Synthetic oligonucleotide
gagugauaugguuugucuuuuuaag

SEQ ID NO: 111448 - RNA, 25 nt, Artificial Sequence
  Description of Artificial Sequence: Synthetic oligonucleotide
ugcaguaaagauccuaaagguuguc

SEQ ID NO: 111449 - RNA, 25 nt, Artificial Sequence
  Description of Artificial Sequence: Synthetic oligonucleotide
aguaaagauccuaaagguugucgac

SEQ ID NO: 111450 - RNA, 25 nt, Artificial Sequence
  Description of Artificial Sequence: Synthetic oligonucleotide
ugacaaaggacaaccuggcaauugu

SEQ ID NO: 111451 - RNA, 25 nt, Artificial Sequence
  Description of Artificial Sequence: Synthetic oligonucleotide
gcaauugugacccaguggugcgagg

SEQ ID NO: 111452 - RNA, 25 nt, Artificial Sequence
  Description of Artificial Sequence: Synthetic oligonucleotide
aacaucauccauagagacaugaaau

SEQ ID NO: 111453 - RNA, 25 nt, Artificial Sequence
  Description of Artificial Sequence: Synthetic oligonucleotide
ugaaauccaacaauauauuucucca

SEQ ID NO: 111454 - RNA, 25 nt, Artificial Sequence
  Description of Artificial Sequence: Synthetic oligonucleotide
aacaauauauuucuccaugaaggcu

SEQ ID NO: 111455 - RNA, 25 nt, Artificial Sequence
  Description of Artificial Sequence: Synthetic oligonucleotide
aacaguaaagucacgcuggaguggu

SEQ ID NO: 111456 - RNA, 25 nt, Artificial Sequence
  Description of Artificial Sequence: Synthetic oligonucleotide
ugugaagaaaguaaaggaagagagg

SEQ ID NO: 111457 - RNA, 25 nt, Artificial Sequence
  Description of Artificial Sequence: Synthetic oligonucleotide
cuuccgagccauccuugcaucgggc

SEQ ID NO: 111458 - RNA, 25 nt, Artificial Sequence
  Description of Artificial Sequence: Synthetic oligonucleotide
aauggagguugaauauccuacugug

SEQ ID NO: 111459 - RNA, 25 nt, Artificial Sequence
  Description of Artificial Sequence: Synthetic oligonucleotide
ggagguugaauauccuacuguguaa

SEQ ID NO: 111460 - RNA, 25 nt, Artificial Sequence
  Description of Artificial Sequence: Synthetic oligonucleotide
auuuugaguuuucccuuguagugua

SEQ ID NO: 111461 - RNA, 25 nt, Artificial Sequence
  Description of Artificial Sequence: Synthetic oligonucleotide
uauccuguuuguucuuuguugauug

SEQ ID NO: 111462 - RNA, 25 nt, Artificial Sequence
  Description of Artificial Sequence: Synthetic oligonucleotide
ccuguuuguucuuuguugauugaaa

SEQ ID NO: 111463 - RNA, 25 nt, Artificial Sequence
  Description of Artificial Sequence: Synthetic oligonucleotide
cucuacagccuucuuuuucuuccau

SEQ ID NO: 111464 - RNA, 25 nt, Artificial Sequence
  Description of Artificial Sequence: Synthetic oligonucleotide
ucuuccauagcuaaucuuccuucua

SEQ ID NO: 111465 - RNA, 25 nt, Artificial Sequence
  Description of Artificial Sequence: Synthetic oligonucleotide
auaaucuuccuguugaaugcuucau

SEQ ID NO: 111466 - RNA, 25 nt, Artificial Sequence
  Description of Artificial Sequence: Synthetic oligonucleotide
uaaucuuccuguugaaugcuucaug

SEQ ID NO: 111467 - RNA, 25 nt, Artificial Sequence
  Description of Artificial Sequence: Synthetic oligonucleotide
cuucaugacuugaauucuacuuuga

SEQ ID NO: 111468 - RNA, 25 nt, Artificial Sequence
  Description of Artificial Sequence: Synthetic oligonucleotide
aagagggagagaagcaacuacagac

SEQ ID NO: 111469 - RNA, 25 nt, Artificial Sequence
  Description of Artificial Sequence: Synthetic oligonucleotide
cgucuccuaccagaccaaggucaac

SEQ ID NO: 111470 - RNA, 25 nt, Artificial Sequence
  Description of Artificial Sequence: Synthetic oligonucleotide
gaucaaucggcccgacuaucucgac

SEQ ID NO: 111471 - RNA, 25 nt, Artificial Sequence
  Description of Artificial Sequence: Synthetic oligonucleotide
ggacgaacauccaaccuucccaaac

SEQ ID NO: 111472 - RNA, 25 nt, Artificial Sequence
  Description of Artificial Sequence: Synthetic oligonucleotide
agggucggaacccaagcuuagaacu

SEQ ID NO: 111473 - RNA, 25 nt, Artificial Sequence
  Description of Artificial Sequence: Synthetic oligonucleotide
ucggaacccaagcuuagaacuuuaa

SEQ ID NO: 111474 - RNA, 25 nt, Artificial Sequence
  Description of Artificial Sequence: Synthetic oligonucleotide
acccaagcuuagaacuuuaagcaac

SEQ ID NO: 111475 - RNA, 25 nt, Artificial Sequence
  Description of Artificial Sequence: Synthetic oligonucleotide
gaacuuuaagcaacaagaccaccac

SEQ ID NO: 111476 - RNA, 25 nt, Artificial Sequence
  Description of Artificial Sequence: Synthetic oligonucleotide
acuauucaguggcgagaaauaaagu

SEQ ID NO: 111477 - RNA, 25 nt, Artificial Sequence
  Description of Artificial Sequence: Synthetic oligonucleotide
cuauucaguggcgagaaauaaaguu

SEQ ID NO: 111478 - RNA, 25 nt, Artificial Sequence
  Description of Artificial Sequence: Synthetic oligonucleotide
aaacacagauaacaggaaaugaucc

SEQ ID NO: 111479 - RNA, 25 nt, Artificial Sequence
  Description of Artificial Sequence: Synthetic oligonucleotide
cuuaagaaaagagaagaaaugaaac

SEQ ID NO: 111480 - RNA, 25 nt, Artificial Sequence
  Description of Artificial Sequence: Synthetic oligonucleotide
cugaaggaguguguuuccauccucc

SEQ ID NO: 111481 - RNA, 25 nt, Artificial Sequence
  Description of Artificial Sequence: Synthetic oligonucleotide
ucaccgcgggacugaaaaucuuuga

SEQ ID NO: 111482 - RNA, 25 nt, Artificial Sequence
  Description of Artificial Sequence: Synthetic oligonucleotide
agcagaaauaagcgugccguucagg

SEQ ID NO: 111483 - RNA, 25 nt, Artificial Sequence
  Description of Artificial Sequence: Synthetic oligonucleotide
aagcgugccguucaggguccagaag

SEQ ID NO: 111484 - RNA, 25 nt, Artificial Sequence
  Description of Artificial Sequence: Synthetic oligonucleotide
agaaacagucacucaagacugcuug

SEQ ID NO: 111485 - RNA, 25 nt, Artificial Sequence
  Description of Artificial Sequence: Synthetic oligonucleotide
agaggaagaagguccaugucuuugg

SEQ ID NO: 111486 - RNA, 25 nt, Artificial Sequence
  Description of Artificial Sequence: Synthetic oligonucleotide
uguauucaaaauaugccugaaacac

SEQ ID NO: 111487 - RNA, 25 nt, Artificial Sequence
  Description of Artificial Sequence: Synthetic oligonucleotide
auuuuccucccuuucucuguaccuc

SEQ ID NO: 111488 - RNA, 25 nt, Artificial Sequence
  Description of Artificial Sequence: Synthetic oligonucleotide
caaagaaagauagagcaagacaaga

SEQ ID NO: 111489 - RNA, 25 nt, Artificial Sequence
  Description of Artificial Sequence: Synthetic oligonucleotide
aagaaagauagagcaagacaagaaa

SEQ ID NO: 111490 - RNA, 25 nt, Artificial Sequence
  Description of Artificial Sequence: Synthetic oligonucleotide
gaaagcauuuguuuguacaagaucc

SEQ ID NO: 111491 - RNA, 25 nt, Artificial Sequence
  Description of Artificial Sequence: Synthetic oligonucleotide
ugaguuaaacgaacguacuugcaga

SEQ ID NO: 111492 - RNA, 25 nt, Artificial Sequence
  Description of Artificial Sequence: Synthetic oligonucleotide
acugauacagaacgaucgauacaga

SEQ ID NO: 111493 - RNA, 25 nt, Artificial Sequence
  Description of Artificial Sequence: Synthetic oligonucleotide
auauuauauauauauaaaaauaaau

SEQ ID NO: 111494 - RNA, 25 nt, Artificial Sequence
  Description of Artificial Sequence: Synthetic oligonucleotide
auuauauauauauaaaaauaaauau

SEQ ID NO: 111495 - RNA, 25 nt, Artificial Sequence
  Description of Artificial Sequence: Synthetic oligonucleotide
ucacuggauguauuugacugcugug

SEQ ID NO: 111496 - RNA, 25 nt, Artificial Sequence
  Description of Artificial Sequence: Synthetic oligonucleotide
cagggaagaggaggagaugagagac

SEQ ID NO: 111497 - RNA, 25 nt, Artificial Sequence
  Description of Artificial Sequence: Synthetic oligonucleotide
augaucuuuuuuuugucccacuugg

SEQ ID NO: 111498 - RNA, 27 nt, Artificial Sequence
  Description of Artificial Sequence: Synthetic oligonucleotide
ggccgugaacuccucaucaaaauaccu

SEQ ID NO: 111499 - RNA, 27 nt, Artificial Sequence
  Description of Artificial Sequence: Synthetic oligonucleotide
uggugugauggugaucaucugggccgu

SEQ ID NO: 111500 - RNA, 27 nt, Artificial Sequence
  Description of Artificial Sequence: Synthetic oligonucleotide
aaacccgcaggauaguuuucuucccua

SEQ ID NO: 111501 - RNA, 27 nt, Artificial Sequence
  Description of Artificial Sequence: Synthetic oligonucleotide
caaacuggaugaaauaaauuaaaaccc

SEQ ID NO: 111502 - RNA, 27 nt, Artificial Sequence
  Description of Artificial Sequence: Synthetic oligonucleotide
agaaguccuuaacauuucccuacguga

SEQ ID NO: 111503 - RNA, 27 nt, Artificial Sequence
  Description of Artificial Sequence: Synthetic oligonucleotide
cucugucccacuggguaaacccuggcc

SEQ ID NO: 111504 - RNA, 27 nt, Artificial Sequence
  Description of Artificial Sequence: Synthetic oligonucleotide
cacaauaacaaauuuaaaccuugcucc

SEQ ID NO: 111505 - RNA, 27 nt, Artificial Sequence
  Description of Artificial Sequence: Synthetic oligonucleotide
aaaugcauuugaacaacauaauacaca

SEQ ID NO: 111506 - RNA, 27 nt, Artificial Sequence
  Description of Artificial Sequence: Synthetic oligonucleotide
ggcuuuccugucacaaagauuaaaaac

SEQ ID NO: 111507 - RNA, 27 nt, Artificial Sequence
  Description of Artificial Sequence: Synthetic oligonucleotide
agggcuuuccugucacaaagauuaaaa

SEQ ID NO: 111508 - RNA, 27 nt, Artificial Sequence
  Description of Artificial Sequence: Synthetic oligonucleotide
ggccaugcugggagacauaagcagcag

SEQ ID NO: 111509 - RNA, 27 nt, Artificial Sequence
  Description of Artificial Sequence: Synthetic oligonucleotide
ucagggagaagcuucugaaacacuucu

SEQ ID NO: 111510 - RNA, 27 nt, Artificial Sequence
  Description of Artificial Sequence: Synthetic oligonucleotide
aagggcuucuuccuuauugauggucag

SEQ ID NO: 111511 - RNA, 27 nt, Artificial Sequence
  Description of Artificial Sequence: Synthetic oligonucleotide
ugaagggcuucuuccuuauugaugguc

SEQ ID NO: 111512 - RNA, 27 nt, Artificial Sequence
  Description of Artificial Sequence: Synthetic oligonucleotide
cgcugaagggcuucuuccuuauugaug

SEQ ID NO: 111513 - RNA, 27 nt, Artificial Sequence
  Description of Artificial Sequence: Synthetic oligonucleotide
gccgcugaagggcuucuuccuuauuga

SEQ ID NO: 111514 - RNA, 27 nt, Artificial Sequence
  Description of Artificial Sequence: Synthetic oligonucleotide
acuggccgcugaagggcuucuuccuua

SEQ ID NO: 111515 - RNA, 27 nt, Artificial Sequence
  Description of Artificial Sequence: Synthetic oligonucleotide
cggagcuuuucaccuuuaguuaugcuu

SEQ ID NO: 111516 - RNA, 27 nt, Artificial Sequence
  Description of Artificial Sequence: Synthetic oligonucleotide
ccggagcuuuucaccuuuaguuaugcu

SEQ ID NO: 111517 - RNA, 27 nt, Artificial Sequence
  Description of Artificial Sequence: Synthetic oligonucleotide
cagacuguugacuggcgugauguaguu

SEQ ID NO: 111518 - RNA, 27 nt, Artificial Sequence
  Description of Artificial Sequence: Synthetic oligonucleotide
cuuuugaacucugcuuaaauccagugg

SEQ ID NO: 111519 - RNA, 27 nt, Artificial Sequence
  Description of Artificial Sequence: Synthetic oligonucleotide
gcuuuugaacucugcuuaaauccagug

SEQ ID NO: 111520 - RNA, 27 nt, Artificial Sequence
  Description of Artificial Sequence: Synthetic oligonucleotide
agggcuuuugaacucugcuuaaaucca

SEQ ID NO: 111521 - RNA, 27 nt, Artificial Sequence
  Description of Artificial Sequence: Synthetic oligonucleotide
aagggcuuuugaacucugcuuaaaucc

SEQ ID NO: 111522 - RNA, 27 nt, Artificial Sequence
  Description of Artificial Sequence: Synthetic oligonucleotide
ugaagggcuuuugaacucugcuuaaau

SEQ ID NO: 111523 - RNA, 27 nt, Artificial Sequence
  Description of Artificial Sequence: Synthetic oligonucleotide
cugaagggcuuuugaacucugcuuaaa

SEQ ID NO: 111524 - RNA, 27 nt, Artificial Sequence
  Description of Artificial Sequence: Synthetic oligonucleotide
cgcugaagggcuuuugaacucugcuua

SEQ ID NO: 111525 - RNA, 27 nt, Artificial Sequence
  Description of Artificial Sequence: Synthetic oligonucleotide
cgagcggcuucacucagacccugaggc

SEQ ID NO: 111526 - RNA, 27 nt, Artificial Sequence
  Description of Artificial Sequence: Synthetic oligonucleotide
uugacuggcgugauguaguugcuuggg

SEQ ID NO: 111527 - RNA, 27 nt, Artificial Sequence
  Description of Artificial Sequence: Synthetic oligonucleotide
cacgcaccaagaagcugccauugaucc

SEQ ID NO: 111528 - RNA, 27 nt, Artificial Sequence
  Description of Artificial Sequence: Synthetic oligonucleotide
cugaugaauccaaugugggcuggaauc

SEQ ID NO: 111529 - RNA, 27 nt, Artificial Sequence
  Description of Artificial Sequence: Synthetic oligonucleotide
cuuagguauuccacauucucagcugug

SEQ ID NO: 111530 - RNA, 27 nt, Artificial Sequence
  Description of Artificial Sequence: Synthetic oligonucleotide
ugagccucaaauuaggagauacguuuu

SEQ ID NO: 111531 - RNA, 27 nt, Artificial Sequence
  Description of Artificial Sequence: Synthetic oligonucleotide
ccaauuguagagaaauuauuuuaggaa

SEQ ID NO: 111532 - RNA, 27 nt, Artificial Sequence
  Description of Artificial Sequence: Synthetic oligonucleotide
ggcuccuaacuagcugaaucuuccaau

SEQ ID NO: 111533 - RNA, 27 nt, Artificial Sequence
  Description of Artificial Sequence: Synthetic oligonucleotide
guggauauugacuaggagaguuuaaaa

SEQ ID NO: 111534 - RNA, 27 nt, Artificial Sequence
  Description of Artificial Sequence: Synthetic oligonucleotide
ugugacugaacauaacuguaggcugaa

SEQ ID NO: 111535 - RNA, 27 nt, Artificial Sequence
  Description of Artificial Sequence: Synthetic oligonucleotide
guaugugugugugacugaacauaacug

SEQ ID NO: 111536 - RNA, 27 nt, Artificial Sequence
  Description of Artificial Sequence: Synthetic oligonucleotide
aagcaaaaggaacauuuuguaugugug

SEQ ID NO: 111537 - RNA, 27 nt, Artificial Sequence
  Description of Artificial Sequence: Synthetic oligonucleotide
aaaaauuacuuuaaaagcaaaaggaac

SEQ ID NO: 111538 - RNA, 27 nt, Artificial Sequence
  Description of Artificial Sequence: Synthetic oligonucleotide
ccauugacuguugcuucacaggucaga

SEQ ID NO: 111539 - RNA, 27 nt, Artificial Sequence
  Description of Artificial Sequence: Synthetic oligonucleotide
auugguuugucgaugugugagauaguu

SEQ ID NO: 111540 - RNA, 27 nt, Artificial Sequence
  Description of Artificial Sequence: Synthetic oligonucleotide
agugguagcaguacaauugaggacaag

SEQ ID NO: 111541 - RNA, 27 nt, Artificial Sequence
  Description of Artificial Sequence: Synthetic oligonucleotide
uaagaccgcuugccagcuacgguuuca

SEQ ID NO: 111542 - RNA, 27 nt, Artificial Sequence
  Description of Artificial Sequence: Synthetic oligonucleotide
agccgguaagaccgcuugccagcuacg

SEQ ID NO: 111543 - RNA, 27 nt, Artificial Sequence
  Description of Artificial Sequence: Synthetic oligonucleotide
gguaacccaucuuuuaaccauacaacu

SEQ ID NO: 111544 - RNA, 27 nt, Artificial Sequence
  Description of Artificial Sequence: Synthetic oligonucleotide
ucgcagguaacccaucuuuuaaccaua

SEQ ID NO: 111545 - RNA, 27 nt, Artificial Sequence
  Description of Artificial Sequence: Synthetic oligonucleotide
cucagcaagauuguauaauucccugca

SEQ ID NO: 111546 - RNA, 27 nt, Artificial Sequence
  Description of Artificial Sequence: Synthetic oligonucleotide
acuguuuuaugcucagcaagauuguau

SEQ ID NO: 111547 - RNA, 27 nt, Artificial Sequence
  Description of Artificial Sequence: Synthetic oligonucleotide
aggauaaaggacucuucauuauuggaa

SEQ ID NO: 111548 - RNA, 27 nt, Artificial Sequence
  Description of Artificial Sequence: Synthetic oligonucleotide
caacuugcguuggaacauccaaagugu

SEQ ID NO: 111549 - RNA, 27 nt, Artificial Sequence
  Description of Artificial Sequence: Synthetic oligonucleotide
augguuucaguuuaguggaagcauuua

SEQ ID NO: 111550 - RNA, 27 nt, Artificial Sequence
  Description of Artificial Sequence: Synthetic oligonucleotide
auauuuaacaaagucaaacuuucucac

SEQ ID NO: 111551 - RNA, 27 nt, Artificial Sequence
  Description of Artificial Sequence: Synthetic oligonucleotide
aacuuuuaauauacaguaguucuuuuc

SEQ ID NO: 111552 - RNA, 27 nt, Artificial Sequence
  Description of Artificial Sequence: Synthetic oligonucleotide
guuaagucaaaacccguauuucuaaag

SEQ ID NO: 111553 - RNA, 27 nt, Artificial Sequence
  Description of Artificial Sequence: Synthetic oligonucleotide
gugcugaguuugcuguacccauguuga

SEQ ID NO: 111554 - RNA, 27 nt, Artificial Sequence
  Description of Artificial Sequence: Synthetic oligonucleotide
ugaggucagcaucuucugugucuuuac

SEQ ID NO: 111555 - RNA, 27 nt, Artificial Sequence
  Description of Artificial Sequence: Synthetic oligonucleotide
gcgaucugaauaaaccucccuacuagc

SEQ ID NO: 111556 - RNA, 27 nt, Artificial Sequence
  Description of Artificial Sequence: Synthetic oligonucleotide
aucccagaacccugcugcagaaggcca

SEQ ID NO: 111557 - RNA, 27 nt, Artificial Sequence
  Description of Artificial Sequence: Synthetic oligonucleotide
cauaauuuccaauauguaccagaccuu

SEQ ID NO: 111558 - RNA, 27 nt, Artificial Sequence
  Description of Artificial Sequence: Synthetic oligonucleotide
cuagugcuuccaucggaaggacuaggu

SEQ ID NO: 111559 - RNA, 27 nt, Artificial Sequence
  Description of Artificial Sequence: Synthetic oligonucleotide
uccacauaaaaacaauauucacuggga

SEQ ID NO: 111560 - RNA, 27 nt, Artificial Sequence
  Description of Artificial Sequence: Synthetic oligonucleotide
ucuaccaauuccaacuugaauucauug

SEQ ID NO: 111561 - RNA, 27 nt, Artificial Sequence
  Description of Artificial Sequence: Synthetic oligonucleotide
ucuccaagucuaaaucuguguccugag

SEQ ID NO: 111562 - RNA, 27 nt, Artificial Sequence
  Description of Artificial Sequence: Synthetic oligonucleotide
uggaauacuguaacugugcuuugagga

SEQ ID NO: 111563 - RNA, 27 nt, Artificial Sequence
  Description of Artificial Sequence: Synthetic oligonucleotide
uuaauucaucagugguggcagugguag

SEQ ID NO: 111564 - RNA, 27 nt, Artificial Sequence
  Description of Artificial Sequence: Synthetic oligonucleotide
gugaugauguggcacuaguaguuucuu

SEQ ID NO: 111565 - RNA, 27 nt, Artificial Sequence
  Description of Artificial Sequence: Synthetic oligonucleotide
ucuguuuggugaggcuguccgacuuug

SEQ ID NO: 111566 - RNA, 27 nt, Artificial Sequence
  Description of Artificial Sequence: Synthetic oligonucleotide
ccaucauguuccauuuuucgcuuucuc

SEQ ID NO: 111567 - RNA, 27 nt, Artificial Sequence
  Description of Artificial Sequence: Synthetic oligonucleotide
gcagucuacaugcuaaaucagagggua

SEQ ID NO: 111568 - RNA, 27 nt, Artificial Sequence
  Description of Artificial Sequence: Synthetic oligonucleotide
cauaaauagauccuuaaauagcucaaa

SEQ ID NO: 111569 - RNA, 27 nt, Artificial Sequence
  Description of Artificial Sequence: Synthetic oligonucleotide
ugauaauagugcuuuuucaccuuuuuc

SEQ ID NO: 111570 - RNA, 27 nt, Artificial Sequence
  Description of Artificial Sequence: Synthetic oligonucleotide
gcagaacugauaauagugcuuuuucac

SEQ ID NO: 111571 - RNA, 27 nt, Artificial Sequence
  Description of Artificial Sequence: Synthetic oligonucleotide
guagguuuaaucuuucuuuucagccau

SEQ ID NO: 111572 - RNA, 27 nt, Artificial Sequence
  Description of Artificial Sequence: Synthetic oligonucleotide
agaaggauuuuauuauaaggguuuaau

SEQ ID NO: 111573 - RNA, 27 nt, Artificial Sequence
  Description of Artificial Sequence: Synthetic oligonucleotide
gucuacagcauuggcuaauaguaugaa

SEQ ID NO: 111574 - RNA, 27 nt, Artificial Sequence
  Description of Artificial Sequence: Synthetic oligonucleotide
cuauuccuaucaaaaugcuucugucua

SEQ ID NO: 111575 - RNA, 27 nt, Artificial Sequence
  Description of Artificial Sequence: Synthetic oligonucleotide
ucagggccauuaucuuauuugcucuau

SEQ ID NO: 111576 - RNA, 27 nt, Artificial Sequence
  Description of Artificial Sequence: Synthetic oligonucleotide
ugcuugaggaagagaaaaauguugguc

SEQ ID NO: 111577 - RNA, 27 nt, Artificial Sequence
  Description of Artificial Sequence: Synthetic oligonucleotide
ugggcugaacuuuucucauacuuaaag

SEQ ID NO: 111578 - RNA, 27 nt, Artificial Sequence
  Description of Artificial Sequence: Synthetic oligonucleotide
gguucagcagccaucuuuauuccugcg

SEQ ID NO: 111579 - RNA, 27 nt, Artificial Sequence
  Description of Artificial Sequence: Synthetic oligonucleotide
ugaagagaacuuggucauucaaauuuc

SEQ ID NO: 111580 - RNA, 27 nt, Artificial Sequence
  Description of Artificial Sequence: Synthetic oligonucleotide
cucuaggcuggcuaucuuuauacauac

SEQ ID NO: 111581 - RNA, 27 nt, Artificial Sequence
  Description of Artificial Sequence: Synthetic oligonucleotide
acacuucacagagauaguuacagccau

SEQ ID NO: 111582 - RNA, 27 nt, Artificial Sequence
  Description of Artificial Sequence: Synthetic oligonucleotide
uugaaauuuucucacacuucacagaga

SEQ ID NO: 111583 - RNA, 27 nt, Artificial Sequence
  Description of Artificial Sequence: Synthetic oligonucleotide
ucaggaggauucauuuccuuaaaggaa

SEQ ID NO: 111584 - RNA, 27 nt, Artificial Sequence
  Description of Artificial Sequence: Synthetic oligonucleotide
auaugaugucacuuuuuguauccuuga

SEQ ID NO: 111585 - RNA, 27 nt, Artificial Sequence
  Description of Artificial Sequence: Synthetic oligonucleotide
uaugaugaagauucaaauugcaucuua

SEQ ID NO: 111586 - RNA, 27 nt, Artificial Sequence
  Description of Artificial Sequence: Synthetic oligonucleotide
uuaauagcuagucuucguuuugaacag

SEQ ID NO: 111587 - RNA, 27 nt, Artificial Sequence
  Description of Artificial Sequence: Synthetic oligonucleotide
auuuuuaguagagaugagguuucacca

SEQ ID NO: 111588 - RNA, 27 nt, Artificial Sequence
  Description of Artificial Sequence: Synthetic oligonucleotide
aggcgagauagagcuucucuuucguuc

SEQ ID NO: 111589 - RNA, 27 nt, Artificial Sequence
  Description of Artificial Sequence: Synthetic oligonucleotide
aacuggaccgaaggcgcuuguggagaa

SEQ ID NO: 111590 - RNA, 27 nt, Artificial Sequence
  Description of Artificial Sequence: Synthetic oligonucleotide
gcggcuacaucuuuggaaucuucuccu

SEQ ID NO: 111591 - RNA, 27 nt, Artificial Sequence
  Description of Artificial Sequence: Synthetic oligonucleotide
caagucuccucauugaauccagauugg

SEQ ID NO: 111592 - RNA, 27 nt, Artificial Sequence
  Description of Artificial Sequence: Synthetic oligonucleotide
uccucacuacucucaaaucuguucugg

SEQ ID NO: 111593 - RNA, 27 nt, Artificial Sequence
  Description of Artificial Sequence: Synthetic oligonucleotide
uuuguacucaucugcacagcucuggcu

SEQ ID NO: 111594 - RNA, 27 nt, Artificial Sequence
  Description of Artificial Sequence: Synthetic oligonucleotide
gcccauuaacaacaacaaucugaggug

SEQ ID NO: 111595 - RNA, 27 nt, Artificial Sequence
  Description of Artificial Sequence: Synthetic oligonucleotide
aauaaauuaaaaauaauuaaaauagug

SEQ ID NO: 111596 - RNA, 27 nt, Artificial Sequence
  Description of Artificial Sequence: Synthetic oligonucleotide
cauauuuaaauauuaauaaauuaaaaa

SEQ ID NO: 111597 - RNA, 27 nt, Artificial Sequence
  Description of Artificial Sequence: Synthetic oligonucleotide
gaaacaaaggauauucaaacugcauag

SEQ ID NO: 111598 - RNA, 27 nt, Artificial Sequence
  Description of Artificial Sequence: Synthetic oligonucleotide
caaacacuuagacgccagcagcauggg

SEQ ID NO: 111599 - RNA, 27 nt, Artificial Sequence
  Description of Artificial Sequence: Synthetic oligonucleotide
uuugucacaggugaaaugcacaucuga

SEQ ID NO: 111600 - RNA, 27 nt, Artificial Sequence
  Description of Artificial Sequence: Synthetic oligonucleotide
uaauucagccuggcacagguuuugauc

SEQ ID NO: 111601 - RNA, 27 nt, Artificial Sequence
  Description of Artificial Sequence: Synthetic oligonucleotide
auuguaagaaugacuacccacauucac

SEQ ID NO: 111602 - RNA, 27 nt, Artificial Sequence
  Description of Artificial Sequence: Synthetic oligonucleotide
caauuguaagaaugacuacccacauuc

SEQ ID NO: 111603 - RNA, 27 nt, Artificial Sequence
  Description of Artificial Sequence: Synthetic oligonucleotide
guacacucucugaugcucauuuucaua

SEQ ID NO: 111604 - RNA, 27 nt, Artificial Sequence
  Description of Artificial Sequence: Synthetic oligonucleotide
cugcugaguucuacaugaaaagcaaau

SEQ ID NO: 111605 - RNA, 27 nt, Artificial Sequence
  Description of Artificial Sequence: Synthetic oligonucleotide
uacugaaaauaaauauagaaauacaac

SEQ ID NO: 111606 - RNA, 27 nt, Artificial Sequence
  Description of Artificial Sequence: Synthetic oligonucleotide
uuccauuuaagaaacauuaaucaaaac

SEQ ID NO: 111607 - RNA, 27 nt, Artificial Sequence
  Description of Artificial Sequence: Synthetic oligonucleotide
acaauuuuaggcacuauacacguuguu

SEQ ID NO: 111608 - RNA, 27 nt, Artificial Sequence
  Description of Artificial Sequence: Synthetic oligonucleotide
ccagauguuaguagccaaggauauggu

SEQ ID NO: 111609 - RNA, 27 nt, Artificial Sequence
  Description of Artificial Sequence: Synthetic oligonucleotide
agcucacagucuccagauguuaguagc

SEQ ID NO: 111610 - RNA, 27 nt, Artificial Sequence
  Description of Artificial Sequence: Synthetic oligonucleotide
auuaauaaaaagcacacaacuuauggc

SEQ ID NO: 111611 - RNA, 27 nt, Artificial Sequence
  Description of Artificial Sequence: Synthetic oligonucleotide
aauguaagaagagccaaaaugaugcau

SEQ ID NO: 111612 - RNA, 27 nt, Artificial Sequence
  Description of Artificial Sequence: Synthetic oligonucleotide
acauuuuuacaaauguaagaagagcca

SEQ ID NO: 111613 - RNA, 27 nt, Artificial Sequence
  Description of Artificial Sequence: Synthetic oligonucleotide
aauaugaauuaagaugaccuaaucugu

SEQ ID NO: 111614 - RNA, 27 nt, Artificial Sequence
  Description of Artificial Sequence: Synthetic oligonucleotide
ucaugauuaguucuuucaauuccaucc

SEQ ID NO: 111615 - RNA, 27 nt, Artificial Sequence
  Description of Artificial Sequence: Synthetic oligonucleotide
cccaagagcagaaggaaugagugugca

SEQ ID NO: 111616 - RNA, 27 nt, Artificial Sequence
  Description of Artificial Sequence: Synthetic oligonucleotide
cucaaagcuacugguuaccucuacacc

SEQ ID NO: 111617 - RNA, 27 nt, Artificial Sequence
  Description of Artificial Sequence: Synthetic oligonucleotide
ugaaauauuacguggcaugugguuggg

SEQ ID NO: 111618 - RNA, 27 nt, Artificial Sequence
  Description of Artificial Sequence: Synthetic oligonucleotide
agugaagagaauaacuuguuuccgaag

SEQ ID NO: 111619 - RNA, 27 nt, Artificial Sequence
  Description of Artificial Sequence: Synthetic oligonucleotide
uuucuuagcauuaguuauugggaguga

SEQ ID NO: 111620 - RNA, 27 nt, Artificial Sequence
  Description of Artificial Sequence: Synthetic oligonucleotide
uugauuuucagcauuucuuagcauuag

SEQ ID NO: 111621 - RNA, 27 nt, Artificial Sequence
  Description of Artificial Sequence: Synthetic oligonucleotide
aaaguaaucauauuuagagaaagacag

SEQ ID NO: 111622 - RNA, 27 nt, Artificial Sequence
  Description of Artificial Sequence: Synthetic oligonucleotide
uguagaacaaaaugccugaaauucagc

SEQ ID NO: 111623 - RNA, 27 nt, Artificial Sequence
  Description of Artificial Sequence: Synthetic oligonucleotide
gagagucccgggugagagggaaucgcc

SEQ ID NO: 111624 - RNA, 27 nt, Artificial Sequence
  Description of Artificial Sequence: Synthetic oligonucleotide
cuuuacuuuaaagguucacuuuccuug

SEQ ID NO: 111625 - RNA, 27 nt, Artificial Sequence
  Description of Artificial Sequence: Synthetic oligonucleotide
ccaggcuuccagagcaugcagccuccu

SEQ ID NO: 111626 - RNA, 27 nt, Artificial Sequence
  Description of Artificial Sequence: Synthetic oligonucleotide
cucucuuuuguuuucuguucagagaaa

SEQ ID NO: 111627 - RNA, 27 nt, Artificial Sequence
  Description of Artificial Sequence: Synthetic oligonucleotide
cggcauaacugauuacagccaaguuca

SEQ ID NO: 111628 - RNA, 27 nt, Artificial Sequence
  Description of Artificial Sequence: Synthetic oligonucleotide
uggacuucuuuuaauuuuggcuucuuc

SEQ ID NO: 111629 - RNA, 27 nt, Artificial Sequence
  Description of Artificial Sequence: Synthetic oligonucleotide
uaaccucaccuggacuucuuuuaauuu

SEQ ID NO: 111630 - RNA, 27 nt, Artificial Sequence
  Description of Artificial Sequence: Synthetic oligonucleotide
guccucuucccgauaauccggauucag

SEQ ID NO: 111631 - RNA, 27 nt, Artificial Sequence
  Description of Artificial Sequence: Synthetic oligonucleotide
acaauacuugcuuugaugucacauuaa

SEQ ID NO: 111632 - RNA, 27 nt, Artificial Sequence
  Description of Artificial Sequence: Synthetic oligonucleotide
gagugcuacaauacuugcuuugauguc

SEQ ID NO: 111633 - RNA, 27 nt, Artificial Sequence
  Description of Artificial Sequence: Synthetic oligonucleotide
auuugugguuuuguuuucucucucucu

SEQ ID NO: 111634 - RNA, 27 nt, Artificial Sequence
  Description of Artificial Sequence: Synthetic oligonucleotide
uguaugggcuuaaauacuacagcgagg

SEQ ID NO: 111635 - RNA, 27 nt, Artificial Sequence
  Description of Artificial Sequence: Synthetic oligonucleotide
cuguaugggcuuaaauacuacagcgag

SEQ ID NO: 111636 - RNA, 27 nt, Artificial Sequence
  Description of Artificial Sequence: Synthetic oligonucleotide
ggaagguuucuguaugggcuuaaauac

SEQ ID NO: 111637 - RNA, 27 nt, Artificial Sequence
  Description of Artificial Sequence: Synthetic oligonucleotide
guagguauaccauguuuauuuuaauac

SEQ ID NO: 111638 - RNA, 27 nt, Artificial Sequence
  Description of Artificial Sequence: Synthetic oligonucleotide
uccgaaaacuggccgaucagaacagcc

SEQ ID NO: 111639 - RNA, 27 nt, Artificial Sequence
  Description of Artificial Sequence: Synthetic oligonucleotide
cccuguuccaaaguucaaauuauuugu

SEQ ID NO: 111640 - RNA, 27 nt, Artificial Sequence
  Description of Artificial Sequence: Synthetic oligonucleotide
acuggaaaguuaaauuaaggucgcaau

SEQ ID NO: 111641 - RNA, 27 nt, Artificial Sequence
  Description of Artificial Sequence: Synthetic oligonucleotide
caaaaccaaacuuuagcuuucucagcc

SEQ ID NO: 111642 - RNA, 27 nt, Artificial Sequence
  Description of Artificial Sequence: Synthetic oligonucleotide
uacagugggaaguagcaucuuuacuuu

SEQ ID NO: 111643 - RNA, 27 nt, Artificial Sequence
  Description of Artificial Sequence: Synthetic oligonucleotide
ucauaugguaucagcaauuaagcagua

SEQ ID NO: 111644 - RNA, 27 nt, Artificial Sequence
  Description of Artificial Sequence: Synthetic oligonucleotide
cagcccauguuucauucauaugguauc

SEQ ID NO: 111645 - RNA, 27 nt, Artificial Sequence
  Description of Artificial Sequence: Synthetic oligonucleotide
uaugaaaaaguuggauaagaaaguugg

SEQ ID NO: 111646 - RNA, 27 nt, Artificial Sequence
  Description of Artificial Sequence: Synthetic oligonucleotide
uccggccucaugaugucaugcaaggcu

SEQ ID NO: 111647 - RNA, 27 nt, Artificial Sequence
  Description of Artificial Sequence: Synthetic oligonucleotide
acaaaugcagucauauacaaauucagg

SEQ ID NO: 111648 - RNA, 27 nt, Artificial Sequence
  Description of Artificial Sequence: Synthetic oligonucleotide
gguaguaaacauucuacuaggauucuu

SEQ ID NO: 111649 - RNA, 27 nt, Artificial Sequence
  Description of Artificial Sequence: Synthetic oligonucleotide
uuucaucaaaaaauucuucccuuucug

SEQ ID NO: 111650 - RNA, 27 nt, Artificial Sequence
  Description of Artificial Sequence: Synthetic oligonucleotide
aaauucacacacuggcaugccgauagc

SEQ ID NO: 111651 - RNA, 27 nt, Artificial Sequence
  Description of Artificial Sequence: Synthetic oligonucleotide
acauacauugcucuacuaugaggugaa

SEQ ID NO: 111652 - RNA, 27 nt, Artificial Sequence
  Description of Artificial Sequence: Synthetic oligonucleotide
uauauaugugcuuuggcaauucuggug

SEQ ID NO: 111653 - RNA, 27 nt, Artificial Sequence
  Description of Artificial Sequence: Synthetic oligonucleotide
ggagaaacuauuacccagaucaccacu

SEQ ID NO: 111654 - RNA, 27 nt, Artificial Sequence
  Description of Artificial Sequence: Synthetic oligonucleotide
auuuggagaaacuauuacccagaucac

SEQ ID NO: 111655 - RNA, 27 nt, Artificial Sequence
  Description of Artificial Sequence: Synthetic oligonucleotide
uuucuaggaaguauucaucacauccac

SEQ ID NO: 111656 - RNA, 27 nt, Artificial Sequence
  Description of Artificial Sequence: Synthetic oligonucleotide
cauauaugguguagcuguggaaaugcg

SEQ ID NO: 111657 - RNA, 27 nt, Artificial Sequence
  Description of Artificial Sequence: Synthetic oligonucleotide
cuccauucauauaugguguagcugugg

SEQ ID NO: 111658 - RNA, 27 nt, Artificial Sequence
  Description of Artificial Sequence: Synthetic oligonucleotide
aucuucuucucguguaagaacugcagc

SEQ ID NO: 111659 - RNA, 27 nt, Artificial Sequence
  Description of Artificial Sequence: Synthetic oligonucleotide
ucccuguaaaugaucuucuucucgugu

SEQ ID NO: 111660 - RNA, 27 nt, Artificial Sequence
  Description of Artificial Sequence: Synthetic oligonucleotide
gucccuguaaaugaucuucuucucgug

SEQ ID NO: 111661 - RNA, 27 nt, Artificial Sequence
  Description of Artificial Sequence: Synthetic oligonucleotide
ucaggucccuguaaaugaucuucuucu

SEQ ID NO: 111662 - RNA, 27 nt, Artificial Sequence
  Description of Artificial Sequence: Synthetic oligonucleotide
gaugcagucaaacaccucuuccucugu

SEQ ID NO: 111663 - RNA, 27 nt, Artificial Sequence
  Description of Artificial Sequence: Synthetic oligonucleotide
cgaugcagucaaacaccucuuccucug

SEQ ID NO: 111664 - RNA, 27 nt, Artificial Sequence
  Description of Artificial Sequence: Synthetic oligonucleotide
cccugugaacucgcccucaaaguagcg

SEQ ID NO: 111665 - RNA, 27 nt, Artificial Sequence
  Description of Artificial Sequence: Synthetic oligonucleotide
ggacagaggugccaggagaugcccuca

SEQ ID NO: 111666 - RNA, 27 nt, Artificial Sequence
  Description of Artificial Sequence: Synthetic oligonucleotide
uuaaaaagacaaaccauaucacuccuu

SEQ ID NO: 111667 - RNA, 27 nt, Artificial Sequence
  Description of Artificial Sequence: Synthetic oligonucleotide
cuuaaaaagacaaaccauaucacuccu

SEQ ID NO: 111668 - RNA, 27 nt, Artificial Sequence
  Description of Artificial Sequence: Synthetic oligonucleotide
gacaaccuuuaggaucuuuacugcaac

SEQ ID NO: 111669 - RNA, 27 nt, Artificial Sequence
  Description of Artificial Sequence: Synthetic oligonucleotide
gucgacaaccuuuaggaucuuuacugc

SEQ ID NO: 111670 - RNA, 27 nt, Artificial Sequence
  Description of Artificial Sequence: Synthetic oligonucleotide
acaauugccagguuguccuuugucaug

SEQ ID NO: 111671 - RNA, 27 nt, Artificial Sequence
  Description of Artificial Sequence: Synthetic oligonucleotide
ccucgcaccacugggucacaauugcca

SEQ ID NO: 111672 - RNA, 27 nt, Artificial Sequence
  Description of Artificial Sequence: Synthetic oligonucleotide
auuucaugucucuauggaugauguucu

SEQ ID NO: 111673 - RNA, 27 nt, Artificial Sequence
  Description of Artificial Sequence: Synthetic oligonucleotide
uggagaaauauauuguuggauuucaug

SEQ ID NO: 111674 - RNA, 27 nt, Artificial Sequence
  Description of Artificial Sequence: Synthetic oligonucleotide
agccuucauggagaaauauauuguugg

SEQ ID NO: 111675 - RNA, 27 nt, Artificial Sequence
  Description of Artificial Sequence: Synthetic oligonucleotide
accacuccagcgugacuuuacuguugc

SEQ ID NO: 111676 - RNA, 27 nt, Artificial Sequence
  Description of Artificial Sequence: Synthetic oligonucleotide
ccucucuuccuuuacuuucuucacaca

SEQ ID NO: 111677 - RNA, 27 nt, Artificial Sequence
  Description of Artificial Sequence: Synthetic oligonucleotide
gcccgaugcaaggauggcucggaagcg

SEQ ID NO: 111678 - RNA, 27 nt, Artificial Sequence
  Description of Artificial Sequence: Synthetic oligonucleotide
cacaguaggauauucaaccuccauuuc

SEQ ID NO: 111679 - RNA, 27 nt, Artificial Sequence
  Description of Artificial Sequence: Synthetic oligonucleotide
uuacacaguaggauauucaaccuccau

SEQ ID NO: 111680 - RNA, 27 nt, Artificial Sequence
  Description of Artificial Sequence: Synthetic oligonucleotide
uacacuacaagggaaaacucaaaaucu

SEQ ID NO: 111681 - RNA, 27 nt, Artificial Sequence
  Description of Artificial Sequence: Synthetic oligonucleotide
caaucaacaaagaacaaacaggauaaa

SEQ ID NO: 111682 - RNA, 27 nt, Artificial Sequence
  Description of Artificial Sequence: Synthetic oligonucleotide
uuucaaucaacaaagaacaaacaggau

SEQ ID NO: 111683 - RNA, 27 nt, Artificial Sequence
  Description of Artificial Sequence: Synthetic oligonucleotide
auggaagaaaaagaaggcuguagagaa

SEQ ID NO: 111684 - RNA, 27 nt, Artificial Sequence
  Description of Artificial Sequence: Synthetic oligonucleotide
uagaaggaagauuagcuauggaagaaa

SEQ ID NO: 111685 - RNA, 27 nt, Artificial Sequence
  Description of Artificial Sequence: Synthetic oligonucleotide
augaagcauucaacaggaagauuauuu

SEQ ID NO: 111686 - RNA, 27 nt, Artificial Sequence
  Description of Artificial Sequence: Synthetic oligonucleotide
caugaagcauucaacaggaagauuauu

SEQ ID NO: 111687 - RNA, 27 nt, Artificial Sequence
  Description of Artificial Sequence: Synthetic oligonucleotide
ucaaaguagaauucaagucaugaagca

SEQ ID NO: 111688 - RNA, 27 nt, Artificial Sequence
  Description of Artificial Sequence: Synthetic oligonucleotide
gucuguaguugcuucucucccucuuag

SEQ ID NO: 111689 - RNA, 27 nt, Artificial Sequence
  Description of Artificial Sequence: Synthetic oligonucleotide
guugaccuuggucugguaggagacggc

SEQ ID NO: 111690 - RNA, 27 nt, Artificial Sequence
  Description of Artificial Sequence: Synthetic oligonucleotide
gucgagauagucgggccgauugaucuc

SEQ ID NO: 111691 - RNA, 27 nt, Artificial Sequence
  Description of Artificial Sequence: Synthetic oligonucleotide
guuugggaagguuggauguucguccuc

SEQ ID NO: 111692 - RNA, 27 nt, Artificial Sequence
  Description of Artificial Sequence: Synthetic oligonucleotide
aguucuaagcuuggguuccgacccuaa

SEQ ID NO: 111693 - RNA, 27 nt, Artificial Sequence
  Description of Artificial Sequence: Synthetic oligonucleotide
uuaaaguucuaagcuuggguuccgacc

SEQ ID NO: 111694 - RNA, 27 nt, Artificial Sequence
  Description of Artificial Sequence: Synthetic oligonucleotide
guugcuuaaaguucuaagcuuggguuc

SEQ ID NO: 111695 - RNA, 27 nt, Artificial Sequence
  Description of Artificial Sequence: Synthetic oligonucleotide
gugguggucuuguugcuuaaaguucua

SEQ ID NO: 111696 - RNA, 27 nt, Artificial Sequence
  Description of Artificial Sequence: Synthetic oligonucleotide
acuuuauuucucgccacugaauaguag

SEQ ID NO: 111697 - RNA, 27 nt, Artificial Sequence
  Description of Artificial Sequence: Synthetic oligonucleotide
aacuuuauuucucgccacugaauagua

SEQ ID NO: 111698 - RNA, 27 nt, Artificial Sequence
  Description of Artificial Sequence: Synthetic oligonucleotide
ggaucauuuccuguuaucuguguuugu

SEQ ID NO: 111699 - RNA, 27 nt, Artificial Sequence
  Description of Artificial Sequence: Synthetic oligonucleotide
guuucauuucuucucuuuucuuaaggc

SEQ ID NO: 111700 - RNA, 27 nt, Artificial Sequence
  Description of Artificial Sequence: Synthetic oligonucleotide
ggaggauggaaacacacuccuucaguu

SEQ ID NO: 111701 - RNA, 27 nt, Artificial Sequence
  Description of Artificial Sequence: Synthetic oligonucleotide
ucaaagauuuucagucccgcggugaca

SEQ ID NO: 111702 - RNA, 27 nt, Artificial Sequence
  Description of Artificial Sequence: Synthetic oligonucleotide
ccugaacggcacgcuuauuucugcugu

SEQ ID NO: 111703 - RNA, 27 nt, Artificial Sequence
  Description of Artificial Sequence: Synthetic oligonucleotide
cuucuggacccugaacggcacgcuuau

SEQ ID NO: 111704 - RNA, 27 nt, Artificial Sequence
  Description of Artificial Sequence: Synthetic oligonucleotide
caagcagucuugagugacuguuucuuc

SEQ ID NO: 111705 - RNA, 27 nt, Artificial Sequence
  Description of Artificial Sequence: Synthetic oligonucleotide
ccaaagacauggaccuucuuccucuga

SEQ ID NO: 111706 - RNA, 27 nt, Artificial Sequence
  Description of Artificial Sequence: Synthetic oligonucleotide
guguuucaggcauauuuugaauacauc

SEQ ID NO: 111707 - RNA, 27 nt, Artificial Sequence
  Description of Artificial Sequence: Synthetic oligonucleotide
gagguacagagaaagggaggaaaauag

SEQ ID NO: 111708 - RNA, 27 nt, Artificial Sequence
  Description of Artificial Sequence: Synthetic oligonucleotide
ucuugucuugcucuaucuuucuuuggu

SEQ ID NO: 111709 - RNA, 27 nt, Artificial Sequence
  Description of Artificial Sequence: Synthetic oligonucleotide
uuucuugucuugcucuaucuuucuuug

SEQ ID NO: 111710 - RNA, 27 nt, Artificial Sequence
  Description of Artificial Sequence: Synthetic oligonucleotide
ggaucuuguacaaacaaaugcuuucuc

SEQ ID NO: 111711 - RNA, 27 nt, Artificial Sequence
  Description of Artificial Sequence: Synthetic oligonucleotide
ucugcaaguacguucguuuaacucaag

SEQ ID NO: 111712 - RNA, 27 nt, Artificial Sequence
  Description of Artificial Sequence: Synthetic oligonucleotide
ucuguaucgaucguucuguaucagucu

SEQ ID NO: 111713 - RNA, 27 nt, Artificial Sequence
  Description of Artificial Sequence: Synthetic oligonucleotide
auuuauuuuuauauauauauaauauau

SEQ ID NO: 111714 - RNA, 27 nt, Artificial Sequence
  Description of Artificial Sequence: Synthetic oligonucleotide
auauuuauuuuuauauauauauaauau

SEQ ID NO: 111715 - RNA, 27 nt, Artificial Sequence
  Description of Artificial Sequence: Synthetic oligonucleotide
cacagcagucaaauacauccagugaag

SEQ ID NO: 111716 - RNA, 27 nt, Artificial Sequence
  Description of Artificial Sequence: Synthetic oligonucleotide
gucucucaucuccuccucuucccuguc

SEQ ID NO: 111717 - RNA, 27 nt, Artificial Sequence
  Description of Artificial Sequence: Synthetic oligonucleotide
ccaagugggacaaaaaaaagaucaugc

SEQ ID NO: 111718 - RNA, 14 nt, Artificial Sequence
  Description of Artificial Sequence: Synthetic oligonucleotide
guauuuugaugagg

SEQ ID NO: 111719 - RNA, 12 nt, Artificial Sequence
  Description of Artificial Sequence: Synthetic oligonucleotide
ggcccagaugau

SEQ ID NO: 111720 - RNA, 14 nt, Artificial Sequence
  Description of Artificial Sequence: Synthetic oligonucleotide
gggaagaaaacuau

SEQ ID NO: 111721 - RNA, 15 nt, Artificial Sequence
  Description of Artificial Sequence: Synthetic oligonucleotide
guuuuaauuuauuuc

SEQ ID NO: 111722 - RNA, 12 nt, Artificial Sequence
  Description of Artificial Sequence: Synthetic oligonucleotide
acguagggaaau

SEQ ID NO: 111723 - RNA, 12 nt, Artificial Sequence
  Description of Artificial Sequence: Synthetic oligonucleotide
ccaggguuuacc

SEQ ID NO: 111724 - RNA, 11 nt, Artificial Sequence
  Description of Artificial Sequence: Synthetic oligonucleotide
agcaagguuua

SEQ ID NO: 111725 - RNA, 12 nt, Artificial Sequence
  Description of Artificial Sequence: Synthetic oligonucleotide
uguauuauguug

SEQ ID NO: 111726 - RNA, 15 nt, Artificial Sequence
  Description of Artificial Sequence: Synthetic oligonucleotide
uuuuaaucuuuguga

SEQ ID NO: 111727 - RNA, 14 nt, Artificial Sequence
  Description of Artificial Sequence: Synthetic oligonucleotide
uuaaucuuugugac

SEQ ID NO: 111728 - RNA, 13 nt, Artificial Sequence
  Description of Artificial Sequence: Synthetic oligonucleotide
gcugcuuaugucu

SEQ ID NO: 111729 - RNA, 14 nt, Artificial Sequence
  Description of Artificial Sequence: Synthetic oligonucleotide
aaguguuucagaag

SEQ ID NO: 111730 - RNA, 13 nt, Artificial Sequence
  Description of Artificial Sequence: Synthetic oligonucleotide
gaccaucaauaag

SEQ ID NO: 111731 - RNA, 13 nt, Artificial Sequence
  Description of Artificial Sequence: Synthetic oligonucleotide
ccaucaauaagga

SEQ ID NO: 111732 - RNA, 14 nt, Artificial Sequence
  Description of Artificial Sequence: Synthetic oligonucleotide
ucaauaaggaagaa

SEQ ID NO: 111733 - RNA, 14 nt, Artificial Sequence
  Description of Artificial Sequence: Synthetic oligonucleotide
aauaaggaagaagc

SEQ ID NO: 111734 - RNA, 13 nt, Artificial Sequence
  Description of Artificial Sequence: Synthetic oligonucleotide
aggaagaagcccu

SEQ ID NO: 111735 - RNA, 13 nt, Artificial Sequence
  Description of Artificial Sequence: Synthetic oligonucleotide
gcauaacuaaagg

SEQ ID NO: 111736 - RNA, 14 nt, Artificial Sequence
  Description of Artificial Sequence: Synthetic oligonucleotide
cauaacuaaaggug

SEQ ID NO: 111737 - RNA, 12 nt, Artificial Sequence
  Description of Artificial Sequence: Synthetic oligonucleotide
cuacaucacgcc

SEQ ID NO: 111738 - RNA, 12 nt, Artificial Sequence
  Description of Artificial Sequence: Synthetic oligonucleotide
acuggauuuaag

SEQ ID NO: 111739 - RNA, 12 nt, Artificial Sequence
  Description of Artificial Sequence: Synthetic oligonucleotide
cuggauuuaagc

SEQ ID NO: 111740 - RNA, 13 nt, Artificial Sequence
  Description of Artificial Sequence: Synthetic oligonucleotide
gauuuaagcagag

SEQ ID NO: 111741 - RNA, 13 nt, Artificial Sequence
  Description of Artificial Sequence: Synthetic oligonucleotide
auuuaagcagagu

SEQ ID NO: 111742 - RNA, 13 nt, Artificial Sequence
  Description of Artificial Sequence: Synthetic oligonucleotide
uuaagcagaguuc

SEQ ID NO: 111743 - RNA, 13 nt, Artificial Sequence
  Description of Artificial Sequence: Synthetic oligonucleotide
uaagcagaguuca

SEQ ID NO: 111744 - RNA, 14 nt, Artificial Sequence
  Description of Artificial Sequence: Synthetic oligonucleotide
agcagaguucaaaa

SEQ ID NO: 111745 - RNA, 12 nt, Artificial Sequence
  Description of Artificial Sequence: Synthetic oligonucleotide
cucagggucuga

SEQ ID NO: 111746 - RNA, 13 nt, Artificial Sequence
  Description of Artificial Sequence: Synthetic oligonucleotide
caagcaacuacau

SEQ ID NO: 111747 - RNA, 12 nt, Artificial Sequence
  Description of Artificial Sequence: Synthetic oligonucleotide
aucaauggcagc

SEQ ID NO: 111748 - RNA, 11 nt, Artificial Sequence
  Description of Artificial Sequence: Synthetic oligonucleotide
uuccagcccac

SEQ ID NO: 111749 - RNA, 12 nt, Artificial Sequence
  Description of Artificial Sequence: Synthetic oligonucleotide
cagcugagaaug

SEQ ID NO: 111750 - RNA, 13 nt, Artificial Sequence
  Description of Artificial Sequence: Synthetic oligonucleotide
aacguaucuccua

SEQ ID NO: 111751 - RNA, 14 nt, Artificial Sequence
  Description of Artificial Sequence: Synthetic oligonucleotide
ccuaaaauaauuuc

SEQ ID NO: 111752 - RNA, 13 nt, Artificial Sequence
  Description of Artificial Sequence: Synthetic oligonucleotide
uggaagauucagc

SEQ ID NO: 111753 - RNA, 12 nt, Artificial Sequence
  Description of Artificial Sequence: Synthetic oligonucleotide
uuaaacucuccu

SEQ ID NO: 111754 - RNA, 12 nt, Artificial Sequence
  Description of Artificial Sequence: Synthetic oligonucleotide
cagccuacaguu

SEQ ID NO: 111755 - RNA, 13 nt, Artificial Sequence
  Description of Artificial Sequence: Synthetic oligonucleotide
guuauguucaguc

SEQ ID NO: 111756 - RNA, 13 nt, Artificial Sequence
  Description of Artificial Sequence: Synthetic oligonucleotide
cacauacaaaaug

SEQ ID NO: 111757 - RNA, 9 nt, Artificial Sequence
  Description of Artificial Sequence: Synthetic oligonucleotide
uccuuuugc

SEQ ID NO: 111758 - RNA, 12 nt, Artificial Sequence
  Description of Artificial Sequence: Synthetic oligonucleotide
ugaccugugaag

SEQ ID NO: 111759 - RNA, 12 nt, Artificial Sequence
  Description of Artificial Sequence: Synthetic oligonucleotide
cuaucucacaca

SEQ ID NO: 111760 - RNA, 13 nt, Artificial Sequence
  Description of Artificial Sequence: Synthetic oligonucleotide
uguccucaauugu

SEQ ID NO: 111761 - RNA, 12 nt, Artificial Sequence
  Description of Artificial Sequence: Synthetic oligonucleotide
aaaccguagcug

SEQ ID NO: 111762 - RNA, 12 nt, Artificial Sequence
  Description of Artificial Sequence: Synthetic oligonucleotide
uagcuggcaagc

SEQ ID NO: 111763 - RNA, 14 nt, Artificial Sequence
  Description of Artificial Sequence: Synthetic oligonucleotide
uuguaugguuaaaa

SEQ ID NO: 111764 - RNA, 14 nt, Artificial Sequence
  Description of Artificial Sequence: Synthetic oligonucleotide
ugguuaaaagaugg

SEQ ID NO: 111765 - RNA, 13 nt, Artificial Sequence
  Description of Artificial Sequence: Synthetic oligonucleotide
cagggaauuauac

SEQ ID NO: 111766 - RNA, 12 nt, Artificial Sequence
  Description of Artificial Sequence: Synthetic oligonucleotide
acaaucuugcug

SEQ ID NO: 111767 - RNA, 13 nt, Artificial Sequence
  Description of Artificial Sequence: Synthetic oligonucleotide
ccaauaaugaaga

SEQ ID NO: 111768 - RNA, 13 nt, Artificial Sequence
  Description of Artificial Sequence: Synthetic oligonucleotide
acuuuggauguuc

SEQ ID NO: 111769 - RNA, 12 nt, Artificial Sequence
  Description of Artificial Sequence: Synthetic oligonucleotide
aaugcuuccacu

SEQ ID NO: 111770 - RNA, 11 nt, Artificial Sequence
  Description of Artificial Sequence: Synthetic oligonucleotide
gagaaaguuug

SEQ ID NO: 111771 - RNA, 11 nt, Artificial Sequence
  Description of Artificial Sequence: Synthetic oligonucleotide
aaagaacuacu

SEQ ID NO: 111772 - RNA, 12 nt, Artificial Sequence
  Description of Artificial Sequence: Synthetic oligonucleotide
uuagaaauacgg

SEQ ID NO: 111773 - RNA, 12 nt, Artificial Sequence
  Description of Artificial Sequence: Synthetic oligonucleotide
aacauggguaca

SEQ ID NO: 111774 - RNA, 14 nt, Artificial Sequence
  Description of Artificial Sequence: Synthetic oligonucleotide
aaagacacagaaga

SEQ ID NO: 111775 - RNA, 11 nt, Artificial Sequence
  Description of Artificial Sequence: Synthetic oligonucleotide
uaguagggagg

SEQ ID NO: 111776 - RNA, 12 nt, Artificial Sequence
  Description of Artificial Sequence: Synthetic oligonucleotide
gccuucugcagc

SEQ ID NO: 111777 - RNA, 10 nt, Artificial Sequence
  Description of Artificial Sequence: Synthetic oligonucleotide
ggucugguac

SEQ ID NO: 111778 - RNA, 12 nt, Artificial Sequence
  Description of Artificial Sequence: Synthetic oligonucleotide
cuaguccuuccg

SEQ ID NO: 111779 - RNA, 12 nt, Artificial Sequence
  Description of Artificial Sequence: Synthetic oligonucleotide
ccagugaauauu

SEQ ID NO: 111780 - RNA, 13 nt, Artificial Sequence
  Description of Artificial Sequence: Synthetic oligonucleotide
augaauucaaguu

SEQ ID NO: 111781 - RNA, 12 nt, Artificial Sequence
  Description of Artificial Sequence: Synthetic oligonucleotide
caggacacagau

SEQ ID NO: 111782 - RNA, 12 nt, Artificial Sequence
  Description of Artificial Sequence: Synthetic oligonucleotide
cucaaagcacag

SEQ ID NO: 111783 - RNA, 10 nt, Artificial Sequence
  Description of Artificial Sequence: Synthetic oligonucleotide
accacugcca

SEQ ID NO: 111784 - RNA, 13 nt, Artificial Sequence
  Description of Artificial Sequence: Synthetic oligonucleotide
gaaacuacuagug

SEQ ID NO: 111785 - RNA, 12 nt, Artificial Sequence
  Description of Artificial Sequence: Synthetic oligonucleotide
aagucggacagc

SEQ ID NO: 111786 - RNA, 13 nt, Artificial Sequence
  Description of Artificial Sequence: Synthetic oligonucleotide
gaaagcgaaaaau

SEQ ID NO: 111787 - RNA, 13 nt, Artificial Sequence
  Description of Artificial Sequence: Synthetic oligonucleotide
cccucugauuuag

SEQ ID NO: 111788 - RNA, 12 nt, Artificial Sequence
  Description of Artificial Sequence: Synthetic oligonucleotide
ugagcuauuuaa

SEQ ID NO: 111789 - RNA, 13 nt, Artificial Sequence
  Description of Artificial Sequence: Synthetic oligonucleotide
aaaaggugaaaaa

SEQ ID NO: 111790 - RNA, 14 nt, Artificial Sequence
  Description of Artificial Sequence: Synthetic oligonucleotide
gaaaaagcacuauu

SEQ ID NO: 111791 - RNA, 12 nt, Artificial Sequence
  Description of Artificial Sequence: Synthetic oligonucleotide
ggcugaaaagaa

SEQ ID NO: 111792 - RNA, 12 nt, Artificial Sequence
  Description of Artificial Sequence: Synthetic oligonucleotide
uaaacccuuaua

SEQ ID NO: 111793 - RNA, 13 nt, Artificial Sequence
  Description of Artificial Sequence: Synthetic oligonucleotide
cauacuauuagcc

SEQ ID NO: 111794 - RNA, 12 nt, Artificial Sequence
  Description of Artificial Sequence: Synthetic oligonucleotide
gacagaagcauu

SEQ ID NO: 111795 - RNA, 14 nt, Artificial Sequence
  Description of Artificial Sequence: Synthetic oligonucleotide
agagcaaauaagau

SEQ ID NO: 111796 - RNA, 14 nt, Artificial Sequence
  Description of Artificial Sequence: Synthetic oligonucleotide
ccaacauuuuucuc

SEQ ID NO: 111797 - RNA, 15 nt, Artificial Sequence
  Description of Artificial Sequence: Synthetic oligonucleotide
uuaaguaugagaaaa

SEQ ID NO: 111798 - RNA, 14 nt, Artificial Sequence
  Description of Artificial Sequence: Synthetic oligonucleotide
caggaauaaagaug

SEQ ID NO: 111799 - RNA, 13 nt, Artificial Sequence
  Description of Artificial Sequence: Synthetic oligonucleotide
aauuugaaugacc

SEQ ID NO: 111800 - RNA, 14 nt, Artificial Sequence
  Description of Artificial Sequence: Synthetic oligonucleotide
auguauaaagauag

SEQ ID NO: 111801 - RNA, 12 nt, Artificial Sequence
  Description of Artificial Sequence: Synthetic oligonucleotide
ggcuguaacuau

SEQ ID NO: 111802 - RNA, 11 nt, Artificial Sequence
  Description of Artificial Sequence: Synthetic oligonucleotide
ucugugaagug

SEQ ID NO: 111803 - RNA, 14 nt, Artificial Sequence
  Description of Artificial Sequence: Synthetic oligonucleotide
ccuuuaaggaaaug

SEQ ID NO: 111804 - RNA, 13 nt, Artificial Sequence
  Description of Artificial Sequence: Synthetic oligonucleotide
aaggauacaaaaa

SEQ ID NO: 111805 - RNA, 12 nt, Artificial Sequence
  Description of Artificial Sequence: Synthetic oligonucleotide
agaugcaauuug

SEQ ID NO: 111806 - RNA, 12 nt, Artificial Sequence
  Description of Artificial Sequence: Synthetic oligonucleotide
guucaaaacgaa

SEQ ID NO: 111807 - RNA, 11 nt, Artificial Sequence
  Description of Artificial Sequence: Synthetic oligonucleotide
gugaaaccuca

SEQ ID NO: 111808 - RNA, 13 nt, Artificial Sequence
  Description of Artificial Sequence: Synthetic oligonucleotide
acgaaagagaagc

SEQ ID NO: 111809 - RNA, 12 nt, Artificial Sequence
  Description of Artificial Sequence: Synthetic oligonucleotide
cuccacaagcgc

SEQ ID NO: 111810 - RNA, 14 nt, Artificial Sequence
  Description of Artificial Sequence: Synthetic oligonucleotide
gagaagauuccaaa

SEQ ID NO: 111811 - RNA, 13 nt, Artificial Sequence
  Description of Artificial Sequence: Synthetic oligonucleotide
aaucuggauucaa

SEQ ID NO: 111812 - RNA, 13 nt, Artificial Sequence
  Description of Artificial Sequence: Synthetic oligonucleotide
agaacagauuuga

SEQ ID NO: 111813 - RNA, 11 nt, Artificial Sequence
  Description of Artificial Sequence: Synthetic oligonucleotide
ccagagcugug

SEQ ID NO: 111814 - RNA, 12 nt, Artificial Sequence
  Description of Artificial Sequence: Synthetic oligonucleotide
ccucagauuguu

SEQ ID NO: 111815 - RNA, 12 nt, Artificial Sequence
  Description of Artificial Sequence: Synthetic oligonucleotide
cuauuuuaauua

SEQ ID NO: 111816 - RNA, 13 nt, Artificial Sequence
  Description of Artificial Sequence: Synthetic oligonucleotide
uuuaauuuauuaa

SEQ ID NO: 111817 - RNA, 12 nt, Artificial Sequence
  Description of Artificial Sequence: Synthetic oligonucleotide
augcaguuugaa

SEQ ID NO: 111818 - RNA, 11 nt, Artificial Sequence
  Description of Artificial Sequence: Synthetic oligonucleotide
caugcugcugg

SEQ ID NO: 111819 - RNA, 13 nt, Artificial Sequence
  Description of Artificial Sequence: Synthetic oligonucleotide
agaugugcauuuc

SEQ ID NO: 111820 - RNA, 12 nt, Artificial Sequence
  Description of Artificial Sequence: Synthetic oligonucleotide
ucaaaaccugug

SEQ ID NO: 111821 - RNA, 11 nt, Artificial Sequence
  Description of Artificial Sequence: Synthetic oligonucleotide
gaaugugggua

SEQ ID NO: 111822 - RNA, 10 nt, Artificial Sequence
  Description of Artificial Sequence: Synthetic oligonucleotide
auguggguag

SEQ ID NO: 111823 - RNA, 13 nt, Artificial Sequence
  Description of Artificial Sequence: Synthetic oligonucleotide
ugaaaaugagcau

SEQ ID NO: 111824 - RNA, 13 nt, Artificial Sequence
  Description of Artificial Sequence: Synthetic oligonucleotide
uugcuuuucaugu

SEQ ID NO: 111825 - RNA, 12 nt, Artificial Sequence
  Description of Artificial Sequence: Synthetic oligonucleotide
uguauuucuaua

SEQ ID NO: 111826 - RNA, 13 nt, Artificial Sequence
  Description of Artificial Sequence: Synthetic oligonucleotide
uuugauuaauguu

SEQ ID NO: 111827 - RNA, 12 nt, Artificial Sequence
  Description of Artificial Sequence: Synthetic oligonucleotide
caacguguauag

SEQ ID NO: 111828 - RNA, 12 nt, Artificial Sequence
  Description of Artificial Sequence: Synthetic oligonucleotide
cauauccuuggc

SEQ ID NO: 111829 - RNA, 13 nt, Artificial Sequence
  Description of Artificial Sequence: Synthetic oligonucleotide
uacuaacaucugg

SEQ ID NO: 111830 - RNA, 11 nt, Artificial Sequence
  Description of Artificial Sequence: Synthetic oligonucleotide
cauaaguugug

SEQ ID NO: 111831 - RNA, 12 nt, Artificial Sequence
  Description of Artificial Sequence: Synthetic oligonucleotide
gcaucauuuugg

SEQ ID NO: 111832 - RNA, 10 nt, Artificial Sequence
  Description of Artificial Sequence: Synthetic oligonucleotide
gcucuucuua

SEQ ID NO: 111833 - RNA, 10 nt, Artificial Sequence
  Description of Artificial Sequence: Synthetic oligonucleotide
agauuagguc

SEQ ID NO: 111834 - RNA, 12 nt, Artificial Sequence
  Description of Artificial Sequence: Synthetic oligonucleotide
auggaauugaaa

SEQ ID NO: 111835 - RNA, 13 nt, Artificial Sequence
  Description of Artificial Sequence: Synthetic oligonucleotide
cacacucauuccu

SEQ ID NO: 111836 - RNA, 12 nt, Artificial Sequence
  Description of Artificial Sequence: Synthetic oligonucleotide
uguagagguaac

SEQ ID NO: 111837 - RNA, 11 nt, Artificial Sequence
  Description of Artificial Sequence: Synthetic oligonucleotide
caaccacaugc

SEQ ID NO: 111838 - RNA, 12 nt, Artificial Sequence
  Description of Artificial Sequence: Synthetic oligonucleotide
ucggaaacaagu

SEQ ID NO: 111839 - RNA, 11 nt, Artificial Sequence
  Description of Artificial Sequence: Synthetic oligonucleotide
acucccaauaa

SEQ ID NO: 111840 - RNA, 13 nt, Artificial Sequence
  Description of Artificial Sequence: Synthetic oligonucleotide
aaugcuaagaaau

SEQ ID NO: 111841 - RNA, 11 nt, Artificial Sequence
  Description of Artificial Sequence: Synthetic oligonucleotide
gucuuucucua

SEQ ID NO: 111842 - RNA, 11 nt, Artificial Sequence
  Description of Artificial Sequence: Synthetic oligonucleotide
ugaauuucagg

SEQ ID NO: 111843 - RNA, 13 nt, Artificial Sequence
  Description of Artificial Sequence: Synthetic oligonucleotide
cgauucccucuca

SEQ ID NO: 111844 - RNA, 11 nt, Artificial Sequence
  Description of Artificial Sequence: Synthetic oligonucleotide
aggaaagugaa

SEQ ID NO: 111845 - RNA, 12 nt, Artificial Sequence
  Description of Artificial Sequence: Synthetic oligonucleotide
gaggcugcaugc

SEQ ID NO: 111846 - RNA, 11 nt, Artificial Sequence
  Description of Artificial Sequence: Synthetic oligonucleotide
ucucugaacag

SEQ ID NO: 111847 - RNA, 12 nt, Artificial Sequence
  Description of Artificial Sequence: Synthetic oligonucleotide
aacuuggcugua

SEQ ID NO: 111848 - RNA, 12 nt, Artificial Sequence
  Description of Artificial Sequence: Synthetic oligonucleotide
agaagccaaaau

SEQ ID NO: 111849 - RNA, 14 nt, Artificial Sequence
  Description of Artificial Sequence: Synthetic oligonucleotide
auuaaaagaagucc

SEQ ID NO: 111850 - RNA, 14 nt, Artificial Sequence
  Description of Artificial Sequence: Synthetic oligonucleotide
gaauccggauuauc

SEQ ID NO: 111851 - RNA, 12 nt, Artificial Sequence
  Description of Artificial Sequence: Synthetic oligonucleotide
aaugugacauca

SEQ ID NO: 111852 - RNA, 13 nt, Artificial Sequence
  Description of Artificial Sequence: Synthetic oligonucleotide
caucaaagcaagu

SEQ ID NO: 111853 - RNA, 11 nt, Artificial Sequence
  Description of Artificial Sequence: Synthetic oligonucleotide
agagagagaaa

SEQ ID NO: 111854 - RNA, 13 nt, Artificial Sequence
  Description of Artificial Sequence: Synthetic oligonucleotide
ucgcuguaguauu

SEQ ID NO: 111855 - RNA, 14 nt, Artificial Sequence
  Description of Artificial Sequence: Synthetic oligonucleotide
cgcuguaguauuua

SEQ ID NO: 111856 - RNA, 13 nt, Artificial Sequence
  Description of Artificial Sequence: Synthetic oligonucleotide
auuuaagcccaua

SEQ ID NO: 111857 - RNA, 15 nt, Artificial Sequence
  Description of Artificial Sequence: Synthetic oligonucleotide
auuaaaauaaacaug

SEQ ID NO: 111858 - RNA, 12 nt, Artificial Sequence
  Description of Artificial Sequence: Synthetic oligonucleotide
cuguucugaucg

SEQ ID NO: 111859 - RNA, 16 nt, Artificial Sequence
  Description of Artificial Sequence: Synthetic oligonucleotide
aaauaauuugaacuuu

SEQ ID NO: 111860 - RNA, 12 nt, Artificial Sequence
  Description of Artificial Sequence: Synthetic oligonucleotide
ugcgaccuuaau

SEQ ID NO: 111861 - RNA, 11 nt, Artificial Sequence
  Description of Artificial Sequence: Synthetic oligonucleotide
cugagaaagcu

SEQ ID NO: 111862 - RNA, 13 nt, Artificial Sequence
  Description of Artificial Sequence: Synthetic oligonucleotide
aguaaagaugcua

SEQ ID NO: 111863 - RNA, 12 nt, Artificial Sequence
  Description of Artificial Sequence: Synthetic oligonucleotide
cugcuuaauugc

SEQ ID NO: 111864 - RNA, 14 nt, Artificial Sequence
  Description of Artificial Sequence: Synthetic oligonucleotide
uaccauaugaauga

SEQ ID NO: 111865 - RNA, 12 nt, Artificial Sequence
  Description of Artificial Sequence: Synthetic oligonucleotide
aacuuucuuauc

SEQ ID NO: 111866 - RNA, 13 nt, Artificial Sequence
  Description of Artificial Sequence: Synthetic oligonucleotide
ccuugcaugacau

SEQ ID NO: 111867 - RNA, 14 nt, Artificial Sequence
  Description of Artificial Sequence: Synthetic oligonucleotide
ugaauuuguauaug

SEQ ID NO: 111868 - RNA, 12 nt, Artificial Sequence
  Description of Artificial Sequence: Synthetic oligonucleotide
gaauccuaguag

SEQ ID NO: 111869 - RNA, 10 nt, Artificial Sequence
  Description of Artificial Sequence: Synthetic oligonucleotide
gaaagggaag

SEQ ID NO: 111870 - RNA, 11 nt, Artificial Sequence
  Description of Artificial Sequence: Synthetic oligonucleotide
uaucggcaugc

SEQ ID NO: 111871 - RNA, 12 nt, Artificial Sequence
  Description of Artificial Sequence: Synthetic oligonucleotide
caccucauagua

SEQ ID NO: 111872 - RNA, 11 nt, Artificial Sequence
  Description of Artificial Sequence: Synthetic oligonucleotide
ccagaauugcc

SEQ ID NO: 111873 - RNA, 11 nt, Artificial Sequence
  Description of Artificial Sequence: Synthetic oligonucleotide
uggugaucugg

SEQ ID NO: 111874 - RNA, 12 nt, Artificial Sequence
  Description of Artificial Sequence: Synthetic oligonucleotide
gaucuggguaau

SEQ ID NO: 111875 - RNA, 12 nt, Artificial Sequence
  Description of Artificial Sequence: Synthetic oligonucleotide
ggaugugaugaa

SEQ ID NO: 111876 - RNA, 12 nt, Artificial Sequence
  Description of Artificial Sequence: Synthetic oligonucleotide
cauuuccacagc

SEQ ID NO: 111877 - RNA, 11 nt, Artificial Sequence
  Description of Artificial Sequence: Synthetic oligonucleotide
acagcuacacc

SEQ ID NO: 111878 - RNA, 12 nt, Artificial Sequence
  Description of Artificial Sequence: Synthetic oligonucleotide
ugcaguucuuac

SEQ ID NO: 111879 - RNA, 12 nt, Artificial Sequence
  Description of Artificial Sequence: Synthetic oligonucleotide
acgagaagaaga

SEQ ID NO: 111880 - RNA, 12 nt, Artificial Sequence
  Description of Artificial Sequence: Synthetic oligonucleotide
cgagaagaagau

SEQ ID NO: 111881 - RNA, 15 nt, Artificial Sequence
  Description of Artificial Sequence: Synthetic oligonucleotide
aagaagaucauuuac

SEQ ID NO: 111882 - RNA, 11 nt, Artificial Sequence
  Description of Artificial Sequence: Synthetic oligonucleotide
agaggaagagg

SEQ ID NO: 111883 - RNA, 12 nt, Artificial Sequence
  Description of Artificial Sequence: Synthetic oligonucleotide
gaggaagaggug

SEQ ID NO: 111884 - RNA, 13 nt, Artificial Sequence
  Description of Artificial Sequence: Synthetic oligonucleotide
cuacuuugagggc

SEQ ID NO: 111885 - RNA, 12 nt, Artificial Sequence
  Description of Artificial Sequence: Synthetic oligonucleotide
agggcaucuccu

SEQ ID NO: 111886 - RNA, 10 nt, Artificial Sequence
  Description of Artificial Sequence: Synthetic oligonucleotide
ggagugauau

SEQ ID NO: 111887 - RNA, 11 nt, Artificial Sequence
  Description of Artificial Sequence: Synthetic oligonucleotide
gagugauaugg

SEQ ID NO: 111888 - RNA, 12 nt, Artificial Sequence
  Description of Artificial Sequence: Synthetic oligonucleotide
ugcaguaaagau

SEQ ID NO: 111889 - RNA, 13 nt, Artificial Sequence
  Description of Artificial Sequence: Synthetic oligonucleotide
aguaaagauccua

SEQ ID NO: 111890 - RNA, 12 nt, Artificial Sequence
  Description of Artificial Sequence: Synthetic oligonucleotide
ugacaaaggaca

SEQ ID NO: 111891 - RNA, 13 nt, Artificial Sequence
  Description of Artificial Sequence: Synthetic oligonucleotide
gcaauugugaccc

SEQ ID NO: 111892 - RNA, 12 nt, Artificial Sequence
  Description of Artificial Sequence: Synthetic oligonucleotide
aacaucauccau

SEQ ID NO: 111893 - RNA, 12 nt, Artificial Sequence
  Description of Artificial Sequence: Synthetic oligonucleotide
ugaaauccaaca

SEQ ID NO: 111894 - RNA, 15 nt, Artificial Sequence
  Description of Artificial Sequence: Synthetic oligonucleotide
aacaauauauuucuc

SEQ ID NO: 111895 - RNA, 14 nt, Artificial Sequence
  Description of Artificial Sequence: Synthetic oligonucleotide
aacaguaaagucac

SEQ ID NO: 111896 - RNA, 14 nt, Artificial Sequence
  Description of Artificial Sequence: Synthetic oligonucleotide
ugugaagaaaguaa

SEQ ID NO: 111897 - RNA, 13 nt, Artificial Sequence
  Description of Artificial Sequence: Synthetic oligonucleotide
cuuccgagccauc

SEQ ID NO: 111898 - RNA, 12 nt, Artificial Sequence
  Description of Artificial Sequence: Synthetic oligonucleotide
aauggagguuga

SEQ ID NO: 111899 - RNA, 12 nt, Artificial Sequence
  Description of Artificial Sequence: Synthetic oligonucleotide
ggagguugaaua

SEQ ID NO: 111900 - RNA, 13 nt, Artificial Sequence
  Description of Artificial Sequence: Synthetic oligonucleotide
auuuugaguuuuc

SEQ ID NO: 111901 - RNA, 12 nt, Artificial Sequence
  Description of Artificial Sequence: Synthetic oligonucleotide
uauccuguuugu

SEQ ID NO: 111902 - RNA, 11 nt, Artificial Sequence
  Description of Artificial Sequence: Synthetic oligonucleotide
ccuguuuguuc

SEQ ID NO: 111903 - RNA, 10 nt, Artificial Sequence
  Description of Artificial Sequence: Synthetic oligonucleotide
cucuacagcc

SEQ ID NO: 111904 - RNA, 12 nt, Artificial Sequence
  Description of Artificial Sequence: Synthetic oligonucleotide
ucuuccauagcu

SEQ ID NO: 111905 - RNA, 12 nt, Artificial Sequence
  Description of Artificial Sequence: Synthetic oligonucleotide
auaaucuuccug

SEQ ID NO: 111906 - RNA, 12 nt, Artificial Sequence
  Description of Artificial Sequence: Synthetic oligonucleotide
uaaucuuccugu

SEQ ID NO: 111907 - RNA, 12 nt, Artificial Sequence
  Description of Artificial Sequence: Synthetic oligonucleotide
cuucaugacuug

SEQ ID NO: 111908 - RNA, 12 nt, Artificial Sequence
  Description of Artificial Sequence: Synthetic oligonucleotide
aagagggagaga

SEQ ID NO: 111909 - RNA, 12 nt, Artificial Sequence
  Description of Artificial Sequence: Synthetic oligonucleotide
cgucuccuacca

SEQ ID NO: 111910 - RNA, 12 nt, Artificial Sequence
  Description of Artificial Sequence: Synthetic oligonucleotide
gaucaaucggcc

SEQ ID NO: 111911 - RNA, 12 nt, Artificial Sequence
  Description of Artificial Sequence: Synthetic oligonucleotide
ggacgaacaucc

SEQ ID NO: 111912 - RNA, 11 nt, Artificial Sequence
  Description of Artificial Sequence: Synthetic oligonucleotide
agggucggaac

SEQ ID NO: 111913 - RNA, 10 nt, Artificial Sequence
  Description of Artificial Sequence: Synthetic oligonucleotide
ucggaaccca

SEQ ID NO: 111914 - RNA, 11 nt, Artificial Sequence
  Description of Artificial Sequence: Synthetic oligonucleotide
acccaagcuua

SEQ ID NO: 111915 - RNA, 14 nt, Artificial Sequence
  Description of Artificial Sequence: Synthetic oligonucleotide
gaacuuuaagcaac

SEQ ID NO: 111916 - RNA, 11 nt, Artificial Sequence
  Description of Artificial Sequence: Synthetic oligonucleotide
acuauucagug

SEQ ID NO: 111917 - RNA, 11 nt, Artificial Sequence
  Description of Artificial Sequence: Synthetic oligonucleotide
cuauucagugg

SEQ ID NO: 111918 - RNA, 13 nt, Artificial Sequence
  Description of Artificial Sequence: Synthetic oligonucleotide
aaacacagauaac

SEQ ID NO: 111919 - RNA, 12 nt, Artificial Sequence
  Description of Artificial Sequence: Synthetic oligonucleotide
cuuaagaaaaga

SEQ ID NO: 111920 - RNA, 12 nt, Artificial Sequence
  Description of Artificial Sequence: Synthetic oligonucleotide
cugaaggagugu

SEQ ID NO: 111921 - RNA, 10 nt, Artificial Sequence
  Description of Artificial Sequence: Synthetic oligonucleotide
ucaccgcggg

SEQ ID NO: 111922 - RNA, 14 nt, Artificial Sequence
  Description of Artificial Sequence: Synthetic oligonucleotide
agcagaaauaagcg

SEQ ID NO: 111923 - RNA, 12 nt, Artificial Sequence
  Description of Artificial Sequence: Synthetic oligonucleotide
aagcgugccguu

SEQ ID NO: 111924 - RNA, 12 nt, Artificial Sequence
  Description of Artificial Sequence: Synthetic oligonucleotide
agaaacagucac

SEQ ID NO: 111925 - RNA, 12 nt, Artificial Sequence
  Description of Artificial Sequence: Synthetic oligonucleotide
agaggaagaagg

SEQ ID NO: 111926 - RNA, 14 nt, Artificial Sequence
  Description of Artificial Sequence: Synthetic oligonucleotide
uguauucaaaauau

SEQ ID NO: 111927 - RNA, 13 nt, Artificial Sequence
  Description of Artificial Sequence: Synthetic oligonucleotide
auuuuccucccuu

SEQ ID NO: 111928 - RNA, 13 nt, Artificial Sequence
  Description of Artificial Sequence: Synthetic oligonucleotide
caaagaaagauag

SEQ ID NO: 111929 - RNA, 12 nt, Artificial Sequence
  Description of Artificial Sequence: Synthetic oligonucleotide
aagaaagauaga

SEQ ID NO: 111930 - RNA, 13 nt, Artificial Sequence
  Description of Artificial Sequence: Synthetic oligonucleotide
gaaagcauuuguu

SEQ ID NO: 111931 - RNA, 13 nt, Artificial Sequence
  Description of Artificial Sequence: Synthetic oligonucleotide
ugaguuaaacgaa

SEQ ID NO: 111932 - RNA, 12 nt, Artificial Sequence
  Description of Artificial Sequence: Synthetic oligonucleotide
acugauacagaa

SEQ ID NO: 111933 - RNA, 12 nt, Artificial Sequence
  Description of Artificial Sequence: Synthetic oligonucleotide
auauuauauaua

SEQ ID NO: 111934 - RNA, 12 nt, Artificial Sequence
  Description of Artificial Sequence: Synthetic oligonucleotide
auuauauauaua

SEQ ID NO: 111935 - RNA, 12 nt, Artificial Sequence
  Description of Artificial Sequence: Synthetic oligonucleotide
ucacuggaugua

SEQ ID NO: 111936 - RNA, 12 nt, Artificial Sequence
  Description of Artificial Sequence: Synthetic oligonucleotide
cagggaagagga

SEQ ID NO: 111937 - RNA, 15 nt, Artificial Sequence
  Description of Artificial Sequence: Synthetic oligonucleotide
augaucuuuuuuuug

SEQ ID NO: 111938 - RNA, 11 nt, Artificial Sequence
  Description of Artificial Sequence: Synthetic oligonucleotide
aguucacggcc

SEQ ID NO: 111939 - RNA, 13 nt, Artificial Sequence
  Description of Artificial Sequence: Synthetic oligonucleotide
caccaucacacca

SEQ ID NO: 111940 - RNA, 11 nt, Artificial Sequence
  Description of Artificial Sequence: Synthetic oligonucleotide
ccugcggguuu

SEQ ID NO: 111941 - RNA, 10 nt, Artificial Sequence
  Description of Artificial Sequence: Synthetic oligonucleotide
auccaguuug

SEQ ID NO: 111942 - RNA, 13 nt, Artificial Sequence
  Description of Artificial Sequence: Synthetic oligonucleotide
guuaaggacuucu

SEQ ID NO: 111943 - RNA, 13 nt, Artificial Sequence
  Description of Artificial Sequence: Synthetic oligonucleotide
cagugggacagag

SEQ ID NO: 111944 - RNA, 14 nt, Artificial Sequence
  Description of Artificial Sequence: Synthetic oligonucleotide
aauuuguuauugug

SEQ ID NO: 111945 - RNA, 13 nt, Artificial Sequence
  Description of Artificial Sequence: Synthetic oligonucleotide
uucaaaugcauuu

SEQ ID NO: 111946 - RNA, 10 nt, Artificial Sequence
  Description of Artificial Sequence: Synthetic oligonucleotide
caggaaagcc

SEQ ID NO: 111947 - RNA, 11 nt, Artificial Sequence
  Description of Artificial Sequence: Synthetic oligonucleotide
aggaaagcccu

SEQ ID NO: 111948 - RNA, 12 nt, Artificial Sequence
  Description of Artificial Sequence: Synthetic oligonucleotide
cccagcauggcc

SEQ ID NO: 111949 - RNA, 11 nt, Artificial Sequence
  Description of Artificial Sequence: Synthetic oligonucleotide
cuucucccuga

SEQ ID NO: 111950 - RNA, 12 nt, Artificial Sequence
  Description of Artificial Sequence: Synthetic oligonucleotide
gaagaagcccuu

SEQ ID NO: 111951 - RNA, 12 nt, Artificial Sequence
  Description of Artificial Sequence: Synthetic oligonucleotide
agaagcccuuca

SEQ ID NO: 111952 - RNA, 11 nt, Artificial Sequence
  Description of Artificial Sequence: Synthetic oligonucleotide
gcccuucagcg

SEQ ID NO: 111953 - RNA, 11 nt, Artificial Sequence
  Description of Artificial Sequence: Synthetic oligonucleotide
ccuucagcggc

SEQ ID NO: 111954 - RNA, 12 nt, Artificial Sequence
  Description of Artificial Sequence: Synthetic oligonucleotide
ucagcggccagu

SEQ ID NO: 111955 - RNA, 12 nt, Artificial Sequence
  Description of Artificial Sequence: Synthetic oligonucleotide
ugaaaagcuccg

SEQ ID NO: 111956 - RNA, 11 nt, Artificial Sequence
  Description of Artificial Sequence: Synthetic oligonucleotide
aaaagcuccgg

SEQ ID NO: 111957 - RNA, 13 nt, Artificial Sequence
  Description of Artificial Sequence: Synthetic oligonucleotide
agucaacagucug

SEQ ID NO: 111958 - RNA, 13 nt, Artificial Sequence
  Description of Artificial Sequence: Synthetic oligonucleotide
cagaguucaaaag

SEQ ID NO: 111959 - RNA, 13 nt, Artificial Sequence
  Description of Artificial Sequence: Synthetic oligonucleotide
agaguucaaaagc

SEQ ID NO: 111960 - RNA, 12 nt, Artificial Sequence
  Description of Artificial Sequence: Synthetic oligonucleotide
uucaaaagcccu

SEQ ID NO: 111961 - RNA, 12 nt, Artificial Sequence
  Description of Artificial Sequence: Synthetic oligonucleotide
ucaaaagcccuu

SEQ ID NO: 111962 - RNA, 12 nt, Artificial Sequence
  Description of Artificial Sequence: Synthetic oligonucleotide
aaaagcccuuca

SEQ ID NO: 111963 - RNA, 12 nt, Artificial Sequence
  Description of Artificial Sequence: Synthetic oligonucleotide
aaagcccuucag

SEQ ID NO: 111964 - RNA, 13 nt, Artificial Sequence
  Description of Artificial Sequence: Synthetic oligonucleotide
gugaagccgcucg

SEQ ID NO: 111965 - RNA, 12 nt, Artificial Sequence
  Description of Artificial Sequence: Synthetic oligonucleotide
cacgccagucaa

SEQ ID NO: 111966 - RNA, 13 nt, Artificial Sequence
  Description of Artificial Sequence: Synthetic oligonucleotide
uucuuggugcgug

SEQ ID NO: 111967 - RNA, 14 nt, Artificial Sequence
  Description of Artificial Sequence: Synthetic oligonucleotide
auuggauucaucag

SEQ ID NO: 111968 - RNA, 13 nt, Artificial Sequence
  Description of Artificial Sequence: Synthetic oligonucleotide
uggaauaccuaag

SEQ ID NO: 111969 - RNA, 12 nt, Artificial Sequence
  Description of Artificial Sequence: Synthetic oligonucleotide
auuugaggcuca

SEQ ID NO: 111970 - RNA, 11 nt, Artificial Sequence
  Description of Artificial Sequence: Synthetic oligonucleotide
ucuacaauugg

SEQ ID NO: 111971 - RNA, 12 nt, Artificial Sequence
  Description of Artificial Sequence: Synthetic oligonucleotide
uaguuaggagcc

SEQ ID NO: 111972 - RNA, 13 nt, Artificial Sequence
  Description of Artificial Sequence: Synthetic oligonucleotide
agucaauauccac

SEQ ID NO: 111973 - RNA, 13 nt, Artificial Sequence
  Description of Artificial Sequence: Synthetic oligonucleotide
auguucagucaca

SEQ ID NO: 111974 - RNA, 12 nt, Artificial Sequence
  Description of Artificial Sequence: Synthetic oligonucleotide
acacacacauac

SEQ ID NO: 111975 - RNA, 12 nt, Artificial Sequence
  Description of Artificial Sequence: Synthetic oligonucleotide
uuccuuuugcuu

SEQ ID NO: 111976 - RNA, 16 nt, Artificial Sequence
  Description of Artificial Sequence: Synthetic oligonucleotide
uuuuaaaguaauuuuu

SEQ ID NO: 111977 - RNA, 13 nt, Artificial Sequence
  Description of Artificial Sequence: Synthetic oligonucleotide
caacagucaaugg

SEQ ID NO: 111978 - RNA, 13 nt, Artificial Sequence
  Description of Artificial Sequence: Synthetic oligonucleotide
ucgacaaaccaau

SEQ ID NO: 111979 - RNA, 12 nt, Artificial Sequence
  Description of Artificial Sequence: Synthetic oligonucleotide
acugcuaccacu

SEQ ID NO: 111980 - RNA, 13 nt, Artificial Sequence
  Description of Artificial Sequence: Synthetic oligonucleotide
gcaagcggucuua

SEQ ID NO: 111981 - RNA, 13 nt, Artificial Sequence
  Description of Artificial Sequence: Synthetic oligonucleotide
ggucuuaccggcu

SEQ ID NO: 111982 - RNA, 11 nt, Artificial Sequence
  Description of Artificial Sequence: Synthetic oligonucleotide
gauggguuacc

SEQ ID NO: 111983 - RNA, 11 nt, Artificial Sequence
  Description of Artificial Sequence: Synthetic oligonucleotide
guuaccugcga

SEQ ID NO: 111984 - RNA, 12 nt, Artificial Sequence
  Description of Artificial Sequence: Synthetic oligonucleotide
aaucuugcugag

SEQ ID NO: 111985 - RNA, 13 nt, Artificial Sequence
  Description of Artificial Sequence: Synthetic oligonucleotide
agcauaaaacagu

SEQ ID NO: 111986 - RNA, 12 nt, Artificial Sequence
  Description of Artificial Sequence: Synthetic oligonucleotide
guccuuuauccu

SEQ ID NO: 111987 - RNA, 12 nt, Artificial Sequence
  Description of Artificial Sequence: Synthetic oligonucleotide
caacgcaaguug

SEQ ID NO: 111988 - RNA, 13 nt, Artificial Sequence
  Description of Artificial Sequence: Synthetic oligonucleotide
aaacugaaaccau

SEQ ID NO: 111989 - RNA, 14 nt, Artificial Sequence
  Description of Artificial Sequence: Synthetic oligonucleotide
acuuuguuaaauau

SEQ ID NO: 111990 - RNA, 14 nt, Artificial Sequence
  Description of Artificial Sequence: Synthetic oligonucleotide
guauauuaaaaguu

SEQ ID NO: 111991 - RNA, 13 nt, Artificial Sequence
  Description of Artificial Sequence: Synthetic oligonucleotide
guuuugacuuaac

SEQ ID NO: 111992 - RNA, 13 nt, Artificial Sequence
  Description of Artificial Sequence: Synthetic oligonucleotide
gcaaacucagcac

SEQ ID NO: 111993 - RNA, 11 nt, Artificial Sequence
  Description of Artificial Sequence: Synthetic oligonucleotide
ugcugaccuca

SEQ ID NO: 111994 - RNA, 14 nt, Artificial Sequence
  Description of Artificial Sequence: Synthetic oligonucleotide
uuuauucagaucgc

SEQ ID NO: 111995 - RNA, 13 nt, Artificial Sequence
  Description of Artificial Sequence: Synthetic oligonucleotide
aggguucugggau

SEQ ID NO: 111996 - RNA, 15 nt, Artificial Sequence
  Description of Artificial Sequence: Synthetic oligonucleotide
auauuggaaauuaug

SEQ ID NO: 111997 - RNA, 13 nt, Artificial Sequence
  Description of Artificial Sequence: Synthetic oligonucleotide
auggaagcacuag

SEQ ID NO: 111998 - RNA, 13 nt, Artificial Sequence
  Description of Artificial Sequence: Synthetic oligonucleotide
guuuuuaugugga

SEQ ID NO: 111999 - RNA, 12 nt, Artificial Sequence
  Description of Artificial Sequence: Synthetic oligonucleotide
ggaauugguaga

SEQ ID NO: 112000 - RNA, 13 nt, Artificial Sequence
  Description of Artificial Sequence: Synthetic oligonucleotide
uuagacuuggaga

SEQ ID NO: 112001 - RNA, 13 nt, Artificial Sequence
  Description of Artificial Sequence: Synthetic oligonucleotide
uuacaguauucca

SEQ ID NO: 112002 - RNA, 15 nt, Artificial Sequence
  Description of Artificial Sequence: Synthetic oligonucleotide
ccacugaugaauuaa

SEQ ID NO: 112003 - RNA, 12 nt, Artificial Sequence
  Description of Artificial Sequence: Synthetic oligonucleotide
ccacaucaucac

SEQ ID NO: 112004 - RNA, 13 nt, Artificial Sequence
  Description of Artificial Sequence: Synthetic oligonucleotide
cucaccaaacaga

SEQ ID NO: 112005 - RNA, 12 nt, Artificial Sequence
  Description of Artificial Sequence: Synthetic oligonucleotide
ggaacaugaugg

SEQ ID NO: 112006 - RNA, 12 nt, Artificial Sequence
  Description of Artificial Sequence: Synthetic oligonucleotide
cauguagacugc

SEQ ID NO: 112007 - RNA, 13 nt, Artificial Sequence
  Description of Artificial Sequence: Synthetic oligonucleotide
ggaucuauuuaug

SEQ ID NO: 112008 - RNA, 12 nt, Artificial Sequence
  Description of Artificial Sequence: Synthetic oligonucleotide
gcacuauuauca

SEQ ID NO: 112009 - RNA, 11 nt, Artificial Sequence
  Description of Artificial Sequence: Synthetic oligonucleotide
aucaguucugc

SEQ ID NO: 112010 - RNA, 13 nt, Artificial Sequence
  Description of Artificial Sequence: Synthetic oligonucleotide
agauuaaaccuac

SEQ ID NO: 112011 - RNA, 13 nt, Artificial Sequence
  Description of Artificial Sequence: Synthetic oligonucleotide
auaaaauccuucu

SEQ ID NO: 112012 - RNA, 12 nt, Artificial Sequence
  Description of Artificial Sequence: Synthetic oligonucleotide
aaugcuguagac

SEQ ID NO: 112013 - RNA, 13 nt, Artificial Sequence
  Description of Artificial Sequence: Synthetic oligonucleotide
uugauaggaauag

SEQ ID NO: 112014 - RNA, 11 nt, Artificial Sequence
  Description of Artificial Sequence: Synthetic oligonucleotide
aauggcccuga

SEQ ID NO: 112015 - RNA, 11 nt, Artificial Sequence
  Description of Artificial Sequence: Synthetic oligonucleotide
uuccucaagca

SEQ ID NO: 112016 - RNA, 10 nt, Artificial Sequence
  Description of Artificial Sequence: Synthetic oligonucleotide
guucagccca

SEQ ID NO: 112017 - RNA, 11 nt, Artificial Sequence
  Description of Artificial Sequence: Synthetic oligonucleotide
gcugcugaacc

SEQ ID NO: 112018 - RNA, 12 nt, Artificial Sequence
  Description of Artificial Sequence: Synthetic oligonucleotide
aaguucucuuca

SEQ ID NO: 112019 - RNA, 11 nt, Artificial Sequence
  Description of Artificial Sequence: Synthetic oligonucleotide
ccagccuagag

SEQ ID NO: 112020 - RNA, 13 nt, Artificial Sequence
  Description of Artificial Sequence: Synthetic oligonucleotide
cucugugaagugu

SEQ ID NO: 112021 - RNA, 14 nt, Artificial Sequence
  Description of Artificial Sequence: Synthetic oligonucleotide
ugagaaaauuucaa

SEQ ID NO: 112022 - RNA, 11 nt, Artificial Sequence
  Description of Artificial Sequence: Synthetic oligonucleotide
aauccuccuga

SEQ ID NO: 112023 - RNA, 12 nt, Artificial Sequence
  Description of Artificial Sequence: Synthetic oligonucleotide
gugacaucauau

SEQ ID NO: 112024 - RNA, 13 nt, Artificial Sequence
  Description of Artificial Sequence: Synthetic oligonucleotide
aaucuucaucaua

SEQ ID NO: 112025 - RNA, 13 nt, Artificial Sequence
  Description of Artificial Sequence: Synthetic oligonucleotide
gacuagcuauuaa

SEQ ID NO: 112026 - RNA, 14 nt, Artificial Sequence
  Description of Artificial Sequence: Synthetic oligonucleotide
ucucuacuaaaaau

SEQ ID NO: 112027 - RNA, 12 nt, Artificial Sequence
  Description of Artificial Sequence: Synthetic oligonucleotide
ucuaucucgccu

SEQ ID NO: 112028 - RNA, 13 nt, Artificial Sequence
  Description of Artificial Sequence: Synthetic oligonucleotide
cuucgguccaguu

SEQ ID NO: 112029 - RNA, 11 nt, Artificial Sequence
  Description of Artificial Sequence: Synthetic oligonucleotide
gauguagccgc

SEQ ID NO: 112030 - RNA, 12 nt, Artificial Sequence
  Description of Artificial Sequence: Synthetic oligonucleotide
ugaggagacuug

SEQ ID NO: 112031 - RNA, 12 nt, Artificial Sequence
  Description of Artificial Sequence: Synthetic oligonucleotide
gaguagugagga

SEQ ID NO: 112032 - RNA, 14 nt, Artificial Sequence
  Description of Artificial Sequence: Synthetic oligonucleotide
cagaugaguacaaa

SEQ ID NO: 112033 - RNA, 13 nt, Artificial Sequence
  Description of Artificial Sequence: Synthetic oligonucleotide
guuguuaaugggc

SEQ ID NO: 112034 - RNA, 13 nt, Artificial Sequence
  Description of Artificial Sequence: Synthetic oligonucleotide
uuuuuaauuuauu

SEQ ID NO: 112035 - RNA, 12 nt, Artificial Sequence
  Description of Artificial Sequence: Synthetic oligonucleotide
uauuuaaauaug

SEQ ID NO: 112036 - RNA, 13 nt, Artificial Sequence
  Description of Artificial Sequence: Synthetic oligonucleotide
uauccuuuguuuc

SEQ ID NO: 112037 - RNA, 14 nt, Artificial Sequence
  Description of Artificial Sequence: Synthetic oligonucleotide
cgucuaaguguuug

SEQ ID NO: 112038 - RNA, 12 nt, Artificial Sequence
  Description of Artificial Sequence: Synthetic oligonucleotide
accugugacaaa

SEQ ID NO: 112039 - RNA, 13 nt, Artificial Sequence
  Description of Artificial Sequence: Synthetic oligonucleotide
ccaggcugaauua

SEQ ID NO: 112040 - RNA, 14 nt, Artificial Sequence
  Description of Artificial Sequence: Synthetic oligonucleotide
gucauucuuacaau

SEQ ID NO: 112041 - RNA, 15 nt, Artificial Sequence
  Description of Artificial Sequence: Synthetic oligonucleotide
ucauucuuacaauug

SEQ ID NO: 112042 - RNA, 12 nt, Artificial Sequence
  Description of Artificial Sequence: Synthetic oligonucleotide
cagagaguguac

SEQ ID NO: 112043 - RNA, 12 nt, Artificial Sequence
  Description of Artificial Sequence: Synthetic oligonucleotide
agaacucagcag

SEQ ID NO: 112044 - RNA, 13 nt, Artificial Sequence
  Description of Artificial Sequence: Synthetic oligonucleotide
uuuauuuucagua

SEQ ID NO: 112045 - RNA, 12 nt, Artificial Sequence
  Description of Artificial Sequence: Synthetic oligonucleotide
ucuuaaauggaa

SEQ ID NO: 112046 - RNA, 13 nt, Artificial Sequence
  Description of Artificial Sequence: Synthetic oligonucleotide
ugccuaaaauugu

SEQ ID NO: 112047 - RNA, 12 nt, Artificial Sequence
  Description of Artificial Sequence: Synthetic oligonucleotide
agacugugagcu

SEQ ID NO: 112048 - RNA, 14 nt, Artificial Sequence
  Description of Artificial Sequence: Synthetic oligonucleotide
ugcuuuuuauuaau

SEQ ID NO: 112049 - RNA, 13 nt, Artificial Sequence
  Description of Artificial Sequence: Synthetic oligonucleotide
cucuucuuacauu

SEQ ID NO: 112050 - RNA, 15 nt, Artificial Sequence
  Description of Artificial Sequence: Synthetic oligonucleotide
cauuuguaaaaaugu

SEQ ID NO: 112051 - RNA, 15 nt, Artificial Sequence
  Description of Artificial Sequence: Synthetic oligonucleotide
aucuuaauucauauu

SEQ ID NO: 112052 - RNA, 13 nt, Artificial Sequence
  Description of Artificial Sequence: Synthetic oligonucleotide
gaacuaaucauga

SEQ ID NO: 112053 - RNA, 12 nt, Artificial Sequence
  Description of Artificial Sequence: Synthetic oligonucleotide
ucugcucuuggg

SEQ ID NO: 112054 - RNA, 13 nt, Artificial Sequence
  Description of Artificial Sequence: Synthetic oligonucleotide
caguagcuuugag

SEQ ID NO: 112055 - RNA, 14 nt, Artificial Sequence
  Description of Artificial Sequence: Synthetic oligonucleotide
cacguaauauuuca

SEQ ID NO: 112056 - RNA, 13 nt, Artificial Sequence
  Description of Artificial Sequence: Synthetic oligonucleotide
uauucucuucacu

SEQ ID NO: 112057 - RNA, 14 nt, Artificial Sequence
  Description of Artificial Sequence: Synthetic oligonucleotide
cuaaugcuaagaaa

SEQ ID NO: 112058 - RNA, 12 nt, Artificial Sequence
  Description of Artificial Sequence: Synthetic oligonucleotide
gcugaaaaucaa

SEQ ID NO: 112059 - RNA, 14 nt, Artificial Sequence
  Description of Artificial Sequence: Synthetic oligonucleotide
aauaugauuacuuu

SEQ ID NO: 112060 - RNA, 14 nt, Artificial Sequence
  Description of Artificial Sequence: Synthetic oligonucleotide
cauuuuguucuaca

SEQ ID NO: 112061 - RNA, 12 nt, Artificial Sequence
  Description of Artificial Sequence: Synthetic oligonucleotide
cccgggacucuc

SEQ ID NO: 112062 - RNA, 14 nt, Artificial Sequence
  Description of Artificial Sequence: Synthetic oligonucleotide
ccuuuaaaguaaag

SEQ ID NO: 112063 - RNA, 13 nt, Artificial Sequence
  Description of Artificial Sequence: Synthetic oligonucleotide
ucuggaagccugg

SEQ ID NO: 112064 - RNA, 14 nt, Artificial Sequence
  Description of Artificial Sequence: Synthetic oligonucleotide
aaaacaaaagagag

SEQ ID NO: 112065 - RNA, 13 nt, Artificial Sequence
  Description of Artificial Sequence: Synthetic oligonucleotide
aucaguuaugccg

SEQ ID NO: 112066 - RNA, 13 nt, Artificial Sequence
  Description of Artificial Sequence: Synthetic oligonucleotide
uaaaagaagucca

SEQ ID NO: 112067 - RNA, 11 nt, Artificial Sequence
  Description of Artificial Sequence: Synthetic oligonucleotide
aggugagguua

SEQ ID NO: 112068 - RNA, 11 nt, Artificial Sequence
  Description of Artificial Sequence: Synthetic oligonucleotide
gggaagaggac

SEQ ID NO: 112069 - RNA, 13 nt, Artificial Sequence
  Description of Artificial Sequence: Synthetic oligonucleotide
aagcaaguauugu

SEQ ID NO: 112070 - RNA, 12 nt, Artificial Sequence
  Description of Artificial Sequence: Synthetic oligonucleotide
auuguagcacuc

SEQ ID NO: 112071 - RNA, 14 nt, Artificial Sequence
  Description of Artificial Sequence: Synthetic oligonucleotide
acaaaaccacaaau

SEQ ID NO: 112072 - RNA, 12 nt, Artificial Sequence
  Description of Artificial Sequence: Synthetic oligonucleotide
uaagcccauaca

SEQ ID NO: 112073 - RNA, 11 nt, Artificial Sequence
  Description of Artificial Sequence: Synthetic oligonucleotide
agcccauacag

SEQ ID NO: 112074 - RNA, 12 nt, Artificial Sequence
  Description of Artificial Sequence: Synthetic oligonucleotide
cagaaaccuucc

SEQ ID NO: 112075 - RNA, 10 nt, Artificial Sequence
  Description of Artificial Sequence: Synthetic oligonucleotide
guauaccuac

SEQ ID NO: 112076 - RNA, 13 nt, Artificial Sequence
  Description of Artificial Sequence: Synthetic oligonucleotide
gccaguuuucgga

SEQ ID NO: 112077 - RNA, 9 nt, Artificial Sequence
  Description of Artificial Sequence: Synthetic oligonucleotide
ggaacaggg

SEQ ID NO: 112078 - RNA, 13 nt, Artificial Sequence
  Description of Artificial Sequence: Synthetic oligonucleotide
uuaacuuuccagu

SEQ ID NO: 112079 - RNA, 14 nt, Artificial Sequence
  Description of Artificial Sequence: Synthetic oligonucleotide
aaaguuugguuuug

SEQ ID NO: 112080 - RNA, 12 nt, Artificial Sequence
  Description of Artificial Sequence: Synthetic oligonucleotide
cuucccacugua

SEQ ID NO: 112081 - RNA, 13 nt, Artificial Sequence
  Description of Artificial Sequence: Synthetic oligonucleotide
ugauaccauauga

SEQ ID NO: 112082 - RNA, 11 nt, Artificial Sequence
  Description of Artificial Sequence: Synthetic oligonucleotide
aacaugggcug

SEQ ID NO: 112083 - RNA, 13 nt, Artificial Sequence
  Description of Artificial Sequence: Synthetic oligonucleotide
caacuuuuucaua

SEQ ID NO: 112084 - RNA, 12 nt, Artificial Sequence
  Description of Artificial Sequence: Synthetic oligonucleotide
caugaggccgga

SEQ ID NO: 112085 - RNA, 11 nt, Artificial Sequence
  Description of Artificial Sequence: Synthetic oligonucleotide
acugcauuugu

SEQ ID NO: 112086 - RNA, 13 nt, Artificial Sequence
  Description of Artificial Sequence: Synthetic oligonucleotide
aauguuuacuacc

SEQ ID NO: 112087 - RNA, 15 nt, Artificial Sequence
  Description of Artificial Sequence: Synthetic oligonucleotide
aauuuuuugaugaaa

SEQ ID NO: 112088 - RNA, 14 nt, Artificial Sequence
  Description of Artificial Sequence: Synthetic oligonucleotide
cagugugugaauuu

SEQ ID NO: 112089 - RNA, 13 nt, Artificial Sequence
  Description of Artificial Sequence: Synthetic oligonucleotide
gagcaauguaugu

SEQ ID NO: 112090 - RNA, 14 nt, Artificial Sequence
  Description of Artificial Sequence: Synthetic oligonucleotide
aaagcacauauaua

SEQ ID NO: 112091 - RNA, 14 nt, Artificial Sequence
  Description of Artificial Sequence: Synthetic oligonucleotide
guaauaguuucucc

SEQ ID NO: 112092 - RNA, 13 nt, Artificial Sequence
  Description of Artificial Sequence: Synthetic oligonucleotide
aguuucuccaaau

SEQ ID NO: 112093 - RNA, 13 nt, Artificial Sequence
  Description of Artificial Sequence: Synthetic oligonucleotide
uacuuccuagaaa

SEQ ID NO: 112094 - RNA, 13 nt, Artificial Sequence
  Description of Artificial Sequence: Synthetic oligonucleotide
uacaccauauaug

SEQ ID NO: 112095 - RNA, 14 nt, Artificial Sequence
  Description of Artificial Sequence: Synthetic oligonucleotide
auauaugaauggag

SEQ ID NO: 112096 - RNA, 13 nt, Artificial Sequence
  Description of Artificial Sequence: Synthetic oligonucleotide
acgagaagaagau

SEQ ID NO: 112097 - RNA, 13 nt, Artificial Sequence
  Description of Artificial Sequence: Synthetic oligonucleotide
ucauuuacaggga

SEQ ID NO: 112098 - RNA, 13 nt, Artificial Sequence
  Description of Artificial Sequence: Synthetic oligonucleotide
cauuuacagggac

SEQ ID NO: 112099 - RNA, 10 nt, Artificial Sequence
  Description of Artificial Sequence: Synthetic oligonucleotide
agggaccuga

SEQ ID NO: 112100 - RNA, 14 nt, Artificial Sequence
  Description of Artificial Sequence: Synthetic oligonucleotide
uguuugacugcauc

SEQ ID NO: 112101 - RNA, 13 nt, Artificial Sequence
  Description of Artificial Sequence: Synthetic oligonucleotide
uuugacugcaucg

SEQ ID NO: 112102 - RNA, 12 nt, Artificial Sequence
  Description of Artificial Sequence: Synthetic oligonucleotide
gaguucacaggg

SEQ ID NO: 112103 - RNA, 13 nt, Artificial Sequence
  Description of Artificial Sequence: Synthetic oligonucleotide
ggcaccucugucc

SEQ ID NO: 112104 - RNA, 15 nt, Artificial Sequence
  Description of Artificial Sequence: Synthetic oligonucleotide
gguuugucuuuuuaa

SEQ ID NO: 112105 - RNA, 14 nt, Artificial Sequence
  Description of Artificial Sequence: Synthetic oligonucleotide
uuugucuuuuuaag

SEQ ID NO: 112106 - RNA, 13 nt, Artificial Sequence
  Description of Artificial Sequence: Synthetic oligonucleotide
ccuaaagguuguc

SEQ ID NO: 112107 - RNA, 12 nt, Artificial Sequence
  Description of Artificial Sequence: Synthetic oligonucleotide
aagguugucgac

SEQ ID NO: 112108 - RNA, 13 nt, Artificial Sequence
  Description of Artificial Sequence: Synthetic oligonucleotide
accuggcaauugu

SEQ ID NO: 112109 - RNA, 12 nt, Artificial Sequence
  Description of Artificial Sequence: Synthetic oligonucleotide
aguggugcgagg

SEQ ID NO: 112110 - RNA, 13 nt, Artificial Sequence
  Description of Artificial Sequence: Synthetic oligonucleotide
agagacaugaaau

SEQ ID NO: 112111 - RNA, 13 nt, Artificial Sequence
  Description of Artificial Sequence: Synthetic oligonucleotide
auauauuucucca

SEQ ID NO: 112112 - RNA, 10 nt, Artificial Sequence
  Description of Artificial Sequence: Synthetic oligonucleotide
caugaaggcu

SEQ ID NO: 112113 - RNA, 11 nt, Artificial Sequence
  Description of Artificial Sequence: Synthetic oligonucleotide
gcuggaguggu

SEQ ID NO: 112114 - RNA, 11 nt, Artificial Sequence
  Description of Artificial Sequence: Synthetic oligonucleotide
aggaagagagg

SEQ ID NO: 112115 - RNA, 12 nt, Artificial Sequence
  Description of Artificial Sequence: Synthetic oligonucleotide
cuugcaucgggc

SEQ ID NO: 112116 - RNA, 13 nt, Artificial Sequence
  Description of Artificial Sequence: Synthetic oligonucleotide
auauccuacugug

SEQ ID NO: 112117 - RNA, 13 nt, Artificial Sequence
  Description of Artificial Sequence: Synthetic oligonucleotide
uccuacuguguaa

SEQ ID NO: 112118 - RNA, 12 nt, Artificial Sequence
  Description of Artificial Sequence: Synthetic oligonucleotide
ccuuguagugua

SEQ ID NO: 112119 - RNA, 13 nt, Artificial Sequence
  Description of Artificial Sequence: Synthetic oligonucleotide
ucuuuguugauug

SEQ ID NO: 112120 - RNA, 14 nt, Artificial Sequence
  Description of Artificial Sequence: Synthetic oligonucleotide
uuuguugauugaaa

SEQ ID NO: 112121 - RNA, 15 nt, Artificial Sequence
  Description of Artificial Sequence: Synthetic oligonucleotide
uucuuuuucuuccau

SEQ ID NO: 112122 - RNA, 13 nt, Artificial Sequence
  Description of Artificial Sequence: Synthetic oligonucleotide
aaucuuccuucua

SEQ ID NO: 112123 - RNA, 13 nt, Artificial Sequence
  Description of Artificial Sequence: Synthetic oligonucleotide
uugaaugcuucau

SEQ ID NO: 112124 - RNA, 13 nt, Artificial Sequence
  Description of Artificial Sequence: Synthetic oligonucleotide
ugaaugcuucaug

SEQ ID NO: 112125 - RNA, 13 nt, Artificial Sequence
  Description of Artificial Sequence: Synthetic oligonucleotide
aauucuacuuuga

SEQ ID NO: 112126 - RNA, 13 nt, Artificial Sequence
  Description of Artificial Sequence: Synthetic oligonucleotide
agcaacuacagac

SEQ ID NO: 112127 - RNA, 13 nt, Artificial Sequence
  Description of Artificial Sequence: Synthetic oligonucleotide
gaccaaggucaac

SEQ ID NO: 112128 - RNA, 13 nt, Artificial Sequence
  Description of Artificial Sequence: Synthetic oligonucleotide
cgacuaucucgac

SEQ ID NO: 112129 - RNA, 13 nt, Artificial Sequence
  Description of Artificial Sequence: Synthetic oligonucleotide
aaccuucccaaac

SEQ ID NO: 112130 - RNA, 14 nt, Artificial Sequence
  Description of Artificial Sequence: Synthetic oligonucleotide
ccaagcuuagaacu

SEQ ID NO: 112131 - RNA, 15 nt, Artificial Sequence
  Description of Artificial Sequence: Synthetic oligonucleotide
agcuuagaacuuuaa

SEQ ID NO: 112132 - RNA, 11 nt, Artificial Sequence
  Description of Artificial Sequence: Synthetic oligonucleotide
aagaccaccac

SEQ ID NO: 112133 - RNA, 14 nt, Artificial Sequence
  Description of Artificial Sequence: Synthetic oligonucleotide
gcgagaaauaaagu

SEQ ID NO: 112134 - RNA, 14 nt, Artificial Sequence
  Description of Artificial Sequence: Synthetic oligonucleotide
cgagaaauaaaguu

SEQ ID NO: 112135 - RNA, 12 nt, Artificial Sequence
  Description of Artificial Sequence: Synthetic oligonucleotide
aggaaaugaucc

SEQ ID NO: 112136 - RNA, 13 nt, Artificial Sequence
  Description of Artificial Sequence: Synthetic oligonucleotide
gaagaaaugaaac

SEQ ID NO: 112137 - RNA, 13 nt, Artificial Sequence
  Description of Artificial Sequence: Synthetic oligonucleotide
guuuccauccucc

SEQ ID NO: 112138 - RNA, 15 nt, Artificial Sequence
  Description of Artificial Sequence: Synthetic oligonucleotide
acugaaaaucuuuga

SEQ ID NO: 112139 - RNA, 11 nt, Artificial Sequence
  Description of Artificial Sequence: Synthetic oligonucleotide
ugccguucagg

SEQ ID NO: 112140 - RNA, 13 nt, Artificial Sequence
  Description of Artificial Sequence: Synthetic oligonucleotide
caggguccagaag

SEQ ID NO: 112141 - RNA, 13 nt, Artificial Sequence
  Description of Artificial Sequence: Synthetic oligonucleotide
ucaagacugcuug

SEQ ID NO: 112142 - RNA, 13 nt, Artificial Sequence
  Description of Artificial Sequence: Synthetic oligonucleotide
uccaugucuuugg

SEQ ID NO: 112143 - RNA, 11 nt, Artificial Sequence
  Description of Artificial Sequence: Synthetic oligonucleotide
gccugaaacac

SEQ ID NO: 112144 - RNA, 12 nt, Artificial Sequence
  Description of Artificial Sequence: Synthetic oligonucleotide
ucucuguaccuc

SEQ ID NO: 112145 - RNA, 12 nt, Artificial Sequence
  Description of Artificial Sequence: Synthetic oligonucleotide
agcaagacaaga

SEQ ID NO: 112146 - RNA, 13 nt, Artificial Sequence
  Description of Artificial Sequence: Synthetic oligonucleotide
gcaagacaagaaa

SEQ ID NO: 112147 - RNA, 12 nt, Artificial Sequence
  Description of Artificial Sequence: Synthetic oligonucleotide
uguacaagaucc

SEQ ID NO: 112148 - RNA, 12 nt, Artificial Sequence
  Description of Artificial Sequence: Synthetic oligonucleotide
cguacuugcaga

SEQ ID NO: 112149 - RNA, 13 nt, Artificial Sequence
  Description of Artificial Sequence: Synthetic oligonucleotide
cgaucgauacaga

SEQ ID NO: 112150 - RNA, 13 nt, Artificial Sequence
  Description of Artificial Sequence: Synthetic oligonucleotide
uauaaaaauaaau

SEQ ID NO: 112151 - RNA, 13 nt, Artificial Sequence
  Description of Artificial Sequence: Synthetic oligonucleotide
uaaaaauaaauau

SEQ ID NO: 112152 - RNA, 13 nt, Artificial Sequence
  Description of Artificial Sequence: Synthetic oligonucleotide
uuugacugcugug

SEQ ID NO: 112153 - RNA, 13 nt, Artificial Sequence
  Description of Artificial Sequence: Synthetic oligonucleotide
ggagaugagagac

SEQ ID NO: 112154 - RNA, 10 nt, Artificial Sequence
  Description of Artificial Sequence: Synthetic oligonucleotide
ucccacuugg

SEQ ID NO: 112155 - RNA, 10 nt, Artificial Sequence
  Description of Artificial Sequence: Synthetic oligonucleotide
guucacggcc

SEQ ID NO: 112156 - RNA, 12 nt, Artificial Sequence
  Description of Artificial Sequence: Synthetic oligonucleotide
accaucacacca

SEQ ID NO: 112157 - RNA, 10 nt, Artificial Sequence
  Description of Artificial Sequence: Synthetic oligonucleotide
cugcggguuu

SEQ ID NO: 112158 - RNA, 9 nt, Artificial Sequence
  Description of Artificial Sequence: Synthetic oligonucleotide
uccaguuug

SEQ ID NO: 112159 - RNA, 12 nt, Artificial Sequence
  Description of Artificial Sequence: Synthetic oligonucleotide
uuaaggacuucu

SEQ ID NO: 112160 - RNA, 12 nt, Artificial Sequence
  Description of Artificial Sequence: Synthetic oligonucleotide
agugggacagag

SEQ ID NO: 112161 - RNA, 13 nt, Artificial Sequence
  Description of Artificial Sequence: Synthetic oligonucleotide
auuuguuauugug

SEQ ID NO: 112162 - RNA, 12 nt, Artificial Sequence
  Description of Artificial Sequence: Synthetic oligonucleotide
ucaaaugcauuu

SEQ ID NO: 112163 - RNA, 9 nt, Artificial Sequence
  Description of Artificial Sequence: Synthetic oligonucleotide
aggaaagcc

SEQ ID NO: 112164 - RNA, 10 nt, Artificial Sequence
  Description of Artificial Sequence: Synthetic oligonucleotide
ggaaagcccu

SEQ ID NO: 112165 - RNA, 11 nt, Artificial Sequence
  Description of Artificial Sequence: Synthetic oligonucleotide
ccagcauggcc

SEQ ID NO: 112166 - RNA, 10 nt, Artificial Sequence
  Description of Artificial Sequence: Synthetic oligonucleotide
uucucccuga

SEQ ID NO: 112167 - RNA, 11 nt, Artificial Sequence
  Description of Artificial Sequence: Synthetic oligonucleotide
aagaagcccuu

SEQ ID NO: 112168 - RNA, 11 nt, Artificial Sequence
  Description of Artificial Sequence: Synthetic oligonucleotide
gaagcccuuca

SEQ ID NO: 112169 - RNA, 10 nt, Artificial Sequence
  Description of Artificial Sequence: Synthetic oligonucleotide
cccuucagcg

SEQ ID NO: 112170 - RNA, 10 nt, Artificial Sequence
  Description of Artificial Sequence: Synthetic oligonucleotide
cuucagcggc

SEQ ID NO: 112171 - RNA, 11 nt, Artificial Sequence
  Description of Artificial Sequence: Synthetic oligonucleotide
cagcggccagu

SEQ ID NO: 112172 - RNA, 11 nt, Artificial Sequence
  Description of Artificial Sequence: Synthetic oligonucleotide
gaaaagcuccg

SEQ ID NO: 112173 - RNA, 10 nt, Artificial Sequence
  Description of Artificial Sequence: Synthetic oligonucleotide
aaagcuccgg

SEQ ID NO: 112174 - RNA, 12 nt, Artificial Sequence
  Description of Artificial Sequence: Synthetic oligonucleotide
gucaacagucug

SEQ ID NO: 112175 - RNA, 12 nt, Artificial Sequence
  Description of Artificial Sequence: Synthetic oligonucleotide
agaguucaaaag

SEQ ID NO: 112176 - RNA, 12 nt, Artificial Sequence
  Description of Artificial Sequence: Synthetic oligonucleotide
gaguucaaaagc

SEQ ID NO: 112177 - RNA, 11 nt, Artificial Sequence
  Description of Artificial Sequence: Synthetic oligonucleotide
ucaaaagcccu

SEQ ID NO: 112178 - RNA, 11 nt, Artificial Sequence
  Description of Artificial Sequence: Synthetic oligonucleotide
caaaagcccuu

SEQ ID NO: 112179 - RNA, 11 nt, Artificial Sequence
  Description of Artificial Sequence: Synthetic oligonucleotide
aaagcccuuca

SEQ ID NO: 112180 - RNA, 11 nt, Artificial Sequence
  Description of Artificial Sequence: Synthetic oligonucleotide
aagcccuucag

SEQ ID NO: 112181 - RNA, 12 nt, Artificial Sequence
  Description of Artificial Sequence: Synthetic oligonucleotide
ugaagccgcucg

SEQ ID NO: 112182 - RNA, 11 nt, Artificial Sequence
  Description of Artificial Sequence: Synthetic oligonucleotide
acgccagucaa

SEQ ID NO: 112183 - RNA, 12 nt, Artificial Sequence
  Description of Artificial Sequence: Synthetic oligonucleotide
ucuuggugcgug

SEQ ID NO: 112184 - RNA, 13 nt, Artificial Sequence
  Description of Artificial Sequence: Synthetic oligonucleotide
uuggauucaucag

SEQ ID NO: 112185 - RNA, 12 nt, Artificial Sequence
  Description of Artificial Sequence: Synthetic oligonucleotide
ggaauaccuaag

SEQ ID NO: 112186 - RNA, 11 nt, Artificial Sequence
  Description of Artificial Sequence: Synthetic oligonucleotide
uuugaggcuca

SEQ ID NO: 112187 - RNA, 10 nt, Artificial Sequence
  Description of Artificial Sequence: Synthetic oligonucleotide
cuacaauugg

SEQ ID NO: 112188 - RNA, 11 nt, Artificial Sequence
  Description of Artificial Sequence: Synthetic oligonucleotide
aguuaggagcc

SEQ ID NO: 112189 - RNA, 12 nt, Artificial Sequence
  Description of Artificial Sequence: Synthetic oligonucleotide
gucaauauccac

SEQ ID NO: 112190 - RNA, 12 nt, Artificial Sequence
  Description of Artificial Sequence: Synthetic oligonucleotide
uguucagucaca

SEQ ID NO: 112191 - RNA, 11 nt, Artificial Sequence
  Description of Artificial Sequence: Synthetic oligonucleotide
cacacacauac

SEQ ID NO: 112192 - RNA, 11 nt, Artificial Sequence
  Description of Artificial Sequence: Synthetic oligonucleotide
uccuuuugcuu

SEQ ID NO: 112193 - RNA, 15 nt, Artificial Sequence
  Description of Artificial Sequence: Synthetic oligonucleotide
uuuaaaguaauuuuu

SEQ ID NO: 112194 - RNA, 12 nt, Artificial Sequence
  Description of Artificial Sequence: Synthetic oligonucleotide
aacagucaaugg

SEQ ID NO: 112195 - RNA, 12 nt, Artificial Sequence
  Description of Artificial Sequence: Synthetic oligonucleotide
cgacaaaccaau

SEQ ID NO: 112196 - RNA, 11 nt, Artificial Sequence
  Description of Artificial Sequence: Synthetic oligonucleotide
cugcuaccacu

SEQ ID NO: 112197 - RNA, 12 nt, Artificial Sequence
  Description of Artificial Sequence: Synthetic oligonucleotide
caagcggucuua

SEQ ID NO: 112198 - RNA, 12 nt, Artificial Sequence
  Description of Artificial Sequence: Synthetic oligonucleotide
gucuuaccggcu

SEQ ID NO: 112199 - RNA, 10 nt, Artificial Sequence
  Description of Artificial Sequence: Synthetic oligonucleotide
auggguuacc

SEQ ID NO: 112200 - RNA, 10 nt, Artificial Sequence
  Description of Artificial Sequence: Synthetic oligonucleotide
uuaccugcga

SEQ ID NO: 112201 - RNA, 11 nt, Artificial Sequence
  Description of Artificial Sequence: Synthetic oligonucleotide
aucuugcugag

SEQ ID NO: 112202 - RNA, 12 nt, Artificial Sequence
  Description of Artificial Sequence: Synthetic oligonucleotide
gcauaaaacagu

SEQ ID NO: 112203 - RNA, 11 nt, Artificial Sequence
  Description of Artificial Sequence: Synthetic oligonucleotide
uccuuuauccu

SEQ ID NO: 112204 - RNA, 11 nt, Artificial Sequence
  Description of Artificial Sequence: Synthetic oligonucleotide
aacgcaaguug

SEQ ID NO: 112205 - RNA, 12 nt, Artificial Sequence
  Description of Artificial Sequence: Synthetic oligonucleotide
aacugaaaccau

SEQ ID NO: 112206 - RNA, 13 nt, Artificial Sequence
  Description of Artificial Sequence: Synthetic oligonucleotide
cuuuguuaaauau

SEQ ID NO: 112207 - RNA, 13 nt, Artificial Sequence
  Description of Artificial Sequence: Synthetic oligonucleotide
uauauuaaaaguu

SEQ ID NO: 112208 - RNA, 12 nt, Artificial Sequence
  Description of Artificial Sequence: Synthetic oligonucleotide
uuuugacuuaac

SEQ ID NO: 112209 - RNA, 12 nt, Artificial Sequence
  Description of Artificial Sequence: Synthetic oligonucleotide
caaacucagcac

SEQ ID NO: 112210 - RNA, 10 nt, Artificial Sequence
  Description of Artificial Sequence: Synthetic oligonucleotide
gcugaccuca

SEQ ID NO: 112211 - RNA, 13 nt, Artificial Sequence
  Description of Artificial Sequence: Synthetic oligonucleotide
uuauucagaucgc

SEQ ID NO: 112212 - RNA, 12 nt, Artificial Sequence
  Description of Artificial Sequence: Synthetic oligonucleotide
ggguucugggau

SEQ ID NO: 112213 - RNA, 14 nt, Artificial Sequence
  Description of Artificial Sequence: Synthetic oligonucleotide
uauuggaaauuaug

SEQ ID NO: 112214 - RNA, 12 nt, Artificial Sequence
  Description of Artificial Sequence: Synthetic oligonucleotide
uggaagcacuag

SEQ ID NO: 112215 - RNA, 12 nt, Artificial Sequence
  Description of Artificial Sequence: Synthetic oligonucleotide
uuuuuaugugga

SEQ ID NO: 112216 - RNA, 11 nt, Artificial Sequence
  Description of Artificial Sequence: Synthetic oligonucleotide
gaauugguaga

SEQ ID NO: 112217 - RNA, 12 nt, Artificial Sequence
  Description of Artificial Sequence: Synthetic oligonucleotide
uagacuuggaga

SEQ ID NO: 112218 - RNA, 12 nt, Artificial Sequence
  Description of Artificial Sequence: Synthetic oligonucleotide
uacaguauucca

SEQ ID NO: 112219 - RNA, 14 nt, Artificial Sequence
  Description of Artificial Sequence: Synthetic oligonucleotide
cacugaugaauuaa

SEQ ID NO: 112220 - RNA, 11 nt, Artificial Sequence
  Description of Artificial Sequence: Synthetic oligonucleotide
cacaucaucac

SEQ ID NO: 112221 - RNA, 12 nt, Artificial Sequence
  Description of Artificial Sequence: Synthetic oligonucleotide
ucaccaaacaga

SEQ ID NO: 112222 - RNA, 11 nt, Artificial Sequence
  Description of Artificial Sequence: Synthetic oligonucleotide
gaacaugaugg

SEQ ID NO: 112223 - RNA, 11 nt, Artificial Sequence
  Description of Artificial Sequence: Synthetic oligonucleotide
auguagacugc

SEQ ID NO: 112224 - RNA, 12 nt, Artificial Sequence
  Description of Artificial Sequence: Synthetic oligonucleotide
gaucuauuuaug

SEQ ID NO: 112225 - RNA, 11 nt, Artificial Sequence
  Description of Artificial Sequence: Synthetic oligonucleotide
cacuauuauca

SEQ ID NO: 112226 - RNA, 10 nt, Artificial Sequence
  Description of Artificial Sequence: Synthetic oligonucleotide
ucaguucugc

SEQ ID NO: 112227 - RNA, 12 nt, Artificial Sequence
  Description of Artificial Sequence: Synthetic oligonucleotide
gauuaaaccuac

SEQ ID NO: 112228 - RNA, 12 nt, Artificial Sequence
  Description of Artificial Sequence: Synthetic oligonucleotide
uaaaauccuucu

SEQ ID NO: 112229 - RNA, 11 nt, Artificial Sequence
  Description of Artificial Sequence: Synthetic oligonucleotide
augcuguagac

SEQ ID NO: 112230 - RNA, 12 nt, Artificial Sequence
  Description of Artificial Sequence: Synthetic oligonucleotide
ugauaggaauag

SEQ ID NO: 112231 - RNA, 10 nt, Artificial Sequence
  Description of Artificial Sequence: Synthetic oligonucleotide
auggcccuga

SEQ ID NO: 112232 - RNA, 10 nt, Artificial Sequence
  Description of Artificial Sequence: Synthetic oligonucleotide
uccucaagca

SEQ ID NO: 112233 - RNA, 9 nt, Artificial Sequence
  Description of Artificial Sequence: Synthetic oligonucleotide
uucagccca

SEQ ID NO: 112234 - RNA, 10 nt, Artificial Sequence
  Description of Artificial Sequence: Synthetic oligonucleotide
cugcugaacc

SEQ ID NO: 112235 - RNA, 11 nt, Artificial Sequence
  Description of Artificial Sequence: Synthetic oligonucleotide
aguucucuuca

SEQ ID NO: 112236 - RNA, 10 nt, Artificial Sequence
  Description of Artificial Sequence: Synthetic oligonucleotide
cagccuagag

SEQ ID NO: 112237 - RNA, 12 nt, Artificial Sequence
  Description of Artificial Sequence: Synthetic oligonucleotide
ucugugaagugu

SEQ ID NO: 112238 - RNA, 13 nt, Artificial Sequence
  Description of Artificial Sequence: Synthetic oligonucleotide
gagaaaauuucaa

SEQ ID NO: 112239 - RNA, 10 nt, Artificial Sequence
  Description of Artificial Sequence: Synthetic oligonucleotide
auccuccuga

SEQ ID NO: 112240 - RNA, 11 nt, Artificial Sequence
  Description of Artificial Sequence: Synthetic oligonucleotide
ugacaucauau

SEQ ID NO: 112241 - RNA, 12 nt, Artificial Sequence
  Description of Artificial Sequence: Synthetic oligonucleotide
aucuucaucaua

SEQ ID NO: 112242 - RNA, 12 nt, Artificial Sequence
  Description of Artificial Sequence: Synthetic oligonucleotide
acuagcuauuaa

SEQ ID NO: 112243 - RNA, 13 nt, Artificial Sequence
  Description of Artificial Sequence: Synthetic oligonucleotide
cucuacuaaaaau

SEQ ID NO: 112244 - RNA, 11 nt, Artificial Sequence
  Description of Artificial Sequence: Synthetic oligonucleotide
cuaucucgccu

SEQ ID NO: 112245 - RNA, 12 nt, Artificial Sequence
  Description of Artificial Sequence: Synthetic oligonucleotide
uucgguccaguu

SEQ ID NO: 112246 - RNA, 10 nt, Artificial Sequence
  Description of Artificial Sequence: Synthetic oligonucleotide
auguagccgc

SEQ ID NO: 112247 - RNA, 11 nt, Artificial Sequence
  Description of Artificial Sequence: Synthetic oligonucleotide
gaggagacuug

SEQ ID NO: 112248 - RNA, 11 nt, Artificial Sequence
  Description of Artificial Sequence: Synthetic oligonucleotide
aguagugagga

SEQ ID NO: 112249 - RNA, 13 nt, Artificial Sequence
  Description of Artificial Sequence: Synthetic oligonucleotide
agaugaguacaaa

SEQ ID NO: 112250 - RNA, 12 nt, Artificial Sequence
  Description of Artificial Sequence: Synthetic oligonucleotide
uuguuaaugggc

SEQ ID NO: 112251 - RNA, 12 nt, Artificial Sequence
  Description of Artificial Sequence: Synthetic oligonucleotide
uuuuaauuuauu

SEQ ID NO: 112252 - RNA, 11 nt, Artificial Sequence
  Description of Artificial Sequence: Synthetic oligonucleotide
auuuaaauaug

SEQ ID NO: 112253 - RNA, 12 nt, Artificial Sequence
  Description of Artificial Sequence: Synthetic oligonucleotide
auccuuuguuuc

SEQ ID NO: 112254 - RNA, 13 nt, Artificial Sequence
  Description of Artificial Sequence: Synthetic oligonucleotide
gucuaaguguuug

SEQ ID NO: 112255 - RNA, 11 nt, Artificial Sequence
  Description of Artificial Sequence: Synthetic oligonucleotide
ccugugacaaa

SEQ ID NO: 112256 - RNA, 12 nt, Artificial Sequence
  Description of Artificial Sequence: Synthetic oligonucleotide
caggcugaauua

SEQ ID NO: 112257 - RNA, 13 nt, Artificial Sequence
  Description of Artificial Sequence: Synthetic oligonucleotide
ucauucuuacaau

SEQ ID NO: 112258 - RNA, 14 nt, Artificial Sequence
  Description of Artificial Sequence: Synthetic oligonucleotide
cauucuuacaauug

SEQ ID NO: 112259 - RNA, 11 nt, Artificial Sequence
  Description of Artificial Sequence: Synthetic oligonucleotide
agagaguguac

SEQ ID NO: 112260 - RNA, 11 nt, Artificial Sequence
  Description of Artificial Sequence: Synthetic oligonucleotide
gaacucagcag

SEQ ID NO: 112261 - RNA, 12 nt, Artificial Sequence
  Description of Artificial Sequence: Synthetic oligonucleotide
uuauuuucagua

SEQ ID NO: 112262 - RNA, 11 nt, Artificial Sequence
  Description of Artificial Sequence: Synthetic oligonucleotide
cuuaaauggaa

SEQ ID NO: 112263 - RNA, 12 nt, Artificial Sequence
  Description of Artificial Sequence: Synthetic oligonucleotide
gccuaaaauugu

SEQ ID NO: 112264 - RNA, 12 nt, Artificial Sequence
  Description of Artificial Sequence: Synthetic oligonucleotide
acuaacaucugg

SEQ ID NO: 112265 - RNA, 11 nt, Artificial Sequence
  Description of Artificial Sequence: Synthetic oligonucleotide
gacugugagcu

SEQ ID NO: 112266 - RNA, 13 nt, Artificial Sequence
  Description of Artificial Sequence: Synthetic oligonucleotide
gcuuuuuauuaau

SEQ ID NO: 112267 - RNA, 12 nt, Artificial Sequence
  Description of Artificial Sequence: Synthetic oligonucleotide
ucuucuuacauu

SEQ ID NO: 112268 - RNA, 14 nt, Artificial Sequence
  Description of Artificial Sequence: Synthetic oligonucleotide
auuuguaaaaaugu

SEQ ID NO: 112269 - RNA, 14 nt, Artificial Sequence
  Description of Artificial Sequence: Synthetic oligonucleotide
ucuuaauucauauu

SEQ ID NO: 112270 - RNA, 12 nt, Artificial Sequence
  Description of Artificial Sequence: Synthetic oligonucleotide
aacuaaucauga

SEQ ID NO: 112271 - RNA, 11 nt, Artificial Sequence
  Description of Artificial Sequence: Synthetic oligonucleotide
cugcucuuggg

SEQ ID NO: 112272 - RNA, 12 nt, Artificial Sequence
  Description of Artificial Sequence: Synthetic oligonucleotide
aguagcuuugag

SEQ ID NO: 112273 - RNA, 13 nt, Artificial Sequence
  Description of Artificial Sequence: Synthetic oligonucleotide
acguaauauuuca

SEQ ID NO: 112274 - RNA, 12 nt, Artificial Sequence
  Description of Artificial Sequence: Synthetic oligonucleotide
auucucuucacu

SEQ ID NO: 112275 - RNA, 13 nt, Artificial Sequence
  Description of Artificial Sequence: Synthetic oligonucleotide
uaaugcuaagaaa

SEQ ID NO: 112276 - RNA, 11 nt, Artificial Sequence
  Description of Artificial Sequence: Synthetic oligonucleotide
cugaaaaucaa

SEQ ID NO: 112277 - RNA, 13 nt, Artificial Sequence
  Description of Artificial Sequence: Synthetic oligonucleotide
auaugauuacuuu

SEQ ID NO: 112278 - RNA, 13 nt, Artificial Sequence
  Description of Artificial Sequence: Synthetic oligonucleotide
auuuuguucuaca

SEQ ID NO: 112279 - RNA, 11 nt, Artificial Sequence
  Description of Artificial Sequence: Synthetic oligonucleotide
ccgggacucuc

SEQ ID NO: 112280 - RNA, 13 nt, Artificial Sequence
  Description of Artificial Sequence: Synthetic oligonucleotide
cuuuaaaguaaag

SEQ ID NO: 112281 - RNA, 12 nt, Artificial Sequence
  Description of Artificial Sequence: Synthetic oligonucleotide
cuggaagccugg

SEQ ID NO: 112282 - RNA, 13 nt, Artificial Sequence
  Description of Artificial Sequence: Synthetic oligonucleotide
aaacaaaagagag

SEQ ID NO: 112283 - RNA, 12 nt, Artificial Sequence
  Description of Artificial Sequence: Synthetic oligonucleotide
ucaguuaugccg

SEQ ID NO: 112284 - RNA, 12 nt, Artificial Sequence
  Description of Artificial Sequence: Synthetic oligonucleotide
aaaagaagucca

SEQ ID NO: 112285 - RNA, 10 nt, Artificial Sequence
  Description of Artificial Sequence: Synthetic oligonucleotide
ggugagguua

SEQ ID NO: 112286 - RNA, 10 nt, Artificial Sequence
  Description of Artificial Sequence: Synthetic oligonucleotide
ggaagaggac

SEQ ID NO: 112287 - RNA, 12 nt, Artificial Sequence
  Description of Artificial Sequence: Synthetic oligonucleotide
agcaaguauugu

SEQ ID NO: 112288 - RNA, 11 nt, Artificial Sequence
  Description of Artificial Sequence: Synthetic oligonucleotide
uuguagcacuc

SEQ ID NO: 112289 - RNA, 13 nt, Artificial Sequence
  Description of Artificial Sequence: Synthetic oligonucleotide
caaaaccacaaau

SEQ ID NO: 112290 - RNA, 11 nt, Artificial Sequence
  Description of Artificial Sequence: Synthetic oligonucleotide
aagcccauaca

SEQ ID NO: 112291 - RNA, 10 nt, Artificial Sequence
  Description of Artificial Sequence: Synthetic oligonucleotide
gcccauacag

SEQ ID NO: 112292 - RNA, 11 nt, Artificial Sequence
  Description of Artificial Sequence: Synthetic oligonucleotide
agaaaccuucc

SEQ ID NO: 112293 - RNA, 9 nt, Artificial Sequence
  Description of Artificial Sequence: Synthetic oligonucleotide
uauaccuac

SEQ ID NO: 112294 - RNA, 12 nt, Artificial Sequence
  Description of Artificial Sequence: Synthetic oligonucleotide
ccaguuuucgga

SEQ ID NO: 112295 - RNA, 8 nt, Artificial Sequence
  Description of Artificial Sequence: Synthetic oligonucleotide
gaacaggg

SEQ ID NO: 112296 - RNA, 12 nt, Artificial Sequence
  Description of Artificial Sequence: Synthetic oligonucleotide
uaacuuuccagu

SEQ ID NO: 112297 - RNA, 13 nt, Artificial Sequence
  Description of Artificial Sequence: Synthetic oligonucleotide
aaguuugguuuug

SEQ ID NO: 112298 - RNA, 11 nt, Artificial Sequence
  Description of Artificial Sequence: Synthetic oligonucleotide
uucccacugua

SEQ ID NO: 112299 - RNA, 12 nt, Artificial Sequence
  Description of Artificial Sequence: Synthetic oligonucleotide
gauaccauauga

SEQ ID NO: 112300 - RNA, 10 nt, Artificial Sequence
  Description of Artificial Sequence: Synthetic oligonucleotide
acaugggcug

SEQ ID NO: 112301 - RNA, 12 nt, Artificial Sequence
  Description of Artificial Sequence: Synthetic oligonucleotide
aacuuuuucaua

SEQ ID NO: 112302 - RNA, 11 nt, Artificial Sequence
  Description of Artificial Sequence: Synthetic oligonucleotide
augaggccgga

SEQ ID NO: 112303 - RNA, 10 nt, Artificial Sequence
  Description of Artificial Sequence: Synthetic oligonucleotide
cugcauuugu

SEQ ID NO: 112304 - RNA, 12 nt, Artificial Sequence
  Description of Artificial Sequence: Synthetic oligonucleotide
auguuuacuacc

SEQ ID NO: 112305 - RNA, 14 nt, Artificial Sequence
  Description of Artificial Sequence: Synthetic oligonucleotide
auuuuuugaugaaa

SEQ ID NO: 112306 - RNA, 13 nt, Artificial Sequence
  Description of Artificial Sequence: Synthetic oligonucleotide
agugugugaauuu

SEQ ID NO: 112307 - RNA, 12 nt, Artificial Sequence
  Description of Artificial Sequence: Synthetic oligonucleotide
agcaauguaugu

SEQ ID NO: 112308 - RNA, 13 nt, Artificial Sequence
  Description of Artificial Sequence: Synthetic oligonucleotide
aagcacauauaua

SEQ ID NO: 112309 - RNA, 13 nt, Artificial Sequence
  Description of Artificial Sequence: Synthetic oligonucleotide
uaauaguuucucc

SEQ ID NO: 112310 - RNA, 12 nt, Artificial Sequence
  Description of Artificial Sequence: Synthetic oligonucleotide
guuucuccaaau

SEQ ID NO: 112311 - RNA, 12 nt, Artificial Sequence
  Description of Artificial Sequence: Synthetic oligonucleotide
acuuccuagaaa

SEQ ID NO: 112312 - RNA, 12 nt, Artificial Sequence
  Description of Artificial Sequence: Synthetic oligonucleotide
acaccauauaug

SEQ ID NO: 112313 - RNA, 13 nt, Artificial Sequence
  Description of Artificial Sequence: Synthetic oligonucleotide
uauaugaauggag

SEQ ID NO: 112314 - RNA, 12 nt, Artificial Sequence
  Description of Artificial Sequence: Synthetic oligonucleotide
cauuuacaggga

SEQ ID NO: 112315 - RNA, 12 nt, Artificial Sequence
  Description of Artificial Sequence: Synthetic oligonucleotide
auuuacagggac

SEQ ID NO: 112316 - RNA, 9 nt, Artificial Sequence
  Description of Artificial Sequence: Synthetic oligonucleotide
gggaccuga

SEQ ID NO: 112317 - RNA, 13 nt, Artificial Sequence
  Description of Artificial Sequence: Synthetic oligonucleotide
guuugacugcauc

SEQ ID NO: 112318 - RNA, 12 nt, Artificial Sequence
  Description of Artificial Sequence: Synthetic oligonucleotide
uugacugcaucg

SEQ ID NO: 112319 - RNA, 11 nt, Artificial Sequence
  Description of Artificial Sequence: Synthetic oligonucleotide
aguucacaggg

SEQ ID NO: 112320 - RNA, 12 nt, Artificial Sequence
  Description of Artificial Sequence: Synthetic oligonucleotide
gcaccucugucc

SEQ ID NO: 112321 - RNA, 14 nt, Artificial Sequence
  Description of Artificial Sequence: Synthetic oligonucleotide
guuugucuuuuuaa

SEQ ID NO: 112322 - RNA, 13 nt, Artificial Sequence
  Description of Artificial Sequence: Synthetic oligonucleotide
uugucuuuuuaag

SEQ ID NO: 112323 - RNA, 12 nt, Artificial Sequence
  Description of Artificial Sequence: Synthetic oligonucleotide
cuaaagguuguc

SEQ ID NO: 112324 - RNA, 11 nt, Artificial Sequence
  Description of Artificial Sequence: Synthetic oligonucleotide
agguugucgac

SEQ ID NO: 112325 - RNA, 12 nt, Artificial Sequence
  Description of Artificial Sequence: Synthetic oligonucleotide
ccuggcaauugu

SEQ ID NO: 112326 - RNA, 11 nt, Artificial Sequence
  Description of Artificial Sequence: Synthetic oligonucleotide
guggugcgagg

SEQ ID NO: 112327 - RNA, 12 nt, Artificial Sequence
  Description of Artificial Sequence: Synthetic oligonucleotide
gagacaugaaau

SEQ ID NO: 112328 - RNA, 12 nt, Artificial Sequence
  Description of Artificial Sequence: Synthetic oligonucleotide
uauauuucucca

SEQ ID NO: 112329 - RNA, 9 nt, Artificial Sequence
  Description of Artificial Sequence: Synthetic oligonucleotide
augaaggcu

SEQ ID NO: 112330 - RNA, 10 nt, Artificial Sequence
  Description of Artificial Sequence: Synthetic oligonucleotide
cuggaguggu

SEQ ID NO: 112331 - RNA, 10 nt, Artificial Sequence
  Description of Artificial Sequence: Synthetic oligonucleotide
ggaagagagg

SEQ ID NO: 112332 - RNA, 11 nt, Artificial Sequence
  Description of Artificial Sequence: Synthetic oligonucleotide
uugcaucgggc

SEQ ID NO: 112333 - RNA, 12 nt, Artificial Sequence
  Description of Artificial Sequence: Synthetic oligonucleotide
uauccuacugug

SEQ ID NO: 112334 - RNA, 12 nt, Artificial Sequence
  Description of Artificial Sequence: Synthetic oligonucleotide
ccuacuguguaa

SEQ ID NO: 112335 - RNA, 11 nt, Artificial Sequence
  Description of Artificial Sequence: Synthetic oligonucleotide
cuuguagugua

SEQ ID NO: 112336 - RNA, 12 nt, Artificial Sequence
  Description of Artificial Sequence: Synthetic oligonucleotide
cuuuguugauug

SEQ ID NO: 112337 - RNA, 13 nt, Artificial Sequence
  Description of Artificial Sequence: Synthetic oligonucleotide
uuguugauugaaa

SEQ ID NO: 112338 - RNA, 14 nt, Artificial Sequence
  Description of Artificial Sequence: Synthetic oligonucleotide
ucuuuuucuuccau

SEQ ID NO: 112339 - RNA, 12 nt, Artificial Sequence
  Description of Artificial Sequence: Synthetic oligonucleotide
aucuuccuucua

SEQ ID NO: 112340 - RNA, 12 nt, Artificial Sequence
  Description of Artificial Sequence: Synthetic oligonucleotide
ugaaugcuucau

SEQ ID NO: 112341 - RNA, 12 nt, Artificial Sequence
  Description of Artificial Sequence: Synthetic oligonucleotide
gaaugcuucaug

SEQ ID NO: 112342 - RNA, 12 nt, Artificial Sequence
  Description of Artificial Sequence: Synthetic oligonucleotide
auucuacuuuga

SEQ ID NO: 112343 - RNA, 12 nt, Artificial Sequence
  Description of Artificial Sequence: Synthetic oligonucleotide
gcaacuacagac

SEQ ID NO: 112344 - RNA, 12 nt, Artificial Sequence
  Description of Artificial Sequence: Synthetic oligonucleotide
accaaggucaac

SEQ ID NO: 112345 - RNA, 12 nt, Artificial Sequence
  Description of Artificial Sequence: Synthetic oligonucleotide
gacuaucucgac

SEQ ID NO: 112346 - RNA, 12 nt, Artificial Sequence
  Description of Artificial Sequence: Synthetic oligonucleotide
accuucccaaac

SEQ ID NO: 112347 - RNA, 13 nt, Artificial Sequence
  Description of Artificial Sequence: Synthetic oligonucleotide
caagcuuagaacu

SEQ ID NO: 112348 - RNA, 14 nt, Artificial Sequence
  Description of Artificial Sequence: Synthetic oligonucleotide
gcuuagaacuuuaa

SEQ ID NO: 112349 - RNA, 13 nt, Artificial Sequence
  Description of Artificial Sequence: Synthetic oligonucleotide
aacuuuaagcaac

SEQ ID NO: 112350 - RNA, 10 nt, Artificial Sequence
  Description of Artificial Sequence: Synthetic oligonucleotide
agaccaccac

SEQ ID NO: 112351 - RNA, 13 nt, Artificial Sequence
  Description of Artificial Sequence: Synthetic oligonucleotide
cgagaaauaaagu

SEQ ID NO: 112352 - RNA, 13 nt, Artificial Sequence
  Description of Artificial Sequence: Synthetic oligonucleotide
gagaaauaaaguu

SEQ ID NO: 112353 - RNA, 11 nt, Artificial Sequence
  Description of Artificial Sequence: Synthetic oligonucleotide
ggaaaugaucc

SEQ ID NO: 112354 - RNA, 12 nt, Artificial Sequence
  Description of Artificial Sequence: Synthetic oligonucleotide
aagaaaugaaac

SEQ ID NO: 112355 - RNA, 12 nt, Artificial Sequence
  Description of Artificial Sequence: Synthetic oligonucleotide
uuuccauccucc

SEQ ID NO: 112356 - RNA, 14 nt, Artificial Sequence
  Description of Artificial Sequence: Synthetic oligonucleotide
cugaaaaucuuuga

SEQ ID NO: 112357 - RNA, 10 nt, Artificial Sequence
  Description of Artificial Sequence: Synthetic oligonucleotide
gccguucagg

SEQ ID NO: 112358 - RNA, 12 nt, Artificial Sequence
  Description of Artificial Sequence: Synthetic oligonucleotide
aggguccagaag

SEQ ID NO: 112359 - RNA, 12 nt, Artificial Sequence
  Description of Artificial Sequence: Synthetic oligonucleotide
caagacugcuug

SEQ ID NO: 112360 - RNA, 12 nt, Artificial Sequence
  Description of Artificial Sequence: Synthetic oligonucleotide
ccaugucuuugg

SEQ ID NO: 112361 - RNA, 10 nt, Artificial Sequence
  Description of Artificial Sequence: Synthetic oligonucleotide
ccugaaacac

SEQ ID NO: 112362 - RNA, 11 nt, Artificial Sequence
  Description of Artificial Sequence: Synthetic oligonucleotide
cucuguaccuc

SEQ ID NO: 112363 - RNA, 11 nt, Artificial Sequence
  Description of Artificial Sequence: Synthetic oligonucleotide
gcaagacaaga

SEQ ID NO: 112364 - RNA, 12 nt, Artificial Sequence
  Description of Artificial Sequence: Synthetic oligonucleotide
caagacaagaaa

SEQ ID NO: 112365 - RNA, 11 nt, Artificial Sequence
  Description of Artificial Sequence: Synthetic oligonucleotide
guacaagaucc

SEQ ID NO: 112366 - RNA, 11 nt, Artificial Sequence
  Description of Artificial Sequence: Synthetic oligonucleotide
guacuugcaga

SEQ ID NO: 112367 - RNA, 12 nt, Artificial Sequence
  Description of Artificial Sequence: Synthetic oligonucleotide
gaucgauacaga

SEQ ID NO: 112368 - RNA, 12 nt, Artificial Sequence
  Description of Artificial Sequence: Synthetic oligonucleotide
auaaaaauaaau

SEQ ID NO: 112369 - RNA, 12 nt, Artificial Sequence
  Description of Artificial Sequence: Synthetic oligonucleotide
aaaaauaaauau

SEQ ID NO: 112370 - RNA, 12 nt, Artificial Sequence
  Description of Artificial Sequence: Synthetic oligonucleotide
uugacugcugug

SEQ ID NO: 112371 - RNA, 12 nt, Artificial Sequence
  Description of Artificial Sequence: Synthetic oligonucleotide
gagaugagagac

SEQ ID NO: 112372 - RNA, 9 nt, Artificial Sequence
  Description of Artificial Sequence: Synthetic oligonucleotide
cccacuugg

SEQ ID NO: 112373 - RNA, 6803 nt, Homo sapiens
cggccccagaaaacccgagcgaguagggggcggcgcgcaggagggaggagaacugggggcgcgggaggcuggugggugucggggguggagauguagaagaugugacgccgcggcccggcgggugccagauuagcggacgcgcugcccgcgguugcaacgggaucccgggcgcugcagcuugggaggcggcucuccccaggcggcguccgcggagacacccauccgugaaccccaggucccgggccgccggcucgccgcgcaccaggggccggcggacagaagagcggccgagcggcucgaggcugggggaccgcgggcgcggccgcgcgcugccgggcgggaggcuggggggccggggccggggccgugccccggagcgggucggaggccggggccggggccgggggacggcggcuccccgcgcggcuccagcggcucggggaucccggccgggccccgcagggaccauggcagccgggagcaucaccacgcugcccgccuugcccgaggauggcggcagcggcgccuucccgcccggccacuucaaggaccccaagcggcuguacugcaaaaacgggggcuucuuccugcgcauccaccccgacggccgaguugacgggguccgggagaagagcgacccucacaucaagcuacaacuucaagcagaagagagaggaguugugucuaucaaaggagugugugcuaaccguuaccuggcuaugaaggaagauggaagauuacuggcuucuaaauguguuacggaugaguguuucuuuuuugaacgauuggaaucuaauaacuacaauacuuaccggucaaggaaauacaccaguugguauguggcacugaaacgaacugggcaguauaaacuuggauccaaaacaggaccugggcagaaagcuauacuuuuucuuccaaugucugcuaagagcugauuuuaauggccacaucuaaucucauuucacaugaaagaagaaguauauuuuagaaauuuguuaaugagaguaaaagaaaauaaauguguauagcucaguuuggauaauuggucaaacaauuuuuuauccaguaguaaaauauguaaccauugucccaguaaagaaaaauaacaaaaguuguaaaauguauauucucccuuuuauauugcaucugcuguuacccagugaagcuuaccuagagcaaugaucuuuuucacgcauuugcuuuauucgaaaagaggcuuuuaaaaugugcauguuuagaaacaaaauuucuucauggaaaucauauacauuagaaaaucacagucagauguuuaaucaauccaaaauguccacuauuucuuaugucauucguuagucuacauguuucuaaacauauaaaugugaauuuaaucaauuccuuucauaguuuuauaauucucuggcaguuccuuaugauagaguuuauaaaacaguccuguguaaacugcuggaaguucuuccacagucaggucaauuuugucaaacccuucucuguacccauacagcagcagccuagcaacucugcuggugaugggaguuguauuuucagucuucgccaggucauugagauccauccacucacaucuuaagcauucuuccuggcaaaaauuuauggugaaugaauauggcuuuaggcggcagaugauauacauaucugacuucccaaaagcuccaggauuugugugcuguugccgaauacucaggacggaccugaauucugauuuuauaccagucucuucaaaaacuucucgaaccgcugugucuccuacguaaaaaaagagauguacaaaucaauaauaauuacacuuuuagaaacuguaucaucaaagauuuucaguuaaaguagcauuauguaaaggcucaaaacauuacccuaacaaaguaaaguuuucaauacaaauucuuugccuuguggauaucaagaaaucccaaaauauuuucuuaccacuguaaauucaagaagcuuuugaaaugcugaauauuucuuuggcugcuacuuggaggcuuaucuaccuguacauuuuuggggucagcucuuuuuaacuucuugcugcucuuuuucccaaaagguaaaaauauagauugaaaaguuaaaacauuuugcauggcugcaguuccuuuguuucuugagauaagauuccaaagaacuuagauucauuucuucaacaccgaaaugcuggagguguuugaucaguuuucaagaaacuuggaauauaaauaauuuuauaauucaacaaagguuuucacauuuuauaagguugauuuuucaauuaaaugcaaauuuguguggcaggauuuuuauugccauuaacauauuuuuguggcugcuuuuucuacacauccagauggucccucuaacugggcuuucucuaauuuugugauguucugucauugucucccaaaguauuuaggagaagcccuuuaaaaagcugccuuccucuaccacuuugcuggaaagcuucacaauugucacagacaaagauuuuuguuccaauacucguuuugccucuauuuuucuuguuugucaaauaguaaaugauauuugcccuugcaguaauucuacuggugaaaaacaugcaaagaagaggaagucacagaaacaugucucaauucccaugugcugugacuguagacugucuuaccauagacugucuuacccauccccuggauaugcucuuguuuuuucccucuaauagcuauggaaagaugcauagaaagaguauaauguuuuaaaacauaaggcauucaucugccauuuuucaauuacaugcugacuucccuuacaauugagauuugcccauagguuaaacaugguuagaaacaacugaaagcauaaaagaaaaaucuaggccgggugcaguggcucaugccuauauucccugcacuuugggaggccaaagcaggaggaucgcuugagcccaggaguucaagaccaaccuggugaaaccccgucucuacaaaaaaacacaaaaaauagccaggcaugguggcguguacauguggucucagauacuugggaggcugaggugggaggguugaucacuugaggcugagaggucaagguugcagugagccauaaucgugccacugcaguccagccuaggcaacagagugagacuuugucucaaaaaaagagaaauuuuccuuaauaagaaaaguaauuuuuacucugaugugcaauacauuuguuauuaaauuuauuauuuaagaugguagcacuagucuuaaauuguauaaaauauccccuaacauguuuaaauguccauuuuuauucauuaugcuuugaaaaauaauuauggggaaauacauguuuguuauuaaauuuauuauuaaagauaguagcacuagucuuaaauuugauauaacaucuccuaacuuguuuaaauguccauuuuuauucuuuaugcuugaaaauaaauuauggggauccuauuuagcucuuaguaccacuaaucaaaaguucggcauguagcucaugaucuaugcuguuucuaugucguggaagcaccggauggggguagugagcaaaucugcccugcucagcagucaccauagcagcugacugaaaaucagcacugccugaguaguuuugaucaguuuaacuugaaucacuaacugacugaaaauugaaugggcaaauaagugcuuuugucuccagaguaugcgggagacccuuccaccucaagauggauauuucuuccccaaggauuucaagaugaauugaaauuuuuaaucaagauagugugcuuuauucuguuguauuuuuuauuauuuuaauauacuguaagccaaacugaaauaacauuugcuguuuuauagguuugaagaacauaggaaaaacuaagagguuuuguuuuuauuuuugcugaugaagagauauguuuaaauauguuguauuguuuuguuuaguuacaggacaauaaugaaauggaguuuauauuuguuauuucuauuuuguuauauuuaauaauagaauuagauugaaauaaaauauaaugggaaauaaucugcagaauguggguuuccugguguuuccucugacucuagugcacugaugaucucugauaaggcucagcugcuuuauaguucucuggcuaaugcagcagauacucuuccugccagugguaauacgauuuuuuaagaaggcaguuugucaauuuuaaucuuguggauaccuuuauacucuuaggguauuauuuuauacaaaagccuugaggauugcauucuauuuucuauaugacccucuugauauuuaaaaaacacuauggauaacaauucuucauuuaccuaguauuaugaaagaaugaaggaguucaaacaaauguguuucccaguuaacuaggguuuacuguuugagccaauauaaauguuuaacuguuugugauggcaguauuccuaaaguacauugcauguuuuccuaaauacagaguuuaaauaauuucaguaauucuuagaugauucagcuucaucauuaagaauaucuuuuguuuuauguugaguuagaaaugccuucauauagacauagucuuucagaccucuacugucaguuuucauuucuagcugcuuucaggguuuuaugaauuuucaggcaaagcuuuaauuuauacuaagcuuaggaaguauggcuaaugccaacggcaguuuuuuucuucuuaauuccacaugacugaggcauauaugaucucuggguaggugaguuguugugacaaccacaagcacuuuuuuuuuuuuuaaagaaaaaaagguagugaauuuuuaaucaucuggacuuuaagaaggauucuggaguauacuuaggccugaaauuauauauauuuggcuuggaaauguguuuuucuucaauuacaucuacaaguaaguacagcugaaauucagaggacccauaagaguucacaugaaaaaaaucaauucauuugaaaaggcaagaugcaggagagaggaagccuugcaaaccugcagacugcuuuuugcccaauauagauuggguaaggcugcaaaacauaagcuuaauuagcucacaugcucugcucucacguggcaccaguggauagugugagagaauuaggcuguagaacaaauggccuucucuuucagcauucacaccacuacaaaaucaucuuuuauaucaacagaagaauaagcauaaacuaagcaaaaggucaauaaguaccugaaaccaagauuggcuagagauauaucuuaaugcaauccauuuucugauggauuguuacgaguuggcuauauaauguauguaugguauuuugauuuguguaaaaguuuuaaaaaucaagcuuuaaguacauggacauuuuuaaauaaaauauuuaaagacaauuuagaaaauugccuuaauaucauuguuggcuaaauagaauaggggacaugcauauuaaggaaaaggucauggagaaauaauauugguaucaaacaaauacauugauuugucaugauacacauugaauuugauccaauaguuuaaggaauagguaggaaaauuugguuucuauuuuucgauuuccuguaaaucagugacauaaauaauucuuagcuuauuuuauauuuccuugucuuaaauacugagcucaguaaguuguguuaggggauuauuucucaguugagacuuucuuauaugacauuuuacuauguuuugacuuccugacuauuaaaaauaaauaguagaaacaauuuucauaaagugaagaauuauauaaucacugcuuuauaacugacuuuauuauauuuauuucaaaguucauuuaaaggcuacuauucauccucugugauggaauggucaggaauuuguuuucucauaguuuaauuccaacaacaauauuagucguauccaaaauaaccuuuaaugcuaaacuuuacugauguauauccaaagcuucuccuuuucagacagauuaauccagaagcagucauaaacagaagaauaggugguauguuccuaaugauauuauuucuacuaauggaauaaacuguaauauuagaaauuaugcugcuaauuauaucagcucugagguaauuucugaaauguucagacucagucggaacaaauuggaaaauuuaaauuuuuauucuuagcuauaaagcaagaaaguaaacacauuaauuuccucaacauuuuuaagccaauuaaaaauauaaaagauacacaccaauaucuucuucaggcucugacaggccuccuggaaacuuccacauauuuuucaacugcaguauaaagucagaaaauaaaguuaacauaacuuucacuaacacacacauauguagauuucacaaaauccaccuauaauuggucaaagugguugagaauauauuuuuuaguaauugcaugcaaaauuuuucuagcuuccauccuuucucccucguuucuucuuuuuuugggggagcugguaacugaugaaaucuuuucccaccuuuucucuucaggaaauauaagugguuuuguuugguuaacgugauacauucuguaugaaugaaacauuggagggaaacaucuacugaauuucuguaauuuaaaauauuuugcugcuaguuaacuaugaacagauagaagaaucuuacagaugcugcuauaaauaaguagaaaauauaaauuucaucacuaaaauaugcuauuuuaaaaucuauuuccuauauuguauuucuaaucagauguauuacucuuauuauuucuauuguauguguuaaugauuuuauguaaaaauguaauugcuuuucaugaguaguaugaauaaaauugauuaguuuguguuuucuugucucccgaaaaaaaaaaaaaaaaaaaaaaaaaaaaaa

SEQ ID NO: 112374 - RNA, 19 nt, Artificial Sequence
  Description of Artificial Sequence: Synthetic oligonucleotide
cggccccagaaaacccgag

SEQ ID NO: 112375 - RNA, 19 nt, Artificial Sequence
  Description of Artificial Sequence: Synthetic oligonucleotide
gcgaguagggggcggcgcg

SEQ ID NO: 112376 - RNA, 19 nt, Artificial Sequence
  Description of Artificial Sequence: Synthetic oligonucleotide
gcaggagggaggagaacug

SEQ ID NO: 112377 - RNA, 19 nt, Artificial Sequence
  Description of Artificial Sequence: Synthetic oligonucleotide
gggggcgcgggaggcuggu

SEQ ID NO: 112378 - RNA, 19 nt, Artificial Sequence
  Description of Artificial Sequence: Synthetic oligonucleotide
ugggugucggggguggaga

SEQ ID NO: 112379 - RNA, 19 nt, Artificial Sequence
  Description of Artificial Sequence: Synthetic oligonucleotide
auguagaagaugugacgcc

SEQ ID NO: 112380 - RNA, 19 nt, Artificial Sequence
  Description of Artificial Sequence: Synthetic oligonucleotide
cgcggcccggcgggugcca

SEQ ID NO: 112381 - RNA, 19 nt, Artificial Sequence
  Description of Artificial Sequence: Synthetic oligonucleotide
agauuagcggacgcgcugc

SEQ ID NO: 112382 - RNA, 19 nt, Artificial Sequence
  Description of Artificial Sequence: Synthetic oligonucleotide
cccgcgguugcaacgggau

SEQ ID NO: 112383 - RNA, 19 nt, Artificial Sequence
  Description of Artificial Sequence: Synthetic oligonucleotide
ucccgggcgcugcagcuug

SEQ ID NO: 112384 - RNA, 19 nt, Artificial Sequence
  Description of Artificial Sequence: Synthetic oligonucleotide
gggaggcggcucuccccag

SEQ ID NO: 112385 - RNA, 19 nt, Artificial Sequence
  Description of Artificial Sequence: Synthetic oligonucleotide
ggcggcguccgcggagaca

SEQ ID NO: 112386 - RNA, 19 nt, Artificial Sequence
  Description of Artificial Sequence: Synthetic oligonucleotide
acccauccgugaaccccag

SEQ ID NO: 112387 - RNA, 19 nt, Artificial Sequence
  Description of Artificial Sequence: Synthetic oligonucleotide
ggucccgggccgccggcuc

SEQ ID NO: 112388 - RNA, 19 nt, Artificial Sequence
  Description of Artificial Sequence: Synthetic oligonucleotide
cgccgcgcaccaggggccg

SEQ ID NO: 112389 - RNA, 19 nt, Artificial Sequence
  Description of Artificial Sequence: Synthetic oligonucleotide
ggcggacagaagagcggcc

SEQ ID NO: 112390 - RNA, 19 nt, Artificial Sequence
  Description of Artificial Sequence: Synthetic oligonucleotide
cgagcggcucgaggcuggg

SEQ ID NO: 112391 - RNA, 19 nt, Artificial Sequence
  Description of Artificial Sequence: Synthetic oligonucleotide
gggaccgcgggcgcggccg

SEQ ID NO: 112392 - RNA, 19 nt, Artificial Sequence
  Description of Artificial Sequence: Synthetic oligonucleotide
gcgcgcugccgggcgggag

SEQ ID NO: 112393 - RNA, 19 nt, Artificial Sequence
  Description of Artificial Sequence: Synthetic oligonucleotide
ggcuggggggccggggccg

SEQ ID NO: 112394 - RNA, 19 nt, Artificial Sequence
  Description of Artificial Sequence: Synthetic oligonucleotide
ggggccgugccccggagcg

SEQ ID NO: 112395 - RNA, 19 nt, Artificial Sequence
  Description of Artificial Sequence: Synthetic oligonucleotide
gggucggaggccggggccg

SEQ ID NO: 112396 - RNA, 19 nt, Artificial Sequence
  Description of Artificial Sequence: Synthetic oligonucleotide
ggggccgggggacggcggc

SEQ ID NO: 112397 - RNA, 19 nt, Artificial Sequence
  Description of Artificial Sequence: Synthetic oligonucleotide
cuccccgcgcggcuccagc

SEQ ID NO: 112398 - RNA, 19 nt, Artificial Sequence
  Description of Artificial Sequence: Synthetic oligonucleotide
cggcucggggaucccggcc

SEQ ID NO: 112399 - RNA, 19 nt, Artificial Sequence
  Description of Artificial Sequence: Synthetic oligonucleotide
cgggccccgcagggaccau

SEQ ID NO: 112400 - RNA, 19 nt, Artificial Sequence
  Description of Artificial Sequence: Synthetic oligonucleotide
uggcagccgggagcaucac

SEQ ID NO: 112401 - RNA, 19 nt, Artificial Sequence
  Description of Artificial Sequence: Synthetic oligonucleotide
ccacgcugcccgccuugcc

SEQ ID NO: 112402 - RNA, 19 nt, Artificial Sequence
  Description of Artificial Sequence: Synthetic oligonucleotide
ccgaggauggcggcagcgg

SEQ ID NO: 112403 - RNA, 19 nt, Artificial Sequence
  Description of Artificial Sequence: Synthetic oligonucleotide
gcgccuucccgcccggcca

SEQ ID NO: 112404 - RNA, 19 nt, Artificial Sequence
  Description of Artificial Sequence: Synthetic oligonucleotide
acuucaaggaccccaagcg

SEQ ID NO: 112405 - RNA, 19 nt, Artificial Sequence
  Description of Artificial Sequence: Synthetic oligonucleotide
ggcuguacugcaaaaacgg

SEQ ID NO: 112406 - RNA, 19 nt, Artificial Sequence
  Description of Artificial Sequence: Synthetic oligonucleotide
ggggcuucuuccugcgcau

SEQ ID NO: 112407 - RNA, 19 nt, Artificial Sequence
  Description of Artificial Sequence: Synthetic oligonucleotide
uccaccccgacggccgagu

SEQ ID NO: 112408 - RNA, 19 nt, Artificial Sequence
  Description of Artificial Sequence: Synthetic oligonucleotide
uugacgggguccgggagaa

SEQ ID NO: 112409 - RNA, 19 nt, Artificial Sequence
  Description of Artificial Sequence: Synthetic oligonucleotide
agagcgacccucacaucaa

SEQ ID NO: 112410 - RNA, 19 nt, Artificial Sequence
  Description of Artificial Sequence: Synthetic oligonucleotide
agcuacaacuucaagcaga

SEQ ID NO: 112411 - RNA, 19 nt, Artificial Sequence
  Description of Artificial Sequence: Synthetic oligonucleotide
aagagagaggaguuguguc

SEQ ID NO: 112412 - RNA, 19 nt, Artificial Sequence
  Description of Artificial Sequence: Synthetic oligonucleotide
cuaucaaaggagugugugc

SEQ ID NO: 112413 - RNA, 19 nt, Artificial Sequence
  Description of Artificial Sequence: Synthetic oligonucleotide
cuaaccguuaccuggcuau

SEQ ID NO: 112414 - RNA, 19 nt, Artificial Sequence
  Description of Artificial Sequence: Synthetic oligonucleotide
ugaaggaagauggaagauu

SEQ ID NO: 112415 - RNA, 19 nt, Artificial Sequence
  Description of Artificial Sequence: Synthetic oligonucleotide
uacuggcuucuaaaugugu

SEQ ID NO: 112416 - RNA, 19 nt, Artificial Sequence
  Description of Artificial Sequence: Synthetic oligonucleotide
uuacggaugaguguuucuu

SEQ ID NO: 112417 - RNA, 19 nt, Artificial Sequence
  Description of Artificial Sequence: Synthetic oligonucleotide
uuuuugaacgauuggaauc

SEQ ID NO: 112418 - RNA, 19 nt, Artificial Sequence
  Description of Artificial Sequence: Synthetic oligonucleotide
cuaauaacuacaauacuua

SEQ ID NO: 112419 - RNA, 19 nt, Artificial Sequence
  Description of Artificial Sequence: Synthetic oligonucleotide
accggucaaggaaauacac

SEQ ID NO: 112420 - RNA, 19 nt, Artificial Sequence
  Description of Artificial Sequence: Synthetic oligonucleotide
ccaguugguauguggcacu

SEQ ID NO: 112421 - RNA, 19 nt, Artificial Sequence
  Description of Artificial Sequence: Synthetic oligonucleotide
ugaaacgaacugggcagua

SEQ ID NO: 112422 - RNA, 19 nt, Artificial Sequence
  Description of Artificial Sequence: Synthetic oligonucleotide
auaaacuuggauccaaaac

SEQ ID NO: 112423 - RNA, 19 nt, Artificial Sequence
  Description of Artificial Sequence: Synthetic oligonucleotide
caggaccugggcagaaagc

SEQ ID NO: 112424 - RNA, 19 nt, Artificial Sequence
  Description of Artificial Sequence: Synthetic oligonucleotide
cuauacuuuuucuuccaau

SEQ ID NO: 112425 - RNA, 19 nt, Artificial Sequence
  Description of Artificial Sequence: Synthetic oligonucleotide
ugucugcuaagagcugauu

SEQ ID NO: 112426 - RNA, 19 nt, Artificial Sequence
  Description of Artificial Sequence: Synthetic oligonucleotide
uuuaauggccacaucuaau

SEQ ID NO: 112427 - RNA, 19 nt, Artificial Sequence
  Description of Artificial Sequence: Synthetic oligonucleotide
ucucauuucacaugaaaga

SEQ ID NO: 112428 - RNA, 19 nt, Artificial Sequence
  Description of Artificial Sequence: Synthetic oligonucleotide
aagaaguauauuuuagaaa

SEQ ID NO: 112429 - RNA, 19 nt, Artificial Sequence
  Description of Artificial Sequence: Synthetic oligonucleotide
auuuguuaaugagaguaaa

SEQ ID NO: 112430 - RNA, 19 nt, Artificial Sequence
  Description of Artificial Sequence: Synthetic oligonucleotide
aagaaaauaaauguguaua

SEQ ID NO: 112431 - RNA, 19 nt, Artificial Sequence
  Description of Artificial Sequence: Synthetic oligonucleotide
agcucaguuuggauaauug

SEQ ID NO: 112432 - RNA, 19 nt, Artificial Sequence
  Description of Artificial Sequence: Synthetic oligonucleotide
ggucaaacaauuuuuuauc

SEQ ID NO: 112433 - RNA, 19 nt, Artificial Sequence
  Description of Artificial Sequence: Synthetic oligonucleotide
ccaguaguaaaauauguaa

SEQ ID NO: 112434 - RNA, 19 nt, Artificial Sequence
  Description of Artificial Sequence: Synthetic oligonucleotide
accauugucccaguaaaga

SEQ ID NO: 112435 - RNA, 19 nt, Artificial Sequence
  Description of Artificial Sequence: Synthetic oligonucleotide
aaaaauaacaaaaguugua

SEQ ID NO: 112436 - RNA, 19 nt, Artificial Sequence
  Description of Artificial Sequence: Synthetic oligonucleotide
aaaauguauauucucccuu

SEQ ID NO: 112437 - RNA, 19 nt, Artificial Sequence
  Description of Artificial Sequence: Synthetic oligonucleotide
uuuauauugcaucugcugu

SEQ ID NO: 112438 - RNA, 19 nt, Artificial Sequence
  Description of Artificial Sequence: Synthetic oligonucleotide
uuacccagugaagcuuacc

SEQ ID NO: 112439 - RNA, 19 nt, Artificial Sequence
  Description of Artificial Sequence: Synthetic oligonucleotide
cuagagcaaugaucuuuuu

SEQ ID NO: 112440 - RNA, 19 nt, Artificial Sequence
  Description of Artificial Sequence: Synthetic oligonucleotide
ucacgcauuugcuuuauuc

SEQ ID NO: 112441 - RNA, 19 nt, Artificial Sequence
  Description of Artificial Sequence: Synthetic oligonucleotide
cgaaaagaggcuuuuaaaa

SEQ ID NO: 112442 - RNA, 19 nt, Artificial Sequence
  Description of Artificial Sequence: Synthetic oligonucleotide
augugcauguuuagaaaca

SEQ ID NO: 112443 - RNA, 19 nt, Artificial Sequence
  Description of Artificial Sequence: Synthetic oligonucleotide
aaaauuucuucauggaaau

SEQ ID NO: 112444 - RNA, 19 nt, Artificial Sequence
  Description of Artificial Sequence: Synthetic oligonucleotide
ucauauacauuagaaaauc

SEQ ID NO: 112445 - RNA, 19 nt, Artificial Sequence
  Description of Artificial Sequence: Synthetic oligonucleotide
cacagucagauguuuaauc

SEQ ID NO: 112446 - RNA, 19 nt, Artificial Sequence
  Description of Artificial Sequence: Synthetic oligonucleotide
caauccaaaauguccacua

SEQ ID NO: 112447 - RNA, 19 nt, Artificial Sequence
  Description of Artificial Sequence: Synthetic oligonucleotide
auuucuuaugucauucguu

SEQ ID NO: 112448 - RNA, 19 nt, Artificial Sequence
  Description of Artificial Sequence: Synthetic oligonucleotide
uagucuacauguuucuaaa

SEQ ID NO: 112449 - RNA, 19 nt, Artificial Sequence
  Description of Artificial Sequence: Synthetic oligonucleotide
acauauaaaugugaauuua

SEQ ID NO: 112450 - RNA, 19 nt, Artificial Sequence
  Description of Artificial Sequence: Synthetic oligonucleotide
aaucaauuccuuucauagu

SEQ ID NO: 112451 - RNA, 19 nt, Artificial Sequence
  Description of Artificial Sequence: Synthetic oligonucleotide
uuuuauaauucucuggcag

SEQ ID NO: 112452 - RNA, 19 nt, Artificial Sequence
  Description of Artificial Sequence: Synthetic oligonucleotide
guuccuuaugauagaguuu

SEQ ID NO: 112453 - RNA, 19 nt, Artificial Sequence
  Description of Artificial Sequence: Synthetic oligonucleotide
uauaaaacaguccugugua

SEQ ID NO: 112454 - RNA, 19 nt, Artificial Sequence
  Description of Artificial Sequence: Synthetic oligonucleotide
aaacugcuggaaguucuuc

SEQ ID NO: 112455 - RNA, 19 nt, Artificial Sequence
  Description of Artificial Sequence: Synthetic oligonucleotide
ccacagucaggucaauuuu

SEQ ID NO: 112456 - RNA, 19 nt, Artificial Sequence
  Description of Artificial Sequence: Synthetic oligonucleotide
ugucaaacccuucucugua

SEQ ID NO: 112457 - RNA, 19 nt, Artificial Sequence
  Description of Artificial Sequence: Synthetic oligonucleotide
acccauacagcagcagccu

SEQ ID NO: 112458 - RNA, 19 nt, Artificial Sequence
  Description of Artificial Sequence: Synthetic oligonucleotide
uagcaacucugcuggugau

SEQ ID NO: 112459 - RNA, 19 nt, Artificial Sequence
  Description of Artificial Sequence: Synthetic oligonucleotide
ugggaguuguauuuucagu

SEQ ID NO: 112460 - RNA, 19 nt, Artificial Sequence
  Description of Artificial Sequence: Synthetic oligonucleotide
ucuucgccaggucauugag

SEQ ID NO: 112461 - RNA, 19 nt, Artificial Sequence
  Description of Artificial Sequence: Synthetic oligonucleotide
gauccauccacucacaucu

SEQ ID NO: 112462 - RNA, 19 nt, Artificial Sequence
  Description of Artificial Sequence: Synthetic oligonucleotide
uuaagcauucuuccuggca

SEQ ID NO: 112463 - RNA, 19 nt, Artificial Sequence
  Description of Artificial Sequence: Synthetic oligonucleotide
aaaaauuuauggugaauga

SEQ ID NO: 112464 - RNA, 19 nt, Artificial Sequence
  Description of Artificial Sequence: Synthetic oligonucleotide
aauauggcuuuaggcggca

SEQ ID NO: 112465 - RNA, 19 nt, Artificial Sequence
  Description of Artificial Sequence: Synthetic oligonucleotide
agaugauauacauaucuga

SEQ ID NO: 112466 - RNA, 19 nt, Artificial Sequence
  Description of Artificial Sequence: Synthetic oligonucleotide
acuucccaaaagcuccagg

SEQ ID NO: 112467 - RNA, 19 nt, Artificial Sequence
  Description of Artificial Sequence: Synthetic oligonucleotide
gauuugugugcuguugccg

SEQ ID NO: 112468 - RNA, 19 nt, Artificial Sequence
  Description of Artificial Sequence: Synthetic oligonucleotide
gaauacucaggacggaccu

SEQ ID NO: 112469 - RNA, 19 nt, Artificial Sequence
  Description of Artificial Sequence: Synthetic oligonucleotide
ugaauucugauuuuauacc

SEQ ID NO: 112470 - RNA, 19 nt, Artificial Sequence
  Description of Artificial Sequence: Synthetic oligonucleotide
cagucucuucaaaaacuuc

SEQ ID NO: 112471 - RNA, 19 nt, Artificial Sequence
  Description of Artificial Sequence: Synthetic oligonucleotide
cucgaaccgcugugucucc

SEQ ID NO: 112472 - RNA, 19 nt, Artificial Sequence
  Description of Artificial Sequence: Synthetic oligonucleotide
cuacguaaaaaaagagaug

SEQ ID NO: 112473 - RNA, 19 nt, Artificial Sequence
  Description of Artificial Sequence: Synthetic oligonucleotide
guacaaaucaauaauaauu

SEQ ID NO: 112474 - RNA, 19 nt, Artificial Sequence
  Description of Artificial Sequence: Synthetic oligonucleotide
uacacuuuuagaaacugua

SEQ ID NO: 112475 - RNA, 19 nt, Artificial Sequence
  Description of Artificial Sequence: Synthetic oligonucleotide
aucaucaaagauuuucagu

SEQ ID NO: 112476 - RNA, 19 nt, Artificial Sequence
  Description of Artificial Sequence: Synthetic oligonucleotide
uuaaaguagcauuauguaa

SEQ ID NO: 112477 - RNA, 19 nt, Artificial Sequence
  Description of Artificial Sequence: Synthetic oligonucleotide
aaggcucaaaacauuaccc

SEQ ID NO: 112478 - RNA, 19 nt, Artificial Sequence
  Description of Artificial Sequence: Synthetic oligonucleotide
cuaacaaaguaaaguuuuc

SEQ ID NO: 112479 - RNA, 19 nt, Artificial Sequence
  Description of Artificial Sequence: Synthetic oligonucleotide
caauacaaauucuuugccu

SEQ ID NO: 112480 - RNA, 19 nt, Artificial Sequence
  Description of Artificial Sequence: Synthetic oligonucleotide
uuguggauaucaagaaauc

SEQ ID NO: 112481 - RNA, 19 nt, Artificial Sequence
  Description of Artificial Sequence: Synthetic oligonucleotide
cccaaaauauuuucuuacc

SEQ ID NO: 112482 - RNA, 19 nt, Artificial Sequence
  Description of Artificial Sequence: Synthetic oligonucleotide
cacuguaaauucaagaagc

SEQ ID NO: 112483 - RNA, 19 nt, Artificial Sequence
  Description of Artificial Sequence: Synthetic oligonucleotide
cuuuugaaaugcugaauau

SEQ ID NO: 112484 - RNA, 19 nt, Artificial Sequence
  Description of Artificial Sequence: Synthetic oligonucleotide
uuucuuuggcugcuacuug

SEQ ID NO: 112485 - RNA, 19 nt, Artificial Sequence
  Description of Artificial Sequence: Synthetic oligonucleotide
ggaggcuuaucuaccugua

SEQ ID NO: 112486 - RNA, 19 nt, Artificial Sequence
  Description of Artificial Sequence: Synthetic oligonucleotide
acauuuuuggggucagcuc

SEQ ID NO: 112487 - RNA, 19 nt, Artificial Sequence
  Description of Artificial Sequence: Synthetic oligonucleotide
cuuuuuaacuucuugcugc

SEQ ID NO: 112488 - RNA, 19 nt, Artificial Sequence
  Description of Artificial Sequence: Synthetic oligonucleotide
cucuuuuucccaaaaggua

SEQ ID NO: 112489 - RNA, 19 nt, Artificial Sequence
  Description of Artificial Sequence: Synthetic oligonucleotide
aaaaauauagauugaaaag

SEQ ID NO: 112490 - RNA, 19 nt, Artificial Sequence
  Description of Artificial Sequence: Synthetic oligonucleotide
guuaaaacauuuugcaugg

SEQ ID NO: 112491 - RNA, 19 nt, Artificial Sequence
  Description of Artificial Sequence: Synthetic oligonucleotide
gcugcaguuccuuuguuuc

SEQ ID NO: 112492 - RNA, 19 nt, Artificial Sequence
  Description of Artificial Sequence: Synthetic oligonucleotide
cuugagauaagauuccaaa

SEQ ID NO: 112493 - RNA, 19 nt, Artificial Sequence
  Description of Artificial Sequence: Synthetic oligonucleotide
agaacuuagauucauuucu

SEQ ID NO: 112494 - RNA, 19 nt, Artificial Sequence
  Description of Artificial Sequence: Synthetic oligonucleotide
uucaacaccgaaaugcugg

SEQ ID NO: 112495 - RNA, 19 nt, Artificial Sequence
  Description of Artificial Sequence: Synthetic oligonucleotide
gagguguuugaucaguuuu

SEQ ID NO: 112496 - RNA, 19 nt, Artificial Sequence
  Description of Artificial Sequence: Synthetic oligonucleotide
ucaagaaacuuggaauaua

SEQ ID NO: 112497 - RNA, 19 nt, Artificial Sequence
  Description of Artificial Sequence: Synthetic oligonucleotide
aaauaauuuuauaauucaa

SEQ ID NO: 112498 - RNA, 19 nt, Artificial Sequence
  Description of Artificial Sequence: Synthetic oligonucleotide
acaaagguuuucacauuuu

SEQ ID NO: 112499 - RNA, 19 nt, Artificial Sequence
  Description of Artificial Sequence: Synthetic oligonucleotide
uauaagguugauuuuucaa

SEQ ID NO: 112500 - RNA, 19 nt, Artificial Sequence
  Description of Artificial Sequence: Synthetic oligonucleotide
auuaaaugcaaauuugugu

SEQ ID NO: 112501 - RNA, 19 nt, Artificial Sequence
  Description of Artificial Sequence: Synthetic oligonucleotide
uggcaggauuuuuauugcc

SEQ ID NO: 112502 - RNA, 19 nt, Artificial Sequence
  Description of Artificial Sequence: Synthetic oligonucleotide
cauuaacauauuuuugugg

SEQ ID NO: 112503 - RNA, 19 nt, Artificial Sequence
  Description of Artificial Sequence: Synthetic oligonucleotide
gcugcuuuuucuacacauc

SEQ ID NO: 112504 - RNA, 19 nt, Artificial Sequence
  Description of Artificial Sequence: Synthetic oligonucleotide
ccagauggucccucuaacu

SEQ ID NO: 112505 - RNA, 19 nt, Artificial Sequence
  Description of Artificial Sequence: Synthetic oligonucleotide
ugggcuuucucuaauuuug

SEQ ID NO: 112506 - RNA, 19 nt, Artificial Sequence
  Description of Artificial Sequence: Synthetic oligonucleotide
gugauguucugucauuguc

SEQ ID NO: 112507 - RNA, 19 nt, Artificial Sequence
  Description of Artificial Sequence: Synthetic oligonucleotide
cucccaaaguauuuaggag

SEQ ID NO: 112508 - RNA, 19 nt, Artificial Sequence
  Description of Artificial Sequence: Synthetic oligonucleotide
gaagcccuuuaaaaagcug

SEQ ID NO: 112509 - RNA, 19 nt, Artificial Sequence
  Description of Artificial Sequence: Synthetic oligonucleotide
gccuuccucuaccacuuug

SEQ ID NO: 112510 - RNA, 19 nt, Artificial Sequence
  Description of Artificial Sequence: Synthetic oligonucleotide
gcuggaaagcuucacaauu

SEQ ID NO: 112511 - RNA, 19 nt, Artificial Sequence
  Description of Artificial Sequence: Synthetic oligonucleotide
ugucacagacaaagauuuu

SEQ ID NO: 112512 - RNA, 19 nt, Artificial Sequence
  Description of Artificial Sequence: Synthetic oligonucleotide
uuguuccaauacucguuuu

SEQ ID NO: 112513 - RNA, 19 nt, Artificial Sequence
  Description of Artificial Sequence: Synthetic oligonucleotide
ugccucuauuuuucuuguu

SEQ ID NO: 112514 - RNA, 19 nt, Artificial Sequence
  Description of Artificial Sequence: Synthetic oligonucleotide
uugucaaauaguaaaugau

SEQ ID NO: 112515 - RNA, 19 nt, Artificial Sequence
  Description of Artificial Sequence: Synthetic oligonucleotide
uauuugcccuugcaguaau

SEQ ID NO: 112516 - RNA, 19 nt, Artificial Sequence
  Description of Artificial Sequence: Synthetic oligonucleotide
uucuacuggugaaaaacau

SEQ ID NO: 112517 - RNA, 19 nt, Artificial Sequence
  Description of Artificial Sequence: Synthetic oligonucleotide
ugcaaagaagaggaaguca

SEQ ID NO: 112518 - RNA, 19 nt, Artificial Sequence
  Description of Artificial Sequence: Synthetic oligonucleotide
acagaaacaugucucaauu

SEQ ID NO: 112519 - RNA, 19 nt, Artificial Sequence
  Description of Artificial Sequence: Synthetic oligonucleotide
ucccaugugcugugacugu

SEQ ID NO: 112520 - RNA, 19 nt, Artificial Sequence
  Description of Artificial Sequence: Synthetic oligonucleotide
uagacugucuuaccauaga

SEQ ID NO: 112521 - RNA, 19 nt, Artificial Sequence
  Description of Artificial Sequence: Synthetic oligonucleotide
acugucuuacccauccccu

SEQ ID NO: 112522 - RNA, 19 nt, Artificial Sequence
  Description of Artificial Sequence: Synthetic oligonucleotide
uggauaugcucuuguuuuu

SEQ ID NO: 112523 - RNA, 19 nt, Artificial Sequence
  Description of Artificial Sequence: Synthetic oligonucleotide
uucccucuaauagcuaugg

SEQ ID NO: 112524 - RNA, 19 nt, Artificial Sequence
  Description of Artificial Sequence: Synthetic oligonucleotide
gaaagaugcauagaaagag

SEQ ID NO: 112525 - RNA, 19 nt, Artificial Sequence
  Description of Artificial Sequence: Synthetic oligonucleotide
guauaauguuuuaaaacau

SEQ ID NO: 112526 - RNA, 19 nt, Artificial Sequence
  Description of Artificial Sequence: Synthetic oligonucleotide
uaaggcauucaucugccau

SEQ ID NO: 112527 - RNA, 19 nt, Artificial Sequence
  Description of Artificial Sequence: Synthetic oligonucleotide
uuuuucaauuacaugcuga

SEQ ID NO: 112528 - RNA, 19 nt, Artificial Sequence
  Description of Artificial Sequence: Synthetic oligonucleotide
acuucccuuacaauugaga

SEQ ID NO: 112529 - RNA, 19 nt, Artificial Sequence
  Description of Artificial Sequence: Synthetic oligonucleotide
auuugcccauagguuaaac

SEQ ID NO: 112530 - RNA, 19 nt, Artificial Sequence
  Description of Artificial Sequence: Synthetic oligonucleotide
caugguuagaaacaacuga

SEQ ID NO: 112531 - RNA, 19 nt, Artificial Sequence
  Description of Artificial Sequence: Synthetic oligonucleotide
aaagcauaaaagaaaaauc

SEQ ID NO: 112532 - RNA, 19 nt, Artificial Sequence
  Description of Artificial Sequence: Synthetic oligonucleotide
cuaggccgggugcaguggc

SEQ ID NO: 112533 - RNA, 19 nt, Artificial Sequence
  Description of Artificial Sequence: Synthetic oligonucleotide
cucaugccuauauucccug

SEQ ID NO: 112534 - RNA, 19 nt, Artificial Sequence
  Description of Artificial Sequence: Synthetic oligonucleotide
gcacuuugggaggccaaag

SEQ ID NO: 112535 - RNA, 19 nt, Artificial Sequence
  Description of Artificial Sequence: Synthetic oligonucleotide
gcaggaggaucgcuugagc

SEQ ID NO: 112536 - RNA, 19 nt, Artificial Sequence
  Description of Artificial Sequence: Synthetic oligonucleotide
cccaggaguucaagaccaa

SEQ ID NO: 112537 - RNA, 19 nt, Artificial Sequence
  Description of Artificial Sequence: Synthetic oligonucleotide
accuggugaaaccccgucu

SEQ ID NO: 112538 - RNA, 19 nt, Artificial Sequence
  Description of Artificial Sequence: Synthetic oligonucleotide
ucuacaaaaaaacacaaaa

SEQ ID NO: 112539 - RNA, 19 nt, Artificial Sequence
  Description of Artificial Sequence: Synthetic oligonucleotide
aaauagccaggcauggugg

SEQ ID NO: 112540 - RNA, 19 nt, Artificial Sequence
  Description of Artificial Sequence: Synthetic oligonucleotide
gcguguacauguggucuca

SEQ ID NO: 112541 - RNA, 19 nt, Artificial Sequence
  Description of Artificial Sequence: Synthetic oligonucleotide
agauacuugggaggcugag

SEQ ID NO: 112542 - RNA, 19 nt, Artificial Sequence
  Description of Artificial Sequence: Synthetic oligonucleotide
ggugggaggguugaucacu

SEQ ID NO: 112543 - RNA, 19 nt, Artificial Sequence
  Description of Artificial Sequence: Synthetic oligonucleotide
uugaggcugagaggucaag

SEQ ID NO: 112544 - RNA, 19 nt, Artificial Sequence
  Description of Artificial Sequence: Synthetic oligonucleotide
gguugcagugagccauaau

SEQ ID NO: 112545 - RNA, 19 nt, Artificial Sequence
  Description of Artificial Sequence: Synthetic oligonucleotide
ucgugccacugcaguccag

SEQ ID NO: 112546 - RNA, 19 nt, Artificial Sequence
  Description of Artificial Sequence: Synthetic oligonucleotide
gccuaggcaacagagugag

SEQ ID NO: 112547 - RNA, 19 nt, Artificial Sequence
  Description of Artificial Sequence: Synthetic oligonucleotide
gacuuugucucaaaaaaag

SEQ ID NO: 112548 - RNA, 19 nt, Artificial Sequence
  Description of Artificial Sequence: Synthetic oligonucleotide
gagaaauuuuccuuaauaa

SEQ ID NO: 112549 - RNA, 19 nt, Artificial Sequence
  Description of Artificial Sequence: Synthetic oligonucleotide
agaaaaguaauuuuuacuc

SEQ ID NO: 112550 - RNA, 19 nt, Artificial Sequence
  Description of Artificial Sequence: Synthetic oligonucleotide
cugaugugcaauacauuug

SEQ ID NO: 112551 - RNA, 19 nt, Artificial Sequence
  Description of Artificial Sequence: Synthetic oligonucleotide
guuauuaaauuuauuauuu

SEQ ID NO: 112552 - RNA, 19 nt, Artificial Sequence
  Description of Artificial Sequence: Synthetic oligonucleotide
uaagaugguagcacuaguc

SEQ ID NO: 112553 - RNA, 19 nt, Artificial Sequence
  Description of Artificial Sequence: Synthetic oligonucleotide
cuuaaauuguauaaaauau

SEQ ID NO: 112554 - RNA, 19 nt, Artificial Sequence
  Description of Artificial Sequence: Synthetic oligonucleotide
uccccuaacauguuuaaau

SEQ ID NO: 112555 - RNA, 19 nt, Artificial Sequence
  Description of Artificial Sequence: Synthetic oligonucleotide
uguccauuuuuauucauua

SEQ ID NO: 112556 - RNA, 19 nt, Artificial Sequence
  Description of Artificial Sequence: Synthetic oligonucleotide
augcuuugaaaaauaauua

SEQ ID NO: 112557 - RNA, 19 nt, Artificial Sequence
  Description of Artificial Sequence: Synthetic oligonucleotide
auggggaaauacauguuug

SEQ ID NO: 112558 - RNA, 19 nt, Artificial Sequence
  Description of Artificial Sequence: Synthetic oligonucleotide
guuauuaaauuuauuauua

SEQ ID NO: 112559 - RNA, 19 nt, Artificial Sequence
  Description of Artificial Sequence: Synthetic oligonucleotide
aaagauaguagcacuaguc

SEQ ID NO: 112560 - RNA, 19 nt, Artificial Sequence
  Description of Artificial Sequence: Synthetic oligonucleotide
cuuaaauuugauauaacau

SEQ ID NO: 112561 - RNA, 19 nt, Artificial Sequence
  Description of Artificial Sequence: Synthetic oligonucleotide
ucuccuaacuuguuuaaau

SEQ ID NO: 112562 - RNA, 19 nt, Artificial Sequence
  Description of Artificial Sequence: Synthetic oligonucleotide
uguccauuuuuauucuuua

SEQ ID NO: 112563 - RNA, 19 nt, Artificial Sequence
  Description of Artificial Sequence: Synthetic oligonucleotide
augcuugaaaauaaauuau

SEQ ID NO: 112564 - RNA, 19 nt, Artificial Sequence
  Description of Artificial Sequence: Synthetic oligonucleotide
uggggauccuauuuagcuc

SEQ ID NO: 112565 - RNA, 19 nt, Artificial Sequence
  Description of Artificial Sequence: Synthetic oligonucleotide
cuuaguaccacuaaucaaa

SEQ ID NO: 112566 - RNA, 19 nt, Artificial Sequence
  Description of Artificial Sequence: Synthetic oligonucleotide
aaguucggcauguagcuca

SEQ ID NO: 112567 - RNA, 19 nt, Artificial Sequence
  Description of Artificial Sequence: Synthetic oligonucleotide
augaucuaugcuguuucua

SEQ ID NO: 112568 - RNA, 19 nt, Artificial Sequence
  Description of Artificial Sequence: Synthetic oligonucleotide
augucguggaagcaccgga

SEQ ID NO: 112569 - RNA, 19 nt, Artificial Sequence
  Description of Artificial Sequence: Synthetic oligonucleotide
auggggguagugagcaaau

SEQ ID NO: 112570 - RNA, 19 nt, Artificial Sequence
  Description of Artificial Sequence: Synthetic oligonucleotide
ucugcccugcucagcaguc

SEQ ID NO: 112571 - RNA, 19 nt, Artificial Sequence
  Description of Artificial Sequence: Synthetic oligonucleotide
caccauagcagcugacuga

SEQ ID NO: 112572 - RNA, 19 nt, Artificial Sequence
  Description of Artificial Sequence: Synthetic oligonucleotide
aaaaucagcacugccugag

SEQ ID NO: 112573 - RNA, 19 nt, Artificial Sequence
  Description of Artificial Sequence: Synthetic oligonucleotide
guaguuuugaucaguuuaa

SEQ ID NO: 112574 - RNA, 19 nt, Artificial Sequence
  Description of Artificial Sequence: Synthetic oligonucleotide
acuugaaucacuaacugac

SEQ ID NO: 112575 - RNA, 19 nt, Artificial Sequence
  Description of Artificial Sequence: Synthetic oligonucleotide
cugaaaauugaaugggcaa

SEQ ID NO: 112576 - RNA, 19 nt, Artificial Sequence
  Description of Artificial Sequence: Synthetic oligonucleotide
aauaagugcuuuugucucc

SEQ ID NO: 112577 - RNA, 19 nt, Artificial Sequence
  Description of Artificial Sequence: Synthetic oligonucleotide
cagaguaugcgggagaccc

SEQ ID NO: 112578 - RNA, 19 nt, Artificial Sequence
  Description of Artificial Sequence: Synthetic oligonucleotide
cuuccaccucaagauggau

SEQ ID NO: 112579 - RNA, 19 nt, Artificial Sequence
  Description of Artificial Sequence: Synthetic oligonucleotide
uauuucuuccccaaggauu

SEQ ID NO: 112580 - RNA, 19 nt, Artificial Sequence
  Description of Artificial Sequence: Synthetic oligonucleotide
uucaagaugaauugaaauu

SEQ ID NO: 112581 - RNA, 19 nt, Artificial Sequence
  Description of Artificial Sequence: Synthetic oligonucleotide
uuuuaaucaagauagugug

SEQ ID NO: 112582 - RNA, 19 nt, Artificial Sequence
  Description of Artificial Sequence: Synthetic oligonucleotide
gcuuuauucuguuguauuu

SEQ ID NO: 112583 - RNA, 19 nt, Artificial Sequence
  Description of Artificial Sequence: Synthetic oligonucleotide
uuuuauuauuuuaauauac

SEQ ID NO: 112584 - RNA, 19 nt, Artificial Sequence
  Description of Artificial Sequence: Synthetic oligonucleotide
cuguaagccaaacugaaau

SEQ ID NO: 112585 - RNA, 19 nt, Artificial Sequence
  Description of Artificial Sequence: Synthetic oligonucleotide
uaacauuugcuguuuuaua

SEQ ID NO: 112586 - RNA, 19 nt, Artificial Sequence
  Description of Artificial Sequence: Synthetic oligonucleotide
agguuugaagaacauagga

SEQ ID NO: 112587 - RNA, 19 nt, Artificial Sequence
  Description of Artificial Sequence: Synthetic oligonucleotide
aaaaacuaagagguuuugu

SEQ ID NO: 112588 - RNA, 19 nt, Artificial Sequence
  Description of Artificial Sequence: Synthetic oligonucleotide
uuuuuauuuuugcugauga

SEQ ID NO: 112589 - RNA, 19 nt, Artificial Sequence
  Description of Artificial Sequence: Synthetic oligonucleotide
aagagauauguuuaaauau

SEQ ID NO: 112590 - RNA, 19 nt, Artificial Sequence
  Description of Artificial Sequence: Synthetic oligonucleotide
uguuguauuguuuuguuua

SEQ ID NO: 112591 - RNA, 19 nt, Artificial Sequence
  Description of Artificial Sequence: Synthetic oligonucleotide
aguuacaggacaauaauga

SEQ ID NO: 112592 - RNA, 19 nt, Artificial Sequence
  Description of Artificial Sequence: Synthetic oligonucleotide
aaauggaguuuauauuugu

SEQ ID NO: 112593 - RNA, 19 nt, Artificial Sequence
  Description of Artificial Sequence: Synthetic oligonucleotide
uuauuucuauuuuguuaua

SEQ ID NO: 112594 - RNA, 19 nt, Artificial Sequence
  Description of Artificial Sequence: Synthetic oligonucleotide
auuuaauaauagaauuaga

SEQ ID NO: 112595 - RNA, 19 nt, Artificial Sequence
  Description of Artificial Sequence: Synthetic oligonucleotide
auugaaauaaaauauaaug

SEQ ID NO: 112596 - RNA, 19 nt, Artificial Sequence
  Description of Artificial Sequence: Synthetic oligonucleotide
gggaaauaaucugcagaau

SEQ ID NO: 112597 - RNA, 19 nt, Artificial Sequence
  Description of Artificial Sequence: Synthetic oligonucleotide
uguggguuuccugguguuu

SEQ ID NO: 112598 - RNA, 19 nt, Artificial Sequence
  Description of Artificial Sequence: Synthetic oligonucleotide
uccucugacucuagugcac

SEQ ID NO: 112599 - RNA, 19 nt, Artificial Sequence
  Description of Artificial Sequence: Synthetic oligonucleotide
cugaugaucucugauaagg

SEQ ID NO: 112600 - RNA, 19 nt, Artificial Sequence
  Description of Artificial Sequence: Synthetic oligonucleotide
gcucagcugcuuuauaguu

SEQ ID NO: 112601 - RNA, 19 nt, Artificial Sequence
  Description of Artificial Sequence: Synthetic oligonucleotide
ucucuggcuaaugcagcag

SEQ ID NO: 112602 - RNA, 19 nt, Artificial Sequence
  Description of Artificial Sequence: Synthetic oligonucleotide
gauacucuuccugccagug

SEQ ID NO: 112603 - RNA, 19 nt, Artificial Sequence
  Description of Artificial Sequence: Synthetic oligonucleotide
gguaauacgauuuuuuaag

SEQ ID NO: 112604 - RNA, 19 nt, Artificial Sequence
  Description of Artificial Sequence: Synthetic oligonucleotide
gaaggcaguuugucaauuu

SEQ ID NO: 112605 - RNA, 19 nt, Artificial Sequence
  Description of Artificial Sequence: Synthetic oligonucleotide
uuaaucuuguggauaccuu

SEQ ID NO: 112606 - RNA, 19 nt, Artificial Sequence
  Description of Artificial Sequence: Synthetic oligonucleotide
uuauacucuuaggguauua

SEQ ID NO: 112607 - RNA, 19 nt, Artificial Sequence
  Description of Artificial Sequence: Synthetic oligonucleotide
auuuuauacaaaagccuug

SEQ ID NO: 112608 - RNA, 19 nt, Artificial Sequence
  Description of Artificial Sequence: Synthetic oligonucleotide
gaggauugcauucuauuuu

SEQ ID NO: 112609 - RNA, 19 nt, Artificial Sequence
  Description of Artificial Sequence: Synthetic oligonucleotide
ucuauaugacccucuugau

SEQ ID NO: 112610 - RNA, 19 nt, Artificial Sequence
  Description of Artificial Sequence: Synthetic oligonucleotide
uauuuaaaaaacacuaugg

SEQ ID NO: 112611 - RNA, 19 nt, Artificial Sequence
  Description of Artificial Sequence: Synthetic oligonucleotide
gauaacaauucuucauuua

SEQ ID NO: 112612 - RNA, 19 nt, Artificial Sequence
  Description of Artificial Sequence: Synthetic oligonucleotide
accuaguauuaugaaagaa

SEQ ID NO: 112613 - RNA, 19 nt, Artificial Sequence
  Description of Artificial Sequence: Synthetic oligonucleotide
augaaggaguucaaacaaa

SEQ ID NO: 112614 - RNA, 19 nt, Artificial Sequence
  Description of Artificial Sequence: Synthetic oligonucleotide
auguguuucccaguuaacu

SEQ ID NO: 112615 - RNA, 19 nt, Artificial Sequence
  Description of Artificial Sequence: Synthetic oligonucleotide
uaggguuuacuguuugagc

SEQ ID NO: 112616 - RNA, 19 nt, Artificial Sequence
  Description of Artificial Sequence: Synthetic oligonucleotide
ccaauauaaauguuuaacu

SEQ ID NO: 112617 - RNA, 19 nt, Artificial Sequence
  Description of Artificial Sequence: Synthetic oligonucleotide
uguuugugauggcaguauu

SEQ ID NO: 112618 - RNA, 19 nt, Artificial Sequence
  Description of Artificial Sequence: Synthetic oligonucleotide
uccuaaaguacauugcaug

SEQ ID NO: 112619 - RNA, 19 nt, Artificial Sequence
  Description of Artificial Sequence: Synthetic oligonucleotide
guuuuccuaaauacagagu

SEQ ID NO: 112620 - RNA, 19 nt, Artificial Sequence
  Description of Artificial Sequence: Synthetic oligonucleotide
uuuaaauaauuucaguaau

SEQ ID NO: 112621 - RNA, 19 nt, Artificial Sequence
  Description of Artificial Sequence: Synthetic oligonucleotide
uucuuagaugauucagcuu

SEQ ID NO: 112622 - RNA, 19 nt, Artificial Sequence
  Description of Artificial Sequence: Synthetic oligonucleotide
ucaucauuaagaauaucuu

SEQ ID NO: 112623 - RNA, 19 nt, Artificial Sequence
  Description of Artificial Sequence: Synthetic oligonucleotide
uuuguuuuauguugaguua

SEQ ID NO: 112624 - RNA, 19 nt, Artificial Sequence
  Description of Artificial Sequence: Synthetic oligonucleotide
agaaaugccuucauauaga

SEQ ID NO: 112625 - RNA, 19 nt, Artificial Sequence
  Description of Artificial Sequence: Synthetic oligonucleotide
acauagucuuucagaccuc

SEQ ID NO: 112626 - RNA, 19 nt, Artificial Sequence
  Description of Artificial Sequence: Synthetic oligonucleotide
cuacugucaguuuucauuu

SEQ ID NO: 112627 - RNA, 19 nt, Artificial Sequence
  Description of Artificial Sequence: Synthetic oligonucleotide
ucuagcugcuuucaggguu

SEQ ID NO: 112628 - RNA, 19 nt, Artificial Sequence
  Description of Artificial Sequence: Synthetic oligonucleotide
uuuaugaauuuucaggcaa

SEQ ID NO: 112629 - RNA, 19 nt, Artificial Sequence
  Description of Artificial Sequence: Synthetic oligonucleotide
aagcuuuaauuuauacuaa

SEQ ID NO: 112630 - RNA, 19 nt, Artificial Sequence
  Description of Artificial Sequence: Synthetic oligonucleotide
agcuuaggaaguauggcua

SEQ ID NO: 112631 - RNA, 19 nt, Artificial Sequence
  Description of Artificial Sequence: Synthetic oligonucleotide
aaugccaacggcaguuuuu

SEQ ID NO: 112632 - RNA, 19 nt, Artificial Sequence
  Description of Artificial Sequence: Synthetic oligonucleotide
uuucuucuuaauuccacau

SEQ ID NO: 112633 - RNA, 19 nt, Artificial Sequence
  Description of Artificial Sequence: Synthetic oligonucleotide
ugacugaggcauauaugau

SEQ ID NO: 112634 - RNA, 19 nt, Artificial Sequence
  Description of Artificial Sequence: Synthetic oligonucleotide
ucucuggguaggugaguug

SEQ ID NO: 112635 - RNA, 19 nt, Artificial Sequence
  Description of Artificial Sequence: Synthetic oligonucleotide
guugugacaaccacaagca

SEQ ID NO: 112636 - RNA, 19 nt, Artificial Sequence
  Description of Artificial Sequence: Synthetic oligonucleotide
gaaaaaaagguagugaauu

SEQ ID NO: 112637 - RNA, 19 nt, Artificial Sequence
  Description of Artificial Sequence: Synthetic oligonucleotide
uuuuaaucaucuggacuuu

SEQ ID NO: 112638 - RNA, 19 nt, Artificial Sequence
  Description of Artificial Sequence: Synthetic oligonucleotide
uaagaaggauucuggagua

SEQ ID NO: 112639 - RNA, 19 nt, Artificial Sequence
  Description of Artificial Sequence: Synthetic oligonucleotide
auacuuaggccugaaauua

SEQ ID NO: 112640 - RNA, 19 nt, Artificial Sequence
  Description of Artificial Sequence: Synthetic oligonucleotide
auauauauuuggcuuggaa

SEQ ID NO: 112641 - RNA, 19 nt, Artificial Sequence
  Description of Artificial Sequence: Synthetic oligonucleotide
aauguguuuuucuucaauu

SEQ ID NO: 112642 - RNA, 19 nt, Artificial Sequence
  Description of Artificial Sequence: Synthetic oligonucleotide
uacaucuacaaguaaguac

SEQ ID NO: 112643 - RNA, 19 nt, Artificial Sequence
  Description of Artificial Sequence: Synthetic oligonucleotide
cagcugaaauucagaggac

SEQ ID NO: 112644 - RNA, 19 nt, Artificial Sequence
  Description of Artificial Sequence: Synthetic oligonucleotide
cccauaagaguucacauga

SEQ ID NO: 112645 - RNA, 19 nt, Artificial Sequence
  Description of Artificial Sequence: Synthetic oligonucleotide
aaaaaaaucaauucauuug

SEQ ID NO: 112646 - RNA, 19 nt, Artificial Sequence
  Description of Artificial Sequence: Synthetic oligonucleotide
gaaaaggcaagaugcagga

SEQ ID NO: 112647 - RNA, 19 nt, Artificial Sequence
  Description of Artificial Sequence: Synthetic oligonucleotide
agagaggaagccuugcaaa

SEQ ID NO: 112648 - RNA, 19 nt, Artificial Sequence
  Description of Artificial Sequence: Synthetic oligonucleotide
accugcagacugcuuuuug

SEQ ID NO: 112649 - RNA, 19 nt, Artificial Sequence
  Description of Artificial Sequence: Synthetic oligonucleotide
gcccaauauagauugggua

SEQ ID NO: 112650 - RNA, 19 nt, Artificial Sequence
  Description of Artificial Sequence: Synthetic oligonucleotide
aaggcugcaaaacauaagc

SEQ ID NO: 112651 - RNA, 19 nt, Artificial Sequence
  Description of Artificial Sequence: Synthetic oligonucleotide
cuuaauuagcucacaugcu

SEQ ID NO: 112652 - RNA, 19 nt, Artificial Sequence
  Description of Artificial Sequence: Synthetic oligonucleotide
ucugcucucacguggcacc

SEQ ID NO: 112653 - RNA, 19 nt, Artificial Sequence
  Description of Artificial Sequence: Synthetic oligonucleotide
caguggauagugugagaga

SEQ ID NO: 112654 - RNA, 19 nt, Artificial Sequence
  Description of Artificial Sequence: Synthetic oligonucleotide
aauuaggcuguagaacaaa

SEQ ID NO: 112655 - RNA, 19 nt, Artificial Sequence
  Description of Artificial Sequence: Synthetic oligonucleotide
auggccuucucuuucagca

SEQ ID NO: 112656 - RNA, 19 nt, Artificial Sequence
  Description of Artificial Sequence: Synthetic oligonucleotide
auucacaccacuacaaaau

SEQ ID NO: 112657 - RNA, 19 nt, Artificial Sequence
  Description of Artificial Sequence: Synthetic oligonucleotide
ucaucuuuuauaucaacag

SEQ ID NO: 112658 - RNA, 19 nt, Artificial Sequence
  Description of Artificial Sequence: Synthetic oligonucleotide
gaagaauaagcauaaacua

SEQ ID NO: 112659 - RNA, 19 nt, Artificial Sequence
  Description of Artificial Sequence: Synthetic oligonucleotide
aagcaaaaggucaauaagu

SEQ ID NO: 112660 - RNA, 19 nt, Artificial Sequence
  Description of Artificial Sequence: Synthetic oligonucleotide
uaccugaaaccaagauugg

SEQ ID NO: 112661 - RNA, 19 nt, Artificial Sequence
  Description of Artificial Sequence: Synthetic oligonucleotide
gcuagagauauaucuuaau

SEQ ID NO: 112662 - RNA, 19 nt, Artificial Sequence
  Description of Artificial Sequence: Synthetic oligonucleotide
ugcaauccauuuucugaug

SEQ ID NO: 112663 - RNA, 19 nt, Artificial Sequence
  Description of Artificial Sequence: Synthetic oligonucleotide
ggauuguuacgaguuggcu

SEQ ID NO: 112664 - RNA, 19 nt, Artificial Sequence
  Description of Artificial Sequence: Synthetic oligonucleotide
uauauaauguauguauggu

SEQ ID NO: 112665 - RNA, 19 nt, Artificial Sequence
  Description of Artificial Sequence: Synthetic oligonucleotide
uauuuugauuuguguaaaa

SEQ ID NO: 112666 - RNA, 19 nt, Artificial Sequence
  Description of Artificial Sequence: Synthetic oligonucleotide
aguuuuaaaaaucaagcuu

SEQ ID NO: 112667 - RNA, 19 nt, Artificial Sequence
  Description of Artificial Sequence: Synthetic oligonucleotide
uuaaguacauggacauuuu

SEQ ID NO: 112668 - RNA, 19 nt, Artificial Sequence
  Description of Artificial Sequence: Synthetic oligonucleotide
uuaaauaaaauauuuaaag

SEQ ID NO: 112669 - RNA, 19 nt, Artificial Sequence
  Description of Artificial Sequence: Synthetic oligonucleotide
gacaauuuagaaaauugcc

SEQ ID NO: 112670 - RNA, 19 nt, Artificial Sequence
  Description of Artificial Sequence: Synthetic oligonucleotide
cuuaauaucauuguuggcu

SEQ ID NO: 112671 - RNA, 19 nt, Artificial Sequence
  Description of Artificial Sequence: Synthetic oligonucleotide
uaaauagaauaggggacau

SEQ ID NO: 112672 - RNA, 19 nt, Artificial Sequence
  Description of Artificial Sequence: Synthetic oligonucleotide
ugcauauuaaggaaaaggu

SEQ ID NO: 112673 - RNA, 19 nt, Artificial Sequence
  Description of Artificial Sequence: Synthetic oligonucleotide
ucauggagaaauaauauug

SEQ ID NO: 112674 - RNA, 19 nt, Artificial Sequence
  Description of Artificial Sequence: Synthetic oligonucleotide
gguaucaaacaaauacauu

SEQ ID NO: 112675 - RNA, 19 nt, Artificial Sequence
  Description of Artificial Sequence: Synthetic oligonucleotide
ugauuugucaugauacaca

SEQ ID NO: 112676 - RNA, 19 nt, Artificial Sequence
  Description of Artificial Sequence: Synthetic oligonucleotide
auugaauuugauccaauag

SEQ ID NO: 112677 - RNA, 19 nt, Artificial Sequence
  Description of Artificial Sequence: Synthetic oligonucleotide
guuuaaggaauagguagga

SEQ ID NO: 112678 - RNA, 19 nt, Artificial Sequence
  Description of Artificial Sequence: Synthetic oligonucleotide
aaaauuugguuucuauuuu

SEQ ID NO: 112679 - RNA, 19 nt, Artificial Sequence
  Description of Artificial Sequence: Synthetic oligonucleotide
uucgauuuccuguaaauca

SEQ ID NO: 112680 - RNA, 19 nt, Artificial Sequence
  Description of Artificial Sequence: Synthetic oligonucleotide
agugacauaaauaauucuu

SEQ ID NO: 112681 - RNA, 19 nt, Artificial Sequence
  Description of Artificial Sequence: Synthetic oligonucleotide
uagcuuauuuuauauuucc

SEQ ID NO: 112682 - RNA, 19 nt, Artificial Sequence
  Description of Artificial Sequence: Synthetic oligonucleotide
cuugucuuaaauacugagc

SEQ ID NO: 112683 - RNA, 19 nt, Artificial Sequence
  Description of Artificial Sequence: Synthetic oligonucleotide
cucaguaaguuguguuagg

SEQ ID NO: 112684 - RNA, 19 nt, Artificial Sequence
  Description of Artificial Sequence: Synthetic oligonucleotide
gggauuauuucucaguuga

SEQ ID NO: 112685 - RNA, 19 nt, Artificial Sequence
  Description of Artificial Sequence: Synthetic oligonucleotide
agacuuucuuauaugacau

SEQ ID NO: 112686 - RNA, 19 nt, Artificial Sequence
  Description of Artificial Sequence: Synthetic oligonucleotide
uuuuacuauguuuugacuu

SEQ ID NO: 112687 - RNA, 19 nt, Artificial Sequence
  Description of Artificial Sequence: Synthetic oligonucleotide
uccugacuauuaaaaauaa

SEQ ID NO: 112688 - RNA, 19 nt, Artificial Sequence
  Description of Artificial Sequence: Synthetic oligonucleotide
aauaguagaaacaauuuuc

SEQ ID NO: 112689 - RNA, 19 nt, Artificial Sequence
  Description of Artificial Sequence: Synthetic oligonucleotide
cauaaagugaagaauuaua

SEQ ID NO: 112690 - RNA, 19 nt, Artificial Sequence
  Description of Artificial Sequence: Synthetic oligonucleotide
auaaucacugcuuuauaac

SEQ ID NO: 112691 - RNA, 19 nt, Artificial Sequence
  Description of Artificial Sequence: Synthetic oligonucleotide
cugacuuuauuauauuuau

SEQ ID NO: 112692 - RNA, 19 nt, Artificial Sequence
  Description of Artificial Sequence: Synthetic oligonucleotide
uuucaaaguucauuuaaag

SEQ ID NO: 112693 - RNA, 19 nt, Artificial Sequence
  Description of Artificial Sequence: Synthetic oligonucleotide
ggcuacuauucauccucug

SEQ ID NO: 112694 - RNA, 19 nt, Artificial Sequence
  Description of Artificial Sequence: Synthetic oligonucleotide
gugauggaauggucaggaa

SEQ ID NO: 112695 - RNA, 19 nt, Artificial Sequence
  Description of Artificial Sequence: Synthetic oligonucleotide
auuuguuuucucauaguuu

SEQ ID NO: 112696 - RNA, 19 nt, Artificial Sequence
  Description of Artificial Sequence: Synthetic oligonucleotide
uaauuccaacaacaauauu

SEQ ID NO: 112697 - RNA, 19 nt, Artificial Sequence
  Description of Artificial Sequence: Synthetic oligonucleotide
uagucguauccaaaauaac

SEQ ID NO: 112698 - RNA, 19 nt, Artificial Sequence
  Description of Artificial Sequence: Synthetic oligonucleotide
ccuuuaaugcuaaacuuua

SEQ ID NO: 112699 - RNA, 19 nt, Artificial Sequence
  Description of Artificial Sequence: Synthetic oligonucleotide
acugauguauauccaaagc

SEQ ID NO: 112700 - RNA, 19 nt, Artificial Sequence
  Description of Artificial Sequence: Synthetic oligonucleotide
cuucuccuuuucagacaga

SEQ ID NO: 112701 - RNA, 19 nt, Artificial Sequence
  Description of Artificial Sequence: Synthetic oligonucleotide
auuaauccagaagcaguca

SEQ ID NO: 112702 - RNA, 19 nt, Artificial Sequence
  Description of Artificial Sequence: Synthetic oligonucleotide
auaaacagaagaauaggug

SEQ ID NO: 112703 - RNA, 19 nt, Artificial Sequence
  Description of Artificial Sequence: Synthetic oligonucleotide
gguauguuccuaaugauau

SEQ ID NO: 112704 - RNA, 19 nt, Artificial Sequence
  Description of Artificial Sequence: Synthetic oligonucleotide
uuauuucuacuaauggaau

SEQ ID NO: 112705 - RNA, 19 nt, Artificial Sequence
  Description of Artificial Sequence: Synthetic oligonucleotide
uaaacuguaauauuagaaa

SEQ ID NO: 112706 - RNA, 19 nt, Artificial Sequence
  Description of Artificial Sequence: Synthetic oligonucleotide
auuaugcugcuaauuauau

SEQ ID NO: 112707 - RNA, 19 nt, Artificial Sequence
  Description of Artificial Sequence: Synthetic oligonucleotide
ucagcucugagguaauuuc

SEQ ID NO: 112708 - RNA, 19 nt, Artificial Sequence
  Description of Artificial Sequence: Synthetic oligonucleotide
cugaaauguucagacucag

SEQ ID NO: 112709 - RNA, 19 nt, Artificial Sequence
  Description of Artificial Sequence: Synthetic oligonucleotide
gucggaacaaauuggaaaa

SEQ ID NO: 112710 - RNA, 19 nt, Artificial Sequence
  Description of Artificial Sequence: Synthetic oligonucleotide
auuuaaauuuuuauucuua

SEQ ID NO: 112711 - RNA, 19 nt, Artificial Sequence
  Description of Artificial Sequence: Synthetic oligonucleotide
agcuauaaagcaagaaagu

SEQ ID NO: 112712 - RNA, 19 nt, Artificial Sequence
  Description of Artificial Sequence: Synthetic oligonucleotide
uaaacacauuaauuuccuc

SEQ ID NO: 112713 - RNA, 19 nt, Artificial Sequence
  Description of Artificial Sequence: Synthetic oligonucleotide
caacauuuuuaagccaauu

SEQ ID NO: 112714 - RNA, 19 nt, Artificial Sequence
  Description of Artificial Sequence: Synthetic oligonucleotide
uaaaaauauaaaagauaca

SEQ ID NO: 112715 - RNA, 19 nt, Artificial Sequence
  Description of Artificial Sequence: Synthetic oligonucleotide
acaccaauaucuucuucag

SEQ ID NO: 112716 - RNA, 19 nt, Artificial Sequence
  Description of Artificial Sequence: Synthetic oligonucleotide
ggcucugacaggccuccug

SEQ ID NO: 112717 - RNA, 19 nt, Artificial Sequence
  Description of Artificial Sequence: Synthetic oligonucleotide
ggaaacuuccacauauuuu

SEQ ID NO: 112718 - RNA, 19 nt, Artificial Sequence
  Description of Artificial Sequence: Synthetic oligonucleotide
uucaacugcaguauaaagu

SEQ ID NO: 112719 - RNA, 19 nt, Artificial Sequence
  Description of Artificial Sequence: Synthetic oligonucleotide
ucagaaaauaaaguuaaca

SEQ ID NO: 112720 - RNA, 19 nt, Artificial Sequence
  Description of Artificial Sequence: Synthetic oligonucleotide
auaacuuucacuaacacac

SEQ ID NO: 112721 - RNA, 19 nt, Artificial Sequence
  Description of Artificial Sequence: Synthetic oligonucleotide
cacauauguagauuucaca

SEQ ID NO: 112722 - RNA, 19 nt, Artificial Sequence
  Description of Artificial Sequence: Synthetic oligonucleotide
aaaauccaccuauaauugg

SEQ ID NO: 112723 - RNA, 19 nt, Artificial Sequence
  Description of Artificial Sequence: Synthetic oligonucleotide
gucaaagugguugagaaua

SEQ ID NO: 112724 - RNA, 19 nt, Artificial Sequence
  Description of Artificial Sequence: Synthetic oligonucleotide
auauuuuuuaguaauugca

SEQ ID NO: 112725 - RNA, 19 nt, Artificial Sequence
  Description of Artificial Sequence: Synthetic oligonucleotide
augcaaaauuuuucuagcu

SEQ ID NO: 112726 - RNA, 19 nt, Artificial Sequence
  Description of Artificial Sequence: Synthetic oligonucleotide
uuccauccuuucucccucg

SEQ ID NO: 112727 - RNA, 19 nt, Artificial Sequence
  Description of Artificial Sequence: Synthetic oligonucleotide
guuucuucuuuuuuugggg

SEQ ID NO: 112728 - RNA, 19 nt, Artificial Sequence
  Description of Artificial Sequence: Synthetic oligonucleotide
ggagcugguaacugaugaa

SEQ ID NO: 112729 - RNA, 19 nt, Artificial Sequence
  Description of Artificial Sequence: Synthetic oligonucleotide
aaucuuuucccaccuuuuc

SEQ ID NO: 112730 - RNA, 19 nt, Artificial Sequence
  Description of Artificial Sequence: Synthetic oligonucleotide
cucuucaggaaauauaagu

SEQ ID NO: 112731 - RNA, 19 nt, Artificial Sequence
  Description of Artificial Sequence: Synthetic oligonucleotide
ugguuuuguuugguuaacg

SEQ ID NO: 112732 - RNA, 19 nt, Artificial Sequence
  Description of Artificial Sequence: Synthetic oligonucleotide
gugauacauucuguaugaa

SEQ ID NO: 112733 - RNA, 19 nt, Artificial Sequence
  Description of Artificial Sequence: Synthetic oligonucleotide
augaaacauuggagggaaa

SEQ ID NO: 112734 - RNA, 19 nt, Artificial Sequence
  Description of Artificial Sequence: Synthetic oligonucleotide
acaucuacugaauuucugu

SEQ ID NO: 112735 - RNA, 19 nt, Artificial Sequence
  Description of Artificial Sequence: Synthetic oligonucleotide
uaauuuaaaauauuuugcu

SEQ ID NO: 112736 - RNA, 19 nt, Artificial Sequence
  Description of Artificial Sequence: Synthetic oligonucleotide
ugcuaguuaacuaugaaca

SEQ ID NO: 112737 - RNA, 19 nt, Artificial Sequence
  Description of Artificial Sequence: Synthetic oligonucleotide
agauagaagaaucuuacag

SEQ ID NO: 112738 - RNA, 19 nt, Artificial Sequence
  Description of Artificial Sequence: Synthetic oligonucleotide
gaugcugcuauaaauaagu

SEQ ID NO: 112739 - RNA, 19 nt, Artificial Sequence
  Description of Artificial Sequence: Synthetic oligonucleotide
uagaaaauauaaauuucau

SEQ ID NO: 112740 - RNA, 19 nt, Artificial Sequence
  Description of Artificial Sequence: Synthetic oligonucleotide
ucacuaaaauaugcuauuu

SEQ ID NO: 112741 - RNA, 19 nt, Artificial Sequence
  Description of Artificial Sequence: Synthetic oligonucleotide
uuaaaaucuauuuccuaua

SEQ ID NO: 112742 - RNA, 19 nt, Artificial Sequence
  Description of Artificial Sequence: Synthetic oligonucleotide
auuguauuucuaaucagau

SEQ ID NO: 112743 - RNA, 19 nt, Artificial Sequence
  Description of Artificial Sequence: Synthetic oligonucleotide
uguauuacucuuauuauuu

SEQ ID NO: 112744 - RNA, 19 nt, Artificial Sequence
  Description of Artificial Sequence: Synthetic oligonucleotide
ucuauuguauguguuaaug

SEQ ID NO: 112745 - RNA, 19 nt, Artificial Sequence
  Description of Artificial Sequence: Synthetic oligonucleotide
gauuuuauguaaaaaugua

SEQ ID NO: 112746 - RNA, 19 nt, Artificial Sequence
  Description of Artificial Sequence: Synthetic oligonucleotide
aauugcuuuucaugaguag

SEQ ID NO: 112747 - RNA, 19 nt, Artificial Sequence
  Description of Artificial Sequence: Synthetic oligonucleotide
guaugaauaaaauugauua

SEQ ID NO: 112748 - RNA, 19 nt, Artificial Sequence
  Description of Artificial Sequence: Synthetic oligonucleotide
aguuuguguuuucuugucu

SEQ ID NO: 112749 - RNA, 25 nt, Artificial Sequence
  Description of Artificial Sequence: Synthetic oligonucleotide
cggccccagaaaacccgagcgagua

SEQ ID NO: 112750 - RNA, 25 nt, Artificial Sequence
  Description of Artificial Sequence: Synthetic oligonucleotide
agggggcggcgcgcaggagggagga

SEQ ID NO: 112751 - RNA, 25 nt, Artificial Sequence
  Description of Artificial Sequence: Synthetic oligonucleotide
agaacugggggcgcgggaggcuggu

SEQ ID NO: 112752 - RNA, 25 nt, Artificial Sequence
  Description of Artificial Sequence: Synthetic oligonucleotide
ugggugucggggguggagauguaga

SEQ ID NO: 112753 - RNA, 25 nt, Artificial Sequence
  Description of Artificial Sequence: Synthetic oligonucleotide
aagaugugacgccgcggcccggcgg

SEQ ID NO: 112754 - RNA, 25 nt, Artificial Sequence
  Description of Artificial Sequence: Synthetic oligonucleotide
ggugccagauuagcggacgcgcugc

SEQ ID NO: 112755 - RNA, 25 nt, Artificial Sequence
  Description of Artificial Sequence: Synthetic oligonucleotide
cccgcgguugcaacgggaucccggg

SEQ ID NO: 112756 - RNA, 25 nt, Artificial Sequence
  Description of Artificial Sequence: Synthetic oligonucleotide
gcgcugcagcuugggaggcggcucu

SEQ ID NO: 112757 - RNA, 25 nt, Artificial Sequence
  Description of Artificial Sequence: Synthetic oligonucleotide
uccccaggcggcguccgcggagaca

SEQ ID NO: 112758 - RNA, 25 nt, Artificial Sequence
  Description of Artificial Sequence: Synthetic oligonucleotide
acccauccgugaaccccaggucccg

SEQ ID NO: 112759 - RNA, 25 nt, Artificial Sequence
  Description of Artificial Sequence: Synthetic oligonucleotide
gggccgccggcucgccgcgcaccag

SEQ ID NO: 112760 - RNA, 25 nt, Artificial Sequence
  Description of Artificial Sequence: Synthetic oligonucleotide
ggggccggcggacagaagagcggcc

SEQ ID NO: 112761 - RNA, 25 nt, Artificial Sequence
  Description of Artificial Sequence: Synthetic oligonucleotide
cgagcggcucgaggcugggggaccg

SEQ ID NO: 112762 - RNA, 25 nt, Artificial Sequence
  Description of Artificial Sequence: Synthetic oligonucleotide
gcgggcgcggccgcgcgcugccggg

SEQ ID NO: 112763 - RNA, 25 nt, Artificial Sequence
  Description of Artificial Sequence: Synthetic oligonucleotide
gcgggaggcuggggggccggggccg

SEQ ID NO: 112764 - RNA, 25 nt, Artificial Sequence
  Description of Artificial Sequence: Synthetic oligonucleotide
ggggccgugccccggagcgggucgg

SEQ ID NO: 112765 - RNA, 25 nt, Artificial Sequence
  Description of Artificial Sequence: Synthetic oligonucleotide
gaggccggggccggggccgggggac

SEQ ID NO: 112766 - RNA, 25 nt, Artificial Sequence
  Description of Artificial Sequence: Synthetic oligonucleotide
cggcggcuccccgcgcggcuccagc

SEQ ID NO: 112767 - RNA, 25 nt, Artificial Sequence
  Description of Artificial Sequence: Synthetic oligonucleotide
cggcucggggaucccggccgggccc

SEQ ID NO: 112768 - RNA, 25 nt, Artificial Sequence
  Description of Artificial Sequence: Synthetic oligonucleotide
ccgcagggaccauggcagccgggag

SEQ ID NO: 112769 - RNA, 25 nt, Artificial Sequence
  Description of Artificial Sequence: Synthetic oligonucleotide
gcaucaccacgcugcccgccuugcc

SEQ ID NO: 112770 - RNA, 25 nt, Artificial Sequence
  Description of Artificial Sequence: Synthetic oligonucleotide
ccgaggauggcggcagcggcgccuu

SEQ ID NO: 112771 - RNA, 25 nt, Artificial Sequence
  Description of Artificial Sequence: Synthetic oligonucleotide
ucccgcccggccacuucaaggaccc

SEQ ID NO: 112772 - RNA, 25 nt, Artificial Sequence
  Description of Artificial Sequence: Synthetic oligonucleotide
ccaagcggcuguacugcaaaaacgg

SEQ ID NO: 112773 - RNA, 25 nt, Artificial Sequence
  Description of Artificial Sequence: Synthetic oligonucleotide
ggggcuucuuccugcgcauccaccc

SEQ ID NO: 112774 - RNA, 25 nt, Artificial Sequence
  Description of Artificial Sequence: Synthetic oligonucleotide
ccgacggccgaguugacgggguccg

SEQ ID NO: 112775 - RNA, 25 nt, Artificial Sequence
  Description of Artificial Sequence: Synthetic oligonucleotide
gggagaagagcgacccucacaucaa

SEQ ID NO: 112776 - RNA, 25 nt, Artificial Sequence
  Description of Artificial Sequence: Synthetic oligonucleotide
agcuacaacuucaagcagaagagag

SEQ ID NO: 112777 - RNA, 25 nt, Artificial Sequence
  Description of Artificial Sequence: Synthetic oligonucleotide
gaggaguugugucuaucaaaggagu

SEQ ID NO: 112778 - RNA, 25 nt, Artificial Sequence
  Description of Artificial Sequence: Synthetic oligonucleotide
ugugugcuaaccguuaccuggcuau

SEQ ID NO: 112779 - RNA, 25 nt, Artificial Sequence
  Description of Artificial Sequence: Synthetic oligonucleotide
ugaaggaagauggaagauuacuggc

SEQ ID NO: 112780 - RNA, 25 nt, Artificial Sequence
  Description of Artificial Sequence: Synthetic oligonucleotide
cuucuaaauguguuacggaugagug

SEQ ID NO: 112781 - RNA, 25 nt, Artificial Sequence
  Description of Artificial Sequence: Synthetic oligonucleotide
guuucuuuuuugaacgauuggaauc

SEQ ID NO: 112782 - RNA, 25 nt, Artificial Sequence
  Description of Artificial Sequence: Synthetic oligonucleotide
cuaauaacuacaauacuuaccgguc

SEQ ID NO: 112783 - RNA, 25 nt, Artificial Sequence
  Description of Artificial Sequence: Synthetic oligonucleotide
caaggaaauacaccaguugguaugu

SEQ ID NO: 112784 - RNA, 25 nt, Artificial Sequence
  Description of Artificial Sequence: Synthetic oligonucleotide
uggcacugaaacgaacugggcagua

SEQ ID NO: 112785 - RNA, 25 nt, Artificial Sequence
  Description of Artificial Sequence: Synthetic oligonucleotide
auaaacuuggauccaaaacaggacc

SEQ ID NO: 112786 - RNA, 25 nt, Artificial Sequence
  Description of Artificial Sequence: Synthetic oligonucleotide
cugggcagaaagcuauacuuuuucu

SEQ ID NO: 112787 - RNA, 25 nt, Artificial Sequence
  Description of Artificial Sequence: Synthetic oligonucleotide
uuccaaugucugcuaagagcugauu

SEQ ID NO: 112788 - RNA, 25 nt, Artificial Sequence
  Description of Artificial Sequence: Synthetic oligonucleotide
uuuaauggccacaucuaaucucauu

SEQ ID NO: 112789 - RNA, 25 nt, Artificial Sequence
  Description of Artificial Sequence: Synthetic oligonucleotide
uucacaugaaagaagaaguauauuu

SEQ ID NO: 112790 - RNA, 25 nt, Artificial Sequence
  Description of Artificial Sequence: Synthetic oligonucleotide
uuagaaauuuguuaaugagaguaaa

SEQ ID NO: 112791 - RNA, 25 nt, Artificial Sequence
  Description of Artificial Sequence: Synthetic oligonucleotide
aagaaaauaaauguguauagcucag

SEQ ID NO: 112792 - RNA, 25 nt, Artificial Sequence
  Description of Artificial Sequence: Synthetic oligonucleotide
guuuggauaauuggucaaacaauuu

SEQ ID NO: 112793 - RNA, 25 nt, Artificial Sequence
  Description of Artificial Sequence: Synthetic oligonucleotide
uuuuauccaguaguaaaauauguaa

SEQ ID NO: 112794 - RNA, 25 nt, Artificial Sequence
  Description of Artificial Sequence: Synthetic oligonucleotide
accauugucccaguaaagaaaaaua

SEQ ID NO: 112795 - RNA, 25 nt, Artificial Sequence
  Description of Artificial Sequence: Synthetic oligonucleotide
aacaaaaguuguaaaauguauauuc

SEQ ID NO: 112796 - RNA, 25 nt, Artificial Sequence
  Description of Artificial Sequence: Synthetic oligonucleotide
cucccuuuuauauugcaucugcugu

SEQ ID NO: 112797 - RNA, 25 nt, Artificial Sequence
  Description of Artificial Sequence: Synthetic oligonucleotide
uuacccagugaagcuuaccuagagc

SEQ ID NO: 112798 - RNA, 25 nt, Artificial Sequence
  Description of Artificial Sequence: Synthetic oligonucleotide
caaugaucuuuuucacgcauuugcu

SEQ ID NO: 112799 - RNA, 25 nt, Artificial Sequence
  Description of Artificial Sequence: Synthetic oligonucleotide
uuuauucgaaaagaggcuuuuaaaa

SEQ ID NO: 112800 - RNA, 25 nt, Artificial Sequence
  Description of Artificial Sequence: Synthetic oligonucleotide
augugcauguuuagaaacaaaauuu

SEQ ID NO: 112801 - RNA, 25 nt, Artificial Sequence
  Description of Artificial Sequence: Synthetic oligonucleotide
ucuucauggaaaucauauacauuag

SEQ ID NO: 112802 - RNA, 25 nt, Artificial Sequence
  Description of Artificial Sequence: Synthetic oligonucleotide
gaaaaucacagucagauguuuaauc

SEQ ID NO: 112803 - RNA, 25 nt, Artificial Sequence
  Description of Artificial Sequence: Synthetic oligonucleotide
caauccaaaauguccacuauuucuu

SEQ ID NO: 112804 - RNA, 25 nt, Artificial Sequence
  Description of Artificial Sequence: Synthetic oligonucleotide
uaugucauucguuagucuacauguu

SEQ ID NO: 112805 - RNA, 25 nt, Artificial Sequence
  Description of Artificial Sequence: Synthetic oligonucleotide
uucuaaacauauaaaugugaauuua

SEQ ID NO: 112806 - RNA, 25 nt, Artificial Sequence
  Description of Artificial Sequence: Synthetic oligonucleotide
aaucaauuccuuucauaguuuuaua

SEQ ID NO: 112807 - RNA, 25 nt, Artificial Sequence
  Description of Artificial Sequence: Synthetic oligonucleotide
aauucucuggcaguuccuuaugaua

SEQ ID NO: 112808 - RNA, 25 nt, Artificial Sequence
  Description of Artificial Sequence: Synthetic oligonucleotide
agaguuuauaaaacaguccugugua

SEQ ID NO: 112809 - RNA, 25 nt, Artificial Sequence
  Description of Artificial Sequence: Synthetic oligonucleotide
aaacugcuggaaguucuuccacagu

SEQ ID NO: 112810 - RNA, 25 nt, Artificial Sequence
  Description of Artificial Sequence: Synthetic oligonucleotide
ucaggucaauuuugucaaacccuuc

SEQ ID NO: 112811 - RNA, 25 nt, Artificial Sequence
  Description of Artificial Sequence: Synthetic oligonucleotide
cucuguacccauacagcagcagccu

SEQ ID NO: 112812 - RNA, 25 nt, Artificial Sequence
  Description of Artificial Sequence: Synthetic oligonucleotide
uagcaacucugcuggugaugggagu

SEQ ID NO: 112813 - RNA, 25 nt, Artificial Sequence
  Description of Artificial Sequence: Synthetic oligonucleotide
uuguauuuucagucuucgccagguc

SEQ ID NO: 112814 - RNA, 25 nt, Artificial Sequence
  Description of Artificial Sequence: Synthetic oligonucleotide
cauugagauccauccacucacaucu

SEQ ID NO: 112815 - RNA, 25 nt, Artificial Sequence
  Description of Artificial Sequence: Synthetic oligonucleotide
uuaagcauucuuccuggcaaaaauu

SEQ ID NO: 112816 - RNA, 25 nt, Artificial Sequence
  Description of Artificial Sequence: Synthetic oligonucleotide
uuauggugaaugaauauggcuuuag

SEQ ID NO: 112817 - RNA, 25 nt, Artificial Sequence
  Description of Artificial Sequence: Synthetic oligonucleotide
ggcggcagaugauauacauaucuga

SEQ ID NO: 112818 - RNA, 25 nt, Artificial Sequence
  Description of Artificial Sequence: Synthetic oligonucleotide
acuucccaaaagcuccaggauuugu

SEQ ID NO: 112819 - RNA, 25 nt, Artificial Sequence
  Description of Artificial Sequence: Synthetic oligonucleotide
ugugcuguugccgaauacucaggac

SEQ ID NO: 112820 - RNA, 25 nt, Artificial Sequence
  Description of Artificial Sequence: Synthetic oligonucleotide
cggaccugaauucugauuuuauacc

SEQ ID NO: 112821 - RNA, 25 nt, Artificial Sequence
  Description of Artificial Sequence: Synthetic oligonucleotide
cagucucuucaaaaacuucucgaac

SEQ ID NO: 112822 - RNA, 25 nt, Artificial Sequence
  Description of Artificial Sequence: Synthetic oligonucleotide
ccgcugugucuccuacguaaaaaaa

SEQ ID NO: 112823 - RNA, 25 nt, Artificial Sequence
  Description of Artificial Sequence: Synthetic oligonucleotide
agagauguacaaaucaauaauaauu

SEQ ID NO: 112824 - RNA, 25 nt, Artificial Sequence
  Description of Artificial Sequence: Synthetic oligonucleotide
uacacuuuuagaaacuguaucauca

SEQ ID NO: 112825 - RNA, 25 nt, Artificial Sequence
  Description of Artificial Sequence: Synthetic oligonucleotide
aaagauuuucaguuaaaguagcauu

SEQ ID NO: 112826 - RNA, 25 nt, Artificial Sequence
  Description of Artificial Sequence: Synthetic oligonucleotide
uauguaaaggcucaaaacauuaccc

SEQ ID NO: 112827 - RNA, 25 nt, Artificial Sequence
  Description of Artificial Sequence: Synthetic oligonucleotide
cuaacaaaguaaaguuuucaauaca

SEQ ID NO: 112828 - RNA, 25 nt, Artificial Sequence
  Description of Artificial Sequence: Synthetic oligonucleotide
aaauucuuugccuuguggauaucaa

SEQ ID NO: 112829 - RNA, 25 nt, Artificial Sequence
  Description of Artificial Sequence: Synthetic oligonucleotide
agaaaucccaaaauauuuucuuacc

SEQ ID NO: 112830 - RNA, 25 nt, Artificial Sequence
  Description of Artificial Sequence: Synthetic oligonucleotide
cacuguaaauucaagaagcuuuuga

SEQ ID NO: 112831 - RNA, 25 nt, Artificial Sequence
  Description of Artificial Sequence: Synthetic oligonucleotide
aaaugcugaauauuucuuuggcugc

SEQ ID NO: 112832 - RNA, 25 nt, Artificial Sequence
  Description of Artificial Sequence: Synthetic oligonucleotide
cuacuuggaggcuuaucuaccugua

SEQ ID NO: 112833 - RNA, 25 nt, Artificial Sequence
  Description of Artificial Sequence: Synthetic oligonucleotide
acauuuuuggggucagcucuuuuua

SEQ ID NO: 112834 - RNA, 25 nt, Artificial Sequence
  Description of Artificial Sequence: Synthetic oligonucleotide
aacuucuugcugcucuuuuucccaa

SEQ ID NO: 112835 - RNA, 25 nt, Artificial Sequence
  Description of Artificial Sequence: Synthetic oligonucleotide
aaagguaaaaauauagauugaaaag

SEQ ID NO: 112836 - RNA, 25 nt, Artificial Sequence
  Description of Artificial Sequence: Synthetic oligonucleotide
guuaaaacauuuugcauggcugcag

SEQ ID NO: 112837 - RNA, 25 nt, Artificial Sequence
  Description of Artificial Sequence: Synthetic oligonucleotide
guuccuuuguuucuugagauaagau

SEQ ID NO: 112838 - RNA, 25 nt, Artificial Sequence
  Description of Artificial Sequence: Synthetic oligonucleotide
uuccaaagaacuuagauucauuucu

SEQ ID NO: 112839 - RNA, 25 nt, Artificial Sequence
  Description of Artificial Sequence: Synthetic oligonucleotide
uucaacaccgaaaugcuggaggugu

SEQ ID NO: 112840 - RNA, 25 nt, Artificial Sequence
  Description of Artificial Sequence: Synthetic oligonucleotide
uuugaucaguuuucaagaaacuugg

SEQ ID NO: 112841 - RNA, 25 nt, Artificial Sequence
  Description of Artificial Sequence: Synthetic oligonucleotide
gaauauaaauaauuuuauaauucaa

SEQ ID NO: 112842 - RNA, 25 nt, Artificial Sequence
  Description of Artificial Sequence: Synthetic oligonucleotide
acaaagguuuucacauuuuauaagg

SEQ ID NO: 112843 - RNA, 25 nt, Artificial Sequence
  Description of Artificial Sequence: Synthetic oligonucleotide
guugauuuuucaauuaaaugcaaau

SEQ ID NO: 112844 - RNA, 25 nt, Artificial Sequence
  Description of Artificial Sequence: Synthetic oligonucleotide
uuuguguggcaggauuuuuauugcc

SEQ ID NO: 112845 - RNA, 25 nt, Artificial Sequence
  Description of Artificial Sequence: Synthetic oligonucleotide
cauuaacauauuuuuguggcugcuu

SEQ ID NO: 112846 - RNA, 25 nt, Artificial Sequence
  Description of Artificial Sequence: Synthetic oligonucleotide
uuuucuacacauccagauggucccu

SEQ ID NO: 112847 - RNA, 25 nt, Artificial Sequence
  Description of Artificial Sequence: Synthetic oligonucleotide
ucuaacugggcuuucucuaauuuug

SEQ ID NO: 112848 - RNA, 25 nt, Artificial Sequence
  Description of Artificial Sequence: Synthetic oligonucleotide
gugauguucugucauugucucccaa

SEQ ID NO: 112849 - RNA, 25 nt, Artificial Sequence
  Description of Artificial Sequence: Synthetic oligonucleotide
aaguauuuaggagaagcccuuuaaa

SEQ ID NO: 112850 - RNA, 25 nt, Artificial Sequence
  Description of Artificial Sequence: Synthetic oligonucleotide
aaagcugccuuccucuaccacuuug

SEQ ID NO: 112851 - RNA, 25 nt, Artificial Sequence
  Description of Artificial Sequence: Synthetic oligonucleotide
gcuggaaagcuucacaauugucaca

SEQ ID NO: 112852 - RNA, 25 nt, Artificial Sequence
  Description of Artificial Sequence: Synthetic oligonucleotide
agacaaagauuuuuguuccaauacu

SEQ ID NO: 112853 - RNA, 25 nt, Artificial Sequence
  Description of Artificial Sequence: Synthetic oligonucleotide
ucguuuugccucuauuuuucuuguu

SEQ ID NO: 112854 - RNA, 25 nt, Artificial Sequence
  Description of Artificial Sequence: Synthetic oligonucleotide
uugucaaauaguaaaugauauuugc

SEQ ID NO: 112855 - RNA, 25 nt, Artificial Sequence
  Description of Artificial Sequence: Synthetic oligonucleotide
cccuugcaguaauucuacuggugaa

SEQ ID NO: 112856 - RNA, 25 nt, Artificial Sequence
  Description of Artificial Sequence: Synthetic oligonucleotide
aaaacaugcaaagaagaggaaguca

SEQ ID NO: 112857 - RNA, 25 nt, Artificial Sequence
  Description of Artificial Sequence: Synthetic oligonucleotide
acagaaacaugucucaauucccaug

SEQ ID NO: 112858 - RNA, 25 nt, Artificial Sequence
  Description of Artificial Sequence: Synthetic oligonucleotide
gugcugugacuguagacugucuuac

SEQ ID NO: 112859 - RNA, 25 nt, Artificial Sequence
  Description of Artificial Sequence: Synthetic oligonucleotide
ccauagacugucuuacccauccccu

SEQ ID NO: 112860 - RNA, 25 nt, Artificial Sequence
  Description of Artificial Sequence: Synthetic oligonucleotide
uggauaugcucuuguuuuuucccuc

SEQ ID NO: 112861 - RNA, 25 nt, Artificial Sequence
  Description of Artificial Sequence: Synthetic oligonucleotide
cuaauagcuauggaaagaugcauag

SEQ ID NO: 112862 - RNA, 25 nt, Artificial Sequence
  Description of Artificial Sequence: Synthetic oligonucleotide
gaaagaguauaauguuuuaaaacau

SEQ ID NO: 112863 - RNA, 25 nt, Artificial Sequence
  Description of Artificial Sequence: Synthetic oligonucleotide
uaaggcauucaucugccauuuuuca

SEQ ID NO: 112864 - RNA, 25 nt, Artificial Sequence
  Description of Artificial Sequence: Synthetic oligonucleotide
aauuacaugcugacuucccuuacaa

SEQ ID NO: 112865 - RNA, 25 nt, Artificial Sequence
  Description of Artificial Sequence: Synthetic oligonucleotide
auugagauuugcccauagguuaaac

SEQ ID NO: 112866 - RNA, 25 nt, Artificial Sequence
  Description of Artificial Sequence: Synthetic oligonucleotide
caugguuagaaacaacugaaagcau

SEQ ID NO: 112867 - RNA, 25 nt, Artificial Sequence
  Description of Artificial Sequence: Synthetic oligonucleotide
uaaaagaaaaaucuaggccgggugc

SEQ ID NO: 112868 - RNA, 25 nt, Artificial Sequence
  Description of Artificial Sequence: Synthetic oligonucleotide
caguggcucaugccuauauucccug

SEQ ID NO: 112869 - RNA, 25 nt, Artificial Sequence
  Description of Artificial Sequence: Synthetic oligonucleotide
gcacuuugggaggccaaagcaggag

SEQ ID NO: 112870 - RNA, 25 nt, Artificial Sequence
  Description of Artificial Sequence: Synthetic oligonucleotide
ggaucgcuugagcccaggaguucaa

SEQ ID NO: 112871 - RNA, 25 nt, Artificial Sequence
  Description of Artificial Sequence: Synthetic oligonucleotide
agaccaaccuggugaaaccccgucu

SEQ ID NO: 112872 - RNA, 25 nt, Artificial Sequence
  Description of Artificial Sequence: Synthetic oligonucleotide
ucuacaaaaaaacacaaaaaauagc

SEQ ID NO: 112873 - RNA, 25 nt, Artificial Sequence
  Description of Artificial Sequence: Synthetic oligonucleotide
ccaggcaugguggcguguacaugug

SEQ ID NO: 112874 - RNA, 25 nt, Artificial Sequence
  Description of Artificial Sequence: Synthetic oligonucleotide
ggucucagauacuugggaggcugag

SEQ ID NO: 112875 - RNA, 25 nt, Artificial Sequence
  Description of Artificial Sequence: Synthetic oligonucleotide
ggugggaggguugaucacuugaggc

SEQ ID NO: 112876 - RNA, 25 nt, Artificial Sequence
  Description of Artificial Sequence: Synthetic oligonucleotide
cugagaggucaagguugcagugagc

SEQ ID NO: 112877 - RNA, 25 nt, Artificial Sequence
  Description of Artificial Sequence: Synthetic oligonucleotide
ccauaaucgugccacugcaguccag

SEQ ID NO: 112878 - RNA, 25 nt, Artificial Sequence
  Description of Artificial Sequence: Synthetic oligonucleotide
gccuaggcaacagagugagacuuug

SEQ ID NO: 112879 - RNA, 25 nt, Artificial Sequence
  Description of Artificial Sequence: Synthetic oligonucleotide
gucucaaaaaaagagaaauuuuccu

SEQ ID NO: 112880 - RNA, 25 nt, Artificial Sequence
  Description of Artificial Sequence: Synthetic oligonucleotide
uuaauaagaaaaguaauuuuuacuc

SEQ ID NO: 112881 - RNA, 25 nt, Artificial Sequence
  Description of Artificial Sequence: Synthetic oligonucleotide
cugaugugcaauacauuuguuauua

SEQ ID NO: 112882 - RNA, 25 nt, Artificial Sequence
  Description of Artificial Sequence: Synthetic oligonucleotide
aaauuuauuauuuaagaugguagca

SEQ ID NO: 112883 - RNA, 25 nt, Artificial Sequence
  Description of Artificial Sequence: Synthetic oligonucleotide
acuagucuuaaauuguauaaaauau

SEQ ID NO: 112884 - RNA, 25 nt, Artificial Sequence
  Description of Artificial Sequence: Synthetic oligonucleotide
uccccuaacauguuuaaauguccau

SEQ ID NO: 112885 - RNA, 25 nt, Artificial Sequence
  Description of Artificial Sequence: Synthetic oligonucleotide
uuuuuauucauuaugcuuugaaaaa

SEQ ID NO: 112886 - RNA, 25 nt, Artificial Sequence
  Description of Artificial Sequence: Synthetic oligonucleotide
auaauuauggggaaauacauguuug

SEQ ID NO: 112887 - RNA, 25 nt, Artificial Sequence
  Description of Artificial Sequence: Synthetic oligonucleotide
guuauuaaauuuauuauuaaagaua

SEQ ID NO: 112888 - RNA, 25 nt, Artificial Sequence
  Description of Artificial Sequence: Synthetic oligonucleotide
aguagcacuagucuuaaauuugaua

SEQ ID NO: 112889 - RNA, 25 nt, Artificial Sequence
  Description of Artificial Sequence: Synthetic oligonucleotide
auaacaucuccuaacuuguuuaaau

SEQ ID NO: 112890 - RNA, 25 nt, Artificial Sequence
  Description of Artificial Sequence: Synthetic oligonucleotide
uguccauuuuuauucuuuaugcuug

SEQ ID NO: 112891 - RNA, 25 nt, Artificial Sequence
  Description of Artificial Sequence: Synthetic oligonucleotide
gaaaauaaauuauggggauccuauu

SEQ ID NO: 112892 - RNA, 25 nt, Artificial Sequence
  Description of Artificial Sequence: Synthetic oligonucleotide
uuagcucuuaguaccacuaaucaaa

SEQ ID NO: 112893 - RNA, 25 nt, Artificial Sequence
  Description of Artificial Sequence: Synthetic oligonucleotide
aaguucggcauguagcucaugaucu

SEQ ID NO: 112894 - RNA, 25 nt, Artificial Sequence
  Description of Artificial Sequence: Synthetic oligonucleotide
uaugcuguuucuaugucguggaagc

SEQ ID NO: 112895 - RNA, 25 nt, Artificial Sequence
  Description of Artificial Sequence: Synthetic oligonucleotide
caccggauggggguagugagcaaau

SEQ ID NO: 112896 - RNA, 25 nt, Artificial Sequence
  Description of Artificial Sequence: Synthetic oligonucleotide
ucugcccugcucagcagucaccaua

SEQ ID NO: 112897 - RNA, 25 nt, Artificial Sequence
  Description of Artificial Sequence: Synthetic oligonucleotide
agcagcugacugaaaaucagcacug

SEQ ID NO: 112898 - RNA, 25 nt, Artificial Sequence
  Description of Artificial Sequence: Synthetic oligonucleotide
gccugaguaguuuugaucaguuuaa

SEQ ID NO: 112899 - RNA, 25 nt, Artificial Sequence
  Description of Artificial Sequence: Synthetic oligonucleotide
acuugaaucacuaacugacugaaaa

SEQ ID NO: 112900 - RNA, 25 nt, Artificial Sequence
  Description of Artificial Sequence: Synthetic oligonucleotide
auugaaugggcaaauaagugcuuuu

SEQ ID NO: 112901 - RNA, 25 nt, Artificial Sequence
  Description of Artificial Sequence: Synthetic oligonucleotide
ugucuccagaguaugcgggagaccc

SEQ ID NO: 112902 - RNA, 25 nt, Artificial Sequence
  Description of Artificial Sequence: Synthetic oligonucleotide
cuuccaccucaagauggauauuucu

SEQ ID NO: 112903 - RNA, 25 nt, Artificial Sequence
  Description of Artificial Sequence: Synthetic oligonucleotide
uuccccaaggauuucaagaugaauu

SEQ ID NO: 112904 - RNA, 25 nt, Artificial Sequence
  Description of Artificial Sequence: Synthetic oligonucleotide
ugaaauuuuuaaucaagauagugug

SEQ ID NO: 112905 - RNA, 25 nt, Artificial Sequence
  Description of Artificial Sequence: Synthetic oligonucleotide
gcuuuauucuguuguauuuuuuauu

SEQ ID NO: 112906 - RNA, 25 nt, Artificial Sequence
  Description of Artificial Sequence: Synthetic oligonucleotide
uauuuuaauauacuguaagccaaac

SEQ ID NO: 112907 - RNA, 25 nt, Artificial Sequence
  Description of Artificial Sequence: Synthetic oligonucleotide
cugaaauaacauuugcuguuuuaua

SEQ ID NO: 112908 - RNA, 25 nt, Artificial Sequence
  Description of Artificial Sequence: Synthetic oligonucleotide
agguuugaagaacauaggaaaaacu

SEQ ID NO: 112909 - RNA, 25 nt, Artificial Sequence
  Description of Artificial Sequence: Synthetic oligonucleotide
uaagagguuuuguuuuuauuuuugc

SEQ ID NO: 112910 - RNA, 25 nt, Artificial Sequence
  Description of Artificial Sequence: Synthetic oligonucleotide
cugaugaagagauauguuuaaauau

SEQ ID NO: 112911 - RNA, 25 nt, Artificial Sequence
  Description of Artificial Sequence: Synthetic oligonucleotide
uguuguauuguuuuguuuaguuaca

SEQ ID NO: 112912 - RNA, 25 nt, Artificial Sequence
  Description of Artificial Sequence: Synthetic oligonucleotide
aggacaauaaugaaauggaguuuau

SEQ ID NO: 112913 - RNA, 25 nt, Artificial Sequence
  Description of Artificial Sequence: Synthetic oligonucleotide
uauuuguuauuucuauuuuguuaua

SEQ ID NO: 112914 - RNA, 25 nt, Artificial Sequence
  Description of Artificial Sequence: Synthetic oligonucleotide
auuuaauaauagaauuagauugaaa

SEQ ID NO: 112915 - RNA, 25 nt, Artificial Sequence
  Description of Artificial Sequence: Synthetic oligonucleotide
auaaaauauaaugggaaauaaucug

SEQ ID NO: 112916 - RNA, 25 nt, Artificial Sequence
  Description of Artificial Sequence: Synthetic oligonucleotide
gcagaauguggguuuccugguguuu

SEQ ID NO: 112917 - RNA, 25 nt, Artificial Sequence
  Description of Artificial Sequence: Synthetic oligonucleotide
uccucugacucuagugcacugauga

SEQ ID NO: 112918 - RNA, 25 nt, Artificial Sequence
  Description of Artificial Sequence: Synthetic oligonucleotide
aucucugauaaggcucagcugcuuu

SEQ ID NO: 112919 - RNA, 25 nt, Artificial Sequence
  Description of Artificial Sequence: Synthetic oligonucleotide
uauaguucucuggcuaaugcagcag

SEQ ID NO: 112920 - RNA, 25 nt, Artificial Sequence
  Description of Artificial Sequence: Synthetic oligonucleotide
gauacucuuccugccagugguaaua

SEQ ID NO: 112921 - RNA, 25 nt, Artificial Sequence
  Description of Artificial Sequence: Synthetic oligonucleotide
acgauuuuuuaagaaggcaguuugu

SEQ ID NO: 112922 - RNA, 25 nt, Artificial Sequence
  Description of Artificial Sequence: Synthetic oligonucleotide
ucaauuuuaaucuuguggauaccuu

SEQ ID NO: 112923 - RNA, 25 nt, Artificial Sequence
  Description of Artificial Sequence: Synthetic oligonucleotide
uuauacucuuaggguauuauuuuau

SEQ ID NO: 112924 - RNA, 25 nt, Artificial Sequence
  Description of Artificial Sequence: Synthetic oligonucleotide
uacaaaagccuugaggauugcauuc

SEQ ID NO: 112925 - RNA, 25 nt, Artificial Sequence
  Description of Artificial Sequence: Synthetic oligonucleotide
cuauuuucuauaugacccucuugau

SEQ ID NO: 112926 - RNA, 25 nt, Artificial Sequence
  Description of Artificial Sequence: Synthetic oligonucleotide
uauuuaaaaaacacuauggauaaca

SEQ ID NO: 112927 - RNA, 25 nt, Artificial Sequence
  Description of Artificial Sequence: Synthetic oligonucleotide
aauucuucauuuaccuaguauuaug

SEQ ID NO: 112928 - RNA, 25 nt, Artificial Sequence
  Description of Artificial Sequence: Synthetic oligonucleotide
gaaagaaugaaggaguucaaacaaa

SEQ ID NO: 112929 - RNA, 25 nt, Artificial Sequence
  Description of Artificial Sequence: Synthetic oligonucleotide
auguguuucccaguuaacuaggguu

SEQ ID NO: 112930 - RNA, 25 nt, Artificial Sequence
  Description of Artificial Sequence: Synthetic oligonucleotide
uuacuguuugagccaauauaaaugu

SEQ ID NO: 112931 - RNA, 25 nt, Artificial Sequence
  Description of Artificial Sequence: Synthetic oligonucleotide
uuuaacuguuugugauggcaguauu

SEQ ID NO: 112932 - RNA, 25 nt, Artificial Sequence
  Description of Artificial Sequence: Synthetic oligonucleotide
uccuaaaguacauugcauguuuucc

SEQ ID NO: 112933 - RNA, 25 nt, Artificial Sequence
  Description of Artificial Sequence: Synthetic oligonucleotide
cuaaauacagaguuuaaauaauuuc

SEQ ID NO: 112934 - RNA, 25 nt, Artificial Sequence
  Description of Artificial Sequence: Synthetic oligonucleotide
caguaauucuuagaugauucagcuu

SEQ ID NO: 112935 - RNA, 25 nt, Artificial Sequence
  Description of Artificial Sequence: Synthetic oligonucleotide
ucaucauuaagaauaucuuuuguuu

SEQ ID NO: 112936 - RNA, 25 nt, Artificial Sequence
  Description of Artificial Sequence: Synthetic oligonucleotide
uuauguugaguuagaaaugccuuca

SEQ ID NO: 112937 - RNA, 25 nt, Artificial Sequence
  Description of Artificial Sequence: Synthetic oligonucleotide
auauagacauagucuuucagaccuc

SEQ ID NO: 112938 - RNA, 25 nt, Artificial Sequence
  Description of Artificial Sequence: Synthetic oligonucleotide
cuacugucaguuuucauuucuagcu

SEQ ID NO: 112939 - RNA, 25 nt, Artificial Sequence
  Description of Artificial Sequence: Synthetic oligonucleotide
ugcuuucaggguuuuaugaauuuuc

SEQ ID NO: 112940 - RNA, 25 nt, Artificial Sequence
  Description of Artificial Sequence: Synthetic oligonucleotide
caggcaaagcuuuaauuuauacuaa

SEQ ID NO: 112941 - RNA, 25 nt, Artificial Sequence
  Description of Artificial Sequence: Synthetic oligonucleotide
agcuuaggaaguauggcuaaugcca

SEQ ID NO: 112942 - RNA, 25 nt, Artificial Sequence
  Description of Artificial Sequence: Synthetic oligonucleotide
aacggcaguuuuuuucuucuuaauu

SEQ ID NO: 112943 - RNA, 25 nt, Artificial Sequence
  Description of Artificial Sequence: Synthetic oligonucleotide
uccacaugacugaggcauauaugau

SEQ ID NO: 112944 - RNA, 25 nt, Artificial Sequence
  Description of Artificial Sequence: Synthetic oligonucleotide
ucucuggguaggugaguuguuguga

SEQ ID NO: 112945 - RNA, 25 nt, Artificial Sequence
  Description of Artificial Sequence: Synthetic oligonucleotide
uuuaaagaaaaaaagguagugaauu

SEQ ID NO: 112946 - RNA, 25 nt, Artificial Sequence
  Description of Artificial Sequence: Synthetic oligonucleotide
uuuuaaucaucuggacuuuaagaag

SEQ ID NO: 112947 - RNA, 25 nt, Artificial Sequence
  Description of Artificial Sequence: Synthetic oligonucleotide
ggauucuggaguauacuuaggccug

SEQ ID NO: 112948 - RNA, 25 nt, Artificial Sequence
  Description of Artificial Sequence: Synthetic oligonucleotide
gaaauuauauauauuuggcuuggaa

SEQ ID NO: 112949 - RNA, 25 nt, Artificial Sequence
  Description of Artificial Sequence: Synthetic oligonucleotide
aauguguuuuucuucaauuacaucu

SEQ ID NO: 112950 - RNA, 25 nt, Artificial Sequence
  Description of Artificial Sequence: Synthetic oligonucleotide
uacaaguaaguacagcugaaauuca

SEQ ID NO: 112951 - RNA, 25 nt, Artificial Sequence
  Description of Artificial Sequence: Synthetic oligonucleotide
agaggacccauaagaguucacauga

SEQ ID NO: 112952 - RNA, 25 nt, Artificial Sequence
  Description of Artificial Sequence: Synthetic oligonucleotide
aaaaaaaucaauucauuugaaaagg

SEQ ID NO: 112953 - RNA, 25 nt, Artificial Sequence
  Description of Artificial Sequence: Synthetic oligonucleotide
gcaagaugcaggagagaggaagccu

SEQ ID NO: 112954 - RNA, 25 nt, Artificial Sequence
  Description of Artificial Sequence: Synthetic oligonucleotide
uugcaaaccugcagacugcuuuuug

SEQ ID NO: 112955 - RNA, 25 nt, Artificial Sequence
  Description of Artificial Sequence: Synthetic oligonucleotide
gcccaauauagauuggguaaggcug

SEQ ID NO: 112956 - RNA, 25 nt, Artificial Sequence
  Description of Artificial Sequence: Synthetic oligonucleotide
gcaaaacauaagcuuaauuagcuca

SEQ ID NO: 112957 - RNA, 25 nt, Artificial Sequence
  Description of Artificial Sequence: Synthetic oligonucleotide
acaugcucugcucucacguggcacc

SEQ ID NO: 112958 - RNA, 25 nt, Artificial Sequence
  Description of Artificial Sequence: Synthetic oligonucleotide
caguggauagugugagagaauuagg

SEQ ID NO: 112959 - RNA, 25 nt, Artificial Sequence
  Description of Artificial Sequence: Synthetic oligonucleotide
gcuguagaacaaauggccuucucuu

SEQ ID NO: 112960 - RNA, 25 nt, Artificial Sequence
  Description of Artificial Sequence: Synthetic oligonucleotide
uucagcauucacaccacuacaaaau

SEQ ID NO: 112961 - RNA, 25 nt, Artificial Sequence
  Description of Artificial Sequence: Synthetic oligonucleotide
ucaucuuuuauaucaacagaagaau

SEQ ID NO: 112962 - RNA, 25 nt, Artificial Sequence
  Description of Artificial Sequence: Synthetic oligonucleotide
uaagcauaaacuaagcaaaagguca

SEQ ID NO: 112963 - RNA, 25 nt, Artificial Sequence
  Description of Artificial Sequence: Synthetic oligonucleotide
aauaaguaccugaaaccaagauugg

SEQ ID NO: 112964 - RNA, 25 nt, Artificial Sequence
  Description of Artificial Sequence: Synthetic oligonucleotide
gcuagagauauaucuuaaugcaauc

SEQ ID NO: 112965 - RNA, 25 nt, Artificial Sequence
  Description of Artificial Sequence: Synthetic oligonucleotide
ccauuuucugauggauuguuacgag

SEQ ID NO: 112966 - RNA, 25 nt, Artificial Sequence
  Description of Artificial Sequence: Synthetic oligonucleotide
guuggcuauauaauguauguauggu

SEQ ID NO: 112967 - RNA, 25 nt, Artificial Sequence
  Description of Artificial Sequence: Synthetic oligonucleotide
uauuuugauuuguguaaaaguuuua

SEQ ID NO: 112968 - RNA, 25 nt, Artificial Sequence
  Description of Artificial Sequence: Synthetic oligonucleotide
aaaaaucaagcuuuaaguacaugga

SEQ ID NO: 112969 - RNA, 25 nt, Artificial Sequence
  Description of Artificial Sequence: Synthetic oligonucleotide
acauuuuuaaauaaaauauuuaaag

SEQ ID NO: 112970 - RNA, 25 nt, Artificial Sequence
  Description of Artificial Sequence: Synthetic oligonucleotide
gacaauuuagaaaauugccuuaaua

SEQ ID NO: 112971 - RNA, 25 nt, Artificial Sequence
  Description of Artificial Sequence: Synthetic oligonucleotide
aucauuguuggcuaaauagaauagg

SEQ ID NO: 112972 - RNA, 25 nt, Artificial Sequence
  Description of Artificial Sequence: Synthetic oligonucleotide
gggacaugcauauuaaggaaaaggu

SEQ ID NO: 112973 - RNA, 25 nt, Artificial Sequence
  Description of Artificial Sequence: Synthetic oligonucleotide
ucauggagaaauaauauugguauca

SEQ ID NO: 112974 - RNA, 25 nt, Artificial Sequence
  Description of Artificial Sequence: Synthetic oligonucleotide
aaacaaauacauugauuugucauga

SEQ ID NO: 112975 - RNA, 25 nt, Artificial Sequence
  Description of Artificial Sequence: Synthetic oligonucleotide
auacacauugaauuugauccaauag

SEQ ID NO: 112976 - RNA, 25 nt, Artificial Sequence
  Description of Artificial Sequence: Synthetic oligonucleotide
guuuaaggaauagguaggaaaauuu

SEQ ID NO: 112977 - RNA, 25 nt, Artificial Sequence
  Description of Artificial Sequence: Synthetic oligonucleotide
ugguuucuauuuuucgauuuccugu

SEQ ID NO: 112978 - RNA, 25 nt, Artificial Sequence
  Description of Artificial Sequence: Synthetic oligonucleotide
uaaaucagugacauaaauaauucuu

SEQ ID NO: 112979 - RNA, 25 nt, Artificial Sequence
  Description of Artificial Sequence: Synthetic oligonucleotide
uagcuuauuuuauauuuccuugucu

SEQ ID NO: 112980 - RNA, 25 nt, Artificial Sequence
  Description of Artificial Sequence: Synthetic oligonucleotide
uuaaauacugagcucaguaaguugu

SEQ ID NO: 112981 - RNA, 25 nt, Artificial Sequence
  Description of Artificial Sequence: Synthetic oligonucleotide
uguuaggggauuauuucucaguuga

SEQ ID NO: 112982 - RNA, 25 nt, Artificial Sequence
  Description of Artificial Sequence: Synthetic oligonucleotide
agacuuucuuauaugacauuuuacu

SEQ ID NO: 112983 - RNA, 25 nt, Artificial Sequence
  Description of Artificial Sequence: Synthetic oligonucleotide
uauguuuugacuuccugacuauuaa

SEQ ID NO: 112984 - RNA, 25 nt, Artificial Sequence
  Description of Artificial Sequence: Synthetic oligonucleotide
aaaauaaauaguagaaacaauuuuc

SEQ ID NO: 112985 - RNA, 25 nt, Artificial Sequence
  Description of Artificial Sequence: Synthetic oligonucleotide
cauaaagugaagaauuauauaauca

SEQ ID NO: 112986 - RNA, 25 nt, Artificial Sequence
  Description of Artificial Sequence: Synthetic oligonucleotide
acugcuuuauaacugacuuuauuau

SEQ ID NO: 112987 - RNA, 25 nt, Artificial Sequence
  Description of Artificial Sequence: Synthetic oligonucleotide
uauuuauuucaaaguucauuuaaag

SEQ ID NO: 112988 - RNA, 25 nt, Artificial Sequence
  Description of Artificial Sequence: Synthetic oligonucleotide
ggcuacuauucauccucugugaugg

SEQ ID NO: 112989 - RNA, 25 nt, Artificial Sequence
  Description of Artificial Sequence: Synthetic oligonucleotide
gaauggucaggaauuuguuuucuca

SEQ ID NO: 112990 - RNA, 25 nt, Artificial Sequence
  Description of Artificial Sequence: Synthetic oligonucleotide
auaguuuaauuccaacaacaauauu

SEQ ID NO: 112991 - RNA, 25 nt, Artificial Sequence
  Description of Artificial Sequence: Synthetic oligonucleotide
uagucguauccaaaauaaccuuuaa

SEQ ID NO: 112992 - RNA, 25 nt, Artificial Sequence
  Description of Artificial Sequence: Synthetic oligonucleotide
augcuaaacuuuacugauguauauc

SEQ ID NO: 112993 - RNA, 25 nt, Artificial Sequence
  Description of Artificial Sequence: Synthetic oligonucleotide
ccaaagcuucuccuuuucagacaga

SEQ ID NO: 112994 - RNA, 25 nt, Artificial Sequence
  Description of Artificial Sequence: Synthetic oligonucleotide
auuaauccagaagcagucauaaaca

SEQ ID NO: 112995 - RNA, 25 nt, Artificial Sequence
  Description of Artificial Sequence: Synthetic oligonucleotide
agaagaauaggugguauguuccuaa

SEQ ID NO: 112996 - RNA, 25 nt, Artificial Sequence
  Description of Artificial Sequence: Synthetic oligonucleotide
augauauuauuucuacuaauggaau

SEQ ID NO: 112997 - RNA, 25 nt, Artificial Sequence
  Description of Artificial Sequence: Synthetic oligonucleotide
uaaacuguaauauuagaaauuaugc

SEQ ID NO: 112998 - RNA, 25 nt, Artificial Sequence
  Description of Artificial Sequence: Synthetic oligonucleotide
cugcuaauuauaucagcucugaggu

SEQ ID NO: 112999 - RNA, 25 nt, Artificial Sequence
  Description of Artificial Sequence: Synthetic oligonucleotide
uaauuucugaaauguucagacucag

SEQ ID NO: 113000 - RNA, 25 nt, Artificial Sequence
  Description of Artificial Sequence: Synthetic oligonucleotide
gucggaacaaauuggaaaauuuaaa

SEQ ID NO: 113001 - RNA, 25 nt, Artificial Sequence
  Description of Artificial Sequence: Synthetic oligonucleotide
auuuuuauucuuagcuauaaagcaa

SEQ ID NO: 113002 - RNA, 25 nt, Artificial Sequence
  Description of Artificial Sequence: Synthetic oligonucleotide
agaaaguaaacacauuaauuuccuc

SEQ ID NO: 113003 - RNA, 25 nt, Artificial Sequence
  Description of Artificial Sequence: Synthetic oligonucleotide
caacauuuuuaagccaauuaaaaau

SEQ ID NO: 113004 - RNA, 25 nt, Artificial Sequence
  Description of Artificial Sequence: Synthetic oligonucleotide
uauaaaagauacacaccaauaucuu

SEQ ID NO: 113005 - RNA, 25 nt, Artificial Sequence
  Description of Artificial Sequence: Synthetic oligonucleotide
ucuucaggcucugacaggccuccug

SEQ ID NO: 113006 - RNA, 25 nt, Artificial Sequence
  Description of Artificial Sequence: Synthetic oligonucleotide
ggaaacuuccacauauuuuucaacu

SEQ ID NO: 113007 - RNA, 25 nt, Artificial Sequence
  Description of Artificial Sequence: Synthetic oligonucleotide
ugcaguauaaagucagaaaauaaag

SEQ ID NO: 113008 - RNA, 25 nt, Artificial Sequence
  Description of Artificial Sequence: Synthetic oligonucleotide
guuaacauaacuuucacuaacacac

SEQ ID NO: 113009 - RNA, 25 nt, Artificial Sequence
  Description of Artificial Sequence: Synthetic oligonucleotide
cacauauguagauuucacaaaaucc

SEQ ID NO: 113010 - RNA, 25 nt, Artificial Sequence
  Description of Artificial Sequence: Synthetic oligonucleotide
caccuauaauuggucaaagugguug

SEQ ID NO: 113011 - RNA, 25 nt, Artificial Sequence
  Description of Artificial Sequence: Synthetic oligonucleotide
gagaauauauuuuuuaguaauugca

SEQ ID NO: 113012 - RNA, 25 nt, Artificial Sequence
  Description of Artificial Sequence: Synthetic oligonucleotide
augcaaaauuuuucuagcuuccauc

SEQ ID NO: 113013 - RNA, 25 nt, Artificial Sequence
  Description of Artificial Sequence: Synthetic oligonucleotide
ccuuucucccucguuucuucuuuuu

SEQ ID NO: 113014 - RNA, 25 nt, Artificial Sequence
  Description of Artificial Sequence: Synthetic oligonucleotide
uuugggggagcugguaacugaugaa

SEQ ID NO: 113015 - RNA, 25 nt, Artificial Sequence
  Description of Artificial Sequence: Synthetic oligonucleotide
aaucuuuucccaccuuuucucuuca

SEQ ID NO: 113016 - RNA, 25 nt, Artificial Sequence
  Description of Artificial Sequence: Synthetic oligonucleotide
aggaaauauaagugguuuuguuugg

SEQ ID NO: 113017 - RNA, 25 nt, Artificial Sequence
  Description of Artificial Sequence: Synthetic oligonucleotide
guuaacgugauacauucuguaugaa

SEQ ID NO: 113018 - RNA, 25 nt, Artificial Sequence
  Description of Artificial Sequence: Synthetic oligonucleotide
augaaacauuggagggaaacaucua

SEQ ID NO: 113019 - RNA, 25 nt, Artificial Sequence
  Description of Artificial Sequence: Synthetic oligonucleotide
acugaauuucuguaauuuaaaauau

SEQ ID NO: 113020 - RNA, 25 nt, Artificial Sequence
  Description of Artificial Sequence: Synthetic oligonucleotide
uuuugcugcuaguuaacuaugaaca

SEQ ID NO: 113021 - RNA, 25 nt, Artificial Sequence
  Description of Artificial Sequence: Synthetic oligonucleotide
agauagaagaaucuuacagaugcug

SEQ ID NO: 113022 - RNA, 25 nt, Artificial Sequence
  Description of Artificial Sequence: Synthetic oligonucleotide
gcuauaaauaaguagaaaauauaaa

SEQ ID NO: 113023 - RNA, 25 nt, Artificial Sequence
  Description of Artificial Sequence: Synthetic oligonucleotide
auuucaucacuaaaauaugcuauuu

SEQ ID NO: 113024 - RNA, 25 nt, Artificial Sequence
  Description of Artificial Sequence: Synthetic oligonucleotide
uuaaaaucuauuuccuauauuguau

SEQ ID NO: 113025 - RNA, 25 nt, Artificial Sequence
  Description of Artificial Sequence: Synthetic oligonucleotide
uuucuaaucagauguauuacucuua

SEQ ID NO: 113026 - RNA, 25 nt, Artificial Sequence
  Description of Artificial Sequence: Synthetic oligonucleotide
auuauuucuauuguauguguuaaug

SEQ ID NO: 113027 - RNA, 25 nt, Artificial Sequence
  Description of Artificial Sequence: Synthetic oligonucleotide
gauuuuauguaaaaauguaauugcu

SEQ ID NO: 113028 - RNA, 25 nt, Artificial Sequence
  Description of Artificial Sequence: Synthetic oligonucleotide
uuuucaugaguaguaugaauaaaau

SEQ ID NO: 113029 - RNA, 25 nt, Artificial Sequence
  Description of Artificial Sequence: Synthetic oligonucleotide
uugauuaguuuguguuuucuugucu

SEQ ID NO: 113030 - DNA, 21 bp, Artificial Sequence
  Description of Artificial Sequence: Synthetic oligonucleotide
  Description of Combined DNA/RNA Molecule: Synthetic oligonucleotide
cuacacaaaucagcgauuutt

SEQ ID NO: 113031 - DNA, 21 bp, Artificial Sequence
  Description of Artificial Sequence: Synthetic oligonucleotide
  Description of Combined DNA/RNA Molecule: Synthetic oligonucleotide
aaaucgcugauuuguguagtt

SEQ ID NO: 113032 - DNA, 25 bp, Artificial Sequence
  Description of Artificial Sequence: Synthetic oligonucleotide
  Description of Combined DNA/RNA Molecule: Synthetic oligonucleotide
cuacacaaaucagcgauuuccaugt

SEQ ID NO: 113033 - RNA, 27 nt, Artificial Sequence
  Description of Artificial Sequence: Synthetic oligonucleotide
acauggaaaucgcugauuuguguaguc

SEQ ID NO: 113034 - RNA, 13 nt, Artificial Sequence
  Description of Artificial Sequence: Synthetic oligonucleotide
cuacacaaaucag

SEQ ID NO: 113035 - DNA, 11 bp, Artificial Sequence
  Description of Artificial Sequence: Synthetic oligonucleotide
  Description of Combined DNA/RNA Molecule: Synthetic oligonucleotide
gauuuccaugt

SEQ ID NO: 113036 - DNA, 21 bp, Artificial Sequence
  Description of Artificial Sequence: Synthetic oligonucleotide
  Description of Combined DNA/RNA Molecule: Synthetic oligonucleotide
ggaucuuauuucuucggagtt

SEQ ID NO: 113037 - DNA, 21 bp, Artificial Sequence
  Description of Artificial Sequence: Synthetic oligonucleotide
  Description of Combined DNA/RNA Molecule: Synthetic oligonucleotide
cuccgaagaaauaagaucctt

SEQ ID NO: 113038 - RNA, 11 nt, Artificial Sequence
  Description of Artificial Sequence: Synthetic oligonucleotide
ggaucuuauuu

SEQ ID NO: 113039 - DNA, 10 bp, Artificial Sequence
  Description of Artificial Sequence: Synthetic oligonucleotide
  Description of Combined DNA/RNA Molecule: Synthetic oligonucleotide
cuucggagtt

SEQ ID NO: 113040 - RNA, 27 nt, Artificial Sequence
  Description of Artificial Sequence: Synthetic oligonucleotide
cauugucuccgaagaaauaagauccuu

SEQ ID NO: 113041 - RNA, 8 nt, Artificial Sequence
  Description of Artificial Sequence: Synthetic oligonucleotide
  modified_base (2): LNA-G
ggaucuua

SEQ ID NO: 113042 - DNA, 17 bp, Artificial Sequence
  Description of Artificial Sequence: Synthetic oligonucleotide
  Description of Combined DNA/RNA Molecule: Synthetic oligonucleotide
uuucuucggagacaatg

SEQ ID NO: 113043 - DNA, 16 bp, Artificial Sequence
  Description of Artificial Sequence: Synthetic oligonucleotide
  Description of Combined DNA/RNA Molecule: Synthetic oligonucleotide
uucuucggagacaatg

SEQ ID NO: 113044 - DNA, 15 bp, Artificial Sequence
  Description of Artificial Sequence: Synthetic oligonucleotide
  Description of Combined DNA/RNA Molecule: Synthetic oligonucleotide
ucuucggagacaatg

SEQ ID NO: 113045 - DNA, 14 bp, Artificial Sequence
  Description of Artificial Sequence: Synthetic oligonucleotide
  Description of Combined DNA/RNA Molecule: Synthetic oligonucleotide
cuucggagacaatg

SEQ ID NO: 113046 - DNA, 13 bp, Artificial Sequence
  Description of Artificial Sequence: Synthetic oligonucleotide
  Description of Combined DNA/RNA Molecule: Synthetic oligonucleotide
uucggagacaatg

SEQ ID NO: 113047 - DNA, 12 bp, Artificial Sequence
  Description of Artificial Sequence: Synthetic oligonucleotide
  Description of Combined DNA/RNA Molecule: Synthetic oligonucleotide
ucggagacaatg

SEQ ID NO: 113048 - DNA, 11 bp, Artificial Sequence
  Description of Artificial Sequence: Synthetic oligonucleotide
  Description of Combined DNA/RNA Molecule: Synthetic oligonucleotide
cggagacaatg

SEQ ID NO: 113049 - RNA, 9 nt, Artificial Sequence
  Description of Artificial Sequence: Synthetic oligonucleotide
  modified_base (2): LNA-G
ggaucuuau

SEQ ID NO: 113050 - RNA, 10 nt, Artificial Sequence
  Description of Artificial Sequence: Synthetic oligonucleotide
  modified_base (2): LNA-G
ggaucuuauu

SEQ ID NO: 113051 - RNA, 11 nt, Artificial Sequence
  Description of Artificial Sequence: Synthetic oligonucleotide
  modified_base (2): LNA-G
ggaucuuauuu

SEQ ID NO: 113052 - RNA, 12 nt, Artificial Sequence
  Description of Artificial Sequence: Synthetic oligonucleotide
  modified_base (2): LNA-G
ggaucuuauuuc

SEQ ID NO: 113053 - RNA, 8 nt, Artificial Sequence
  Description of Artificial Sequence: Synthetic oligonucleotide
  modified_base (3): LNA-A
cuacacaa

SEQ ID NO: 113054 - DNA, 13 bp, Artificial Sequence
  Description of Artificial Sequence: Synthetic oligonucleotide
  Description of Combined DNA/RNA Molecule: Synthetic oligonucleotide
  modified_base (8): LNA-A
aucagcgauuutt

SEQ ID NO: 113055 - DNA, 12 bp, Artificial Sequence
  Description of Artificial Sequence: Synthetic oligonucleotide
  Description of Combined DNA/RNA Molecule: Synthetic oligonucleotide
  modified_base (7): LNA-A
ucagcgauuutt

SEQ ID NO: 113056 - DNA, 11 bp, Artificial Sequence
  Description of Artificial Sequence: Synthetic oligonucleotide
  Description of Combined DNA/RNA Molecule: Synthetic oligonucleotide
  modified_base (6): LNA-A
cagcgauuutt

SEQ ID NO: 113057 - DNA, 10 bp, Artificial Sequence
  Description of Artificial Sequence: Synthetic oligonucleotide
  Description of Combined DNA/RNA Molecule: Synthetic oligonucleotide
  modified_base (5): LNA-A
agcgauuutt

SEQ ID NO: 113058 - DNA, 9 bp, Artificial Sequence
  Description of Artificial Sequence: Synthetic oligonucleotide
  Description of Combined DNA/RNA Molecule: Synthetic oligonucleotide
  modified_base (4): LNA-A
gcgauuutt

SEQ ID NO: 113059 - DNA, 8 bp, Artificial Sequence
  Description of Artificial Sequence: Synthetic oligonucleotide
  Description of Combined DNA/RNA Molecule: Synthetic oligonucleotide
  modified_base (3): LNA-A
cgauuutt

SEQ ID NO: 113060 - DNA, 7 bp, Artificial Sequence
  Description of Artificial Sequence: Synthetic oligonucleotide
  Description of Combined DNA/RNA Molecule: Synthetic oligonucleotide
  modified_base (2): LNA-A
gauuutt

SEQ ID NO: 113061 - RNA, 9 nt, Artificial Sequence
  Description of Artificial Sequence: Synthetic oligonucleotide
  modified_base (3): LNA-A
cuacacaaa

SEQ ID NO: 113062 - RNA, 10 nt, Artificial Sequence
  Description of Artificial Sequence: Synthetic oligonucleotide
  modified_base (3): LNA-A
cuacacaaau

SEQ ID NO: 113063 - RNA, 11 nt, Artificial Sequence
  Description of Artificial Sequence: Synthetic oligonucleotide
  modified_base (3): LNA-A
cuacacaaauc

SEQ ID NO: 113064 - RNA, 12 nt, Artificial Sequence
  Description of Artificial Sequence: Synthetic oligonucleotide
  modified_base (3): LNA-A
cuacacaaauca

SEQ ID NO: 113065 - RNA, 13 nt, Artificial Sequence
  Description of Artificial Sequence: Synthetic oligonucleotide
  modified_base (3): LNA-A
cuacacaaaucag

SEQ ID NO: 113066 - RNA, 14 nt, Artificial Sequence
  Description of Artificial Sequence: Synthetic oligonucleotide
  modified_base (3): LNA-A
cuacacaaaucagc

SEQ ID NO: 113067 - RNA, 13 nt, Artificial Sequence
  Description of Artificial Sequence: Synthetic oligonucleotide
  modified_base (2): LNA-G
ggaucuuauuucu

SEQ ID NO: 113068 - RNA, 14 nt, Artificial Sequence
  Description of Artificial Sequence: Synthetic oligonucleotide
  modified_base (2): LNA-G
ggaucuuauuucuu

SEQ ID NO: 113069 - RNA, 8 nt, Artificial Sequence
  Description of Artificial Sequence: Synthetic oligonucleotide
  modified_base (2): LNA-G
  modified_base (8): LNA-A
ggaucuua

SEQ ID NO: 113070 - RNA, 9 nt, Artificial Sequence
  Description of Artificial Sequence: Synthetic oligonucleotide
  modified_base (2): LNA-G
  modified_base (9): LNA-U
ggaucuuau

SEQ ID NO: 113071 - RNA, 10 nt, Artificial Sequence
  Description of Artificial Sequence: Synthetic oligonucleotide
  modified_base (2): LNA-G
  modified_base (10): LNA-U
ggaucuuauu

SEQ ID NO: 113072 - RNA, 11 nt, Artificial Sequence
  Description of Artificial Sequence: Synthetic oligonucleotide
  modified_base (2): LNA-G
  modified_base (11): LNA-U
ggaucuuauuu

SEQ ID NO: 113073 - RNA, 12 nt, Artificial Sequence
  Description of Artificial Sequence: Synthetic oligonucleotide
  modified_base (2): LNA-G
  modified_base (12): LNA-C
ggaucuuauuuc

SEQ ID NO: 113074 - RNA, 13 nt, Artificial Sequence
  Description of Artificial Sequence: Synthetic oligonucleotide
  modified_base (2): LNA-G
  modified_base (13): LNA-U
ggaucuuauuucu

SEQ ID NO: 113075 - RNA, 14 nt, Artificial Sequence
  Description of Artificial Sequence: Synthetic oligonucleotide
  modified_base (2): LNA-G
  modified_base (14): LNA-U
ggaucuuauuucuu

SEQ ID NO: 113076 - DNA, 13 bp, Artificial Sequence
  Description of Artificial Sequence: Synthetic oligonucleotide
  Description of Combined DNA/RNA Molecule: Synthetic oligonucleotide
  modified_base (8): LNA-G
uuucuucggagtt

SEQ ID NO: 113077 - DNA, 12 bp, Artificial Sequence
  Description of Artificial Sequence: Synthetic oligonucleotide
  Description of Combined DNA/RNA Molecule: Synthetic oligonucleotide
  modified_base (7): LNA-G
uucuucggagtt

SEQ ID NO: 113078 - DNA, 11 bp, Artificial Sequence
  Description of Artificial Sequence: Synthetic oligonucleotide
  Description of Combined DNA/RNA Molecule: Synthetic oligonucleotide
  modified_base (6): LNA-G
ucuucggagtt

SEQ ID NO: 113079 - DNA, 10 bp, Artificial Sequence
  Description of Artificial Sequence: Synthetic oligonucleotide
  Description of Combined DNA/RNA Molecule: Synthetic oligonucleotide
  modified_base (5): LNA-G
cuucggagtt

SEQ ID NO: 113080 - DNA, 9 bp, Artificial Sequence
  Description of Artificial Sequence: Synthetic oligonucleotide
  Description of Combined DNA/RNA Molecule: Synthetic oligonucleotide
  modified_base (4): LNA-G
uucggagtt

SEQ ID NO: 113081 - DNA, 8 bp, Artificial Sequence
  Description of Artificial Sequence: Synthetic oligonucleotide
  Description of Combined DNA/RNA Molecule: Synthetic oligonucleotide
  modified_base (3): LNA-G
ucggagtt

SEQ ID NO: 113082 - DNA, 7 bp, Artificial Sequence
  Description of Artificial Sequence: Synthetic oligonucleotide
  Description of Combined DNA/RNA Molecule: Synthetic oligonucleotide
  modified_base (2): LNA-G
cggagtt

SEQ ID NO: 113083 - DNA, 13 bp, Artificial Sequence
  Description of Artificial Sequence: Synthetic oligonucleotide
  Description of Combined DNA/RNA Molecule: Synthetic oligonucleotide
  modified_base (1): LNA-U
  modified_base (8): LNA-G
uuucuucggagtt

SEQ ID NO: 113084 - DNA, 12 bp, Artificial Sequence
  Description of Artificial Sequence: Synthetic oligonucleotide
  Description of Combined DNA/RNA Molecule: Synthetic oligonucleotide
  modified_base (1): LNA-U
  modified_base (7): LNA-G
uucuucggagtt

SEQ ID NO: 113085 - DNA, 11 bp, Artificial Sequence
  Description of Artificial Sequence: Synthetic oligonucleotide
  Description of Combined DNA/RNA Molecule: Synthetic oligonucleotide
  modified_base (1): LNA-U
  modified_base (6): LNA-G
ucuucggagtt

SEQ ID NO: 113086 - DNA, 10 bp, Artificial Sequence
  Description of Artificial Sequence: Synthetic oligonucleotide
  Description of Combined DNA/RNA Molecule: Synthetic oligonucleotide
  modified_base (1): LNA-C
  modified_base (5): LNA-G
cuucggagtt

SEQ ID NO: 113087 - DNA, 9 bp, Artificial Sequence
  Description of Artificial Sequence: Synthetic oligonucleotide
  Description of Combined DNA/RNA Molecule: Synthetic oligonucleotide
  modified_base (1): LNA-U
  modified_base (4): LNA-G
uucggagtt

SEQ ID NO: 113088 - DNA, 8 bp, Artificial Sequence
  Description of Artificial Sequence: Synthetic oligonucleotide
  Description of Combined DNA/RNA Molecule: Synthetic oligonucleotide
  modified_base (1): LNA-U
  modified_base (3): LNA-G
ucggagtt

SEQ ID NO: 113089 - DNA, 7 bp, Artificial Sequence
  Description of Artificial Sequence: Synthetic oligonucleotide
  Description of Combined DNA/RNA Molecule: Synthetic oligonucleotide
  modified_base (1): LNA-C
  modified_base (2): LNA-G
cggagtt

SEQ ID NO: 113090 - DNA, 21 bp, Artificial Sequence
  Description of Artificial Sequence: Synthetic oligonucleotide
  Description of Combined DNA/RNA Molecule: Synthetic oligonucleotide
  modified_base (2): LNA-G
  modified_base (16): LNA-G
ggaucuuauuucuucggagtt

SEQ ID NO: 113091 - DNA, 25 bp, Artificial Sequence
  Description of Artificial Sequence: Synthetic oligonucleotide
  Description of Combined DNA/RNA Molecule: Synthetic oligonucleotide
ggaucuuauuucuucggagacaatg

SEQ ID NO: 113092 - RNA, 25 nt, Artificial Sequence
  Description of Artificial Sequence: Synthetic oligonucleotide
guauuuugaugaggaguucacggcc

SEQ ID NO: 113093 - RNA, 25 nt, Artificial Sequence
  Description of Artificial Sequence: Synthetic oligonucleotide
ggcccagaugaucaccaucacacca

SEQ ID NO: 113094 - RNA, 25 nt, Artificial Sequence
  Description of Artificial Sequence: Synthetic oligonucleotide
gggaagaaaacuauccugcggguuu

SEQ ID NO: 113095 - RNA, 25 nt, Artificial Sequence
  Description of Artificial Sequence: Synthetic oligonucleotide
guuuuaauuuauuucauccaguuug

SEQ ID NO: 113096 - RNA, 25 nt, Artificial Sequence
  Description of Artificial Sequence: Synthetic oligonucleotide
acguagggaaauguuaaggacuucu

SEQ ID NO: 113097 - RNA, 25 nt, Artificial Sequence
  Description of Artificial Sequence: Synthetic oligonucleotide
ccaggguuuacccagugggacagag

SEQ ID NO: 113098 - RNA, 25 nt, Artificial Sequence
  Description of Artificial Sequence: Synthetic oligonucleotide
agcaagguuuaaauuuguuauugug

SEQ ID NO: 113099 - RNA, 25 nt, Artificial Sequence
  Description of Artificial Sequence: Synthetic oligonucleotide
uguauuauguuguucaaaugcauuu

SEQ ID NO: 113100 - RNA, 25 nt, Artificial Sequence
  Description of Artificial Sequence: Synthetic oligonucleotide
uuuuaaucuuugugacaggaaagcc

SEQ ID NO: 113101 - RNA, 25 nt, Artificial Sequence
  Description of Artificial Sequence: Synthetic oligonucleotide
uuaaucuuugugacaggaaagcccu

SEQ ID NO: 113102 - RNA, 25 nt, Artificial Sequence
  Description of Artificial Sequence: Synthetic oligonucleotide
gcugcuuaugucucccagcauggcc

SEQ ID NO: 113103 - RNA, 25 nt, Artificial Sequence
  Description of Artificial Sequence: Synthetic oligonucleotide
aaguguuucagaagcuucucccuga

SEQ ID NO: 113104 - RNA, 25 nt, Artificial Sequence
  Description of Artificial Sequence: Synthetic oligonucleotide
gaccaucaauaaggaagaagcccuu

SEQ ID NO: 113105 - RNA, 25 nt, Artificial Sequence
  Description of Artificial Sequence: Synthetic oligonucleotide
ccaucaauaaggaagaagcccuuca

SEQ ID NO: 113106 - RNA, 25 nt, Artificial Sequence
  Description of Artificial Sequence: Synthetic oligonucleotide
ucaauaaggaagaagcccuucagcg

SEQ ID NO: 113107 - RNA, 25 nt, Artificial Sequence
  Description of Artificial Sequence: Synthetic oligonucleotide
aauaaggaagaagcccuucagcggc

SEQ ID NO: 113108 - RNA, 25 nt, Artificial Sequence
  Description of Artificial Sequence: Synthetic oligonucleotide
aggaagaagcccuucagcggccagu

SEQ ID NO: 113109 - RNA, 25 nt, Artificial Sequence
  Description of Artificial Sequence: Synthetic oligonucleotide
gcauaacuaaaggugaaaagcuccg

SEQ ID NO: 113110 - RNA, 25 nt, Artificial Sequence
  Description of Artificial Sequence: Synthetic oligonucleotide
cauaacuaaaggugaaaagcuccgg

SEQ ID NO: 113111 - RNA, 25 nt, Artificial Sequence
  Description of Artificial Sequence: Synthetic oligonucleotide
cuacaucacgccagucaacagucug

SEQ ID NO: 113112 - RNA, 25 nt, Artificial Sequence
  Description of Artificial Sequence: Synthetic oligonucleotide
acuggauuuaagcagaguucaaaag

SEQ ID NO: 113113 - RNA, 25 nt, Artificial Sequence
  Description of Artificial Sequence: Synthetic oligonucleotide
cuggauuuaagcagaguucaaaagc

SEQ ID NO: 113114 - RNA, 25 nt, Artificial Sequence
  Description of Artificial Sequence: Synthetic oligonucleotide
gauuuaagcagaguucaaaagcccu

SEQ ID NO: 113115 - RNA, 25 nt, Artificial Sequence
  Description of Artificial Sequence: Synthetic oligonucleotide
auuuaagcagaguucaaaagcccuu

SEQ ID NO: 113116 - RNA, 25 nt, Artificial Sequence
  Description of Artificial Sequence: Synthetic oligonucleotide
uuaagcagaguucaaaagcccuuca

SEQ ID NO: 113117 - RNA, 25 nt, Artificial Sequence
  Description of Artificial Sequence: Synthetic oligonucleotide
uaagcagaguucaaaagcccuucag

SEQ ID NO: 113118 - RNA, 25 nt, Artificial Sequence
  Description of Artificial Sequence: Synthetic oligonucleotide
agcagaguucaaaagcccuucagcg

SEQ ID NO: 113119 - RNA, 25 nt, Artificial Sequence
  Description of Artificial Sequence: Synthetic oligonucleotide
cucagggucugagugaagccgcucg

SEQ ID NO: 113120 - RNA, 25 nt, Artificial Sequence
  Description of Artificial Sequence: Synthetic oligonucleotide
caagcaacuacaucacgccagucaa

SEQ ID NO: 113121 - RNA, 25 nt, Artificial Sequence
  Description of Artificial Sequence: Synthetic oligonucleotide
aucaauggcagcuucuuggugcgug

SEQ ID NO: 113122 - RNA, 25 nt, Artificial Sequence
  Description of Artificial Sequence: Synthetic oligonucleotide
uuccagcccacauuggauucaucag

SEQ ID NO: 113123 - RNA, 25 nt, Artificial Sequence
  Description of Artificial Sequence: Synthetic oligonucleotide
cagcugagaauguggaauaccuaag

SEQ ID NO: 113124 - RNA, 25 nt, Artificial Sequence
  Description of Artificial Sequence: Synthetic oligonucleotide
aacguaucuccuaauuugaggcuca

SEQ ID NO: 113125 - RNA, 25 nt, Artificial Sequence
  Description of Artificial Sequence: Synthetic oligonucleotide
ccuaaaauaauuucucuacaauugg

SEQ ID NO: 113126 - RNA, 25 nt, Artificial Sequence
  Description of Artificial Sequence: Synthetic oligonucleotide
uggaagauucagcuaguuaggagcc

SEQ ID NO: 113127 - RNA, 25 nt, Artificial Sequence
  Description of Artificial Sequence: Synthetic oligonucleotide
uuaaacucuccuagucaauauccac

SEQ ID NO: 113128 - RNA, 25 nt, Artificial Sequence
  Description of Artificial Sequence: Synthetic oligonucleotide
cagccuacaguuauguucagucaca

SEQ ID NO: 113129 - RNA, 25 nt, Artificial Sequence
  Description of Artificial Sequence: Synthetic oligonucleotide
guuauguucagucacacacacauac

SEQ ID NO: 113130 - RNA, 25 nt, Artificial Sequence
  Description of Artificial Sequence: Synthetic oligonucleotide
cacauacaaaauguuccuuuugcuu

SEQ ID NO: 113131 - RNA, 25 nt, Artificial Sequence
  Description of Artificial Sequence: Synthetic oligonucleotide
uccuuuugcuuuuaaaguaauuuuu

SEQ ID NO: 113132 - RNA, 25 nt, Artificial Sequence
  Description of Artificial Sequence: Synthetic oligonucleotide
ugaccugugaagcaacagucaaugg

SEQ ID NO: 113133 - RNA, 25 nt, Artificial Sequence
  Description of Artificial Sequence: Synthetic oligonucleotide
cuaucucacacaucgacaaaccaau

SEQ ID NO: 113134 - RNA, 25 nt, Artificial Sequence
  Description of Artificial Sequence: Synthetic oligonucleotide
uguccucaauuguacugcuaccacu

SEQ ID NO: 113135 - RNA, 25 nt, Artificial Sequence
  Description of Artificial Sequence: Synthetic oligonucleotide
aaaccguagcuggcaagcggucuua

SEQ ID NO: 113136 - RNA, 25 nt, Artificial Sequence
  Description of Artificial Sequence: Synthetic oligonucleotide
uagcuggcaagcggucuuaccggcu

SEQ ID NO: 113137 - RNA, 25 nt, Artificial Sequence
  Description of Artificial Sequence: Synthetic oligonucleotide
uuguaugguuaaaagauggguuacc

SEQ ID NO: 113138 - RNA, 25 nt, Artificial Sequence
  Description of Artificial Sequence: Synthetic oligonucleotide
ugguuaaaagauggguuaccugcga

SEQ ID NO: 113139 - RNA, 25 nt, Artificial Sequence
  Description of Artificial Sequence: Synthetic oligonucleotide
cagggaauuauacaaucuugcugag

SEQ ID NO: 113140 - RNA, 25 nt, Artificial Sequence
  Description of Artificial Sequence: Synthetic oligonucleotide
acaaucuugcugagcauaaaacagu

SEQ ID NO: 113141 - RNA, 25 nt, Artificial Sequence
  Description of Artificial Sequence: Synthetic oligonucleotide
ccaauaaugaagaguccuuuauccu

SEQ ID NO: 113142 - RNA, 25 nt, Artificial Sequence
  Description of Artificial Sequence: Synthetic oligonucleotide
acuuuggauguuccaacgcaaguug

SEQ ID NO: 113143 - RNA, 25 nt, Artificial Sequence
  Description of Artificial Sequence: Synthetic oligonucleotide
aaugcuuccacuaaacugaaaccau

SEQ ID NO: 113144 - RNA, 25 nt, Artificial Sequence
  Description of Artificial Sequence: Synthetic oligonucleotide
gagaaaguuugacuuuguuaaauau

SEQ ID NO: 113145 - RNA, 25 nt, Artificial Sequence
  Description of Artificial Sequence: Synthetic oligonucleotide
aaagaacuacuguauauuaaaaguu

SEQ ID NO: 113146 - RNA, 25 nt, Artificial Sequence
  Description of Artificial Sequence: Synthetic oligonucleotide
uuagaaauacggguuuugacuuaac

SEQ ID NO: 113147 - RNA, 25 nt, Artificial Sequence
  Description of Artificial Sequence: Synthetic oligonucleotide
aacauggguacagcaaacucagcac

SEQ ID NO: 113148 - RNA, 25 nt, Artificial Sequence
  Description of Artificial Sequence: Synthetic oligonucleotide
aaagacacagaagaugcugaccuca

SEQ ID NO: 113149 - RNA, 25 nt, Artificial Sequence
  Description of Artificial Sequence: Synthetic oligonucleotide
uaguagggagguuuauucagaucgc

SEQ ID NO: 113150 - RNA, 25 nt, Artificial Sequence
  Description of Artificial Sequence: Synthetic oligonucleotide
gccuucugcagcaggguucugggau

SEQ ID NO: 113151 - RNA, 25 nt, Artificial Sequence
  Description of Artificial Sequence: Synthetic oligonucleotide
ggucugguacauauuggaaauuaug

SEQ ID NO: 113152 - RNA, 25 nt, Artificial Sequence
  Description of Artificial Sequence: Synthetic oligonucleotide
cuaguccuuccgauggaagcacuag

SEQ ID NO: 113153 - RNA, 25 nt, Artificial Sequence
  Description of Artificial Sequence: Synthetic oligonucleotide
ccagugaauauuguuuuuaugugga

SEQ ID NO: 113154 - RNA, 25 nt, Artificial Sequence
  Description of Artificial Sequence: Synthetic oligonucleotide
augaauucaaguuggaauugguaga

SEQ ID NO: 113155 - RNA, 25 nt, Artificial Sequence
  Description of Artificial Sequence: Synthetic oligonucleotide
caggacacagauuuagacuuggaga

SEQ ID NO: 113156 - RNA, 25 nt, Artificial Sequence
  Description of Artificial Sequence: Synthetic oligonucleotide
cucaaagcacaguuacaguauucca

SEQ ID NO: 113157 - RNA, 25 nt, Artificial Sequence
  Description of Artificial Sequence: Synthetic oligonucleotide
accacugccaccacugaugaauuaa

SEQ ID NO: 113158 - RNA, 25 nt, Artificial Sequence
  Description of Artificial Sequence: Synthetic oligonucleotide
gaaacuacuagugccacaucaucac

SEQ ID NO: 113159 - RNA, 25 nt, Artificial Sequence
  Description of Artificial Sequence: Synthetic oligonucleotide
aagucggacagccucaccaaacaga

SEQ ID NO: 113160 - RNA, 25 nt, Artificial Sequence
  Description of Artificial Sequence: Synthetic oligonucleotide
gaaagcgaaaaauggaacaugaugg

SEQ ID NO: 113161 - RNA, 25 nt, Artificial Sequence
  Description of Artificial Sequence: Synthetic oligonucleotide
cccucugauuuagcauguagacugc

SEQ ID NO: 113162 - RNA, 25 nt, Artificial Sequence
  Description of Artificial Sequence: Synthetic oligonucleotide
ugagcuauuuaaggaucuauuuaug

SEQ ID NO: 113163 - RNA, 25 nt, Artificial Sequence
  Description of Artificial Sequence: Synthetic oligonucleotide
aaaaggugaaaaagcacuauuauca

SEQ ID NO: 113164 - RNA, 25 nt, Artificial Sequence
  Description of Artificial Sequence: Synthetic oligonucleotide
gaaaaagcacuauuaucaguucugc

SEQ ID NO: 113165 - RNA, 25 nt, Artificial Sequence
  Description of Artificial Sequence: Synthetic oligonucleotide
ggcugaaaagaaagauuaaaccuac

SEQ ID NO: 113166 - RNA, 25 nt, Artificial Sequence
  Description of Artificial Sequence: Synthetic oligonucleotide
uaaacccuuauaauaaaauccuucu

SEQ ID NO: 113167 - RNA, 25 nt, Artificial Sequence
  Description of Artificial Sequence: Synthetic oligonucleotide
cauacuauuagccaaugcuguagac

SEQ ID NO: 113168 - RNA, 25 nt, Artificial Sequence
  Description of Artificial Sequence: Synthetic oligonucleotide
gacagaagcauuuugauaggaauag

SEQ ID NO: 113169 - RNA, 25 nt, Artificial Sequence
  Description of Artificial Sequence: Synthetic oligonucleotide
agagcaaauaagauaauggcccuga

SEQ ID NO: 113170 - RNA, 25 nt, Artificial Sequence
  Description of Artificial Sequence: Synthetic oligonucleotide
ccaacauuuuucucuuccucaagca

SEQ ID NO: 113171 - RNA, 25 nt, Artificial Sequence
  Description of Artificial Sequence: Synthetic oligonucleotide
uuaaguaugagaaaaguucagccca

SEQ ID NO: 113172 - RNA, 25 nt, Artificial Sequence
  Description of Artificial Sequence: Synthetic oligonucleotide
caggaauaaagauggcugcugaacc

SEQ ID NO: 113173 - RNA, 25 nt, Artificial Sequence
  Description of Artificial Sequence: Synthetic oligonucleotide
aauuugaaugaccaaguucucuuca

SEQ ID NO: 113174 - RNA, 25 nt, Artificial Sequence
  Description of Artificial Sequence: Synthetic oligonucleotide
auguauaaagauagccagccuagag

SEQ ID NO: 113175 - RNA, 25 nt, Artificial Sequence
  Description of Artificial Sequence: Synthetic oligonucleotide
ggcuguaacuaucucugugaagugu

SEQ ID NO: 113176 - RNA, 25 nt, Artificial Sequence
  Description of Artificial Sequence: Synthetic oligonucleotide
ucugugaagugugagaaaauuucaa

SEQ ID NO: 113177 - RNA, 25 nt, Artificial Sequence
  Description of Artificial Sequence: Synthetic oligonucleotide
ccuuuaaggaaaugaauccuccuga

SEQ ID NO: 113178 - RNA, 25 nt, Artificial Sequence
  Description of Artificial Sequence: Synthetic oligonucleotide
aaggauacaaaaagugacaucauau

SEQ ID NO: 113179 - RNA, 25 nt, Artificial Sequence
  Description of Artificial Sequence: Synthetic oligonucleotide
agaugcaauuugaaucuucaucaua

SEQ ID NO: 113180 - RNA, 25 nt, Artificial Sequence
  Description of Artificial Sequence: Synthetic oligonucleotide
guucaaaacgaagacuagcuauuaa

SEQ ID NO: 113181 - RNA, 25 nt, Artificial Sequence
  Description of Artificial Sequence: Synthetic oligonucleotide
gugaaaccucaucucuacuaaaaau

SEQ ID NO: 113182 - RNA, 25 nt, Artificial Sequence
  Description of Artificial Sequence: Synthetic oligonucleotide
acgaaagagaagcucuaucucgccu

SEQ ID NO: 113183 - RNA, 25 nt, Artificial Sequence
  Description of Artificial Sequence: Synthetic oligonucleotide
cuccacaagcgccuucgguccaguu

SEQ ID NO: 113184 - RNA, 25 nt, Artificial Sequence
  Description of Artificial Sequence: Synthetic oligonucleotide
gagaagauuccaaagauguagccgc

SEQ ID NO: 113185 - RNA, 25 nt, Artificial Sequence
  Description of Artificial Sequence: Synthetic oligonucleotide
aaucuggauucaaugaggagacuug

SEQ ID NO: 113186 - RNA, 25 nt, Artificial Sequence
  Description of Artificial Sequence: Synthetic oligonucleotide
agaacagauuugagaguagugagga

SEQ ID NO: 113187 - RNA, 25 nt, Artificial Sequence
  Description of Artificial Sequence: Synthetic oligonucleotide
ccagagcugugcagaugaguacaaa

SEQ ID NO: 113188 - RNA, 25 nt, Artificial Sequence
  Description of Artificial Sequence: Synthetic oligonucleotide
ccucagauuguuguuguuaaugggc

SEQ ID NO: 113189 - RNA, 25 nt, Artificial Sequence
  Description of Artificial Sequence: Synthetic oligonucleotide
cuauuuuaauuauuuuuaauuuauu

SEQ ID NO: 113190 - RNA, 25 nt, Artificial Sequence
  Description of Artificial Sequence: Synthetic oligonucleotide
uuuaauuuauuaauauuuaaauaug

SEQ ID NO: 113191 - RNA, 25 nt, Artificial Sequence
  Description of Artificial Sequence: Synthetic oligonucleotide
augcaguuugaauauccuuuguuuc

SEQ ID NO: 113192 - RNA, 25 nt, Artificial Sequence
  Description of Artificial Sequence: Synthetic oligonucleotide
caugcugcuggcgucuaaguguuug

SEQ ID NO: 113193 - RNA, 25 nt, Artificial Sequence
  Description of Artificial Sequence: Synthetic oligonucleotide
agaugugcauuucaccugugacaaa

SEQ ID NO: 113194 - RNA, 25 nt, Artificial Sequence
  Description of Artificial Sequence: Synthetic oligonucleotide
ucaaaaccugugccaggcugaauua

SEQ ID NO: 113195 - RNA, 25 nt, Artificial Sequence
  Description of Artificial Sequence: Synthetic oligonucleotide
gaauguggguagucauucuuacaau

SEQ ID NO: 113196 - RNA, 25 nt, Artificial Sequence
  Description of Artificial Sequence: Synthetic oligonucleotide
auguggguagucauucuuacaauug

SEQ ID NO: 113197 - RNA, 25 nt, Artificial Sequence
  Description of Artificial Sequence: Synthetic oligonucleotide
ugaaaaugagcaucagagaguguac

SEQ ID NO: 113198 - RNA, 25 nt, Artificial Sequence
  Description of Artificial Sequence: Synthetic oligonucleotide
uugcuuuucauguagaacucagcag

SEQ ID NO: 113199 - RNA, 25 nt, Artificial Sequence
  Description of Artificial Sequence: Synthetic oligonucleotide
uguauuucuauauuuauuuucagua

SEQ ID NO: 113200 - RNA, 25 nt, Artificial Sequence
  Description of Artificial Sequence: Synthetic oligonucleotide
uuugauuaauguuucuuaaauggaa

SEQ ID NO: 113201 - RNA, 25 nt, Artificial Sequence
  Description of Artificial Sequence: Synthetic oligonucleotide
caacguguauagugccuaaaauugu

SEQ ID NO: 113202 - RNA, 25 nt, Artificial Sequence
  Description of Artificial Sequence: Synthetic oligonucleotide
cauauccuuggcuacuaacaucugg

SEQ ID NO: 113203 - RNA, 25 nt, Artificial Sequence
  Description of Artificial Sequence: Synthetic oligonucleotide
uacuaacaucuggagacugugagcu

SEQ ID NO: 113204 - RNA, 25 nt, Artificial Sequence
  Description of Artificial Sequence: Synthetic oligonucleotide
cauaaguugugugcuuuuuauuaau

SEQ ID NO: 113205 - RNA, 25 nt, Artificial Sequence
  Description of Artificial Sequence: Synthetic oligonucleotide
gcaucauuuuggcucuucuuacauu

SEQ ID NO: 113206 - RNA, 25 nt, Artificial Sequence
  Description of Artificial Sequence: Synthetic oligonucleotide
gcucuucuuacauuuguaaaaaugu

SEQ ID NO: 113207 - RNA, 25 nt, Artificial Sequence
  Description of Artificial Sequence: Synthetic oligonucleotide
agauuaggucaucuuaauucauauu

SEQ ID NO: 113208 - RNA, 25 nt, Artificial Sequence
  Description of Artificial Sequence: Synthetic oligonucleotide
auggaauugaaagaacuaaucauga

SEQ ID NO: 113209 - RNA, 25 nt, Artificial Sequence
  Description of Artificial Sequence: Synthetic oligonucleotide
cacacucauuccuucugcucuuggg

SEQ ID NO: 113210 - RNA, 25 nt, Artificial Sequence
  Description of Artificial Sequence: Synthetic oligonucleotide
uguagagguaaccaguagcuuugag

SEQ ID NO: 113211 - RNA, 25 nt, Artificial Sequence
  Description of Artificial Sequence: Synthetic oligonucleotide
caaccacaugccacguaauauuuca

SEQ ID NO: 113212 - RNA, 25 nt, Artificial Sequence
  Description of Artificial Sequence: Synthetic oligonucleotide
ucggaaacaaguuauucucuucacu

SEQ ID NO: 113213 - RNA, 25 nt, Artificial Sequence
  Description of Artificial Sequence: Synthetic oligonucleotide
acucccaauaacuaaugcuaagaaa

SEQ ID NO: 113214 - RNA, 25 nt, Artificial Sequence
  Description of Artificial Sequence: Synthetic oligonucleotide
aaugcuaagaaaugcugaaaaucaa

SEQ ID NO: 113215 - RNA, 25 nt, Artificial Sequence
  Description of Artificial Sequence: Synthetic oligonucleotide
gucuuucucuaaauaugauuacuuu

SEQ ID NO: 113216 - RNA, 25 nt, Artificial Sequence
  Description of Artificial Sequence: Synthetic oligonucleotide
ugaauuucaggcauuuuguucuaca

SEQ ID NO: 113217 - RNA, 25 nt, Artificial Sequence
  Description of Artificial Sequence: Synthetic oligonucleotide
cgauucccucucacccgggacucuc

SEQ ID NO: 113218 - RNA, 25 nt, Artificial Sequence
  Description of Artificial Sequence: Synthetic oligonucleotide
aggaaagugaaccuuuaaaguaaag

SEQ ID NO: 113219 - RNA, 25 nt, Artificial Sequence
  Description of Artificial Sequence: Synthetic oligonucleotide
gaggcugcaugcucuggaagccugg

SEQ ID NO: 113220 - RNA, 25 nt, Artificial Sequence
  Description of Artificial Sequence: Synthetic oligonucleotide
ucucugaacagaaaacaaaagagag

SEQ ID NO: 113221 - RNA, 25 nt, Artificial Sequence
  Description of Artificial Sequence: Synthetic oligonucleotide
aacuuggcuguaaucaguuaugccg

SEQ ID NO: 113222 - RNA, 25 nt, Artificial Sequence
  Description of Artificial Sequence: Synthetic oligonucleotide
agaagccaaaauuaaaagaagucca

SEQ ID NO: 113223 - RNA, 25 nt, Artificial Sequence
  Description of Artificial Sequence: Synthetic oligonucleotide
auuaaaagaaguccaggugagguua

SEQ ID NO: 113224 - RNA, 25 nt, Artificial Sequence
  Description of Artificial Sequence: Synthetic oligonucleotide
gaauccggauuaucgggaagaggac

SEQ ID NO: 113225 - RNA, 25 nt, Artificial Sequence
  Description of Artificial Sequence: Synthetic oligonucleotide
aaugugacaucaaagcaaguauugu

SEQ ID NO: 113226 - RNA, 25 nt, Artificial Sequence
  Description of Artificial Sequence: Synthetic oligonucleotide
caucaaagcaaguauuguagcacuc

SEQ ID NO: 113227 - RNA, 25 nt, Artificial Sequence
  Description of Artificial Sequence: Synthetic oligonucleotide
agagagagaaaacaaaaccacaaau

SEQ ID NO: 113228 - RNA, 25 nt, Artificial Sequence
  Description of Artificial Sequence: Synthetic oligonucleotide
ucgcuguaguauuuaagcccauaca

SEQ ID NO: 113229 - RNA, 25 nt, Artificial Sequence
  Description of Artificial Sequence: Synthetic oligonucleotide
cgcuguaguauuuaagcccauacag

SEQ ID NO: 113230 - RNA, 25 nt, Artificial Sequence
  Description of Artificial Sequence: Synthetic oligonucleotide
auuuaagcccauacagaaaccuucc

SEQ ID NO: 113231 - RNA, 25 nt, Artificial Sequence
  Description of Artificial Sequence: Synthetic oligonucleotide
auuaaaauaaacaugguauaccuac

SEQ ID NO: 113232 - RNA, 25 nt, Artificial Sequence
  Description of Artificial Sequence: Synthetic oligonucleotide
cuguucugaucggccaguuuucgga

SEQ ID NO: 113233 - RNA, 25 nt, Artificial Sequence
  Description of Artificial Sequence: Synthetic oligonucleotide
aaauaauuugaacuuuggaacaggg

SEQ ID NO: 113234 - RNA, 25 nt, Artificial Sequence
  Description of Artificial Sequence: Synthetic oligonucleotide
ugcgaccuuaauuuaacuuuccagu

SEQ ID NO: 113235 - RNA, 25 nt, Artificial Sequence
  Description of Artificial Sequence: Synthetic oligonucleotide
cugagaaagcuaaaguuugguuuug

SEQ ID NO: 113236 - RNA, 25 nt, Artificial Sequence
  Description of Artificial Sequence: Synthetic oligonucleotide
aguaaagaugcuacuucccacugua

SEQ ID NO: 113237 - RNA, 25 nt, Artificial Sequence
  Description of Artificial Sequence: Synthetic oligonucleotide
cugcuuaauugcugauaccauauga

SEQ ID NO: 113238 - RNA, 25 nt, Artificial Sequence
  Description of Artificial Sequence: Synthetic oligonucleotide
uaccauaugaaugaaacaugggcug

SEQ ID NO: 113239 - RNA, 25 nt, Artificial Sequence
  Description of Artificial Sequence: Synthetic oligonucleotide
aacuuucuuauccaacuuuuucaua

SEQ ID NO: 113240 - RNA, 25 nt, Artificial Sequence
  Description of Artificial Sequence: Synthetic oligonucleotide
ccuugcaugacaucaugaggccgga

SEQ ID NO: 113241 - RNA, 25 nt, Artificial Sequence
  Description of Artificial Sequence: Synthetic oligonucleotide
ugaauuuguauaugacugcauuugu

SEQ ID NO: 113242 - RNA, 25 nt, Artificial Sequence
  Description of Artificial Sequence: Synthetic oligonucleotide
gaauccuaguagaauguuuacuacc

SEQ ID NO: 113243 - RNA, 25 nt, Artificial Sequence
  Description of Artificial Sequence: Synthetic oligonucleotide
gaaagggaagaauuuuuugaugaaa

SEQ ID NO: 113244 - RNA, 25 nt, Artificial Sequence
  Description of Artificial Sequence: Synthetic oligonucleotide
uaucggcaugccagugugugaauuu

SEQ ID NO: 113245 - RNA, 25 nt, Artificial Sequence
  Description of Artificial Sequence: Synthetic oligonucleotide
caccucauaguagagcaauguaugu

SEQ ID NO: 113246 - RNA, 25 nt, Artificial Sequence
  Description of Artificial Sequence: Synthetic oligonucleotide
ccagaauugccaaagcacauauaua

SEQ ID NO: 113247 - RNA, 25 nt, Artificial Sequence
  Description of Artificial Sequence: Synthetic oligonucleotide
uggugaucuggguaauaguuucucc

SEQ ID NO: 113248 - RNA, 25 nt, Artificial Sequence
  Description of Artificial Sequence: Synthetic oligonucleotide
gaucuggguaauaguuucuccaaau

SEQ ID NO: 113249 - RNA, 25 nt, Artificial Sequence
  Description of Artificial Sequence: Synthetic oligonucleotide
ggaugugaugaauacuuccuagaaa

SEQ ID NO: 113250 - RNA, 25 nt, Artificial Sequence
  Description of Artificial Sequence: Synthetic oligonucleotide
cauuuccacagcuacaccauauaug

SEQ ID NO: 113251 - RNA, 25 nt, Artificial Sequence
  Description of Artificial Sequence: Synthetic oligonucleotide
acagcuacaccauauaugaauggag

SEQ ID NO: 113252 - RNA, 25 nt, Artificial Sequence
  Description of Artificial Sequence: Synthetic oligonucleotide
ugcaguucuuacacgagaagaagau

SEQ ID NO: 113253 - RNA, 25 nt, Artificial Sequence
  Description of Artificial Sequence: Synthetic oligonucleotide
acgagaagaagaucauuuacaggga

SEQ ID NO: 113254 - RNA, 25 nt, Artificial Sequence
  Description of Artificial Sequence: Synthetic oligonucleotide
cgagaagaagaucauuuacagggac

SEQ ID NO: 113255 - RNA, 25 nt, Artificial Sequence
  Description of Artificial Sequence: Synthetic oligonucleotide
aagaagaucauuuacagggaccuga

SEQ ID NO: 113256 - RNA, 25 nt, Artificial Sequence
  Description of Artificial Sequence: Synthetic oligonucleotide
agaggaagagguguuugacugcauc

SEQ ID NO: 113257 - RNA, 25 nt, Artificial Sequence
  Description of Artificial Sequence: Synthetic oligonucleotide
gaggaagagguguuugacugcaucg

SEQ ID NO: 113258 - RNA, 25 nt, Artificial Sequence
  Description of Artificial Sequence: Synthetic oligonucleotide
cuacuuugagggcgaguucacaggg

SEQ ID NO: 113259 - RNA, 25 nt, Artificial Sequence
  Description of Artificial Sequence: Synthetic oligonucleotide
agggcaucuccuggcaccucugucc

SEQ ID NO: 113260 - RNA, 25 nt, Artificial Sequence
  Description of Artificial Sequence: Synthetic oligonucleotide
ggagugauaugguuugucuuuuuaa

SEQ ID NO: 113261 - RNA, 25 nt, Artificial Sequence
  Description of Artificial Sequence: Synthetic oligonucleotide
gagugauaugguuugucuuuuuaag

SEQ ID NO: 113262 - RNA, 25 nt, Artificial Sequence
  Description of Artificial Sequence: Synthetic oligonucleotide
ugcaguaaagauccuaaagguuguc

SEQ ID NO: 113263 - RNA, 25 nt, Artificial Sequence
  Description of Artificial Sequence: Synthetic oligonucleotide
aguaaagauccuaaagguugucgac

SEQ ID NO: 113264 - RNA, 25 nt, Artificial Sequence
  Description of Artificial Sequence: Synthetic oligonucleotide
ugacaaaggacaaccuggcaauugu

SEQ ID NO: 113265 - RNA, 25 nt, Artificial Sequence
  Description of Artificial Sequence: Synthetic oligonucleotide
gcaauugugacccaguggugcgagg

SEQ ID NO: 113266 - RNA, 25 nt, Artificial Sequence
  Description of Artificial Sequence: Synthetic oligonucleotide
aacaucauccauagagacaugaaau

SEQ ID NO: 113267 - RNA, 25 nt, Artificial Sequence
  Description of Artificial Sequence: Synthetic oligonucleotide
ugaaauccaacaauauauuucucca

SEQ ID NO: 113268 - RNA, 25 nt, Artificial Sequence
  Description of Artificial Sequence: Synthetic oligonucleotide
aacaauauauuucuccaugaaggcu

SEQ ID NO: 113269 - RNA, 25 nt, Artificial Sequence
  Description of Artificial Sequence: Synthetic oligonucleotide
aacaguaaagucacgcuggaguggu

SEQ ID NO: 113270 - RNA, 25 nt, Artificial Sequence
  Description of Artificial Sequence: Synthetic oligonucleotide
ugugaagaaaguaaaggaagagagg

SEQ ID NO: 113271 - RNA, 25 nt, Artificial Sequence
  Description of Artificial Sequence: Synthetic oligonucleotide
cuuccgagccauccuugcaucgggc

SEQ ID NO: 113272 - RNA, 25 nt, Artificial Sequence
  Description of Artificial Sequence: Synthetic oligonucleotide
aauggagguugaauauccuacugug

SEQ ID NO: 113273 - RNA, 25 nt, Artificial Sequence
  Description of Artificial Sequence: Synthetic oligonucleotide
ggagguugaauauccuacuguguaa

SEQ ID NO: 113274 - RNA, 25 nt, Artificial Sequence
  Description of Artificial Sequence: Synthetic oligonucleotide
auuuugaguuuucccuuguagugua

SEQ ID NO: 113275 - RNA, 25 nt, Artificial Sequence
  Description of Artificial Sequence: Synthetic oligonucleotide
uauccuguuuguucuuuguugauug

SEQ ID NO: 113276 - RNA, 25 nt, Artificial Sequence
  Description of Artificial Sequence: Synthetic oligonucleotide
ccuguuuguucuuuguugauugaaa

SEQ ID NO: 113277 - RNA, 25 nt, Artificial Sequence
  Description of Artificial Sequence: Synthetic oligonucleotide
cucuacagccuucuuuuucuuccau

SEQ ID NO: 113278 - RNA, 25 nt, Artificial Sequence
  Description of Artificial Sequence: Synthetic oligonucleotide
ucuuccauagcuaaucuuccuucua

SEQ ID NO: 113279 - RNA, 25 nt, Artificial Sequence
  Description of Artificial Sequence: Synthetic oligonucleotide
auaaucuuccuguugaaugcuucau

SEQ ID NO: 113280 - RNA, 25 nt, Artificial Sequence
  Description of Artificial Sequence: Synthetic oligonucleotide
uaaucuuccuguugaaugcuucaug

SEQ ID NO: 113281 - RNA, 25 nt, Artificial Sequence
  Description of Artificial Sequence: Synthetic oligonucleotide
cuucaugacuugaauucuacuuuga

SEQ ID NO: 113282 - RNA, 25 nt, Artificial Sequence
  Description of Artificial Sequence: Synthetic oligonucleotide
aagagggagagaagcaacuacagac

SEQ ID NO: 113283 - RNA, 25 nt, Artificial Sequence
  Description of Artificial Sequence: Synthetic oligonucleotide
cgucuccuaccagaccaaggucaac

SEQ ID NO: 113284 - RNA, 25 nt, Artificial Sequence
  Description of Artificial Sequence: Synthetic oligonucleotide
gaucaaucggcccgacuaucucgac

SEQ ID NO: 113285 - RNA, 25 nt, Artificial Sequence
  Description of Artificial Sequence: Synthetic oligonucleotide
ggacgaacauccaaccuucccaaac

SEQ ID NO: 113286 - RNA, 25 nt, Artificial Sequence
  Description of Artificial Sequence: Synthetic oligonucleotide
agggucggaacccaagcuuagaacu

SEQ ID NO: 113287 - RNA, 25 nt, Artificial Sequence
  Description of Artificial Sequence: Synthetic oligonucleotide
ucggaacccaagcuuagaacuuuaa

SEQ ID NO: 113288 - RNA, 25 nt, Artificial Sequence
  Description of Artificial Sequence: Synthetic oligonucleotide
acccaagcuuagaacuuuaagcaac

SEQ ID NO: 113289 - RNA, 25 nt, Artificial Sequence
  Description of Artificial Sequence: Synthetic oligonucleotide
gaacuuuaagcaacaagaccaccac

SEQ ID NO: 113290 - RNA, 25 nt, Artificial Sequence
  Description of Artificial Sequence: Synthetic oligonucleotide
acuauucaguggcgagaaauaaagu

SEQ ID NO: 113291 - RNA, 25 nt, Artificial Sequence
  Description of Artificial Sequence: Synthetic oligonucleotide
cuauucaguggcgagaaauaaaguu

SEQ ID NO: 113292 - RNA, 25 nt, Artificial Sequence
  Description of Artificial Sequence: Synthetic oligonucleotide
aaacacagauaacaggaaaugaucc

SEQ ID NO: 113293 - RNA, 25 nt, Artificial Sequence
  Description of Artificial Sequence: Synthetic oligonucleotide
cuuaagaaaagagaagaaaugaaac

SEQ ID NO: 113294 - RNA, 25 nt, Artificial Sequence
  Description of Artificial Sequence: Synthetic oligonucleotide
cugaaggaguguguuuccauccucc

SEQ ID NO: 113295 - RNA, 25 nt, Artificial Sequence
  Description of Artificial Sequence: Synthetic oligonucleotide
ucaccgcgggacugaaaaucuuuga

SEQ ID NO: 113296 - RNA, 25 nt, Artificial Sequence
  Description of Artificial Sequence: Synthetic oligonucleotide
agcagaaauaagcgugccguucagg

SEQ ID NO: 113297 - RNA, 25 nt, Artificial Sequence
  Description of Artificial Sequence: Synthetic oligonucleotide
aagcgugccguucaggguccagaag

SEQ ID NO: 113298 - RNA, 25 nt, Artificial Sequence
  Description of Artificial Sequence: Synthetic oligonucleotide
agaaacagucacucaagacugcuug

SEQ ID NO: 113299 - RNA, 25 nt, Artificial Sequence
  Description of Artificial Sequence: Synthetic oligonucleotide
agaggaagaagguccaugucuuugg

SEQ ID NO: 113300 - RNA, 25 nt, Artificial Sequence
  Description of Artificial Sequence: Synthetic oligonucleotide
uguauucaaaauaugccugaaacac

SEQ ID NO: 113301 - RNA, 25 nt, Artificial Sequence
  Description of Artificial Sequence: Synthetic oligonucleotide
auuuuccucccuuucucuguaccuc

SEQ ID NO: 113302 - RNA, 25 nt, Artificial Sequence
  Description of Artificial Sequence: Synthetic oligonucleotide
caaagaaagauagagcaagacaaga

SEQ ID NO: 113303 - RNA, 25 nt, Artificial Sequence
  Description of Artificial Sequence: Synthetic oligonucleotide
aagaaagauagagcaagacaagaaa

SEQ ID NO: 113304 - RNA, 25 nt, Artificial Sequence
  Description of Artificial Sequence: Synthetic oligonucleotide
gaaagcauuuguuuguacaagaucc

SEQ ID NO: 113305 - RNA, 25 nt, Artificial Sequence
  Description of Artificial Sequence: Synthetic oligonucleotide
ugaguuaaacgaacguacuugcaga

SEQ ID NO: 113306 - RNA, 25 nt, Artificial Sequence
  Description of Artificial Sequence: Synthetic oligonucleotide
acugauacagaacgaucgauacaga

SEQ ID NO: 113307 - RNA, 25 nt, Artificial Sequence
  Description of Artificial Sequence: Synthetic oligonucleotide
auauuauauauauauaaaaauaaau

SEQ ID NO: 113308 - RNA, 25 nt, Artificial Sequence
  Description of Artificial Sequence: Synthetic oligonucleotide
auuauauauauauaaaaauaaauau

SEQ ID NO: 113309 - RNA, 25 nt, Artificial Sequence
  Description of Artificial Sequence: Synthetic oligonucleotide
ucacuggauguauuugacugcugug

SEQ ID NO: 113310 - RNA, 25 nt, Artificial Sequence
  Description of Artificial Sequence: Synthetic oligonucleotide
cagggaagaggaggagaugagagac

SEQ ID NO: 113311 - RNA, 25 nt, Artificial Sequence
  Description of Artificial Sequence: Synthetic oligonucleotide
augaucuuuuuuuugucccacuugg

SEQ ID NO: 113312 - RNA, 27 nt, Artificial Sequence
  Description of Artificial Sequence: Synthetic oligonucleotide
ggccgugaacuccucaucaaaauaccu

SEQ ID NO: 113313 - RNA, 27 nt, Artificial Sequence
  Description of Artificial Sequence: Synthetic oligonucleotide
uggugugauggugaucaucugggccgu

SEQ ID NO: 113314 - RNA, 27 nt, Artificial Sequence
  Description of Artificial Sequence: Synthetic oligonucleotide
aaacccgcaggauaguuuucuucccua

SEQ ID NO: 113315 - RNA, 27 nt, Artificial Sequence
  Description of Artificial Sequence: Synthetic oligonucleotide
caaacuggaugaaauaaauuaaaaccc

SEQ ID NO: 113316 - RNA, 27 nt, Artificial Sequence
  Description of Artificial Sequence: Synthetic oligonucleotide
agaaguccuuaacauuucccuacguga

SEQ ID NO: 113317 - RNA, 27 nt, Artificial Sequence
  Description of Artificial Sequence: Synthetic oligonucleotide
cucugucccacuggguaaacccuggcc

SEQ ID NO: 113318 - RNA, 27 nt, Artificial Sequence
  Description of Artificial Sequence: Synthetic oligonucleotide
cacaauaacaaauuuaaaccuugcucc

SEQ ID NO: 113319 - RNA, 27 nt, Artificial Sequence
  Description of Artificial Sequence: Synthetic oligonucleotide
aaaugcauuugaacaacauaauacaca

SEQ ID NO: 113320 - RNA, 27 nt, Artificial Sequence
  Description of Artificial Sequence: Synthetic oligonucleotide
ggcuuuccugucacaaagauuaaaaac

SEQ ID NO: 113321 - RNA, 27 nt, Artificial Sequence
  Description of Artificial Sequence: Synthetic oligonucleotide
agggcuuuccugucacaaagauuaaaa

SEQ ID NO: 113322 - RNA, 27 nt, Artificial Sequence
  Description of Artificial Sequence: Synthetic oligonucleotide
ggccaugcugggagacauaagcagcag

SEQ ID NO: 113323 - RNA, 27 nt, Artificial Sequence
  Description of Artificial Sequence: Synthetic oligonucleotide
ucagggagaagcuucugaaacacuucu

SEQ ID NO: 113324 - RNA, 27 nt, Artificial Sequence
  Description of Artificial Sequence: Synthetic oligonucleotide
aagggcuucuuccuuauugauggucag

SEQ ID NO: 113325 - RNA, 27 nt, Artificial Sequence
  Description of Artificial Sequence: Synthetic oligonucleotide
ugaagggcuucuuccuuauugaugguc

SEQ ID NO: 113326 - RNA, 27 nt, Artificial Sequence
  Description of Artificial Sequence: Synthetic oligonucleotide
cgcugaagggcuucuuccuuauugaug

SEQ ID NO: 113327 - RNA, 27 nt, Artificial Sequence
  Description of Artificial Sequence: Synthetic oligonucleotide
gccgcugaagggcuucuuccuuauuga

SEQ ID NO: 113328 - RNA, 27 nt, Artificial Sequence
  Description of Artificial Sequence: Synthetic oligonucleotide
acuggccgcugaagggcuucuuccuua

SEQ ID NO: 113329 - RNA, 27 nt, Artificial Sequence
  Description of Artificial Sequence: Synthetic oligonucleotide
cggagcuuuucaccuuuaguuaugcuu

SEQ ID NO: 113330 - RNA, 27 nt, Artificial Sequence
  Description of Artificial Sequence: Synthetic oligonucleotide
ccggagcuuuucaccuuuaguuaugcu

SEQ ID NO: 113331 - RNA, 27 nt, Artificial Sequence
  Description of Artificial Sequence: Synthetic oligonucleotide
cagacuguugacuggcgugauguaguu

SEQ ID NO: 113332 - RNA, 27 nt, Artificial Sequence
  Description of Artificial Sequence: Synthetic oligonucleotide
cuuuugaacucugcuuaaauccagugg

SEQ ID NO: 113333 - RNA, 27 nt, Artificial Sequence
  Description of Artificial Sequence: Synthetic oligonucleotide
gcuuuugaacucugcuuaaauccagug

SEQ ID NO: 113334 - RNA, 27 nt, Artificial Sequence
  Description of Artificial Sequence: Synthetic oligonucleotide
agggcuuuugaacucugcuuaaaucca

SEQ ID NO: 113335 - RNA, 27 nt, Artificial Sequence
  Description of Artificial Sequence: Synthetic oligonucleotide
aagggcuuuugaacucugcuuaaaucc

SEQ ID NO: 113336 - RNA, 27 nt, Artificial Sequence
  Description of Artificial Sequence: Synthetic oligonucleotide
ugaagggcuuuugaacucugcuuaaau

SEQ ID NO: 113337 - RNA, 27 nt, Artificial Sequence
  Description of Artificial Sequence: Synthetic oligonucleotide
cugaagggcuuuugaacucugcuuaaa

SEQ ID NO: 113338 - RNA, 27 nt, Artificial Sequence
  Description of Artificial Sequence: Synthetic oligonucleotide
cgcugaagggcuuuugaacucugcuua

SEQ ID NO: 113339 - RNA, 27 nt, Artificial Sequence
  Description of Artificial Sequence: Synthetic oligonucleotide
cgagcggcuucacucagacccugaggc

SEQ ID NO: 113340 - RNA, 27 nt, Artificial Sequence
  Description of Artificial Sequence: Synthetic oligonucleotide
uugacuggcgugauguaguugcuuggg

SEQ ID NO: 113341 - RNA, 27 nt, Artificial Sequence
  Description of Artificial Sequence: Synthetic oligonucleotide
cacgcaccaagaagcugccauugaucc

SEQ ID NO: 113342 - RNA, 27 nt, Artificial Sequence
  Description of Artificial Sequence: Synthetic oligonucleotide
cugaugaauccaaugugggcuggaauc

SEQ ID NO: 113343 - RNA, 27 nt, Artificial Sequence
  Description of Artificial Sequence: Synthetic oligonucleotide
cuuagguauuccacauucucagcugug

SEQ ID NO: 113344 - RNA, 27 nt, Artificial Sequence
  Description of Artificial Sequence: Synthetic oligonucleotide
ugagccucaaauuaggagauacguuuu

SEQ ID NO: 113345 - RNA, 27 nt, Artificial Sequence
  Description of Artificial Sequence: Synthetic oligonucleotide
ccaauuguagagaaauuauuuuaggaa

SEQ ID NO: 113346 - RNA, 27 nt, Artificial Sequence
  Description of Artificial Sequence: Synthetic oligonucleotide
ggcuccuaacuagcugaaucuuccaau

SEQ ID NO: 113347 - RNA, 27 nt, Artificial Sequence
  Description of Artificial Sequence: Synthetic oligonucleotide
guggauauugacuaggagaguuuaaaa

SEQ ID NO: 113348 - RNA, 27 nt, Artificial Sequence
  Description of Artificial Sequence: Synthetic oligonucleotide
ugugacugaacauaacuguaggcugaa

SEQ ID NO: 113349 - RNA, 27 nt, Artificial Sequence
  Description of Artificial Sequence: Synthetic oligonucleotide
guaugugugugugacugaacauaacug

SEQ ID NO: 113350 - RNA, 27 nt, Artificial Sequence
  Description of Artificial Sequence: Synthetic oligonucleotide
aagcaaaaggaacauuuuguaugugug

SEQ ID NO: 113351 - RNA, 27 nt, Artificial Sequence
  Description of Artificial Sequence: Synthetic oligonucleotide
aaaaauuacuuuaaaagcaaaaggaac

SEQ ID NO: 113352 - RNA, 27 nt, Artificial Sequence
  Description of Artificial Sequence: Synthetic oligonucleotide
ccauugacuguugcuucacaggucaga

SEQ ID NO: 113353 - RNA, 27 nt, Artificial Sequence
  Description of Artificial Sequence: Synthetic oligonucleotide
auugguuugucgaugugugagauaguu

SEQ ID NO: 113354 - RNA, 27 nt, Artificial Sequence
  Description of Artificial Sequence: Synthetic oligonucleotide
agugguagcaguacaauugaggacaag

SEQ ID NO: 113355 - RNA, 27 nt, Artificial Sequence
  Description of Artificial Sequence: Synthetic oligonucleotide
uaagaccgcuugccagcuacgguuuca

SEQ ID NO: 113356 - RNA, 27 nt, Artificial Sequence
  Description of Artificial Sequence: Synthetic oligonucleotide
agccgguaagaccgcuugccagcuacg

SEQ ID NO: 113357 - RNA, 27 nt, Artificial Sequence
  Description of Artificial Sequence: Synthetic oligonucleotide
gguaacccaucuuuuaaccauacaacu

SEQ ID NO: 113358 - RNA, 27 nt, Artificial Sequence
  Description of Artificial Sequence: Synthetic oligonucleotide
ucgcagguaacccaucuuuuaaccaua

SEQ ID NO: 113359 - RNA, 27 nt, Artificial Sequence
  Description of Artificial Sequence: Synthetic oligonucleotide
cucagcaagauuguauaauucccugca

SEQ ID NO: 113360 - RNA, 27 nt, Artificial Sequence
  Description of Artificial Sequence: Synthetic oligonucleotide
acuguuuuaugcucagcaagauuguau

SEQ ID NO: 113361 - RNA, 27 nt, Artificial Sequence
  Description of Artificial Sequence: Synthetic oligonucleotide
aggauaaaggacucuucauuauuggaa

SEQ ID NO: 113362 - RNA, 27 nt, Artificial Sequence
  Description of Artificial Sequence: Synthetic oligonucleotide
caacuugcguuggaacauccaaagugu

SEQ ID NO: 113363 - RNA, 27 nt, Artificial Sequence
  Description of Artificial Sequence: Synthetic oligonucleotide
augguuucaguuuaguggaagcauuua

SEQ ID NO: 113364 - RNA, 27 nt, Artificial Sequence
  Description of Artificial Sequence: Synthetic oligonucleotide
auauuuaacaaagucaaacuuucucac

SEQ ID NO: 113365 - RNA, 27 nt, Artificial Sequence
  Description of Artificial Sequence: Synthetic oligonucleotide
aacuuuuaauauacaguaguucuuuuc

SEQ ID NO: 113366 - RNA, 27 nt, Artificial Sequence
  Description of Artificial Sequence: Synthetic oligonucleotide
guuaagucaaaacccguauuucuaaag

SEQ ID NO: 113367 - RNA, 27 nt, Artificial Sequence
  Description of Artificial Sequence: Synthetic oligonucleotide
gugcugaguuugcuguacccauguuga

SEQ ID NO: 113368 - RNA, 27 nt, Artificial Sequence
  Description of Artificial Sequence: Synthetic oligonucleotide
ugaggucagcaucuucugugucuuuac

SEQ ID NO: 113369 - RNA, 27 nt, Artificial Sequence
  Description of Artificial Sequence: Synthetic oligonucleotide
gcgaucugaauaaaccucccuacuagc

SEQ ID NO: 113370 - RNA, 27 nt, Artificial Sequence
  Description of Artificial Sequence: Synthetic oligonucleotide
aucccagaacccugcugcagaaggcca

SEQ ID NO: 113371 - RNA, 27 nt, Artificial Sequence
  Description of Artificial Sequence: Synthetic oligonucleotide
cauaauuuccaauauguaccagaccuu

SEQ ID NO: 113372 - RNA, 27 nt, Artificial Sequence
  Description of Artificial Sequence: Synthetic oligonucleotide
cuagugcuuccaucggaaggacuaggu

SEQ ID NO: 113373 - RNA, 27 nt, Artificial Sequence
  Description of Artificial Sequence: Synthetic oligonucleotide
uccacauaaaaacaauauucacuggga

SEQ ID NO: 113374 - RNA, 27 nt, Artificial Sequence
  Description of Artificial Sequence: Synthetic oligonucleotide
ucuaccaauuccaacuugaauucauug

SEQ ID NO: 113375 - RNA, 27 nt, Artificial Sequence
  Description of Artificial Sequence: Synthetic oligonucleotide
ucuccaagucuaaaucuguguccugag

SEQ ID NO: 113376 - RNA, 27 nt, Artificial Sequence
  Description of Artificial Sequence: Synthetic oligonucleotide
uggaauacuguaacugugcuuugagga

SEQ ID NO: 113377 - RNA, 27 nt, Artificial Sequence
  Description of Artificial Sequence: Synthetic oligonucleotide
uuaauucaucagugguggcagugguag

SEQ ID NO: 113378 - RNA, 27 nt, Artificial Sequence
  Description of Artificial Sequence: Synthetic oligonucleotide
gugaugauguggcacuaguaguuucuu

SEQ ID NO: 113379 - RNA, 27 nt, Artificial Sequence
  Description of Artificial Sequence: Synthetic oligonucleotide
ucuguuuggugaggcuguccgacuuug

SEQ ID NO: 113380 - RNA, 27 nt, Artificial Sequence
  Description of Artificial Sequence: Synthetic oligonucleotide
ccaucauguuccauuuuucgcuuucuc

SEQ ID NO: 113381 - RNA, 27 nt, Artificial Sequence
  Description of Artificial Sequence: Synthetic oligonucleotide
gcagucuacaugcuaaaucagagggua

SEQ ID NO: 113382 - RNA, 27 nt, Artificial Sequence
  Description of Artificial Sequence: Synthetic oligonucleotide
cauaaauagauccuuaaauagcucaaa

SEQ ID NO: 113383 - RNA, 27 nt, Artificial Sequence
  Description of Artificial Sequence: Synthetic oligonucleotide
ugauaauagugcuuuuucaccuuuuuc

SEQ ID NO: 113384 - RNA, 27 nt, Artificial Sequence
  Description of Artificial Sequence: Synthetic oligonucleotide
gcagaacugauaauagugcuuuuucac

SEQ ID NO: 113385 - RNA, 27 nt, Artificial Sequence
  Description of Artificial Sequence: Synthetic oligonucleotide
guagguuuaaucuuucuuuucagccau

SEQ ID NO: 113386 - RNA, 27 nt, Artificial Sequence
  Description of Artificial Sequence: Synthetic oligonucleotide
agaaggauuuuauuauaaggguuuaau

SEQ ID NO: 113387 - RNA, 27 nt, Artificial Sequence
  Description of Artificial Sequence: Synthetic oligonucleotide
gucuacagcauuggcuaauaguaugaa

SEQ ID NO: 113388 - RNA, 27 nt, Artificial Sequence
  Description of Artificial Sequence: Synthetic oligonucleotide
cuauuccuaucaaaaugcuucugucua

SEQ ID NO: 113389 - RNA, 27 nt, Artificial Sequence
  Description of Artificial Sequence: Synthetic oligonucleotide
ucagggccauuaucuuauuugcucuau

SEQ ID NO: 113390 - RNA, 27 nt, Artificial Sequence
  Description of Artificial Sequence: Synthetic oligonucleotide
ugcuugaggaagagaaaaauguugguc

SEQ ID NO: 113391 - RNA, 27 nt, Artificial Sequence
  Description of Artificial Sequence: Synthetic oligonucleotide
ugggcugaacuuuucucauacuuaaag

SEQ ID NO: 113392 - RNA, 27 nt, Artificial Sequence
  Description of Artificial Sequence: Synthetic oligonucleotide
gguucagcagccaucuuuauuccugcg

SEQ ID NO: 113393 - RNA, 27 nt, Artificial Sequence
  Description of Artificial Sequence: Synthetic oligonucleotide
ugaagagaacuuggucauucaaauuuc

SEQ ID NO: 113394 - RNA, 27 nt, Artificial Sequence
  Description of Artificial Sequence: Synthetic oligonucleotide
cucuaggcuggcuaucuuuauacauac

SEQ ID NO: 113395 - RNA, 27 nt, Artificial Sequence
  Description of Artificial Sequence: Synthetic oligonucleotide
acacuucacagagauaguuacagccau

SEQ ID NO: 113396 - RNA, 27 nt, Artificial Sequence
  Description of Artificial Sequence: Synthetic oligonucleotide
uugaaauuuucucacacuucacagaga

SEQ ID NO: 113397 - RNA, 27 nt, Artificial Sequence
  Description of Artificial Sequence: Synthetic oligonucleotide
ucaggaggauucauuuccuuaaaggaa

SEQ ID NO: 113398 - RNA, 27 nt, Artificial Sequence
  Description of Artificial Sequence: Synthetic oligonucleotide
auaugaugucacuuuuuguauccuuga

SEQ ID NO: 113399 - RNA, 27 nt, Artificial Sequence
  Description of Artificial Sequence: Synthetic oligonucleotide
uaugaugaagauucaaauugcaucuua

SEQ ID NO: 113400 - RNA, 27 nt, Artificial Sequence
  Description of Artificial Sequence: Synthetic oligonucleotide
uuaauagcuagucuucguuuugaacag

SEQ ID NO: 113401 - RNA, 27 nt, Artificial Sequence
  Description of Artificial Sequence: Synthetic oligonucleotide
auuuuuaguagagaugagguuucacca

SEQ ID NO: 113402 - RNA, 27 nt, Artificial Sequence
  Description of Artificial Sequence: Synthetic oligonucleotide
aggcgagauagagcuucucuuucguuc

SEQ ID NO: 113403 - RNA, 27 nt, Artificial Sequence
  Description of Artificial Sequence: Synthetic oligonucleotide
aacuggaccgaaggcgcuuguggagaa

SEQ ID NO: 113404 - RNA, 27 nt, Artificial Sequence
  Description of Artificial Sequence: Synthetic oligonucleotide
gcggcuacaucuuuggaaucuucuccu

SEQ ID NO: 113405 - RNA, 27 nt, Artificial Sequence
  Description of Artificial Sequence: Synthetic oligonucleotide
caagucuccucauugaauccagauugg

SEQ ID NO: 113406 - RNA, 27 nt, Artificial Sequence
  Description of Artificial Sequence: Synthetic oligonucleotide
uccucacuacucucaaaucuguucugg

SEQ ID NO: 113407 - RNA, 27 nt, Artificial Sequence
  Description of Artificial Sequence: Synthetic oligonucleotide
uuuguacucaucugcacagcucuggcu

SEQ ID NO: 113408 - RNA, 27 nt, Artificial Sequence
  Description of Artificial Sequence: Synthetic oligonucleotide
gcccauuaacaacaacaaucugaggug

SEQ ID NO: 113409 - RNA, 27 nt, Artificial Sequence
  Description of Artificial Sequence: Synthetic oligonucleotide
aauaaauuaaaaauaauuaaaauagug

SEQ ID NO: 113410 - RNA, 27 nt, Artificial Sequence
  Description of Artificial Sequence: Synthetic oligonucleotide
cauauuuaaauauuaauaaauuaaaaa

SEQ ID NO: 113411 - RNA, 27 nt, Artificial Sequence
  Description of Artificial Sequence: Synthetic oligonucleotide
gaaacaaaggauauucaaacugcauag

SEQ ID NO: 113412 - RNA, 27 nt, Artificial Sequence
  Description of Artificial Sequence: Synthetic oligonucleotide
caaacacuuagacgccagcagcauggg

SEQ ID NO: 113413 - RNA, 27 nt, Artificial Sequence
  Description of Artificial Sequence: Synthetic oligonucleotide
uuugucacaggugaaaugcacaucuga

SEQ ID NO: 113414 - RNA, 27 nt, Artificial Sequence
  Description of Artificial Sequence: Synthetic oligonucleotide
uaauucagccuggcacagguuuugauc

SEQ ID NO: 113415 - RNA, 27 nt, Artificial Sequence
  Description of Artificial Sequence: Synthetic oligonucleotide
auuguaagaaugacuacccacauucac

SEQ ID NO: 113416 - RNA, 27 nt, Artificial Sequence
  Description of Artificial Sequence: Synthetic oligonucleotide
caauuguaagaaugacuacccacauuc

SEQ ID NO: 113417 - RNA, 27 nt, Artificial Sequence
  Description of Artificial Sequence: Synthetic oligonucleotide
guacacucucugaugcucauuuucaua

SEQ ID NO: 113418 - RNA, 27 nt, Artificial Sequence
  Description of Artificial Sequence: Synthetic oligonucleotide
cugcugaguucuacaugaaaagcaaau

SEQ ID NO: 113419 - RNA, 27 nt, Artificial Sequence
  Description of Artificial Sequence: Synthetic oligonucleotide
uacugaaaauaaauauagaaauacaac

SEQ ID NO: 113420 - RNA, 27 nt, Artificial Sequence
  Description of Artificial Sequence: Synthetic oligonucleotide
uuccauuuaagaaacauuaaucaaaac

SEQ ID NO: 113421 - RNA, 27 nt, Artificial Sequence
  Description of Artificial Sequence: Synthetic oligonucleotide
acaauuuuaggcacuauacacguuguu

SEQ ID NO: 113422 - RNA, 27 nt, Artificial Sequence
  Description of Artificial Sequence: Synthetic oligonucleotide
ccagauguuaguagccaaggauauggu

SEQ ID NO: 113423 - RNA, 27 nt, Artificial Sequence
  Description of Artificial Sequence: Synthetic oligonucleotide
agcucacagucuccagauguuaguagc

SEQ ID NO: 113424 - RNA, 27 nt, Artificial Sequence
  Description of Artificial Sequence: Synthetic oligonucleotide
auuaauaaaaagcacacaacuuauggc

SEQ ID NO: 113425 - RNA, 27 nt, Artificial Sequence
  Description of Artificial Sequence: Synthetic oligonucleotide
aauguaagaagagccaaaaugaugcau

SEQ ID NO: 113426 - RNA, 27 nt, Artificial Sequence
  Description of Artificial Sequence: Synthetic oligonucleotide
acauuuuuacaaauguaagaagagcca

SEQ ID NO: 113427 - RNA, 27 nt, Artificial Sequence
  Description of Artificial Sequence: Synthetic oligonucleotide
aauaugaauuaagaugaccuaaucugu

SEQ ID NO: 113428 - RNA, 27 nt, Artificial Sequence
  Description of Artificial Sequence: Synthetic oligonucleotide
ucaugauuaguucuuucaauuccaucc

SEQ ID NO: 113429 - RNA, 27 nt, Artificial Sequence
  Description of Artificial Sequence: Synthetic oligonucleotide
cccaagagcagaaggaaugagugugca

SEQ ID NO: 113430 - RNA, 27 nt, Artificial Sequence
  Description of Artificial Sequence: Synthetic oligonucleotide
cucaaagcuacugguuaccucuacacc

SEQ ID NO: 113431 - RNA, 27 nt, Artificial Sequence
  Description of Artificial Sequence: Synthetic oligonucleotide
ugaaauauuacguggcaugugguuggg

SEQ ID NO: 113432 - RNA, 27 nt, Artificial Sequence
  Description of Artificial Sequence: Synthetic oligonucleotide
agugaagagaauaacuuguuuccgaag

SEQ ID NO: 113433 - RNA, 27 nt, Artificial Sequence
  Description of Artificial Sequence: Synthetic oligonucleotide
uuucuuagcauuaguuauugggaguga

SEQ ID NO: 113434 - RNA, 27 nt, Artificial Sequence
  Description of Artificial Sequence: Synthetic oligonucleotide
uugauuuucagcauuucuuagcauuag

SEQ ID NO: 113435 - RNA, 27 nt, Artificial Sequence
  Description of Artificial Sequence: Synthetic oligonucleotide
aaaguaaucauauuuagagaaagacag

SEQ ID NO: 113436 - RNA, 27 nt, Artificial Sequence
  Description of Artificial Sequence: Synthetic oligonucleotide
uguagaacaaaaugccugaaauucagc

SEQ ID NO: 113437 - RNA, 27 nt, Artificial Sequence
  Description of Artificial Sequence: Synthetic oligonucleotide
gagagucccgggugagagggaaucgcc

SEQ ID NO: 113438 - RNA, 27 nt, Artificial Sequence
  Description of Artificial Sequence: Synthetic oligonucleotide
cuuuacuuuaaagguucacuuuccuug

SEQ ID NO: 113439 - RNA, 27 nt, Artificial Sequence
  Description of Artificial Sequence: Synthetic oligonucleotide
ccaggcuuccagagcaugcagccuccu

SEQ ID NO: 113440 - RNA, 27 nt, Artificial Sequence
  Description of Artificial Sequence: Synthetic oligonucleotide
cucucuuuuguuuucuguucagagaaa

SEQ ID NO: 113441 - RNA, 27 nt, Artificial Sequence
  Description of Artificial Sequence: Synthetic oligonucleotide
cggcauaacugauuacagccaaguuca

SEQ ID NO: 113442 - RNA, 27 nt, Artificial Sequence
  Description of Artificial Sequence: Synthetic oligonucleotide
uggacuucuuuuaauuuuggcuucuuc

SEQ ID NO: 113443 - RNA, 27 nt, Artificial Sequence
  Description of Artificial Sequence: Synthetic oligonucleotide
uaaccucaccuggacuucuuuuaauuu

SEQ ID NO: 113444 - RNA, 27 nt, Artificial Sequence
  Description of Artificial Sequence: Synthetic oligonucleotide
guccucuucccgauaauccggauucag

SEQ ID NO: 113445 - RNA, 27 nt, Artificial Sequence
  Description of Artificial Sequence: Synthetic oligonucleotide
acaauacuugcuuugaugucacauuaa

SEQ ID NO: 113446 - RNA, 27 nt, Artificial Sequence
  Description of Artificial Sequence: Synthetic oligonucleotide
gagugcuacaauacuugcuuugauguc

SEQ ID NO: 113447 - RNA, 27 nt, Artificial Sequence
  Description of Artificial Sequence: Synthetic oligonucleotide
auuugugguuuuguuuucucucucucu

SEQ ID NO: 113448 - RNA, 27 nt, Artificial Sequence
  Description of Artificial Sequence: Synthetic oligonucleotide
uguaugggcuuaaauacuacagcgagg

SEQ ID NO: 113449 - RNA, 27 nt, Artificial Sequence
  Description of Artificial Sequence: Synthetic oligonucleotide
cuguaugggcuuaaauacuacagcgag

SEQ ID NO: 113450 - RNA, 27 nt, Artificial Sequence
  Description of Artificial Sequence: Synthetic oligonucleotide
ggaagguuucuguaugggcuuaaauac

SEQ ID NO: 113451 - RNA, 27 nt, Artificial Sequence
  Description of Artificial Sequence: Synthetic oligonucleotide
guagguauaccauguuuauuuuaauac

SEQ ID NO: 113452 - RNA, 27 nt, Artificial Sequence
  Description of Artificial Sequence: Synthetic oligonucleotide
uccgaaaacuggccgaucagaacagcc

SEQ ID NO: 113453 - RNA, 27 nt, Artificial Sequence
  Description of Artificial Sequence: Synthetic oligonucleotide
cccuguuccaaaguucaaauuauuugu

SEQ ID NO: 113454 - RNA, 27 nt, Artificial Sequence
  Description of Artificial Sequence: Synthetic oligonucleotide
acuggaaaguuaaauuaaggucgcaau

SEQ ID NO: 113455 - RNA, 27 nt, Artificial Sequence
  Description of Artificial Sequence: Synthetic oligonucleotide
caaaaccaaacuuuagcuuucucagcc

SEQ ID NO: 113456 - RNA, 27 nt, Artificial Sequence
  Description of Artificial Sequence: Synthetic oligonucleotide
uacagugggaaguagcaucuuuacuuu

SEQ ID NO: 113457 - RNA, 27 nt, Artificial Sequence
  Description of Artificial Sequence: Synthetic oligonucleotide
ucauaugguaucagcaauuaagcagua

SEQ ID NO: 113458 - RNA, 27 nt, Artificial Sequence
  Description of Artificial Sequence: Synthetic oligonucleotide
cagcccauguuucauucauaugguauc

SEQ ID NO: 113459 - RNA, 27 nt, Artificial Sequence
  Description of Artificial Sequence: Synthetic oligonucleotide
uaugaaaaaguuggauaagaaaguugg

SEQ ID NO: 113460 - RNA, 27 nt, Artificial Sequence
  Description of Artificial Sequence: Synthetic oligonucleotide
uccggccucaugaugucaugcaaggcu

SEQ ID NO: 113461 - RNA, 27 nt, Artificial Sequence
  Description of Artificial Sequence: Synthetic oligonucleotide
acaaaugcagucauauacaaauucagg

SEQ ID NO: 113462 - RNA, 27 nt, Artificial Sequence
  Description of Artificial Sequence: Synthetic oligonucleotide
gguaguaaacauucuacuaggauucuu

SEQ ID NO: 113463 - RNA, 27 nt, Artificial Sequence
  Description of Artificial Sequence: Synthetic oligonucleotide
uuucaucaaaaaauucuucccuuucug

SEQ ID NO: 113464 - RNA, 27 nt, Artificial Sequence
  Description of Artificial Sequence: Synthetic oligonucleotide
aaauucacacacuggcaugccgauagc

SEQ ID NO: 113465 - RNA, 27 nt, Artificial Sequence
  Description of Artificial Sequence: Synthetic oligonucleotide
acauacauugcucuacuaugaggugaa

SEQ ID NO: 113466 - RNA, 27 nt, Artificial Sequence
  Description of Artificial Sequence: Synthetic oligonucleotide
uauauaugugcuuuggcaauucuggug

SEQ ID NO: 113467 - RNA, 27 nt, Artificial Sequence
  Description of Artificial Sequence: Synthetic oligonucleotide
ggagaaacuauuacccagaucaccacu

SEQ ID NO: 113468 - RNA, 27 nt, Artificial Sequence
  Description of Artificial Sequence: Synthetic oligonucleotide
auuuggagaaacuauuacccagaucac

SEQ ID NO: 113469 - RNA, 27 nt, Artificial Sequence
  Description of Artificial Sequence: Synthetic oligonucleotide
uuucuaggaaguauucaucacauccac

SEQ ID NO: 113470 - RNA, 27 nt, Artificial Sequence
  Description of Artificial Sequence: Synthetic oligonucleotide
cauauaugguguagcuguggaaaugcg

SEQ ID NO: 113471 - RNA, 27 nt, Artificial Sequence
  Description of Artificial Sequence: Synthetic oligonucleotide
cuccauucauauaugguguagcugugg

SEQ ID NO: 113472 - RNA, 27 nt, Artificial Sequence
  Description of Artificial Sequence: Synthetic oligonucleotide
aucuucuucucguguaagaacugcagc

SEQ ID NO: 113473 - RNA, 27 nt, Artificial Sequence
  Description of Artificial Sequence: Synthetic oligonucleotide
ucccuguaaaugaucuucuucucgugu

SEQ ID NO: 113474 - RNA, 27 nt, Artificial Sequence
  Description of Artificial Sequence: Synthetic oligonucleotide
gucccuguaaaugaucuucuucucgug

SEQ ID NO: 113475 - RNA, 27 nt, Artificial Sequence
  Description of Artificial Sequence: Synthetic oligonucleotide
ucaggucccuguaaaugaucuucuucu

SEQ ID NO: 113476 - RNA, 27 nt, Artificial Sequence
  Description of Artificial Sequence: Synthetic oligonucleotide
gaugcagucaaacaccucuuccucugu

SEQ ID NO: 113477 - RNA, 27 nt, Artificial Sequence
  Description of Artificial Sequence: Synthetic oligonucleotide
cgaugcagucaaacaccucuuccucug

SEQ ID NO: 113478 - RNA, 27 nt, Artificial Sequence
  Description of Artificial Sequence: Synthetic oligonucleotide
cccugugaacucgcccucaaaguagcg

SEQ ID NO: 113479 - RNA, 27 nt, Artificial Sequence
  Description of Artificial Sequence: Synthetic oligonucleotide
ggacagaggugccaggagaugcccuca

SEQ ID NO: 113480 - RNA, 27 nt, Artificial Sequence
  Description of Artificial Sequence: Synthetic oligonucleotide
uuaaaaagacaaaccauaucacuccuu

SEQ ID NO: 113481 - RNA, 27 nt, Artificial Sequence
  Description of Artificial Sequence: Synthetic oligonucleotide
cuuaaaaagacaaaccauaucacuccu

SEQ ID NO: 113482 - RNA, 27 nt, Artificial Sequence
  Description of Artificial Sequence: Synthetic oligonucleotide
gacaaccuuuaggaucuuuacugcaac

SEQ ID NO: 113483 - RNA, 27 nt, Artificial Sequence
  Description of Artificial Sequence: Synthetic oligonucleotide
gucgacaaccuuuaggaucuuuacugc

SEQ ID NO: 113484 - RNA, 27 nt, Artificial Sequence
  Description of Artificial Sequence: Synthetic oligonucleotide
acaauugccagguuguccuuugucaug

SEQ ID NO: 113485 - RNA, 27 nt, Artificial Sequence
  Description of Artificial Sequence: Synthetic oligonucleotide
ccucgcaccacugggucacaauugcca

SEQ ID NO: 113486 - RNA, 27 nt, Artificial Sequence
  Description of Artificial Sequence: Synthetic oligonucleotide
auuucaugucucuauggaugauguucu

SEQ ID NO: 113487 - RNA, 27 nt, Artificial Sequence
  Description of Artificial Sequence: Synthetic oligonucleotide
uggagaaauauauuguuggauuucaug

SEQ ID NO: 113488 - RNA, 27 nt, Artificial Sequence
  Description of Artificial Sequence: Synthetic oligonucleotide
agccuucauggagaaauauauuguugg

SEQ ID NO: 113489 - RNA, 27 nt, Artificial Sequence
  Description of Artificial Sequence: Synthetic oligonucleotide
accacuccagcgugacuuuacuguugc

SEQ ID NO: 113490 - RNA, 27 nt, Artificial Sequence
  Description of Artificial Sequence: Synthetic oligonucleotide
ccucucuuccuuuacuuucuucacaca

SEQ ID NO: 113491 - RNA, 27 nt, Artificial Sequence
  Description of Artificial Sequence: Synthetic oligonucleotide
gcccgaugcaaggauggcucggaagcg

SEQ ID NO: 113492 - RNA, 27 nt, Artificial Sequence
  Description of Artificial Sequence: Synthetic oligonucleotide
cacaguaggauauucaaccuccauuuc

SEQ ID NO: 113493 - RNA, 27 nt, Artificial Sequence
  Description of Artificial Sequence: Synthetic oligonucleotide
uuacacaguaggauauucaaccuccau

SEQ ID NO: 113494 - RNA, 27 nt, Artificial Sequence
  Description of Artificial Sequence: Synthetic oligonucleotide
uacacuacaagggaaaacucaaaaucu

SEQ ID NO: 113495 - RNA, 27 nt, Artificial Sequence
  Description of Artificial Sequence: Synthetic oligonucleotide
caaucaacaaagaacaaacaggauaaa

SEQ ID NO: 113496 - RNA, 27 nt, Artificial Sequence
  Description of Artificial Sequence: Synthetic oligonucleotide
uuucaaucaacaaagaacaaacaggau

SEQ ID NO: 113497 - RNA, 27 nt, Artificial Sequence
  Description of Artificial Sequence: Synthetic oligonucleotide
auggaagaaaaagaaggcuguagagaa

SEQ ID NO: 113498 - RNA, 27 nt, Artificial Sequence
  Description of Artificial Sequence: Synthetic oligonucleotide
uagaaggaagauuagcuauggaagaaa

SEQ ID NO: 113499 - RNA, 27 nt, Artificial Sequence
  Description of Artificial Sequence: Synthetic oligonucleotide
augaagcauucaacaggaagauuauuu

SEQ ID NO: 113500 - RNA, 27 nt, Artificial Sequence
  Description of Artificial Sequence: Synthetic oligonucleotide
caugaagcauucaacaggaagauuauu

SEQ ID NO: 113501 - RNA, 27 nt, Artificial Sequence
  Description of Artificial Sequence: Synthetic oligonucleotide
ucaaaguagaauucaagucaugaagca

SEQ ID NO: 113502 - RNA, 27 nt, Artificial Sequence
  Description of Artificial Sequence: Synthetic oligonucleotide
gucuguaguugcuucucucccucuuag

SEQ ID NO: 113503 - RNA, 27 nt, Artificial Sequence
  Description of Artificial Sequence: Synthetic oligonucleotide
guugaccuuggucugguaggagacggc

SEQ ID NO: 113504 - RNA, 27 nt, Artificial Sequence
  Description of Artificial Sequence: Synthetic oligonucleotide
gucgagauagucgggccgauugaucuc

SEQ ID NO: 113505 - RNA, 27 nt, Artificial Sequence
  Description of Artificial Sequence: Synthetic oligonucleotide
guuugggaagguuggauguucguccuc

SEQ ID NO: 113506 - RNA, 27 nt, Artificial Sequence
  Description of Artificial Sequence: Synthetic oligonucleotide
aguucuaagcuuggguuccgacccuaa

SEQ ID NO: 113507 - RNA, 27 nt, Artificial Sequence
  Description of Artificial Sequence: Synthetic oligonucleotide
uuaaaguucuaagcuuggguuccgacc

SEQ ID NO: 113508 - RNA, 27 nt, Artificial Sequence
  Description of Artificial Sequence: Synthetic oligonucleotide
guugcuuaaaguucuaagcuuggguuc

SEQ ID NO: 113509 - RNA, 27 nt, Artificial Sequence
  Description of Artificial Sequence: Synthetic oligonucleotide
gugguggucuuguugcuuaaaguucua

SEQ ID NO: 113510 - RNA, 27 nt, Artificial Sequence
  Description of Artificial Sequence: Synthetic oligonucleotide
acuuuauuucucgccacugaauaguag

SEQ ID NO: 113511 - RNA, 27 nt, Artificial Sequence
  Description of Artificial Sequence: Synthetic oligonucleotide
aacuuuauuucucgccacugaauagua

SEQ ID NO: 113512 - RNA, 27 nt, Artificial Sequence
  Description of Artificial Sequence: Synthetic oligonucleotide
ggaucauuuccuguuaucuguguuugu

SEQ ID NO: 113513 - RNA, 27 nt, Artificial Sequence
  Description of Artificial Sequence: Synthetic oligonucleotide
guuucauuucuucucuuuucuuaaggc

SEQ ID NO: 113514 - RNA, 27 nt, Artificial Sequence
  Description of Artificial Sequence: Synthetic oligonucleotide
ggaggauggaaacacacuccuucaguu

SEQ ID NO: 113515 - RNA, 27 nt, Artificial Sequence
  Description of Artificial Sequence: Synthetic oligonucleotide
ucaaagauuuucagucccgcggugaca

SEQ ID NO: 113516 - RNA, 27 nt, Artificial Sequence
  Description of Artificial Sequence: Synthetic oligonucleotide
ccugaacggcacgcuuauuucugcugu

SEQ ID NO: 113517 - RNA, 27 nt, Artificial Sequence
  Description of Artificial Sequence: Synthetic oligonucleotide
cuucuggacccugaacggcacgcuuau

SEQ ID NO: 113518 - RNA, 27 nt, Artificial Sequence
  Description of Artificial Sequence: Synthetic oligonucleotide
caagcagucuugagugacuguuucuuc

SEQ ID NO: 113519 - RNA, 27 nt, Artificial Sequence
  Description of Artificial Sequence: Synthetic oligonucleotide
ccaaagacauggaccuucuuccucuga

SEQ ID NO: 113520 - RNA, 27 nt, Artificial Sequence
  Description of Artificial Sequence: Synthetic oligonucleotide
guguuucaggcauauuuugaauacauc

SEQ ID NO: 113521 - RNA, 27 nt, Artificial Sequence
  Description of Artificial Sequence: Synthetic oligonucleotide
gagguacagagaaagggaggaaaauag

SEQ ID NO: 113522 - RNA, 27 nt, Artificial Sequence
  Description of Artificial Sequence: Synthetic oligonucleotide
ucuugucuugcucuaucuuucuuuggu

SEQ ID NO: 113523 - RNA, 27 nt, Artificial Sequence
  Description of Artificial Sequence: Synthetic oligonucleotide
uuucuugucuugcucuaucuuucuuug

SEQ ID NO: 113524 - RNA, 27 nt, Artificial Sequence
  Description of Artificial Sequence: Synthetic oligonucleotide
ggaucuuguacaaacaaaugcuuucuc

SEQ ID NO: 113525 - RNA, 27 nt, Artificial Sequence
  Description of Artificial Sequence: Synthetic oligonucleotide
ucugcaaguacguucguuuaacucaag

SEQ ID NO: 113526 - RNA, 27 nt, Artificial Sequence
  Description of Artificial Sequence: Synthetic oligonucleotide
ucuguaucgaucguucuguaucagucu

SEQ ID NO: 113527 - RNA, 27 nt, Artificial Sequence
  Description of Artificial Sequence: Synthetic oligonucleotide
auuuauuuuuauauauauauaauauau

SEQ ID NO: 113528 - RNA, 27 nt, Artificial Sequence
  Description of Artificial Sequence: Synthetic oligonucleotide
auauuuauuuuuauauauauauaauau

SEQ ID NO: 113529 - RNA, 27 nt, Artificial Sequence
  Description of Artificial Sequence: Synthetic oligonucleotide
cacagcagucaaauacauccagugaag

SEQ ID NO: 113530 - RNA, 27 nt, Artificial Sequence
  Description of Artificial Sequence: Synthetic oligonucleotide
gucucucaucuccuccucuucccuguc

SEQ ID NO: 113531 - RNA, 27 nt, Artificial Sequence
  Description of Artificial Sequence: Synthetic oligonucleotide
ccaagugggacaaaaaaaagaucaugc

SEQ ID NO: 113532 - RNA, 14 nt, Artificial Sequence
  Description of Artificial Sequence: Synthetic oligonucleotide
guauuuugaugagg

SEQ ID NO: 113533 - RNA, 12 nt, Artificial Sequence
  Description of Artificial Sequence: Synthetic oligonucleotide
ggcccagaugau

SEQ ID NO: 113534 - RNA, 14 nt, Artificial Sequence
  Description of Artificial Sequence: Synthetic oligonucleotide
gggaagaaaacuau

SEQ ID NO: 113535 - RNA, 15 nt, Artificial Sequence
  Description of Artificial Sequence: Synthetic oligonucleotide
guuuuaauuuauuuc

SEQ ID NO: 113536 - RNA, 12 nt, Artificial Sequence
  Description of Artificial Sequence: Synthetic oligonucleotide
acguagggaaau

SEQ ID NO: 113537 - RNA, 12 nt, Artificial Sequence
  Description of Artificial Sequence: Synthetic oligonucleotide
ccaggguuuacc

SEQ ID NO: 113538 - RNA, 11 nt, Artificial Sequence
  Description of Artificial Sequence: Synthetic oligonucleotide
agcaagguuua

SEQ ID NO: 113539 - RNA, 12 nt, Artificial Sequence
  Description of Artificial Sequence: Synthetic oligonucleotide
uguauuauguug

SEQ ID NO: 113540 - RNA, 15 nt, Artificial Sequence
  Description of Artificial Sequence: Synthetic oligonucleotide
uuuuaaucuuuguga

SEQ ID NO: 113541 - RNA, 14 nt, Artificial Sequence
  Description of Artificial Sequence: Synthetic oligonucleotide
uuaaucuuugugac

SEQ ID NO: 113542 - RNA, 13 nt, Artificial Sequence
  Description of Artificial Sequence: Synthetic oligonucleotide
gcugcuuaugucu

SEQ ID NO: 113543 - RNA, 14 nt, Artificial Sequence
  Description of Artificial Sequence: Synthetic oligonucleotide
aaguguuucagaag

SEQ ID NO: 113544 - RNA, 13 nt, Artificial Sequence
  Description of Artificial Sequence: Synthetic oligonucleotide
gaccaucaauaag

SEQ ID NO: 113545 - RNA, 13 nt, Artificial Sequence
  Description of Artificial Sequence: Synthetic oligonucleotide
ccaucaauaagga

SEQ ID NO: 113546 - RNA, 14 nt, Artificial Sequence
  Description of Artificial Sequence: Synthetic oligonucleotide
ucaauaaggaagaa

SEQ ID NO: 113547 - RNA, 14 nt, Artificial Sequence
  Description of Artificial Sequence: Synthetic oligonucleotide
aauaaggaagaagc

SEQ ID NO: 113548 - RNA, 13 nt, Artificial Sequence
  Description of Artificial Sequence: Synthetic oligonucleotide
aggaagaagcccu

SEQ ID NO: 113549 - RNA, 13 nt, Artificial Sequence
  Description of Artificial Sequence: Synthetic oligonucleotide
gcauaacuaaagg

SEQ ID NO: 113550 - RNA, 14 nt, Artificial Sequence
  Description of Artificial Sequence: Synthetic oligonucleotide
cauaacuaaaggug

SEQ ID NO: 113551 - RNA, 12 nt, Artificial Sequence
  Description of Artificial Sequence: Synthetic oligonucleotide
cuacaucacgcc

SEQ ID NO: 113552 - RNA, 12 nt, Artificial Sequence
  Description of Artificial Sequence: Synthetic oligonucleotide
acuggauuuaag

SEQ ID NO: 113553 - RNA, 12 nt, Artificial Sequence
  Description of Artificial Sequence: Synthetic oligonucleotide
cuggauuuaagc

SEQ ID NO: 113554 - RNA, 13 nt, Artificial Sequence
  Description of Artificial Sequence: Synthetic oligonucleotide
gauuuaagcagag

SEQ ID NO: 113555 - RNA, 13 nt, Artificial Sequence
  Description of Artificial Sequence: Synthetic oligonucleotide
auuuaagcagagu

SEQ ID NO: 113556 - RNA, 13 nt, Artificial Sequence
  Description of Artificial Sequence: Synthetic oligonucleotide
uuaagcagaguuc

SEQ ID NO: 113557 - RNA, 13 nt, Artificial Sequence
  Description of Artificial Sequence: Synthetic oligonucleotide
uaagcagaguuca

SEQ ID NO: 113558 - RNA, 14 nt, Artificial Sequence
  Description of Artificial Sequence: Synthetic oligonucleotide
agcagaguucaaaa

SEQ ID NO: 113559 - RNA, 12 nt, Artificial Sequence
  Description of Artificial Sequence: Synthetic oligonucleotide
cucagggucuga

SEQ ID NO: 113560 - RNA, 13 nt, Artificial Sequence
  Description of Artificial Sequence: Synthetic oligonucleotide
caagcaacuacau

SEQ ID NO: 113561 - RNA, 12 nt, Artificial Sequence
  Description of Artificial Sequence: Synthetic oligonucleotide
aucaauggcagc

SEQ ID NO: 113562 - RNA, 11 nt, Artificial Sequence
  Description of Artificial Sequence: Synthetic oligonucleotide
uuccagcccac

SEQ ID NO: 113563 - RNA, 12 nt, Artificial Sequence
  Description of Artificial Sequence: Synthetic oligonucleotide
cagcugagaaug

SEQ ID NO: 113564 - RNA, 13 nt, Artificial Sequence
  Description of Artificial Sequence: Synthetic oligonucleotide
aacguaucuccua

SEQ ID NO: 113565 - RNA, 14 nt, Artificial Sequence
  Description of Artificial Sequence: Synthetic oligonucleotide
ccuaaaauaauuuc

SEQ ID NO: 113566 - RNA, 13 nt, Artificial Sequence
  Description of Artificial Sequence: Synthetic oligonucleotide
uggaagauucagc

SEQ ID NO: 113567 - RNA, 12 nt, Artificial Sequence
  Description of Artificial Sequence: Synthetic oligonucleotide
uuaaacucuccu

SEQ ID NO: 113568 - RNA, 12 nt, Artificial Sequence
  Description of Artificial Sequence: Synthetic oligonucleotide
cagccuacaguu

SEQ ID NO: 113569 - RNA, 13 nt, Artificial Sequence
  Description of Artificial Sequence: Synthetic oligonucleotide
guuauguucaguc

SEQ ID NO: 113570 - RNA, 13 nt, Artificial Sequence
  Description of Artificial Sequence: Synthetic oligonucleotide
cacauacaaaaug

SEQ ID NO: 113571 - RNA, 9 nt, Artificial Sequence
  Description of Artificial Sequence: Synthetic oligonucleotide
uccuuuugc

SEQ ID NO: 113572 - RNA, 12 nt, Artificial Sequence
  Description of Artificial Sequence: Synthetic oligonucleotide
ugaccugugaag

SEQ ID NO: 113573 - RNA, 12 nt, Artificial Sequence
  Description of Artificial Sequence: Synthetic oligonucleotide
cuaucucacaca

SEQ ID NO: 113574 - RNA, 13 nt, Artificial Sequence
  Description of Artificial Sequence: Synthetic oligonucleotide
uguccucaauugu

SEQ ID NO: 113575 - RNA, 12 nt, Artificial Sequence
  Description of Artificial Sequence: Synthetic oligonucleotide
aaaccguagcug

SEQ ID NO: 113576 - RNA, 12 nt, Artificial Sequence
  Description of Artificial Sequence: Synthetic oligonucleotide
uagcuggcaagc

SEQ ID NO: 113577 - RNA, 14 nt, Artificial Sequence
  Description of Artificial Sequence: Synthetic oligonucleotide
uuguaugguuaaaa

SEQ ID NO: 113578 - RNA, 14 nt, Artificial Sequence
  Description of Artificial Sequence: Synthetic oligonucleotide
ugguuaaaagaugg

SEQ ID NO: 113579 - RNA, 13 nt, Artificial Sequence
  Description of Artificial Sequence: Synthetic oligonucleotide
cagggaauuauac

SEQ ID NO: 113580 - RNA, 12 nt, Artificial Sequence
  Description of Artificial Sequence: Synthetic oligonucleotide
acaaucuugcug

SEQ ID NO: 113581 - RNA, 13 nt, Artificial Sequence
  Description of Artificial Sequence: Synthetic oligonucleotide
ccaauaaugaaga

SEQ ID NO: 113582 - RNA, 13 nt, Artificial Sequence
  Description of Artificial Sequence: Synthetic oligonucleotide
acuuuggauguuc

SEQ ID NO: 113583 - RNA, 12 nt, Artificial Sequence
  Description of Artificial Sequence: Synthetic oligonucleotide
aaugcuuccacu

SEQ ID NO: 113584 - RNA, 11 nt, Artificial Sequence
  Description of Artificial Sequence: Synthetic oligonucleotide
gagaaaguuug

SEQ ID NO: 113585 - RNA, 11 nt, Artificial Sequence
  Description of Artificial Sequence: Synthetic oligonucleotide
aaagaacuacu

SEQ ID NO: 113586 - RNA, 12 nt, Artificial Sequence
  Description of Artificial Sequence: Synthetic oligonucleotide
uuagaaauacgg

SEQ ID NO: 113587 - RNA, 12 nt, Artificial Sequence
  Description of Artificial Sequence: Synthetic oligonucleotide
aacauggguaca

SEQ ID NO: 113588 - RNA, 14 nt, Artificial Sequence
  Description of Artificial Sequence: Synthetic oligonucleotide
aaagacacagaaga

SEQ ID NO: 113589 - RNA, 11 nt, Artificial Sequence
  Description of Artificial Sequence: Synthetic oligonucleotide
uaguagggagg

SEQ ID NO: 113590 - RNA, 12 nt, Artificial Sequence
  Description of Artificial Sequence: Synthetic oligonucleotide
gccuucugcagc

SEQ ID NO: 113591 - RNA, 10 nt, Artificial Sequence
  Description of Artificial Sequence: Synthetic oligonucleotide
ggucugguac

SEQ ID NO: 113592 - RNA, 12 nt, Artificial Sequence
  Description of Artificial Sequence: Synthetic oligonucleotide
cuaguccuuccg

SEQ ID NO: 113593 - RNA, 12 nt, Artificial Sequence
  Description of Artificial Sequence: Synthetic oligonucleotide
ccagugaauauu

SEQ ID NO: 113594 - RNA, 13 nt, Artificial Sequence
  Description of Artificial Sequence: Synthetic oligonucleotide
augaauucaaguu

SEQ ID NO: 113595 - RNA, 12 nt, Artificial Sequence
  Description of Artificial Sequence: Synthetic oligonucleotide
caggacacagau

SEQ ID NO: 113596 - RNA, 12 nt, Artificial Sequence
  Description of Artificial Sequence: Synthetic oligonucleotide
cucaaagcacag

SEQ ID NO: 113597 - RNA, 10 nt, Artificial Sequence
  Description of Artificial Sequence: Synthetic oligonucleotide
accacugcca

SEQ ID NO: 113598 - RNA, 13 nt, Artificial Sequence
  Description of Artificial Sequence: Synthetic oligonucleotide
gaaacuacuagug

SEQ ID NO: 113599 - RNA, 12 nt, Artificial Sequence
  Description of Artificial Sequence: Synthetic oligonucleotide
aagucggacagc

SEQ ID NO: 113600 - RNA, 13 nt, Artificial Sequence
  Description of Artificial Sequence: Synthetic oligonucleotide
gaaagcgaaaaau

SEQ ID NO: 113601 - RNA, 13 nt, Artificial Sequence
  Description of Artificial Sequence: Synthetic oligonucleotide
cccucugauuuag

SEQ ID NO: 113602 - RNA, 12 nt, Artificial Sequence
  Description of Artificial Sequence: Synthetic oligonucleotide
ugagcuauuuaa

SEQ ID NO: 113603 - RNA, 13 nt, Artificial Sequence
  Description of Artificial Sequence: Synthetic oligonucleotide
aaaaggugaaaaa

SEQ ID NO: 113604 - RNA, 14 nt, Artificial Sequence
  Description of Artificial Sequence: Synthetic oligonucleotide
gaaaaagcacuauu

SEQ ID NO: 113605 - RNA, 12 nt, Artificial Sequence
  Description of Artificial Sequence: Synthetic oligonucleotide
ggcugaaaagaa

SEQ ID NO: 113606 - RNA, 12 nt, Artificial Sequence
  Description of Artificial Sequence: Synthetic oligonucleotide
uaaacccuuaua

SEQ ID NO: 113607 - RNA, 13 nt, Artificial Sequence
  Description of Artificial Sequence: Synthetic oligonucleotide
cauacuauuagcc

SEQ ID NO: 113608 - RNA, 12 nt, Artificial Sequence
  Description of Artificial Sequence: Synthetic oligonucleotide
gacagaagcauu

SEQ ID NO: 113609 - RNA, 14 nt, Artificial Sequence
  Description of Artificial Sequence: Synthetic oligonucleotide
agagcaaauaagau

SEQ ID NO: 113610 - RNA, 14 nt, Artificial Sequence
  Description of Artificial Sequence: Synthetic oligonucleotide
ccaacauuuuucuc

SEQ ID NO: 113611 - RNA, 15 nt, Artificial Sequence
  Description of Artificial Sequence: Synthetic oligonucleotide
uuaaguaugagaaaa

SEQ ID NO: 113612 - RNA, 14 nt, Artificial Sequence
  Description of Artificial Sequence: Synthetic oligonucleotide
caggaauaaagaug

SEQ ID NO: 113613 - RNA, 13 nt, Artificial Sequence
  Description of Artificial Sequence: Synthetic oligonucleotide
aauuugaaugacc

SEQ ID NO: 113614 - RNA, 14 nt, Artificial Sequence
  Description of Artificial Sequence: Synthetic oligonucleotide
auguauaaagauag

SEQ ID NO: 113615 - RNA, 12 nt, Artificial Sequence
  Description of Artificial Sequence: Synthetic oligonucleotide
ggcuguaacuau

SEQ ID NO: 113616 - RNA, 11 nt, Artificial Sequence
  Description of Artificial Sequence: Synthetic oligonucleotide
ucugugaagug

SEQ ID NO: 113617 - RNA, 14 nt, Artificial Sequence
  Description of Artificial Sequence: Synthetic oligonucleotide
ccuuuaaggaaaug

SEQ ID NO: 113618 - RNA, 13 nt, Artificial Sequence
  Description of Artificial Sequence: Synthetic oligonucleotide
aaggauacaaaaa

SEQ ID NO: 113619 - RNA, 12 nt, Artificial Sequence
  Description of Artificial Sequence: Synthetic oligonucleotide
agaugcaauuug

SEQ ID NO: 113620 - RNA, 12 nt, Artificial Sequence
  Description of Artificial Sequence: Synthetic oligonucleotide
guucaaaacgaa

SEQ ID NO: 113621 - RNA, 11 nt, Artificial Sequence
  Description of Artificial Sequence: Synthetic oligonucleotide
gugaaaccuca

SEQ ID NO: 113622 - RNA, 13 nt, Artificial Sequence
  Description of Artificial Sequence: Synthetic oligonucleotide
acgaaagagaagc

SEQ ID NO: 113623 - RNA, 12 nt, Artificial Sequence
  Description of Artificial Sequence: Synthetic oligonucleotide
cuccacaagcgc

SEQ ID NO: 113624 - RNA, 14 nt, Artificial Sequence
  Description of Artificial Sequence: Synthetic oligonucleotide
gagaagauuccaaa

SEQ ID NO: 113625 - RNA, 13 nt, Artificial Sequence
  Description of Artificial Sequence: Synthetic oligonucleotide
aaucuggauucaa

SEQ ID NO: 113626 - RNA, 13 nt, Artificial Sequence
  Description of Artificial Sequence: Synthetic oligonucleotide
agaacagauuuga

SEQ ID NO: 113627 - RNA, 11 nt, Artificial Sequence
  Description of Artificial Sequence: Synthetic oligonucleotide
ccagagcugug

SEQ ID NO: 113628 - RNA, 12 nt, Artificial Sequence
  Description of Artificial Sequence: Synthetic oligonucleotide
ccucagauuguu

SEQ ID NO: 113629 - RNA, 12 nt, Artificial Sequence
  Description of Artificial Sequence: Synthetic oligonucleotide
cuauuuuaauua

SEQ ID NO: 113630 - RNA, 13 nt, Artificial Sequence
  Description of Artificial Sequence: Synthetic oligonucleotide
uuuaauuuauuaa

SEQ ID NO: 113631 - RNA, 12 nt, Artificial Sequence
  Description of Artificial Sequence: Synthetic oligonucleotide
augcaguuugaa

SEQ ID NO: 113632 - RNA, 11 nt, Artificial Sequence
  Description of Artificial Sequence: Synthetic oligonucleotide
caugcugcugg

SEQ ID NO: 113633 - RNA, 13 nt, Artificial Sequence
  Description of Artificial Sequence: Synthetic oligonucleotide
agaugugcauuuc

SEQ ID NO: 113634 - RNA, 12 nt, Artificial Sequence
  Description of Artificial Sequence: Synthetic oligonucleotide
ucaaaaccugug

SEQ ID NO: 113635 - RNA, 11 nt, Artificial Sequence
  Description of Artificial Sequence: Synthetic oligonucleotide
gaaugugggua

SEQ ID NO: 113636 - RNA, 10 nt, Artificial Sequence
  Description of Artificial Sequence: Synthetic oligonucleotide
auguggguag

SEQ ID NO: 113637 - RNA, 13 nt, Artificial Sequence
  Description of Artificial Sequence: Synthetic oligonucleotide
ugaaaaugagcau

SEQ ID NO: 113638 - RNA, 13 nt, Artificial Sequence
  Description of Artificial Sequence: Synthetic oligonucleotide
uugcuuuucaugu

SEQ ID NO: 113639 - RNA, 12 nt, Artificial Sequence
  Description of Artificial Sequence: Synthetic oligonucleotide
uguauuucuaua

SEQ ID NO: 113640 - RNA, 13 nt, Artificial Sequence
  Description of Artificial Sequence: Synthetic oligonucleotide
uuugauuaauguu

SEQ ID NO: 113641 - RNA, 12 nt, Artificial Sequence
  Description of Artificial Sequence: Synthetic oligonucleotide
caacguguauag

SEQ ID NO: 113642 - RNA, 12 nt, Artificial Sequence
  Description of Artificial Sequence: Synthetic oligonucleotide
cauauccuuggc

SEQ ID NO: 113643 - RNA, 13 nt, Artificial Sequence
  Description of Artificial Sequence: Synthetic oligonucleotide
uacuaacaucugg

SEQ ID NO: 113644 - RNA, 11 nt, Artificial Sequence
  Description of Artificial Sequence: Synthetic oligonucleotide
cauaaguugug

SEQ ID NO: 113645 - RNA, 12 nt, Artificial Sequence
  Description of Artificial Sequence: Synthetic oligonucleotide
gcaucauuuugg

SEQ ID NO: 113646 - RNA, 10 nt, Artificial Sequence
  Description of Artificial Sequence: Synthetic oligonucleotide
gcucuucuua

SEQ ID NO: 113647 - RNA, 10 nt, Artificial Sequence
  Description of Artificial Sequence: Synthetic oligonucleotide
agauuagguc

SEQ ID NO: 113648 - RNA, 12 nt, Artificial Sequence
  Description of Artificial Sequence: Synthetic oligonucleotide
auggaauugaaa

SEQ ID NO: 113649 - RNA, 13 nt, Artificial Sequence
  Description of Artificial Sequence: Synthetic oligonucleotide
cacacucauuccu

SEQ ID NO: 113650 - RNA, 12 nt, Artificial Sequence
  Description of Artificial Sequence: Synthetic oligonucleotide
uguagagguaac

SEQ ID NO: 113651 - RNA, 11 nt, Artificial Sequence
  Description of Artificial Sequence: Synthetic oligonucleotide
caaccacaugc

SEQ ID NO: 113652 - RNA, 12 nt, Artificial Sequence
  Description of Artificial Sequence: Synthetic oligonucleotide
ucggaaacaagu

SEQ ID NO: 113653 - RNA, 11 nt, Artificial Sequence
  Description of Artificial Sequence: Synthetic oligonucleotide
acucccaauaa

SEQ ID NO: 113654 - RNA, 13 nt, Artificial Sequence
  Description of Artificial Sequence: Synthetic oligonucleotide
aaugcuaagaaau

SEQ ID NO: 113655 - RNA, 11 nt, Artificial Sequence
  Description of Artificial Sequence: Synthetic oligonucleotide
gucuuucucua

SEQ ID NO: 113656 - RNA, 11 nt, Artificial Sequence
  Description of Artificial Sequence: Synthetic oligonucleotide
ugaauuucagg

SEQ ID NO: 113657 - RNA, 13 nt, Artificial Sequence
  Description of Artificial Sequence: Synthetic oligonucleotide
cgauucccucuca

SEQ ID NO: 113658 - RNA, 11 nt, Artificial Sequence
  Description of Artificial Sequence: Synthetic oligonucleotide
aggaaagugaa

SEQ ID NO: 113659 - RNA, 12 nt, Artificial Sequence
  Description of Artificial Sequence: Synthetic oligonucleotide
gaggcugcaugc

SEQ ID NO: 113660 - RNA, 11 nt, Artificial Sequence
  Description of Artificial Sequence: Synthetic oligonucleotide
ucucugaacag

SEQ ID NO: 113661 - RNA, 12 nt, Artificial Sequence
  Description of Artificial Sequence: Synthetic oligonucleotide
aacuuggcugua

SEQ ID NO: 113662 - RNA, 12 nt, Artificial Sequence
  Description of Artificial Sequence: Synthetic oligonucleotide
agaagccaaaau

SEQ ID NO: 113663 - RNA, 14 nt, Artificial Sequence
  Description of Artificial Sequence: Synthetic oligonucleotide
auuaaaagaagucc

SEQ ID NO: 113664 - RNA, 14 nt, Artificial Sequence
  Description of Artificial Sequence: Synthetic oligonucleotide
gaauccggauuauc

SEQ ID NO: 113665 - RNA, 12 nt, Artificial Sequence
  Description of Artificial Sequence: Synthetic oligonucleotide
aaugugacauca

SEQ ID NO: 113666 - RNA, 13 nt, Artificial Sequence
  Description of Artificial Sequence: Synthetic oligonucleotide
caucaaagcaagu

SEQ ID NO: 113667 - RNA, 11 nt, Artificial Sequence
  Description of Artificial Sequence: Synthetic oligonucleotide
agagagagaaa

SEQ ID NO: 113668 - RNA, 13 nt, Artificial Sequence
  Description of Artificial Sequence: Synthetic oligonucleotide
ucgcuguaguauu

SEQ ID NO: 113669 - RNA, 14 nt, Artificial Sequence
  Description of Artificial Sequence: Synthetic oligonucleotide
cgcuguaguauuua

SEQ ID NO: 113670 - RNA, 13 nt, Artificial Sequence
  Description of Artificial Sequence: Synthetic oligonucleotide
auuuaagcccaua

SEQ ID NO: 113671 - RNA, 15 nt, Artificial Sequence
  Description of Artificial Sequence: Synthetic oligonucleotide
auuaaaauaaacaug

SEQ ID NO: 113672 - RNA, 12 nt, Artificial Sequence
  Description of Artificial Sequence: Synthetic oligonucleotide
cuguucugaucg

SEQ ID NO: 113673 - RNA, 16 nt, Artificial Sequence
  Description of Artificial Sequence: Synthetic oligonucleotide
aaauaauuugaacuuu

SEQ ID NO: 113674 - RNA, 12 nt, Artificial Sequence
  Description of Artificial Sequence: Synthetic oligonucleotide
ugcgaccuuaau

SEQ ID NO: 113675 - RNA, 11 nt, Artificial Sequence
  Description of Artificial Sequence: Synthetic oligonucleotide
cugagaaagcu

SEQ ID NO: 113676 - RNA, 13 nt, Artificial Sequence
  Description of Artificial Sequence: Synthetic oligonucleotide
aguaaagaugcua

SEQ ID NO: 113677 - RNA, 12 nt, Artificial Sequence
  Description of Artificial Sequence: Synthetic oligonucleotide
cugcuuaauugc

SEQ ID NO: 113678 - RNA, 14 nt, Artificial Sequence
  Description of Artificial Sequence: Synthetic oligonucleotide
uaccauaugaauga

SEQ ID NO: 113679 - RNA, 12 nt, Artificial Sequence
  Description of Artificial Sequence: Synthetic oligonucleotide
aacuuucuuauc

SEQ ID NO: 113680 - RNA, 13 nt, Artificial Sequence
  Description of Artificial Sequence: Synthetic oligonucleotide
ccuugcaugacau

SEQ ID NO: 113681 - RNA, 14 nt, Artificial Sequence
  Description of Artificial Sequence: Synthetic oligonucleotide
ugaauuuguauaug

SEQ ID NO: 113682 - RNA, 12 nt, Artificial Sequence
  Description of Artificial Sequence: Synthetic oligonucleotide
gaauccuaguag

SEQ ID NO: 113683 - RNA, 10 nt, Artificial Sequence
  Description of Artificial Sequence: Synthetic oligonucleotide
gaaagggaag

SEQ ID NO: 113684 - RNA, 11 nt, Artificial Sequence
  Description of Artificial Sequence: Synthetic oligonucleotide
uaucggcaugc

SEQ ID NO: 113685 - RNA, 12 nt, Artificial Sequence
  Description of Artificial Sequence: Synthetic oligonucleotide
caccucauagua

SEQ ID NO: 113686 - RNA, 11 nt, Artificial Sequence
  Description of Artificial Sequence: Synthetic oligonucleotide
ccagaauugcc

SEQ ID NO: 113687 - RNA, 11 nt, Artificial Sequence
  Description of Artificial Sequence: Synthetic oligonucleotide
uggugaucugg

SEQ ID NO: 113688 - RNA, 12 nt, Artificial Sequence
  Description of Artificial Sequence: Synthetic oligonucleotide
gaucuggguaau

SEQ ID NO: 113689 - RNA, 12 nt, Artificial Sequence
  Description of Artificial Sequence: Synthetic oligonucleotide
ggaugugaugaa

SEQ ID NO: 113690 - RNA, 12 nt, Artificial Sequence
  Description of Artificial Sequence: Synthetic oligonucleotide
cauuuccacagc

SEQ ID NO: 113691 - RNA, 11 nt, Artificial Sequence
  Description of Artificial Sequence: Synthetic oligonucleotide
acagcuacacc

SEQ ID NO: 113692 - RNA, 12 nt, Artificial Sequence
  Description of Artificial Sequence: Synthetic oligonucleotide
ugcaguucuuac

SEQ ID NO: 113693 - RNA, 12 nt, Artificial Sequence
  Description of Artificial Sequence: Synthetic oligonucleotide
acgagaagaaga

SEQ ID NO: 113694 - RNA, 12 nt, Artificial Sequence
  Description of Artificial Sequence: Synthetic oligonucleotide
cgagaagaagau

SEQ ID NO: 113695 - RNA, 15 nt, Artificial Sequence
  Description of Artificial Sequence: Synthetic oligonucleotide
aagaagaucauuuac

SEQ ID NO: 113696 - RNA, 11 nt, Artificial Sequence
  Description of Artificial Sequence: Synthetic oligonucleotide
agaggaagagg

SEQ ID NO: 113697 - RNA, 12 nt, Artificial Sequence
  Description of Artificial Sequence: Synthetic oligonucleotide
gaggaagaggug

SEQ ID NO: 113698 - RNA, 13 nt, Artificial Sequence
  Description of Artificial Sequence: Synthetic oligonucleotide
cuacuuugagggc

SEQ ID NO: 113699 - RNA, 12 nt, Artificial Sequence
  Description of Artificial Sequence: Synthetic oligonucleotide
agggcaucuccu

SEQ ID NO: 113700 - RNA, 10 nt, Artificial Sequence
  Description of Artificial Sequence: Synthetic oligonucleotide
ggagugauau

SEQ ID NO: 113701 - RNA, 11 nt, Artificial Sequence
  Description of Artificial Sequence: Synthetic oligonucleotide
gagugauaugg

SEQ ID NO: 113702 - RNA, 12 nt, Artificial Sequence
  Description of Artificial Sequence: Synthetic oligonucleotide
ugcaguaaagau

SEQ ID NO: 113703 - RNA, 13 nt, Artificial Sequence
  Description of Artificial Sequence: Synthetic oligonucleotide
aguaaagauccua

SEQ ID NO: 113704 - RNA, 12 nt, Artificial Sequence
  Description of Artificial Sequence: Synthetic oligonucleotide
ugacaaaggaca

SEQ ID NO: 113705 - RNA, 13 nt, Artificial Sequence
  Description of Artificial Sequence: Synthetic oligonucleotide
gcaauugugaccc

SEQ ID NO: 113706 - RNA, 12 nt, Artificial Sequence
  Description of Artificial Sequence: Synthetic oligonucleotide
aacaucauccau

SEQ ID NO: 113707 - RNA, 12 nt, Artificial Sequence
  Description of Artificial Sequence: Synthetic oligonucleotide
ugaaauccaaca

SEQ ID NO: 113708 - RNA, 15 nt, Artificial Sequence
  Description of Artificial Sequence: Synthetic oligonucleotide
aacaauauauuucuc

SEQ ID NO: 113709 - RNA, 14 nt, Artificial Sequence
  Description of Artificial Sequence: Synthetic oligonucleotide
aacaguaaagucac

SEQ ID NO: 113710 - RNA, 14 nt, Artificial Sequence
  Description of Artificial Sequence: Synthetic oligonucleotide
ugugaagaaaguaa

SEQ ID NO: 113711 - RNA, 13 nt, Artificial Sequence
  Description of Artificial Sequence: Synthetic oligonucleotide
cuuccgagccauc

SEQ ID NO: 113712 - RNA, 12 nt, Artificial Sequence
  Description of Artificial Sequence: Synthetic oligonucleotide
aauggagguuga

SEQ ID NO: 113713 - RNA, 12 nt, Artificial Sequence
  Description of Artificial Sequence: Synthetic oligonucleotide
ggagguugaaua

SEQ ID NO: 113714 - RNA, 13 nt, Artificial Sequence
  Description of Artificial Sequence: Synthetic oligonucleotide
auuuugaguuuuc

SEQ ID NO: 113715 - RNA, 12 nt, Artificial Sequence
  Description of Artificial Sequence: Synthetic oligonucleotide
uauccuguuugu

SEQ ID NO: 113716 - RNA, 11 nt, Artificial Sequence
  Description of Artificial Sequence: Synthetic oligonucleotide
ccuguuuguuc

SEQ ID NO: 113717 - RNA, 10 nt, Artificial Sequence
  Description of Artificial Sequence: Synthetic oligonucleotide
cucuacagcc

SEQ ID NO: 113718 - RNA, 12 nt, Artificial Sequence
  Description of Artificial Sequence: Synthetic oligonucleotide
ucuuccauagcu

SEQ ID NO: 113719 - RNA, 12 nt, Artificial Sequence
  Description of Artificial Sequence: Synthetic oligonucleotide
auaaucuuccug

SEQ ID NO: 113720 - RNA, 12 nt, Artificial Sequence
  Description of Artificial Sequence: Synthetic oligonucleotide
uaaucuuccugu

SEQ ID NO: 113721 - RNA, 12 nt, Artificial Sequence
  Description of Artificial Sequence: Synthetic oligonucleotide
cuucaugacuug

SEQ ID NO: 113722 - RNA, 12 nt, Artificial Sequence
  Description of Artificial Sequence: Synthetic oligonucleotide
aagagggagaga

SEQ ID NO: 113723 - RNA, 12 nt, Artificial Sequence
  Description of Artificial Sequence: Synthetic oligonucleotide
cgucuccuacca

SEQ ID NO: 113724 - RNA, 12 nt, Artificial Sequence
  Description of Artificial Sequence: Synthetic oligonucleotide
gaucaaucggcc

SEQ ID NO: 113725 - RNA, 12 nt, Artificial Sequence
  Description of Artificial Sequence: Synthetic oligonucleotide
ggacgaacaucc

SEQ ID NO: 113726 - RNA, 11 nt, Artificial Sequence
  Description of Artificial Sequence: Synthetic oligonucleotide
agggucggaac

SEQ ID NO: 113727 - RNA, 10 nt, Artificial Sequence
  Description of Artificial Sequence: Synthetic oligonucleotide
ucggaaccca

SEQ ID NO: 113728 - RNA, 11 nt, Artificial Sequence
  Description of Artificial Sequence: Synthetic oligonucleotide
acccaagcuua

SEQ ID NO: 113729 - RNA, 14 nt, Artificial Sequence
  Description of Artificial Sequence: Synthetic oligonucleotide
gaacuuuaagcaac

SEQ ID NO: 113730 - RNA, 11 nt, Artificial Sequence
  Description of Artificial Sequence: Synthetic oligonucleotide
acuauucagug

SEQ ID NO: 113731 - RNA, 11 nt, Artificial Sequence
  Description of Artificial Sequence: Synthetic oligonucleotide
cuauucagugg

SEQ ID NO: 113732 - RNA, 13 nt, Artificial Sequence
  Description of Artificial Sequence: Synthetic oligonucleotide
aaacacagauaac

SEQ ID NO: 113733 - RNA, 12 nt, Artificial Sequence
  Description of Artificial Sequence: Synthetic oligonucleotide
cuuaagaaaaga

SEQ ID NO: 113734 - RNA, 12 nt, Artificial Sequence
  Description of Artificial Sequence: Synthetic oligonucleotide
cugaaggagugu

SEQ ID NO: 113735 - RNA, 10 nt, Artificial Sequence
  Description of Artificial Sequence: Synthetic oligonucleotide
ucaccgcggg

SEQ ID NO: 113736 - RNA, 14 nt, Artificial Sequence
  Description of Artificial Sequence: Synthetic oligonucleotide
agcagaaauaagcg

SEQ ID NO: 113737 - RNA, 12 nt, Artificial Sequence
  Description of Artificial Sequence: Synthetic oligonucleotide
aagcgugccguu

SEQ ID NO: 113738 - RNA, 12 nt, Artificial Sequence
  Description of Artificial Sequence: Synthetic oligonucleotide
agaaacagucac

SEQ ID NO: 113739 - RNA, 12 nt, Artificial Sequence
  Description of Artificial Sequence: Synthetic oligonucleotide
agaggaagaagg

SEQ ID NO: 113740 - RNA, 14 nt, Artificial Sequence
  Description of Artificial Sequence: Synthetic oligonucleotide
uguauucaaaauau

SEQ ID NO: 113741 - RNA, 13 nt, Artificial Sequence
  Description of Artificial Sequence: Synthetic oligonucleotide
auuuuccucccuu

SEQ ID NO: 113742 - RNA, 13 nt, Artificial Sequence
  Description of Artificial Sequence: Synthetic oligonucleotide
caaagaaagauag

SEQ ID NO: 113743 - RNA, 12 nt, Artificial Sequence
  Description of Artificial Sequence: Synthetic oligonucleotide
aagaaagauaga

SEQ ID NO: 113744 - RNA, 13 nt, Artificial Sequence
  Description of Artificial Sequence: Synthetic oligonucleotide
gaaagcauuuguu

SEQ ID NO: 113745 - RNA, 13 nt, Artificial Sequence
  Description of Artificial Sequence: Synthetic oligonucleotide
ugaguuaaacgaa

SEQ ID NO: 113746 - RNA, 12 nt, Artificial Sequence
  Description of Artificial Sequence: Synthetic oligonucleotide
acugauacagaa

SEQ ID NO: 113747 - RNA, 12 nt, Artificial Sequence
  Description of Artificial Sequence: Synthetic oligonucleotide
auauuauauaua

SEQ ID NO: 113748 - RNA, 12 nt, Artificial Sequence
  Description of Artificial Sequence: Synthetic oligonucleotide
auuauauauaua

SEQ ID NO: 113749 - RNA, 12 nt, Artificial Sequence
  Description of Artificial Sequence: Synthetic oligonucleotide
ucacuggaugua

SEQ ID NO: 113750 - RNA, 12 nt, Artificial Sequence
  Description of Artificial Sequence: Synthetic oligonucleotide
cagggaagagga

SEQ ID NO: 113751 - RNA, 15 nt, Artificial Sequence
  Description of Artificial Sequence: Synthetic oligonucleotide
augaucuuuuuuuug

SEQ ID NO: 113752 - RNA, 11 nt, Artificial Sequence
  Description of Artificial Sequence: Synthetic oligonucleotide
aguucacggcc

SEQ ID NO: 113753 - RNA, 13 nt, Artificial Sequence
  Description of Artificial Sequence: Synthetic oligonucleotide
caccaucacacca

SEQ ID NO: 113754 - RNA, 11 nt, Artificial Sequence
  Description of Artificial Sequence: Synthetic oligonucleotide
ccugcggguuu

SEQ ID NO: 113755 - RNA, 10 nt, Artificial Sequence
  Description of Artificial Sequence: Synthetic oligonucleotide
auccaguuug

SEQ ID NO: 113756 - RNA, 13 nt, Artificial Sequence
  Description of Artificial Sequence: Synthetic oligonucleotide
guuaaggacuucu

SEQ ID NO: 113757 - RNA, 13 nt, Artificial Sequence
  Description of Artificial Sequence: Synthetic oligonucleotide
cagugggacagag

SEQ ID NO: 113758 - RNA, 14 nt, Artificial Sequence
  Description of Artificial Sequence: Synthetic oligonucleotide
aauuuguuauugug

SEQ ID NO: 113759 - RNA, 13 nt, Artificial Sequence
  Description of Artificial Sequence: Synthetic oligonucleotide
uucaaaugcauuu

SEQ ID NO: 113760 - RNA, 10 nt, Artificial Sequence
  Description of Artificial Sequence: Synthetic oligonucleotide
caggaaagcc

SEQ ID NO: 113761 - RNA, 11 nt, Artificial Sequence
  Description of Artificial Sequence: Synthetic oligonucleotide
aggaaagcccu

SEQ ID NO: 113762 - RNA, 12 nt, Artificial Sequence
  Description of Artificial Sequence: Synthetic oligonucleotide
cccagcauggcc

SEQ ID NO: 113763 - RNA, 11 nt, Artificial Sequence
  Description of Artificial Sequence: Synthetic oligonucleotide
cuucucccuga

SEQ ID NO: 113764 - RNA, 12 nt, Artificial Sequence
  Description of Artificial Sequence: Synthetic oligonucleotide
gaagaagcccuu

SEQ ID NO: 113765 - RNA, 12 nt, Artificial Sequence
  Description of Artificial Sequence: Synthetic oligonucleotide
agaagcccuuca

SEQ ID NO: 113766 - RNA, 11 nt, Artificial Sequence
  Description of Artificial Sequence: Synthetic oligonucleotide
gcccuucagcg

SEQ ID NO: 113767 - RNA, 11 nt, Artificial Sequence
  Description of Artificial Sequence: Synthetic oligonucleotide
ccuucagcggc

SEQ ID NO: 113768 - RNA, 12 nt, Artificial Sequence
  Description of Artificial Sequence: Synthetic oligonucleotide
ucagcggccagu

SEQ ID NO: 113769 - RNA, 12 nt, Artificial Sequence
  Description of Artificial Sequence: Synthetic oligonucleotide
ugaaaagcuccg

SEQ ID NO: 113770 - RNA, 11 nt, Artificial Sequence
  Description of Artificial Sequence: Synthetic oligonucleotide
aaaagcuccgg

SEQ ID NO: 113771 - RNA, 13 nt, Artificial Sequence
  Description of Artificial Sequence: Synthetic oligonucleotide
agucaacagucug

SEQ ID NO: 113772 - RNA, 13 nt, Artificial Sequence
  Description of Artificial Sequence: Synthetic oligonucleotide
cagaguucaaaag

SEQ ID NO: 113773 - RNA, 13 nt, Artificial Sequence
  Description of Artificial Sequence: Synthetic oligonucleotide
agaguucaaaagc

SEQ ID NO: 113774 - RNA, 12 nt, Artificial Sequence
  Description of Artificial Sequence: Synthetic oligonucleotide
uucaaaagcccu

SEQ ID NO: 113775 - RNA, 12 nt, Artificial Sequence
  Description of Artificial Sequence: Synthetic oligonucleotide
ucaaaagcccuu

SEQ ID NO: 113776 - RNA, 12 nt, Artificial Sequence
  Description of Artificial Sequence: Synthetic oligonucleotide
aaaagcccuuca

SEQ ID NO: 113777 - RNA, 12 nt, Artificial Sequence
  Description of Artificial Sequence: Synthetic oligonucleotide
aaagcccuucag

SEQ ID NO: 113778 - RNA, 13 nt, Artificial Sequence
  Description of Artificial Sequence: Synthetic oligonucleotide
gugaagccgcucg

SEQ ID NO: 113779 - RNA, 12 nt, Artificial Sequence
  Description of Artificial Sequence: Synthetic oligonucleotide
cacgccagucaa

SEQ ID NO: 113780 - RNA, 13 nt, Artificial Sequence
  Description of Artificial Sequence: Synthetic oligonucleotide
uucuuggugcgug

SEQ ID NO: 113781 - RNA, 14 nt, Artificial Sequence
  Description of Artificial Sequence: Synthetic oligonucleotide
auuggauucaucag

SEQ ID NO: 113782 - RNA, 13 nt, Artificial Sequence
  Description of Artificial Sequence: Synthetic oligonucleotide
uggaauaccuaag

SEQ ID NO: 113783 - RNA, 12 nt, Artificial Sequence
  Description of Artificial Sequence: Synthetic oligonucleotide
auuugaggcuca

SEQ ID NO: 113784 - RNA, 11 nt, Artificial Sequence
  Description of Artificial Sequence: Synthetic oligonucleotide
ucuacaauugg

SEQ ID NO: 113785 - RNA, 12 nt, Artificial Sequence
  Description of Artificial Sequence: Synthetic oligonucleotide
uaguuaggagcc

SEQ ID NO: 113786 - RNA, 13 nt, Artificial Sequence
  Description of Artificial Sequence: Synthetic oligonucleotide
agucaauauccac

SEQ ID NO: 113787 - RNA, 13 nt, Artificial Sequence
  Description of Artificial Sequence: Synthetic oligonucleotide
auguucagucaca

SEQ ID NO: 113788 - RNA, 12 nt, Artificial Sequence
  Description of Artificial Sequence: Synthetic oligonucleotide
acacacacauac

SEQ ID NO: 113789 - RNA, 12 nt, Artificial Sequence
  Description of Artificial Sequence: Synthetic oligonucleotide
uuccuuuugcuu

SEQ ID NO: 113790 - RNA, 16 nt, Artificial Sequence
  Description of Artificial Sequence: Synthetic oligonucleotide
uuuuaaaguaauuuuu

SEQ ID NO: 113791 - RNA, 13 nt, Artificial Sequence
  Description of Artificial Sequence: Synthetic oligonucleotide
caacagucaaugg

SEQ ID NO: 113792 - RNA, 13 nt, Artificial Sequence
  Description of Artificial Sequence: Synthetic oligonucleotide
ucgacaaaccaau

SEQ ID NO: 113793 - RNA, 12 nt, Artificial Sequence
  Description of Artificial Sequence: Synthetic oligonucleotide
acugcuaccacu

SEQ ID NO: 113794 - RNA, 13 nt, Artificial Sequence
  Description of Artificial Sequence: Synthetic oligonucleotide
gcaagcggucuua

SEQ ID NO: 113795 - RNA, 13 nt, Artificial Sequence
  Description of Artificial Sequence: Synthetic oligonucleotide
ggucuuaccggcu

SEQ ID NO: 113796 - RNA, 11 nt, Artificial Sequence
  Description of Artificial Sequence: Synthetic oligonucleotide
gauggguuacc

SEQ ID NO: 113797 - RNA, 11 nt, Artificial Sequence
  Description of Artificial Sequence: Synthetic oligonucleotide
guuaccugcga

SEQ ID NO: 113798 - RNA, 12 nt, Artificial Sequence
  Description of Artificial Sequence: Synthetic oligonucleotide
aaucuugcugag

SEQ ID NO: 113799 - RNA, 13 nt, Artificial Sequence
  Description of Artificial Sequence: Synthetic oligonucleotide
agcauaaaacagu

SEQ ID NO: 113800 - RNA, 12 nt, Artificial Sequence
  Description of Artificial Sequence: Synthetic oligonucleotide
guccuuuauccu

SEQ ID NO: 113801 - RNA, 12 nt, Artificial Sequence
  Description of Artificial Sequence: Synthetic oligonucleotide
caacgcaaguug

SEQ ID NO: 113802 - RNA, 13 nt, Artificial Sequence
  Description of Artificial Sequence: Synthetic oligonucleotide
aaacugaaaccau

SEQ ID NO: 113803 - RNA, 14 nt, Artificial Sequence
  Description of Artificial Sequence: Synthetic oligonucleotide
acuuuguuaaauau

SEQ ID NO: 113804 - RNA, 14 nt, Artificial Sequence
  Description of Artificial Sequence: Synthetic oligonucleotide
guauauuaaaaguu

SEQ ID NO: 113805 - RNA, 13 nt, Artificial Sequence
  Description of Artificial Sequence: Synthetic oligonucleotide
guuuugacuuaac

SEQ ID NO: 113806 - RNA, 13 nt, Artificial Sequence
  Description of Artificial Sequence: Synthetic oligonucleotide
gcaaacucagcac

SEQ ID NO: 113807 - RNA, 11 nt, Artificial Sequence
  Description of Artificial Sequence: Synthetic oligonucleotide
ugcugaccuca

SEQ ID NO: 113808 - RNA, 14 nt, Artificial Sequence
  Description of Artificial Sequence: Synthetic oligonucleotide
uuuauucagaucgc

SEQ ID NO: 113809 - RNA, 13 nt, Artificial Sequence
  Description of Artificial Sequence: Synthetic oligonucleotide
aggguucugggau

SEQ ID NO: 113810 - RNA, 15 nt, Artificial Sequence
  Description of Artificial Sequence: Synthetic oligonucleotide
auauuggaaauuaug

SEQ ID NO: 113811 - RNA, 13 nt, Artificial Sequence
  Description of Artificial Sequence: Synthetic oligonucleotide
auggaagcacuag

SEQ ID NO: 113812 - RNA, 13 nt, Artificial Sequence
  Description of Artificial Sequence: Synthetic oligonucleotide
guuuuuaugugga

SEQ ID NO: 113813 - RNA, 12 nt, Artificial Sequence
  Description of Artificial Sequence: Synthetic oligonucleotide
ggaauugguaga

SEQ ID NO: 113814 - RNA, 13 nt, Artificial Sequence
  Description of Artificial Sequence: Synthetic oligonucleotide
uuagacuuggaga

SEQ ID NO: 113815 - RNA, 13 nt, Artificial Sequence
  Description of Artificial Sequence: Synthetic oligonucleotide
uuacaguauucca

SEQ ID NO: 113816 - RNA, 15 nt, Artificial Sequence
  Description of Artificial Sequence: Synthetic oligonucleotide
ccacugaugaauuaa

SEQ ID NO: 113817 - RNA, 12 nt, Artificial Sequence
  Description of Artificial Sequence: Synthetic oligonucleotide
ccacaucaucac

SEQ ID NO: 113818 - RNA, 13 nt, Artificial Sequence
  Description of Artificial Sequence: Synthetic oligonucleotide
cucaccaaacaga

SEQ ID NO: 113819 - RNA, 12 nt, Artificial Sequence
  Description of Artificial Sequence: Synthetic oligonucleotide
ggaacaugaugg

SEQ ID NO: 113820 - RNA, 12 nt, Artificial Sequence
  Description of Artificial Sequence: Synthetic oligonucleotide
cauguagacugc

SEQ ID NO: 113821 - RNA, 13 nt, Artificial Sequence
  Description of Artificial Sequence: Synthetic oligonucleotide
ggaucuauuuaug

SEQ ID NO: 113822 - RNA, 12 nt, Artificial Sequence
  Description of Artificial Sequence: Synthetic oligonucleotide
gcacuauuauca

SEQ ID NO: 113823 - RNA, 11 nt, Artificial Sequence
  Description of Artificial Sequence: Synthetic oligonucleotide
aucaguucugc

SEQ ID NO: 113824 - RNA, 13 nt, Artificial Sequence
  Description of Artificial Sequence: Synthetic oligonucleotide
agauuaaaccuac

SEQ ID NO: 113825 - RNA, 13 nt, Artificial Sequence
  Description of Artificial Sequence: Synthetic oligonucleotide
auaaaauccuucu

SEQ ID NO: 113826 - RNA, 12 nt, Artificial Sequence
  Description of Artificial Sequence: Synthetic oligonucleotide
aaugcuguagac

SEQ ID NO: 113827 - RNA, 13 nt, Artificial Sequence
  Description of Artificial Sequence: Synthetic oligonucleotide
uugauaggaauag

SEQ ID NO: 113828 - RNA, 11 nt, Artificial Sequence
  Description of Artificial Sequence: Synthetic oligonucleotide
aauggcccuga

SEQ ID NO: 113829 - RNA, 11 nt, Artificial Sequence
  Description of Artificial Sequence: Synthetic oligonucleotide
uuccucaagca

SEQ ID NO: 113830 - RNA, 10 nt, Artificial Sequence
  Description of Artificial Sequence: Synthetic oligonucleotide
guucagccca

SEQ ID NO: 113831 - RNA, 11 nt, Artificial Sequence
  Description of Artificial Sequence: Synthetic oligonucleotide
gcugcugaacc

SEQ ID NO: 113832 - RNA, 12 nt, Artificial Sequence
  Description of Artificial Sequence: Synthetic oligonucleotide
aaguucucuuca

SEQ ID NO: 113833 - RNA, 11 nt, Artificial Sequence
  Description of Artificial Sequence: Synthetic oligonucleotide
ccagccuagag

SEQ ID NO: 113834 - RNA, 13 nt, Artificial Sequence
  Description of Artificial Sequence: Synthetic oligonucleotide
cucugugaagugu

SEQ ID NO: 113835 - RNA, 14 nt, Artificial Sequence
  Description of Artificial Sequence: Synthetic oligonucleotide
ugagaaaauuucaa

SEQ ID NO: 113836 - RNA, 11 nt, Artificial Sequence
  Description of Artificial Sequence: Synthetic oligonucleotide
aauccuccuga

SEQ ID NO: 113837 - RNA, 12 nt, Artificial Sequence
  Description of Artificial Sequence: Synthetic oligonucleotide
gugacaucauau

SEQ ID NO: 113838 - RNA, 13 nt, Artificial Sequence
  Description of Artificial Sequence: Synthetic oligonucleotide
aaucuucaucaua

SEQ ID NO: 113839 - RNA, 13 nt, Artificial Sequence
  Description of Artificial Sequence: Synthetic oligonucleotide
gacuagcuauuaa

SEQ ID NO: 113840 - RNA, 14 nt, Artificial Sequence
  Description of Artificial Sequence: Synthetic oligonucleotide
ucucuacuaaaaau

SEQ ID NO: 113841 - RNA, 12 nt, Artificial Sequence
  Description of Artificial Sequence: Synthetic oligonucleotide
ucuaucucgccu

SEQ ID NO: 113842 - RNA, 13 nt, Artificial Sequence
  Description of Artificial Sequence: Synthetic oligonucleotide
cuucgguccaguu

SEQ ID NO: 113843 - RNA, 11 nt, Artificial Sequence
  Description of Artificial Sequence: Synthetic oligonucleotide
gauguagccgc

SEQ ID NO: 113844 - RNA, 12 nt, Artificial Sequence
  Description of Artificial Sequence: Synthetic oligonucleotide
ugaggagacuug

SEQ ID NO: 113845 - RNA, 12 nt, Artificial Sequence
  Description of Artificial Sequence: Synthetic oligonucleotide
gaguagugagga

SEQ ID NO: 113846 - RNA, 14 nt, Artificial Sequence
  Description of Artificial Sequence: Synthetic oligonucleotide
cagaugaguacaaa

SEQ ID NO: 113847 - RNA, 13 nt, Artificial Sequence
  Description of Artificial Sequence: Synthetic oligonucleotide
guuguuaaugggc

SEQ ID NO: 113848 - RNA, 13 nt, Artificial Sequence
  Description of Artificial Sequence: Synthetic oligonucleotide
uuuuuaauuuauu

SEQ ID NO: 113849 - RNA, 12 nt, Artificial Sequence
  Description of Artificial Sequence: Synthetic oligonucleotide
uauuuaaauaug

SEQ ID NO: 113850 - RNA, 13 nt, Artificial Sequence
  Description of Artificial Sequence: Synthetic oligonucleotide
uauccuuuguuuc

SEQ ID NO: 113851 - RNA, 14 nt, Artificial Sequence
  Description of Artificial Sequence: Synthetic oligonucleotide
cgucuaaguguuug

SEQ ID NO: 113852 - RNA, 12 nt, Artificial Sequence
  Description of Artificial Sequence: Synthetic oligonucleotide
accugugacaaa

SEQ ID NO: 113853 - RNA, 13 nt, Artificial Sequence
  Description of Artificial Sequence: Synthetic oligonucleotide
ccaggcugaauua

SEQ ID NO: 113854 - RNA, 14 nt, Artificial Sequence
  Description of Artificial Sequence: Synthetic oligonucleotide
gucauucuuacaau

SEQ ID NO: 113855 - RNA, 15 nt, Artificial Sequence
  Description of Artificial Sequence: Synthetic oligonucleotide
ucauucuuacaauug

SEQ ID NO: 113856 - RNA, 12 nt, Artificial Sequence
  Description of Artificial Sequence: Synthetic oligonucleotide
cagagaguguac

SEQ ID NO: 113857 - RNA, 12 nt, Artificial Sequence
  Description of Artificial Sequence: Synthetic oligonucleotide
agaacucagcag

SEQ ID NO: 113858 - RNA, 13 nt, Artificial Sequence
  Description of Artificial Sequence: Synthetic oligonucleotide
uuuauuuucagua

SEQ ID NO: 113859 - RNA, 12 nt, Artificial Sequence
  Description of Artificial Sequence: Synthetic oligonucleotide
ucuuaaauggaa

SEQ ID NO: 113860 - RNA, 13 nt, Artificial Sequence
  Description of Artificial Sequence: Synthetic oligonucleotide
ugccuaaaauugu

SEQ ID NO: 113861 - RNA, 12 nt, Artificial Sequence
  Description of Artificial Sequence: Synthetic oligonucleotide
agacugugagcu

SEQ ID NO: 113862 - RNA, 14 nt, Artificial Sequence
  Description of Artificial Sequence: Synthetic oligonucleotide
ugcuuuuuauuaau

SEQ ID NO: 113863 - RNA, 13 nt, Artificial Sequence
  Description of Artificial Sequence: Synthetic oligonucleotide
cucuucuuacauu

SEQ ID NO: 113864 - RNA, 15 nt, Artificial Sequence
  Description of Artificial Sequence: Synthetic oligonucleotide
cauuuguaaaaaugu

SEQ ID NO: 113865 - RNA, 15 nt, Artificial Sequence
  Description of Artificial Sequence: Synthetic oligonucleotide
aucuuaauucauauu

SEQ ID NO: 113866 - RNA, 13 nt, Artificial Sequence
  Description of Artificial Sequence: Synthetic oligonucleotide
gaacuaaucauga

SEQ ID NO: 113867 - RNA, 12 nt, Artificial Sequence
  Description of Artificial Sequence: Synthetic oligonucleotide
ucugcucuuggg

SEQ ID NO: 113868 - RNA, 13 nt, Artificial Sequence
  Description of Artificial Sequence: Synthetic oligonucleotide
caguagcuuugag

SEQ ID NO: 113869 - RNA, 14 nt, Artificial Sequence
  Description of Artificial Sequence: Synthetic oligonucleotide
cacguaauauuuca

SEQ ID NO: 113870 - RNA, 13 nt, Artificial Sequence
  Description of Artificial Sequence: Synthetic oligonucleotide
uauucucuucacu

SEQ ID NO: 113871 - RNA, 14 nt, Artificial Sequence
  Description of Artificial Sequence: Synthetic oligonucleotide
cuaaugcuaagaaa

SEQ ID NO: 113872 - RNA, 12 nt, Artificial Sequence
  Description of Artificial Sequence: Synthetic oligonucleotide
gcugaaaaucaa

SEQ ID NO: 113873 - RNA, 14 nt, Artificial Sequence
  Description of Artificial Sequence: Synthetic oligonucleotide
aauaugauuacuuu

SEQ ID NO: 113874 - RNA, 14 nt, Artificial Sequence
  Description of Artificial Sequence: Synthetic oligonucleotide
cauuuuguucuaca

SEQ ID NO: 113875 - RNA, 12 nt, Artificial Sequence
  Description of Artificial Sequence: Synthetic oligonucleotide
cccgggacucuc

SEQ ID NO: 113876 - RNA, 14 nt, Artificial Sequence
  Description of Artificial Sequence: Synthetic oligonucleotide
ccuuuaaaguaaag

SEQ ID NO: 113877 - RNA, 13 nt, Artificial Sequence
  Description of Artificial Sequence: Synthetic oligonucleotide
ucuggaagccugg

SEQ ID NO: 113878 - RNA, 14 nt, Artificial Sequence
  Description of Artificial Sequence: Synthetic oligonucleotide
aaaacaaaagagag

SEQ ID NO: 113879 - RNA, 13 nt, Artificial Sequence
  Description of Artificial Sequence: Synthetic oligonucleotide
aucaguuaugccg

SEQ ID NO: 113880 - RNA, 13 nt, Artificial Sequence
  Description of Artificial Sequence: Synthetic oligonucleotide
uaaaagaagucca

SEQ ID NO: 113881 - RNA, 11 nt, Artificial Sequence
  Description of Artificial Sequence: Synthetic oligonucleotide
aggugagguua

SEQ ID NO: 113882 - RNA, 11 nt, Artificial Sequence
  Description of Artificial Sequence: Synthetic oligonucleotide
gggaagaggac

SEQ ID NO: 113883 - RNA, 13 nt, Artificial Sequence
  Description of Artificial Sequence: Synthetic oligonucleotide
aagcaaguauugu

SEQ ID NO: 113884 - RNA, 12 nt, Artificial Sequence
  Description of Artificial Sequence: Synthetic oligonucleotide
auuguagcacuc

SEQ ID NO: 113885 - RNA, 14 nt, Artificial Sequence
  Description of Artificial Sequence: Synthetic oligonucleotide
acaaaaccacaaau

SEQ ID NO: 113886 - RNA, 12 nt, Artificial Sequence
  Description of Artificial Sequence: Synthetic oligonucleotide
uaagcccauaca

SEQ ID NO: 113887 - RNA, 11 nt, Artificial Sequence
  Description of Artificial Sequence: Synthetic oligonucleotide
agcccauacag

SEQ ID NO: 113888 - RNA, 12 nt, Artificial Sequence
  Description of Artificial Sequence: Synthetic oligonucleotide
cagaaaccuucc

SEQ ID NO: 113889 - RNA, 10 nt, Artificial Sequence
  Description of Artificial Sequence: Synthetic oligonucleotide
guauaccuac

SEQ ID NO: 113890 - RNA, 13 nt, Artificial Sequence
  Description of Artificial Sequence: Synthetic oligonucleotide
gccaguuuucgga

SEQ ID NO: 113891 - RNA, 9 nt, Artificial Sequence
  Description of Artificial Sequence: Synthetic oligonucleotide
ggaacaggg

SEQ ID NO: 113892 - RNA, 13 nt, Artificial Sequence
  Description of Artificial Sequence: Synthetic oligonucleotide
uuaacuuuccagu

SEQ ID NO: 113893 - RNA, 14 nt, Artificial Sequence
  Description of Artificial Sequence: Synthetic oligonucleotide
aaaguuugguuuug

SEQ ID NO: 113894 - RNA, 12 nt, Artificial Sequence
  Description of Artificial Sequence: Synthetic oligonucleotide
cuucccacugua

SEQ ID NO: 113895 - RNA, 13 nt, Artificial Sequence
  Description of Artificial Sequence: Synthetic oligonucleotide
ugauaccauauga

SEQ ID NO: 113896 - RNA, 11 nt, Artificial Sequence
  Description of Artificial Sequence: Synthetic oligonucleotide
aacaugggcug

SEQ ID NO: 113897 - RNA, 13 nt, Artificial Sequence
  Description of Artificial Sequence: Synthetic oligonucleotide
caacuuuuucaua

SEQ ID NO: 113898 - RNA, 12 nt, Artificial Sequence
  Description of Artificial Sequence: Synthetic oligonucleotide
caugaggccgga

SEQ ID NO: 113899 - RNA, 11 nt, Artificial Sequence
  Description of Artificial Sequence: Synthetic oligonucleotide
acugcauuugu

SEQ ID NO: 113900 - RNA, 13 nt, Artificial Sequence
  Description of Artificial Sequence: Synthetic oligonucleotide
aauguuuacuacc

SEQ ID NO: 113901 - RNA, 15 nt, Artificial Sequence
  Description of Artificial Sequence: Synthetic oligonucleotide
aauuuuuugaugaaa

SEQ ID NO: 113902 - RNA, 14 nt, Artificial Sequence
  Description of Artificial Sequence: Synthetic oligonucleotide
cagugugugaauuu

SEQ ID NO: 113903 - RNA, 13 nt, Artificial Sequence
  Description of Artificial Sequence: Synthetic oligonucleotide
gagcaauguaugu

SEQ ID NO: 113904 - RNA, 14 nt, Artificial Sequence
  Description of Artificial Sequence: Synthetic oligonucleotide
aaagcacauauaua

SEQ ID NO: 113905 - RNA, 14 nt, Artificial Sequence
  Description of Artificial Sequence: Synthetic oligonucleotide
guaauaguuucucc

SEQ ID NO: 113906 - RNA, 13 nt, Artificial Sequence
  Description of Artificial Sequence: Synthetic oligonucleotide
aguuucuccaaau

SEQ ID NO: 113907 - RNA, 13 nt, Artificial Sequence
  Description of Artificial Sequence: Synthetic oligonucleotide
uacuuccuagaaa

SEQ ID NO: 113908 - RNA, 13 nt, Artificial Sequence
  Description of Artificial Sequence: Synthetic oligonucleotide
uacaccauauaug

SEQ ID NO: 113909 - RNA, 14 nt, Artificial Sequence
  Description of Artificial Sequence: Synthetic oligonucleotide
auauaugaauggag

SEQ ID NO: 113910 - RNA, 13 nt, Artificial Sequence
  Description of Artificial Sequence: Synthetic oligonucleotide
acgagaagaagau

SEQ ID NO: 113911 - RNA, 13 nt, Artificial Sequence
  Description of Artificial Sequence: Synthetic oligonucleotide
ucauuuacaggga

SEQ ID NO: 113912 - RNA, 13 nt, Artificial Sequence
  Description of Artificial Sequence: Synthetic oligonucleotide
cauuuacagggac

SEQ ID NO: 113913 - RNA, 10 nt, Artificial Sequence
  Description of Artificial Sequence: Synthetic oligonucleotide
agggaccuga

SEQ ID NO: 113914 - RNA, 14 nt, Artificial Sequence
  Description of Artificial Sequence: Synthetic oligonucleotide
uguuugacugcauc

SEQ ID NO: 113915 - RNA, 13 nt, Artificial Sequence
  Description of Artificial Sequence: Synthetic oligonucleotide
uuugacugcaucg

SEQ ID NO: 113916 - RNA, 12 nt, Artificial Sequence
  Description of Artificial Sequence: Synthetic oligonucleotide
gaguucacaggg

SEQ ID NO: 113917 - RNA, 13 nt, Artificial Sequence
  Description of Artificial Sequence: Synthetic oligonucleotide
ggcaccucugucc

SEQ ID NO: 113918 - RNA, 15 nt, Artificial Sequence
  Description of Artificial Sequence: Synthetic oligonucleotide
gguuugucuuuuuaa

SEQ ID NO: 113919 - RNA, 14 nt, Artificial Sequence
  Description of Artificial Sequence: Synthetic oligonucleotide
uuugucuuuuuaag

SEQ ID NO: 113920 - RNA, 13 nt, Artificial Sequence
  Description of Artificial Sequence: Synthetic oligonucleotide
ccuaaagguuguc

SEQ ID NO: 113921 - RNA, 12 nt, Artificial Sequence
  Description of Artificial Sequence: Synthetic oligonucleotide
aagguugucgac

SEQ ID NO: 113922 - RNA, 13 nt, Artificial Sequence
  Description of Artificial Sequence: Synthetic oligonucleotide
accuggcaauugu

SEQ ID NO: 113923 - RNA, 12 nt, Artificial Sequence
  Description of Artificial Sequence: Synthetic oligonucleotide
aguggugcgagg

SEQ ID NO: 113924 - RNA, 13 nt, Artificial Sequence
  Description of Artificial Sequence: Synthetic oligonucleotide
agagacaugaaau

SEQ ID NO: 113925 - RNA, 13 nt, Artificial Sequence
  Description of Artificial Sequence: Synthetic oligonucleotide
auauauuucucca

SEQ ID NO: 113926 - RNA, 10 nt, Artificial Sequence
  Description of Artificial Sequence: Synthetic oligonucleotide
caugaaggcu

SEQ ID NO: 113927 - RNA, 11 nt, Artificial Sequence
  Description of Artificial Sequence: Synthetic oligonucleotide
gcuggaguggu

SEQ ID NO: 113928 - RNA, 11 nt, Artificial Sequence
  Description of Artificial Sequence: Synthetic oligonucleotide
aggaagagagg

SEQ ID NO: 113929 - RNA, 12 nt, Artificial Sequence
  Description of Artificial Sequence: Synthetic oligonucleotide
cuugcaucgggc

SEQ ID NO: 113930 - RNA, 13 nt, Artificial Sequence
  Description of Artificial Sequence: Synthetic oligonucleotide
auauccuacugug

SEQ ID NO: 113931 - RNA, 13 nt, Artificial Sequence
  Description of Artificial Sequence: Synthetic oligonucleotide
uccuacuguguaa

SEQ ID NO: 113932 - RNA, 12 nt, Artificial Sequence
  Description of Artificial Sequence: Synthetic oligonucleotide
ccuuguagugua

SEQ ID NO: 113933 - RNA, 13 nt, Artificial Sequence
  Description of Artificial Sequence: Synthetic oligonucleotide
ucuuuguugauug

SEQ ID NO: 113934 - RNA, 14 nt, Artificial Sequence
  Description of Artificial Sequence: Synthetic oligonucleotide
uuuguugauugaaa

SEQ ID NO: 113935 - RNA, 15 nt, Artificial Sequence
  Description of Artificial Sequence: Synthetic oligonucleotide
uucuuuuucuuccau

SEQ ID NO: 113936 - RNA, 13 nt, Artificial Sequence
  Description of Artificial Sequence: Synthetic oligonucleotide
aaucuuccuucua

SEQ ID NO: 113937 - RNA, 13 nt, Artificial Sequence
  Description of Artificial Sequence: Synthetic oligonucleotide
uugaaugcuucau

SEQ ID NO: 113938 - RNA, 13 nt, Artificial Sequence
  Description of Artificial Sequence: Synthetic oligonucleotide
ugaaugcuucaug

SEQ ID NO: 113939 - RNA, 13 nt, Artificial Sequence
  Description of Artificial Sequence: Synthetic oligonucleotide
aauucuacuuuga

SEQ ID NO: 113940 - RNA, 13 nt, Artificial Sequence
  Description of Artificial Sequence: Synthetic oligonucleotide
agcaacuacagac

SEQ ID NO: 113941 - RNA, 13 nt, Artificial Sequence
  Description of Artificial Sequence: Synthetic oligonucleotide
gaccaaggucaac

SEQ ID NO: 113942 - RNA, 13 nt, Artificial Sequence
  Description of Artificial Sequence: Synthetic oligonucleotide
cgacuaucucgac

SEQ ID NO: 113943 - RNA, 13 nt, Artificial Sequence
  Description of Artificial Sequence: Synthetic oligonucleotide
aaccuucccaaac

SEQ ID NO: 113944 - RNA, 14 nt, Artificial Sequence
  Description of Artificial Sequence: Synthetic oligonucleotide
ccaagcuuagaacu

SEQ ID NO: 113945 - RNA, 15 nt, Artificial Sequence
  Description of Artificial Sequence: Synthetic oligonucleotide
agcuuagaacuuuaa

SEQ ID NO: 113946 - RNA, 11 nt, Artificial Sequence
  Description of Artificial Sequence: Synthetic oligonucleotide
aagaccaccac

SEQ ID NO: 113947 - RNA, 14 nt, Artificial Sequence
  Description of Artificial Sequence: Synthetic oligonucleotide
gcgagaaauaaagu

SEQ ID NO: 113948 - RNA, 14 nt, Artificial Sequence
  Description of Artificial Sequence: Synthetic oligonucleotide
cgagaaauaaaguu

SEQ ID NO: 113949 - RNA, 12 nt, Artificial Sequence
  Description of Artificial Sequence: Synthetic oligonucleotide
aggaaaugaucc

SEQ ID NO: 113950 - RNA, 13 nt, Artificial Sequence
  Description of Artificial Sequence: Synthetic oligonucleotide
gaagaaaugaaac

SEQ ID NO: 113951 - RNA, 13 nt, Artificial Sequence
  Description of Artificial Sequence: Synthetic oligonucleotide
guuuccauccucc

SEQ ID NO: 113952 - RNA, 15 nt, Artificial Sequence
  Description of Artificial Sequence: Synthetic oligonucleotide
acugaaaaucuuuga

SEQ ID NO: 113953 - RNA, 11 nt, Artificial Sequence
  Description of Artificial Sequence: Synthetic oligonucleotide
ugccguucagg

SEQ ID NO: 113954 - RNA, 13 nt, Artificial Sequence
  Description of Artificial Sequence: Synthetic oligonucleotide
caggguccagaag

SEQ ID NO: 113955 - RNA, 13 nt, Artificial Sequence
  Description of Artificial Sequence: Synthetic oligonucleotide
ucaagacugcuug

SEQ ID NO: 113956 - RNA, 13 nt, Artificial Sequence
  Description of Artificial Sequence: Synthetic oligonucleotide
uccaugucuuugg

SEQ ID NO: 113957 - RNA, 11 nt, Artificial Sequence
  Description of Artificial Sequence: Synthetic oligonucleotide
gccugaaacac

SEQ ID NO: 113958 - RNA, 12 nt, Artificial Sequence
  Description of Artificial Sequence: Synthetic oligonucleotide
ucucuguaccuc

SEQ ID NO: 113959 - RNA, 12 nt, Artificial Sequence
  Description of Artificial Sequence: Synthetic oligonucleotide
agcaagacaaga

SEQ ID NO: 113960 - RNA, 13 nt, Artificial Sequence
  Description of Artificial Sequence: Synthetic oligonucleotide
gcaagacaagaaa

SEQ ID NO: 113961 - RNA, 12 nt, Artificial Sequence
  Description of Artificial Sequence: Synthetic oligonucleotide
uguacaagaucc

SEQ ID NO: 113962 - RNA, 12 nt, Artificial Sequence
  Description of Artificial Sequence: Synthetic oligonucleotide
cguacuugcaga

SEQ ID NO: 113963 - RNA, 13 nt, Artificial Sequence
  Description of Artificial Sequence: Synthetic oligonucleotide
cgaucgauacaga

SEQ ID NO: 113964 - RNA, 13 nt, Artificial Sequence
  Description of Artificial Sequence: Synthetic oligonucleotide
uauaaaaauaaau

SEQ ID NO: 113965 - RNA, 13 nt, Artificial Sequence
  Description of Artificial Sequence: Synthetic oligonucleotide
uaaaaauaaauau

SEQ ID NO: 113966 - RNA, 13 nt, Artificial Sequence
  Description of Artificial Sequence: Synthetic oligonucleotide
uuugacugcugug

SEQ ID NO: 113967 - RNA, 13 nt, Artificial Sequence
  Description of Artificial Sequence: Synthetic oligonucleotide
ggagaugagagac

SEQ ID NO: 113968 - RNA, 10 nt, Artificial Sequence
  Description of Artificial Sequence: Synthetic oligonucleotide
ucccacuugg

SEQ ID NO: 113969 - RNA, 10 nt, Artificial Sequence
  Description of Artificial Sequence: Synthetic oligonucleotide
guucacggcc

SEQ ID NO: 113970 - RNA, 12 nt, Artificial Sequence
  Description of Artificial Sequence: Synthetic oligonucleotide
accaucacacca

SEQ ID NO: 113971 - RNA, 10 nt, Artificial Sequence
  Description of Artificial Sequence: Synthetic oligonucleotide
cugcggguuu

SEQ ID NO: 113972 - RNA, 9 nt, Artificial Sequence
  Description of Artificial Sequence: Synthetic oligonucleotide
uccaguuug

SEQ ID NO: 113973 - RNA, 12 nt, Artificial Sequence
  Description of Artificial Sequence: Synthetic oligonucleotide
uuaaggacuucu

SEQ ID NO: 113974 - RNA, 12 nt, Artificial Sequence
  Description of Artificial Sequence: Synthetic oligonucleotide
agugggacagag

SEQ ID NO: 113975 - RNA, 13 nt, Artificial Sequence
  Description of Artificial Sequence: Synthetic oligonucleotide
auuuguuauugug

SEQ ID NO: 113976 - RNA, 12 nt, Artificial Sequence
  Description of Artificial Sequence: Synthetic oligonucleotide
ucaaaugcauuu

SEQ ID NO: 113977 - RNA, 9 nt, Artificial Sequence
  Description of Artificial Sequence: Synthetic oligonucleotide
aggaaagcc

SEQ ID NO: 113978 - RNA, 10 nt, Artificial Sequence
  Description of Artificial Sequence: Synthetic oligonucleotide
ggaaagcccu

SEQ ID NO: 113979 - RNA, 11 nt, Artificial Sequence
  Description of Artificial Sequence: Synthetic oligonucleotide
ccagcauggcc

SEQ ID NO: 113980 - RNA, 10 nt, Artificial Sequence
  Description of Artificial Sequence: Synthetic oligonucleotide
uucucccuga

SEQ ID NO: 113981 - RNA, 11 nt, Artificial Sequence
  Description of Artificial Sequence: Synthetic oligonucleotide
aagaagcccuu

SEQ ID NO: 113982 - RNA, 11 nt, Artificial Sequence
  Description of Artificial Sequence: Synthetic oligonucleotide
gaagcccuuca

SEQ ID NO: 113983 - RNA, 10 nt, Artificial Sequence
  Description of Artificial Sequence: Synthetic oligonucleotide
cccuucagcg

SEQ ID NO: 113984 - RNA, 10 nt, Artificial Sequence
  Description of Artificial Sequence: Synthetic oligonucleotide
cuucagcggc

SEQ ID NO: 113985 - RNA, 11 nt, Artificial Sequence
  Description of Artificial Sequence: Synthetic oligonucleotide
cagcggccagu

SEQ ID NO: 113986 - RNA, 11 nt, Artificial Sequence
  Description of Artificial Sequence: Synthetic oligonucleotide
gaaaagcuccg

SEQ ID NO: 113987 - RNA, 10 nt, Artificial Sequence
  Description of Artificial Sequence: Synthetic oligonucleotide
aaagcuccgg

SEQ ID NO: 113988 - RNA, 12 nt, Artificial Sequence
  Description of Artificial Sequence: Synthetic oligonucleotide
gucaacagucug

SEQ ID NO: 113989 - RNA, 12 nt, Artificial Sequence
  Description of Artificial Sequence: Synthetic oligonucleotide
agaguucaaaag

SEQ ID NO: 113990 - RNA, 12 nt, Artificial Sequence
  Description of Artificial Sequence: Synthetic oligonucleotide
gaguucaaaagc

SEQ ID NO: 113991 - RNA, 11 nt, Artificial Sequence
  Description of Artificial Sequence: Synthetic oligonucleotide
ucaaaagcccu

SEQ ID NO: 113992 - RNA, 11 nt, Artificial Sequence
  Description of Artificial Sequence: Synthetic oligonucleotide
caaaagcccuu

SEQ ID NO: 113993 - RNA, 11 nt, Artificial Sequence
  Description of Artificial Sequence: Synthetic oligonucleotide
aaagcccuuca

SEQ ID NO: 113994 - RNA, 11 nt, Artificial Sequence
  Description of Artificial Sequence: Synthetic oligonucleotide
aagcccuucag

SEQ ID NO: 113995 - RNA, 12 nt, Artificial Sequence
  Description of Artificial Sequence: Synthetic oligonucleotide
ugaagccgcucg

SEQ ID NO: 113996 - RNA, 11 nt, Artificial Sequence
  Description of Artificial Sequence: Synthetic oligonucleotide
acgccagucaa

SEQ ID NO: 113997 - RNA, 12 nt, Artificial Sequence
  Description of Artificial Sequence: Synthetic oligonucleotide
ucuuggugcgug

SEQ ID NO: 113998 - RNA, 13 nt, Artificial Sequence
  Description of Artificial Sequence: Synthetic oligonucleotide
uuggauucaucag

SEQ ID NO: 113999 - RNA, 12 nt, Artificial Sequence
  Description of Artificial Sequence: Synthetic oligonucleotide
ggaauaccuaag

SEQ ID NO: 114000 - RNA, 11 nt, Artificial Sequence
  Description of Artificial Sequence: Synthetic oligonucleotide
uuugaggcuca

SEQ ID NO: 114001 - RNA, 10 nt, Artificial Sequence
  Description of Artificial Sequence: Synthetic oligonucleotide
cuacaauugg

SEQ ID NO: 114002 - RNA, 11 nt, Artificial Sequence
  Description of Artificial Sequence: Synthetic oligonucleotide
aguuaggagcc

SEQ ID NO: 114003 - RNA, 12 nt, Artificial Sequence
  Description of Artificial Sequence: Synthetic oligonucleotide
gucaauauccac

SEQ ID NO: 114004 - RNA, 12 nt, Artificial Sequence
  Description of Artificial Sequence: Synthetic oligonucleotide
uguucagucaca

SEQ ID NO: 114005 - RNA, 11 nt, Artificial Sequence
  Description of Artificial Sequence: Synthetic oligonucleotide
cacacacauac

SEQ ID NO: 114006 - RNA, 11 nt, Artificial Sequence
  Description of Artificial Sequence: Synthetic oligonucleotide
uccuuuugcuu

SEQ ID NO: 114007 - RNA, 15 nt, Artificial Sequence
  Description of Artificial Sequence: Synthetic oligonucleotide
uuuaaaguaauuuuu

SEQ ID NO: 114008 - RNA, 12 nt, Artificial Sequence
  Description of Artificial Sequence: Synthetic oligonucleotide
aacagucaaugg

SEQ ID NO: 114009 - RNA, 12 nt, Artificial Sequence
  Description of Artificial Sequence: Synthetic oligonucleotide
cgacaaaccaau

SEQ ID NO: 114010 - RNA, 11 nt, Artificial Sequence
  Description of Artificial Sequence: Synthetic oligonucleotide
cugcuaccacu

SEQ ID NO: 114011 - RNA, 12 nt, Artificial Sequence
  Description of Artificial Sequence: Synthetic oligonucleotide
caagcggucuua

SEQ ID NO: 114012 - RNA, 12 nt, Artificial Sequence
  Description of Artificial Sequence: Synthetic oligonucleotide
gucuuaccggcu

SEQ ID NO: 114013 - RNA, 10 nt, Artificial Sequence
  Description of Artificial Sequence: Synthetic oligonucleotide
auggguuacc

SEQ ID NO: 114014 - RNA, 10 nt, Artificial Sequence
  Description of Artificial Sequence: Synthetic oligonucleotide
uuaccugcga

SEQ ID NO: 114015 - RNA, 11 nt, Artificial Sequence
  Description of Artificial Sequence: Synthetic oligonucleotide
aucuugcugag

SEQ ID NO: 114016 - RNA, 12 nt, Artificial Sequence
  Description of Artificial Sequence: Synthetic oligonucleotide
gcauaaaacagu

SEQ ID NO: 114017 - RNA, 11 nt, Artificial Sequence
  Description of Artificial Sequence: Synthetic oligonucleotide
uccuuuauccu

SEQ ID NO: 114018 - RNA, 11 nt, Artificial Sequence
  Description of Artificial Sequence: Synthetic oligonucleotide
aacgcaaguug

SEQ ID NO: 114019 - RNA, 12 nt, Artificial Sequence
  Description of Artificial Sequence: Synthetic oligonucleotide
aacugaaaccau

SEQ ID NO: 114020 - RNA, 13 nt, Artificial Sequence
  Description of Artificial Sequence: Synthetic oligonucleotide
cuuuguuaaauau

SEQ ID NO: 114021 - RNA, 13 nt, Artificial Sequence
  Description of Artificial Sequence: Synthetic oligonucleotide
uauauuaaaaguu

SEQ ID NO: 114022 - RNA, 12 nt, Artificial Sequence
  Description of Artificial Sequence: Synthetic oligonucleotide
uuuugacuuaac

SEQ ID NO: 114023 - RNA, 12 nt, Artificial Sequence
  Description of Artificial Sequence: Synthetic oligonucleotide
caaacucagcac

SEQ ID NO: 114024 - RNA, 10 nt, Artificial Sequence
  Description of Artificial Sequence: Synthetic oligonucleotide
gcugaccuca

SEQ ID NO: 114025 - RNA, 13 nt, Artificial Sequence
  Description of Artificial Sequence: Synthetic oligonucleotide
uuauucagaucgc

SEQ ID NO: 114026 - RNA, 12 nt, Artificial Sequence
  Description of Artificial Sequence: Synthetic oligonucleotide
ggguucugggau

SEQ ID NO: 114027 - RNA, 14 nt, Artificial Sequence
  Description of Artificial Sequence: Synthetic oligonucleotide
uauuggaaauuaug

SEQ ID NO: 114028 - RNA, 12 nt, Artificial Sequence
  Description of Artificial Sequence: Synthetic oligonucleotide
uggaagcacuag

SEQ ID NO: 114029 - RNA, 12 nt, Artificial Sequence
  Description of Artificial Sequence: Synthetic oligonucleotide
uuuuuaugugga

SEQ ID NO: 114030 - RNA, 11 nt, Artificial Sequence
  Description of Artificial Sequence: Synthetic oligonucleotide
gaauugguaga

SEQ ID NO: 114031 - RNA, 12 nt, Artificial Sequence
  Description of Artificial Sequence: Synthetic oligonucleotide
uagacuuggaga

SEQ ID NO: 114032 - RNA, 12 nt, Artificial Sequence
  Description of Artificial Sequence: Synthetic oligonucleotide
uacaguauucca

SEQ ID NO: 114033 - RNA, 14 nt, Artificial Sequence
  Description of Artificial Sequence: Synthetic oligonucleotide
cacugaugaauuaa

SEQ ID NO: 114034 - RNA, 11 nt, Artificial Sequence
  Description of Artificial Sequence: Synthetic oligonucleotide
cacaucaucac

SEQ ID NO: 114035 - RNA, 12 nt, Artificial Sequence
  Description of Artificial Sequence: Synthetic oligonucleotide
ucaccaaacaga

SEQ ID NO: 114036 - RNA, 11 nt, Artificial Sequence
  Description of Artificial Sequence: Synthetic oligonucleotide
gaacaugaugg

SEQ ID NO: 114037 - RNA, 11 nt, Artificial Sequence
  Description of Artificial Sequence: Synthetic oligonucleotide
auguagacugc

SEQ ID NO: 114038 - RNA, 12 nt, Artificial Sequence
  Description of Artificial Sequence: Synthetic oligonucleotide
gaucuauuuaug

SEQ ID NO: 114039 - RNA, 11 nt, Artificial Sequence
  Description of Artificial Sequence: Synthetic oligonucleotide
cacuauuauca

SEQ ID NO: 114040 - RNA, 10 nt, Artificial Sequence
  Description of Artificial Sequence: Synthetic oligonucleotide
ucaguucugc

SEQ ID NO: 114041 - RNA, 12 nt, Artificial Sequence
  Description of Artificial Sequence: Synthetic oligonucleotide
gauuaaaccuac

SEQ ID NO: 114042 - RNA, 12 nt, Artificial Sequence
  Description of Artificial Sequence: Synthetic oligonucleotide
uaaaauccuucu

SEQ ID NO: 114043 - RNA, 11 nt, Artificial Sequence
  Description of Artificial Sequence: Synthetic oligonucleotide
augcuguagac

SEQ ID NO: 114044 - RNA, 12 nt, Artificial Sequence
  Description of Artificial Sequence: Synthetic oligonucleotide
ugauaggaauag

SEQ ID NO: 114045 - RNA, 10 nt, Artificial Sequence
  Description of Artificial Sequence: Synthetic oligonucleotide
auggcccuga

SEQ ID NO: 114046 - RNA, 10 nt, Artificial Sequence
  Description of Artificial Sequence: Synthetic oligonucleotide
uccucaagca

SEQ ID NO: 114047 - RNA, 9 nt, Artificial Sequence
  Description of Artificial Sequence: Synthetic oligonucleotide
uucagccca

SEQ ID NO: 114048 - RNA, 10 nt, Artificial Sequence
  Description of Artificial Sequence: Synthetic oligonucleotide
cugcugaacc

SEQ ID NO: 114049 - RNA, 11 nt, Artificial Sequence
  Description of Artificial Sequence: Synthetic oligonucleotide
aguucucuuca

SEQ ID NO: 114050 - RNA, 10 nt, Artificial Sequence
  Description of Artificial Sequence: Synthetic oligonucleotide
cagccuagag

SEQ ID NO: 114051 - RNA, 12 nt, Artificial Sequence
  Description of Artificial Sequence: Synthetic oligonucleotide
ucugugaagugu

SEQ ID NO: 114052 - RNA, 13 nt, Artificial Sequence
  Description of Artificial Sequence: Synthetic oligonucleotide
gagaaaauuucaa

SEQ ID NO: 114053 - RNA, 10 nt, Artificial Sequence
  Description of Artificial Sequence: Synthetic oligonucleotide
auccuccuga

SEQ ID NO: 114054 - RNA, 11 nt, Artificial Sequence
  Description of Artificial Sequence: Synthetic oligonucleotide
ugacaucauau

SEQ ID NO: 114055 - RNA, 12 nt, Artificial Sequence
  Description of Artificial Sequence: Synthetic oligonucleotide
aucuucaucaua

SEQ ID NO: 114056 - RNA, 12 nt, Artificial Sequence
  Description of Artificial Sequence: Synthetic oligonucleotide
acuagcuauuaa

SEQ ID NO: 114057 - RNA, 13 nt, Artificial Sequence
  Description of Artificial Sequence: Synthetic oligonucleotide
cucuacuaaaaau

SEQ ID NO: 114058 - RNA, 11 nt, Artificial Sequence
  Description of Artificial Sequence: Synthetic oligonucleotide
cuaucucgccu

SEQ ID NO: 114059 - RNA, 12 nt, Artificial Sequence
  Description of Artificial Sequence: Synthetic oligonucleotide
uucgguccaguu

SEQ ID NO: 114060 - RNA, 10 nt, Artificial Sequence
  Description of Artificial Sequence: Synthetic oligonucleotide
auguagccgc

SEQ ID NO: 114061 - RNA, 11 nt, Artificial Sequence
  Description of Artificial Sequence: Synthetic oligonucleotide
gaggagacuug

SEQ ID NO: 114062 - RNA, 11 nt, Artificial Sequence
  Description of Artificial Sequence: Synthetic oligonucleotide
aguagugagga

SEQ ID NO: 114063 - RNA, 13 nt, Artificial Sequence
  Description of Artificial Sequence: Synthetic oligonucleotide
agaugaguacaaa

SEQ ID NO: 114064 - RNA, 12 nt, Artificial Sequence
  Description of Artificial Sequence: Synthetic oligonucleotide
uuguuaaugggc

SEQ ID NO: 114065 - RNA, 12 nt, Artificial Sequence
  Description of Artificial Sequence: Synthetic oligonucleotide
uuuuaauuuauu

SEQ ID NO: 114066 - RNA, 11 nt, Artificial Sequence
  Description of Artificial Sequence: Synthetic oligonucleotide
auuuaaauaug

SEQ ID NO: 114067 - RNA, 12 nt, Artificial Sequence
  Description of Artificial Sequence: Synthetic oligonucleotide
auccuuuguuuc

SEQ ID NO: 114068 - RNA, 13 nt, Artificial Sequence
  Description of Artificial Sequence: Synthetic oligonucleotide
gucuaaguguuug

SEQ ID NO: 114069 - RNA, 11 nt, Artificial Sequence
  Description of Artificial Sequence: Synthetic oligonucleotide
ccugugacaaa

SEQ ID NO: 114070 - RNA, 12 nt, Artificial Sequence
  Description of Artificial Sequence: Synthetic oligonucleotide
caggcugaauua

SEQ ID NO: 114071 - RNA, 13 nt, Artificial Sequence
  Description of Artificial Sequence: Synthetic oligonucleotide
ucauucuuacaau

SEQ ID NO: 114072 - RNA, 14 nt, Artificial Sequence
  Description of Artificial Sequence: Synthetic oligonucleotide
cauucuuacaauug

SEQ ID NO: 114073 - RNA, 11 nt, Artificial Sequence
  Description of Artificial Sequence: Synthetic oligonucleotide
agagaguguac

SEQ ID NO: 114074 - RNA, 11 nt, Artificial Sequence
  Description of Artificial Sequence: Synthetic oligonucleotide
gaacucagcag

SEQ ID NO: 114075 - RNA, 12 nt, Artificial Sequence
  Description of Artificial Sequence: Synthetic oligonucleotide
uuauuuucagua

SEQ ID NO: 114076 - RNA, 11 nt, Artificial Sequence
  Description of Artificial Sequence: Synthetic oligonucleotide
cuuaaauggaa

SEQ ID NO: 114077 - RNA, 12 nt, Artificial Sequence
  Description of Artificial Sequence: Synthetic oligonucleotide
gccuaaaauugu

SEQ ID NO: 114078 - RNA, 12 nt, Artificial Sequence
  Description of Artificial Sequence: Synthetic oligonucleotide
acuaacaucugg

SEQ ID NO: 114079 - RNA, 11 nt, Artificial Sequence
  Description of Artificial Sequence: Synthetic oligonucleotide
gacugugagcu

SEQ ID NO: 114080 - RNA, 13 nt, Artificial Sequence
  Description of Artificial Sequence: Synthetic oligonucleotide
gcuuuuuauuaau

SEQ ID NO: 114081 - RNA, 12 nt, Artificial Sequence
  Description of Artificial Sequence: Synthetic oligonucleotide
ucuucuuacauu

SEQ ID NO: 114082 - RNA, 14 nt, Artificial Sequence
  Description of Artificial Sequence: Synthetic oligonucleotide
auuuguaaaaaugu

SEQ ID NO: 114083 - RNA, 14 nt, Artificial Sequence
  Description of Artificial Sequence: Synthetic oligonucleotide
ucuuaauucauauu

SEQ ID NO: 114084 - RNA, 12 nt, Artificial Sequence
  Description of Artificial Sequence: Synthetic oligonucleotide
aacuaaucauga

SEQ ID NO: 114085 - RNA, 11 nt, Artificial Sequence
  Description of Artificial Sequence: Synthetic oligonucleotide
cugcucuuggg

SEQ ID NO: 114086 - RNA, 12 nt, Artificial Sequence
  Description of Artificial Sequence: Synthetic oligonucleotide
aguagcuuugag

SEQ ID NO: 114087 - RNA, 13 nt, Artificial Sequence
  Description of Artificial Sequence: Synthetic oligonucleotide
acguaauauuuca

SEQ ID NO: 114088 - RNA, 12 nt, Artificial Sequence
  Description of Artificial Sequence: Synthetic oligonucleotide
auucucuucacu

SEQ ID NO: 114089 - RNA, 13 nt, Artificial Sequence
  Description of Artificial Sequence: Synthetic oligonucleotide
uaaugcuaagaaa

SEQ ID NO: 114090 - RNA, 11 nt, Artificial Sequence
  Description of Artificial Sequence: Synthetic oligonucleotide
cugaaaaucaa

SEQ ID NO: 114091 - RNA, 13 nt, Artificial Sequence
  Description of Artificial Sequence: Synthetic oligonucleotide
auaugauuacuuu

SEQ ID NO: 114092 - RNA, 13 nt, Artificial Sequence
  Description of Artificial Sequence: Synthetic oligonucleotide
auuuuguucuaca

SEQ ID NO: 114093 - RNA, 11 nt, Artificial Sequence
  Description of Artificial Sequence: Synthetic oligonucleotide
ccgggacucuc

SEQ ID NO: 114094 - RNA, 13 nt, Artificial Sequence
  Description of Artificial Sequence: Synthetic oligonucleotide
cuuuaaaguaaag

SEQ ID NO: 114095 - RNA, 12 nt, Artificial Sequence
  Description of Artificial Sequence: Synthetic oligonucleotide
cuggaagccugg

SEQ ID NO: 114096 - RNA, 13 nt, Artificial Sequence
  Description of Artificial Sequence: Synthetic oligonucleotide
aaacaaaagagag

SEQ ID NO: 114097 - RNA, 12 nt, Artificial Sequence
  Description of Artificial Sequence: Synthetic oligonucleotide
ucaguuaugccg

SEQ ID NO: 114098 - RNA, 12 nt, Artificial Sequence
  Description of Artificial Sequence: Synthetic oligonucleotide
aaaagaagucca

SEQ ID NO: 114099 - RNA, 10 nt, Artificial Sequence
  Description of Artificial Sequence: Synthetic oligonucleotide
ggugagguua

SEQ ID NO: 114100 - RNA, 10 nt, Artificial Sequence
  Description of Artificial Sequence: Synthetic oligonucleotide
ggaagaggac

SEQ ID NO: 114101 - RNA, 12 nt, Artificial Sequence
  Description of Artificial Sequence: Synthetic oligonucleotide
agcaaguauugu

SEQ ID NO: 114102 - RNA, 11 nt, Artificial Sequence
  Description of Artificial Sequence: Synthetic oligonucleotide
uuguagcacuc

SEQ ID NO: 114103 - RNA, 13 nt, Artificial Sequence
  Description of Artificial Sequence: Synthetic oligonucleotide
caaaaccacaaau

SEQ ID NO: 114104 - RNA, 11 nt, Artificial Sequence
  Description of Artificial Sequence: Synthetic oligonucleotide
aagcccauaca

SEQ ID NO: 114105 - RNA, 10 nt, Artificial Sequence
  Description of Artificial Sequence: Synthetic oligonucleotide
gcccauacag

SEQ ID NO: 114106 - RNA, 11 nt, Artificial Sequence
  Description of Artificial Sequence: Synthetic oligonucleotide
agaaaccuucc

SEQ ID NO: 114107 - RNA, 9 nt, Artificial Sequence
  Description of Artificial Sequence: Synthetic oligonucleotide
uauaccuac

SEQ ID NO: 114108 - RNA, 12 nt, Artificial Sequence
  Description of Artificial Sequence: Synthetic oligonucleotide
ccaguuuucgga

SEQ ID NO: 114109 - RNA, 8 nt, Artificial Sequence
  Description of Artificial Sequence: Synthetic oligonucleotide
gaacaggg

SEQ ID NO: 114110 - RNA, 12 nt, Artificial Sequence
  Description of Artificial Sequence: Synthetic oligonucleotide
uaacuuuccagu

SEQ ID NO: 114111 - RNA, 13 nt, Artificial Sequence
  Description of Artificial Sequence: Synthetic oligonucleotide
aaguuugguuuug

SEQ ID NO: 114112 - RNA, 11 nt, Artificial Sequence
  Description of Artificial Sequence: Synthetic oligonucleotide
uucccacugua

SEQ ID NO: 114113 - RNA, 12 nt, Artificial Sequence
  Description of Artificial Sequence: Synthetic oligonucleotide
gauaccauauga

SEQ ID NO: 114114 - RNA, 10 nt, Artificial Sequence
  Description of Artificial Sequence: Synthetic oligonucleotide
acaugggcug

SEQ ID NO: 114115 - RNA, 12 nt, Artificial Sequence
  Description of Artificial Sequence: Synthetic oligonucleotide
aacuuuuucaua

SEQ ID NO: 114116 - RNA, 11 nt, Artificial Sequence
  Description of Artificial Sequence: Synthetic oligonucleotide
augaggccgga

SEQ ID NO: 114117 - RNA, 10 nt, Artificial Sequence
  Description of Artificial Sequence: Synthetic oligonucleotide
cugcauuugu

SEQ ID NO: 114118 - RNA, 12 nt, Artificial Sequence
  Description of Artificial Sequence: Synthetic oligonucleotide
auguuuacuacc

SEQ ID NO: 114119 - RNA, 14 nt, Artificial Sequence
  Description of Artificial Sequence: Synthetic oligonucleotide
auuuuuugaugaaa

SEQ ID NO: 114120 - RNA, 13 nt, Artificial Sequence
  Description of Artificial Sequence: Synthetic oligonucleotide
agugugugaauuu

SEQ ID NO: 114121 - RNA, 12 nt, Artificial Sequence
  Description of Artificial Sequence: Synthetic oligonucleotide
agcaauguaugu

SEQ ID NO: 114122 - RNA, 13 nt, Artificial Sequence
  Description of Artificial Sequence: Synthetic oligonucleotide
aagcacauauaua

SEQ ID NO: 114123 - RNA, 13 nt, Artificial Sequence
  Description of Artificial Sequence: Synthetic oligonucleotide
uaauaguuucucc

SEQ ID NO: 114124 - RNA, 12 nt, Artificial Sequence
  Description of Artificial Sequence: Synthetic oligonucleotide
guuucuccaaau

SEQ ID NO: 114125 - RNA, 12 nt, Artificial Sequence
  Description of Artificial Sequence: Synthetic oligonucleotide
acuuccuagaaa

SEQ ID NO: 114126 - RNA, 12 nt, Artificial Sequence
  Description of Artificial Sequence: Synthetic oligonucleotide
acaccauauaug

SEQ ID NO: 114127 - RNA, 13 nt, Artificial Sequence
  Description of Artificial Sequence: Synthetic oligonucleotide
uauaugaauggag

SEQ ID NO: 114128 - RNA, 12 nt, Artificial Sequence
  Description of Artificial Sequence: Synthetic oligonucleotide
cauuuacaggga

SEQ ID NO: 114129 - RNA, 12 nt, Artificial Sequence
  Description of Artificial Sequence: Synthetic oligonucleotide
auuuacagggac

SEQ ID NO: 114130 - RNA, 9 nt, Artificial Sequence
  Description of Artificial Sequence: Synthetic oligonucleotide
gggaccuga

SEQ ID NO: 114131 - RNA, 13 nt, Artificial Sequence
  Description of Artificial Sequence: Synthetic oligonucleotide
guuugacugcauc

SEQ ID NO: 114132 - RNA, 12 nt, Artificial Sequence
  Description of Artificial Sequence: Synthetic oligonucleotide
uugacugcaucg

SEQ ID NO: 114133 - RNA, 11 nt, Artificial Sequence
  Description of Artificial Sequence: Synthetic oligonucleotide
aguucacaggg

SEQ ID NO: 114134 - RNA, 12 nt, Artificial Sequence
  Description of Artificial Sequence: Synthetic oligonucleotide
gcaccucugucc

SEQ ID NO: 114135 - RNA, 14 nt, Artificial Sequence
  Description of Artificial Sequence: Synthetic oligonucleotide
guuugucuuuuuaa

SEQ ID NO: 114136 - RNA, 13 nt, Artificial Sequence
  Description of Artificial Sequence: Synthetic oligonucleotide
uugucuuuuuaag

SEQ ID NO: 114137 - RNA, 12 nt, Artificial Sequence
  Description of Artificial Sequence: Synthetic oligonucleotide
cuaaagguuguc

SEQ ID NO: 114138 - RNA, 11 nt, Artificial Sequence
  Description of Artificial Sequence: Synthetic oligonucleotide
agguugucgac

SEQ ID NO: 114139 - RNA, 12 nt, Artificial Sequence
  Description of Artificial Sequence: Synthetic oligonucleotide
ccuggcaauugu

SEQ ID NO: 114140 - RNA, 11 nt, Artificial Sequence
  Description of Artificial Sequence: Synthetic oligonucleotide
guggugcgagg

SEQ ID NO: 114141 - RNA, 12 nt, Artificial Sequence
  Description of Artificial Sequence: Synthetic oligonucleotide
gagacaugaaau

SEQ ID NO: 114142 - RNA, 12 nt, Artificial Sequence
  Description of Artificial Sequence: Synthetic oligonucleotide
uauauuucucca

SEQ ID NO: 114143 - RNA, 9 nt, Artificial Sequence
  Description of Artificial Sequence: Synthetic oligonucleotide
augaaggcu

SEQ ID NO: 114144 - RNA, 10 nt, Artificial Sequence
  Description of Artificial Sequence: Synthetic oligonucleotide
cuggaguggu

SEQ ID NO: 114145 - RNA, 10 nt, Artificial Sequence
  Description of Artificial Sequence: Synthetic oligonucleotide
ggaagagagg

SEQ ID NO: 114146 - RNA, 11 nt, Artificial Sequence
  Description of Artificial Sequence: Synthetic oligonucleotide
uugcaucgggc

SEQ ID NO: 114147 - RNA, 12 nt, Artificial Sequence
  Description of Artificial Sequence: Synthetic oligonucleotide
uauccuacugug

SEQ ID NO: 114148 - RNA, 12 nt, Artificial Sequence
  Description of Artificial Sequence: Synthetic oligonucleotide
ccuacuguguaa

SEQ ID NO: 114149 - RNA, 11 nt, Artificial Sequence
  Description of Artificial Sequence: Synthetic oligonucleotide
cuuguagugua

SEQ ID NO: 114150 - RNA, 12 nt, Artificial Sequence
  Description of Artificial Sequence: Synthetic oligonucleotide
cuuuguugauug

SEQ ID NO: 114151 - RNA, 13 nt, Artificial Sequence
  Description of Artificial Sequence: Synthetic oligonucleotide
uuguugauugaaa

SEQ ID NO: 114152 - RNA, 14 nt, Artificial Sequence
  Description of Artificial Sequence: Synthetic oligonucleotide
ucuuuuucuuccau

SEQ ID NO: 114153 - RNA, 12 nt, Artificial Sequence
  Description of Artificial Sequence: Synthetic oligonucleotide
aucuuccuucua

SEQ ID NO: 114154 - RNA, 12 nt, Artificial Sequence
  Description of Artificial Sequence: Synthetic oligonucleotide
ugaaugcuucau

SEQ ID NO: 114155 - RNA, 12 nt, Artificial Sequence
  Description of Artificial Sequence: Synthetic oligonucleotide
gaaugcuucaug

SEQ ID NO: 114156 - RNA, 12 nt, Artificial Sequence
  Description of Artificial Sequence: Synthetic oligonucleotide
auucuacuuuga

SEQ ID NO: 114157 - RNA, 12 nt, Artificial Sequence
  Description of Artificial Sequence: Synthetic oligonucleotide
gcaacuacagac

SEQ ID NO: 114158 - RNA, 12 nt, Artificial Sequence
  Description of Artificial Sequence: Synthetic oligonucleotide
accaaggucaac

SEQ ID NO: 114159 - RNA, 12 nt, Artificial Sequence
  Description of Artificial Sequence: Synthetic oligonucleotide
gacuaucucgac

SEQ ID NO: 114160 - RNA, 12 nt, Artificial Sequence
  Description of Artificial Sequence: Synthetic oligonucleotide
accuucccaaac

SEQ ID NO: 114161 - RNA, 13 nt, Artificial Sequence
  Description of Artificial Sequence: Synthetic oligonucleotide
caagcuuagaacu

SEQ ID NO: 114162 - RNA, 14 nt, Artificial Sequence
  Description of Artificial Sequence: Synthetic oligonucleotide
gcuuagaacuuuaa

SEQ ID NO: 114163 - RNA, 13 nt, Artificial Sequence
  Description of Artificial Sequence: Synthetic oligonucleotide
aacuuuaagcaac

SEQ ID NO: 114164 - RNA, 10 nt, Artificial Sequence
  Description of Artificial Sequence: Synthetic oligonucleotide
agaccaccac

SEQ ID NO: 114165 - RNA, 13 nt, Artificial Sequence
  Description of Artificial Sequence: Synthetic oligonucleotide
cgagaaauaaagu

SEQ ID NO: 114166 - RNA, 13 nt, Artificial Sequence
  Description of Artificial Sequence: Synthetic oligonucleotide
gagaaauaaaguu

SEQ ID NO: 114167 - RNA, 11 nt, Artificial Sequence
  Description of Artificial Sequence: Synthetic oligonucleotide
ggaaaugaucc

SEQ ID NO: 114168 - RNA, 12 nt, Artificial Sequence
  Description of Artificial Sequence: Synthetic oligonucleotide
aagaaaugaaac

SEQ ID NO: 114169 - RNA, 12 nt, Artificial Sequence
  Description of Artificial Sequence: Synthetic oligonucleotide
uuuccauccucc

SEQ ID NO: 114170 - RNA, 14 nt, Artificial Sequence
  Description of Artificial Sequence: Synthetic oligonucleotide
cugaaaaucuuuga

SEQ ID NO: 114171 - RNA, 10 nt, Artificial Sequence
  Description of Artificial Sequence: Synthetic oligonucleotide
gccguucagg

SEQ ID NO: 114172 - RNA, 12 nt, Artificial Sequence
  Description of Artificial Sequence: Synthetic oligonucleotide
aggguccagaag

SEQ ID NO: 114173 - RNA, 12 nt, Artificial Sequence
  Description of Artificial Sequence: Synthetic oligonucleotide
caagacugcuug

SEQ ID NO: 114174 - RNA, 12 nt, Artificial Sequence
  Description of Artificial Sequence: Synthetic oligonucleotide
ccaugucuuugg

SEQ ID NO: 114175 - RNA, 10 nt, Artificial Sequence
  Description of Artificial Sequence: Synthetic oligonucleotide
ccugaaacac

SEQ ID NO: 114176 - RNA, 11 nt, Artificial Sequence
  Description of Artificial Sequence: Synthetic oligonucleotide
cucuguaccuc

SEQ ID NO: 114177 - RNA, 11 nt, Artificial Sequence
  Description of Artificial Sequence: Synthetic oligonucleotide
gcaagacaaga

SEQ ID NO: 114178 - RNA, 12 nt, Artificial Sequence
  Description of Artificial Sequence: Synthetic oligonucleotide
caagacaagaaa

SEQ ID NO: 114179 - RNA, 11 nt, Artificial Sequence
  Description of Artificial Sequence: Synthetic oligonucleotide
guacaagaucc

SEQ ID NO: 114180 - RNA, 11 nt, Artificial Sequence
  Description of Artificial Sequence: Synthetic oligonucleotide
guacuugcaga

SEQ ID NO: 114181 - RNA, 12 nt, Artificial Sequence
  Description of Artificial Sequence: Synthetic oligonucleotide
gaucgauacaga

SEQ ID NO: 114182 - RNA, 12 nt, Artificial Sequence
  Description of Artificial Sequence: Synthetic oligonucleotide
auaaaaauaaau

SEQ ID NO: 114183 - RNA, 12 nt, Artificial Sequence
  Description of Artificial Sequence: Synthetic oligonucleotide
aaaaauaaauau

SEQ ID NO: 114184 - RNA, 12 nt, Artificial Sequence
  Description of Artificial Sequence: Synthetic oligonucleotide
uugacugcugug

SEQ ID NO: 114185 - RNA, 12 nt, Artificial Sequence
  Description of Artificial Sequence: Synthetic oligonucleotide
gagaugagagac

SEQ ID NO: 114186 - RNA, 9 nt, Artificial Sequence
  Description of Artificial Sequence: Synthetic oligonucleotide
cccacuugg

SEQ ID NO: 114187 - RNA, 2346 nt, Homo sapiens
ccuucgcgcccugggccaucucccucccaccucccuccgcggagcagccagacagcgagggccccggccgggggcaggggggacgccccguccggggcacccccccggcucugagccgcccgcggggccggccucggcccggagcggaggaaggagucgccgaggagcagccugaggccccagagucugagacgagccgccgccgcccccgccacugcggggaggagggggaggaggagcgggaggagggacgagcuggucgggagaagaggaaaaaaacuuuugagacuuuuccguugccgcugggagccggaggcgcggggaccucuuggcgcgacgcugccccgcgaggaggcaggacuuggggaccccagaccgccucccuuugccgccggggacgcuugcucccucccugcccccuacacggcgucccucaggcgcccccauuccggaccagcccucgggagucgccgacccggccucccgcaaagacuuuuccccagaccucgggcgcacccccugcacgccgccuucauccccggccugucuccugagcccccgcgcauccuagacccuuucuccuccaggagacggaucucucuccgaccugccacagauccccuauucaagaccacccaccuucugguaccagaucgcgcccaucuagguuauuuccgugggauacugagacacccccgguccaagccuccccuccaccacugcgcccuucucccugaggaccucagcuuucccucgaggcccuccuaccuuuugccgggagacccccagccccugcaggggcggggccuccccaccacaccagcccuguucgcgcucucggcagugccggggggcgccgccucccccaugccgcccuccgggcugcggcugcugccgcugcugcuaccgcugcuguggcuacuggugcugacgccuggccggccggccgcgggacuauccaccugcaagacuaucgacauggagcuggugaagcggaagcgcaucgaggccauccgcggccagauccuguccaagcugcggcucgccagccccccgagccagggggaggugccgcccggcccgcugcccgaggccgugcucgcccuguacaacagcacccgcgaccggguggccggggagagugcagaaccggagcccgagccugaggccgacuacuacgccaaggaggucacccgcgugcuaaugguggaaacccacaacgaaaucuaugacaaguucaagcagaguacacacagcauauauauguucuucaacacaucagagcuccgagaagcgguaccugaacccguguugcucucccgggcagagcugcgucugcugaggcucaaguuaaaaguggagcagcacguggagcuguaccagaaauacagcaacaauuccuggcgauaccucagcaaccggcugcuggcacccagcgacucgccagagugguuaucuuuugaugucaccggaguugugcggcagugguugagccguggaggggaaauugagggcuuucgccuuagcgcccacugcuccugugacagcagggauaacacacugcaaguggacaucaacggguucacuaccggccgccgaggugaccuggccaccauucauggcaugaaccggccuuuccugcuucucauggccaccccgcuggagagggcccagcaucugcaaagcucccggcaccgccgagcccuggacaccaacuauugcuucagcuccacggagaagaacugcugcgugcggcagcuguacauugacuuccgcaaggaccucggcuggaaguggauccacgagcccaagggcuaccaugccaacuucugccucgggcccugccccuacauuuggagccuggacacgcaguacagcaagguccuggcccuguacaaccagcauaacccgggcgccucggcggcgccgugcugcgugccgcaggcgcuggagccgcugcccaucguguacuacgugggccgcaagcccaagguggagcagcuguccaacaugaucgugcgcuccugcaagugcagcugaggucccgccccgccccgccccgccccggcaggcccggccccaccccgccccgcccccgcugccuugcccaugggggcuguauuuaaggacacccgugccccaagcccaccuggggccccauuaaagauggagagaggacugcggaucucugugucauugggcgccugccuggggucuccaucccugacguucccccacucccacucccucucucucccucucugccuccuccugccugucugcacuauuccuuugcccggcaucaaggcacaggggaccaguggggaacacuacuguaguuagauc

SEQ ID NO: 114188 - RNA, 19 nt, Artificial Sequence
  Description of Artificial Sequence: Synthetic oligonucleotide
ccuucgcgcccugggccau

SEQ ID NO: 114189 - RNA, 19 nt, Artificial Sequence
  Description of Artificial Sequence: Synthetic oligonucleotide
ucucccucccaccucccuc

SEQ ID NO: 114190 - RNA, 19 nt, Artificial Sequence
  Description of Artificial Sequence: Synthetic oligonucleotide
ccgcggagcagccagacag

SEQ ID NO: 114191 - RNA, 19 nt, Artificial Sequence
  Description of Artificial Sequence: Synthetic oligonucleotide
gcgagggccccggccgggg

SEQ ID NO: 114192 - RNA, 19 nt, Artificial Sequence
  Description of Artificial Sequence: Synthetic oligonucleotide
ggcaggggggacgccccgu

SEQ ID NO: 114193 - RNA, 19 nt, Artificial Sequence
  Description of Artificial Sequence: Synthetic oligonucleotide
uccggggcacccccccggc

SEQ ID NO: 114194 - RNA, 19 nt, Artificial Sequence
  Description of Artificial Sequence: Synthetic oligonucleotide
cucugagccgcccgcgggg

SEQ ID NO: 114195 - RNA, 19 nt, Artificial Sequence
  Description of Artificial Sequence: Synthetic oligonucleotide
gccggccucggcccggagc

SEQ ID NO: 114196 - RNA, 19 nt, Artificial Sequence
  Description of Artificial Sequence: Synthetic oligonucleotide
cggaggaaggagucgccga

SEQ ID NO: 114197 - RNA, 19 nt, Artificial Sequence
  Description of Artificial Sequence: Synthetic oligonucleotide
aggagcagccugaggcccc

SEQ ID NO: 114198 - RNA, 19 nt, Artificial Sequence
  Description of Artificial Sequence: Synthetic oligonucleotide
cagagucugagacgagccg

SEQ ID NO: 114199 - RNA, 19 nt, Artificial Sequence
  Description of Artificial Sequence: Synthetic oligonucleotide
gccgccgcccccgccacug

SEQ ID NO: 114200 - RNA, 19 nt, Artificial Sequence
  Description of Artificial Sequence: Synthetic oligonucleotide
gcggggaggagggggagga

SEQ ID NO: 114201 - RNA, 19 nt, Artificial Sequence
  Description of Artificial Sequence: Synthetic oligonucleotide
aggagcgggaggagggacg

SEQ ID NO: 114202 - RNA, 19 nt, Artificial Sequence
  Description of Artificial Sequence: Synthetic oligonucleotide
gagcuggucgggagaagag

SEQ ID NO: 114203 - RNA, 19 nt, Artificial Sequence
  Description of Artificial Sequence: Synthetic oligonucleotide
ggaaaaaaacuuuugagac

SEQ ID NO: 114204 - RNA, 19 nt, Artificial Sequence
  Description of Artificial Sequence: Synthetic oligonucleotide
cuuuuccguugccgcuggg

SEQ ID NO: 114205 - RNA, 19 nt, Artificial Sequence
  Description of Artificial Sequence: Synthetic oligonucleotide
gagccggaggcgcggggac

SEQ ID NO: 114206 - RNA, 19 nt, Artificial Sequence
  Description of Artificial Sequence: Synthetic oligonucleotide
ccucuuggcgcgacgcugc

SEQ ID NO: 114207 - RNA, 19 nt, Artificial Sequence
  Description of Artificial Sequence: Synthetic oligonucleotide
ccccgcgaggaggcaggac

SEQ ID NO: 114208 - RNA, 19 nt, Artificial Sequence
  Description of Artificial Sequence: Synthetic oligonucleotide
cuuggggaccccagaccgc

SEQ ID NO: 114209 - RNA, 19 nt, Artificial Sequence
  Description of Artificial Sequence: Synthetic oligonucleotide
ccucccuuugccgccgggg

SEQ ID NO: 114210 - RNA, 19 nt, Artificial Sequence
  Description of Artificial Sequence: Synthetic oligonucleotide
gacgcuugcucccucccug

SEQ ID NO: 114211 - RNA, 19 nt, Artificial Sequence
  Description of Artificial Sequence: Synthetic oligonucleotide
gcccccuacacggcguccc

SEQ ID NO: 114212 - RNA, 19 nt, Artificial Sequence
  Description of Artificial Sequence: Synthetic oligonucleotide
cucaggcgcccccauuccg

SEQ ID NO: 114213 - RNA, 19 nt, Artificial Sequence
  Description of Artificial Sequence: Synthetic oligonucleotide
ggaccagcccucgggaguc

SEQ ID NO: 114214 - RNA, 19 nt, Artificial Sequence
  Description of Artificial Sequence: Synthetic oligonucleotide
cgccgacccggccucccgc

SEQ ID NO: 114215 - RNA, 19 nt, Artificial Sequence
  Description of Artificial Sequence: Synthetic oligonucleotide
caaagacuuuuccccagac

SEQ ID NO: 114216 - RNA, 19 nt, Artificial Sequence
  Description of Artificial Sequence: Synthetic oligonucleotide
ccucgggcgcacccccugc

SEQ ID NO: 114217 - RNA, 19 nt, Artificial Sequence
  Description of Artificial Sequence: Synthetic oligonucleotide
cacgccgccuucauccccg

SEQ ID NO: 114218 - RNA, 19 nt, Artificial Sequence
  Description of Artificial Sequence: Synthetic oligonucleotide
ggccugucuccugagcccc

SEQ ID NO: 114219 - RNA, 19 nt, Artificial Sequence
  Description of Artificial Sequence: Synthetic oligonucleotide
ccgcgcauccuagacccuu

SEQ ID NO: 114220 - RNA, 19 nt, Artificial Sequence
  Description of Artificial Sequence: Synthetic oligonucleotide
uucuccuccaggagacgga

SEQ ID NO: 114221 - RNA, 19 nt, Artificial Sequence
  Description of Artificial Sequence: Synthetic oligonucleotide
aucucucuccgaccugcca

SEQ ID NO: 114222 - RNA, 19 nt, Artificial Sequence
  Description of Artificial Sequence: Synthetic oligonucleotide
acagauccccuauucaaga

SEQ ID NO: 114223 - RNA, 19 nt, Artificial Sequence
  Description of Artificial Sequence: Synthetic oligonucleotide
accacccaccuucugguac

SEQ ID NO: 114224 - RNA, 19 nt, Artificial Sequence
  Description of Artificial Sequence: Synthetic oligonucleotide
ccagaucgcgcccaucuag

SEQ ID NO: 114225 - RNA, 19 nt, Artificial Sequence
  Description of Artificial Sequence: Synthetic oligonucleotide
gguuauuuccgugggauac

SEQ ID NO: 114226 - RNA, 19 nt, Artificial Sequence
  Description of Artificial Sequence: Synthetic oligonucleotide
cugagacacccccggucca

SEQ ID NO: 114227 - RNA, 19 nt, Artificial Sequence
  Description of Artificial Sequence: Synthetic oligonucleotide
aagccuccccuccaccacu

SEQ ID NO: 114228 - RNA, 19 nt, Artificial Sequence
  Description of Artificial Sequence: Synthetic oligonucleotide
ugcgcccuucucccugagg

SEQ ID NO: 114229 - RNA, 19 nt, Artificial Sequence
  Description of Artificial Sequence: Synthetic oligonucleotide
gaccucagcuuucccucga

SEQ ID NO: 114230 - RNA, 19 nt, Artificial Sequence
  Description of Artificial Sequence: Synthetic oligonucleotide
aggcccuccuaccuuuugc

SEQ ID NO: 114231 - RNA, 19 nt, Artificial Sequence
  Description of Artificial Sequence: Synthetic oligonucleotide
ccgggagacccccagcccc

SEQ ID NO: 114232 - RNA, 19 nt, Artificial Sequence
  Description of Artificial Sequence: Synthetic oligonucleotide
cugcaggggcggggccucc

SEQ ID NO: 114233 - RNA, 19 nt, Artificial Sequence
  Description of Artificial Sequence: Synthetic oligonucleotide
cccaccacaccagcccugu

SEQ ID NO: 114234 - RNA, 19 nt, Artificial Sequence
  Description of Artificial Sequence: Synthetic oligonucleotide
uucgcgcucucggcagugc

SEQ ID NO: 114235 - RNA, 19 nt, Artificial Sequence
  Description of Artificial Sequence: Synthetic oligonucleotide
ccggggggcgccgccuccc

SEQ ID NO: 114236 - RNA, 19 nt, Artificial Sequence
  Description of Artificial Sequence: Synthetic oligonucleotide
cccaugccgcccuccgggc

SEQ ID NO: 114237 - RNA, 19 nt, Artificial Sequence
  Description of Artificial Sequence: Synthetic oligonucleotide
cugcggcugcugccgcugc

SEQ ID NO: 114238 - RNA, 19 nt, Artificial Sequence
  Description of Artificial Sequence: Synthetic oligonucleotide
cugcuaccgcugcuguggc

SEQ ID NO: 114239 - RNA, 19 nt, Artificial Sequence
  Description of Artificial Sequence: Synthetic oligonucleotide
cuacuggugcugacgccug

SEQ ID NO: 114240 - RNA, 19 nt, Artificial Sequence
  Description of Artificial Sequence: Synthetic oligonucleotide
ggccggccggccgcgggac

SEQ ID NO: 114241 - RNA, 19 nt, Artificial Sequence
  Description of Artificial Sequence: Synthetic oligonucleotide
cuauccaccugcaagacua

SEQ ID NO: 114242 - RNA, 19 nt, Artificial Sequence
  Description of Artificial Sequence: Synthetic oligonucleotide
aucgacauggagcugguga

SEQ ID NO: 114243 - RNA, 19 nt, Artificial Sequence
  Description of Artificial Sequence: Synthetic oligonucleotide
aagcggaagcgcaucgagg

SEQ ID NO: 114244 - RNA, 19 nt, Artificial Sequence
  Description of Artificial Sequence: Synthetic oligonucleotide
gccauccgcggccagaucc

SEQ ID NO: 114245 - RNA, 19 nt, Artificial Sequence
  Description of Artificial Sequence: Synthetic oligonucleotide
cuguccaagcugcggcucg

SEQ ID NO: 114246 - RNA, 19 nt, Artificial Sequence
  Description of Artificial Sequence: Synthetic oligonucleotide
gccagccccccgagccagg

SEQ ID NO: 114247 - RNA, 19 nt, Artificial Sequence
  Description of Artificial Sequence: Synthetic oligonucleotide
ggggaggugccgcccggcc

SEQ ID NO: 114248 - RNA, 19 nt, Artificial Sequence
  Description of Artificial Sequence: Synthetic oligonucleotide
ccgcugcccgaggccgugc

SEQ ID NO: 114249 - RNA, 19 nt, Artificial Sequence
  Description of Artificial Sequence: Synthetic oligonucleotide
cucgcccuguacaacagca

SEQ ID NO: 114250 - RNA, 19 nt, Artificial Sequence
  Description of Artificial Sequence: Synthetic oligonucleotide
acccgcgaccggguggccg

SEQ ID NO: 114251 - RNA, 19 nt, Artificial Sequence
  Description of Artificial Sequence: Synthetic oligonucleotide
ggggagagugcagaaccgg

SEQ ID NO: 114252 - RNA, 19 nt, Artificial Sequence
  Description of Artificial Sequence: Synthetic oligonucleotide
gagcccgagccugaggccg

SEQ ID NO: 114253 - RNA, 19 nt, Artificial Sequence
  Description of Artificial Sequence: Synthetic oligonucleotide
gacuacuacgccaaggagg

SEQ ID NO: 114254 - RNA, 19 nt, Artificial Sequence
  Description of Artificial Sequence: Synthetic oligonucleotide
gucacccgcgugcuaaugg

SEQ ID NO: 114255 - RNA, 19 nt, Artificial Sequence
  Description of Artificial Sequence: Synthetic oligonucleotide
guggaaacccacaacgaaa

SEQ ID NO: 114256 - RNA, 19 nt, Artificial Sequence
  Description of Artificial Sequence: Synthetic oligonucleotide
aucuaugacaaguucaagc

SEQ ID NO: 114257 - RNA, 19 nt, Artificial Sequence
  Description of Artificial Sequence: Synthetic oligonucleotide
cagaguacacacagcauau

SEQ ID NO: 114258 - RNA, 19 nt, Artificial Sequence
  Description of Artificial Sequence: Synthetic oligonucleotide
uauauguucuucaacacau

SEQ ID NO: 114259 - RNA, 19 nt, Artificial Sequence
  Description of Artificial Sequence: Synthetic oligonucleotide
ucagagcuccgagaagcgg

SEQ ID NO: 114260 - RNA, 19 nt, Artificial Sequence
  Description of Artificial Sequence: Synthetic oligonucleotide
guaccugaacccguguugc

SEQ ID NO: 114261 - RNA, 19 nt, Artificial Sequence
  Description of Artificial Sequence: Synthetic oligonucleotide
cucucccgggcagagcugc

SEQ ID NO: 114262 - RNA, 19 nt, Artificial Sequence
  Description of Artificial Sequence: Synthetic oligonucleotide
cgucugcugaggcucaagu

SEQ ID NO: 114263 - RNA, 19 nt, Artificial Sequence
  Description of Artificial Sequence: Synthetic oligonucleotide
uuaaaaguggagcagcacg

SEQ ID NO: 114264 - RNA, 19 nt, Artificial Sequence
  Description of Artificial Sequence: Synthetic oligonucleotide
guggagcuguaccagaaau

SEQ ID NO: 114265 - RNA, 19 nt, Artificial Sequence
  Description of Artificial Sequence: Synthetic oligonucleotide
uacagcaacaauuccuggc

SEQ ID NO: 114266 - RNA, 19 nt, Artificial Sequence
  Description of Artificial Sequence: Synthetic oligonucleotide
cgauaccucagcaaccggc

SEQ ID NO: 114267 - RNA, 19 nt, Artificial Sequence
  Description of Artificial Sequence: Synthetic oligonucleotide
cugcuggcacccagcgacu

SEQ ID NO: 114268 - RNA, 19 nt, Artificial Sequence
  Description of Artificial Sequence: Synthetic oligonucleotide
ucgccagagugguuaucuu

SEQ ID NO: 114269 - RNA, 19 nt, Artificial Sequence
  Description of Artificial Sequence: Synthetic oligonucleotide
uuugaugucaccggaguug

SEQ ID NO: 114270 - RNA, 19 nt, Artificial Sequence
  Description of Artificial Sequence: Synthetic oligonucleotide
gugcggcagugguugagcc

SEQ ID NO: 114271 - RNA, 19 nt, Artificial Sequence
  Description of Artificial Sequence: Synthetic oligonucleotide
cguggaggggaaauugagg

SEQ ID NO: 114272 - RNA, 19 nt, Artificial Sequence
  Description of Artificial Sequence: Synthetic oligonucleotide
ggcuuucgccuuagcgccc

SEQ ID NO: 114273 - RNA, 19 nt, Artificial Sequence
  Description of Artificial Sequence: Synthetic oligonucleotide
cacugcuccugugacagca

SEQ ID NO: 114274 - RNA, 19 nt, Artificial Sequence
  Description of Artificial Sequence: Synthetic oligonucleotide
agggauaacacacugcaag

SEQ ID NO: 114275 - RNA, 19 nt, Artificial Sequence
  Description of Artificial Sequence: Synthetic oligonucleotide
guggacaucaacggguuca

SEQ ID NO: 114276 - RNA, 19 nt, Artificial Sequence
  Description of Artificial Sequence: Synthetic oligonucleotide
acuaccggccgccgaggug

SEQ ID NO: 114277 - RNA, 19 nt, Artificial Sequence
  Description of Artificial Sequence: Synthetic oligonucleotide
gaccuggccaccauucaug

SEQ ID NO: 114278 - RNA, 19 nt, Artificial Sequence
  Description of Artificial Sequence: Synthetic oligonucleotide
ggcaugaaccggccuuucc

SEQ ID NO: 114279 - RNA, 19 nt, Artificial Sequence
  Description of Artificial Sequence: Synthetic oligonucleotide
cugcuucucauggccaccc

SEQ ID NO: 114280 - RNA, 19 nt, Artificial Sequence
  Description of Artificial Sequence: Synthetic oligonucleotide
ccgcuggagagggcccagc

SEQ ID NO: 114281 - RNA, 19 nt, Artificial Sequence
  Description of Artificial Sequence: Synthetic oligonucleotide
caucugcaaagcucccggc

SEQ ID NO: 114282 - RNA, 19 nt, Artificial Sequence
  Description of Artificial Sequence: Synthetic oligonucleotide
caccgccgagcccuggaca

SEQ ID NO: 114283 - RNA, 19 nt, Artificial Sequence
  Description of Artificial Sequence: Synthetic oligonucleotide
accaacuauugcuucagcu

SEQ ID NO: 114284 - RNA, 19 nt, Artificial Sequence
  Description of Artificial Sequence: Synthetic oligonucleotide
uccacggagaagaacugcu

SEQ ID NO: 114285 - RNA, 19 nt, Artificial Sequence
  Description of Artificial Sequence: Synthetic oligonucleotide
ugcgugcggcagcuguaca

SEQ ID NO: 114286 - RNA, 19 nt, Artificial Sequence
  Description of Artificial Sequence: Synthetic oligonucleotide
auugacuuccgcaaggacc

SEQ ID NO: 114287 - RNA, 19 nt, Artificial Sequence
  Description of Artificial Sequence: Synthetic oligonucleotide
cucggcuggaaguggaucc

SEQ ID NO: 114288 - RNA, 19 nt, Artificial Sequence
  Description of Artificial Sequence: Synthetic oligonucleotide
cacgagcccaagggcuacc

SEQ ID NO: 114289 - RNA, 19 nt, Artificial Sequence
  Description of Artificial Sequence: Synthetic oligonucleotide
caugccaacuucugccucg

SEQ ID NO: 114290 - RNA, 19 nt, Artificial Sequence
  Description of Artificial Sequence: Synthetic oligonucleotide
gggcccugccccuacauuu

SEQ ID NO: 114291 - RNA, 19 nt, Artificial Sequence
  Description of Artificial Sequence: Synthetic oligonucleotide
uggagccuggacacgcagu

SEQ ID NO: 114292 - RNA, 19 nt, Artificial Sequence
  Description of Artificial Sequence: Synthetic oligonucleotide
uacagcaagguccuggccc

SEQ ID NO: 114293 - RNA, 19 nt, Artificial Sequence
  Description of Artificial Sequence: Synthetic oligonucleotide
cuguacaaccagcauaacc

SEQ ID NO: 114294 - RNA, 19 nt, Artificial Sequence
  Description of Artificial Sequence: Synthetic oligonucleotide
ccgggcgccucggcggcgc

SEQ ID NO: 114295 - RNA, 19 nt, Artificial Sequence
  Description of Artificial Sequence: Synthetic oligonucleotide
ccgugcugcgugccgcagg

SEQ ID NO: 114296 - RNA, 19 nt, Artificial Sequence
  Description of Artificial Sequence: Synthetic oligonucleotide
gcgcuggagccgcugccca

SEQ ID NO: 114297 - RNA, 19 nt, Artificial Sequence
  Description of Artificial Sequence: Synthetic oligonucleotide
aucguguacuacgugggcc

SEQ ID NO: 114298 - RNA, 19 nt, Artificial Sequence
  Description of Artificial Sequence: Synthetic oligonucleotide
cgcaagcccaagguggagc

SEQ ID NO: 114299 - RNA, 19 nt, Artificial Sequence
  Description of Artificial Sequence: Synthetic oligonucleotide
cagcuguccaacaugaucg

SEQ ID NO: 114300 - RNA, 19 nt, Artificial Sequence
  Description of Artificial Sequence: Synthetic oligonucleotide
gugcgcuccugcaagugca

SEQ ID NO: 114301 - RNA, 19 nt, Artificial Sequence
  Description of Artificial Sequence: Synthetic oligonucleotide
agcugaggucccgccccgc

SEQ ID NO: 114302 - RNA, 19 nt, Artificial Sequence
  Description of Artificial Sequence: Synthetic oligonucleotide
ccccgccccgccccggcag

SEQ ID NO: 114303 - RNA, 19 nt, Artificial Sequence
  Description of Artificial Sequence: Synthetic oligonucleotide
ggcccggccccaccccgcc

SEQ ID NO: 114304 - RNA, 19 nt, Artificial Sequence
  Description of Artificial Sequence: Synthetic oligonucleotide
cccgcccccgcugccuugc

SEQ ID NO: 114305 - RNA, 19 nt, Artificial Sequence
  Description of Artificial Sequence: Synthetic oligonucleotide
cccaugggggcuguauuua

SEQ ID NO: 114306 - RNA, 19 nt, Artificial Sequence
  Description of Artificial Sequence: Synthetic oligonucleotide
aaggacacccgugccccaa

SEQ ID NO: 114307 - RNA, 19 nt, Artificial Sequence
  Description of Artificial Sequence: Synthetic oligonucleotide
agcccaccuggggccccau

SEQ ID NO: 114308 - RNA, 19 nt, Artificial Sequence
  Description of Artificial Sequence: Synthetic oligonucleotide
uuaaagauggagagaggac

SEQ ID NO: 114309 - RNA, 19 nt, Artificial Sequence
  Description of Artificial Sequence: Synthetic oligonucleotide
cugcggaucucugugucau

SEQ ID NO: 114310 - RNA, 19 nt, Artificial Sequence
  Description of Artificial Sequence: Synthetic oligonucleotide
uugggcgccugccuggggu

SEQ ID NO: 114311 - RNA, 19 nt, Artificial Sequence
  Description of Artificial Sequence: Synthetic oligonucleotide
ucuccaucccugacguucc

SEQ ID NO: 114312 - RNA, 19 nt, Artificial Sequence
  Description of Artificial Sequence: Synthetic oligonucleotide
ccccacucccacucccucu

SEQ ID NO: 114313 - RNA, 19 nt, Artificial Sequence
  Description of Artificial Sequence: Synthetic oligonucleotide
ucucucccucucugccucc

SEQ ID NO: 114314 - RNA, 19 nt, Artificial Sequence
  Description of Artificial Sequence: Synthetic oligonucleotide
cuccugccugucugcacua

SEQ ID NO: 114315 - RNA, 19 nt, Artificial Sequence
  Description of Artificial Sequence: Synthetic oligonucleotide
auuccuuugcccggcauca

SEQ ID NO: 114316 - RNA, 19 nt, Artificial Sequence
  Description of Artificial Sequence: Synthetic oligonucleotide
aaggcacaggggaccagug

SEQ ID NO: 114317 - RNA, 19 nt, Artificial Sequence
  Description of Artificial Sequence: Synthetic oligonucleotide
ggggaacacuacuguaguu

SEQ ID NO: 114318 - RNA, 19 nt, Artificial Sequence
  Description of Artificial Sequence: Synthetic oligonucleotide
acacuacuguaguuagauc

SEQ ID NO: 114319 - RNA, 25 nt, Artificial Sequence
  Description of Artificial Sequence: Synthetic oligonucleotide
ccuucgcgcccugggccaucucccu

SEQ ID NO: 114320 - RNA, 25 nt, Artificial Sequence
  Description of Artificial Sequence: Synthetic oligonucleotide
ucccaccucccuccgcggagcagcc

SEQ ID NO: 114321 - RNA, 25 nt, Artificial Sequence
  Description of Artificial Sequence: Synthetic oligonucleotide
cagacagcgagggccccggccgggg

SEQ ID NO: 114322 - RNA, 25 nt, Artificial Sequence
  Description of Artificial Sequence: Synthetic oligonucleotide
ggcaggggggacgccccguccgggg

SEQ ID NO: 114323 - RNA, 25 nt, Artificial Sequence
  Description of Artificial Sequence: Synthetic oligonucleotide
gcacccccccggcucugagccgccc

SEQ ID NO: 114324 - RNA, 25 nt, Artificial Sequence
  Description of Artificial Sequence: Synthetic oligonucleotide
cgcggggccggccucggcccggagc

SEQ ID NO: 114325 - RNA, 25 nt, Artificial Sequence
  Description of Artificial Sequence: Synthetic oligonucleotide
cggaggaaggagucgccgaggagca

SEQ ID NO: 114326 - RNA, 25 nt, Artificial Sequence
  Description of Artificial Sequence: Synthetic oligonucleotide
agccugaggccccagagucugagac

SEQ ID NO: 114327 - RNA, 25 nt, Artificial Sequence
  Description of Artificial Sequence: Synthetic oligonucleotide
cgagccgccgccgcccccgccacug

SEQ ID NO: 114328 - RNA, 25 nt, Artificial Sequence
  Description of Artificial Sequence: Synthetic oligonucleotide
gcggggaggagggggaggaggagcg

SEQ ID NO: 114329 - RNA, 25 nt, Artificial Sequence
  Description of Artificial Sequence: Synthetic oligonucleotide
gggaggagggacgagcuggucggga

SEQ ID NO: 114330 - RNA, 25 nt, Artificial Sequence
  Description of Artificial Sequence: Synthetic oligonucleotide
agaagaggaaaaaaacuuuugagac

SEQ ID NO: 114331 - RNA, 25 nt, Artificial Sequence
  Description of Artificial Sequence: Synthetic oligonucleotide
cuuuuccguugccgcugggagccgg

SEQ ID NO: 114332 - RNA, 25 nt, Artificial Sequence
  Description of Artificial Sequence: Synthetic oligonucleotide
gaggcgcggggaccucuuggcgcga

SEQ ID NO: 114333 - RNA, 25 nt, Artificial Sequence
  Description of Artificial Sequence: Synthetic oligonucleotide
acgcugccccgcgaggaggcaggac

SEQ ID NO: 114334 - RNA, 25 nt, Artificial Sequence
  Description of Artificial Sequence: Synthetic oligonucleotide
cuuggggaccccagaccgccucccu

SEQ ID NO: 114335 - RNA, 25 nt, Artificial Sequence
  Description of Artificial Sequence: Synthetic oligonucleotide
uuugccgccggggacgcuugcuccc

SEQ ID NO: 114336 - RNA, 25 nt, Artificial Sequence
  Description of Artificial Sequence: Synthetic oligonucleotide
cucccugcccccuacacggcguccc

SEQ ID NO: 114337 - RNA, 25 nt, Artificial Sequence
  Description of Artificial Sequence: Synthetic oligonucleotide
cucaggcgcccccauuccggaccag

SEQ ID NO: 114338 - RNA, 25 nt, Artificial Sequence
  Description of Artificial Sequence: Synthetic oligonucleotide
gcccucgggagucgccgacccggcc

SEQ ID NO: 114339 - RNA, 25 nt, Artificial Sequence
  Description of Artificial Sequence: Synthetic oligonucleotide
cucccgcaaagacuuuuccccagac

SEQ ID NO: 114340 - RNA, 25 nt, Artificial Sequence
  Description of Artificial Sequence: Synthetic oligonucleotide
ccucgggcgcacccccugcacgccg

SEQ ID NO: 114341 - RNA, 25 nt, Artificial Sequence
  Description of Artificial Sequence: Synthetic oligonucleotide
gccuucauccccggccugucuccug

SEQ ID NO: 114342 - RNA, 25 nt, Artificial Sequence
  Description of Artificial Sequence: Synthetic oligonucleotide
gagcccccgcgcauccuagacccuu

SEQ ID NO: 114343 - RNA, 25 nt, Artificial Sequence
  Description of Artificial Sequence: Synthetic oligonucleotide
uucuccuccaggagacggaucucuc

SEQ ID NO: 114344 - RNA, 25 nt, Artificial Sequence
  Description of Artificial Sequence: Synthetic oligonucleotide
cuccgaccugccacagauccccuau

SEQ ID NO: 114345 - RNA, 25 nt, Artificial Sequence
  Description of Artificial Sequence: Synthetic oligonucleotide
uucaagaccacccaccuucugguac

SEQ ID NO: 114346 - RNA, 25 nt, Artificial Sequence
  Description of Artificial Sequence: Synthetic oligonucleotide
ccagaucgcgcccaucuagguuauu

SEQ ID NO: 114347 - RNA, 25 nt, Artificial Sequence
  Description of Artificial Sequence: Synthetic oligonucleotide
uuccgugggauacugagacaccccc

SEQ ID NO: 114348 - RNA, 25 nt, Artificial Sequence
  Description of Artificial Sequence: Synthetic oligonucleotide
cgguccaagccuccccuccaccacu

SEQ ID NO: 114349 - RNA, 25 nt, Artificial Sequence
  Description of Artificial Sequence: Synthetic oligonucleotide
ugcgcccuucucccugaggaccuca

SEQ ID NO: 114350 - RNA, 25 nt, Artificial Sequence
  Description of Artificial Sequence: Synthetic oligonucleotide
agcuuucccucgaggcccuccuacc

SEQ ID NO: 114351 - RNA, 25 nt, Artificial Sequence
  Description of Artificial Sequence: Synthetic oligonucleotide
cuuuugccgggagacccccagcccc

SEQ ID NO: 114352 - RNA, 25 nt, Artificial Sequence
  Description of Artificial Sequence: Synthetic oligonucleotide
cugcaggggcggggccuccccacca

SEQ ID NO: 114353 - RNA, 25 nt, Artificial Sequence
  Description of Artificial Sequence: Synthetic oligonucleotide
acaccagcccuguucgcgcucucgg

SEQ ID NO: 114354 - RNA, 25 nt, Artificial Sequence
  Description of Artificial Sequence: Synthetic oligonucleotide
gcagugccggggggcgccgccuccc

SEQ ID NO: 114355 - RNA, 25 nt, Artificial Sequence
  Description of Artificial Sequence: Synthetic oligonucleotide
cccaugccgcccuccgggcugcggc

SEQ ID NO: 114356 - RNA, 25 nt, Artificial Sequence
  Description of Artificial Sequence: Synthetic oligonucleotide
cugcugccgcugcugcuaccgcugc

SEQ ID NO: 114357 - RNA, 25 nt, Artificial Sequence
  Description of Artificial Sequence: Synthetic oligonucleotide
cuguggcuacuggugcugacgccug

SEQ ID NO: 114358 - RNA, 25 nt, Artificial Sequence
  Description of Artificial Sequence: Synthetic oligonucleotide
ggccggccggccgcgggacuaucca

SEQ ID NO: 114359 - RNA, 25 nt, Artificial Sequence
  Description of Artificial Sequence: Synthetic oligonucleotide
accugcaagacuaucgacauggagc

SEQ ID NO: 114360 - RNA, 25 nt, Artificial Sequence
  Description of Artificial Sequence: Synthetic oligonucleotide
cuggugaagcggaagcgcaucgagg

SEQ ID NO: 114361 - RNA, 25 nt, Artificial Sequence
  Description of Artificial Sequence: Synthetic oligonucleotide
gccauccgcggccagauccugucca

SEQ ID NO: 114362 - RNA, 25 nt, Artificial Sequence
  Description of Artificial Sequence: Synthetic oligonucleotide
aagcugcggcucgccagccccccga

SEQ ID NO: 114363 - RNA, 25 nt, Artificial Sequence
  Description of Artificial Sequence: Synthetic oligonucleotide
agccagggggaggugccgcccggcc

SEQ ID NO: 114364 - RNA, 25 nt, Artificial Sequence
  Description of Artificial Sequence: Synthetic oligonucleotide
ccgcugcccgaggccgugcucgccc

SEQ ID NO: 114365 - RNA, 25 nt, Artificial Sequence
  Description of Artificial Sequence: Synthetic oligonucleotide
cuguacaacagcacccgcgaccggg

SEQ ID NO: 114366 - RNA, 25 nt, Artificial Sequence
  Description of Artificial Sequence: Synthetic oligonucleotide
guggccggggagagugcagaaccgg

SEQ ID NO: 114367 - RNA, 25 nt, Artificial Sequence
  Description of Artificial Sequence: Synthetic oligonucleotide
gagcccgagccugaggccgacuacu

SEQ ID NO: 114368 - RNA, 25 nt, Artificial Sequence
  Description of Artificial Sequence: Synthetic oligonucleotide
uacgccaaggaggucacccgcgugc

SEQ ID NO: 114369 - RNA, 25 nt, Artificial Sequence
  Description of Artificial Sequence: Synthetic oligonucleotide
cuaaugguggaaacccacaacgaaa

SEQ ID NO: 114370 - RNA, 25 nt, Artificial Sequence
  Description of Artificial Sequence: Synthetic oligonucleotide
aucuaugacaaguucaagcagagua

SEQ ID NO: 114371 - RNA, 25 nt, Artificial Sequence
  Description of Artificial Sequence: Synthetic oligonucleotide
acacacagcauauauauguucuuca

SEQ ID NO: 114372 - RNA, 25 nt, Artificial Sequence
  Description of Artificial Sequence: Synthetic oligonucleotide
aacacaucagagcuccgagaagcgg

SEQ ID NO: 114373 - RNA, 25 nt, Artificial Sequence
  Description of Artificial Sequence: Synthetic oligonucleotide
guaccugaacccguguugcucuccc

SEQ ID NO: 114374 - RNA, 25 nt, Artificial Sequence
  Description of Artificial Sequence: Synthetic oligonucleotide
cgggcagagcugcgucugcugaggc

SEQ ID NO: 114375 - RNA, 25 nt, Artificial Sequence
  Description of Artificial Sequence: Synthetic oligonucleotide
cucaaguuaaaaguggagcagcacg

SEQ ID NO: 114376 - RNA, 25 nt, Artificial Sequence
  Description of Artificial Sequence: Synthetic oligonucleotide
guggagcuguaccagaaauacagca

SEQ ID NO: 114377 - RNA, 25 nt, Artificial Sequence
  Description of Artificial Sequence: Synthetic oligonucleotide
aacaauuccuggcgauaccucagca

SEQ ID NO: 114378 - RNA, 25 nt, Artificial Sequence
  Description of Artificial Sequence: Synthetic oligonucleotide
aaccggcugcuggcacccagcgacu

SEQ ID NO: 114379 - RNA, 25 nt, Artificial Sequence
  Description of Artificial Sequence: Synthetic oligonucleotide
ucgccagagugguuaucuuuugaug

SEQ ID NO: 114380 - RNA, 25 nt, Artificial Sequence
  Description of Artificial Sequence: Synthetic oligonucleotide
gucaccggaguugugcggcaguggu

SEQ ID NO: 114381 - RNA, 25 nt, Artificial Sequence
  Description of Artificial Sequence: Synthetic oligonucleotide
uugagccguggaggggaaauugagg

SEQ ID NO: 114382 - RNA, 25 nt, Artificial Sequence
  Description of Artificial Sequence: Synthetic oligonucleotide
ggcuuucgccuuagcgcccacugcu

SEQ ID NO: 114383 - RNA, 25 nt, Artificial Sequence
  Description of Artificial Sequence: Synthetic oligonucleotide
uccugugacagcagggauaacacac

SEQ ID NO: 114384 - RNA, 25 nt, Artificial Sequence
  Description of Artificial Sequence: Synthetic oligonucleotide
cugcaaguggacaucaacggguuca

SEQ ID NO: 114385 - RNA, 25 nt, Artificial Sequence
  Description of Artificial Sequence: Synthetic oligonucleotide
acuaccggccgccgaggugaccugg

SEQ ID NO: 114386 - RNA, 25 nt, Artificial Sequence
  Description of Artificial Sequence: Synthetic oligonucleotide
gccaccauucauggcaugaaccggc

SEQ ID NO: 114387 - RNA, 25 nt, Artificial Sequence
  Description of Artificial Sequence: Synthetic oligonucleotide
ccuuuccugcuucucauggccaccc

SEQ ID NO: 114388 - RNA, 25 nt, Artificial Sequence
  Description of Artificial Sequence: Synthetic oligonucleotide
ccgcuggagagggcccagcaucugc

SEQ ID NO: 114389 - RNA, 25 nt, Artificial Sequence
  Description of Artificial Sequence: Synthetic oligonucleotide
caaagcucccggcaccgccgagccc

SEQ ID NO: 114390 - RNA, 25 nt, Artificial Sequence
  Description of Artificial Sequence: Synthetic oligonucleotide
cuggacaccaacuauugcuucagcu

SEQ ID NO: 114391 - RNA, 25 nt, Artificial Sequence
  Description of Artificial Sequence: Synthetic oligonucleotide
uccacggagaagaacugcugcgugc

SEQ ID NO: 114392 - RNA, 25 nt, Artificial Sequence
  Description of Artificial Sequence: Synthetic oligonucleotide
cggcagcuguacauugacuuccgca

SEQ ID NO: 114393 - RNA, 25 nt, Artificial Sequence
  Description of Artificial Sequence: Synthetic oligonucleotide
aaggaccucggcuggaaguggaucc

SEQ ID NO: 114394 - RNA, 25 nt, Artificial Sequence
  Description of Artificial Sequence: Synthetic oligonucleotide
cacgagcccaagggcuaccaugcca

SEQ ID NO: 114395 - RNA, 25 nt, Artificial Sequence
  Description of Artificial Sequence: Synthetic oligonucleotide
aacuucugccucgggcccugccccu

SEQ ID NO: 114396 - RNA, 25 nt, Artificial Sequence
  Description of Artificial Sequence: Synthetic oligonucleotide
uacauuuggagccuggacacgcagu

SEQ ID NO: 114397 - RNA, 25 nt, Artificial Sequence
  Description of Artificial Sequence: Synthetic oligonucleotide
uacagcaagguccuggcccuguaca

SEQ ID NO: 114398 - RNA, 25 nt, Artificial Sequence
  Description of Artificial Sequence: Synthetic oligonucleotide
aaccagcauaacccgggcgccucgg

SEQ ID NO: 114399 - RNA, 25 nt, Artificial Sequence
  Description of Artificial Sequence: Synthetic oligonucleotide
gcggcgccgugcugcgugccgcagg

SEQ ID NO: 114400 - RNA, 25 nt, Artificial Sequence
  Description of Artificial Sequence: Synthetic oligonucleotide
gcgcuggagccgcugcccaucgugu

SEQ ID NO: 114401 - RNA, 25 nt, Artificial Sequence
  Description of Artificial Sequence: Synthetic oligonucleotide
uacuacgugggccgcaagcccaagg

SEQ ID NO: 114402 - RNA, 25 nt, Artificial Sequence
  Description of Artificial Sequence: Synthetic oligonucleotide
guggagcagcuguccaacaugaucg

SEQ ID NO: 114403 - RNA, 25 nt, Artificial Sequence
  Description of Artificial Sequence: Synthetic oligonucleotide
gugcgcuccugcaagugcagcugag

SEQ ID NO: 114404 - RNA, 25 nt, Artificial Sequence
  Description of Artificial Sequence: Synthetic oligonucleotide
ggucccgccccgccccgccccgccc

SEQ ID NO: 114405 - RNA, 25 nt, Artificial Sequence
  Description of Artificial Sequence: Synthetic oligonucleotide
ccggcaggcccggccccaccccgcc

SEQ ID NO: 114406 - RNA, 25 nt, Artificial Sequence
  Description of Artificial Sequence: Synthetic oligonucleotide
cccgcccccgcugccuugcccaugg

SEQ ID NO: 114407 - RNA, 25 nt, Artificial Sequence
  Description of Artificial Sequence: Synthetic oligonucleotide
ggggcuguauuuaaggacacccgug

SEQ ID NO: 114408 - RNA, 25 nt, Artificial Sequence
  Description of Artificial Sequence: Synthetic oligonucleotide
gccccaagcccaccuggggccccau

SEQ ID NO: 114409 - RNA, 25 nt, Artificial Sequence
  Description of Artificial Sequence: Synthetic oligonucleotide
uuaaagauggagagaggacugcgga

SEQ ID NO: 114410 - RNA, 25 nt, Artificial Sequence
  Description of Artificial Sequence: Synthetic oligonucleotide
aucucugugucauugggcgccugcc

SEQ ID NO: 114411 - RNA, 25 nt, Artificial Sequence
  Description of Artificial Sequence: Synthetic oligonucleotide
cuggggucuccaucccugacguucc

SEQ ID NO: 114412 - RNA, 25 nt, Artificial Sequence
  Description of Artificial Sequence: Synthetic oligonucleotide
ccccacucccacucccucucucucc

SEQ ID NO: 114413 - RNA, 25 nt, Artificial Sequence
  Description of Artificial Sequence: Synthetic oligonucleotide
ccucucugccuccuccugccugucu

SEQ ID NO: 114414 - RNA, 25 nt, Artificial Sequence
  Description of Artificial Sequence: Synthetic oligonucleotide
ugcacuauuccuuugcccggcauca

SEQ ID NO: 114415 - RNA, 25 nt, Artificial Sequence
  Description of Artificial Sequence: Synthetic oligonucleotide
aaggcacaggggaccaguggggaac

SEQ ID NO: 114416 - RNA, 25 nt, Artificial Sequence
  Description of Artificial Sequence: Synthetic oligonucleotide
uggggaacacuacuguaguuagauc

SEQ ID NO: 114417 - RNA, 1695 nt, Homo sapiens
caagcaggauacguuuuucuguugggcauugacuagauuguuugcaaaaguuucgcaucaaaaacaaacaacaacaacaaaaaaccaaacaacucuccuugaucuauacuuugagaauuguugauuucuuuuuuuuuauucugacuuuuaaaaacaacuuuuuuuuccacuuuuuuaaaaaaugcacuacugugugcugagcgcuuuucugauccugcaucuggucacggucgcgcucagccugucuaccugcagcacacucgauauggaccaguucaugcgcaagaggaucgaggcgauccgcgggcagauccugagcaagcugaagcucaccagucccccagaagacuauccugagcccgaggaaguccccccggaggugauuuccaucuacaacagcaccagggacuugcuccaggagaaggcgagccggagggcggccgccugcgagcgcgagaggagcgacgaagaguacuacgccaaggagguuuacaaaauagacaugccgcccuucuuccccuccgaaaaugccaucccgcccacuuucuacagacccuacuucagaauuguucgauuugacgucucagcaauggagaagaaugcuuccaauuuggugaaagcagaguucagagucuuucguuugcagaacccaaaagccagagugccugaacaacggauugagcuauaucagauucucaaguccaaagauuuaacaucuccaacccagcgcuacaucgacagcaaaguugugaaaacaagagcagaaggcgaauggcucuccuucgauguaacugaugcuguucaugaauggcuucaccauaaagacaggaaccugggauuuaaaauaagcuuacacugucccugcugcacuuuuguaccaucuaauaauuacaucaucccaaauaaaagugaagaacuagaagcaagauuugcagguauugauggcaccuccacauauaccaguggugaucagaaaacuauaaaguccacuaggaaaaaaaacagugggaagaccccacaucuccugcuaauguuauugcccuccuacagacuugagucacaacagaccaaccggcggaagaagcgugcuuuggaugcggccuauugcuuuagaaaugugcaggauaauugcugccuacguccacuuuacauugauuucaagagggaucuaggguggaaauggauacacgaacccaaaggguacaaugccaacuucugugcuggagcaugcccguauuuauggaguucagacacucagcacagcaggguccugagcuuauauaauaccauaaauccagaagcaucugcuucuccuugcugcgugucccaagauuuagaaccucuaaccauucucuacuacauuggcaaaacacccaagauugaacagcuuucuaauaugauuguaaagucuugcaaaugcagcuaaaauucuuggaaaaguggcaagaccaaaaugacaaugaugaugauaaugaugaugacgacgacaacgaugaugcuuguaacaagaaaacauaagagagccuugguucaucaguguuaaaaaauuuuugaaaaggcgguacuaguucagacacuuuggaaguuuguguucuguuuguuaaaacuggcaucugacacaaaaaaaguugaaggccuuauucuacauuucaccuacuuuguaagugagagagacaagaagcaaauuuuuuuaaa

SEQ ID NO: 114418 - RNA, 19 nt, Artificial Sequence
  Description of Artificial Sequence: Synthetic oligonucleotide
caagcaggauacguuuuuc

SEQ ID NO: 114419 - RNA, 19 nt, Artificial Sequence
  Description of Artificial Sequence: Synthetic oligonucleotide
cuguugggcauugacuaga

SEQ ID NO: 114420 - RNA, 19 nt, Artificial Sequence
  Description of Artificial Sequence: Synthetic oligonucleotide
auuguuugcaaaaguuucg

SEQ ID NO: 114421 - RNA, 19 nt, Artificial Sequence
  Description of Artificial Sequence: Synthetic oligonucleotide
gcaucaaaaacaaacaaca

SEQ ID NO: 114422 - RNA, 19 nt, Artificial Sequence
  Description of Artificial Sequence: Synthetic oligonucleotide
aacaacaaaaaaccaaaca

SEQ ID NO: 114423 - RNA, 19 nt, Artificial Sequence
  Description of Artificial Sequence: Synthetic oligonucleotide
aacucuccuugaucuauac

SEQ ID NO: 114424 - RNA, 19 nt, Artificial Sequence
  Description of Artificial Sequence: Synthetic oligonucleotide
cuuugagaauuguugauuu

SEQ ID NO: 114425 - RNA, 19 nt, Artificial Sequence
  Description of Artificial Sequence: Synthetic oligonucleotide
ucuuuuuuuuuauucugac

SEQ ID NO: 114426 - RNA, 19 nt, Artificial Sequence
  Description of Artificial Sequence: Synthetic oligonucleotide
cuuuuaaaaacaacuuuuu

SEQ ID NO: 114427 - RNA, 19 nt, Artificial Sequence
  Description of Artificial Sequence: Synthetic oligonucleotide
uuuuccacuuuuuuaaaaa

SEQ ID NO: 114428 - RNA, 19 nt, Artificial Sequence
  Description of Artificial Sequence: Synthetic oligonucleotide
aaugcacuacugugugcug

SEQ ID NO: 114429 - RNA, 19 nt, Artificial Sequence
  Description of Artificial Sequence: Synthetic oligonucleotide
gagcgcuuuucugauccug

SEQ ID NO: 114430 - RNA, 19 nt, Artificial Sequence
  Description of Artificial Sequence: Synthetic oligonucleotide
gcaucuggucacggucgcg

SEQ ID NO: 114431 - RNA, 19 nt, Artificial Sequence
  Description of Artificial Sequence: Synthetic oligonucleotide
gcucagccugucuaccugc

SEQ ID NO: 114432 - RNA, 19 nt, Artificial Sequence
  Description of Artificial Sequence: Synthetic oligonucleotide
cagcacacucgauauggac

SEQ ID NO: 114433 - RNA, 19 nt, Artificial Sequence
  Description of Artificial Sequence: Synthetic oligonucleotide
ccaguucaugcgcaagagg

SEQ ID NO: 114434 - RNA, 19 nt, Artificial Sequence
  Description of Artificial Sequence: Synthetic oligonucleotide
gaucgaggcgauccgcggg

SEQ ID NO: 114435 - RNA, 19 nt, Artificial Sequence
  Description of Artificial Sequence: Synthetic oligonucleotide
gcagauccugagcaagcug

SEQ ID NO: 114436 - RNA, 19 nt, Artificial Sequence
  Description of Artificial Sequence: Synthetic oligonucleotide
gaagcucaccaguccccca

SEQ ID NO: 114437 - RNA, 19 nt, Artificial Sequence
  Description of Artificial Sequence: Synthetic oligonucleotide
agaagacuauccugagccc

SEQ ID NO: 114438 - RNA, 19 nt, Artificial Sequence
  Description of Artificial Sequence: Synthetic oligonucleotide
cgaggaaguccccccggag

SEQ ID NO: 114439 - RNA, 19 nt, Artificial Sequence
  Description of Artificial Sequence: Synthetic oligonucleotide
ggugauuuccaucuacaac

SEQ ID NO: 114440 - RNA, 19 nt, Artificial Sequence
  Description of Artificial Sequence: Synthetic oligonucleotide
cagcaccagggacuugcuc

SEQ ID NO: 114441 - RNA, 19 nt, Artificial Sequence
  Description of Artificial Sequence: Synthetic oligonucleotide
ccaggagaaggcgagccgg

SEQ ID NO: 114442 - RNA, 19 nt, Artificial Sequence
  Description of Artificial Sequence: Synthetic oligonucleotide
gagggcggccgccugcgag

SEQ ID NO: 114443 - RNA, 19 nt, Artificial Sequence
  Description of Artificial Sequence: Synthetic oligonucleotide
gcgcgagaggagcgacgaa

SEQ ID NO: 114444 - RNA, 19 nt, Artificial Sequence
  Description of Artificial Sequence: Synthetic oligonucleotide
agaguacuacgccaaggag

SEQ ID NO: 114445 - RNA, 19 nt, Artificial Sequence
  Description of Artificial Sequence: Synthetic oligonucleotide
gguuuacaaaauagacaug

SEQ ID NO: 114446 - RNA, 19 nt, Artificial Sequence
  Description of Artificial Sequence: Synthetic oligonucleotide
gccgcccuucuuccccucc

SEQ ID NO: 114447 - RNA, 19 nt, Artificial Sequence
  Description of Artificial Sequence: Synthetic oligonucleotide
cgaaaaugccaucccgccc

SEQ ID NO: 114448 - RNA, 19 nt, Artificial Sequence
  Description of Artificial Sequence: Synthetic oligonucleotide
cacuuucuacagacccuac

SEQ ID NO: 114449 - RNA, 19 nt, Artificial Sequence
  Description of Artificial Sequence: Synthetic oligonucleotide
cuucagaauuguucgauuu

SEQ ID NO: 114450 - RNA, 19 nt, Artificial Sequence
  Description of Artificial Sequence: Synthetic oligonucleotide
ugacgucucagcaauggag

SEQ ID NO: 114451 - RNA, 19 nt, Artificial Sequence
  Description of Artificial Sequence: Synthetic oligonucleotide
gaagaaugcuuccaauuug

SEQ ID NO: 114452 - RNA, 19 nt, Artificial Sequence
  Description of Artificial Sequence: Synthetic oligonucleotide
ggugaaagcagaguucaga

SEQ ID NO: 114453 - RNA, 19 nt, Artificial Sequence
  Description of Artificial Sequence: Synthetic oligonucleotide
agucuuucguuugcagaac

SEQ ID NO: 114454 - RNA, 19 nt, Artificial Sequence
  Description of Artificial Sequence: Synthetic oligonucleotide
cccaaaagccagagugccu

SEQ ID NO: 114455 - RNA, 19 nt, Artificial Sequence
  Description of Artificial Sequence: Synthetic oligonucleotide
ugaacaacggauugagcua

SEQ ID NO: 114456 - RNA, 19 nt, Artificial Sequence
  Description of Artificial Sequence: Synthetic oligonucleotide
auaucagauucucaagucc

SEQ ID NO: 114457 - RNA, 19 nt, Artificial Sequence
  Description of Artificial Sequence: Synthetic oligonucleotide
caaagauuuaacaucucca

SEQ ID NO: 114458 - RNA, 19 nt, Artificial Sequence
  Description of Artificial Sequence: Synthetic oligonucleotide
aacccagcgcuacaucgac

SEQ ID NO: 114459 - RNA, 19 nt, Artificial Sequence
  Description of Artificial Sequence: Synthetic oligonucleotide
cagcaaaguugugaaaaca

SEQ ID NO: 114460 - RNA, 19 nt, Artificial Sequence
  Description of Artificial Sequence: Synthetic oligonucleotide
aagagcagaaggcgaaugg

SEQ ID NO: 114461 - RNA, 19 nt, Artificial Sequence
  Description of Artificial Sequence: Synthetic oligonucleotide
gcucuccuucgauguaacu

SEQ ID NO: 114462 - RNA, 19 nt, Artificial Sequence
  Description of Artificial Sequence: Synthetic oligonucleotide
ugaugcuguucaugaaugg

SEQ ID NO: 114463 - RNA, 19 nt, Artificial Sequence
  Description of Artificial Sequence: Synthetic oligonucleotide
gcuucaccauaaagacagg

SEQ ID NO: 114464 - RNA, 19 nt, Artificial Sequence
  Description of Artificial Sequence: Synthetic oligonucleotide
gaaccugggauuuaaaaua

SEQ ID NO: 114465 - RNA, 19 nt, Artificial Sequence
  Description of Artificial Sequence: Synthetic oligonucleotide
aagcuuacacugucccugc

SEQ ID NO: 114466 - RNA, 19 nt, Artificial Sequence
  Description of Artificial Sequence: Synthetic oligonucleotide
cugcacuuuuguaccaucu

SEQ ID NO: 114467 - RNA, 19 nt, Artificial Sequence
  Description of Artificial Sequence: Synthetic oligonucleotide
uaauaauuacaucauccca

SEQ ID NO: 114468 - RNA, 19 nt, Artificial Sequence
  Description of Artificial Sequence: Synthetic oligonucleotide
aaauaaaagugaagaacua

SEQ ID NO: 114469 - RNA, 19 nt, Artificial Sequence
  Description of Artificial Sequence: Synthetic oligonucleotide
agaagcaagauuugcaggu

SEQ ID NO: 114470 - RNA, 19 nt, Artificial Sequence
  Description of Artificial Sequence: Synthetic oligonucleotide
uauugauggcaccuccaca

SEQ ID NO: 114471 - RNA, 19 nt, Artificial Sequence
  Description of Artificial Sequence: Synthetic oligonucleotide
auauaccaguggugaucag

SEQ ID NO: 114472 - RNA, 19 nt, Artificial Sequence
  Description of Artificial Sequence: Synthetic oligonucleotide
gaaaacuauaaaguccacu

SEQ ID NO: 114473 - RNA, 19 nt, Artificial Sequence
  Description of Artificial Sequence: Synthetic oligonucleotide
uaggaaaaaaaacaguggg

SEQ ID NO: 114474 - RNA, 19 nt, Artificial Sequence
  Description of Artificial Sequence: Synthetic oligonucleotide
gaagaccccacaucuccug

SEQ ID NO: 114475 - RNA, 19 nt, Artificial Sequence
  Description of Artificial Sequence: Synthetic oligonucleotide
gcuaauguuauugcccucc

SEQ ID NO: 114476 - RNA, 19 nt, Artificial Sequence
  Description of Artificial Sequence: Synthetic oligonucleotide
cuacagacuugagucacaa

SEQ ID NO: 114477 - RNA, 19 nt, Artificial Sequence
  Description of Artificial Sequence: Synthetic oligonucleotide
acagaccaaccggcggaag

SEQ ID NO: 114478 - RNA, 19 nt, Artificial Sequence
  Description of Artificial Sequence: Synthetic oligonucleotide
gaagcgugcuuuggaugcg

SEQ ID NO: 114479 - RNA, 19 nt, Artificial Sequence
  Description of Artificial Sequence: Synthetic oligonucleotide
ggccuauugcuuuagaaau

SEQ ID NO: 114480 - RNA, 19 nt, Artificial Sequence
  Description of Artificial Sequence: Synthetic oligonucleotide
ugugcaggauaauugcugc

SEQ ID NO: 114481 - RNA, 19 nt, Artificial Sequence
  Description of Artificial Sequence: Synthetic oligonucleotide
ccuacguccacuuuacauu

SEQ ID NO: 114482 - RNA, 19 nt, Artificial Sequence
  Description of Artificial Sequence: Synthetic oligonucleotide
ugauuucaagagggaucua

SEQ ID NO: 114483 - RNA, 19 nt, Artificial Sequence
  Description of Artificial Sequence: Synthetic oligonucleotide
aggguggaaauggauacac

SEQ ID NO: 114484 - RNA, 19 nt, Artificial Sequence
  Description of Artificial Sequence: Synthetic oligonucleotide
cgaacccaaaggguacaau

SEQ ID NO: 114485 - RNA, 19 nt, Artificial Sequence
  Description of Artificial Sequence: Synthetic oligonucleotide
ugccaacuucugugcugga

SEQ ID NO: 114486 - RNA, 19 nt, Artificial Sequence
  Description of Artificial Sequence: Synthetic oligonucleotide
agcaugcccguauuuaugg

SEQ ID NO: 114487 - RNA, 19 nt, Artificial Sequence
  Description of Artificial Sequence: Synthetic oligonucleotide
gaguucagacacucagcac

SEQ ID NO: 114488 - RNA, 19 nt, Artificial Sequence
  Description of Artificial Sequence: Synthetic oligonucleotide
cagcaggguccugagcuua

SEQ ID NO: 114489 - RNA, 19 nt, Artificial Sequence
  Description of Artificial Sequence: Synthetic oligonucleotide
auauaauaccauaaaucca

SEQ ID NO: 114490 - RNA, 19 nt, Artificial Sequence
  Description of Artificial Sequence: Synthetic oligonucleotide
agaagcaucugcuucuccu

SEQ ID NO: 114491 - RNA, 19 nt, Artificial Sequence
  Description of Artificial Sequence: Synthetic oligonucleotide
uugcugcgugucccaagau

SEQ ID NO: 114492 - RNA, 19 nt, Artificial Sequence
  Description of Artificial Sequence: Synthetic oligonucleotide
uuuagaaccucuaaccauu

SEQ ID NO: 114493 - RNA, 19 nt, Artificial Sequence
  Description of Artificial Sequence: Synthetic oligonucleotide
ucucuacuacauuggcaaa

SEQ ID NO: 114494 - RNA, 19 nt, Artificial Sequence
  Description of Artificial Sequence: Synthetic oligonucleotide
aacacccaagauugaacag

SEQ ID NO: 114495 - RNA, 19 nt, Artificial Sequence
  Description of Artificial Sequence: Synthetic oligonucleotide
gcuuucuaauaugauugua

SEQ ID NO: 114496 - RNA, 19 nt, Artificial Sequence
  Description of Artificial Sequence: Synthetic oligonucleotide
aaagucuugcaaaugcagc

SEQ ID NO: 114497 - RNA, 19 nt, Artificial Sequence
  Description of Artificial Sequence: Synthetic oligonucleotide
cuaaaauucuuggaaaagu

SEQ ID NO: 114498 - RNA, 19 nt, Artificial Sequence
  Description of Artificial Sequence: Synthetic oligonucleotide
uggcaagaccaaaaugaca

SEQ ID NO: 114499 - RNA, 19 nt, Artificial Sequence
  Description of Artificial Sequence: Synthetic oligonucleotide
aaugaugaugauaaugaug

SEQ ID NO: 114500 - RNA, 19 nt, Artificial Sequence
  Description of Artificial Sequence: Synthetic oligonucleotide
gaugacgacgacaacgaug

SEQ ID NO: 114501 - RNA, 19 nt, Artificial Sequence
  Description of Artificial Sequence: Synthetic oligonucleotide
gaugcuuguaacaagaaaa

SEQ ID NO: 114502 - RNA, 19 nt, Artificial Sequence
  Description of Artificial Sequence: Synthetic oligonucleotide
acauaagagagccuugguu

SEQ ID NO: 114503 - RNA, 19 nt, Artificial Sequence
  Description of Artificial Sequence: Synthetic oligonucleotide
ucaucaguguuaaaaaauu

SEQ ID NO: 114504 - RNA, 19 nt, Artificial Sequence
  Description of Artificial Sequence: Synthetic oligonucleotide
uuuugaaaaggcgguacua

SEQ ID NO: 114505 - RNA, 19 nt, Artificial Sequence
  Description of Artificial Sequence: Synthetic oligonucleotide
aguucagacacuuuggaag

SEQ ID NO: 114506 - RNA, 19 nt, Artificial Sequence
  Description of Artificial Sequence: Synthetic oligonucleotide
guuuguguucuguuuguua

SEQ ID NO: 114507 - RNA, 19 nt, Artificial Sequence
  Description of Artificial Sequence: Synthetic oligonucleotide
aaaacuggcaucugacaca

SEQ ID NO: 114508 - RNA, 19 nt, Artificial Sequence
  Description of Artificial Sequence: Synthetic oligonucleotide
aaaaaaaguugaaggccuu

SEQ ID NO: 114509 - RNA, 19 nt, Artificial Sequence
  Description of Artificial Sequence: Synthetic oligonucleotide
uauucuacauuucaccuac

SEQ ID NO: 114510 - RNA, 19 nt, Artificial Sequence
  Description of Artificial Sequence: Synthetic oligonucleotide
cuuuguaagugagagagac

SEQ ID NO: 114511 - RNA, 19 nt, Artificial Sequence
  Description of Artificial Sequence: Synthetic oligonucleotide
caagaagcaaauuuuuuua

SEQ ID NO: 114512 - RNA, 19 nt, Artificial Sequence
  Description of Artificial Sequence: Synthetic oligonucleotide
agaagcaaauuuuuuuaaa

SEQ ID NO: 114513 - RNA, 25 nt, Artificial Sequence
  Description of Artificial Sequence: Synthetic oligonucleotide
caagcaggauacguuuuucuguugg

SEQ ID NO: 114514 - RNA, 25 nt, Artificial Sequence
  Description of Artificial Sequence: Synthetic oligonucleotide
ggcauugacuagauuguuugcaaaa

SEQ ID NO: 114515 - RNA, 25 nt, Artificial Sequence
  Description of Artificial Sequence: Synthetic oligonucleotide
aguuucgcaucaaaaacaaacaaca

SEQ ID NO: 114516 - RNA, 25 nt, Artificial Sequence
  Description of Artificial Sequence: Synthetic oligonucleotide
aacaacaaaaaaccaaacaacucuc

SEQ ID NO: 114517 - RNA, 25 nt, Artificial Sequence
  Description of Artificial Sequence: Synthetic oligonucleotide
ccuugaucuauacuuugagaauugu

SEQ ID NO: 114518 - RNA, 25 nt, Artificial Sequence
  Description of Artificial Sequence: Synthetic oligonucleotide
uugauuucuuuuuuuuuauucugac

SEQ ID NO: 114519 - RNA, 25 nt, Artificial Sequence
  Description of Artificial Sequence: Synthetic oligonucleotide
cuuuuaaaaacaacuuuuuuuucca

SEQ ID NO: 114520 - RNA, 25 nt, Artificial Sequence
  Description of Artificial Sequence: Synthetic oligonucleotide
acuuuuuuaaaaaaugcacuacugu

SEQ ID NO: 114521 - RNA, 25 nt, Artificial Sequence
  Description of Artificial Sequence: Synthetic oligonucleotide
ugugcugagcgcuuuucugauccug

SEQ ID NO: 114522 - RNA, 25 nt, Artificial Sequence
  Description of Artificial Sequence: Synthetic oligonucleotide
gcaucuggucacggucgcgcucagc

SEQ ID NO: 114523 - RNA, 25 nt, Artificial Sequence
  Description of Artificial Sequence: Synthetic oligonucleotide
ccugucuaccugcagcacacucgau

SEQ ID NO: 114524 - RNA, 25 nt, Artificial Sequence
  Description of Artificial Sequence: Synthetic oligonucleotide
uauggaccaguucaugcgcaagagg

SEQ ID NO: 114525 - RNA, 25 nt, Artificial Sequence
  Description of Artificial Sequence: Synthetic oligonucleotide
gaucgaggcgauccgcgggcagauc

SEQ ID NO: 114526 - RNA, 25 nt, Artificial Sequence
  Description of Artificial Sequence: Synthetic oligonucleotide
ccugagcaagcugaagcucaccagu

SEQ ID NO: 114527 - RNA, 25 nt, Artificial Sequence
  Description of Artificial Sequence: Synthetic oligonucleotide
ucccccagaagacuauccugagccc

SEQ ID NO: 114528 - RNA, 25 nt, Artificial Sequence
  Description of Artificial Sequence: Synthetic oligonucleotide
cgaggaaguccccccggaggugauu

SEQ ID NO: 114529 - RNA, 25 nt, Artificial Sequence
  Description of Artificial Sequence: Synthetic oligonucleotide
uuccaucuacaacagcaccagggac

SEQ ID NO: 114530 - RNA, 25 nt, Artificial Sequence
  Description of Artificial Sequence: Synthetic oligonucleotide
cuugcuccaggagaaggcgagccgg

SEQ ID NO: 114531 - RNA, 25 nt, Artificial Sequence
  Description of Artificial Sequence: Synthetic oligonucleotide
gagggcggccgccugcgagcgcgag

SEQ ID NO: 114532 - RNA, 25 nt, Artificial Sequence
  Description of Artificial Sequence: Synthetic oligonucleotide
gaggagcgacgaagaguacuacgcc

SEQ ID NO: 114533 - RNA, 25 nt, Artificial Sequence
  Description of Artificial Sequence: Synthetic oligonucleotide
caaggagguuuacaaaauagacaug

SEQ ID NO: 114534 - RNA, 25 nt, Artificial Sequence
  Description of Artificial Sequence: Synthetic oligonucleotide
gccgcccuucuuccccuccgaaaau

SEQ ID NO: 114535 - RNA, 25 nt, Artificial Sequence
  Description of Artificial Sequence: Synthetic oligonucleotide
ugccaucccgcccacuuucuacaga

SEQ ID NO: 114536 - RNA, 25 nt, Artificial Sequence
  Description of Artificial Sequence: Synthetic oligonucleotide
acccuacuucagaauuguucgauuu

SEQ ID NO: 114537 - RNA, 25 nt, Artificial Sequence
  Description of Artificial Sequence: Synthetic oligonucleotide
ugacgucucagcaauggagaagaau

SEQ ID NO: 114538 - RNA, 25 nt, Artificial Sequence
  Description of Artificial Sequence: Synthetic oligonucleotide
ugcuuccaauuuggugaaagcagag

SEQ ID NO: 114539 - RNA, 25 nt, Artificial Sequence
  Description of Artificial Sequence: Synthetic oligonucleotide
guucagagucuuucguuugcagaac

SEQ ID NO: 114540 - RNA, 25 nt, Artificial Sequence
  Description of Artificial Sequence: Synthetic oligonucleotide
cccaaaagccagagugccugaacaa

SEQ ID NO: 114541 - RNA, 25 nt, Artificial Sequence
  Description of Artificial Sequence: Synthetic oligonucleotide
acggauugagcuauaucagauucuc

SEQ ID NO: 114542 - RNA, 25 nt, Artificial Sequence
  Description of Artificial Sequence: Synthetic oligonucleotide
caaguccaaagauuuaacaucucca

SEQ ID NO: 114543 - RNA, 25 nt, Artificial Sequence
  Description of Artificial Sequence: Synthetic oligonucleotide
aacccagcgcuacaucgacagcaaa

SEQ ID NO: 114544 - RNA, 25 nt, Artificial Sequence
  Description of Artificial Sequence: Synthetic oligonucleotide
aguugugaaaacaagagcagaaggc

SEQ ID NO: 114545 - RNA, 25 nt, Artificial Sequence
  Description of Artificial Sequence: Synthetic oligonucleotide
cgaauggcucuccuucgauguaacu

SEQ ID NO: 114546 - RNA, 25 nt, Artificial Sequence
  Description of Artificial Sequence: Synthetic oligonucleotide
ugaugcuguucaugaauggcuucac

SEQ ID NO: 114547 - RNA, 25 nt, Artificial Sequence
  Description of Artificial Sequence: Synthetic oligonucleotide
ccauaaagacaggaaccugggauuu

SEQ ID NO: 114548 - RNA, 25 nt, Artificial Sequence
  Description of Artificial Sequence: Synthetic oligonucleotide
uaaaauaagcuuacacugucccugc

SEQ ID NO: 114549 - RNA, 25 nt, Artificial Sequence
  Description of Artificial Sequence: Synthetic oligonucleotide
cugcacuuuuguaccaucuaauaau

SEQ ID NO: 114550 - RNA, 25 nt, Artificial Sequence
  Description of Artificial Sequence: Synthetic oligonucleotide
uuacaucaucccaaauaaaagugaa

SEQ ID NO: 114551 - RNA, 25 nt, Artificial Sequence
  Description of Artificial Sequence: Synthetic oligonucleotide
agaacuagaagcaagauuugcaggu

SEQ ID NO: 114552 - RNA, 25 nt, Artificial Sequence
  Description of Artificial Sequence: Synthetic oligonucleotide
uauugauggcaccuccacauauacc

SEQ ID NO: 114553 - RNA, 25 nt, Artificial Sequence
  Description of Artificial Sequence: Synthetic oligonucleotide
caguggugaucagaaaacuauaaag

SEQ ID NO: 114554 - RNA, 25 nt, Artificial Sequence
  Description of Artificial Sequence: Synthetic oligonucleotide
guccacuaggaaaaaaaacaguggg

SEQ ID NO: 114555 - RNA, 25 nt, Artificial Sequence
  Description of Artificial Sequence: Synthetic oligonucleotide
gaagaccccacaucuccugcuaaug

SEQ ID NO: 114556 - RNA, 25 nt, Artificial Sequence
  Description of Artificial Sequence: Synthetic oligonucleotide
guuauugcccuccuacagacuugag

SEQ ID NO: 114557 - RNA, 25 nt, Artificial Sequence
  Description of Artificial Sequence: Synthetic oligonucleotide
gucacaacagaccaaccggcggaag

SEQ ID NO: 114558 - RNA, 25 nt, Artificial Sequence
  Description of Artificial Sequence: Synthetic oligonucleotide
gaagcgugcuuuggaugcggccuau

SEQ ID NO: 114559 - RNA, 25 nt, Artificial Sequence
  Description of Artificial Sequence: Synthetic oligonucleotide
uugcuuuagaaaugugcaggauaau

SEQ ID NO: 114560 - RNA, 25 nt, Artificial Sequence
  Description of Artificial Sequence: Synthetic oligonucleotide
uugcugccuacguccacuuuacauu

SEQ ID NO: 114561 - RNA, 25 nt, Artificial Sequence
  Description of Artificial Sequence: Synthetic oligonucleotide
ugauuucaagagggaucuagggugg

SEQ ID NO: 114562 - RNA, 25 nt, Artificial Sequence
  Description of Artificial Sequence: Synthetic oligonucleotide
gaaauggauacacgaacccaaaggg

SEQ ID NO: 114563 - RNA, 25 nt, Artificial Sequence
  Description of Artificial Sequence: Synthetic oligonucleotide
guacaaugccaacuucugugcugga

SEQ ID NO: 114564 - RNA, 25 nt, Artificial Sequence
  Description of Artificial Sequence: Synthetic oligonucleotide
agcaugcccguauuuauggaguuca

SEQ ID NO: 114565 - RNA, 25 nt, Artificial Sequence
  Description of Artificial Sequence: Synthetic oligonucleotide
agacacucagcacagcaggguccug

SEQ ID NO: 114566 - RNA, 25 nt, Artificial Sequence
  Description of Artificial Sequence: Synthetic oligonucleotide
gagcuuauauaauaccauaaaucca

SEQ ID NO: 114567 - RNA, 25 nt, Artificial Sequence
  Description of Artificial Sequence: Synthetic oligonucleotide
agaagcaucugcuucuccuugcugc

SEQ ID NO: 114568 - RNA, 25 nt, Artificial Sequence
  Description of Artificial Sequence: Synthetic oligonucleotide
cgugucccaagauuuagaaccucua

SEQ ID NO: 114569 - RNA, 25 nt, Artificial Sequence
  Description of Artificial Sequence: Synthetic oligonucleotide
aaccauucucuacuacauuggcaaa

SEQ ID NO: 114570 - RNA, 25 nt, Artificial Sequence
  Description of Artificial Sequence: Synthetic oligonucleotide
aacacccaagauugaacagcuuucu

SEQ ID NO: 114571 - RNA, 25 nt, Artificial Sequence
  Description of Artificial Sequence: Synthetic oligonucleotide
uaauaugauuguaaagucuugcaaa

SEQ ID NO: 114572 - RNA, 25 nt, Artificial Sequence
  Description of Artificial Sequence: Synthetic oligonucleotide
augcagcuaaaauucuuggaaaagu

SEQ ID NO: 114573 - RNA, 25 nt, Artificial Sequence
  Description of Artificial Sequence: Synthetic oligonucleotide
uggcaagaccaaaaugacaaugaug

SEQ ID NO: 114574 - RNA, 25 nt, Artificial Sequence
  Description of Artificial Sequence: Synthetic oligonucleotide
gaugauaaugaugaugacgacgaca

SEQ ID NO: 114575 - RNA, 25 nt, Artificial Sequence
  Description of Artificial Sequence: Synthetic oligonucleotide
aacgaugaugcuuguaacaagaaaa

SEQ ID NO: 114576 - RNA, 25 nt, Artificial Sequence
  Description of Artificial Sequence: Synthetic oligonucleotide
acauaagagagccuugguucaucag

SEQ ID NO: 114577 - RNA, 25 nt, Artificial Sequence
  Description of Artificial Sequence: Synthetic oligonucleotide
guguuaaaaaauuuuugaaaaggcg

SEQ ID NO: 114578 - RNA, 25 nt, Artificial Sequence
  Description of Artificial Sequence: Synthetic oligonucleotide
gguacuaguucagacacuuuggaag

SEQ ID NO: 114579 - RNA, 25 nt, Artificial Sequence
  Description of Artificial Sequence: Synthetic oligonucleotide
guuuguguucuguuuguuaaaacug

SEQ ID NO: 114580 - RNA, 25 nt, Artificial Sequence
  Description of Artificial Sequence: Synthetic oligonucleotide
ggcaucugacacaaaaaaaguugaa

SEQ ID NO: 114581 - RNA, 25 nt, Artificial Sequence
  Description of Artificial Sequence: Synthetic oligonucleotide
aggccuuauucuacauuucaccuac

SEQ ID NO: 114582 - RNA, 25 nt, Artificial Sequence
  Description of Artificial Sequence: Synthetic oligonucleotide
cuuuguaagugagagagacaagaag

SEQ ID NO: 114583 - RNA, 25 nt, Artificial Sequence
  Description of Artificial Sequence: Synthetic oligonucleotide
gagacaagaagcaaauuuuuuuaaa

SEQ ID NO: 114584 - RNA, 2574 nt, Homo sapiens
ccuguuuagacacauggacaacaaucccagcgcuacaaggcacacaguccgcuucuucguccucaggguugccagcgcuuccuggaaguccugaagcucucgcagugcagugaguucaugcaccuucuugccaagccucagucuuugggaucuggggaggccgccugguuuuccucccuccuucugcacgucugcuggggucucuuccucuccaggccuugccgucccccuggccucucuucccagcucacacaugaagaugcacuugcaaagggcucuggugguccuggcccugcugaacuuugccacggucagccucucucuguccacuugcaccaccuuggacuucggccacaucaagaagaagaggguggaagccauuaggggacagaucuugagcaagcucaggcucaccagccccccugagccaacggugaugacccacguccccuaucagguccuggcccuuuacaacagcacccgggagcugcuggaggagaugcauggggagagggaggaaggcugcacccaggaaaacaccgagucggaauacuaugccaaagaaauccauaaauucgacaugauccaggggcuggcggagcacaacgaacuggcugucugcccuaaaggaauuaccuccaagguuuuccgcuucaauguguccucaguggagaaaaauagaaccaaccuauuccgagcagaauuccgggucuugcgggugcccaaccccagcucuaagcggaaugagcagaggaucgagcucuuccagauccuucggccagaugagcacauugccaaacagcgcuauaucgguggcaagaaucugcccacacggggcacugccgaguggcuguccuuugaugucacugacacugugcgugaguggcuguugagaagagaguccaacuuaggucuagaaaucagcauucacuguccaugucacaccuuucagcccaauggagauauccuggaaaacauucacgaggugauggaaaucaaauucaaaggcguggacaaugaggaugaccauggccguggagaucuggggcgccucaagaagcagaaggaucaccacaacccucaucuaauccucaugaugauucccccacaccggcucgacaacccgggccaggggggucagaggaagaagcgggcuuuggacaccaauuacugcuuccgcaacuuggaggagaacugcugugugcgcccccucuacauugacuuccgacaggaucugggcuggaaguggguccaugaaccuaagggcuacuaugccaacuucugcucaggcccuugcccauaccuccgcagugcagacacaacccacagcacggugcugggacuguacaacacucugaacccugaagcaucugccucgccuugcugcgugccccaggaccuggagccccugaccauccuguacuauguugggaggacccccaaaguggagcagcucuccaacaugguggugaagucuuguaaauguagcugagaccccacgugcgacagagagaggggagagagaaccaccacugccugacugcccgcuccucgggaaacacacaagcaacaaaccucacugagaggccuggagcccacaaccuucggcuccgggcaaauggcugagauggagguuuccuuuuggaacauuucuuucuugcuggcucugagaaucacggugguaaagaaaguguggguuugguuagaggaaggcugaacucuucagaacacacagacuuucugugacgcagacagaggggauggggauagaggaaagggaugguaaguugagauguuguguggcaaugggauuugggcuacccuaaagggagaaggaagggcagagaauggcugggucagggccagacuggaagacacuucagaucugagguuggauuugcucauugcuguaccacaucugcucuagggaaucuggauuauguuauacaaggcaagcauuuuuuuuuuuaaagacagguuacgaagacaaagucccagaauuguaucucauacugucugggauuaagggcaaaucuauuacuuuugcaaacuguccucuacaucaauuaacaucgugggucacuacagggagaaaauccaggucaugcaguuccuggcccaucaacuguauugggccuuuuggauaugcugaacgcagaagaaaggguggaaaucaacccucuccugucugcccucugggucccuccucucaccucucccucgaucauauuuccccuuggacacuugguuagacgccuuccaggucaggaugcacauuucuggauugugguuccaugcagccuuggggcauuaugggucuucccccacuuccccuccaagacccuguguucauuugguguuccuggaagcaggugcuacaacaugugaggcauucggggaagcugcacaugugccacacagugacuuggccccagacgcauagacugagguauaaagacaaguaugaauauuacucucaaaaucuuuguauaaauaaauauuuuuggggcauccuggaugauuucaucuucuggaauauuguuucuagaacaguaaaagccuuauucuaaggug

SEQ ID NO: 114585 - RNA, 19 nt, Artificial Sequence
  Description of Artificial Sequence: Synthetic oligonucleotide
ccuguuuagacacauggac

SEQ ID NO: 114586 - RNA, 19 nt, Artificial Sequence
  Description of Artificial Sequence: Synthetic oligonucleotide
caacaaucccagcgcuaca

SEQ ID NO: 114587 - RNA, 19 nt, Artificial Sequence
  Description of Artificial Sequence: Synthetic oligonucleotide
aaggcacacaguccgcuuc

SEQ ID NO: 114588 - RNA, 19 nt, Artificial Sequence
  Description of Artificial Sequence: Synthetic oligonucleotide
cuucguccucaggguugcc

SEQ ID NO: 114589 - RNA, 19 nt, Artificial Sequence
  Description of Artificial Sequence: Synthetic oligonucleotide
cagcgcuuccuggaagucc

SEQ ID NO: 114590 - RNA, 19 nt, Artificial Sequence
  Description of Artificial Sequence: Synthetic oligonucleotide
cugaagcucucgcagugca

SEQ ID NO: 114591 - RNA, 19 nt, Artificial Sequence
  Description of Artificial Sequence: Synthetic oligonucleotide
agugaguucaugcaccuuc

SEQ ID NO: 114592 - RNA, 19 nt, Artificial Sequence
  Description of Artificial Sequence: Synthetic oligonucleotide
cuugccaagccucagucuu

SEQ ID NO: 114593 - RNA, 19 nt, Artificial Sequence
  Description of Artificial Sequence: Synthetic oligonucleotide
uugggaucuggggaggccg

SEQ ID NO: 114594 - RNA, 19 nt, Artificial Sequence
  Description of Artificial Sequence: Synthetic oligonucleotide
gccugguuuuccucccucc

SEQ ID NO: 114595 - RNA, 19 nt, Artificial Sequence
  Description of Artificial Sequence: Synthetic oligonucleotide
cuucugcacgucugcuggg

SEQ ID NO: 114596 - RNA, 19 nt, Artificial Sequence
  Description of Artificial Sequence: Synthetic oligonucleotide
ggucucuuccucuccaggc

SEQ ID NO: 114597 - RNA, 19 nt, Artificial Sequence
  Description of Artificial Sequence: Synthetic oligonucleotide
ccuugccgucccccuggcc

SEQ ID NO: 114598 - RNA, 19 nt, Artificial Sequence
  Description of Artificial Sequence: Synthetic oligonucleotide
cucucuucccagcucacac

SEQ ID NO: 114599 - RNA, 19 nt, Artificial Sequence
  Description of Artificial Sequence: Synthetic oligonucleotide
caugaagaugcacuugcaa

SEQ ID NO: 114600 - RNA, 19 nt, Artificial Sequence
  Description of Artificial Sequence: Synthetic oligonucleotide
aagggcucuggugguccug

SEQ ID NO: 114601 - RNA, 19 nt, Artificial Sequence
  Description of Artificial Sequence: Synthetic oligonucleotide
ggcccugcugaacuuugcc

SEQ ID NO: 114602 - RNA, 19 nt, Artificial Sequence
  Description of Artificial Sequence: Synthetic oligonucleotide
cacggucagccucucucug

SEQ ID NO: 114603 - RNA, 19 nt, Artificial Sequence
  Description of Artificial Sequence: Synthetic oligonucleotide
guccacuugcaccaccuug

SEQ ID NO: 114604 - RNA, 19 nt, Artificial Sequence
  Description of Artificial Sequence: Synthetic oligonucleotide
ggacuucggccacaucaag

SEQ ID NO: 114605 - RNA, 19 nt, Artificial Sequence
  Description of Artificial Sequence: Synthetic oligonucleotide
gaagaagaggguggaagcc

SEQ ID NO: 114606 - RNA, 19 nt, Artificial Sequence
  Description of Artificial Sequence: Synthetic oligonucleotide
cauuaggggacagaucuug

SEQ ID NO: 114607 - RNA, 19 nt, Artificial Sequence
  Description of Artificial Sequence: Synthetic oligonucleotide
gagcaagcucaggcucacc

SEQ ID NO: 114608 - RNA, 19 nt, Artificial Sequence
  Description of Artificial Sequence: Synthetic oligonucleotide
cagccccccugagccaacg

SEQ ID NO: 114609 - RNA, 19 nt, Artificial Sequence
  Description of Artificial Sequence: Synthetic oligonucleotide
ggugaugacccacgucccc

SEQ ID NO: 114610 - RNA, 19 nt, Artificial Sequence
  Description of Artificial Sequence: Synthetic oligonucleotide
cuaucagguccuggcccuu

SEQ ID NO: 114611 - RNA, 19 nt, Artificial Sequence
  Description of Artificial Sequence: Synthetic oligonucleotide
uuacaacagcacccgggag

SEQ ID NO: 114612 - RNA, 19 nt, Artificial Sequence
  Description of Artificial Sequence: Synthetic oligonucleotide
gcugcuggaggagaugcau

SEQ ID NO: 114613 - RNA, 19 nt, Artificial Sequence
  Description of Artificial Sequence: Synthetic oligonucleotide
uggggagagggaggaaggc

SEQ ID NO: 114614 - RNA, 19 nt, Artificial Sequence
  Description of Artificial Sequence: Synthetic oligonucleotide
cugcacccaggaaaacacc

SEQ ID NO: 114615 - RNA, 19 nt, Artificial Sequence
  Description of Artificial Sequence: Synthetic oligonucleotide
cgagucggaauacuaugcc

SEQ ID NO: 114616 - RNA, 19 nt, Artificial Sequence
  Description of Artificial Sequence: Synthetic oligonucleotide
caaagaaauccauaaauuc

SEQ ID NO: 114617 - RNA, 19 nt, Artificial Sequence
  Description of Artificial Sequence: Synthetic oligonucleotide
cgacaugauccaggggcug

SEQ ID NO: 114618 - RNA, 19 nt, Artificial Sequence
  Description of Artificial Sequence: Synthetic oligonucleotide
ggcggagcacaacgaacug

SEQ ID NO: 114619 - RNA, 19 nt, Artificial Sequence
  Description of Artificial Sequence: Synthetic oligonucleotide
ggcugucugcccuaaagga

SEQ ID NO: 114620 - RNA, 19 nt, Artificial Sequence
  Description of Artificial Sequence: Synthetic oligonucleotide
aauuaccuccaagguuuuc

SEQ ID NO: 114621 - RNA, 19 nt, Artificial Sequence
  Description of Artificial Sequence: Synthetic oligonucleotide
ccgcuucaauguguccuca

SEQ ID NO: 114622 - RNA, 19 nt, Artificial Sequence
  Description of Artificial Sequence: Synthetic oligonucleotide
aguggagaaaaauagaacc

SEQ ID NO: 114623 - RNA, 19 nt, Artificial Sequence
  Description of Artificial Sequence: Synthetic oligonucleotide
caaccuauuccgagcagaa

SEQ ID NO: 114624 - RNA, 19 nt, Artificial Sequence
  Description of Artificial Sequence: Synthetic oligonucleotide
auuccgggucuugcgggug

SEQ ID NO: 114625 - RNA, 19 nt, Artificial Sequence
  Description of Artificial Sequence: Synthetic oligonucleotide
gcccaaccccagcucuaag

SEQ ID NO: 114626 - RNA, 19 nt, Artificial Sequence
  Description of Artificial Sequence: Synthetic oligonucleotide
gcggaaugagcagaggauc

SEQ ID NO: 114627 - RNA, 19 nt, Artificial Sequence
  Description of Artificial Sequence: Synthetic oligonucleotide
cgagcucuuccagauccuu

SEQ ID NO: 114628 - RNA, 19 nt, Artificial Sequence
  Description of Artificial Sequence: Synthetic oligonucleotide
ucggccagaugagcacauu

SEQ ID NO: 114629 - RNA, 19 nt, Artificial Sequence
  Description of Artificial Sequence: Synthetic oligonucleotide
ugccaaacagcgcuauauc

SEQ ID NO: 114630 - RNA, 19 nt, Artificial Sequence
  Description of Artificial Sequence: Synthetic oligonucleotide
cgguggcaagaaucugccc

SEQ ID NO: 114631 - RNA, 19 nt, Artificial Sequence
  Description of Artificial Sequence: Synthetic oligonucleotide
cacacggggcacugccgag

SEQ ID NO: 114632 - RNA, 19 nt, Artificial Sequence
  Description of Artificial Sequence: Synthetic oligonucleotide
guggcuguccuuugauguc

SEQ ID NO: 114633 - RNA, 19 nt, Artificial Sequence
  Description of Artificial Sequence: Synthetic oligonucleotide
cacugacacugugcgugag

SEQ ID NO: 114634 - RNA, 19 nt, Artificial Sequence
  Description of Artificial Sequence: Synthetic oligonucleotide
guggcuguugagaagagag

SEQ ID NO: 114635 - RNA, 19 nt, Artificial Sequence
  Description of Artificial Sequence: Synthetic oligonucleotide
guccaacuuaggucuagaa

SEQ ID NO: 114636 - RNA, 19 nt, Artificial Sequence
  Description of Artificial Sequence: Synthetic oligonucleotide
aaucagcauucacugucca

SEQ ID NO: 114637 - RNA, 19 nt, Artificial Sequence
  Description of Artificial Sequence: Synthetic oligonucleotide
augucacaccuuucagccc

SEQ ID NO: 114638 - RNA, 19 nt, Artificial Sequence
  Description of Artificial Sequence: Synthetic oligonucleotide
caauggagauauccuggaa

SEQ ID NO: 114639 - RNA, 19 nt, Artificial Sequence
  Description of Artificial Sequence: Synthetic oligonucleotide
aaacauucacgaggugaug

SEQ ID NO: 114640 - RNA, 19 nt, Artificial Sequence
  Description of Artificial Sequence: Synthetic oligonucleotide
ggaaaucaaauucaaaggc

SEQ ID NO: 114641 - RNA, 19 nt, Artificial Sequence
  Description of Artificial Sequence: Synthetic oligonucleotide
cguggacaaugaggaugac

SEQ ID NO: 114642 - RNA, 19 nt, Artificial Sequence
  Description of Artificial Sequence: Synthetic oligonucleotide
ccauggccguggagaucug

SEQ ID NO: 114643 - RNA, 19 nt, Artificial Sequence
  Description of Artificial Sequence: Synthetic oligonucleotide
ggggcgccucaagaagcag

SEQ ID NO: 114644 - RNA, 19 nt, Artificial Sequence
  Description of Artificial Sequence: Synthetic oligonucleotide
gaaggaucaccacaacccu

SEQ ID NO: 114645 - RNA, 19 nt, Artificial Sequence
  Description of Artificial Sequence: Synthetic oligonucleotide
ucaucuaauccucaugaug

SEQ ID NO: 114646 - RNA, 19 nt, Artificial Sequence
  Description of Artificial Sequence: Synthetic oligonucleotide
gauucccccacaccggcuc

SEQ ID NO: 114647 - RNA, 19 nt, Artificial Sequence
  Description of Artificial Sequence: Synthetic oligonucleotide
cgacaacccgggccagggg

SEQ ID NO: 114648 - RNA, 19 nt, Artificial Sequence
  Description of Artificial Sequence: Synthetic oligonucleotide
gggucagaggaagaagcgg

SEQ ID NO: 114649 - RNA, 19 nt, Artificial Sequence
  Description of Artificial Sequence: Synthetic oligonucleotide
ggcuuuggacaccaauuac

SEQ ID NO: 114650 - RNA, 19 nt, Artificial Sequence
  Description of Artificial Sequence: Synthetic oligonucleotide
cugcuuccgcaacuuggag

SEQ ID NO: 114651 - RNA, 19 nt, Artificial Sequence
  Description of Artificial Sequence: Synthetic oligonucleotide
ggagaacugcugugugcgc

SEQ ID NO: 114652 - RNA, 19 nt, Artificial Sequence
  Description of Artificial Sequence: Synthetic oligonucleotide
cccccucuacauugacuuc

SEQ ID NO: 114653 - RNA, 19 nt, Artificial Sequence
  Description of Artificial Sequence: Synthetic oligonucleotide
ccgacaggaucugggcugg

SEQ ID NO: 114654 - RNA, 19 nt, Artificial Sequence
  Description of Artificial Sequence: Synthetic oligonucleotide
gaaguggguccaugaaccu

SEQ ID NO: 114655 - RNA, 19 nt, Artificial Sequence
  Description of Artificial Sequence: Synthetic oligonucleotide
uaagggcuacuaugccaac

SEQ ID NO: 114656 - RNA, 19 nt, Artificial Sequence
  Description of Artificial Sequence: Synthetic oligonucleotide
cuucugcucaggcccuugc

SEQ ID NO: 114657 - RNA, 19 nt, Artificial Sequence
  Description of Artificial Sequence: Synthetic oligonucleotide
cccauaccuccgcagugca

SEQ ID NO: 114658 - RNA, 19 nt, Artificial Sequence
  Description of Artificial Sequence: Synthetic oligonucleotide
agacacaacccacagcacg

SEQ ID NO: 114659 - RNA, 19 nt, Artificial Sequence
  Description of Artificial Sequence: Synthetic oligonucleotide
ggugcugggacuguacaac

SEQ ID NO: 114660 - RNA, 19 nt, Artificial Sequence
  Description of Artificial Sequence: Synthetic oligonucleotide
cacucugaacccugaagca

SEQ ID NO: 114661 - RNA, 19 nt, Artificial Sequence
  Description of Artificial Sequence: Synthetic oligonucleotide
aucugccucgccuugcugc

SEQ ID NO: 114662 - RNA, 19 nt, Artificial Sequence
  Description of Artificial Sequence: Synthetic oligonucleotide
cgugccccaggaccuggag

SEQ ID NO: 114663 - RNA, 19 nt, Artificial Sequence
  Description of Artificial Sequence: Synthetic oligonucleotide
gccccugaccauccuguac

SEQ ID NO: 114664 - RNA, 19 nt, Artificial Sequence
  Description of Artificial Sequence: Synthetic oligonucleotide
cuauguugggaggaccccc

SEQ ID NO: 114665 - RNA, 19 nt, Artificial Sequence
  Description of Artificial Sequence: Synthetic oligonucleotide
caaaguggagcagcucucc

SEQ ID NO: 114666 - RNA, 19 nt, Artificial Sequence
  Description of Artificial Sequence: Synthetic oligonucleotide
caacaugguggugaagucu

SEQ ID NO: 114667 - RNA, 19 nt, Artificial Sequence
  Description of Artificial Sequence: Synthetic oligonucleotide
uuguaaauguagcugagac

SEQ ID NO: 114668 - RNA, 19 nt, Artificial Sequence
  Description of Artificial Sequence: Synthetic oligonucleotide
ccccacgugcgacagagag

SEQ ID NO: 114669 - RNA, 19 nt, Artificial Sequence
  Description of Artificial Sequence: Synthetic oligonucleotide
gaggggagagagaaccacc

SEQ ID NO: 114670 - RNA, 19 nt, Artificial Sequence
  Description of Artificial Sequence: Synthetic oligonucleotide
cacugccugacugcccgcu

SEQ ID NO: 114671 - RNA, 19 nt, Artificial Sequence
  Description of Artificial Sequence: Synthetic oligonucleotide
uccucgggaaacacacaag

SEQ ID NO: 114672 - RNA, 19 nt, Artificial Sequence
  Description of Artificial Sequence: Synthetic oligonucleotide
gcaacaaaccucacugaga

SEQ ID NO: 114673 - RNA, 19 nt, Artificial Sequence
  Description of Artificial Sequence: Synthetic oligonucleotide
aggccuggagcccacaacc

SEQ ID NO: 114674 - RNA, 19 nt, Artificial Sequence
  Description of Artificial Sequence: Synthetic oligonucleotide
cuucggcuccgggcaaaug

SEQ ID NO: 114675 - RNA, 19 nt, Artificial Sequence
  Description of Artificial Sequence: Synthetic oligonucleotide
ggcugagauggagguuucc

SEQ ID NO: 114676 - RNA, 19 nt, Artificial Sequence
  Description of Artificial Sequence: Synthetic oligonucleotide
cuuuuggaacauuucuuuc

SEQ ID NO: 114677 - RNA, 19 nt, Artificial Sequence
  Description of Artificial Sequence: Synthetic oligonucleotide
cuugcuggcucugagaauc

SEQ ID NO: 114678 - RNA, 19 nt, Artificial Sequence
  Description of Artificial Sequence: Synthetic oligonucleotide
cacggugguaaagaaagug

SEQ ID NO: 114679 - RNA, 19 nt, Artificial Sequence
  Description of Artificial Sequence: Synthetic oligonucleotide
guggguuugguuagaggaa

SEQ ID NO: 114680 - RNA, 19 nt, Artificial Sequence
  Description of Artificial Sequence: Synthetic oligonucleotide
aggcugaacucuucagaac

SEQ ID NO: 114681 - RNA, 19 nt, Artificial Sequence
  Description of Artificial Sequence: Synthetic oligonucleotide
cacacagacuuucugugac

SEQ ID NO: 114682 - RNA, 19 nt, Artificial Sequence
  Description of Artificial Sequence: Synthetic oligonucleotide
cgcagacagaggggauggg

SEQ ID NO: 114683 - RNA, 19 nt, Artificial Sequence
  Description of Artificial Sequence: Synthetic oligonucleotide
ggauagaggaaagggaugg

SEQ ID NO: 114684 - RNA, 19 nt, Artificial Sequence
  Description of Artificial Sequence: Synthetic oligonucleotide
guaaguugagauguugugu

SEQ ID NO: 114685 - RNA, 19 nt, Artificial Sequence
  Description of Artificial Sequence: Synthetic oligonucleotide
uggcaaugggauuugggcu

SEQ ID NO: 114686 - RNA, 19 nt, Artificial Sequence
  Description of Artificial Sequence: Synthetic oligonucleotide
uacccuaaagggagaagga

SEQ ID NO: 114687 - RNA, 19 nt, Artificial Sequence
  Description of Artificial Sequence: Synthetic oligonucleotide
aagggcagagaauggcugg

SEQ ID NO: 114688 - RNA, 19 nt, Artificial Sequence
  Description of Artificial Sequence: Synthetic oligonucleotide
ggucagggccagacuggaa

SEQ ID NO: 114689 - RNA, 19 nt, Artificial Sequence
  Description of Artificial Sequence: Synthetic oligonucleotide
agacacuucagaucugagg

SEQ ID NO: 114690 - RNA, 19 nt, Artificial Sequence
  Description of Artificial Sequence: Synthetic oligonucleotide
guuggauuugcucauugcu

SEQ ID NO: 114691 - RNA, 19 nt, Artificial Sequence
  Description of Artificial Sequence: Synthetic oligonucleotide
uguaccacaucugcucuag

SEQ ID NO: 114692 - RNA, 19 nt, Artificial Sequence
  Description of Artificial Sequence: Synthetic oligonucleotide
gggaaucuggauuauguua

SEQ ID NO: 114693 - RNA, 19 nt, Artificial Sequence
  Description of Artificial Sequence: Synthetic oligonucleotide
auacaaggcaagcauuuuu

SEQ ID NO: 114694 - RNA, 19 nt, Artificial Sequence
  Description of Artificial Sequence: Synthetic oligonucleotide
uuuuuuuaaagacagguua

SEQ ID NO: 114695 - RNA, 19 nt, Artificial Sequence
  Description of Artificial Sequence: Synthetic oligonucleotide
acgaagacaaagucccaga

SEQ ID NO: 114696 - RNA, 19 nt, Artificial Sequence
  Description of Artificial Sequence: Synthetic oligonucleotide
aauuguaucucauacuguc

SEQ ID NO: 114697 - RNA, 19 nt, Artificial Sequence
  Description of Artificial Sequence: Synthetic oligonucleotide
cugggauuaagggcaaauc

SEQ ID NO: 114698 - RNA, 19 nt, Artificial Sequence
  Description of Artificial Sequence: Synthetic oligonucleotide
cuauuacuuuugcaaacug

SEQ ID NO: 114699 - RNA, 19 nt, Artificial Sequence
  Description of Artificial Sequence: Synthetic oligonucleotide
guccucuacaucaauuaac

SEQ ID NO: 114700 - RNA, 19 nt, Artificial Sequence
  Description of Artificial Sequence: Synthetic oligonucleotide
caucgugggucacuacagg

SEQ ID NO: 114701 - RNA, 19 nt, Artificial Sequence
  Description of Artificial Sequence: Synthetic oligonucleotide
ggagaaaauccaggucaug

SEQ ID NO: 114702 - RNA, 19 nt, Artificial Sequence
  Description of Artificial Sequence: Synthetic oligonucleotide
gcaguuccuggcccaucaa

SEQ ID NO: 114703 - RNA, 19 nt, Artificial Sequence
  Description of Artificial Sequence: Synthetic oligonucleotide
acuguauugggccuuuugg

SEQ ID NO: 114704 - RNA, 19 nt, Artificial Sequence
  Description of Artificial Sequence: Synthetic oligonucleotide
gauaugcugaacgcagaag

SEQ ID NO: 114705 - RNA, 19 nt, Artificial Sequence
  Description of Artificial Sequence: Synthetic oligonucleotide
gaaaggguggaaaucaacc

SEQ ID NO: 114706 - RNA, 19 nt, Artificial Sequence
  Description of Artificial Sequence: Synthetic oligonucleotide
ccucuccugucugcccucu

SEQ ID NO: 114707 - RNA, 19 nt, Artificial Sequence
  Description of Artificial Sequence: Synthetic oligonucleotide
ugggucccuccucucaccu

SEQ ID NO: 114708 - RNA, 19 nt, Artificial Sequence
  Description of Artificial Sequence: Synthetic oligonucleotide
ucucccucgaucauauuuc

SEQ ID NO: 114709 - RNA, 19 nt, Artificial Sequence
  Description of Artificial Sequence: Synthetic oligonucleotide
ccccuuggacacuugguua

SEQ ID NO: 114710 - RNA, 19 nt, Artificial Sequence
  Description of Artificial Sequence: Synthetic oligonucleotide
agacgccuuccaggucagg

SEQ ID NO: 114711 - RNA, 19 nt, Artificial Sequence
  Description of Artificial Sequence: Synthetic oligonucleotide
gaugcacauuucuggauug

SEQ ID NO: 114712 - RNA, 19 nt, Artificial Sequence
  Description of Artificial Sequence: Synthetic oligonucleotide
gugguuccaugcagccuug

SEQ ID NO: 114713 - RNA, 19 nt, Artificial Sequence
  Description of Artificial Sequence: Synthetic oligonucleotide
ggggcauuaugggucuucc

SEQ ID NO: 114714 - RNA, 19 nt, Artificial Sequence
  Description of Artificial Sequence: Synthetic oligonucleotide
ccccacuuccccuccaaga

SEQ ID NO: 114715 - RNA, 19 nt, Artificial Sequence
  Description of Artificial Sequence: Synthetic oligonucleotide
acccuguguucauuuggug

SEQ ID NO: 114716 - RNA, 19 nt, Artificial Sequence
  Description of Artificial Sequence: Synthetic oligonucleotide
guuccuggaagcaggugcu

SEQ ID NO: 114717 - RNA, 19 nt, Artificial Sequence
  Description of Artificial Sequence: Synthetic oligonucleotide
uacaacaugugaggcauuc

SEQ ID NO: 114718 - RNA, 19 nt, Artificial Sequence
  Description of Artificial Sequence: Synthetic oligonucleotide
cggggaagcugcacaugug

SEQ ID NO: 114719 - RNA, 19 nt, Artificial Sequence
  Description of Artificial Sequence: Synthetic oligonucleotide
gccacacagugacuuggcc

SEQ ID NO: 114720 - RNA, 19 nt, Artificial Sequence
  Description of Artificial Sequence: Synthetic oligonucleotide
cccagacgcauagacugag

SEQ ID NO: 114721 - RNA, 19 nt, Artificial Sequence
  Description of Artificial Sequence: Synthetic oligonucleotide
gguauaaagacaaguauga

SEQ ID NO: 114722 - RNA, 19 nt, Artificial Sequence
  Description of Artificial Sequence: Synthetic oligonucleotide
aauauuacucucaaaaucu

SEQ ID NO: 114723 - RNA, 19 nt, Artificial Sequence
  Description of Artificial Sequence: Synthetic oligonucleotide
uuuguauaaauaaauauuu

SEQ ID NO: 114724 - RNA, 19 nt, Artificial Sequence
  Description of Artificial Sequence: Synthetic oligonucleotide
uuuggggcauccuggauga

SEQ ID NO: 114725 - RNA, 19 nt, Artificial Sequence
  Description of Artificial Sequence: Synthetic oligonucleotide
auuucaucuucuggaauau

SEQ ID NO: 114726 - RNA, 19 nt, Artificial Sequence
  Description of Artificial Sequence: Synthetic oligonucleotide
uuguuucuagaacaguaaa

SEQ ID NO: 114727 - RNA, 19 nt, Artificial Sequence
  Description of Artificial Sequence: Synthetic oligonucleotide
aaagccuuauucuaaggug

SEQ ID NO: 114728 - RNA, 25 nt, Artificial Sequence
  Description of Artificial Sequence: Synthetic oligonucleotide
ccuguuuagacacauggacaacaau

SEQ ID NO: 114729 - RNA, 25 nt, Artificial Sequence
  Description of Artificial Sequence: Synthetic oligonucleotide
ucccagcgcuacaaggcacacaguc

SEQ ID NO: 114730 - RNA, 25 nt, Artificial Sequence
  Description of Artificial Sequence: Synthetic oligonucleotide
ccgcuucuucguccucaggguugcc

SEQ ID NO: 114731 - RNA, 25 nt, Artificial Sequence
  Description of Artificial Sequence: Synthetic oligonucleotide
cagcgcuuccuggaaguccugaagc

SEQ ID NO: 114732 - RNA, 25 nt, Artificial Sequence
  Description of Artificial Sequence: Synthetic oligonucleotide
cucucgcagugcagugaguucaugc

SEQ ID NO: 114733 - RNA, 25 nt, Artificial Sequence
  Description of Artificial Sequence: Synthetic oligonucleotide
caccuucuugccaagccucagucuu

SEQ ID NO: 114734 - RNA, 25 nt, Artificial Sequence
  Description of Artificial Sequence: Synthetic oligonucleotide
uugggaucuggggaggccgccuggu

SEQ ID NO: 114735 - RNA, 25 nt, Artificial Sequence
  Description of Artificial Sequence: Synthetic oligonucleotide
uuuuccucccuccuucugcacgucu

SEQ ID NO: 114736 - RNA, 25 nt, Artificial Sequence
  Description of Artificial Sequence: Synthetic oligonucleotide
ugcuggggucucuuccucuccaggc

SEQ ID NO: 114737 - RNA, 25 nt, Artificial Sequence
  Description of Artificial Sequence: Synthetic oligonucleotide
ccuugccgucccccuggccucucuu

SEQ ID NO: 114738 - RNA, 25 nt, Artificial Sequence
  Description of Artificial Sequence: Synthetic oligonucleotide
ucccagcucacacaugaagaugcac

SEQ ID NO: 114739 - RNA, 25 nt, Artificial Sequence
  Description of Artificial Sequence: Synthetic oligonucleotide
cuugcaaagggcucuggugguccug

SEQ ID NO: 114740 - RNA, 25 nt, Artificial Sequence
  Description of Artificial Sequence: Synthetic oligonucleotide
ggcccugcugaacuuugccacgguc

SEQ ID NO: 114741 - RNA, 25 nt, Artificial Sequence
  Description of Artificial Sequence: Synthetic oligonucleotide
cagccucucucuguccacuugcacc

SEQ ID NO: 114742 - RNA, 25 nt, Artificial Sequence
  Description of Artificial Sequence: Synthetic oligonucleotide
caccuuggacuucggccacaucaag

SEQ ID NO: 114743 - RNA, 25 nt, Artificial Sequence
  Description of Artificial Sequence: Synthetic oligonucleotide
gaagaagaggguggaagccauuagg

SEQ ID NO: 114744 - RNA, 25 nt, Artificial Sequence
  Description of Artificial Sequence: Synthetic oligonucleotide
gggacagaucuugagcaagcucagg

SEQ ID NO: 114745 - RNA, 25 nt, Artificial Sequence
  Description of Artificial Sequence: Synthetic oligonucleotide
gcucaccagccccccugagccaacg

SEQ ID NO: 114746 - RNA, 25 nt, Artificial Sequence
  Description of Artificial Sequence: Synthetic oligonucleotide
ggugaugacccacguccccuaucag

SEQ ID NO: 114747 - RNA, 25 nt, Artificial Sequence
  Description of Artificial Sequence: Synthetic oligonucleotide
gguccuggcccuuuacaacagcacc

SEQ ID NO: 114748 - RNA, 25 nt, Artificial Sequence
  Description of Artificial Sequence: Synthetic oligonucleotide
ccgggagcugcuggaggagaugcau

SEQ ID NO: 114749 - RNA, 25 nt, Artificial Sequence
  Description of Artificial Sequence: Synthetic oligonucleotide
uggggagagggaggaaggcugcacc

SEQ ID NO: 114750 - RNA, 25 nt, Artificial Sequence
  Description of Artificial Sequence: Synthetic oligonucleotide
ccaggaaaacaccgagucggaauac

SEQ ID NO: 114751 - RNA, 25 nt, Artificial Sequence
  Description of Artificial Sequence: Synthetic oligonucleotide
cuaugccaaagaaauccauaaauuc

SEQ ID NO: 114752 - RNA, 25 nt, Artificial Sequence
  Description of Artificial Sequence: Synthetic oligonucleotide
cgacaugauccaggggcuggcggag

SEQ ID NO: 114753 - RNA, 25 nt, Artificial Sequence
  Description of Artificial Sequence: Synthetic oligonucleotide
gcacaacgaacuggcugucugcccu

SEQ ID NO: 114754 - RNA, 25 nt, Artificial Sequence
  Description of Artificial Sequence: Synthetic oligonucleotide
uaaaggaauuaccuccaagguuuuc

SEQ ID NO: 114755 - RNA, 25 nt, Artificial Sequence
  Description of Artificial Sequence: Synthetic oligonucleotide
ccgcuucaauguguccucaguggag

SEQ ID NO: 114756 - RNA, 25 nt, Artificial Sequence
  Description of Artificial Sequence: Synthetic oligonucleotide
gaaaaauagaaccaaccuauuccga

SEQ ID NO: 114757 - RNA, 25 nt, Artificial Sequence
  Description of Artificial Sequence: Synthetic oligonucleotide
agcagaauuccgggucuugcgggug

SEQ ID NO: 114758 - RNA, 25 nt, Artificial Sequence
  Description of Artificial Sequence: Synthetic oligonucleotide
gcccaaccccagcucuaagcggaau

SEQ ID NO: 114759 - RNA, 25 nt, Artificial Sequence
  Description of Artificial Sequence: Synthetic oligonucleotide
ugagcagaggaucgagcucuuccag

SEQ ID NO: 114760 - RNA, 25 nt, Artificial Sequence
  Description of Artificial Sequence: Synthetic oligonucleotide
gauccuucggccagaugagcacauu

SEQ ID NO: 114761 - RNA, 25 nt, Artificial Sequence
  Description of Artificial Sequence: Synthetic oligonucleotide
ugccaaacagcgcuauaucgguggc

SEQ ID NO: 114762 - RNA, 25 nt, Artificial Sequence
  Description of Artificial Sequence: Synthetic oligonucleotide
caagaaucugcccacacggggcacu

SEQ ID NO: 114763 - RNA, 25 nt, Artificial Sequence
  Description of Artificial Sequence: Synthetic oligonucleotide
ugccgaguggcuguccuuugauguc

SEQ ID NO: 114764 - RNA, 25 nt, Artificial Sequence
  Description of Artificial Sequence: Synthetic oligonucleotide
cacugacacugugcgugaguggcug

SEQ ID NO: 114765 - RNA, 25 nt, Artificial Sequence
  Description of Artificial Sequence: Synthetic oligonucleotide
guugagaagagaguccaacuuaggu

SEQ ID NO: 114766 - RNA, 25 nt, Artificial Sequence
  Description of Artificial Sequence: Synthetic oligonucleotide
ucuagaaaucagcauucacugucca

SEQ ID NO: 114767 - RNA, 25 nt, Artificial Sequence
  Description of Artificial Sequence: Synthetic oligonucleotide
augucacaccuuucagcccaaugga

SEQ ID NO: 114768 - RNA, 25 nt, Artificial Sequence
  Description of Artificial Sequence: Synthetic oligonucleotide
agauauccuggaaaacauucacgag

SEQ ID NO: 114769 - RNA, 25 nt, Artificial Sequence
  Description of Artificial Sequence: Synthetic oligonucleotide
ggugauggaaaucaaauucaaaggc

SEQ ID NO: 114770 - RNA, 25 nt, Artificial Sequence
  Description of Artificial Sequence: Synthetic oligonucleotide
cguggacaaugaggaugaccauggc

SEQ ID NO: 114771 - RNA, 25 nt, Artificial Sequence
  Description of Artificial Sequence: Synthetic oligonucleotide
ccguggagaucuggggcgccucaag

SEQ ID NO: 114772 - RNA, 25 nt, Artificial Sequence
  Description of Artificial Sequence: Synthetic oligonucleotide
gaagcagaaggaucaccacaacccu

SEQ ID NO: 114773 - RNA, 25 nt, Artificial Sequence
  Description of Artificial Sequence: Synthetic oligonucleotide
ucaucuaauccucaugaugauuccc

SEQ ID NO: 114774 - RNA, 25 nt, Artificial Sequence
  Description of Artificial Sequence: Synthetic oligonucleotide
cccacaccggcucgacaacccgggc

SEQ ID NO: 114775 - RNA, 25 nt, Artificial Sequence
  Description of Artificial Sequence: Synthetic oligonucleotide
ccaggggggucagaggaagaagcgg

SEQ ID NO: 114776 - RNA, 25 nt, Artificial Sequence
  Description of Artificial Sequence: Synthetic oligonucleotide
ggcuuuggacaccaauuacugcuuc

SEQ ID NO: 114777 - RNA, 25 nt, Artificial Sequence
  Description of Artificial Sequence: Synthetic oligonucleotide
ccgcaacuuggaggagaacugcugu

SEQ ID NO: 114778 - RNA, 25 nt, Artificial Sequence
  Description of Artificial Sequence: Synthetic oligonucleotide
ugugcgcccccucuacauugacuuc

SEQ ID NO: 114779 - RNA, 25 nt, Artificial Sequence
  Description of Artificial Sequence: Synthetic oligonucleotide
ccgacaggaucugggcuggaagugg

SEQ ID NO: 114780 - RNA, 25 nt, Artificial Sequence
  Description of Artificial Sequence: Synthetic oligonucleotide
gguccaugaaccuaagggcuacuau

SEQ ID NO: 114781 - RNA, 25 nt, Artificial Sequence
  Description of Artificial Sequence: Synthetic oligonucleotide
ugccaacuucugcucaggcccuugc

SEQ ID NO: 114782 - RNA, 25 nt, Artificial Sequence
  Description of Artificial Sequence: Synthetic oligonucleotide
cccauaccuccgcagugcagacaca

SEQ ID NO: 114783 - RNA, 25 nt, Artificial Sequence
  Description of Artificial Sequence: Synthetic oligonucleotide
aacccacagcacggugcugggacug

SEQ ID NO: 114784 - RNA, 25 nt, Artificial Sequence
  Description of Artificial Sequence: Synthetic oligonucleotide
guacaacacucugaacccugaagca

SEQ ID NO: 114785 - RNA, 25 nt, Artificial Sequence
  Description of Artificial Sequence: Synthetic oligonucleotide
aucugccucgccuugcugcgugccc

SEQ ID NO: 114786 - RNA, 25 nt, Artificial Sequence
  Description of Artificial Sequence: Synthetic oligonucleotide
ccaggaccuggagccccugaccauc

SEQ ID NO: 114787 - RNA, 25 nt, Artificial Sequence
  Description of Artificial Sequence: Synthetic oligonucleotide
ccuguacuauguugggaggaccccc

SEQ ID NO: 114788 - RNA, 25 nt, Artificial Sequence
  Description of Artificial Sequence: Synthetic oligonucleotide
caaaguggagcagcucuccaacaug

SEQ ID NO: 114789 - RNA, 25 nt, Artificial Sequence
  Description of Artificial Sequence: Synthetic oligonucleotide
gguggugaagucuuguaaauguagc

SEQ ID NO: 114790 - RNA, 25 nt, Artificial Sequence
  Description of Artificial Sequence: Synthetic oligonucleotide
cugagaccccacgugcgacagagag

SEQ ID NO: 114791 - RNA, 25 nt, Artificial Sequence
  Description of Artificial Sequence: Synthetic oligonucleotide
gaggggagagagaaccaccacugcc

SEQ ID NO: 114792 - RNA, 25 nt, Artificial Sequence
  Description of Artificial Sequence: Synthetic oligonucleotide
cugacugcccgcuccucgggaaaca

SEQ ID NO: 114793 - RNA, 25 nt, Artificial Sequence
  Description of Artificial Sequence: Synthetic oligonucleotide
acacaagcaacaaaccucacugaga

SEQ ID NO: 114794 - RNA, 25 nt, Artificial Sequence
  Description of Artificial Sequence: Synthetic oligonucleotide
aggccuggagcccacaaccuucggc

SEQ ID NO: 114795 - RNA, 25 nt, Artificial Sequence
  Description of Artificial Sequence: Synthetic oligonucleotide
cuccgggcaaauggcugagauggag

SEQ ID NO: 114796 - RNA, 25 nt, Artificial Sequence
  Description of Artificial Sequence: Synthetic oligonucleotide
gguuuccuuuuggaacauuucuuuc

SEQ ID NO: 114797 - RNA, 25 nt, Artificial Sequence
  Description of Artificial Sequence: Synthetic oligonucleotide
cuugcuggcucugagaaucacggug

SEQ ID NO: 114798 - RNA, 25 nt, Artificial Sequence
  Description of Artificial Sequence: Synthetic oligonucleotide
gguaaagaaaguguggguuugguua

SEQ ID NO: 114799 - RNA, 25 nt, Artificial Sequence
  Description of Artificial Sequence: Synthetic oligonucleotide
agaggaaggcugaacucuucagaac

SEQ ID NO: 114800 - RNA, 25 nt, Artificial Sequence
  Description of Artificial Sequence: Synthetic oligonucleotide
cacacagacuuucugugacgcagac

SEQ ID NO: 114801 - RNA, 25 nt, Artificial Sequence
  Description of Artificial Sequence: Synthetic oligonucleotide
cagaggggauggggauagaggaaag

SEQ ID NO: 114802 - RNA, 25 nt, Artificial Sequence
  Description of Artificial Sequence: Synthetic oligonucleotide
gggaugguaaguugagauguugugu

SEQ ID NO: 114803 - RNA, 25 nt, Artificial Sequence
  Description of Artificial Sequence: Synthetic oligonucleotide
uggcaaugggauuugggcuacccua

SEQ ID NO: 114804 - RNA, 25 nt, Artificial Sequence
  Description of Artificial Sequence: Synthetic oligonucleotide
aaagggagaaggaagggcagagaau

SEQ ID NO: 114805 - RNA, 25 nt, Artificial Sequence
  Description of Artificial Sequence: Synthetic oligonucleotide
uggcugggucagggccagacuggaa

SEQ ID NO: 114806 - RNA, 25 nt, Artificial Sequence
  Description of Artificial Sequence: Synthetic oligonucleotide
agacacuucagaucugagguuggau

SEQ ID NO: 114807 - RNA, 25 nt, Artificial Sequence
  Description of Artificial Sequence: Synthetic oligonucleotide
uuugcucauugcuguaccacaucug

SEQ ID NO: 114808 - RNA, 25 nt, Artificial Sequence
  Description of Artificial Sequence: Synthetic oligonucleotide
gcucuagggaaucuggauuauguua

SEQ ID NO: 114809 - RNA, 25 nt, Artificial Sequence
  Description of Artificial Sequence: Synthetic oligonucleotide
uaaagacagguuacgaagacaaagu

SEQ ID NO: 114810 - RNA, 25 nt, Artificial Sequence
  Description of Artificial Sequence: Synthetic oligonucleotide
ucccagaauuguaucucauacuguc

SEQ ID NO: 114811 - RNA, 25 nt, Artificial Sequence
  Description of Artificial Sequence: Synthetic oligonucleotide
cugggauuaagggcaaaucuauuac

SEQ ID NO: 114812 - RNA, 25 nt, Artificial Sequence
  Description of Artificial Sequence: Synthetic oligonucleotide
cuuuugcaaacuguccucuacauca

SEQ ID NO: 114813 - RNA, 25 nt, Artificial Sequence
  Description of Artificial Sequence: Synthetic oligonucleotide
aauuaacaucgugggucacuacagg

SEQ ID NO: 114814 - RNA, 25 nt, Artificial Sequence
  Description of Artificial Sequence: Synthetic oligonucleotide
ggagaaaauccaggucaugcaguuc

SEQ ID NO: 114815 - RNA, 25 nt, Artificial Sequence
  Description of Artificial Sequence: Synthetic oligonucleotide
ccuggcccaucaacuguauugggcc

SEQ ID NO: 114816 - RNA, 25 nt, Artificial Sequence
  Description of Artificial Sequence: Synthetic oligonucleotide
cuuuuggauaugcugaacgcagaag

SEQ ID NO: 114817 - RNA, 25 nt, Artificial Sequence
  Description of Artificial Sequence: Synthetic oligonucleotide
gaaaggguggaaaucaacccucucc

SEQ ID NO: 114818 - RNA, 25 nt, Artificial Sequence
  Description of Artificial Sequence: Synthetic oligonucleotide
cugucugcccucugggucccuccuc

SEQ ID NO: 114819 - RNA, 25 nt, Artificial Sequence
  Description of Artificial Sequence: Synthetic oligonucleotide
cucaccucucccucgaucauauuuc

SEQ ID NO: 114820 - RNA, 25 nt, Artificial Sequence
  Description of Artificial Sequence: Synthetic oligonucleotide
ccccuuggacacuugguuagacgcc

SEQ ID NO: 114821 - RNA, 25 nt, Artificial Sequence
  Description of Artificial Sequence: Synthetic oligonucleotide
cuuccaggucaggaugcacauuucu

SEQ ID NO: 114822 - RNA, 25 nt, Artificial Sequence
  Description of Artificial Sequence: Synthetic oligonucleotide
uggauugugguuccaugcagccuug

SEQ ID NO: 114823 - RNA, 25 nt, Artificial Sequence
  Description of Artificial Sequence: Synthetic oligonucleotide
ggggcauuaugggucuucccccacu

SEQ ID NO: 114824 - RNA, 25 nt, Artificial Sequence
  Description of Artificial Sequence: Synthetic oligonucleotide
uuccccuccaagacccuguguucau

SEQ ID NO: 114825 - RNA, 25 nt, Artificial Sequence
  Description of Artificial Sequence: Synthetic oligonucleotide
uuugguguuccuggaagcaggugcu

SEQ ID NO: 114826 - RNA, 25 nt, Artificial Sequence
  Description of Artificial Sequence: Synthetic oligonucleotide
uacaacaugugaggcauucggggaa

SEQ ID NO: 114827 - RNA, 25 nt, Artificial Sequence
  Description of Artificial Sequence: Synthetic oligonucleotide
agcugcacaugugccacacagugac

SEQ ID NO: 114828 - RNA, 25 nt, Artificial Sequence
  Description of Artificial Sequence: Synthetic oligonucleotide
cuuggccccagacgcauagacugag

SEQ ID NO: 114829 - RNA, 25 nt, Artificial Sequence
  Description of Artificial Sequence: Synthetic oligonucleotide
gguauaaagacaaguaugaauauua

SEQ ID NO: 114830 - RNA, 25 nt, Artificial Sequence
  Description of Artificial Sequence: Synthetic oligonucleotide
acucucaaaaucuuuguauaaauaa

SEQ ID NO: 114831 - RNA, 25 nt, Artificial Sequence
  Description of Artificial Sequence: Synthetic oligonucleotide
aauauuuuuggggcauccuggauga

SEQ ID NO: 114832 - RNA, 25 nt, Artificial Sequence
  Description of Artificial Sequence: Synthetic oligonucleotide
auuucaucuucuggaauauuguuuc

SEQ ID NO: 114833 - RNA, 25 nt, Artificial Sequence
  Description of Artificial Sequence: Synthetic oligonucleotide
cuagaacaguaaaagccuuauucua

SEQ ID NO: 114834 - RNA, 25 nt, Artificial Sequence
  Description of Artificial Sequence: Synthetic oligonucleotide
acaguaaaagccuuauucuaaggug

SEQ ID NO: 114835 - DNA, 21 bp, Artificial Sequence
  Description of Artificial Sequence: Synthetic oligonucleotide
  Description of Combined DNA/RNA Molecule: Synthetic oligonucleotide
cuacacaaaucagcgauuutt

SEQ ID NO: 114836 - DNA, 21 bp, Artificial Sequence
  Description of Artificial Sequence: Synthetic oligonucleotide
  Description of Combined DNA/RNA Molecule: Synthetic oligonucleotide
aaaucgcugauuuguguagtt

SEQ ID NO: 114837 - DNA, 25 bp, Artificial Sequence
  Description of Artificial Sequence: Synthetic oligonucleotide
  Description of Combined DNA/RNA Molecule: Synthetic oligonucleotide
cuacacaaaucagcgauuuccaugt

SEQ ID NO: 114838 - RNA, 27 nt, Artificial Sequence
  Description of Artificial Sequence: Synthetic oligonucleotide
acauggaaaucgcugauuuguguaguc

SEQ ID NO: 114839 - RNA, 13 nt, Artificial Sequence
  Description of Artificial Sequence: Synthetic oligonucleotide
cuacacaaaucag

SEQ ID NO: 114840 - DNA, 11 bp, Artificial Sequence
  Description of Artificial Sequence: Synthetic oligonucleotide
  Description of Combined DNA/RNA Molecule: Synthetic oligonucleotide
gauuuccaugt

SEQ ID NO: 114841 - DNA, 21 bp, Artificial Sequence
  Description of Artificial Sequence: Synthetic oligonucleotide
  Description of Combined DNA/RNA Molecule: Synthetic oligonucleotide
ggaucuuauuucuucggagtt

SEQ ID NO: 114842 - DNA, 21 bp, Artificial Sequence
  Description of Artificial Sequence: Synthetic oligonucleotide
  Description of Combined DNA/RNA Molecule: Synthetic oligonucleotide
cuccgaagaaauaagaucctt

SEQ ID NO: 114843 - RNA, 11 nt, Artificial Sequence
  Description of Artificial Sequence: Synthetic oligonucleotide
ggaucuuauuu

SEQ ID NO: 114844 - DNA, 10 bp, Artificial Sequence
  Description of Artificial Sequence: Synthetic oligonucleotide
  Description of Combined DNA/RNA Molecule: Synthetic oligonucleotide
cuucggagtt

SEQ ID NO: 114845 - RNA, 27 nt, Artificial Sequence
  Description of Artificial Sequence: Synthetic oligonucleotide
cauugucuccgaagaaauaagauccuu

SEQ ID NO: 114846 - RNA, 8 nt, Artificial Sequence
  Description of Artificial Sequence: Synthetic oligonucleotide
  modified_base (2): LNA-G
ggaucuua

SEQ ID NO: 114847 - DNA, 17 bp, Artificial Sequence
  Description of Artificial Sequence: Synthetic oligonucleotide
  Description of Combined DNA/RNA Molecule: Synthetic oligonucleotide
uuucuucggagacaatg

SEQ ID NO: 114848 - DNA, 16 bp, Artificial Sequence
  Description of Artificial Sequence: Synthetic oligonucleotide
  Description of Combined DNA/RNA Molecule: Synthetic oligonucleotide
uucuucggagacaatg

SEQ ID NO: 114849 - DNA, 15 bp, Artificial Sequence
  Description of Artificial Sequence: Synthetic oligonucleotide
  Description of Combined DNA/RNA Molecule: Synthetic oligonucleotide
ucuucggagacaatg

SEQ ID NO: 114850 - DNA, 14 bp, Artificial Sequence
  Description of Artificial Sequence: Synthetic oligonucleotide
  Description of Combined DNA/RNA Molecule: Synthetic oligonucleotide
cuucggagacaatg

SEQ ID NO: 114851 - DNA, 13 bp, Artificial Sequence
  Description of Artificial Sequence: Synthetic oligonucleotide
  Description of Combined DNA/RNA Molecule: Synthetic oligonucleotide
uucggagacaatg

SEQ ID NO: 114852 - DNA, 12 bp, Artificial Sequence
  Description of Artificial Sequence: Synthetic oligonucleotide
  Description of Combined DNA/RNA Molecule: Synthetic oligonucleotide
ucggagacaatg

SEQ ID NO: 114853 - DNA, 11 bp, Artificial Sequence
  Description of Artificial Sequence: Synthetic oligonucleotide
  Description of Combined DNA/RNA Molecule: Synthetic oligonucleotide
cggagacaatg

SEQ ID NO: 114854 - RNA, 9 nt, Artificial Sequence
  Description of Artificial Sequence: Synthetic oligonucleotide
  modified_base (2): LNA-G
ggaucuuau

SEQ ID NO: 114855 - RNA, 10 nt, Artificial Sequence
  Description of Artificial Sequence: Synthetic oligonucleotide
  modified_base (2): LNA-G
ggaucuuauu

SEQ ID NO: 114856 - RNA, 11 nt, Artificial Sequence
  Description of Artificial Sequence: Synthetic oligonucleotide
  modified_base (2): LNA-G
ggaucuuauuu

SEQ ID NO: 114857 - RNA, 12 nt, Artificial Sequence
  Description of Artificial Sequence: Synthetic oligonucleotide
  modified_base (2): LNA-G
ggaucuuauuuc

SEQ ID NO: 114858 - RNA, 8 nt, Artificial Sequence
  Description of Artificial Sequence: Synthetic oligonucleotide
  modified_base (3): LNA-A
cuacacaa

SEQ ID NO: 114859 - DNA, 13 bp, Artificial Sequence
  Description of Artificial Sequence: Synthetic oligonucleotide
  Description of Combined DNA/RNA Molecule: Synthetic oligonucleotide
  modified_base (8): LNA-A
aucagcgauuutt

SEQ ID NO: 114860 - DNA, 12 bp, Artificial Sequence
  Description of Artificial Sequence: Synthetic oligonucleotide
  Description of Combined DNA/RNA Molecule: Synthetic oligonucleotide
  modified_base (7): LNA-A
ucagcgauuutt

SEQ ID NO: 114861 - DNA, 11 bp, Artificial Sequence
  Description of Artificial Sequence: Synthetic oligonucleotide
  Description of Combined DNA/RNA Molecule: Synthetic oligonucleotide
  modified_base (6): LNA-A
cagcgauuutt

SEQ ID NO: 114862 - DNA, 10 bp, Artificial Sequence
  Description of Artificial Sequence: Synthetic oligonucleotide
  Description of Combined DNA/RNA Molecule: Synthetic oligonucleotide
  modified_base (5): LNA-A
agcgauuutt

SEQ ID NO: 114863 - DNA, 9 bp, Artificial Sequence
  Description of Artificial Sequence: Synthetic oligonucleotide
  Description of Combined DNA/RNA Molecule: Synthetic oligonucleotide
  modified_base (4): LNA-A
gcgauuutt

SEQ ID NO: 114864 - DNA, 8 bp, Artificial Sequence
  Description of Artificial Sequence: Synthetic oligonucleotide
  Description of Combined DNA/RNA Molecule: Synthetic oligonucleotide
  modified_base (3): LNA-A
cgauuutt

SEQ ID NO: 114865 - DNA, 7 bp, Artificial Sequence
  Description of Artificial Sequence: Synthetic oligonucleotide
  Description of Combined DNA/RNA Molecule: Synthetic oligonucleotide
  modified_base (2): LNA-A
gauuutt

SEQ ID NO: 114866 - RNA, 9 nt, Artificial Sequence
  Description of Artificial Sequence: Synthetic oligonucleotide
  modified_base (3): LNA-A
cuacacaaa

SEQ ID NO: 114867 - RNA, 10 nt, Artificial Sequence
  Description of Artificial Sequence: Synthetic oligonucleotide
  modified_base (3): LNA-A
cuacacaaau

SEQ ID NO: 114868 - RNA, 11 nt, Artificial Sequence
  Description of Artificial Sequence: Synthetic oligonucleotide
  modified_base (3): LNA-A
cuacacaaauc

SEQ ID NO: 114869 - RNA, 12 nt, Artificial Sequence
  Description of Artificial Sequence: Synthetic oligonucleotide
  modified_base (3): LNA-A
cuacacaaauca

SEQ ID NO: 114870 - RNA, 13 nt, Artificial Sequence
  Description of Artificial Sequence: Synthetic oligonucleotide
  modified_base (3): LNA-A
cuacacaaaucag

SEQ ID NO: 114871 - RNA, 14 nt, Artificial Sequence
  Description of Artificial Sequence: Synthetic oligonucleotide
  modified_base (3): LNA-A
cuacacaaaucagc

SEQ ID NO: 114872 - RNA, 13 nt, Artificial Sequence
  Description of Artificial Sequence: Synthetic oligonucleotide
  modified_base (2): LNA-G
ggaucuuauuucu

SEQ ID NO: 114873 - RNA, 14 nt, Artificial Sequence
  Description of Artificial Sequence: Synthetic oligonucleotide
  modified_base (2): LNA-G
ggaucuuauuucuu

SEQ ID NO: 114874 - RNA, 8 nt, Artificial Sequence
  Description of Artificial Sequence: Synthetic oligonucleotide
  modified_base (2): LNA-G
  modified_base (8): LNA-A
ggaucuua

SEQ ID NO: 114875 - RNA, 9 nt, Artificial Sequence
  Description of Artificial Sequence: Synthetic oligonucleotide
  modified_base (2): LNA-G
  modified_base (9): LNA-U
ggaucuuau

SEQ ID NO: 114876 - RNA, 10 nt, Artificial Sequence
  Description of Artificial Sequence: Synthetic oligonucleotide
  modified_base (2): LNA-G
  modified_base (10): LNA-U
ggaucuuauu

SEQ ID NO: 114877 - RNA, 11 nt, Artificial Sequence
  Description of Artificial Sequence: Synthetic oligonucleotide
  modified_base (2): LNA-G
  modified_base (11): LNA-U
ggaucuuauuu

SEQ ID NO: 114878 - RNA, 12 nt, Artificial Sequence
  Description of Artificial Sequence: Synthetic oligonucleotide
  modified_base (2): LNA-G
  modified_base (12): LNA-C
ggaucuuauuuc

SEQ ID NO: 114879 - RNA, 13 nt, Artificial Sequence
  Description of Artificial Sequence: Synthetic oligonucleotide
  modified_base (2): LNA-G
  modified_base (13): LNA-U
ggaucuuauuucu

SEQ ID NO: 114880 - RNA, 14 nt, Artificial Sequence
  Description of Artificial Sequence: Synthetic oligonucleotide
  modified_base (2): LNA-G
  modified_base (14): LNA-U
ggaucuuauuucuu

SEQ ID NO: 114881 - DNA, 13 bp, Artificial Sequence
  Description of Artificial Sequence: Synthetic oligonucleotide
  Description of Combined DNA/RNA Molecule: Synthetic oligonucleotide
  modified_base (8): LNA-G
uuucuucggagtt

SEQ ID NO: 114882 - DNA, 12 bp, Artificial Sequence
  Description of Artificial Sequence: Synthetic oligonucleotide
  Description of Combined DNA/RNA Molecule: Synthetic oligonucleotide
  modified_base (7): LNA-G
uucuucggagtt

SEQ ID NO: 114883 - DNA, 11 bp, Artificial Sequence
  Description of Artificial Sequence: Synthetic oligonucleotide
  Description of Combined DNA/RNA Molecule: Synthetic oligonucleotide
  modified_base (6): LNA-G
ucuucggagtt

SEQ ID NO: 114884 - DNA, 10 bp, Artificial Sequence
  Description of Artificial Sequence: Synthetic oligonucleotide
  Description of Combined DNA/RNA Molecule: Synthetic oligonucleotide
  modified_base (5): LNA-G
cuucggagtt

SEQ ID NO: 114885 - DNA, 9 bp, Artificial Sequence
  Description of Artificial Sequence: Synthetic oligonucleotide
  Description of Combined DNA/RNA Molecule: Synthetic oligonucleotide
  modified_base (4): LNA-G
uucggagtt

SEQ ID NO: 114886 - DNA, 8 bp, Artificial Sequence
  Description of Artificial Sequence: Synthetic oligonucleotide
  Description of Combined DNA/RNA Molecule: Synthetic oligonucleotide
  modified_base (3): LNA-G
ucggagtt

SEQ ID NO: 114887 - DNA, 7 bp, Artificial Sequence
  Description of Artificial Sequence: Synthetic oligonucleotide
  Description of Combined DNA/RNA Molecule: Synthetic oligonucleotide
  modified_base (2): LNA-G
cggagtt

SEQ ID NO: 114888 - DNA, 13 bp, Artificial Sequence
  Description of Artificial Sequence: Synthetic oligonucleotide
  Description of Combined DNA/RNA Molecule: Synthetic oligonucleotide
  modified_base (1): LNA-U
  modified_base (8): LNA-G
uuucuucggagtt

SEQ ID NO: 114889 - DNA, 12 bp, Artificial Sequence
  Description of Artificial Sequence: Synthetic oligonucleotide
  Description of Combined DNA/RNA Molecule: Synthetic oligonucleotide
  modified_base (1): LNA-U
  modified_base (7): LNA-G
uucuucggagtt

SEQ ID NO: 114890 - DNA, 11 bp, Artificial Sequence
  Description of Artificial Sequence: Synthetic oligonucleotide
  Description of Combined DNA/RNA Molecule: Synthetic oligonucleotide
  modified_base (1): LNA-U
  modified_base (6): LNA-G
ucuucggagtt

SEQ ID NO: 114891 - DNA, 10 bp, Artificial Sequence
  Description of Artificial Sequence: Synthetic oligonucleotide
  Description of Combined DNA/RNA Molecule: Synthetic oligonucleotide
  modified_base (1): LNA-C
  modified_base (5): LNA-G
cuucggagtt

SEQ ID NO: 114892 - DNA, 9 bp, Artificial Sequence
  Description of Artificial Sequence: Synthetic oligonucleotide
  Description of Combined DNA/RNA Molecule: Synthetic oligonucleotide
  modified_base (1): LNA-U
  modified_base (4): LNA-G
uucggagtt

SEQ ID NO: 114893 - DNA, 8 bp, Artificial Sequence
  Description of Artificial Sequence: Synthetic oligonucleotide
  Description of Combined DNA/RNA Molecule: Synthetic oligonucleotide
  modified_base (1): LNA-U
  modified_base (3): LNA-G
ucggagtt

SEQ ID NO: 114894 - DNA, 7 bp, Artificial Sequence
  Description of Artificial Sequence: Synthetic oligonucleotide
  Description of Combined DNA/RNA Molecule: Synthetic oligonucleotide
  modified_base (1): LNA-C
  modified_base (2): LNA-G
cggagtt

SEQ ID NO: 114895 - DNA, 21 bp, Artificial Sequence
  Description of Artificial Sequence: Synthetic oligonucleotide
  Description of Combined DNA/RNA Molecule: Synthetic oligonucleotide
  modified_base (2): LNA-G
  modified_base (16): LNA-G
ggaucuuauuucuucggagtt

SEQ ID NO: 114896 - DNA, 25 bp, Artificial Sequence
  Description of Artificial Sequence: Synthetic oligonucleotide
  Description of Combined DNA/RNA Molecule: Synthetic oligonucleotide
ggaucuuauuucuucggagacaatg

SEQ ID NO: 114897 - RNA, 25 nt, Artificial Sequence
  Description of Artificial Sequence: Synthetic oligonucleotide
uuaagcagaguucaaaagcccuuca

SEQ ID NO: 114898 - RNA, 25 nt, Artificial Sequence
  Description of Artificial Sequence: Synthetic oligonucleotide
ggcccagaugaucaccaucacacca

SEQ ID NO: 114899 - RNA, 25 nt, Artificial Sequence
  Description of Artificial Sequence: Synthetic oligonucleotide
gggaagaaaacuauccugcggguuu

SEQ ID NO: 114900 - RNA, 25 nt, Artificial Sequence
  Description of Artificial Sequence: Synthetic oligonucleotide
guuuuaauuuauuucauccaguuug

SEQ ID NO: 114901 - RNA, 25 nt, Artificial Sequence
  Description of Artificial Sequence: Synthetic oligonucleotide
acguagggaaauguuaaggacuucu

SEQ ID NO: 114902 - RNA, 25 nt, Artificial Sequence
  Description of Artificial Sequence: Synthetic oligonucleotide
ccaggguuuacccagugggacagag

SEQ ID NO: 114903 - RNA, 25 nt, Artificial Sequence
  Description of Artificial Sequence: Synthetic oligonucleotide
agcaagguuuaaauuuguuauugug

SEQ ID NO: 114904 - RNA, 25 nt, Artificial Sequence
  Description of Artificial Sequence: Synthetic oligonucleotide
uguauuauguuguucaaaugcauuu

SEQ ID NO: 114905 - RNA, 25 nt, Artificial Sequence
  Description of Artificial Sequence: Synthetic oligonucleotide
uuuuaaucuuugugacaggaaagcc

SEQ ID NO: 114906 - RNA, 25 nt, Artificial Sequence
  Description of Artificial Sequence: Synthetic oligonucleotide
uuaaucuuugugacaggaaagcccu

SEQ ID NO: 114907 - RNA, 25 nt, Artificial Sequence
  Description of Artificial Sequence: Synthetic oligonucleotide
gcugcuuaugucucccagcauggcc

SEQ ID NO: 114908 - RNA, 25 nt, Artificial Sequence
  Description of Artificial Sequence: Synthetic oligonucleotide
aaguguuucagaagcuucucccuga

SEQ ID NO: 114909 - RNA, 25 nt, Artificial Sequence
  Description of Artificial Sequence: Synthetic oligonucleotide
gaccaucaauaaggaagaagcccuu

SEQ ID NO: 114910 - RNA, 25 nt, Artificial Sequence
  Description of Artificial Sequence: Synthetic oligonucleotide
ccaucaauaaggaagaagcccuuca

SEQ ID NO: 114911 - RNA, 25 nt, Artificial Sequence
  Description of Artificial Sequence: Synthetic oligonucleotide
ucaauaaggaagaagcccuucagcg

SEQ ID NO: 114912 - RNA, 25 nt, Artificial Sequence
  Description of Artificial Sequence: Synthetic oligonucleotide
aauaaggaagaagcccuucagcggc

SEQ ID NO: 114913 - RNA, 25 nt, Artificial Sequence
  Description of Artificial Sequence: Synthetic oligonucleotide
aggaagaagcccuucagcggccagu

SEQ ID NO: 114914 - RNA, 25 nt, Artificial Sequence
  Description of Artificial Sequence: Synthetic oligonucleotide
gcauaacuaaaggugaaaagcuccg

SEQ ID NO: 114915 - RNA, 25 nt, Artificial Sequence
  Description of Artificial Sequence: Synthetic oligonucleotide
cauaacuaaaggugaaaagcuccgg

SEQ ID NO: 114916 - RNA, 25 nt, Artificial Sequence
  Description of Artificial Sequence: Synthetic oligonucleotide
cuacaucacgccagucaacagucug

SEQ ID NO: 114917 - RNA, 25 nt, Artificial Sequence
  Description of Artificial Sequence: Synthetic oligonucleotide
acuggauuuaagcagaguucaaaag

SEQ ID NO: 114918 - RNA, 25 nt, Artificial Sequence
  Description of Artificial Sequence: Synthetic oligonucleotide
cuggauuuaagcagaguucaaaagc

SEQ ID NO: 114919 - RNA, 25 nt, Artificial Sequence
  Description of Artificial Sequence: Synthetic oligonucleotide
gauuuaagcagaguucaaaagcccu

SEQ ID NO: 114920 - RNA, 25 nt, Artificial Sequence
  Description of Artificial Sequence: Synthetic oligonucleotide
auuuaagcagaguucaaaagcccuu

SEQ ID NO: 114921 - RNA, 25 nt, Artificial Sequence
  Description of Artificial Sequence: Synthetic oligonucleotide
uuaagcagaguucaaaagcccuuca

SEQ ID NO: 114922 - RNA, 25 nt, Artificial Sequence
  Description of Artificial Sequence: Synthetic oligonucleotide
uaagcagaguucaaaagcccuucag

SEQ ID NO: 114923 - RNA, 25 nt, Artificial Sequence
  Description of Artificial Sequence: Synthetic oligonucleotide
agcagaguucaaaagcccuucagcg

SEQ ID NO: 114924 - RNA, 25 nt, Artificial Sequence
  Description of Artificial Sequence: Synthetic oligonucleotide
cucagggucugagugaagccgcucg

SEQ ID NO: 114925 - RNA, 25 nt, Artificial Sequence
  Description of Artificial Sequence: Synthetic oligonucleotide
caagcaacuacaucacgccagucaa

SEQ ID NO: 114926 - RNA, 25 nt, Artificial Sequence
  Description of Artificial Sequence: Synthetic oligonucleotide
aucaauggcagcuucuuggugcgug

SEQ ID NO: 114927 - RNA, 25 nt, Artificial Sequence
  Description of Artificial Sequence: Synthetic oligonucleotide
uuccagcccacauuggauucaucag

SEQ ID NO: 114928 - RNA, 25 nt, Artificial Sequence
  Description of Artificial Sequence: Synthetic oligonucleotide
cagcugagaauguggaauaccuaag

SEQ ID NO: 114929 - RNA, 25 nt, Artificial Sequence
  Description of Artificial Sequence: Synthetic oligonucleotide
aacguaucuccuaauuugaggcuca

SEQ ID NO: 114930 - RNA, 25 nt, Artificial Sequence
  Description of Artificial Sequence: Synthetic oligonucleotide
ccuaaaauaauuucucuacaauugg

SEQ ID NO: 114931 - RNA, 25 nt, Artificial Sequence
  Description of Artificial Sequence: Synthetic oligonucleotide
uggaagauucagcuaguuaggagcc

SEQ ID NO: 114932 - RNA, 25 nt, Artificial Sequence
  Description of Artificial Sequence: Synthetic oligonucleotide
uuaaacucuccuagucaauauccac

SEQ ID NO: 114933 - RNA, 25 nt, Artificial Sequence
  Description of Artificial Sequence: Synthetic oligonucleotide
cagccuacaguuauguucagucaca

SEQ ID NO: 114934 - RNA, 25 nt, Artificial Sequence
  Description of Artificial Sequence: Synthetic oligonucleotide
guuauguucagucacacacacauac

SEQ ID NO: 114935 - RNA, 25 nt, Artificial Sequence
  Description of Artificial Sequence: Synthetic oligonucleotide
cacauacaaaauguuccuuuugcuu

SEQ ID NO: 114936 - RNA, 25 nt, Artificial Sequence
  Description of Artificial Sequence: Synthetic oligonucleotide
uccuuuugcuuuuaaaguaauuuuu

SEQ ID NO: 114937 - RNA, 25 nt, Artificial Sequence
  Description of Artificial Sequence: Synthetic oligonucleotide
ugaccugugaagcaacagucaaugg

SEQ ID NO: 114938 - RNA, 25 nt, Artificial Sequence
  Description of Artificial Sequence: Synthetic oligonucleotide
cuaucucacacaucgacaaaccaau

SEQ ID NO: 114939 - RNA, 25 nt, Artificial Sequence
  Description of Artificial Sequence: Synthetic oligonucleotide
uguccucaauuguacugcuaccacu

SEQ ID NO: 114940 - RNA, 25 nt, Artificial Sequence
  Description of Artificial Sequence: Synthetic oligonucleotide
aaaccguagcuggcaagcggucuua

SEQ ID NO: 114941 - RNA, 25 nt, Artificial Sequence
  Description of Artificial Sequence: Synthetic oligonucleotide
uagcuggcaagcggucuuaccggcu

SEQ ID NO: 114942 - RNA, 25 nt, Artificial Sequence
  Description of Artificial Sequence: Synthetic oligonucleotide
uuguaugguuaaaagauggguuacc

SEQ ID NO: 114943 - RNA, 25 nt, Artificial Sequence
  Description of Artificial Sequence: Synthetic oligonucleotide
ugguuaaaagauggguuaccugcga

SEQ ID NO: 114944 - RNA, 25 nt, Artificial Sequence
  Description of Artificial Sequence: Synthetic oligonucleotide
cagggaauuauacaaucuugcugag

SEQ ID NO: 114945 - RNA, 25 nt, Artificial Sequence
  Description of Artificial Sequence: Synthetic oligonucleotide
acaaucuugcugagcauaaaacagu

SEQ ID NO: 114946 - RNA, 25 nt, Artificial Sequence
  Description of Artificial Sequence: Synthetic oligonucleotide
ccaauaaugaagaguccuuuauccu

SEQ ID NO: 114947 - RNA, 25 nt, Artificial Sequence
  Description of Artificial Sequence: Synthetic oligonucleotide
acuuuggauguuccaacgcaaguug

SEQ ID NO: 114948 - RNA, 25 nt, Artificial Sequence
  Description of Artificial Sequence: Synthetic oligonucleotide
aaugcuuccacuaaacugaaaccau

SEQ ID NO: 114949 - RNA, 25 nt, Artificial Sequence
  Description of Artificial Sequence: Synthetic oligonucleotide
gagaaaguuugacuuuguuaaauau

SEQ ID NO: 114950 - RNA, 25 nt, Artificial Sequence
  Description of Artificial Sequence: Synthetic oligonucleotide
aaagaacuacuguauauuaaaaguu

SEQ ID NO: 114951 - RNA, 25 nt, Artificial Sequence
  Description of Artificial Sequence: Synthetic oligonucleotide
uuagaaauacggguuuugacuuaac

SEQ ID NO: 114952 - RNA, 25 nt, Artificial Sequence
  Description of Artificial Sequence: Synthetic oligonucleotide
aacauggguacagcaaacucagcac

SEQ ID NO: 114953 - RNA, 25 nt, Artificial Sequence
  Description of Artificial Sequence: Synthetic oligonucleotide
aaagacacagaagaugcugaccuca

SEQ ID NO: 114954 - RNA, 25 nt, Artificial Sequence
  Description of Artificial Sequence: Synthetic oligonucleotide
uaguagggagguuuauucagaucgc

SEQ ID NO: 114955 - RNA, 25 nt, Artificial Sequence
  Description of Artificial Sequence: Synthetic oligonucleotide
gccuucugcagcaggguucugggau

SEQ ID NO: 114956 - RNA, 25 nt, Artificial Sequence
  Description of Artificial Sequence: Synthetic oligonucleotide
ggucugguacauauuggaaauuaug

SEQ ID NO: 114957 - RNA, 25 nt, Artificial Sequence
  Description of Artificial Sequence: Synthetic oligonucleotide
cuaguccuuccgauggaagcacuag

SEQ ID NO: 114958 - RNA, 25 nt, Artificial Sequence
  Description of Artificial Sequence: Synthetic oligonucleotide
ccagugaauauuguuuuuaugugga

SEQ ID NO: 114959 - RNA, 25 nt, Artificial Sequence
  Description of Artificial Sequence: Synthetic oligonucleotide
augaauucaaguuggaauugguaga

SEQ ID NO: 114960 - RNA, 25 nt, Artificial Sequence
  Description of Artificial Sequence: Synthetic oligonucleotide
caggacacagauuuagacuuggaga

SEQ ID NO: 114961 - RNA, 25 nt, Artificial Sequence
  Description of Artificial Sequence: Synthetic oligonucleotide
cucaaagcacaguuacaguauucca

SEQ ID NO: 114962 - RNA, 25 nt, Artificial Sequence
  Description of Artificial Sequence: Synthetic oligonucleotide
accacugccaccacugaugaauuaa

SEQ ID NO: 114963 - RNA, 25 nt, Artificial Sequence
  Description of Artificial Sequence: Synthetic oligonucleotide
gaaacuacuagugccacaucaucac

SEQ ID NO: 114964 - RNA, 25 nt, Artificial Sequence
  Description of Artificial Sequence: Synthetic oligonucleotide
aagucggacagccucaccaaacaga

SEQ ID NO: 114965 - RNA, 25 nt, Artificial Sequence
  Description of Artificial Sequence: Synthetic oligonucleotide
gaaagcgaaaaauggaacaugaugg

SEQ ID NO: 114966 - RNA, 25 nt, Artificial Sequence
  Description of Artificial Sequence: Synthetic oligonucleotide
cccucugauuuagcauguagacugc

SEQ ID NO: 114967 - RNA, 25 nt, Artificial Sequence
  Description of Artificial Sequence: Synthetic oligonucleotide
ugagcuauuuaaggaucuauuuaug

SEQ ID NO: 114968 - RNA, 25 nt, Artificial Sequence
  Description of Artificial Sequence: Synthetic oligonucleotide
aaaaggugaaaaagcacuauuauca

SEQ ID NO: 114969 - RNA, 25 nt, Artificial Sequence
  Description of Artificial Sequence: Synthetic oligonucleotide
gaaaaagcacuauuaucaguucugc

SEQ ID NO: 114970 - RNA, 25 nt, Artificial Sequence
  Description of Artificial Sequence: Synthetic oligonucleotide
ggcugaaaagaaagauuaaaccuac

SEQ ID NO: 114971 - RNA, 25 nt, Artificial Sequence
  Description of Artificial Sequence: Synthetic oligonucleotide
uaaacccuuauaauaaaauccuucu

SEQ ID NO: 114972 - RNA, 25 nt, Artificial Sequence
  Description of Artificial Sequence: Synthetic oligonucleotide
cauacuauuagccaaugcuguagac

SEQ ID NO: 114973 - RNA, 25 nt, Artificial Sequence
  Description of Artificial Sequence: Synthetic oligonucleotide
gacagaagcauuuugauaggaauag

SEQ ID NO: 114974 - RNA, 25 nt, Artificial Sequence
  Description of Artificial Sequence: Synthetic oligonucleotide
agagcaaauaagauaauggcccuga

SEQ ID NO: 114975 - RNA, 25 nt, Artificial Sequence
  Description of Artificial Sequence: Synthetic oligonucleotide
ccaacauuuuucucuuccucaagca

SEQ ID NO: 114976 - RNA, 25 nt, Artificial Sequence
  Description of Artificial Sequence: Synthetic oligonucleotide
uuaaguaugagaaaaguucagccca

SEQ ID NO: 114977 - RNA, 25 nt, Artificial Sequence
  Description of Artificial Sequence: Synthetic oligonucleotide
caggaauaaagauggcugcugaacc

SEQ ID NO: 114978 - RNA, 25 nt, Artificial Sequence
  Description of Artificial Sequence: Synthetic oligonucleotide
aauuugaaugaccaaguucucuuca

SEQ ID NO: 114979 - RNA, 25 nt, Artificial Sequence
  Description of Artificial Sequence: Synthetic oligonucleotide
auguauaaagauagccagccuagag

SEQ ID NO: 114980 - RNA, 25 nt, Artificial Sequence
  Description of Artificial Sequence: Synthetic oligonucleotide
ggcuguaacuaucucugugaagugu

SEQ ID NO: 114981 - RNA, 25 nt, Artificial Sequence
  Description of Artificial Sequence: Synthetic oligonucleotide
ucugugaagugugagaaaauuucaa

SEQ ID NO: 114982 - RNA, 25 nt, Artificial Sequence
  Description of Artificial Sequence: Synthetic oligonucleotide
ccuuuaaggaaaugaauccuccuga

SEQ ID NO: 114983 - RNA, 25 nt, Artificial Sequence
  Description of Artificial Sequence: Synthetic oligonucleotide
aaggauacaaaaagugacaucauau

SEQ ID NO: 114984 - RNA, 25 nt, Artificial Sequence
  Description of Artificial Sequence: Synthetic oligonucleotide
agaugcaauuugaaucuucaucaua

SEQ ID NO: 114985 - RNA, 25 nt, Artificial Sequence
  Description of Artificial Sequence: Synthetic oligonucleotide
guucaaaacgaagacuagcuauuaa

SEQ ID NO: 114986 - RNA, 25 nt, Artificial Sequence
  Description of Artificial Sequence: Synthetic oligonucleotide
gugaaaccucaucucuacuaaaaau

SEQ ID NO: 114987 - RNA, 25 nt, Artificial Sequence
  Description of Artificial Sequence: Synthetic oligonucleotide
acgaaagagaagcucuaucucgccu

SEQ ID NO: 114988 - RNA, 25 nt, Artificial Sequence
  Description of Artificial Sequence: Synthetic oligonucleotide
cuccacaagcgccuucgguccaguu

SEQ ID NO: 114989 - RNA, 25 nt, Artificial Sequence
  Description of Artificial Sequence: Synthetic oligonucleotide
gagaagauuccaaagauguagccgc

SEQ ID NO: 114990 - RNA, 25 nt, Artificial Sequence
  Description of Artificial Sequence: Synthetic oligonucleotide
aaucuggauucaaugaggagacuug

SEQ ID NO: 114991 - RNA, 25 nt, Artificial Sequence
  Description of Artificial Sequence: Synthetic oligonucleotide
agaacagauuugagaguagugagga

SEQ ID NO: 114992 - RNA, 25 nt, Artificial Sequence
  Description of Artificial Sequence: Synthetic oligonucleotide
ccagagcugugcagaugaguacaaa

SEQ ID NO: 114993 - RNA, 25 nt, Artificial Sequence
  Description of Artificial Sequence: Synthetic oligonucleotide
ccucagauuguuguuguuaaugggc

SEQ ID NO: 114994 - RNA, 25 nt, Artificial Sequence
  Description of Artificial Sequence: Synthetic oligonucleotide
cuauuuuaauuauuuuuaauuuauu

SEQ ID NO: 114995 - RNA, 25 nt, Artificial Sequence
  Description of Artificial Sequence: Synthetic oligonucleotide
uuuaauuuauuaauauuuaaauaug

SEQ ID NO: 114996 - RNA, 25 nt, Artificial Sequence
  Description of Artificial Sequence: Synthetic oligonucleotide
augcaguuugaauauccuuuguuuc

SEQ ID NO: 114997 - RNA, 25 nt, Artificial Sequence
  Description of Artificial Sequence: Synthetic oligonucleotide
caugcugcuggcgucuaaguguuug

SEQ ID NO: 114998 - RNA, 25 nt, Artificial Sequence
  Description of Artificial Sequence: Synthetic oligonucleotide
agaugugcauuucaccugugacaaa

SEQ ID NO: 114999 - RNA, 25 nt, Artificial Sequence
  Description of Artificial Sequence: Synthetic oligonucleotide
ucaaaaccugugccaggcugaauua

SEQ ID NO: 115000 - RNA, 25 nt, Artificial Sequence
  Description of Artificial Sequence: Synthetic oligonucleotide
gaauguggguagucauucuuacaau

SEQ ID NO: 115001 - RNA, 25 nt, Artificial Sequence
  Description of Artificial Sequence: Synthetic oligonucleotide
auguggguagucauucuuacaauug

SEQ ID NO: 115002 - RNA, 25 nt, Artificial Sequence
  Description of Artificial Sequence: Synthetic oligonucleotide
ugaaaaugagcaucagagaguguac

SEQ ID NO: 115003 - RNA, 25 nt, Artificial Sequence
  Description of Artificial Sequence: Synthetic oligonucleotide
uugcuuuucauguagaacucagcag

SEQ ID NO: 115004 - RNA, 25 nt, Artificial Sequence
  Description of Artificial Sequence: Synthetic oligonucleotide
uguauuucuauauuuauuuucagua

SEQ ID NO: 115005 - RNA, 25 nt, Artificial Sequence
  Description of Artificial Sequence: Synthetic oligonucleotide
uuugauuaauguuucuuaaauggaa

SEQ ID NO: 115006 - RNA, 25 nt, Artificial Sequence
  Description of Artificial Sequence: Synthetic oligonucleotide
caacguguauagugccuaaaauugu

SEQ ID NO: 115007 - RNA, 25 nt, Artificial Sequence
  Description of Artificial Sequence: Synthetic oligonucleotide
cauauccuuggcuacuaacaucugg

SEQ ID NO: 115008 - RNA, 25 nt, Artificial Sequence
  Description of Artificial Sequence: Synthetic oligonucleotide
uacuaacaucuggagacugugagcu

SEQ ID NO: 115009 - RNA, 25 nt, Artificial Sequence
  Description of Artificial Sequence: Synthetic oligonucleotide
cauaaguugugugcuuuuuauuaau

SEQ ID NO: 115010 - RNA, 25 nt, Artificial Sequence
  Description of Artificial Sequence: Synthetic oligonucleotide
gcaucauuuuggcucuucuuacauu

SEQ ID NO: 115011 - RNA, 25 nt, Artificial Sequence
  Description of Artificial Sequence: Synthetic oligonucleotide
gcucuucuuacauuuguaaaaaugu

SEQ ID NO: 115012 - RNA, 25 nt, Artificial Sequence
  Description of Artificial Sequence: Synthetic oligonucleotide
agauuaggucaucuuaauucauauu

SEQ ID NO: 115013 - RNA, 25 nt, Artificial Sequence
  Description of Artificial Sequence: Synthetic oligonucleotide
auggaauugaaagaacuaaucauga

SEQ ID NO: 115014 - RNA, 25 nt, Artificial Sequence
  Description of Artificial Sequence: Synthetic oligonucleotide
cacacucauuccuucugcucuuggg

SEQ ID NO: 115015 - RNA, 25 nt, Artificial Sequence
  Description of Artificial Sequence: Synthetic oligonucleotide
uguagagguaaccaguagcuuugag

SEQ ID NO: 115016 - RNA, 25 nt, Artificial Sequence
  Description of Artificial Sequence: Synthetic oligonucleotide
caaccacaugccacguaauauuuca

SEQ ID NO: 115017 - RNA, 25 nt, Artificial Sequence
  Description of Artificial Sequence: Synthetic oligonucleotide
ucggaaacaaguuauucucuucacu

SEQ ID NO: 115018 - RNA, 25 nt, Artificial Sequence
  Description of Artificial Sequence: Synthetic oligonucleotide
acucccaauaacuaaugcuaagaaa

SEQ ID NO: 115019 - RNA, 25 nt, Artificial Sequence
  Description of Artificial Sequence: Synthetic oligonucleotide
aaugcuaagaaaugcugaaaaucaa

SEQ ID NO: 115020 - RNA, 25 nt, Artificial Sequence
  Description of Artificial Sequence: Synthetic oligonucleotide
gucuuucucuaaauaugauuacuuu

SEQ ID NO: 115021 - RNA, 25 nt, Artificial Sequence
  Description of Artificial Sequence: Synthetic oligonucleotide
ugaauuucaggcauuuuguucuaca

SEQ ID NO: 115022 - RNA, 25 nt, Artificial Sequence
  Description of Artificial Sequence: Synthetic oligonucleotide
cgauucccucucacccgggacucuc

SEQ ID NO: 115023 - RNA, 25 nt, Artificial Sequence
  Description of Artificial Sequence: Synthetic oligonucleotide
aggaaagugaaccuuuaaaguaaag

SEQ ID NO: 115024 - RNA, 25 nt, Artificial Sequence
  Description of Artificial Sequence: Synthetic oligonucleotide
gaggcugcaugcucuggaagccugg

SEQ ID NO: 115025 - RNA, 25 nt, Artificial Sequence
  Description of Artificial Sequence: Synthetic oligonucleotide
ucucugaacagaaaacaaaagagag

SEQ ID NO: 115026 - RNA, 25 nt, Artificial Sequence
  Description of Artificial Sequence: Synthetic oligonucleotide
aacuuggcuguaaucaguuaugccg

SEQ ID NO: 115027 - RNA, 25 nt, Artificial Sequence
  Description of Artificial Sequence: Synthetic oligonucleotide
agaagccaaaauuaaaagaagucca

SEQ ID NO: 115028 - RNA, 25 nt, Artificial Sequence
  Description of Artificial Sequence: Synthetic oligonucleotide
auuaaaagaaguccaggugagguua

SEQ ID NO: 115029 - RNA, 25 nt, Artificial Sequence
  Description of Artificial Sequence: Synthetic oligonucleotide
gaauccggauuaucgggaagaggac

SEQ ID NO: 115030 - RNA, 25 nt, Artificial Sequence
  Description of Artificial Sequence: Synthetic oligonucleotide
aaugugacaucaaagcaaguauugu

SEQ ID NO: 115031 - RNA, 25 nt, Artificial Sequence
  Description of Artificial Sequence: Synthetic oligonucleotide
caucaaagcaaguauuguagcacuc

SEQ ID NO: 115032 - RNA, 25 nt, Artificial Sequence
  Description of Artificial Sequence: Synthetic oligonucleotide
agagagagaaaacaaaaccacaaau

SEQ ID NO: 115033 - RNA, 25 nt, Artificial Sequence
  Description of Artificial Sequence: Synthetic oligonucleotide
ucgcuguaguauuuaagcccauaca

SEQ ID NO: 115034 - RNA, 25 nt, Artificial Sequence
  Description of Artificial Sequence: Synthetic oligonucleotide
cgcuguaguauuuaagcccauacag

SEQ ID NO: 115035 - RNA, 25 nt, Artificial Sequence
  Description of Artificial Sequence: Synthetic oligonucleotide
auuuaagcccauacagaaaccuucc

SEQ ID NO: 115036 - RNA, 25 nt, Artificial Sequence
  Description of Artificial Sequence: Synthetic oligonucleotide
auuaaaauaaacaugguauaccuac

SEQ ID NO: 115037 - RNA, 25 nt, Artificial Sequence
  Description of Artificial Sequence: Synthetic oligonucleotide
cuguucugaucggccaguuuucgga

SEQ ID NO: 115038 - RNA, 25 nt, Artificial Sequence
  Description of Artificial Sequence: Synthetic oligonucleotide
aaauaauuugaacuuuggaacaggg

SEQ ID NO: 115039 - RNA, 25 nt, Artificial Sequence
  Description of Artificial Sequence: Synthetic oligonucleotide
ugcgaccuuaauuuaacuuuccagu

SEQ ID NO: 115040 - RNA, 25 nt, Artificial Sequence
  Description of Artificial Sequence: Synthetic oligonucleotide
cugagaaagcuaaaguuugguuuug

SEQ ID NO: 115041 - RNA, 25 nt, Artificial Sequence
  Description of Artificial Sequence: Synthetic oligonucleotide
aguaaagaugcuacuucccacugua

SEQ ID NO: 115042 - RNA, 25 nt, Artificial Sequence
  Description of Artificial Sequence: Synthetic oligonucleotide
cugcuuaauugcugauaccauauga

SEQ ID NO: 115043 - RNA, 25 nt, Artificial Sequence
  Description of Artificial Sequence: Synthetic oligonucleotide
uaccauaugaaugaaacaugggcug

SEQ ID NO: 115044 - RNA, 25 nt, Artificial Sequence
  Description of Artificial Sequence: Synthetic oligonucleotide
aacuuucuuauccaacuuuuucaua

SEQ ID NO: 115045 - RNA, 25 nt, Artificial Sequence
  Description of Artificial Sequence: Synthetic oligonucleotide
ccuugcaugacaucaugaggccgga

SEQ ID NO: 115046 - RNA, 25 nt, Artificial Sequence
  Description of Artificial Sequence: Synthetic oligonucleotide
ugaauuuguauaugacugcauuugu

SEQ ID NO: 115047 - RNA, 25 nt, Artificial Sequence
  Description of Artificial Sequence: Synthetic oligonucleotide
gaauccuaguagaauguuuacuacc

SEQ ID NO: 115048 - RNA, 25 nt, Artificial Sequence
  Description of Artificial Sequence: Synthetic oligonucleotide
gaaagggaagaauuuuuugaugaaa

SEQ ID NO: 115049 - RNA, 25 nt, Artificial Sequence
  Description of Artificial Sequence: Synthetic oligonucleotide
uaucggcaugccagugugugaauuu

SEQ ID NO: 115050 - RNA, 25 nt, Artificial Sequence
  Description of Artificial Sequence: Synthetic oligonucleotide
caccucauaguagagcaauguaugu

SEQ ID NO: 115051 - RNA, 25 nt, Artificial Sequence
  Description of Artificial Sequence: Synthetic oligonucleotide
ccagaauugccaaagcacauauaua

SEQ ID NO: 115052 - RNA, 25 nt, Artificial Sequence
  Description of Artificial Sequence: Synthetic oligonucleotide
uggugaucuggguaauaguuucucc

SEQ ID NO: 115053 - RNA, 25 nt, Artificial Sequence
  Description of Artificial Sequence: Synthetic oligonucleotide
gaucuggguaauaguuucuccaaau

SEQ ID NO: 115054 - RNA, 25 nt, Artificial Sequence
  Description of Artificial Sequence: Synthetic oligonucleotide
ggaugugaugaauacuuccuagaaa

SEQ ID NO: 115055 - RNA, 25 nt, Artificial Sequence
  Description of Artificial Sequence: Synthetic oligonucleotide
cauuuccacagcuacaccauauaug

SEQ ID NO: 115056 - RNA, 25 nt, Artificial Sequence
  Description of Artificial Sequence: Synthetic oligonucleotide
acagcuacaccauauaugaauggag

SEQ ID NO: 115057 - RNA, 25 nt, Artificial Sequence
  Description of Artificial Sequence: Synthetic oligonucleotide
ugcaguucuuacacgagaagaagau

SEQ ID NO: 115058 - RNA, 25 nt, Artificial Sequence
  Description of Artificial Sequence: Synthetic oligonucleotide
acgagaagaagaucauuuacaggga

SEQ ID NO: 115059 - RNA, 25 nt, Artificial Sequence
  Description of Artificial Sequence: Synthetic oligonucleotide
cgagaagaagaucauuuacagggac

SEQ ID NO: 115060 - RNA, 25 nt, Artificial Sequence
  Description of Artificial Sequence: Synthetic oligonucleotide
aagaagaucauuuacagggaccuga

SEQ ID NO: 115061 - RNA, 25 nt, Artificial Sequence
  Description of Artificial Sequence: Synthetic oligonucleotide
agaggaagagguguuugacugcauc

SEQ ID NO: 115062 - RNA, 25 nt, Artificial Sequence
  Description of Artificial Sequence: Synthetic oligonucleotide
gaggaagagguguuugacugcaucg

SEQ ID NO: 115063 - RNA, 25 nt, Artificial Sequence
  Description of Artificial Sequence: Synthetic oligonucleotide
cuacuuugagggcgaguucacaggg

SEQ ID NO: 115064 - RNA, 25 nt, Artificial Sequence
  Description of Artificial Sequence: Synthetic oligonucleotide
agggcaucuccuggcaccucugucc

SEQ ID NO: 115065 - RNA, 25 nt, Artificial Sequence
  Description of Artificial Sequence: Synthetic oligonucleotide
ggagugauaugguuugucuuuuuaa

SEQ ID NO: 115066 - RNA, 25 nt, Artificial Sequence
  Description of Artificial Sequence: Synthetic oligonucleotide
gagugauaugguuugucuuuuuaag

SEQ ID NO: 115067 - RNA, 25 nt, Artificial Sequence
  Description of Artificial Sequence: Synthetic oligonucleotide
ugcaguaaagauccuaaagguuguc

SEQ ID NO: 115068 - RNA, 25 nt, Artificial Sequence
  Description of Artificial Sequence: Synthetic oligonucleotide
aguaaagauccuaaagguugucgac

SEQ ID NO: 115069 - RNA, 25 nt, Artificial Sequence
  Description of Artificial Sequence: Synthetic oligonucleotide
ugacaaaggacaaccuggcaauugu

SEQ ID NO: 115070 - RNA, 25 nt, Artificial Sequence
  Description of Artificial Sequence: Synthetic oligonucleotide
gcaauugugacccaguggugcgagg

SEQ ID NO: 115071 - RNA, 25 nt, Artificial Sequence
  Description of Artificial Sequence: Synthetic oligonucleotide
aacaucauccauagagacaugaaau

SEQ ID NO: 115072 - RNA, 25 nt, Artificial Sequence
  Description of Artificial Sequence: Synthetic oligonucleotide
ugaaauccaacaauauauuucucca

SEQ ID NO: 115073 - RNA, 25 nt, Artificial Sequence
  Description of Artificial Sequence: Synthetic oligonucleotide
aacaauauauuucuccaugaaggcu

SEQ ID NO: 115074 - RNA, 25 nt, Artificial Sequence
  Description of Artificial Sequence: Synthetic oligonucleotide
aacaguaaagucacgcuggaguggu

SEQ ID NO: 115075 - RNA, 25 nt, Artificial Sequence
  Description of Artificial Sequence: Synthetic oligonucleotide
ugugaagaaaguaaaggaagagagg

SEQ ID NO: 115076 - RNA, 25 nt, Artificial Sequence
  Description of Artificial Sequence: Synthetic oligonucleotide
cuuccgagccauccuugcaucgggc

SEQ ID NO: 115077 - RNA, 25 nt, Artificial Sequence
  Description of Artificial Sequence: Synthetic oligonucleotide
aauggagguugaauauccuacugug

SEQ ID NO: 115078 - RNA, 25 nt, Artificial Sequence
  Description of Artificial Sequence: Synthetic oligonucleotide
ggagguugaauauccuacuguguaa

SEQ ID NO: 115079 - RNA, 25 nt, Artificial Sequence
  Description of Artificial Sequence: Synthetic oligonucleotide
auuuugaguuuucccuuguagugua

SEQ ID NO: 115080 - RNA, 25 nt, Artificial Sequence
  Description of Artificial Sequence: Synthetic oligonucleotide
uauccuguuuguucuuuguugauug

SEQ ID NO: 115081 - RNA, 25 nt, Artificial Sequence
  Description of Artificial Sequence: Synthetic oligonucleotide
ccuguuuguucuuuguugauugaaa

SEQ ID NO: 115082 - RNA, 25 nt, Artificial Sequence
  Description of Artificial Sequence: Synthetic oligonucleotide
cucuacagccuucuuuuucuuccau

SEQ ID NO: 115083 - RNA, 25 nt, Artificial Sequence
  Description of Artificial Sequence: Synthetic oligonucleotide
ucuuccauagcuaaucuuccuucua

SEQ ID NO: 115084 - RNA, 25 nt, Artificial Sequence
  Description of Artificial Sequence: Synthetic oligonucleotide
auaaucuuccuguugaaugcuucau

SEQ ID NO: 115085 - RNA, 25 nt, Artificial Sequence
  Description of Artificial Sequence: Synthetic oligonucleotide
uaaucuuccuguugaaugcuucaug

SEQ ID NO: 115086 - RNA, 25 nt, Artificial Sequence
  Description of Artificial Sequence: Synthetic oligonucleotide
cuucaugacuugaauucuacuuuga

SEQ ID NO: 115087 - RNA, 25 nt, Artificial Sequence
  Description of Artificial Sequence: Synthetic oligonucleotide
aagagggagagaagcaacuacagac

SEQ ID NO: 115088 - RNA, 25 nt, Artificial Sequence
  Description of Artificial Sequence: Synthetic oligonucleotide
cgucuccuaccagaccaaggucaac

SEQ ID NO: 115089 - RNA, 25 nt, Artificial Sequence
  Description of Artificial Sequence: Synthetic oligonucleotide
gaucaaucggcccgacuaucucgac

SEQ ID NO: 115090 - RNA, 25 nt, Artificial Sequence
  Description of Artificial Sequence: Synthetic oligonucleotide
ggacgaacauccaaccuucccaaac

SEQ ID NO: 115091 - RNA, 25 nt, Artificial Sequence
  Description of Artificial Sequence: Synthetic oligonucleotide
agggucggaacccaagcuuagaacu

SEQ ID NO: 115092 - RNA, 25 nt, Artificial Sequence
  Description of Artificial Sequence: Synthetic oligonucleotide
ucggaacccaagcuuagaacuuuaa

SEQ ID NO: 115093 - RNA, 25 nt, Artificial Sequence
  Description of Artificial Sequence: Synthetic oligonucleotide
acccaagcuuagaacuuuaagcaac

SEQ ID NO: 115094 - RNA, 25 nt, Artificial Sequence
  Description of Artificial Sequence: Synthetic oligonucleotide
gaacuuuaagcaacaagaccaccac

SEQ ID NO: 115095 - RNA, 25 nt, Artificial Sequence
  Description of Artificial Sequence: Synthetic oligonucleotide
acuauucaguggcgagaaauaaagu

SEQ ID NO: 115096 - RNA, 25 nt, Artificial Sequence
  Description of Artificial Sequence: Synthetic oligonucleotide
cuauucaguggcgagaaauaaaguu

SEQ ID NO: 115097 - RNA, 25 nt, Artificial Sequence
  Description of Artificial Sequence: Synthetic oligonucleotide
aaacacagauaacaggaaaugaucc

SEQ ID NO: 115098 - RNA, 25 nt, Artificial Sequence
  Description of Artificial Sequence: Synthetic oligonucleotide
cuuaagaaaagagaagaaaugaaac

SEQ ID NO: 115099 - RNA, 25 nt, Artificial Sequence
  Description of Artificial Sequence: Synthetic oligonucleotide
cugaaggaguguguuuccauccucc

SEQ ID NO: 115100 - RNA, 25 nt, Artificial Sequence
  Description of Artificial Sequence: Synthetic oligonucleotide
ucaccgcgggacugaaaaucuuuga

SEQ ID NO: 115101 - RNA, 25 nt, Artificial Sequence
  Description of Artificial Sequence: Synthetic oligonucleotide
agcagaaauaagcgugccguucagg

SEQ ID NO: 115102 - RNA, 25 nt, Artificial Sequence
  Description of Artificial Sequence: Synthetic oligonucleotide
aagcgugccguucaggguccagaag

SEQ ID NO: 115103 - RNA, 25 nt, Artificial Sequence
  Description of Artificial Sequence: Synthetic oligonucleotide
agaaacagucacucaagacugcuug

SEQ ID NO: 115104 - RNA, 25 nt, Artificial Sequence
  Description of Artificial Sequence: Synthetic oligonucleotide
agaggaagaagguccaugucuuugg

SEQ ID NO: 115105 - RNA, 25 nt, Artificial Sequence
  Description of Artificial Sequence: Synthetic oligonucleotide
uguauucaaaauaugccugaaacac

SEQ ID NO: 115106 - RNA, 25 nt, Artificial Sequence
  Description of Artificial Sequence: Synthetic oligonucleotide
auuuuccucccuuucucuguaccuc

SEQ ID NO: 115107 - RNA, 25 nt, Artificial Sequence
  Description of Artificial Sequence: Synthetic oligonucleotide
caaagaaagauagagcaagacaaga

SEQ ID NO: 115108 - RNA, 25 nt, Artificial Sequence
  Description of Artificial Sequence: Synthetic oligonucleotide
aagaaagauagagcaagacaagaaa

SEQ ID NO: 115109 - RNA, 25 nt, Artificial Sequence
  Description of Artificial Sequence: Synthetic oligonucleotide
gaaagcauuuguuuguacaagaucc

SEQ ID NO: 115110 - RNA, 25 nt, Artificial Sequence
  Description of Artificial Sequence: Synthetic oligonucleotide
ugaguuaaacgaacguacuugcaga

SEQ ID NO: 115111 - RNA, 25 nt, Artificial Sequence
  Description of Artificial Sequence: Synthetic oligonucleotide
acugauacagaacgaucgauacaga

SEQ ID NO: 115112 - RNA, 25 nt, Artificial Sequence
  Description of Artificial Sequence: Synthetic oligonucleotide
auauuauauauauauaaaaauaaau

SEQ ID NO: 115113 - RNA, 25 nt, Artificial Sequence
  Description of Artificial Sequence: Synthetic oligonucleotide
auuauauauauauaaaaauaaauau

SEQ ID NO: 115114 - RNA, 25 nt, Artificial Sequence
  Description of Artificial Sequence: Synthetic oligonucleotide
ucacuggauguauuugacugcugug

SEQ ID NO: 115115 - RNA, 25 nt, Artificial Sequence
  Description of Artificial Sequence: Synthetic oligonucleotide
cagggaagaggaggagaugagagac

SEQ ID NO: 115116 - RNA, 25 nt, Artificial Sequence
  Description of Artificial Sequence: Synthetic oligonucleotide
augaucuuuuuuuugucccacuugg

SEQ ID NO: 115117 - RNA, 27 nt, Artificial Sequence
  Description of Artificial Sequence: Synthetic oligonucleotide
ggccgugaacuccucaucaaaauaccu

SEQ ID NO: 115118 - RNA, 27 nt, Artificial Sequence
  Description of Artificial Sequence: Synthetic oligonucleotide
uggugugauggugaucaucugggccgu

SEQ ID NO: 115119 - RNA, 27 nt, Artificial Sequence
  Description of Artificial Sequence: Synthetic oligonucleotide
aaacccgcaggauaguuuucuucccua

SEQ ID NO: 115120 - RNA, 27 nt, Artificial Sequence
  Description of Artificial Sequence: Synthetic oligonucleotide
caaacuggaugaaauaaauuaaaaccc

SEQ ID NO: 115121 - RNA, 27 nt, Artificial Sequence
  Description of Artificial Sequence: Synthetic oligonucleotide
agaaguccuuaacauuucccuacguga

SEQ ID NO: 115122 - RNA, 27 nt, Artificial Sequence
  Description of Artificial Sequence: Synthetic oligonucleotide
cucugucccacuggguaaacccuggcc

SEQ ID NO: 115123 - RNA, 27 nt, Artificial Sequence
  Description of Artificial Sequence: Synthetic oligonucleotide
cacaauaacaaauuuaaaccuugcucc

SEQ ID NO: 115124 - RNA, 27 nt, Artificial Sequence
  Description of Artificial Sequence: Synthetic oligonucleotide
aaaugcauuugaacaacauaauacaca

SEQ ID NO: 115125 - RNA, 27 nt, Artificial Sequence
  Description of Artificial Sequence: Synthetic oligonucleotide
ggcuuuccugucacaaagauuaaaaac

SEQ ID NO: 115126 - RNA, 27 nt, Artificial Sequence
  Description of Artificial Sequence: Synthetic oligonucleotide
agggcuuuccugucacaaagauuaaaa

SEQ ID NO: 115127 - RNA, 27 nt, Artificial Sequence
  Description of Artificial Sequence: Synthetic oligonucleotide
ggccaugcugggagacauaagcagcag

SEQ ID NO: 115128 - RNA, 27 nt, Artificial Sequence
  Description of Artificial Sequence: Synthetic oligonucleotide
ucagggagaagcuucugaaacacuucu

SEQ ID NO: 115129 - RNA, 27 nt, Artificial Sequence
  Description of Artificial Sequence: Synthetic oligonucleotide
aagggcuucuuccuuauugauggucag

SEQ ID NO: 115130 - RNA, 27 nt, Artificial Sequence
  Description of Artificial Sequence: Synthetic oligonucleotide
ugaagggcuucuuccuuauugaugguc

SEQ ID NO: 115131 - RNA, 27 nt, Artificial Sequence
  Description of Artificial Sequence: Synthetic oligonucleotide
cgcugaagggcuucuuccuuauugaug

SEQ ID NO: 115132 - RNA, 27 nt, Artificial Sequence
  Description of Artificial Sequence: Synthetic oligonucleotide
gccgcugaagggcuucuuccuuauuga

SEQ ID NO: 115133 - RNA, 27 nt, Artificial Sequence
  Description of Artificial Sequence: Synthetic oligonucleotide
acuggccgcugaagggcuucuuccuua

SEQ ID NO: 115134 - RNA, 27 nt, Artificial Sequence
  Description of Artificial Sequence: Synthetic oligonucleotide
cggagcuuuucaccuuuaguuaugcuu

SEQ ID NO: 115135 - RNA, 27 nt, Artificial Sequence
  Description of Artificial Sequence: Synthetic oligonucleotide
ccggagcuuuucaccuuuaguuaugcu

SEQ ID NO: 115136 - RNA, 27 nt, Artificial Sequence
  Description of Artificial Sequence: Synthetic oligonucleotide
cagacuguugacuggcgugauguaguu

SEQ ID NO: 115137 - RNA, 27 nt, Artificial Sequence
  Description of Artificial Sequence: Synthetic oligonucleotide
cuuuugaacucugcuuaaauccagugg

SEQ ID NO: 115138 - RNA, 27 nt, Artificial Sequence
  Description of Artificial Sequence: Synthetic oligonucleotide
gcuuuugaacucugcuuaaauccagug

SEQ ID NO: 115139 - RNA, 27 nt, Artificial Sequence
  Description of Artificial Sequence: Synthetic oligonucleotide
agggcuuuugaacucugcuuaaaucca

SEQ ID NO: 115140 - RNA, 27 nt, Artificial Sequence
  Description of Artificial Sequence: Synthetic oligonucleotide
aagggcuuuugaacucugcuuaaaucc

SEQ ID NO: 115141 - RNA, 27 nt, Artificial Sequence
  Description of Artificial Sequence: Synthetic oligonucleotide
ugaagggcuuuugaacucugcuuaaau

SEQ ID NO: 115142 - RNA, 27 nt, Artificial Sequence
  Description of Artificial Sequence: Synthetic oligonucleotide
cugaagggcuuuugaacucugcuuaaa

SEQ ID NO: 115143 - RNA, 27 nt, Artificial Sequence
  Description of Artificial Sequence: Synthetic oligonucleotide
cgcugaagggcuuuugaacucugcuua

SEQ ID NO: 115144 - RNA, 27 nt, Artificial Sequence
  Description of Artificial Sequence: Synthetic oligonucleotide
cgagcggcuucacucagacccugaggc

SEQ ID NO: 115145 - RNA, 27 nt, Artificial Sequence
  Description of Artificial Sequence: Synthetic oligonucleotide
uugacuggcgugauguaguugcuuggg

SEQ ID NO: 115146 - RNA, 27 nt, Artificial Sequence
  Description of Artificial Sequence: Synthetic oligonucleotide
cacgcaccaagaagcugccauugaucc

SEQ ID NO: 115147 - RNA, 27 nt, Artificial Sequence
  Description of Artificial Sequence: Synthetic oligonucleotide
cugaugaauccaaugugggcuggaauc

SEQ ID NO: 115148 - RNA, 27 nt, Artificial Sequence
  Description of Artificial Sequence: Synthetic oligonucleotide
cuuagguauuccacauucucagcugug

SEQ ID NO: 115149 - RNA, 27 nt, Artificial Sequence
  Description of Artificial Sequence: Synthetic oligonucleotide
ugagccucaaauuaggagauacguuuu

SEQ ID NO: 115150 - RNA, 27 nt, Artificial Sequence
  Description of Artificial Sequence: Synthetic oligonucleotide
ccaauuguagagaaauuauuuuaggaa

SEQ ID NO: 115151 - RNA, 27 nt, Artificial Sequence
  Description of Artificial Sequence: Synthetic oligonucleotide
ggcuccuaacuagcugaaucuuccaau

SEQ ID NO: 115152 - RNA, 27 nt, Artificial Sequence
  Description of Artificial Sequence: Synthetic oligonucleotide
guggauauugacuaggagaguuuaaaa

SEQ ID NO: 115153 - RNA, 27 nt, Artificial Sequence
  Description of Artificial Sequence: Synthetic oligonucleotide
ugugacugaacauaacuguaggcugaa

SEQ ID NO: 115154 - RNA, 27 nt, Artificial Sequence
  Description of Artificial Sequence: Synthetic oligonucleotide
guaugugugugugacugaacauaacug

SEQ ID NO: 115155 - RNA, 27 nt, Artificial Sequence
  Description of Artificial Sequence: Synthetic oligonucleotide
aagcaaaaggaacauuuuguaugugug

SEQ ID NO: 115156 - RNA, 27 nt, Artificial Sequence
  Description of Artificial Sequence: Synthetic oligonucleotide
aaaaauuacuuuaaaagcaaaaggaac

SEQ ID NO: 115157 - RNA, 27 nt, Artificial Sequence
  Description of Artificial Sequence: Synthetic oligonucleotide
ccauugacuguugcuucacaggucaga

SEQ ID NO: 115158 - RNA, 27 nt, Artificial Sequence
  Description of Artificial Sequence: Synthetic oligonucleotide
auugguuugucgaugugugagauaguu

SEQ ID NO: 115159 - RNA, 27 nt, Artificial Sequence
  Description of Artificial Sequence: Synthetic oligonucleotide
agugguagcaguacaauugaggacaag

SEQ ID NO: 115160 - RNA, 27 nt, Artificial Sequence
  Description of Artificial Sequence: Synthetic oligonucleotide
uaagaccgcuugccagcuacgguuuca

SEQ ID NO: 115161 - RNA, 27 nt, Artificial Sequence
  Description of Artificial Sequence: Synthetic oligonucleotide
agccgguaagaccgcuugccagcuacg

SEQ ID NO: 115162 - RNA, 27 nt, Artificial Sequence
  Description of Artificial Sequence: Synthetic oligonucleotide
gguaacccaucuuuuaaccauacaacu

SEQ ID NO: 115163 - RNA, 27 nt, Artificial Sequence
  Description of Artificial Sequence: Synthetic oligonucleotide
ucgcagguaacccaucuuuuaaccaua

SEQ ID NO: 115164 - RNA, 27 nt, Artificial Sequence
  Description of Artificial Sequence: Synthetic oligonucleotide
cucagcaagauuguauaauucccugca

SEQ ID NO: 115165 - RNA, 27 nt, Artificial Sequence
  Description of Artificial Sequence: Synthetic oligonucleotide
acuguuuuaugcucagcaagauuguau

SEQ ID NO: 115166 - RNA, 27 nt, Artificial Sequence
  Description of Artificial Sequence: Synthetic oligonucleotide
aggauaaaggacucuucauuauuggaa

SEQ ID NO: 115167 - RNA, 27 nt, Artificial Sequence
  Description of Artificial Sequence: Synthetic oligonucleotide
caacuugcguuggaacauccaaagugu

SEQ ID NO: 115168 - RNA, 27 nt, Artificial Sequence
  Description of Artificial Sequence: Synthetic oligonucleotide
augguuucaguuuaguggaagcauuua

SEQ ID NO: 115169 - RNA, 27 nt, Artificial Sequence
  Description of Artificial Sequence: Synthetic oligonucleotide
auauuuaacaaagucaaacuuucucac

SEQ ID NO: 115170 - RNA, 27 nt, Artificial Sequence
  Description of Artificial Sequence: Synthetic oligonucleotide
aacuuuuaauauacaguaguucuuuuc

SEQ ID NO: 115171 - RNA, 27 nt, Artificial Sequence
  Description of Artificial Sequence: Synthetic oligonucleotide
guuaagucaaaacccguauuucuaaag

SEQ ID NO: 115172 - RNA, 27 nt, Artificial Sequence
  Description of Artificial Sequence: Synthetic oligonucleotide
gugcugaguuugcuguacccauguuga

SEQ ID NO: 115173 - RNA, 27 nt, Artificial Sequence
  Description of Artificial Sequence: Synthetic oligonucleotide
ugaggucagcaucuucugugucuuuac

SEQ ID NO: 115174 - RNA, 27 nt, Artificial Sequence
  Description of Artificial Sequence: Synthetic oligonucleotide
gcgaucugaauaaaccucccuacuagc

SEQ ID NO: 115175 - RNA, 27 nt, Artificial Sequence
  Description of Artificial Sequence: Synthetic oligonucleotide
aucccagaacccugcugcagaaggcca

SEQ ID NO: 115176 - RNA, 27 nt, Artificial Sequence
  Description of Artificial Sequence: Synthetic oligonucleotide
cauaauuuccaauauguaccagaccuu

SEQ ID NO: 115177 - RNA, 27 nt, Artificial Sequence
  Description of Artificial Sequence: Synthetic oligonucleotide
cuagugcuuccaucggaaggacuaggu

SEQ ID NO: 115178 - RNA, 27 nt, Artificial Sequence
  Description of Artificial Sequence: Synthetic oligonucleotide
uccacauaaaaacaauauucacuggga

SEQ ID NO: 115179 - RNA, 27 nt, Artificial Sequence
  Description of Artificial Sequence: Synthetic oligonucleotide
ucuaccaauuccaacuugaauucauug

SEQ ID NO: 115180 - RNA, 27 nt, Artificial Sequence
  Description of Artificial Sequence: Synthetic oligonucleotide
ucuccaagucuaaaucuguguccugag

SEQ ID NO: 115181 - RNA, 27 nt, Artificial Sequence
  Description of Artificial Sequence: Synthetic oligonucleotide
uggaauacuguaacugugcuuugagga

SEQ ID NO: 115182 - RNA, 27 nt, Artificial Sequence
  Description of Artificial Sequence: Synthetic oligonucleotide
uuaauucaucagugguggcagugguag

SEQ ID NO: 115183 - RNA, 27 nt, Artificial Sequence
  Description of Artificial Sequence: Synthetic oligonucleotide
gugaugauguggcacuaguaguuucuu

SEQ ID NO: 115184 - RNA, 27 nt, Artificial Sequence
  Description of Artificial Sequence: Synthetic oligonucleotide
ucuguuuggugaggcuguccgacuuug

SEQ ID NO: 115185 - RNA, 27 nt, Artificial Sequence
  Description of Artificial Sequence: Synthetic oligonucleotide
ccaucauguuccauuuuucgcuuucuc

SEQ ID NO: 115186 - RNA, 27 nt, Artificial Sequence
  Description of Artificial Sequence: Synthetic oligonucleotide
gcagucuacaugcuaaaucagagggua

SEQ ID NO: 115187 - RNA, 27 nt, Artificial Sequence
  Description of Artificial Sequence: Synthetic oligonucleotide
cauaaauagauccuuaaauagcucaaa

SEQ ID NO: 115188 - RNA, 27 nt, Artificial Sequence
  Description of Artificial Sequence: Synthetic oligonucleotide
ugauaauagugcuuuuucaccuuuuuc

SEQ ID NO: 115189 - RNA, 27 nt, Artificial Sequence
  Description of Artificial Sequence: Synthetic oligonucleotide
gcagaacugauaauagugcuuuuucac

SEQ ID NO: 115190 - RNA, 27 nt, Artificial Sequence
  Description of Artificial Sequence: Synthetic oligonucleotide
guagguuuaaucuuucuuuucagccau

SEQ ID NO: 115191 - RNA, 27 nt, Artificial Sequence
  Description of Artificial Sequence: Synthetic oligonucleotide
agaaggauuuuauuauaaggguuuaau

SEQ ID NO: 115192 - RNA, 27 nt, Artificial Sequence
  Description of Artificial Sequence: Synthetic oligonucleotide
gucuacagcauuggcuaauaguaugaa

SEQ ID NO: 115193 - RNA, 27 nt, Artificial Sequence
  Description of Artificial Sequence: Synthetic oligonucleotide
cuauuccuaucaaaaugcuucugucua

SEQ ID NO: 115194 - RNA, 27 nt, Artificial Sequence
  Description of Artificial Sequence: Synthetic oligonucleotide
ucagggccauuaucuuauuugcucuau

SEQ ID NO: 115195 - RNA, 27 nt, Artificial Sequence
  Description of Artificial Sequence: Synthetic oligonucleotide
ugcuugaggaagagaaaaauguugguc

SEQ ID NO: 115196 - RNA, 27 nt, Artificial Sequence
  Description of Artificial Sequence: Synthetic oligonucleotide
ugggcugaacuuuucucauacuuaaag

SEQ ID NO: 115197 - RNA, 27 nt, Artificial Sequence
  Description of Artificial Sequence: Synthetic oligonucleotide
gguucagcagccaucuuuauuccugcg

SEQ ID NO: 115198 - RNA, 27 nt, Artificial Sequence
  Description of Artificial Sequence: Synthetic oligonucleotide
ugaagagaacuuggucauucaaauuuc

SEQ ID NO: 115199 - RNA, 27 nt, Artificial Sequence
  Description of Artificial Sequence: Synthetic oligonucleotide
cucuaggcuggcuaucuuuauacauac

SEQ ID NO: 115200 - RNA, 27 nt, Artificial Sequence
  Description of Artificial Sequence: Synthetic oligonucleotide
acacuucacagagauaguuacagccau

SEQ ID NO: 115201 - RNA, 27 nt, Artificial Sequence
  Description of Artificial Sequence: Synthetic oligonucleotide
uugaaauuuucucacacuucacagaga

SEQ ID NO: 115202 - RNA, 27 nt, Artificial Sequence
  Description of Artificial Sequence: Synthetic oligonucleotide
ucaggaggauucauuuccuuaaaggaa

SEQ ID NO: 115203 - RNA, 27 nt, Artificial Sequence
  Description of Artificial Sequence: Synthetic oligonucleotide
auaugaugucacuuuuuguauccuuga

SEQ ID NO: 115204 - RNA, 27 nt, Artificial Sequence
  Description of Artificial Sequence: Synthetic oligonucleotide
uaugaugaagauucaaauugcaucuua

SEQ ID NO: 115205 - RNA, 27 nt, Artificial Sequence
  Description of Artificial Sequence: Synthetic oligonucleotide
uuaauagcuagucuucguuuugaacag

SEQ ID NO: 115206 - RNA, 27 nt, Artificial Sequence
  Description of Artificial Sequence: Synthetic oligonucleotide
auuuuuaguagagaugagguuucacca

SEQ ID NO: 115207 - RNA, 27 nt, Artificial Sequence
  Description of Artificial Sequence: Synthetic oligonucleotide
aggcgagauagagcuucucuuucguuc

SEQ ID NO: 115208 - RNA, 27 nt, Artificial Sequence
  Description of Artificial Sequence: Synthetic oligonucleotide
aacuggaccgaaggcgcuuguggagaa

SEQ ID NO: 115209 - RNA, 27 nt, Artificial Sequence
  Description of Artificial Sequence: Synthetic oligonucleotide
gcggcuacaucuuuggaaucuucuccu

SEQ ID NO: 115210 - RNA, 27 nt, Artificial Sequence
  Description of Artificial Sequence: Synthetic oligonucleotide
caagucuccucauugaauccagauugg

SEQ ID NO: 115211 - RNA, 27 nt, Artificial Sequence
  Description of Artificial Sequence: Synthetic oligonucleotide
uccucacuacucucaaaucuguucugg

SEQ ID NO: 115212 - RNA, 27 nt, Artificial Sequence
  Description of Artificial Sequence: Synthetic oligonucleotide
uuuguacucaucugcacagcucuggcu

SEQ ID NO: 115213 - RNA, 27 nt, Artificial Sequence
  Description of Artificial Sequence: Synthetic oligonucleotide
gcccauuaacaacaacaaucugaggug

SEQ ID NO: 115214 - RNA, 27 nt, Artificial Sequence
  Description of Artificial Sequence: Synthetic oligonucleotide
aauaaauuaaaaauaauuaaaauagug

SEQ ID NO: 115215 - RNA, 27 nt, Artificial Sequence
  Description of Artificial Sequence: Synthetic oligonucleotide
cauauuuaaauauuaauaaauuaaaaa

SEQ ID NO: 115216 - RNA, 27 nt, Artificial Sequence
  Description of Artificial Sequence: Synthetic oligonucleotide
gaaacaaaggauauucaaacugcauag

SEQ ID NO: 115217 - RNA, 27 nt, Artificial Sequence
  Description of Artificial Sequence: Synthetic oligonucleotide
caaacacuuagacgccagcagcauggg

SEQ ID NO: 115218 - RNA, 27 nt, Artificial Sequence
  Description of Artificial Sequence: Synthetic oligonucleotide
uuugucacaggugaaaugcacaucuga

SEQ ID NO: 115219 - RNA, 27 nt, Artificial Sequence
  Description of Artificial Sequence: Synthetic oligonucleotide
uaauucagccuggcacagguuuugauc

SEQ ID NO: 115220 - RNA, 27 nt, Artificial Sequence
  Description of Artificial Sequence: Synthetic oligonucleotide
auuguaagaaugacuacccacauucac

SEQ ID NO: 115221 - RNA, 27 nt, Artificial Sequence
  Description of Artificial Sequence: Synthetic oligonucleotide
caauuguaagaaugacuacccacauuc

SEQ ID NO: 115222 - RNA, 27 nt, Artificial Sequence
  Description of Artificial Sequence: Synthetic oligonucleotide
guacacucucugaugcucauuuucaua

SEQ ID NO: 115223 - RNA, 27 nt, Artificial Sequence
  Description of Artificial Sequence: Synthetic oligonucleotide
cugcugaguucuacaugaaaagcaaau

SEQ ID NO: 115224 - RNA, 27 nt, Artificial Sequence
  Description of Artificial Sequence: Synthetic oligonucleotide
uacugaaaauaaauauagaaauacaac

SEQ ID NO: 115225 - RNA, 27 nt, Artificial Sequence
  Description of Artificial Sequence: Synthetic oligonucleotide
uuccauuuaagaaacauuaaucaaaac

SEQ ID NO: 115226 - RNA, 27 nt, Artificial Sequence
  Description of Artificial Sequence: Synthetic oligonucleotide
acaauuuuaggcacuauacacguuguu

SEQ ID NO: 115227 - RNA, 27 nt, Artificial Sequence
  Description of Artificial Sequence: Synthetic oligonucleotide
ccagauguuaguagccaaggauauggu

SEQ ID NO: 115228 - RNA, 27 nt, Artificial Sequence
  Description of Artificial Sequence: Synthetic oligonucleotide
agcucacagucuccagauguuaguagc

SEQ ID NO: 115229 - RNA, 27 nt, Artificial Sequence
  Description of Artificial Sequence: Synthetic oligonucleotide
auuaauaaaaagcacacaacuuauggc

SEQ ID NO: 115230 - RNA, 27 nt, Artificial Sequence
  Description of Artificial Sequence: Synthetic oligonucleotide
aauguaagaagagccaaaaugaugcau

SEQ ID NO: 115231 - RNA, 27 nt, Artificial Sequence
  Description of Artificial Sequence: Synthetic oligonucleotide
acauuuuuacaaauguaagaagagcca

SEQ ID NO: 115232 - RNA, 27 nt, Artificial Sequence
  Description of Artificial Sequence: Synthetic oligonucleotide
aauaugaauuaagaugaccuaaucugu

SEQ ID NO: 115233 - RNA, 27 nt, Artificial Sequence
  Description of Artificial Sequence: Synthetic oligonucleotide
ucaugauuaguucuuucaauuccaucc

SEQ ID NO: 115234 - RNA, 27 nt, Artificial Sequence
  Description of Artificial Sequence: Synthetic oligonucleotide
cccaagagcagaaggaaugagugugca

SEQ ID NO: 115235 - RNA, 27 nt, Artificial Sequence
  Description of Artificial Sequence: Synthetic oligonucleotide
cucaaagcuacugguuaccucuacacc

SEQ ID NO: 115236 - RNA, 27 nt, Artificial Sequence
  Description of Artificial Sequence: Synthetic oligonucleotide
ugaaauauuacguggcaugugguuggg

SEQ ID NO: 115237 - RNA, 27 nt, Artificial Sequence
  Description of Artificial Sequence: Synthetic oligonucleotide
agugaagagaauaacuuguuuccgaag

SEQ ID NO: 115238 - RNA, 27 nt, Artificial Sequence
  Description of Artificial Sequence: Synthetic oligonucleotide
uuucuuagcauuaguuauugggaguga

SEQ ID NO: 115239 - RNA, 27 nt, Artificial Sequence
  Description of Artificial Sequence: Synthetic oligonucleotide
uugauuuucagcauuucuuagcauuag

SEQ ID NO: 115240 - RNA, 27 nt, Artificial Sequence
  Description of Artificial Sequence: Synthetic oligonucleotide
aaaguaaucauauuuagagaaagacag

SEQ ID NO: 115241 - RNA, 27 nt, Artificial Sequence
  Description of Artificial Sequence: Synthetic oligonucleotide
uguagaacaaaaugccugaaauucagc

SEQ ID NO: 115242 - RNA, 27 nt, Artificial Sequence
  Description of Artificial Sequence: Synthetic oligonucleotide
gagagucccgggugagagggaaucgcc

SEQ ID NO: 115243 - RNA, 27 nt, Artificial Sequence
  Description of Artificial Sequence: Synthetic oligonucleotide
cuuuacuuuaaagguucacuuuccuug

SEQ ID NO: 115244 - RNA, 27 nt, Artificial Sequence
  Description of Artificial Sequence: Synthetic oligonucleotide
ccaggcuuccagagcaugcagccuccu

SEQ ID NO: 115245 - RNA, 27 nt, Artificial Sequence
  Description of Artificial Sequence: Synthetic oligonucleotide
cucucuuuuguuuucuguucagagaaa

SEQ ID NO: 115246 - RNA, 27 nt, Artificial Sequence
  Description of Artificial Sequence: Synthetic oligonucleotide
cggcauaacugauuacagccaaguuca

SEQ ID NO: 115247 - RNA, 27 nt, Artificial Sequence
  Description of Artificial Sequence: Synthetic oligonucleotide
uggacuucuuuuaauuuuggcuucuuc

SEQ ID NO: 115248 - RNA, 27 nt, Artificial Sequence
  Description of Artificial Sequence: Synthetic oligonucleotide
uaaccucaccuggacuucuuuuaauuu

SEQ ID NO: 115249 - RNA, 27 nt, Artificial Sequence
  Description of Artificial Sequence: Synthetic oligonucleotide
guccucuucccgauaauccggauucag

SEQ ID NO: 115250 - RNA, 27 nt, Artificial Sequence
  Description of Artificial Sequence: Synthetic oligonucleotide
acaauacuugcuuugaugucacauuaa

SEQ ID NO: 115251 - RNA, 27 nt, Artificial Sequence
  Description of Artificial Sequence: Synthetic oligonucleotide
gagugcuacaauacuugcuuugauguc

SEQ ID NO: 115252 - RNA, 27 nt, Artificial Sequence
  Description of Artificial Sequence: Synthetic oligonucleotide
auuugugguuuuguuuucucucucucu

SEQ ID NO: 115253 - RNA, 27 nt, Artificial Sequence
  Description of Artificial Sequence: Synthetic oligonucleotide
uguaugggcuuaaauacuacagcgagg

SEQ ID NO: 115254 - RNA, 27 nt, Artificial Sequence
  Description of Artificial Sequence: Synthetic oligonucleotide
cuguaugggcuuaaauacuacagcgag

SEQ ID NO: 115255 - RNA, 27 nt, Artificial Sequence
  Description of Artificial Sequence: Synthetic oligonucleotide
ggaagguuucuguaugggcuuaaauac

SEQ ID NO: 115256 - RNA, 27 nt, Artificial Sequence
  Description of Artificial Sequence: Synthetic oligonucleotide
guagguauaccauguuuauuuuaauac

SEQ ID NO: 115257 - RNA, 27 nt, Artificial Sequence
  Description of Artificial Sequence: Synthetic oligonucleotide
uccgaaaacuggccgaucagaacagcc

SEQ ID NO: 115258 - RNA, 27 nt, Artificial Sequence
  Description of Artificial Sequence: Synthetic oligonucleotide
cccuguuccaaaguucaaauuauuugu

SEQ ID NO: 115259 - RNA, 27 nt, Artificial Sequence
  Description of Artificial Sequence: Synthetic oligonucleotide
acuggaaaguuaaauuaaggucgcaau

SEQ ID NO: 115260 - RNA, 27 nt, Artificial Sequence
  Description of Artificial Sequence: Synthetic oligonucleotide
caaaaccaaacuuuagcuuucucagcc

SEQ ID NO: 115261 - RNA, 27 nt, Artificial Sequence
  Description of Artificial Sequence: Synthetic oligonucleotide
uacagugggaaguagcaucuuuacuuu

SEQ ID NO: 115262 - RNA, 27 nt, Artificial Sequence
  Description of Artificial Sequence: Synthetic oligonucleotide
ucauaugguaucagcaauuaagcagua

SEQ ID NO: 115263 - RNA, 27 nt, Artificial Sequence
  Description of Artificial Sequence: Synthetic oligonucleotide
cagcccauguuucauucauaugguauc

SEQ ID NO: 115264 - RNA, 27 nt, Artificial Sequence
  Description of Artificial Sequence: Synthetic oligonucleotide
uaugaaaaaguuggauaagaaaguugg

SEQ ID NO: 115265 - RNA, 27 nt, Artificial Sequence
  Description of Artificial Sequence: Synthetic oligonucleotide
uccggccucaugaugucaugcaaggcu

SEQ ID NO: 115266 - RNA, 27 nt, Artificial Sequence
  Description of Artificial Sequence: Synthetic oligonucleotide
acaaaugcagucauauacaaauucagg

SEQ ID NO: 115267 - RNA, 27 nt, Artificial Sequence
  Description of Artificial Sequence: Synthetic oligonucleotide
gguaguaaacauucuacuaggauucuu

SEQ ID NO: 115268 - RNA, 27 nt, Artificial Sequence
  Description of Artificial Sequence: Synthetic oligonucleotide
uuucaucaaaaaauucuucccuuucug

SEQ ID NO: 115269 - RNA, 27 nt, Artificial Sequence
  Description of Artificial Sequence: Synthetic oligonucleotide
aaauucacacacuggcaugccgauagc

SEQ ID NO: 115270 - RNA, 27 nt, Artificial Sequence
  Description of Artificial Sequence: Synthetic oligonucleotide
acauacauugcucuacuaugaggugaa

SEQ ID NO: 115271 - RNA, 27 nt, Artificial Sequence
  Description of Artificial Sequence: Synthetic oligonucleotide
uauauaugugcuuuggcaauucuggug

SEQ ID NO: 115272 - RNA, 27 nt, Artificial Sequence
  Description of Artificial Sequence: Synthetic oligonucleotide
ggagaaacuauuacccagaucaccacu

SEQ ID NO: 115273 - RNA, 27 nt, Artificial Sequence
  Description of Artificial Sequence: Synthetic oligonucleotide
auuuggagaaacuauuacccagaucac

SEQ ID NO: 115274 - RNA, 27 nt, Artificial Sequence
  Description of Artificial Sequence: Synthetic oligonucleotide
uuucuaggaaguauucaucacauccac

SEQ ID NO: 115275 - RNA, 27 nt, Artificial Sequence
  Description of Artificial Sequence: Synthetic oligonucleotide
cauauaugguguagcuguggaaaugcg

SEQ ID NO: 115276 - RNA, 27 nt, Artificial Sequence
  Description of Artificial Sequence: Synthetic oligonucleotide
cuccauucauauaugguguagcugugg

SEQ ID NO: 115277 - RNA, 27 nt, Artificial Sequence
  Description of Artificial Sequence: Synthetic oligonucleotide
aucuucuucucguguaagaacugcagc

SEQ ID NO: 115278 - RNA, 27 nt, Artificial Sequence
  Description of Artificial Sequence: Synthetic oligonucleotide
ucccuguaaaugaucuucuucucgugu

SEQ ID NO: 115279 - RNA, 27 nt, Artificial Sequence
  Description of Artificial Sequence: Synthetic oligonucleotide
gucccuguaaaugaucuucuucucgug

SEQ ID NO: 115280 - RNA, 27 nt, Artificial Sequence
  Description of Artificial Sequence: Synthetic oligonucleotide
ucaggucccuguaaaugaucuucuucu

SEQ ID NO: 115281 - RNA, 27 nt, Artificial Sequence
  Description of Artificial Sequence: Synthetic oligonucleotide
gaugcagucaaacaccucuuccucugu

SEQ ID NO: 115282 - RNA, 27 nt, Artificial Sequence
  Description of Artificial Sequence: Synthetic oligonucleotide
cgaugcagucaaacaccucuuccucug

SEQ ID NO: 115283 - RNA, 27 nt, Artificial Sequence
  Description of Artificial Sequence: Synthetic oligonucleotide
cccugugaacucgcccucaaaguagcg

SEQ ID NO: 115284 - RNA, 27 nt, Artificial Sequence
  Description of Artificial Sequence: Synthetic oligonucleotide
ggacagaggugccaggagaugcccuca

SEQ ID NO: 115285 - RNA, 27 nt, Artificial Sequence
  Description of Artificial Sequence: Synthetic oligonucleotide
uuaaaaagacaaaccauaucacuccuu

SEQ ID NO: 115286 - RNA, 27 nt, Artificial Sequence
  Description of Artificial Sequence: Synthetic oligonucleotide
cuuaaaaagacaaaccauaucacuccu

SEQ ID NO: 115287 - RNA, 27 nt, Artificial Sequence
  Description of Artificial Sequence: Synthetic oligonucleotide
gacaaccuuuaggaucuuuacugcaac

SEQ ID NO: 115288 - RNA, 27 nt, Artificial Sequence
  Description of Artificial Sequence: Synthetic oligonucleotide
gucgacaaccuuuaggaucuuuacugc

SEQ ID NO: 115289 - RNA, 27 nt, Artificial Sequence
  Description of Artificial Sequence: Synthetic oligonucleotide
acaauugccagguuguccuuugucaug

SEQ ID NO: 115290 - RNA, 27 nt, Artificial Sequence
  Description of Artificial Sequence: Synthetic oligonucleotide
ccucgcaccacugggucacaauugcca

SEQ ID NO: 115291 - RNA, 27 nt, Artificial Sequence
  Description of Artificial Sequence: Synthetic oligonucleotide
auuucaugucucuauggaugauguucu

SEQ ID NO: 115292 - RNA, 27 nt, Artificial Sequence
  Description of Artificial Sequence: Synthetic oligonucleotide
uggagaaauauauuguuggauuucaug

SEQ ID NO: 115293 - RNA, 27 nt, Artificial Sequence
  Description of Artificial Sequence: Synthetic oligonucleotide
agccuucauggagaaauauauuguugg

SEQ ID NO: 115294 - RNA, 27 nt, Artificial Sequence
  Description of Artificial Sequence: Synthetic oligonucleotide
accacuccagcgugacuuuacuguugc

SEQ ID NO: 115295 - RNA, 27 nt, Artificial Sequence
  Description of Artificial Sequence: Synthetic oligonucleotide
ccucucuuccuuuacuuucuucacaca

SEQ ID NO: 115296 - RNA, 27 nt, Artificial Sequence
  Description of Artificial Sequence: Synthetic oligonucleotide
gcccgaugcaaggauggcucggaagcg

SEQ ID NO: 115297 - RNA, 27 nt, Artificial Sequence
  Description of Artificial Sequence: Synthetic oligonucleotide
cacaguaggauauucaaccuccauuuc

SEQ ID NO: 115298 - RNA, 27 nt, Artificial Sequence
  Description of Artificial Sequence: Synthetic oligonucleotide
uuacacaguaggauauucaaccuccau

SEQ ID NO: 115299 - RNA, 27 nt, Artificial Sequence
  Description of Artificial Sequence: Synthetic oligonucleotide
uacacuacaagggaaaacucaaaaucu

SEQ ID NO: 115300 - RNA, 27 nt, Artificial Sequence
  Description of Artificial Sequence: Synthetic oligonucleotide
caaucaacaaagaacaaacaggauaaa

SEQ ID NO: 115301 - RNA, 27 nt, Artificial Sequence
  Description of Artificial Sequence: Synthetic oligonucleotide
uuucaaucaacaaagaacaaacaggau

SEQ ID NO: 115302 - RNA, 27 nt, Artificial Sequence
  Description of Artificial Sequence: Synthetic oligonucleotide
auggaagaaaaagaaggcuguagagaa

SEQ ID NO: 115303 - RNA, 27 nt, Artificial Sequence
  Description of Artificial Sequence: Synthetic oligonucleotide
uagaaggaagauuagcuauggaagaaa

SEQ ID NO: 115304 - RNA, 27 nt, Artificial Sequence
  Description of Artificial Sequence: Synthetic oligonucleotide
augaagcauucaacaggaagauuauuu

SEQ ID NO: 115305 - RNA, 27 nt, Artificial Sequence
  Description of Artificial Sequence: Synthetic oligonucleotide
caugaagcauucaacaggaagauuauu

SEQ ID NO: 115306 - RNA, 27 nt, Artificial Sequence
  Description of Artificial Sequence: Synthetic oligonucleotide
ucaaaguagaauucaagucaugaagca

SEQ ID NO: 115307 - RNA, 27 nt, Artificial Sequence
  Description of Artificial Sequence: Synthetic oligonucleotide
gucuguaguugcuucucucccucuuag

SEQ ID NO: 115308 - RNA, 27 nt, Artificial Sequence
  Description of Artificial Sequence: Synthetic oligonucleotide
guugaccuuggucugguaggagacggc

SEQ ID NO: 115309 - RNA, 27 nt, Artificial Sequence
  Description of Artificial Sequence: Synthetic oligonucleotide
gucgagauagucgggccgauugaucuc

SEQ ID NO: 115310 - RNA, 27 nt, Artificial Sequence
  Description of Artificial Sequence: Synthetic oligonucleotide
guuugggaagguuggauguucguccuc

SEQ ID NO: 115311 - RNA, 27 nt, Artificial Sequence
  Description of Artificial Sequence: Synthetic oligonucleotide
aguucuaagcuuggguuccgacccuaa

SEQ ID NO: 115312 - RNA, 27 nt, Artificial Sequence
  Description of Artificial Sequence: Synthetic oligonucleotide
uuaaaguucuaagcuuggguuccgacc

SEQ ID NO: 115313 - RNA, 27 nt, Artificial Sequence
  Description of Artificial Sequence: Synthetic oligonucleotide
guugcuuaaaguucuaagcuuggguuc

SEQ ID NO: 115314 - RNA, 27 nt, Artificial Sequence
  Description of Artificial Sequence: Synthetic oligonucleotide
gugguggucuuguugcuuaaaguucua

SEQ ID NO: 115315 - RNA, 27 nt, Artificial Sequence
  Description of Artificial Sequence: Synthetic oligonucleotide
acuuuauuucucgccacugaauaguag

SEQ ID NO: 115316 - RNA, 27 nt, Artificial Sequence
  Description of Artificial Sequence: Synthetic oligonucleotide
aacuuuauuucucgccacugaauagua

SEQ ID NO: 115317 - RNA, 27 nt, Artificial Sequence
  Description of Artificial Sequence: Synthetic oligonucleotide
ggaucauuuccuguuaucuguguuugu

SEQ ID NO: 115318 - RNA, 27 nt, Artificial Sequence
  Description of Artificial Sequence: Synthetic oligonucleotide
guuucauuucuucucuuuucuuaaggc

SEQ ID NO: 115319 - RNA, 27 nt, Artificial Sequence
  Description of Artificial Sequence: Synthetic oligonucleotide
ggaggauggaaacacacuccuucaguu

SEQ ID NO: 115320 - RNA, 27 nt, Artificial Sequence
  Description of Artificial Sequence: Synthetic oligonucleotide
ucaaagauuuucagucccgcggugaca

SEQ ID NO: 115321 - RNA, 27 nt, Artificial Sequence
  Description of Artificial Sequence: Synthetic oligonucleotide
ccugaacggcacgcuuauuucugcugu

SEQ ID NO: 115322 - RNA, 27 nt, Artificial Sequence
  Description of Artificial Sequence: Synthetic oligonucleotide
cuucuggacccugaacggcacgcuuau

SEQ ID NO: 115323 - RNA, 27 nt, Artificial Sequence
  Description of Artificial Sequence: Synthetic oligonucleotide
caagcagucuugagugacuguuucuuc

SEQ ID NO: 115324 - RNA, 27 nt, Artificial Sequence
  Description of Artificial Sequence: Synthetic oligonucleotide
ccaaagacauggaccuucuuccucuga

SEQ ID NO: 115325 - RNA, 27 nt, Artificial Sequence
  Description of Artificial Sequence: Synthetic oligonucleotide
guguuucaggcauauuuugaauacauc

SEQ ID NO: 115326 - RNA, 27 nt, Artificial Sequence
  Description of Artificial Sequence: Synthetic oligonucleotide
gagguacagagaaagggaggaaaauag

SEQ ID NO: 115327 - RNA, 27 nt, Artificial Sequence
  Description of Artificial Sequence: Synthetic oligonucleotide
ucuugucuugcucuaucuuucuuuggu

SEQ ID NO: 115328 - RNA, 27 nt, Artificial Sequence
  Description of Artificial Sequence: Synthetic oligonucleotide
uuucuugucuugcucuaucuuucuuug

SEQ ID NO: 115329 - RNA, 27 nt, Artificial Sequence
  Description of Artificial Sequence: Synthetic oligonucleotide
ggaucuuguacaaacaaaugcuuucuc

SEQ ID NO: 115330 - RNA, 27 nt, Artificial Sequence
  Description of Artificial Sequence: Synthetic oligonucleotide
ucugcaaguacguucguuuaacucaag

SEQ ID NO: 115331 - RNA, 27 nt, Artificial Sequence
  Description of Artificial Sequence: Synthetic oligonucleotide
ucuguaucgaucguucuguaucagucu

SEQ ID NO: 115332 - RNA, 27 nt, Artificial Sequence
  Description of Artificial Sequence: Synthetic oligonucleotide
auuuauuuuuauauauauauaauauau

SEQ ID NO: 115333 - RNA, 27 nt, Artificial Sequence
  Description of Artificial Sequence: Synthetic oligonucleotide
auauuuauuuuuauauauauauaauau

SEQ ID NO: 115334 - RNA, 27 nt, Artificial Sequence
  Description of Artificial Sequence: Synthetic oligonucleotide
cacagcagucaaauacauccagugaag

SEQ ID NO: 115335 - RNA, 27 nt, Artificial Sequence
  Description of Artificial Sequence: Synthetic oligonucleotide
gucucucaucuccuccucuucccuguc

SEQ ID NO: 115336 - RNA, 27 nt, Artificial Sequence
  Description of Artificial Sequence: Synthetic oligonucleotide
ccaagugggacaaaaaaaagaucaugc

SEQ ID NO: 115337 - RNA, 14 nt, Artificial Sequence
  Description of Artificial Sequence: Synthetic oligonucleotide
guauuuugaugagg

SEQ ID NO: 115338 - RNA, 12 nt, Artificial Sequence
  Description of Artificial Sequence: Synthetic oligonucleotide
ggcccagaugau

SEQ ID NO: 115339 - RNA, 14 nt, Artificial Sequence
  Description of Artificial Sequence: Synthetic oligonucleotide
gggaagaaaacuau

SEQ ID NO: 115340 - RNA, 15 nt, Artificial Sequence
  Description of Artificial Sequence: Synthetic oligonucleotide
guuuuaauuuauuuc

SEQ ID NO: 115341 - RNA, 12 nt, Artificial Sequence
  Description of Artificial Sequence: Synthetic oligonucleotide
acguagggaaau

SEQ ID NO: 115342 - RNA, 12 nt, Artificial Sequence
  Description of Artificial Sequence: Synthetic oligonucleotide
ccaggguuuacc

SEQ ID NO: 115343 - RNA, 11 nt, Artificial Sequence
  Description of Artificial Sequence: Synthetic oligonucleotide
agcaagguuua

SEQ ID NO: 115344 - RNA, 12 nt, Artificial Sequence
  Description of Artificial Sequence: Synthetic oligonucleotide
uguauuauguug

SEQ ID NO: 115345 - RNA, 15 nt, Artificial Sequence
  Description of Artificial Sequence: Synthetic oligonucleotide
uuuuaaucuuuguga

SEQ ID NO: 115346 - RNA, 14 nt, Artificial Sequence
  Description of Artificial Sequence: Synthetic oligonucleotide
uuaaucuuugugac

SEQ ID NO: 115347 - RNA, 13 nt, Artificial Sequence
  Description of Artificial Sequence: Synthetic oligonucleotide
gcugcuuaugucu

SEQ ID NO: 115348 - RNA, 14 nt, Artificial Sequence
  Description of Artificial Sequence: Synthetic oligonucleotide
aaguguuucagaag

SEQ ID NO: 115349 - RNA, 13 nt, Artificial Sequence
  Description of Artificial Sequence: Synthetic oligonucleotide
gaccaucaauaag

SEQ ID NO: 115350 - RNA, 13 nt, Artificial Sequence
  Description of Artificial Sequence: Synthetic oligonucleotide
ccaucaauaagga

SEQ ID NO: 115351 - RNA, 14 nt, Artificial Sequence
  Description of Artificial Sequence: Synthetic oligonucleotide
ucaauaaggaagaa

SEQ ID NO: 115352 - RNA, 14 nt, Artificial Sequence
  Description of Artificial Sequence: Synthetic oligonucleotide
aauaaggaagaagc

SEQ ID NO: 115353 - RNA, 13 nt, Artificial Sequence
  Description of Artificial Sequence: Synthetic oligonucleotide
aggaagaagcccu

SEQ ID NO: 115354 - RNA, 13 nt, Artificial Sequence
  Description of Artificial Sequence: Synthetic oligonucleotide
gcauaacuaaagg

SEQ ID NO: 115355 - RNA, 14 nt, Artificial Sequence
  Description of Artificial Sequence: Synthetic oligonucleotide
cauaacuaaaggug

SEQ ID NO: 115356 - RNA, 12 nt, Artificial Sequence
  Description of Artificial Sequence: Synthetic oligonucleotide
cuacaucacgcc

SEQ ID NO: 115357 - RNA, 12 nt, Artificial Sequence
  Description of Artificial Sequence: Synthetic oligonucleotide
acuggauuuaag

SEQ ID NO: 115358 - RNA, 12 nt, Artificial Sequence
  Description of Artificial Sequence: Synthetic oligonucleotide
cuggauuuaagc

SEQ ID NO: 115359 - RNA, 13 nt, Artificial Sequence
  Description of Artificial Sequence: Synthetic oligonucleotide
gauuuaagcagag

SEQ ID NO: 115360 - RNA, 13 nt, Artificial Sequence
  Description of Artificial Sequence: Synthetic oligonucleotide
auuuaagcagagu

SEQ ID NO: 115361 - RNA, 13 nt, Artificial Sequence
  Description of Artificial Sequence: Synthetic oligonucleotide
uuaagcagaguuc

SEQ ID NO: 115362 - RNA, 13 nt, Artificial Sequence
  Description of Artificial Sequence: Synthetic oligonucleotide
uaagcagaguuca

SEQ ID NO: 115363 - RNA, 14 nt, Artificial Sequence
  Description of Artificial Sequence: Synthetic oligonucleotide
agcagaguucaaaa

SEQ ID NO: 115364 - RNA, 12 nt, Artificial Sequence
  Description of Artificial Sequence: Synthetic oligonucleotide
cucagggucuga

SEQ ID NO: 115365 - RNA, 13 nt, Artificial Sequence
  Description of Artificial Sequence: Synthetic oligonucleotide
caagcaacuacau

SEQ ID NO: 115366 - RNA, 12 nt, Artificial Sequence
  Description of Artificial Sequence: Synthetic oligonucleotide
aucaauggcagc

SEQ ID NO: 115367 - RNA, 11 nt, Artificial Sequence
  Description of Artificial Sequence: Synthetic oligonucleotide
uuccagcccac

SEQ ID NO: 115368 - RNA, 12 nt, Artificial Sequence
  Description of Artificial Sequence: Synthetic oligonucleotide
cagcugagaaug

SEQ ID NO: 115369 - RNA, 13 nt, Artificial Sequence
  Description of Artificial Sequence: Synthetic oligonucleotide
aacguaucuccua

SEQ ID NO: 115370 - RNA, 14 nt, Artificial Sequence
  Description of Artificial Sequence: Synthetic oligonucleotide
ccuaaaauaauuuc

SEQ ID NO: 115371 - RNA, 13 nt, Artificial Sequence
  Description of Artificial Sequence: Synthetic oligonucleotide
uggaagauucagc

SEQ ID NO: 115372 - RNA, 12 nt, Artificial Sequence
  Description of Artificial Sequence: Synthetic oligonucleotide
uuaaacucuccu

SEQ ID NO: 115373 - RNA, 12 nt, Artificial Sequence
  Description of Artificial Sequence: Synthetic oligonucleotide
cagccuacaguu

SEQ ID NO: 115374 - RNA, 13 nt, Artificial Sequence
  Description of Artificial Sequence: Synthetic oligonucleotide
guuauguucaguc

SEQ ID NO: 115375 - RNA, 13 nt, Artificial Sequence
  Description of Artificial Sequence: Synthetic oligonucleotide
cacauacaaaaug

SEQ ID NO: 115376 - RNA, 9 nt, Artificial Sequence
  Description of Artificial Sequence: Synthetic oligonucleotide
uccuuuugc

SEQ ID NO: 115377 - RNA, 12 nt, Artificial Sequence
  Description of Artificial Sequence: Synthetic oligonucleotide
ugaccugugaag

SEQ ID NO: 115378 - RNA, 12 nt, Artificial Sequence
  Description of Artificial Sequence: Synthetic oligonucleotide
cuaucucacaca

SEQ ID NO: 115379 - RNA, 13 nt, Artificial Sequence
  Description of Artificial Sequence: Synthetic oligonucleotide
uguccucaauugu

SEQ ID NO: 115380 - RNA, 12 nt, Artificial Sequence
  Description of Artificial Sequence: Synthetic oligonucleotide
aaaccguagcug

SEQ ID NO: 115381 - RNA, 12 nt, Artificial Sequence
  Description of Artificial Sequence: Synthetic oligonucleotide
uagcuggcaagc

SEQ ID NO: 115382 - RNA, 14 nt, Artificial Sequence
  Description of Artificial Sequence: Synthetic oligonucleotide
uuguaugguuaaaa

SEQ ID NO: 115383 - RNA, 14 nt, Artificial Sequence
  Description of Artificial Sequence: Synthetic oligonucleotide
ugguuaaaagaugg

SEQ ID NO: 115384 - RNA, 13 nt, Artificial Sequence
  Description of Artificial Sequence: Synthetic oligonucleotide
cagggaauuauac

SEQ ID NO: 115385 - RNA, 12 nt, Artificial Sequence
  Description of Artificial Sequence: Synthetic oligonucleotide
acaaucuugcug

SEQ ID NO: 115386 - RNA, 13 nt, Artificial Sequence
  Description of Artificial Sequence: Synthetic oligonucleotide
ccaauaaugaaga

SEQ ID NO: 115387 - RNA, 13 nt, Artificial Sequence
  Description of Artificial Sequence: Synthetic oligonucleotide
acuuuggauguuc

SEQ ID NO: 115388 - RNA, 12 nt, Artificial Sequence
  Description of Artificial Sequence: Synthetic oligonucleotide
aaugcuuccacu

SEQ ID NO: 115389 - RNA, 11 nt, Artificial Sequence
  Description of Artificial Sequence: Synthetic oligonucleotide
gagaaaguuug

SEQ ID NO: 115390 - RNA, 11 nt, Artificial Sequence
  Description of Artificial Sequence: Synthetic oligonucleotide
aaagaacuacu

SEQ ID NO: 115391 - RNA, 12 nt, Artificial Sequence
  Description of Artificial Sequence: Synthetic oligonucleotide
uuagaaauacgg

SEQ ID NO: 115392 - RNA, 12 nt, Artificial Sequence
  Description of Artificial Sequence: Synthetic oligonucleotide
aacauggguaca

SEQ ID NO: 115393 - RNA, 14 nt, Artificial Sequence
  Description of Artificial Sequence: Synthetic oligonucleotide
aaagacacagaaga

SEQ ID NO: 115394 - RNA, 11 nt, Artificial Sequence
  Description of Artificial Sequence: Synthetic oligonucleotide
uaguagggagg

SEQ ID NO: 115395 - RNA, 12 nt, Artificial Sequence
  Description of Artificial Sequence: Synthetic oligonucleotide
gccuucugcagc

SEQ ID NO: 115396 - RNA, 10 nt, Artificial Sequence
  Description of Artificial Sequence: Synthetic oligonucleotide
ggucugguac

SEQ ID NO: 115397 - RNA, 12 nt, Artificial Sequence
  Description of Artificial Sequence: Synthetic oligonucleotide
cuaguccuuccg

SEQ ID NO: 115398 - RNA, 12 nt, Artificial Sequence
  Description of Artificial Sequence: Synthetic oligonucleotide
ccagugaauauu

SEQ ID NO: 115399 - RNA, 13 nt, Artificial Sequence
  Description of Artificial Sequence: Synthetic oligonucleotide
augaauucaaguu

SEQ ID NO: 115400 - RNA, 12 nt, Artificial Sequence
  Description of Artificial Sequence: Synthetic oligonucleotide
caggacacagau

SEQ ID NO: 115401 - RNA, 12 nt, Artificial Sequence
  Description of Artificial Sequence: Synthetic oligonucleotide
cucaaagcacag

SEQ ID NO: 115402 - RNA, 10 nt, Artificial Sequence
  Description of Artificial Sequence: Synthetic oligonucleotide
accacugcca

SEQ ID NO: 115403 - RNA, 13 nt, Artificial Sequence
  Description of Artificial Sequence: Synthetic oligonucleotide
gaaacuacuagug

SEQ ID NO: 115404 - RNA, 12 nt, Artificial Sequence
  Description of Artificial Sequence: Synthetic oligonucleotide
aagucggacagc

SEQ ID NO: 115405 - RNA, 13 nt, Artificial Sequence
  Description of Artificial Sequence: Synthetic oligonucleotide
gaaagcgaaaaau

SEQ ID NO: 115406 - RNA, 13 nt, Artificial Sequence
  Description of Artificial Sequence: Synthetic oligonucleotide
cccucugauuuag

SEQ ID NO: 115407 - RNA, 12 nt, Artificial Sequence
  Description of Artificial Sequence: Synthetic oligonucleotide
ugagcuauuuaa

SEQ ID NO: 115408 - RNA, 13 nt, Artificial Sequence
  Description of Artificial Sequence: Synthetic oligonucleotide
aaaaggugaaaaa

SEQ ID NO: 115409 - RNA, 14 nt, Artificial Sequence
  Description of Artificial Sequence: Synthetic oligonucleotide
gaaaaagcacuauu

SEQ ID NO: 115410 - RNA, 12 nt, Artificial Sequence
  Description of Artificial Sequence: Synthetic oligonucleotide
ggcugaaaagaa

SEQ ID NO: 115411 - RNA, 12 nt, Artificial Sequence
  Description of Artificial Sequence: Synthetic oligonucleotide
uaaacccuuaua

SEQ ID NO: 115412 - RNA, 13 nt, Artificial Sequence
  Description of Artificial Sequence: Synthetic oligonucleotide
cauacuauuagcc

SEQ ID NO: 115413 - RNA, 12 nt, Artificial Sequence
  Description of Artificial Sequence: Synthetic oligonucleotide
gacagaagcauu

SEQ ID NO: 115414 - RNA, 14 nt, Artificial Sequence
  Description of Artificial Sequence: Synthetic oligonucleotide
agagcaaauaagau

SEQ ID NO: 115415 - RNA, 14 nt, Artificial Sequence
  Description of Artificial Sequence: Synthetic oligonucleotide
ccaacauuuuucuc

SEQ ID NO: 115416 - RNA, 15 nt, Artificial Sequence
  Description of Artificial Sequence: Synthetic oligonucleotide
uuaaguaugagaaaa

SEQ ID NO: 115417 - RNA, 14 nt, Artificial Sequence
  Description of Artificial Sequence: Synthetic oligonucleotide
caggaauaaagaug

SEQ ID NO: 115418 - RNA, 13 nt, Artificial Sequence
  Description of Artificial Sequence: Synthetic oligonucleotide
aauuugaaugacc

SEQ ID NO: 115419 - RNA, 14 nt, Artificial Sequence
  Description of Artificial Sequence: Synthetic oligonucleotide
auguauaaagauag

SEQ ID NO: 115420 - RNA, 12 nt, Artificial Sequence
  Description of Artificial Sequence: Synthetic oligonucleotide
ggcuguaacuau

SEQ ID NO: 115421 - RNA, 11 nt, Artificial Sequence
  Description of Artificial Sequence: Synthetic oligonucleotide
ucugugaagug

SEQ ID NO: 115422 - RNA, 14 nt, Artificial Sequence
  Description of Artificial Sequence: Synthetic oligonucleotide
ccuuuaaggaaaug

SEQ ID NO: 115423 - RNA, 13 nt, Artificial Sequence
  Description of Artificial Sequence: Synthetic oligonucleotide
aaggauacaaaaa

SEQ ID NO: 115424 - RNA, 12 nt, Artificial Sequence
  Description of Artificial Sequence: Synthetic oligonucleotide
agaugcaauuug

SEQ ID NO: 115425 - RNA, 12 nt, Artificial Sequence
  Description of Artificial Sequence: Synthetic oligonucleotide
guucaaaacgaa

SEQ ID NO: 115426 - RNA, 11 nt, Artificial Sequence
  Description of Artificial Sequence: Synthetic oligonucleotide
gugaaaccuca

SEQ ID NO: 115427 - RNA, 13 nt, Artificial Sequence
  Description of Artificial Sequence: Synthetic oligonucleotide
acgaaagagaagc

SEQ ID NO: 115428 - RNA, 12 nt, Artificial Sequence
  Description of Artificial Sequence: Synthetic oligonucleotide
cuccacaagcgc

SEQ ID NO: 115429 - RNA, 14 nt, Artificial Sequence
  Description of Artificial Sequence: Synthetic oligonucleotide
gagaagauuccaaa

SEQ ID NO: 115430 - RNA, 13 nt, Artificial Sequence
  Description of Artificial Sequence: Synthetic oligonucleotide
aaucuggauucaa

SEQ ID NO: 115431 - RNA, 13 nt, Artificial Sequence
  Description of Artificial Sequence: Synthetic oligonucleotide
agaacagauuuga

SEQ ID NO: 115432 - RNA, 11 nt, Artificial Sequence
  Description of Artificial Sequence: Synthetic oligonucleotide
ccagagcugug

SEQ ID NO: 115433 - RNA, 12 nt, Artificial Sequence
  Description of Artificial Sequence: Synthetic oligonucleotide
ccucagauuguu

SEQ ID NO: 115434 - RNA, 12 nt, Artificial Sequence
  Description of Artificial Sequence: Synthetic oligonucleotide
cuauuuuaauua

SEQ ID NO: 115435 - RNA, 13 nt, Artificial Sequence
  Description of Artificial Sequence: Synthetic oligonucleotide
uuuaauuuauuaa

SEQ ID NO: 115436 - RNA, 12 nt, Artificial Sequence
  Description of Artificial Sequence: Synthetic oligonucleotide
augcaguuugaa

SEQ ID NO: 115437 - RNA, 11 nt, Artificial Sequence
  Description of Artificial Sequence: Synthetic oligonucleotide
caugcugcugg

SEQ ID NO: 115438 - RNA, 13 nt, Artificial Sequence
  Description of Artificial Sequence: Synthetic oligonucleotide
agaugugcauuuc

SEQ ID NO: 115439 - RNA, 12 nt, Artificial Sequence
  Description of Artificial Sequence: Synthetic oligonucleotide
ucaaaaccugug

SEQ ID NO: 115440 - RNA, 11 nt, Artificial Sequence
  Description of Artificial Sequence: Synthetic oligonucleotide
gaaugugggua

SEQ ID NO: 115441 - RNA, 10 nt, Artificial Sequence
  Description of Artificial Sequence: Synthetic oligonucleotide
auguggguag

SEQ ID NO: 115442 - RNA, 13 nt, Artificial Sequence
  Description of Artificial Sequence: Synthetic oligonucleotide
ugaaaaugagcau

SEQ ID NO: 115443 - RNA, 13 nt, Artificial Sequence
  Description of Artificial Sequence: Synthetic oligonucleotide
uugcuuuucaugu

SEQ ID NO: 115444 - RNA, 12 nt, Artificial Sequence
  Description of Artificial Sequence: Synthetic oligonucleotide
uguauuucuaua

SEQ ID NO: 115445 - RNA, 13 nt, Artificial Sequence
  Description of Artificial Sequence: Synthetic oligonucleotide
uuugauuaauguu

SEQ ID NO: 115446 - RNA, 12 nt, Artificial Sequence
  Description of Artificial Sequence: Synthetic oligonucleotide
caacguguauag

SEQ ID NO: 115447 - RNA, 12 nt, Artificial Sequence
  Description of Artificial Sequence: Synthetic oligonucleotide
cauauccuuggc

SEQ ID NO: 115448 - RNA, 13 nt, Artificial Sequence
  Description of Artificial Sequence: Synthetic oligonucleotide
uacuaacaucugg

SEQ ID NO: 115449 - RNA, 11 nt, Artificial Sequence
  Description of Artificial Sequence: Synthetic oligonucleotide
cauaaguugug

SEQ ID NO: 115450 - RNA, 12 nt, Artificial Sequence
  Description of Artificial Sequence: Synthetic oligonucleotide
gcaucauuuugg

SEQ ID NO: 115451 - RNA, 10 nt, Artificial Sequence
  Description of Artificial Sequence: Synthetic oligonucleotide
gcucuucuua

SEQ ID NO: 115452 - RNA, 10 nt, Artificial Sequence
  Description of Artificial Sequence: Synthetic oligonucleotide
agauuagguc

SEQ ID NO: 115453 - RNA, 12 nt, Artificial Sequence
  Description of Artificial Sequence: Synthetic oligonucleotide
auggaauugaaa

SEQ ID NO: 115454 - RNA, 13 nt, Artificial Sequence
  Description of Artificial Sequence: Synthetic oligonucleotide
cacacucauuccu

SEQ ID NO: 115455 - RNA, 12 nt, Artificial Sequence
  Description of Artificial Sequence: Synthetic oligonucleotide
uguagagguaac

SEQ ID NO: 115456 - RNA, 11 nt, Artificial Sequence
  Description of Artificial Sequence: Synthetic oligonucleotide
caaccacaugc

SEQ ID NO: 115457 - RNA, 12 nt, Artificial Sequence
  Description of Artificial Sequence: Synthetic oligonucleotide
ucggaaacaagu

SEQ ID NO: 115458 - RNA, 11 nt, Artificial Sequence
  Description of Artificial Sequence: Synthetic oligonucleotide
acucccaauaa

SEQ ID NO: 115459 - RNA, 13 nt, Artificial Sequence
  Description of Artificial Sequence: Synthetic oligonucleotide
aaugcuaagaaau

SEQ ID NO: 115460 - RNA, 11 nt, Artificial Sequence
  Description of Artificial Sequence: Synthetic oligonucleotide
gucuuucucua

SEQ ID NO: 115461 - RNA, 11 nt, Artificial Sequence
  Description of Artificial Sequence: Synthetic oligonucleotide
ugaauuucagg

SEQ ID NO: 115462 - RNA, 13 nt, Artificial Sequence
  Description of Artificial Sequence: Synthetic oligonucleotide
cgauucccucuca

SEQ ID NO: 115463 - RNA, 11 nt, Artificial Sequence
  Description of Artificial Sequence: Synthetic oligonucleotide
aggaaagugaa

SEQ ID NO: 115464 - RNA, 12 nt, Artificial Sequence
  Description of Artificial Sequence: Synthetic oligonucleotide
gaggcugcaugc

SEQ ID NO: 115465 - RNA, 11 nt, Artificial Sequence
  Description of Artificial Sequence: Synthetic oligonucleotide
ucucugaacag

SEQ ID NO: 115466 - RNA, 12 nt, Artificial Sequence
  Description of Artificial Sequence: Synthetic oligonucleotide
aacuuggcugua

SEQ ID NO: 115467 - RNA, 12 nt, Artificial Sequence
  Description of Artificial Sequence: Synthetic oligonucleotide
agaagccaaaau

SEQ ID NO: 115468 - RNA, 14 nt, Artificial Sequence
  Description of Artificial Sequence: Synthetic oligonucleotide
auuaaaagaagucc

SEQ ID NO: 115469 - RNA, 14 nt, Artificial Sequence
  Description of Artificial Sequence: Synthetic oligonucleotide
gaauccggauuauc

SEQ ID NO: 115470 - RNA, 12 nt, Artificial Sequence
  Description of Artificial Sequence: Synthetic oligonucleotide
aaugugacauca

SEQ ID NO: 115471 - RNA, 13 nt, Artificial Sequence
  Description of Artificial Sequence: Synthetic oligonucleotide
caucaaagcaagu

SEQ ID NO: 115472 - RNA, 11 nt, Artificial Sequence
  Description of Artificial Sequence: Synthetic oligonucleotide
agagagagaaa

SEQ ID NO: 115473 - RNA, 13 nt, Artificial Sequence
  Description of Artificial Sequence: Synthetic oligonucleotide
ucgcuguaguauu

SEQ ID NO: 115474 - RNA, 14 nt, Artificial Sequence
  Description of Artificial Sequence: Synthetic oligonucleotide
cgcuguaguauuua

SEQ ID NO: 115475 - RNA, 13 nt, Artificial Sequence
  Description of Artificial Sequence: Synthetic oligonucleotide
auuuaagcccaua

SEQ ID NO: 115476 - RNA, 15 nt, Artificial Sequence
  Description of Artificial Sequence: Synthetic oligonucleotide
auuaaaauaaacaug

SEQ ID NO: 115477 - RNA, 12 nt, Artificial Sequence
  Description of Artificial Sequence: Synthetic oligonucleotide
cuguucugaucg

SEQ ID NO: 115478 - RNA, 16 nt, Artificial Sequence
  Description of Artificial Sequence: Synthetic oligonucleotide
aaauaauuugaacuuu

SEQ ID NO: 115479 - RNA, 12 nt, Artificial Sequence
  Description of Artificial Sequence: Synthetic oligonucleotide
ugcgaccuuaau

SEQ ID NO: 115480 - RNA, 11 nt, Artificial Sequence
  Description of Artificial Sequence: Synthetic oligonucleotide
cugagaaagcu

SEQ ID NO: 115481 - RNA, 13 nt, Artificial Sequence
  Description of Artificial Sequence: Synthetic oligonucleotide
aguaaagaugcua

SEQ ID NO: 115482 - RNA, 12 nt, Artificial Sequence
  Description of Artificial Sequence: Synthetic oligonucleotide
cugcuuaauugc

SEQ ID NO: 115483 - RNA, 14 nt, Artificial Sequence
  Description of Artificial Sequence: Synthetic oligonucleotide
uaccauaugaauga

SEQ ID NO: 115484 - RNA, 12 nt, Artificial Sequence
  Description of Artificial Sequence: Synthetic oligonucleotide
aacuuucuuauc

SEQ ID NO: 115485 - RNA, 13 nt, Artificial Sequence
  Description of Artificial Sequence: Synthetic oligonucleotide
ccuugcaugacau

SEQ ID NO: 115486 - RNA, 14 nt, Artificial Sequence
  Description of Artificial Sequence: Synthetic oligonucleotide
ugaauuuguauaug

SEQ ID NO: 115487 - RNA, 12 nt, Artificial Sequence
  Description of Artificial Sequence: Synthetic oligonucleotide
gaauccuaguag

SEQ ID NO: 115488 - RNA, 10 nt, Artificial Sequence
  Description of Artificial Sequence: Synthetic oligonucleotide
gaaagggaag

SEQ ID NO: 115489 - RNA, 11 nt, Artificial Sequence
  Description of Artificial Sequence: Synthetic oligonucleotide
uaucggcaugc

SEQ ID NO: 115490 - RNA, 12 nt, Artificial Sequence
  Description of Artificial Sequence: Synthetic oligonucleotide
caccucauagua

SEQ ID NO: 115491 - RNA, 11 nt, Artificial Sequence
  Description of Artificial Sequence: Synthetic oligonucleotide
ccagaauugcc

SEQ ID NO: 115492 - RNA, 11 nt, Artificial Sequence
  Description of Artificial Sequence: Synthetic oligonucleotide
uggugaucugg

SEQ ID NO: 115493 - RNA, 12 nt, Artificial Sequence
  Description of Artificial Sequence: Synthetic oligonucleotide
gaucuggguaau

SEQ ID NO: 115494 - RNA, 12 nt, Artificial Sequence
  Description of Artificial Sequence: Synthetic oligonucleotide
ggaugugaugaa

SEQ ID NO: 115495 - RNA, 12 nt, Artificial Sequence
  Description of Artificial Sequence: Synthetic oligonucleotide
cauuuccacagc

SEQ ID NO: 115496 - RNA, 11 nt, Artificial Sequence
  Description of Artificial Sequence: Synthetic oligonucleotide
acagcuacacc

SEQ ID NO: 115497 - RNA, 12 nt, Artificial Sequence
  Description of Artificial Sequence: Synthetic oligonucleotide
ugcaguucuuac

SEQ ID NO: 115498 - RNA, 12 nt, Artificial Sequence
  Description of Artificial Sequence: Synthetic oligonucleotide
acgagaagaaga

SEQ ID NO: 115499 - RNA, 12 nt, Artificial Sequence
  Description of Artificial Sequence: Synthetic oligonucleotide
cgagaagaagau

SEQ ID NO: 115500 - RNA, 15 nt, Artificial Sequence
  Description of Artificial Sequence: Synthetic oligonucleotide
aagaagaucauuuac

SEQ ID NO: 115501 - RNA, 11 nt, Artificial Sequence
  Description of Artificial Sequence: Synthetic oligonucleotide
agaggaagagg

SEQ ID NO: 115502 - RNA, 12 nt, Artificial Sequence
  Description of Artificial Sequence: Synthetic oligonucleotide
gaggaagaggug

SEQ ID NO: 115503 - RNA, 13 nt, Artificial Sequence
  Description of Artificial Sequence: Synthetic oligonucleotide
cuacuuugagggc

SEQ ID NO: 115504 - RNA, 12 nt, Artificial Sequence
  Description of Artificial Sequence: Synthetic oligonucleotide
agggcaucuccu

SEQ ID NO: 115505 - RNA, 10 nt, Artificial Sequence
  Description of Artificial Sequence: Synthetic oligonucleotide
ggagugauau

SEQ ID NO: 115506 - RNA, 11 nt, Artificial Sequence
  Description of Artificial Sequence: Synthetic oligonucleotide
gagugauaugg

SEQ ID NO: 115507 - RNA, 12 nt, Artificial Sequence
  Description of Artificial Sequence: Synthetic oligonucleotide
ugcaguaaagau

SEQ ID NO: 115508 - RNA, 13 nt, Artificial Sequence
  Description of Artificial Sequence: Synthetic oligonucleotide
aguaaagauccua

SEQ ID NO: 115509 - RNA, 12 nt, Artificial Sequence
  Description of Artificial Sequence: Synthetic oligonucleotide
ugacaaaggaca

SEQ ID NO: 115510 - RNA, 13 nt, Artificial Sequence
  Description of Artificial Sequence: Synthetic oligonucleotide
gcaauugugaccc

SEQ ID NO: 115511 - RNA, 12 nt, Artificial Sequence
  Description of Artificial Sequence: Synthetic oligonucleotide
aacaucauccau

SEQ ID NO: 115512 - RNA, 12 nt, Artificial Sequence
  Description of Artificial Sequence: Synthetic oligonucleotide
ugaaauccaaca

SEQ ID NO: 115513 - RNA, 15 nt, Artificial Sequence
  Description of Artificial Sequence: Synthetic oligonucleotide
aacaauauauuucuc

SEQ ID NO: 115514 - RNA, 14 nt, Artificial Sequence
  Description of Artificial Sequence: Synthetic oligonucleotide
aacaguaaagucac

SEQ ID NO: 115515 - RNA, 14 nt, Artificial Sequence
  Description of Artificial Sequence: Synthetic oligonucleotide
ugugaagaaaguaa

SEQ ID NO: 115516 - RNA, 13 nt, Artificial Sequence
  Description of Artificial Sequence: Synthetic oligonucleotide
cuuccgagccauc

SEQ ID NO: 115517 - RNA, 12 nt, Artificial Sequence
  Description of Artificial Sequence: Synthetic oligonucleotide
aauggagguuga

SEQ ID NO: 115518 - RNA, 12 nt, Artificial Sequence
  Description of Artificial Sequence: Synthetic oligonucleotide
ggagguugaaua

SEQ ID NO: 115519 - RNA, 13 nt, Artificial Sequence
  Description of Artificial Sequence: Synthetic oligonucleotide
auuuugaguuuuc

SEQ ID NO: 115520 - RNA, 12 nt, Artificial Sequence
  Description of Artificial Sequence: Synthetic oligonucleotide
uauccuguuugu

SEQ ID NO: 115521 - RNA, 11 nt, Artificial Sequence
  Description of Artificial Sequence: Synthetic oligonucleotide
ccuguuuguuc

SEQ ID NO: 115522 - RNA, 10 nt, Artificial Sequence
  Description of Artificial Sequence: Synthetic oligonucleotide
cucuacagcc

SEQ ID NO: 115523 - RNA, 12 nt, Artificial Sequence
  Description of Artificial Sequence: Synthetic oligonucleotide
ucuuccauagcu

SEQ ID NO: 115524 - RNA, 12 nt, Artificial Sequence
  Description of Artificial Sequence: Synthetic oligonucleotide
auaaucuuccug

SEQ ID NO: 115525 - RNA, 12 nt, Artificial Sequence
  Description of Artificial Sequence: Synthetic oligonucleotide
uaaucuuccugu

SEQ ID NO: 115526 - RNA, 12 nt, Artificial Sequence
  Description of Artificial Sequence: Synthetic oligonucleotide
cuucaugacuug

SEQ ID NO: 115527 - RNA, 12 nt, Artificial Sequence
  Description of Artificial Sequence: Synthetic oligonucleotide
aagagggagaga

SEQ ID NO: 115528 - RNA, 12 nt, Artificial Sequence
  Description of Artificial Sequence: Synthetic oligonucleotide
cgucuccuacca

SEQ ID NO: 115529 - RNA, 12 nt, Artificial Sequence
  Description of Artificial Sequence: Synthetic oligonucleotide
gaucaaucggcc

SEQ ID NO: 115530 - RNA, 12 nt, Artificial Sequence
  Description of Artificial Sequence: Synthetic oligonucleotide
ggacgaacaucc

SEQ ID NO: 115531 - RNA, 11 nt, Artificial Sequence
  Description of Artificial Sequence: Synthetic oligonucleotide
agggucggaac

SEQ ID NO: 115532 - RNA, 10 nt, Artificial Sequence
  Description of Artificial Sequence: Synthetic oligonucleotide
ucggaaccca

SEQ ID NO: 115533 - RNA, 11 nt, Artificial Sequence
  Description of Artificial Sequence: Synthetic oligonucleotide
acccaagcuua

SEQ ID NO: 115534 - RNA, 14 nt, Artificial Sequence
  Description of Artificial Sequence: Synthetic oligonucleotide
gaacuuuaagcaac

SEQ ID NO: 115535 - RNA, 11 nt, Artificial Sequence
  Description of Artificial Sequence: Synthetic oligonucleotide
acuauucagug

SEQ ID NO: 115536 - RNA, 11 nt, Artificial Sequence
  Description of Artificial Sequence: Synthetic oligonucleotide
cuauucagugg

SEQ ID NO: 115537 - RNA, 13 nt, Artificial Sequence
  Description of Artificial Sequence: Synthetic oligonucleotide
aaacacagauaac

SEQ ID NO: 115538 - RNA, 12 nt, Artificial Sequence
  Description of Artificial Sequence: Synthetic oligonucleotide
cuuaagaaaaga

SEQ ID NO: 115539 - RNA, 12 nt, Artificial Sequence
  Description of Artificial Sequence: Synthetic oligonucleotide
cugaaggagugu

SEQ ID NO: 115540 - RNA, 10 nt, Artificial Sequence
  Description of Artificial Sequence: Synthetic oligonucleotide
ucaccgcggg

SEQ ID NO: 115541 - RNA, 14 nt, Artificial Sequence
  Description of Artificial Sequence: Synthetic oligonucleotide
agcagaaauaagcg

SEQ ID NO: 115542 - RNA, 12 nt, Artificial Sequence
  Description of Artificial Sequence: Synthetic oligonucleotide
aagcgugccguu

SEQ ID NO: 115543 - RNA, 12 nt, Artificial Sequence
  Description of Artificial Sequence: Synthetic oligonucleotide
agaaacagucac

SEQ ID NO: 115544 - RNA, 12 nt, Artificial Sequence
  Description of Artificial Sequence: Synthetic oligonucleotide
agaggaagaagg

SEQ ID NO: 115545 - RNA, 14 nt, Artificial Sequence
  Description of Artificial Sequence: Synthetic oligonucleotide
uguauucaaaauau

SEQ ID NO: 115546 - RNA, 13 nt, Artificial Sequence
  Description of Artificial Sequence: Synthetic oligonucleotide
auuuuccucccuu

SEQ ID NO: 115547 - RNA, 13 nt, Artificial Sequence
  Description of Artificial Sequence: Synthetic oligonucleotide
caaagaaagauag

SEQ ID NO: 115548 - RNA, 12 nt, Artificial Sequence
  Description of Artificial Sequence: Synthetic oligonucleotide
aagaaagauaga

SEQ ID NO: 115549 - RNA, 13 nt, Artificial Sequence
  Description of Artificial Sequence: Synthetic oligonucleotide
gaaagcauuuguu

SEQ ID NO: 115550 - RNA, 13 nt, Artificial Sequence
  Description of Artificial Sequence: Synthetic oligonucleotide
ugaguuaaacgaa

SEQ ID NO: 115551 - RNA, 12 nt, Artificial Sequence
  Description of Artificial Sequence: Synthetic oligonucleotide
acugauacagaa

SEQ ID NO: 115552 - RNA, 12 nt, Artificial Sequence
  Description of Artificial Sequence: Synthetic oligonucleotide
auauuauauaua

SEQ ID NO: 115553 - RNA, 12 nt, Artificial Sequence
  Description of Artificial Sequence: Synthetic oligonucleotide
auuauauauaua

SEQ ID NO: 115554 - RNA, 12 nt, Artificial Sequence
  Description of Artificial Sequence: Synthetic oligonucleotide
ucacuggaugua

SEQ ID NO: 115555 - RNA, 12 nt, Artificial Sequence
  Description of Artificial Sequence: Synthetic oligonucleotide
cagggaagagga

SEQ ID NO: 115556 - RNA, 15 nt, Artificial Sequence
  Description of Artificial Sequence: Synthetic oligonucleotide
augaucuuuuuuuug

SEQ ID NO: 115557 - RNA, 11 nt, Artificial Sequence
  Description of Artificial Sequence: Synthetic oligonucleotide
aguucacggcc

SEQ ID NO: 115558 - RNA, 13 nt, Artificial Sequence
  Description of Artificial Sequence: Synthetic oligonucleotide
caccaucacacca

SEQ ID NO: 115559 - RNA, 11 nt, Artificial Sequence
  Description of Artificial Sequence: Synthetic oligonucleotide
ccugcggguuu

SEQ ID NO: 115560 - RNA, 10 nt, Artificial Sequence
  Description of Artificial Sequence: Synthetic oligonucleotide
auccaguuug

SEQ ID NO: 115561 - RNA, 13 nt, Artificial Sequence
  Description of Artificial Sequence: Synthetic oligonucleotide
guuaaggacuucu

SEQ ID NO: 115562 - RNA, 13 nt, Artificial Sequence
  Description of Artificial Sequence: Synthetic oligonucleotide
cagugggacagag

SEQ ID NO: 115563 - RNA, 14 nt, Artificial Sequence
  Description of Artificial Sequence: Synthetic oligonucleotide
aauuuguuauugug

SEQ ID NO: 115564 - RNA, 13 nt, Artificial Sequence
  Description of Artificial Sequence: Synthetic oligonucleotide
uucaaaugcauuu

SEQ ID NO: 115565 - RNA, 10 nt, Artificial Sequence
  Description of Artificial Sequence: Synthetic oligonucleotide
caggaaagcc

SEQ ID NO: 115566 - RNA, 11 nt, Artificial Sequence
  Description of Artificial Sequence: Synthetic oligonucleotide
aggaaagcccu

SEQ ID NO: 115567 - RNA, 12 nt, Artificial Sequence
  Description of Artificial Sequence: Synthetic oligonucleotide
cccagcauggcc

SEQ ID NO: 115568 - RNA, 11 nt, Artificial Sequence
  Description of Artificial Sequence: Synthetic oligonucleotide
cuucucccuga

SEQ ID NO: 115569 - RNA, 12 nt, Artificial Sequence
  Description of Artificial Sequence: Synthetic oligonucleotide
gaagaagcccuu

SEQ ID NO: 115570 - RNA, 12 nt, Artificial Sequence
  Description of Artificial Sequence: Synthetic oligonucleotide
agaagcccuuca

SEQ ID NO: 115571 - RNA, 11 nt, Artificial Sequence
  Description of Artificial Sequence: Synthetic oligonucleotide
gcccuucagcg

SEQ ID NO: 115572 - RNA, 11 nt, Artificial Sequence
  Description of Artificial Sequence: Synthetic oligonucleotide
ccuucagcggc

SEQ ID NO: 115573 - RNA, 12 nt, Artificial Sequence
  Description of Artificial Sequence: Synthetic oligonucleotide
ucagcggccagu

SEQ ID NO: 115574 - RNA, 12 nt, Artificial Sequence
  Description of Artificial Sequence: Synthetic oligonucleotide
ugaaaagcuccg

SEQ ID NO: 115575 - RNA, 11 nt, Artificial Sequence
  Description of Artificial Sequence: Synthetic oligonucleotide
aaaagcuccgg

SEQ ID NO: 115576 - RNA, 13 nt, Artificial Sequence
  Description of Artificial Sequence: Synthetic oligonucleotide
agucaacagucug

SEQ ID NO: 115577 - RNA, 13 nt, Artificial Sequence
  Description of Artificial Sequence: Synthetic oligonucleotide
cagaguucaaaag

SEQ ID NO: 115578 - RNA, 13 nt, Artificial Sequence
  Description of Artificial Sequence: Synthetic oligonucleotide
agaguucaaaagc

SEQ ID NO: 115579 - RNA, 12 nt, Artificial Sequence
  Description of Artificial Sequence: Synthetic oligonucleotide
uucaaaagcccu

SEQ ID NO: 115580 - RNA, 12 nt, Artificial Sequence
  Description of Artificial Sequence: Synthetic oligonucleotide
ucaaaagcccuu

SEQ ID NO: 115581 - RNA, 12 nt, Artificial Sequence
  Description of Artificial Sequence: Synthetic oligonucleotide
aaaagcccuuca

SEQ ID NO: 115582 - RNA, 12 nt, Artificial Sequence
  Description of Artificial Sequence: Synthetic oligonucleotide
aaagcccuucag

SEQ ID NO: 115583 - RNA, 13 nt, Artificial Sequence
  Description of Artificial Sequence: Synthetic oligonucleotide
gugaagccgcucg

SEQ ID NO: 115584 - RNA, 12 nt, Artificial Sequence
  Description of Artificial Sequence: Synthetic oligonucleotide
cacgccagucaa

SEQ ID NO: 115585 - RNA, 13 nt, Artificial Sequence
  Description of Artificial Sequence: Synthetic oligonucleotide
uucuuggugcgug

SEQ ID NO: 115586 - RNA, 14 nt, Artificial Sequence
  Description of Artificial Sequence: Synthetic oligonucleotide
auuggauucaucag

SEQ ID NO: 115587 - RNA, 13 nt, Artificial Sequence
  Description of Artificial Sequence: Synthetic oligonucleotide
uggaauaccuaag

SEQ ID NO: 115588 - RNA, 12 nt, Artificial Sequence
  Description of Artificial Sequence: Synthetic oligonucleotide
auuugaggcuca

SEQ ID NO: 115589 - RNA, 11 nt, Artificial Sequence
  Description of Artificial Sequence: Synthetic oligonucleotide
ucuacaauugg

SEQ ID NO: 115590 - RNA, 12 nt, Artificial Sequence
  Description of Artificial Sequence: Synthetic oligonucleotide
uaguuaggagcc

SEQ ID NO: 115591 - RNA, 13 nt, Artificial Sequence
  Description of Artificial Sequence: Synthetic oligonucleotide
agucaauauccac

SEQ ID NO: 115592 - RNA, 13 nt, Artificial Sequence
  Description of Artificial Sequence: Synthetic oligonucleotide
auguucagucaca

SEQ ID NO: 115593 - RNA, 12 nt, Artificial Sequence
  Description of Artificial Sequence: Synthetic oligonucleotide
acacacacauac

SEQ ID NO: 115594 - RNA, 12 nt, Artificial Sequence
  Description of Artificial Sequence: Synthetic oligonucleotide
uuccuuuugcuu

SEQ ID NO: 115595 - RNA, 16 nt, Artificial Sequence
  Description of Artificial Sequence: Synthetic oligonucleotide
uuuuaaaguaauuuuu

SEQ ID NO: 115596 - RNA, 13 nt, Artificial Sequence
  Description of Artificial Sequence: Synthetic oligonucleotide
caacagucaaugg

SEQ ID NO: 115597 - RNA, 13 nt, Artificial Sequence
  Description of Artificial Sequence: Synthetic oligonucleotide
ucgacaaaccaau

SEQ ID NO: 115598 - RNA, 12 nt, Artificial Sequence
  Description of Artificial Sequence: Synthetic oligonucleotide
acugcuaccacu

SEQ ID NO: 115599 - RNA, 13 nt, Artificial Sequence
  Description of Artificial Sequence: Synthetic oligonucleotide
gcaagcggucuua

SEQ ID NO: 115600 - RNA, 13 nt, Artificial Sequence
  Description of Artificial Sequence: Synthetic oligonucleotide
ggucuuaccggcu

SEQ ID NO: 115601 - RNA, 11 nt, Artificial Sequence
  Description of Artificial Sequence: Synthetic oligonucleotide
gauggguuacc

SEQ ID NO: 115602 - RNA, 11 nt, Artificial Sequence
  Description of Artificial Sequence: Synthetic oligonucleotide
guuaccugcga

SEQ ID NO: 115603 - RNA, 12 nt, Artificial Sequence
  Description of Artificial Sequence: Synthetic oligonucleotide
aaucuugcugag

SEQ ID NO: 115604 - RNA, 13 nt, Artificial Sequence
  Description of Artificial Sequence: Synthetic oligonucleotide
agcauaaaacagu

SEQ ID NO: 115605 - RNA, 12 nt, Artificial Sequence
  Description of Artificial Sequence: Synthetic oligonucleotide
guccuuuauccu

SEQ ID NO: 115606 - RNA, 12 nt, Artificial Sequence
  Description of Artificial Sequence: Synthetic oligonucleotide
caacgcaaguug

SEQ ID NO: 115607 - RNA, 13 nt, Artificial Sequence
  Description of Artificial Sequence: Synthetic oligonucleotide
aaacugaaaccau

SEQ ID NO: 115608 - RNA, 14 nt, Artificial Sequence
  Description of Artificial Sequence: Synthetic oligonucleotide
acuuuguuaaauau

SEQ ID NO: 115609 - RNA, 14 nt, Artificial Sequence
  Description of Artificial Sequence: Synthetic oligonucleotide
guauauuaaaaguu

SEQ ID NO: 115610 - RNA, 13 nt, Artificial Sequence
  Description of Artificial Sequence: Synthetic oligonucleotide
guuuugacuuaac

SEQ ID NO: 115611 - RNA, 13 nt, Artificial Sequence
  Description of Artificial Sequence: Synthetic oligonucleotide
gcaaacucagcac

SEQ ID NO: 115612 - RNA, 11 nt, Artificial Sequence
  Description of Artificial Sequence: Synthetic oligonucleotide
ugcugaccuca

SEQ ID NO: 115613 - RNA, 14 nt, Artificial Sequence
  Description of Artificial Sequence: Synthetic oligonucleotide
uuuauucagaucgc

SEQ ID NO: 115614 - RNA, 13 nt, Artificial Sequence
  Description of Artificial Sequence: Synthetic oligonucleotide
aggguucugggau

SEQ ID NO: 115615 - RNA, 15 nt, Artificial Sequence
  Description of Artificial Sequence: Synthetic oligonucleotide
auauuggaaauuaug

SEQ ID NO: 115616 - RNA, 13 nt, Artificial Sequence
  Description of Artificial Sequence: Synthetic oligonucleotide
auggaagcacuag

SEQ ID NO: 115617 - RNA, 13 nt, Artificial Sequence
  Description of Artificial Sequence: Synthetic oligonucleotide
guuuuuaugugga

SEQ ID NO: 115618 - RNA, 12 nt, Artificial Sequence
  Description of Artificial Sequence: Synthetic oligonucleotide
ggaauugguaga

SEQ ID NO: 115619 - RNA, 13 nt, Artificial Sequence
  Description of Artificial Sequence: Synthetic oligonucleotide
uuagacuuggaga

SEQ ID NO: 115620 - RNA, 13 nt, Artificial Sequence
  Description of Artificial Sequence: Synthetic oligonucleotide
uuacaguauucca

SEQ ID NO: 115621 - RNA, 15 nt, Artificial Sequence
  Description of Artificial Sequence: Synthetic oligonucleotide
ccacugaugaauuaa

SEQ ID NO: 115622 - RNA, 12 nt, Artificial Sequence
  Description of Artificial Sequence: Synthetic oligonucleotide
ccacaucaucac

SEQ ID NO: 115623 - RNA, 13 nt, Artificial Sequence
  Description of Artificial Sequence: Synthetic oligonucleotide
cucaccaaacaga

SEQ ID NO: 115624 - RNA, 12 nt, Artificial Sequence
  Description of Artificial Sequence: Synthetic oligonucleotide
ggaacaugaugg

SEQ ID NO: 115625 - RNA, 12 nt, Artificial Sequence
  Description of Artificial Sequence: Synthetic oligonucleotide
cauguagacugc

SEQ ID NO: 115626 - RNA, 13 nt, Artificial Sequence
  Description of Artificial Sequence: Synthetic oligonucleotide
ggaucuauuuaug

SEQ ID NO: 115627 - RNA, 12 nt, Artificial Sequence
  Description of Artificial Sequence: Synthetic oligonucleotide
gcacuauuauca

SEQ ID NO: 115628 - RNA, 11 nt, Artificial Sequence
  Description of Artificial Sequence: Synthetic oligonucleotide
aucaguucugc

SEQ ID NO: 115629 - RNA, 13 nt, Artificial Sequence
  Description of Artificial Sequence: Synthetic oligonucleotide
agauuaaaccuac

SEQ ID NO: 115630 - RNA, 13 nt, Artificial Sequence
  Description of Artificial Sequence: Synthetic oligonucleotide
auaaaauccuucu

SEQ ID NO: 115631 - RNA, 12 nt, Artificial Sequence
  Description of Artificial Sequence: Synthetic oligonucleotide
aaugcuguagac

SEQ ID NO: 115632 - RNA, 13 nt, Artificial Sequence
  Description of Artificial Sequence: Synthetic oligonucleotide
uugauaggaauag

SEQ ID NO: 115633 - RNA, 11 nt, Artificial Sequence
  Description of Artificial Sequence: Synthetic oligonucleotide
aauggcccuga

SEQ ID NO: 115634 - RNA, 11 nt, Artificial Sequence
  Description of Artificial Sequence: Synthetic oligonucleotide
uuccucaagca

SEQ ID NO: 115635 - RNA, 10 nt, Artificial Sequence
  Description of Artificial Sequence: Synthetic oligonucleotide
guucagccca

SEQ ID NO: 115636 - RNA, 11 nt, Artificial Sequence
  Description of Artificial Sequence: Synthetic oligonucleotide
gcugcugaacc

SEQ ID NO: 115637 - RNA, 12 nt, Artificial Sequence
  Description of Artificial Sequence: Synthetic oligonucleotide
aaguucucuuca

SEQ ID NO: 115638 - RNA, 11 nt, Artificial Sequence
  Description of Artificial Sequence: Synthetic oligonucleotide
ccagccuagag

SEQ ID NO: 115639 - RNA, 13 nt, Artificial Sequence
  Description of Artificial Sequence: Synthetic oligonucleotide
cucugugaagugu

SEQ ID NO: 115640 - RNA, 14 nt, Artificial Sequence
  Description of Artificial Sequence: Synthetic oligonucleotide
ugagaaaauuucaa

SEQ ID NO: 115641 - RNA, 11 nt, Artificial Sequence
  Description of Artificial Sequence: Synthetic oligonucleotide
aauccuccuga

SEQ ID NO: 115642 - RNA, 12 nt, Artificial Sequence
  Description of Artificial Sequence: Synthetic oligonucleotide
gugacaucauau

SEQ ID NO: 115643 - RNA, 13 nt, Artificial Sequence
  Description of Artificial Sequence: Synthetic oligonucleotide
aaucuucaucaua

SEQ ID NO: 115644 - RNA, 13 nt, Artificial Sequence
  Description of Artificial Sequence: Synthetic oligonucleotide
gacuagcuauuaa

SEQ ID NO: 115645 - RNA, 14 nt, Artificial Sequence
  Description of Artificial Sequence: Synthetic oligonucleotide
ucucuacuaaaaau

SEQ ID NO: 115646 - RNA, 12 nt, Artificial Sequence
  Description of Artificial Sequence: Synthetic oligonucleotide
ucuaucucgccu

SEQ ID NO: 115647 - RNA, 13 nt, Artificial Sequence
  Description of Artificial Sequence: Synthetic oligonucleotide
cuucgguccaguu

SEQ ID NO: 115648 - RNA, 11 nt, Artificial Sequence
  Description of Artificial Sequence: Synthetic oligonucleotide
gauguagccgc

SEQ ID NO: 115649 - RNA, 12 nt, Artificial Sequence
  Description of Artificial Sequence: Synthetic oligonucleotide
ugaggagacuug

SEQ ID NO: 115650 - RNA, 12 nt, Artificial Sequence
  Description of Artificial Sequence: Synthetic oligonucleotide
gaguagugagga

SEQ ID NO: 115651 - RNA, 14 nt, Artificial Sequence
  Description of Artificial Sequence: Synthetic oligonucleotide
cagaugaguacaaa

SEQ ID NO: 115652 - RNA, 13 nt, Artificial Sequence
  Description of Artificial Sequence: Synthetic oligonucleotide
guuguuaaugggc

SEQ ID NO: 115653 - RNA, 13 nt, Artificial Sequence
  Description of Artificial Sequence: Synthetic oligonucleotide
uuuuuaauuuauu

SEQ ID NO: 115654 - RNA, 12 nt, Artificial Sequence
  Description of Artificial Sequence: Synthetic oligonucleotide
uauuuaaauaug

SEQ ID NO: 115655 - RNA, 13 nt, Artificial Sequence
  Description of Artificial Sequence: Synthetic oligonucleotide
uauccuuuguuuc

SEQ ID NO: 115656 - RNA, 14 nt, Artificial Sequence
  Description of Artificial Sequence: Synthetic oligonucleotide
cgucuaaguguuug

SEQ ID NO: 115657 - RNA, 12 nt, Artificial Sequence
  Description of Artificial Sequence: Synthetic oligonucleotide
accugugacaaa

SEQ ID NO: 115658 - RNA, 13 nt, Artificial Sequence
  Description of Artificial Sequence: Synthetic oligonucleotide
ccaggcugaauua

SEQ ID NO: 115659 - RNA, 14 nt, Artificial Sequence
  Description of Artificial Sequence: Synthetic oligonucleotide
gucauucuuacaau

SEQ ID NO: 115660 - RNA, 15 nt, Artificial Sequence
  Description of Artificial Sequence: Synthetic oligonucleotide
ucauucuuacaauug

SEQ ID NO: 115661 - RNA, 12 nt, Artificial Sequence
  Description of Artificial Sequence: Synthetic oligonucleotide
cagagaguguac

SEQ ID NO: 115662 - RNA, 12 nt, Artificial Sequence
  Description of Artificial Sequence: Synthetic oligonucleotide
agaacucagcag

SEQ ID NO: 115663 - RNA, 13 nt, Artificial Sequence
  Description of Artificial Sequence: Synthetic oligonucleotide
uuuauuuucagua

SEQ ID NO: 115664 - RNA, 12 nt, Artificial Sequence
  Description of Artificial Sequence: Synthetic oligonucleotide
ucuuaaauggaa

SEQ ID NO: 115665 - RNA, 13 nt, Artificial Sequence
  Description of Artificial Sequence: Synthetic oligonucleotide
ugccuaaaauugu

SEQ ID NO: 115666 - RNA, 12 nt, Artificial Sequence
  Description of Artificial Sequence: Synthetic oligonucleotide
agacugugagcu

SEQ ID NO: 115667 - RNA, 14 nt, Artificial Sequence
  Description of Artificial Sequence: Synthetic oligonucleotide
ugcuuuuuauuaau

SEQ ID NO: 115668 - RNA, 13 nt, Artificial Sequence
  Description of Artificial Sequence: Synthetic oligonucleotide
cucuucuuacauu

SEQ ID NO: 115669 - RNA, 15 nt, Artificial Sequence
  Description of Artificial Sequence: Synthetic oligonucleotide
cauuuguaaaaaugu

SEQ ID NO: 115670 - RNA, 15 nt, Artificial Sequence
  Description of Artificial Sequence: Synthetic oligonucleotide
aucuuaauucauauu

SEQ ID NO: 115671 - RNA, 13 nt, Artificial Sequence
  Description of Artificial Sequence: Synthetic oligonucleotide
gaacuaaucauga

SEQ ID NO: 115672 - RNA, 12 nt, Artificial Sequence
  Description of Artificial Sequence: Synthetic oligonucleotide
ucugcucuuggg

SEQ ID NO: 115673 - RNA, 13 nt, Artificial Sequence
  Description of Artificial Sequence: Synthetic oligonucleotide
caguagcuuugag

SEQ ID NO: 115674 - RNA, 14 nt, Artificial Sequence
  Description of Artificial Sequence: Synthetic oligonucleotide
cacguaauauuuca

SEQ ID NO: 115675 - RNA, 13 nt, Artificial Sequence
  Description of Artificial Sequence: Synthetic oligonucleotide
uauucucuucacu

SEQ ID NO: 115676 - RNA, 14 nt, Artificial Sequence
  Description of Artificial Sequence: Synthetic oligonucleotide
cuaaugcuaagaaa

SEQ ID NO: 115677 - RNA, 12 nt, Artificial Sequence
  Description of Artificial Sequence: Synthetic oligonucleotide
gcugaaaaucaa

SEQ ID NO: 115678 - RNA, 14 nt, Artificial Sequence
  Description of Artificial Sequence: Synthetic oligonucleotide
aauaugauuacuuu

SEQ ID NO: 115679 - RNA, 14 nt, Artificial Sequence
  Description of Artificial Sequence: Synthetic oligonucleotide
cauuuuguucuaca

SEQ ID NO: 115680 - RNA, 12 nt, Artificial Sequence
  Description of Artificial Sequence: Synthetic oligonucleotide
cccgggacucuc

SEQ ID NO: 115681 - RNA, 14 nt, Artificial Sequence
  Description of Artificial Sequence: Synthetic oligonucleotide
ccuuuaaaguaaag

SEQ ID NO: 115682 - RNA, 13 nt, Artificial Sequence
  Description of Artificial Sequence: Synthetic oligonucleotide
ucuggaagccugg

SEQ ID NO: 115683 - RNA, 14 nt, Artificial Sequence
  Description of Artificial Sequence: Synthetic oligonucleotide
aaaacaaaagagag

SEQ ID NO: 115684 - RNA, 13 nt, Artificial Sequence
  Description of Artificial Sequence: Synthetic oligonucleotide
aucaguuaugccg

SEQ ID NO: 115685 - RNA, 13 nt, Artificial Sequence
  Description of Artificial Sequence: Synthetic oligonucleotide
uaaaagaagucca

SEQ ID NO: 115686 - RNA, 11 nt, Artificial Sequence
  Description of Artificial Sequence: Synthetic oligonucleotide
aggugagguua

SEQ ID NO: 115687 - RNA, 11 nt, Artificial Sequence
  Description of Artificial Sequence: Synthetic oligonucleotide
gggaagaggac

SEQ ID NO: 115688 - RNA, 13 nt, Artificial Sequence
  Description of Artificial Sequence: Synthetic oligonucleotide
aagcaaguauugu

SEQ ID NO: 115689 - RNA, 12 nt, Artificial Sequence
  Description of Artificial Sequence: Synthetic oligonucleotide
auuguagcacuc

SEQ ID NO: 115690 - RNA, 14 nt, Artificial Sequence
  Description of Artificial Sequence: Synthetic oligonucleotide
acaaaaccacaaau

SEQ ID NO: 115691 - RNA, 12 nt, Artificial Sequence
  Description of Artificial Sequence: Synthetic oligonucleotide
uaagcccauaca

SEQ ID NO: 115692 - RNA, 11 nt, Artificial Sequence
  Description of Artificial Sequence: Synthetic oligonucleotide
agcccauacag

SEQ ID NO: 115693 - RNA, 12 nt, Artificial Sequence
  Description of Artificial Sequence: Synthetic oligonucleotide
cagaaaccuucc

SEQ ID NO: 115694 - RNA, 10 nt, Artificial Sequence
  Description of Artificial Sequence: Synthetic oligonucleotide
guauaccuac

SEQ ID NO: 115695 - RNA, 13 nt, Artificial Sequence
  Description of Artificial Sequence: Synthetic oligonucleotide
gccaguuuucgga

SEQ ID NO: 115696 - RNA, 9 nt, Artificial Sequence
  Description of Artificial Sequence: Synthetic oligonucleotide
ggaacaggg

SEQ ID NO: 115697 - RNA, 13 nt, Artificial Sequence
  Description of Artificial Sequence: Synthetic oligonucleotide
uuaacuuuccagu

SEQ ID NO: 115698 - RNA, 14 nt, Artificial Sequence
  Description of Artificial Sequence: Synthetic oligonucleotide
aaaguuugguuuug

SEQ ID NO: 115699 - RNA, 12 nt, Artificial Sequence
  Description of Artificial Sequence: Synthetic oligonucleotide
cuucccacugua

SEQ ID NO: 115700 - RNA, 13 nt, Artificial Sequence
  Description of Artificial Sequence: Synthetic oligonucleotide
ugauaccauauga

SEQ ID NO: 115701 - RNA, 11 nt, Artificial Sequence
  Description of Artificial Sequence: Synthetic oligonucleotide
aacaugggcug

SEQ ID NO: 115702 - RNA, 13 nt, Artificial Sequence
  Description of Artificial Sequence: Synthetic oligonucleotide
caacuuuuucaua

SEQ ID NO: 115703 - RNA, 12 nt, Artificial Sequence
  Description of Artificial Sequence: Synthetic oligonucleotide
caugaggccgga

SEQ ID NO: 115704 - RNA, 11 nt, Artificial Sequence
  Description of Artificial Sequence: Synthetic oligonucleotide
acugcauuugu

SEQ ID NO: 115705 - RNA, 13 nt, Artificial Sequence
  Description of Artificial Sequence: Synthetic oligonucleotide
aauguuuacuacc

SEQ ID NO: 115706 - RNA, 15 nt, Artificial Sequence
  Description of Artificial Sequence: Synthetic oligonucleotide
aauuuuuugaugaaa

SEQ ID NO: 115707 - RNA, 14 nt, Artificial Sequence
  Description of Artificial Sequence: Synthetic oligonucleotide
cagugugugaauuu

SEQ ID NO: 115708 - RNA, 13 nt, Artificial Sequence
  Description of Artificial Sequence: Synthetic oligonucleotide
gagcaauguaugu

SEQ ID NO: 115709 - RNA, 14 nt, Artificial Sequence
  Description of Artificial Sequence: Synthetic oligonucleotide
aaagcacauauaua

SEQ ID NO: 115710 - RNA, 14 nt, Artificial Sequence
  Description of Artificial Sequence: Synthetic oligonucleotide
guaauaguuucucc

SEQ ID NO: 115711 - RNA, 13 nt, Artificial Sequence
  Description of Artificial Sequence: Synthetic oligonucleotide
aguuucuccaaau

SEQ ID NO: 115712 - RNA, 13 nt, Artificial Sequence
  Description of Artificial Sequence: Synthetic oligonucleotide
uacuuccuagaaa

SEQ ID NO: 115713 - RNA, 13 nt, Artificial Sequence
  Description of Artificial Sequence: Synthetic oligonucleotide
uacaccauauaug

SEQ ID NO: 115714 - RNA, 14 nt, Artificial Sequence
  Description of Artificial Sequence: Synthetic oligonucleotide
auauaugaauggag

SEQ ID NO: 115715 - RNA, 13 nt, Artificial Sequence
  Description of Artificial Sequence: Synthetic oligonucleotide
acgagaagaagau

SEQ ID NO: 115716 - RNA, 13 nt, Artificial Sequence
  Description of Artificial Sequence: Synthetic oligonucleotide
ucauuuacaggga

SEQ ID NO: 115717 - RNA, 13 nt, Artificial Sequence
  Description of Artificial Sequence: Synthetic oligonucleotide
cauuuacagggac

SEQ ID NO: 115718 - RNA, 10 nt, Artificial Sequence
  Description of Artificial Sequence: Synthetic oligonucleotide
agggaccuga

SEQ ID NO: 115719 - RNA, 14 nt, Artificial Sequence
  Description of Artificial Sequence: Synthetic oligonucleotide
uguuugacugcauc

SEQ ID NO: 115720 - RNA, 13 nt, Artificial Sequence
  Description of Artificial Sequence: Synthetic oligonucleotide
uuugacugcaucg

SEQ ID NO: 115721 - RNA, 12 nt, Artificial Sequence
  Description of Artificial Sequence: Synthetic oligonucleotide
gaguucacaggg

SEQ ID NO: 115722 - RNA, 13 nt, Artificial Sequence
  Description of Artificial Sequence: Synthetic oligonucleotide
ggcaccucugucc

SEQ ID NO: 115723 - RNA, 15 nt, Artificial Sequence
  Description of Artificial Sequence: Synthetic oligonucleotide
gguuugucuuuuuaa

SEQ ID NO: 115724 - RNA, 14 nt, Artificial Sequence
  Description of Artificial Sequence: Synthetic oligonucleotide
uuugucuuuuuaag

SEQ ID NO: 115725 - RNA, 13 nt, Artificial Sequence
  Description of Artificial Sequence: Synthetic oligonucleotide
ccuaaagguuguc

SEQ ID NO: 115726 - RNA, 12 nt, Artificial Sequence
  Description of Artificial Sequence: Synthetic oligonucleotide
aagguugucgac

SEQ ID NO: 115727 - RNA, 13 nt, Artificial Sequence
  Description of Artificial Sequence: Synthetic oligonucleotide
accuggcaauugu

SEQ ID NO: 115728 - RNA, 12 nt, Artificial Sequence
  Description of Artificial Sequence: Synthetic oligonucleotide
aguggugcgagg

SEQ ID NO: 115729 - RNA, 13 nt, Artificial Sequence
  Description of Artificial Sequence: Synthetic oligonucleotide
agagacaugaaau

SEQ ID NO: 115730 - RNA, 13 nt, Artificial Sequence
  Description of Artificial Sequence: Synthetic oligonucleotide
auauauuucucca

SEQ ID NO: 115731 - RNA, 10 nt, Artificial Sequence
  Description of Artificial Sequence: Synthetic oligonucleotide
caugaaggcu

SEQ ID NO: 115732 - RNA, 11 nt, Artificial Sequence
  Description of Artificial Sequence: Synthetic oligonucleotide
gcuggaguggu

SEQ ID NO: 115733 - RNA, 11 nt, Artificial Sequence
  Description of Artificial Sequence: Synthetic oligonucleotide
aggaagagagg

SEQ ID NO: 115734 - RNA, 12 nt, Artificial Sequence
  Description of Artificial Sequence: Synthetic oligonucleotide
cuugcaucgggc

SEQ ID NO: 115735 - RNA, 13 nt, Artificial Sequence
  Description of Artificial Sequence: Synthetic oligonucleotide
auauccuacugug

SEQ ID NO: 115736 - RNA, 13 nt, Artificial Sequence
  Description of Artificial Sequence: Synthetic oligonucleotide
uccuacuguguaa

SEQ ID NO: 115737 - RNA, 12 nt, Artificial Sequence
  Description of Artificial Sequence: Synthetic oligonucleotide
ccuuguagugua

SEQ ID NO: 115738 - RNA, 13 nt, Artificial Sequence
  Description of Artificial Sequence: Synthetic oligonucleotide
ucuuuguugauug

SEQ ID NO: 115739 - RNA, 14 nt, Artificial Sequence
  Description of Artificial Sequence: Synthetic oligonucleotide
uuuguugauugaaa

SEQ ID NO: 115740 - RNA, 15 nt, Artificial Sequence
  Description of Artificial Sequence: Synthetic oligonucleotide
uucuuuuucuuccau

SEQ ID NO: 115741 - RNA, 13 nt, Artificial Sequence
  Description of Artificial Sequence: Synthetic oligonucleotide
aaucuuccuucua

SEQ ID NO: 115742 - RNA, 13 nt, Artificial Sequence
  Description of Artificial Sequence: Synthetic oligonucleotide
uugaaugcuucau

SEQ ID NO: 115743 - RNA, 13 nt, Artificial Sequence
  Description of Artificial Sequence: Synthetic oligonucleotide
ugaaugcuucaug

SEQ ID NO: 115744 - RNA, 13 nt, Artificial Sequence
  Description of Artificial Sequence: Synthetic oligonucleotide
aauucuacuuuga

SEQ ID NO: 115745 - RNA, 13 nt, Artificial Sequence
  Description of Artificial Sequence: Synthetic oligonucleotide
agcaacuacagac

SEQ ID NO: 115746 - RNA, 13 nt, Artificial Sequence
  Description of Artificial Sequence: Synthetic oligonucleotide
gaccaaggucaac

SEQ ID NO: 115747 - RNA, 13 nt, Artificial Sequence
  Description of Artificial Sequence: Synthetic oligonucleotide
cgacuaucucgac

SEQ ID NO: 115748 - RNA, 13 nt, Artificial Sequence
  Description of Artificial Sequence: Synthetic oligonucleotide
aaccuucccaaac

SEQ ID NO: 115749 - RNA, 14 nt, Artificial Sequence
  Description of Artificial Sequence: Synthetic oligonucleotide
ccaagcuuagaacu

SEQ ID NO: 115750 - RNA, 15 nt, Artificial Sequence
  Description of Artificial Sequence: Synthetic oligonucleotide
agcuuagaacuuuaa

SEQ ID NO: 115751 - RNA, 11 nt, Artificial Sequence
  Description of Artificial Sequence: Synthetic oligonucleotide
aagaccaccac

SEQ ID NO: 115752 - RNA, 14 nt, Artificial Sequence
  Description of Artificial Sequence: Synthetic oligonucleotide
gcgagaaauaaagu

SEQ ID NO: 115753 - RNA, 14 nt, Artificial Sequence
  Description of Artificial Sequence: Synthetic oligonucleotide
cgagaaauaaaguu

SEQ ID NO: 115754 - RNA, 12 nt, Artificial Sequence
  Description of Artificial Sequence: Synthetic oligonucleotide
aggaaaugaucc

SEQ ID NO: 115755 - RNA, 13 nt, Artificial Sequence
  Description of Artificial Sequence: Synthetic oligonucleotide
gaagaaaugaaac

SEQ ID NO: 115756 - RNA, 13 nt, Artificial Sequence
  Description of Artificial Sequence: Synthetic oligonucleotide
guuuccauccucc

SEQ ID NO: 115757 - RNA, 15 nt, Artificial Sequence
  Description of Artificial Sequence: Synthetic oligonucleotide
acugaaaaucuuuga

SEQ ID NO: 115758 - RNA, 11 nt, Artificial Sequence
  Description of Artificial Sequence: Synthetic oligonucleotide
ugccguucagg

SEQ ID NO: 115759 - RNA, 13 nt, Artificial Sequence
  Description of Artificial Sequence: Synthetic oligonucleotide
caggguccagaag

SEQ ID NO: 115760 - RNA, 13 nt, Artificial Sequence
  Description of Artificial Sequence: Synthetic oligonucleotide
ucaagacugcuug

SEQ ID NO: 115761 - RNA, 13 nt, Artificial Sequence
  Description of Artificial Sequence: Synthetic oligonucleotide
uccaugucuuugg

SEQ ID NO: 115762 - RNA, 11 nt, Artificial Sequence
  Description of Artificial Sequence: Synthetic oligonucleotide
gccugaaacac

SEQ ID NO: 115763 - RNA, 12 nt, Artificial Sequence
  Description of Artificial Sequence: Synthetic oligonucleotide
ucucuguaccuc

SEQ ID NO: 115764 - RNA, 12 nt, Artificial Sequence
  Description of Artificial Sequence: Synthetic oligonucleotide
agcaagacaaga

SEQ ID NO: 115765 - RNA, 13 nt, Artificial Sequence
  Description of Artificial Sequence: Synthetic oligonucleotide
gcaagacaagaaa

SEQ ID NO: 115766 - RNA, 12 nt, Artificial Sequence
  Description of Artificial Sequence: Synthetic oligonucleotide
uguacaagaucc

SEQ ID NO: 115767 - RNA, 12 nt, Artificial Sequence
  Description of Artificial Sequence: Synthetic oligonucleotide
cguacuugcaga

SEQ ID NO: 115768 - RNA, 13 nt, Artificial Sequence
  Description of Artificial Sequence: Synthetic oligonucleotide
cgaucgauacaga

SEQ ID NO: 115769 - RNA, 13 nt, Artificial Sequence
  Description of Artificial Sequence: Synthetic oligonucleotide
uauaaaaauaaau

SEQ ID NO: 115770 - RNA, 13 nt, Artificial Sequence
  Description of Artificial Sequence: Synthetic oligonucleotide
uaaaaauaaauau

SEQ ID NO: 115771 - RNA, 13 nt, Artificial Sequence
  Description of Artificial Sequence: Synthetic oligonucleotide
uuugacugcugug

SEQ ID NO: 115772 - RNA, 13 nt, Artificial Sequence
  Description of Artificial Sequence: Synthetic oligonucleotide
ggagaugagagac

SEQ ID NO: 115773 - RNA, 10 nt, Artificial Sequence
  Description of Artificial Sequence: Synthetic oligonucleotide
ucccacuugg

SEQ ID NO: 115774 - RNA, 10 nt, Artificial Sequence
  Description of Artificial Sequence: Synthetic oligonucleotide
guucacggcc

SEQ ID NO: 115775 - RNA, 12 nt, Artificial Sequence
  Description of Artificial Sequence: Synthetic oligonucleotide
accaucacacca

SEQ ID NO: 115776 - RNA, 10 nt, Artificial Sequence
  Description of Artificial Sequence: Synthetic oligonucleotide
cugcggguuu

SEQ ID NO: 115777 - RNA, 9 nt, Artificial Sequence
  Description of Artificial Sequence: Synthetic oligonucleotide
uccaguuug

SEQ ID NO: 115778 - RNA, 12 nt, Artificial Sequence
  Description of Artificial Sequence: Synthetic oligonucleotide
uuaaggacuucu

SEQ ID NO: 115779 - RNA, 12 nt, Artificial Sequence
  Description of Artificial Sequence: Synthetic oligonucleotide
agugggacagag

SEQ ID NO: 115780 - RNA, 13 nt, Artificial Sequence
  Description of Artificial Sequence: Synthetic oligonucleotide
auuuguuauugug

SEQ ID NO: 115781 - RNA, 12 nt, Artificial Sequence
  Description of Artificial Sequence: Synthetic oligonucleotide
ucaaaugcauuu

SEQ ID NO: 115782 - RNA, 9 nt, Artificial Sequence
  Description of Artificial Sequence: Synthetic oligonucleotide
aggaaagcc

SEQ ID NO: 115783 - RNA, 10 nt, Artificial Sequence
  Description of Artificial Sequence: Synthetic oligonucleotide
ggaaagcccu

SEQ ID NO: 115784 - RNA, 11 nt, Artificial Sequence
  Description of Artificial Sequence: Synthetic oligonucleotide
ccagcauggcc

SEQ ID NO: 115785 - RNA, 10 nt, Artificial Sequence
  Description of Artificial Sequence: Synthetic oligonucleotide
uucucccuga

SEQ ID NO: 115786 - RNA, 11 nt, Artificial Sequence
  Description of Artificial Sequence: Synthetic oligonucleotide
aagaagcccuu

SEQ ID NO: 115787 - RNA, 11 nt, Artificial Sequence
  Description of Artificial Sequence: Synthetic oligonucleotide
gaagcccuuca

SEQ ID NO: 115788 - RNA, 10 nt, Artificial Sequence
  Description of Artificial Sequence: Synthetic oligonucleotide
cccuucagcg

SEQ ID NO: 115789 - RNA, 10 nt, Artificial Sequence
  Description of Artificial Sequence: Synthetic oligonucleotide
cuucagcggc

SEQ ID NO: 115790 - RNA, 11 nt, Artificial Sequence
  Description of Artificial Sequence: Synthetic oligonucleotide
cagcggccagu

SEQ ID NO: 115791 - RNA, 11 nt, Artificial Sequence
  Description of Artificial Sequence: Synthetic oligonucleotide
gaaaagcuccg

SEQ ID NO: 115792 - RNA, 10 nt, Artificial Sequence
  Description of Artificial Sequence: Synthetic oligonucleotide
aaagcuccgg

SEQ ID NO: 115793 - RNA, 12 nt, Artificial Sequence
  Description of Artificial Sequence: Synthetic oligonucleotide
gucaacagucug

SEQ ID NO: 115794 - RNA, 12 nt, Artificial Sequence
  Description of Artificial Sequence: Synthetic oligonucleotide
agaguucaaaag

SEQ ID NO: 115795 - RNA, 12 nt, Artificial Sequence
  Description of Artificial Sequence: Synthetic oligonucleotide
gaguucaaaagc

SEQ ID NO: 115796 - RNA, 11 nt, Artificial Sequence
  Description of Artificial Sequence: Synthetic oligonucleotide
ucaaaagcccu

SEQ ID NO: 115797 - RNA, 11 nt, Artificial Sequence
  Description of Artificial Sequence: Synthetic oligonucleotide
caaaagcccuu

SEQ ID NO: 115798 - RNA, 11 nt, Artificial Sequence
  Description of Artificial Sequence: Synthetic oligonucleotide
aaagcccuuca

SEQ ID NO: 115799 - RNA, 11 nt, Artificial Sequence
  Description of Artificial Sequence: Synthetic oligonucleotide
aagcccuucag

SEQ ID NO: 115800 - RNA, 12 nt, Artificial Sequence
  Description of Artificial Sequence: Synthetic oligonucleotide
ugaagccgcucg

SEQ ID NO: 115801 - RNA, 11 nt, Artificial Sequence
  Description of Artificial Sequence: Synthetic oligonucleotide
acgccagucaa

SEQ ID NO: 115802 - RNA, 12 nt, Artificial Sequence
  Description of Artificial Sequence: Synthetic oligonucleotide
ucuuggugcgug

SEQ ID NO: 115803 - RNA, 13 nt, Artificial Sequence
  Description of Artificial Sequence: Synthetic oligonucleotide
uuggauucaucag

SEQ ID NO: 115804 - RNA, 12 nt, Artificial Sequence
  Description of Artificial Sequence: Synthetic oligonucleotide
ggaauaccuaag

SEQ ID NO: 115805 - RNA, 11 nt, Artificial Sequence
  Description of Artificial Sequence: Synthetic oligonucleotide
uuugaggcuca

SEQ ID NO: 115806 - RNA, 10 nt, Artificial Sequence
  Description of Artificial Sequence: Synthetic oligonucleotide
cuacaauugg

SEQ ID NO: 115807 - RNA, 11 nt, Artificial Sequence
  Description of Artificial Sequence: Synthetic oligonucleotide
aguuaggagcc

SEQ ID NO: 115808 - RNA, 12 nt, Artificial Sequence
  Description of Artificial Sequence: Synthetic oligonucleotide
gucaauauccac

SEQ ID NO: 115809 - RNA, 12 nt, Artificial Sequence
  Description of Artificial Sequence: Synthetic oligonucleotide
uguucagucaca

SEQ ID NO: 115810 - RNA, 11 nt, Artificial Sequence
  Description of Artificial Sequence: Synthetic oligonucleotide
cacacacauac

SEQ ID NO: 115811 - RNA, 11 nt, Artificial Sequence
  Description of Artificial Sequence: Synthetic oligonucleotide
uccuuuugcuu

SEQ ID NO: 115812 - RNA, 15 nt, Artificial Sequence
  Description of Artificial Sequence: Synthetic oligonucleotide
uuuaaaguaauuuuu

SEQ ID NO: 115813 - RNA, 12 nt, Artificial Sequence
  Description of Artificial Sequence: Synthetic oligonucleotide
aacagucaaugg

SEQ ID NO: 115814 - RNA, 12 nt, Artificial Sequence
  Description of Artificial Sequence: Synthetic oligonucleotide
cgacaaaccaau

SEQ ID NO: 115815 - RNA, 11 nt, Artificial Sequence
  Description of Artificial Sequence: Synthetic oligonucleotide
cugcuaccacu

SEQ ID NO: 115816 - RNA, 12 nt, Artificial Sequence
  Description of Artificial Sequence: Synthetic oligonucleotide
caagcggucuua

SEQ ID NO: 115817 - RNA, 12 nt, Artificial Sequence
  Description of Artificial Sequence: Synthetic oligonucleotide
gucuuaccggcu

SEQ ID NO: 115818 - RNA, 10 nt, Artificial Sequence
  Description of Artificial Sequence: Synthetic oligonucleotide
auggguuacc

SEQ ID NO: 115819 - RNA, 10 nt, Artificial Sequence
  Description of Artificial Sequence: Synthetic oligonucleotide
uuaccugcga

SEQ ID NO: 115820 - RNA, 11 nt, Artificial Sequence
  Description of Artificial Sequence: Synthetic oligonucleotide
aucuugcugag

SEQ ID NO: 115821 - RNA, 12 nt, Artificial Sequence
  Description of Artificial Sequence: Synthetic oligonucleotide
gcauaaaacagu

SEQ ID NO: 115822 - RNA, 11 nt, Artificial Sequence
  Description of Artificial Sequence: Synthetic oligonucleotide
uccuuuauccu

SEQ ID NO: 115823 - RNA, 11 nt, Artificial Sequence
  Description of Artificial Sequence: Synthetic oligonucleotide
aacgcaaguug

SEQ ID NO: 115824 - RNA, 12 nt, Artificial Sequence
  Description of Artificial Sequence: Synthetic oligonucleotide
aacugaaaccau

SEQ ID NO: 115825 - RNA, 13 nt, Artificial Sequence
  Description of Artificial Sequence: Synthetic oligonucleotide
cuuuguuaaauau

SEQ ID NO: 115826 - RNA, 13 nt, Artificial Sequence
  Description of Artificial Sequence: Synthetic oligonucleotide
uauauuaaaaguu

SEQ ID NO: 115827 - RNA, 12 nt, Artificial Sequence
  Description of Artificial Sequence: Synthetic oligonucleotide
uuuugacuuaac

SEQ ID NO: 115828 - RNA, 12 nt, Artificial Sequence
  Description of Artificial Sequence: Synthetic oligonucleotide
caaacucagcac

SEQ ID NO: 115829 - RNA, 10 nt, Artificial Sequence
  Description of Artificial Sequence: Synthetic oligonucleotide
gcugaccuca

SEQ ID NO: 115830 - RNA, 13 nt, Artificial Sequence
  Description of Artificial Sequence: Synthetic oligonucleotide
uuauucagaucgc

SEQ ID NO: 115831 - RNA, 12 nt, Artificial Sequence
  Description of Artificial Sequence: Synthetic oligonucleotide
ggguucugggau

SEQ ID NO: 115832 - RNA, 14 nt, Artificial Sequence
  Description of Artificial Sequence: Synthetic oligonucleotide
uauuggaaauuaug

SEQ ID NO: 115833 - RNA, 12 nt, Artificial Sequence
  Description of Artificial Sequence: Synthetic oligonucleotide
uggaagcacuag

SEQ ID NO: 115834 - RNA, 12 nt, Artificial Sequence
  Description of Artificial Sequence: Synthetic oligonucleotide
uuuuuaugugga

SEQ ID NO: 115835 - RNA, 11 nt, Artificial Sequence
  Description of Artificial Sequence: Synthetic oligonucleotide
gaauugguaga

SEQ ID NO: 115836 - RNA, 12 nt, Artificial Sequence
  Description of Artificial Sequence: Synthetic oligonucleotide
uagacuuggaga

SEQ ID NO: 115837 - RNA, 12 nt, Artificial Sequence
  Description of Artificial Sequence: Synthetic oligonucleotide
uacaguauucca

SEQ ID NO: 115838 - RNA, 14 nt, Artificial Sequence
  Description of Artificial Sequence: Synthetic oligonucleotide
cacugaugaauuaa

SEQ ID NO: 115839 - RNA, 11 nt, Artificial Sequence
  Description of Artificial Sequence: Synthetic oligonucleotide
cacaucaucac

SEQ ID NO: 115840 - RNA, 12 nt, Artificial Sequence
  Description of Artificial Sequence: Synthetic oligonucleotide
ucaccaaacaga

SEQ ID NO: 115841 - RNA, 11 nt, Artificial Sequence
  Description of Artificial Sequence: Synthetic oligonucleotide
gaacaugaugg

SEQ ID NO: 115842 - RNA, 11 nt, Artificial Sequence
  Description of Artificial Sequence: Synthetic oligonucleotide
auguagacugc

SEQ ID NO: 115843 - RNA, 12 nt, Artificial Sequence
  Description of Artificial Sequence: Synthetic oligonucleotide
gaucuauuuaug

SEQ ID NO: 115844 - RNA, 11 nt, Artificial Sequence
  Description of Artificial Sequence: Synthetic oligonucleotide
cacuauuauca

SEQ ID NO: 115845 - RNA, 10 nt, Artificial Sequence
  Description of Artificial Sequence: Synthetic oligonucleotide
ucaguucugc

SEQ ID NO: 115846 - RNA, 12 nt, Artificial Sequence
  Description of Artificial Sequence: Synthetic oligonucleotide
gauuaaaccuac

SEQ ID NO: 115847 - RNA, 12 nt, Artificial Sequence
  Description of Artificial Sequence: Synthetic oligonucleotide
uaaaauccuucu

SEQ ID NO: 115848 - RNA, 11 nt, Artificial Sequence
  Description of Artificial Sequence: Synthetic oligonucleotide
augcuguagac

SEQ ID NO: 115849 - RNA, 12 nt, Artificial Sequence
  Description of Artificial Sequence: Synthetic oligonucleotide
ugauaggaauag

SEQ ID NO: 115850 - RNA, 10 nt, Artificial Sequence
  Description of Artificial Sequence: Synthetic oligonucleotide
auggcccuga

SEQ ID NO: 115851 - RNA, 10 nt, Artificial Sequence
  Description of Artificial Sequence: Synthetic oligonucleotide
uccucaagca

SEQ ID NO: 115852 - RNA, 9 nt, Artificial Sequence
  Description of Artificial Sequence: Synthetic oligonucleotide
uucagccca

SEQ ID NO: 115853 - RNA, 10 nt, Artificial Sequence
  Description of Artificial Sequence: Synthetic oligonucleotide
cugcugaacc

SEQ ID NO: 115854 - RNA, 11 nt, Artificial Sequence
  Description of Artificial Sequence: Synthetic oligonucleotide
aguucucuuca

SEQ ID NO: 115855 - RNA, 10 nt, Artificial Sequence
  Description of Artificial Sequence: Synthetic oligonucleotide
cagccuagag

SEQ ID NO: 115856 - RNA, 12 nt, Artificial Sequence
  Description of Artificial Sequence: Synthetic oligonucleotide
ucugugaagugu

SEQ ID NO: 115857 - RNA, 13 nt, Artificial Sequence
  Description of Artificial Sequence: Synthetic oligonucleotide
gagaaaauuucaa

SEQ ID NO: 115858 - RNA, 10 nt, Artificial Sequence
  Description of Artificial Sequence: Synthetic oligonucleotide
auccuccuga

SEQ ID NO: 115859 - RNA, 11 nt, Artificial Sequence
  Description of Artificial Sequence: Synthetic oligonucleotide
ugacaucauau

SEQ ID NO: 115860 - RNA, 12 nt, Artificial Sequence
  Description of Artificial Sequence: Synthetic oligonucleotide
aucuucaucaua

SEQ ID NO: 115861 - RNA, 12 nt, Artificial Sequence
  Description of Artificial Sequence: Synthetic oligonucleotide
acuagcuauuaa

SEQ ID NO: 115862 - RNA, 13 nt, Artificial Sequence
  Description of Artificial Sequence: Synthetic oligonucleotide
cucuacuaaaaau

SEQ ID NO: 115863 - RNA, 11 nt, Artificial Sequence
  Description of Artificial Sequence: Synthetic oligonucleotide
cuaucucgccu

SEQ ID NO: 115864 - RNA, 12 nt, Artificial Sequence
  Description of Artificial Sequence: Synthetic oligonucleotide
uucgguccaguu

SEQ ID NO: 115865 - RNA, 10 nt, Artificial Sequence
  Description of Artificial Sequence: Synthetic oligonucleotide
auguagccgc

SEQ ID NO: 115866 - RNA, 11 nt, Artificial Sequence
  Description of Artificial Sequence: Synthetic oligonucleotide
gaggagacuug

SEQ ID NO: 115867 - RNA, 11 nt, Artificial Sequence
  Description of Artificial Sequence: Synthetic oligonucleotide
aguagugagga

SEQ ID NO: 115868 - RNA, 13 nt, Artificial Sequence
  Description of Artificial Sequence: Synthetic oligonucleotide
agaugaguacaaa

SEQ ID NO: 115869 - RNA, 12 nt, Artificial Sequence
  Description of Artificial Sequence: Synthetic oligonucleotide
uuguuaaugggc

SEQ ID NO: 115870 - RNA, 12 nt, Artificial Sequence
  Description of Artificial Sequence: Synthetic oligonucleotide
uuuuaauuuauu

SEQ ID NO: 115871 - RNA, 11 nt, Artificial Sequence
  Description of Artificial Sequence: Synthetic oligonucleotide
auuuaaauaug

SEQ ID NO: 115872 - RNA, 12 nt, Artificial Sequence
  Description of Artificial Sequence: Synthetic oligonucleotide
auccuuuguuuc

SEQ ID NO: 115873 - RNA, 13 nt, Artificial Sequence
  Description of Artificial Sequence: Synthetic oligonucleotide
gucuaaguguuug

SEQ ID NO: 115874 - RNA, 11 nt, Artificial Sequence
  Description of Artificial Sequence: Synthetic oligonucleotide
ccugugacaaa

SEQ ID NO: 115875 - RNA, 12 nt, Artificial Sequence
  Description of Artificial Sequence: Synthetic oligonucleotide
caggcugaauua

SEQ ID NO: 115876 - RNA, 13 nt, Artificial Sequence
  Description of Artificial Sequence: Synthetic oligonucleotide
ucauucuuacaau

SEQ ID NO: 115877 - RNA, 14 nt, Artificial Sequence
  Description of Artificial Sequence: Synthetic oligonucleotide
cauucuuacaauug

SEQ ID NO: 115878 - RNA, 11 nt, Artificial Sequence
  Description of Artificial Sequence: Synthetic oligonucleotide
agagaguguac

SEQ ID NO: 115879 - RNA, 11 nt, Artificial Sequence
  Description of Artificial Sequence: Synthetic oligonucleotide
gaacucagcag

SEQ ID NO: 115880 - RNA, 12 nt, Artificial Sequence
  Description of Artificial Sequence: Synthetic oligonucleotide
uuauuuucagua

SEQ ID NO: 115881 - RNA, 11 nt, Artificial Sequence
  Description of Artificial Sequence: Synthetic oligonucleotide
cuuaaauggaa

SEQ ID NO: 115882 - RNA, 12 nt, Artificial Sequence
  Description of Artificial Sequence: Synthetic oligonucleotide
gccuaaaauugu

SEQ ID NO: 115883 - RNA, 12 nt, Artificial Sequence
  Description of Artificial Sequence: Synthetic oligonucleotide
acuaacaucugg

SEQ ID NO: 115884 - RNA, 11 nt, Artificial Sequence
  Description of Artificial Sequence: Synthetic oligonucleotide
gacugugagcu

SEQ ID NO: 115885 - RNA, 13 nt, Artificial Sequence
  Description of Artificial Sequence: Synthetic oligonucleotide
gcuuuuuauuaau

SEQ ID NO: 115886 - RNA, 12 nt, Artificial Sequence
  Description of Artificial Sequence: Synthetic oligonucleotide
ucuucuuacauu

SEQ ID NO: 115887 - RNA, 14 nt, Artificial Sequence
  Description of Artificial Sequence: Synthetic oligonucleotide
auuuguaaaaaugu

SEQ ID NO: 115888 - RNA, 14 nt, Artificial Sequence
  Description of Artificial Sequence: Synthetic oligonucleotide
ucuuaauucauauu

SEQ ID NO: 115889 - RNA, 12 nt, Artificial Sequence
  Description of Artificial Sequence: Synthetic oligonucleotide
aacuaaucauga

SEQ ID NO: 115890 - RNA, 11 nt, Artificial Sequence
  Description of Artificial Sequence: Synthetic oligonucleotide
cugcucuuggg

SEQ ID NO: 115891 - RNA, 12 nt, Artificial Sequence
  Description of Artificial Sequence: Synthetic oligonucleotide
aguagcuuugag

SEQ ID NO: 115892 - RNA, 13 nt, Artificial Sequence
  Description of Artificial Sequence: Synthetic oligonucleotide
acguaauauuuca

SEQ ID NO: 115893 - RNA, 12 nt, Artificial Sequence
  Description of Artificial Sequence: Synthetic oligonucleotide
auucucuucacu

SEQ ID NO: 115894 - RNA, 13 nt, Artificial Sequence
  Description of Artificial Sequence: Synthetic oligonucleotide
uaaugcuaagaaa

SEQ ID NO: 115895 - RNA, 11 nt, Artificial Sequence
  Description of Artificial Sequence: Synthetic oligonucleotide
cugaaaaucaa

SEQ ID NO: 115896 - RNA, 13 nt, Artificial Sequence
  Description of Artificial Sequence: Synthetic oligonucleotide
auaugauuacuuu

SEQ ID NO: 115897 - RNA, 13 nt, Artificial Sequence
  Description of Artificial Sequence: Synthetic oligonucleotide
auuuuguucuaca

SEQ ID NO: 115898 - RNA, 11 nt, Artificial Sequence
  Description of Artificial Sequence: Synthetic oligonucleotide
ccgggacucuc

SEQ ID NO: 115899 - RNA, 13 nt, Artificial Sequence
  Description of Artificial Sequence: Synthetic oligonucleotide
cuuuaaaguaaag

SEQ ID NO: 115900 - RNA, 12 nt, Artificial Sequence
  Description of Artificial Sequence: Synthetic oligonucleotide
cuggaagccugg

SEQ ID NO: 115901 - RNA, 13 nt, Artificial Sequence
  Description of Artificial Sequence: Synthetic oligonucleotide
aaacaaaagagag

SEQ ID NO: 115902 - RNA, 12 nt, Artificial Sequence
  Description of Artificial Sequence: Synthetic oligonucleotide
ucaguuaugccg

SEQ ID NO: 115903 - RNA, 12 nt, Artificial Sequence
  Description of Artificial Sequence: Synthetic oligonucleotide
aaaagaagucca

SEQ ID NO: 115904 - RNA, 10 nt, Artificial Sequence
  Description of Artificial Sequence: Synthetic oligonucleotide
ggugagguua

SEQ ID NO: 115905 - RNA, 10 nt, Artificial Sequence
  Description of Artificial Sequence: Synthetic oligonucleotide
ggaagaggac

SEQ ID NO: 115906 - RNA, 12 nt, Artificial Sequence
  Description of Artificial Sequence: Synthetic oligonucleotide
agcaaguauugu

SEQ ID NO: 115907 - RNA, 11 nt, Artificial Sequence
  Description of Artificial Sequence: Synthetic oligonucleotide
uuguagcacuc

SEQ ID NO: 115908 - RNA, 13 nt, Artificial Sequence
  Description of Artificial Sequence: Synthetic oligonucleotide
caaaaccacaaau

SEQ ID NO: 115909 - RNA, 11 nt, Artificial Sequence
  Description of Artificial Sequence: Synthetic oligonucleotide
aagcccauaca

SEQ ID NO: 115910 - RNA, 10 nt, Artificial Sequence
  Description of Artificial Sequence: Synthetic oligonucleotide
gcccauacag

SEQ ID NO: 115911 - RNA, 11 nt, Artificial Sequence
  Description of Artificial Sequence: Synthetic oligonucleotide
agaaaccuucc

SEQ ID NO: 115912 - RNA, 9 nt, Artificial Sequence
  Description of Artificial Sequence: Synthetic oligonucleotide
uauaccuac

SEQ ID NO: 115913 - RNA, 12 nt, Artificial Sequence
  Description of Artificial Sequence: Synthetic oligonucleotide
ccaguuuucgga

SEQ ID NO: 115914 - RNA, 8 nt, Artificial Sequence
  Description of Artificial Sequence: Synthetic oligonucleotide
gaacaggg

SEQ ID NO: 115915 - RNA, 12 nt, Artificial Sequence
  Description of Artificial Sequence: Synthetic oligonucleotide
uaacuuuccagu

SEQ ID NO: 115916 - RNA, 13 nt, Artificial Sequence
  Description of Artificial Sequence: Synthetic oligonucleotide
aaguuugguuuug

SEQ ID NO: 115917 - RNA, 11 nt, Artificial Sequence
  Description of Artificial Sequence: Synthetic oligonucleotide
uucccacugua

SEQ ID NO: 115918 - RNA, 12 nt, Artificial Sequence
  Description of Artificial Sequence: Synthetic oligonucleotide
gauaccauauga

SEQ ID NO: 115919 - RNA, 10 nt, Artificial Sequence
  Description of Artificial Sequence: Synthetic oligonucleotide
acaugggcug

SEQ ID NO: 115920 - RNA, 12 nt, Artificial Sequence
  Description of Artificial Sequence: Synthetic oligonucleotide
aacuuuuucaua

SEQ ID NO: 115921 - RNA, 11 nt, Artificial Sequence
  Description of Artificial Sequence: Synthetic oligonucleotide
augaggccgga

SEQ ID NO: 115922 - RNA, 10 nt, Artificial Sequence
  Description of Artificial Sequence: Synthetic oligonucleotide
cugcauuugu

SEQ ID NO: 115923 - RNA, 12 nt, Artificial Sequence
  Description of Artificial Sequence: Synthetic oligonucleotide
auguuuacuacc

SEQ ID NO: 115924 - RNA, 14 nt, Artificial Sequence
  Description of Artificial Sequence: Synthetic oligonucleotide
auuuuuugaugaaa

SEQ ID NO: 115925 - RNA, 13 nt, Artificial Sequence
  Description of Artificial Sequence: Synthetic oligonucleotide
agugugugaauuu

SEQ ID NO: 115926 - RNA, 12 nt, Artificial Sequence
  Description of Artificial Sequence: Synthetic oligonucleotide
agcaauguaugu

SEQ ID NO: 115927 - RNA, 13 nt, Artificial Sequence
  Description of Artificial Sequence: Synthetic oligonucleotide
aagcacauauaua

SEQ ID NO: 115928 - RNA, 13 nt, Artificial Sequence
  Description of Artificial Sequence: Synthetic oligonucleotide
uaauaguuucucc

SEQ ID NO: 115929 - RNA, 12 nt, Artificial Sequence
  Description of Artificial Sequence: Synthetic oligonucleotide
guuucuccaaau

SEQ ID NO: 115930 - RNA, 12 nt, Artificial Sequence
  Description of Artificial Sequence: Synthetic oligonucleotide
acuuccuagaaa

SEQ ID NO: 115931 - RNA, 12 nt, Artificial Sequence
  Description of Artificial Sequence: Synthetic oligonucleotide
acaccauauaug

SEQ ID NO: 115932 - RNA, 13 nt, Artificial Sequence
  Description of Artificial Sequence: Synthetic oligonucleotide
uauaugaauggag

SEQ ID NO: 115933 - RNA, 12 nt, Artificial Sequence
  Description of Artificial Sequence: Synthetic oligonucleotide
cauuuacaggga

SEQ ID NO: 115934 - RNA, 12 nt, Artificial Sequence
  Description of Artificial Sequence: Synthetic oligonucleotide
auuuacagggac

SEQ ID NO: 115935 - RNA, 9 nt, Artificial Sequence
  Description of Artificial Sequence: Synthetic oligonucleotide
gggaccuga

SEQ ID NO: 115936 - RNA, 13 nt, Artificial Sequence
  Description of Artificial Sequence: Synthetic oligonucleotide
guuugacugcauc

SEQ ID NO: 115937 - RNA, 12 nt, Artificial Sequence
  Description of Artificial Sequence: Synthetic oligonucleotide
uugacugcaucg

SEQ ID NO: 115938 - RNA, 11 nt, Artificial Sequence
  Description of Artificial Sequence: Synthetic oligonucleotide
aguucacaggg

SEQ ID NO: 115939 - RNA, 12 nt, Artificial Sequence
  Description of Artificial Sequence: Synthetic oligonucleotide
gcaccucugucc

SEQ ID NO: 115940 - RNA, 14 nt, Artificial Sequence
  Description of Artificial Sequence: Synthetic oligonucleotide
guuugucuuuuuaa

SEQ ID NO: 115941 - RNA, 13 nt, Artificial Sequence
  Description of Artificial Sequence: Synthetic oligonucleotide
uugucuuuuuaag

SEQ ID NO: 115942 - RNA, 12 nt, Artificial Sequence
  Description of Artificial Sequence: Synthetic oligonucleotide
cuaaagguuguc

SEQ ID NO: 115943 - RNA, 11 nt, Artificial Sequence
  Description of Artificial Sequence: Synthetic oligonucleotide
agguugucgac

SEQ ID NO: 115944 - RNA, 12 nt, Artificial Sequence
  Description of Artificial Sequence: Synthetic oligonucleotide
ccuggcaauugu

SEQ ID NO: 115945 - RNA, 11 nt, Artificial Sequence
  Description of Artificial Sequence: Synthetic oligonucleotide
guggugcgagg

SEQ ID NO: 115946 - RNA, 12 nt, Artificial Sequence
  Description of Artificial Sequence: Synthetic oligonucleotide
gagacaugaaau

SEQ ID NO: 115947 - RNA, 12 nt, Artificial Sequence
  Description of Artificial Sequence: Synthetic oligonucleotide
uauauuucucca

SEQ ID NO: 115948 - RNA, 9 nt, Artificial Sequence
  Description of Artificial Sequence: Synthetic oligonucleotide
augaaggcu

SEQ ID NO: 115949 - RNA, 10 nt, Artificial Sequence
  Description of Artificial Sequence: Synthetic oligonucleotide
cuggaguggu

SEQ ID NO: 115950 - RNA, 10 nt, Artificial Sequence
  Description of Artificial Sequence: Synthetic oligonucleotide
ggaagagagg

SEQ ID NO: 115951 - RNA, 11 nt, Artificial Sequence
  Description of Artificial Sequence: Synthetic oligonucleotide
uugcaucgggc

SEQ ID NO: 115952 - RNA, 12 nt, Artificial Sequence
  Description of Artificial Sequence: Synthetic oligonucleotide
uauccuacugug

SEQ ID NO: 115953 - RNA, 12 nt, Artificial Sequence
  Description of Artificial Sequence: Synthetic oligonucleotide
ccuacuguguaa

SEQ ID NO: 115954 - RNA, 11 nt, Artificial Sequence
  Description of Artificial Sequence: Synthetic oligonucleotide
cuuguagugua

SEQ ID NO: 115955 - RNA, 12 nt, Artificial Sequence
  Description of Artificial Sequence: Synthetic oligonucleotide
cuuuguugauug

SEQ ID NO: 115956 - RNA, 13 nt, Artificial Sequence
  Description of Artificial Sequence: Synthetic oligonucleotide
uuguugauugaaa

SEQ ID NO: 115957 - RNA, 14 nt, Artificial Sequence
  Description of Artificial Sequence: Synthetic oligonucleotide
ucuuuuucuuccau

SEQ ID NO: 115958 - RNA, 12 nt, Artificial Sequence
  Description of Artificial Sequence: Synthetic oligonucleotide
aucuuccuucua

SEQ ID NO: 115959 - RNA, 12 nt, Artificial Sequence
  Description of Artificial Sequence: Synthetic oligonucleotide
ugaaugcuucau

SEQ ID NO: 115960 - RNA, 12 nt, Artificial Sequence
  Description of Artificial Sequence: Synthetic oligonucleotide
gaaugcuucaug

SEQ ID NO: 115961 - RNA, 12 nt, Artificial Sequence
  Description of Artificial Sequence: Synthetic oligonucleotide
auucuacuuuga

SEQ ID NO: 115962 - RNA, 12 nt, Artificial Sequence
  Description of Artificial Sequence: Synthetic oligonucleotide
gcaacuacagac

SEQ ID NO: 115963 - RNA, 12 nt, Artificial Sequence
  Description of Artificial Sequence: Synthetic oligonucleotide
accaaggucaac

SEQ ID NO: 115964 - RNA, 12 nt, Artificial Sequence
  Description of Artificial Sequence: Synthetic oligonucleotide
gacuaucucgac

SEQ ID NO: 115965 - RNA, 12 nt, Artificial Sequence
  Description of Artificial Sequence: Synthetic oligonucleotide
accuucccaaac

SEQ ID NO: 115966 - RNA, 13 nt, Artificial Sequence
  Description of Artificial Sequence: Synthetic oligonucleotide
caagcuuagaacu

SEQ ID NO: 115967 - RNA, 14 nt, Artificial Sequence
  Description of Artificial Sequence: Synthetic oligonucleotide
gcuuagaacuuuaa

SEQ ID NO: 115968 - RNA, 13 nt, Artificial Sequence
  Description of Artificial Sequence: Synthetic oligonucleotide
aacuuuaagcaac

SEQ ID NO: 115969 - RNA, 10 nt, Artificial Sequence
  Description of Artificial Sequence: Synthetic oligonucleotide
agaccaccac

SEQ ID NO: 115970 - RNA, 13 nt, Artificial Sequence
  Description of Artificial Sequence: Synthetic oligonucleotide
cgagaaauaaagu

SEQ ID NO: 115971 - RNA, 13 nt, Artificial Sequence
  Description of Artificial Sequence: Synthetic oligonucleotide
gagaaauaaaguu

SEQ ID NO: 115972 - RNA, 11 nt, Artificial Sequence
  Description of Artificial Sequence: Synthetic oligonucleotide
ggaaaugaucc

SEQ ID NO: 115973 - RNA, 12 nt, Artificial Sequence
  Description of Artificial Sequence: Synthetic oligonucleotide
aagaaaugaaac

SEQ ID NO: 115974 - RNA, 12 nt, Artificial Sequence
  Description of Artificial Sequence: Synthetic oligonucleotide
uuuccauccucc

SEQ ID NO: 115975 - RNA, 14 nt, Artificial Sequence
  Description of Artificial Sequence: Synthetic oligonucleotide
cugaaaaucuuuga

SEQ ID NO: 115976 - RNA, 10 nt, Artificial Sequence
  Description of Artificial Sequence: Synthetic oligonucleotide
gccguucagg

SEQ ID NO: 115977 - RNA, 12 nt, Artificial Sequence
  Description of Artificial Sequence: Synthetic oligonucleotide
aggguccagaag

SEQ ID NO: 115978 - RNA, 12 nt, Artificial Sequence
  Description of Artificial Sequence: Synthetic oligonucleotide
caagacugcuug

SEQ ID NO: 115979 - RNA, 12 nt, Artificial Sequence
  Description of Artificial Sequence: Synthetic oligonucleotide
ccaugucuuugg

SEQ ID NO: 115980 - RNA, 10 nt, Artificial Sequence
  Description of Artificial Sequence: Synthetic oligonucleotide
ccugaaacac

SEQ ID NO: 115981 - RNA, 11 nt, Artificial Sequence
  Description of Artificial Sequence: Synthetic oligonucleotide
cucuguaccuc

SEQ ID NO: 115982 - RNA, 11 nt, Artificial Sequence
  Description of Artificial Sequence: Synthetic oligonucleotide
gcaagacaaga

SEQ ID NO: 115983 - RNA, 12 nt, Artificial Sequence
  Description of Artificial Sequence: Synthetic oligonucleotide
caagacaagaaa

SEQ ID NO: 115984 - RNA, 11 nt, Artificial Sequence
  Description of Artificial Sequence: Synthetic oligonucleotide
guacaagaucc

SEQ ID NO: 115985 - RNA, 11 nt, Artificial Sequence
  Description of Artificial Sequence: Synthetic oligonucleotide
guacuugcaga

SEQ ID NO: 115986 - RNA, 12 nt, Artificial Sequence
  Description of Artificial Sequence: Synthetic oligonucleotide
gaucgauacaga

SEQ ID NO: 115987 - RNA, 12 nt, Artificial Sequence
  Description of Artificial Sequence: Synthetic oligonucleotide
auaaaaauaaau

SEQ ID NO: 115988 - RNA, 12 nt, Artificial Sequence
  Description of Artificial Sequence: Synthetic oligonucleotide
aaaaauaaauau

SEQ ID NO: 115989 - RNA, 12 nt, Artificial Sequence
  Description of Artificial Sequence: Synthetic oligonucleotide
uugacugcugug

SEQ ID NO: 115990 - RNA, 12 nt, Artificial Sequence
  Description of Artificial Sequence: Synthetic oligonucleotide
gagaugagagac

SEQ ID NO: 115991 - RNA, 9 nt, Artificial Sequence
  Description of Artificial Sequence: Synthetic oligonucleotide
cccacuugg

SEQ ID NO: 115992 - RNA, 6475 nt, Homo sapiens
ggcgaggcgagguuugcuggggugaggcagcggcgcggccgggccgggccgggccacaggcgguggcggcgggaccauggaggcggcggucgcugcuccgcguccccggcugcuccuccucgugcuggcggcggcggcggcggcggcggcggcgcugcucccgggggcgacggcguuacaguguuucugccaccucuguacaaaagacaauuuuacuugugugacagaugggcucugcuuugucucugucacagagaccacagacaaaguuauacacaacagcauguguauagcugaaauugacuuaauuccucgagauaggccguuuguaugugcacccucuucaaaaacugggucugugacuacaacauauugcugcaaucaggaccauugcaauaaaauagaacuuccaacuacuguaaagucaucaccuggccuugguccuguggaacuggcagcugucauugcuggaccagugugcuucgucugcaucucacucauguugauggucuauaucugccacaaccgcacugucauucaccaucgagugccaaaugaagaggacccuucauuagaucgcccuuuuauuucagaggguacuacguugaaagacuuaauuuaugauaugacaacgucagguucuggcucagguuuaccauugcuuguucagagaacaauugcgagaacuauuguguuacaagaaagcauuggcaaaggucgauuuggagaaguuuggagaggaaaguggcggggagaagaaguugcuguuaagauauucuccucuagagaagaacguucgugguuccgugaggcagagauuuaucaaacuguaauguuacgucaugaaaacauccugggauuuauagcagcagacaauaaagacaaugguacuuggacucagcucugguuggugucagauuaucaugagcauggaucccuuuuugauuacuuaaacagauacacaguuacuguggaaggaaugauaaaacuugcucuguccacggcgagcggucuugcccaucuucacauggagauuguugguacccaaggaaagccagccauugcucauagagauuugaaaucaaagaauaucuugguaaagaagaauggaacuugcuguauugcagacuuaggacuggcaguaagacaugauucagccacagauaccauugauauugcuccaaaccacagagugggaacaaaaagguacauggccccugaaguucucgaugauuccauaaauaugaaacauuuugaauccuucaaacgugcugacaucuaugcaaugggcuuaguauucugggaaauugcucgacgauguuccauugguggaauucaugaagauuaccaacugccuuauuaugaucuuguaccuucugacccaucaguugaagaaaugagaaaaguuguuugugaacagaaguuaaggccaaauaucccaaacagauggcagagcugugaagccuugagaguaauggcuaaaauuaugagagaauguugguaugccaauggagcagcuaggcuuacagcauugcggauuaagaaaacauuaucgcaacucagucaacaggaaggcaucaaaauguaauucuacagcuuugccugaacucuccuuuuuucuucagaucugcuccuggguuuuaauuugggaggucaauuguucuaccucacugagagggaacagaaggauauugcuuccuuuugcagcaguguaauaaagucaauuaaaaacuucccaggauuucuuuggacccaggaaacagccauguggguccuuucugugcacuaugaacgcuucuuucccaggacagaaaauguguagucuaccuuuauuuuuuauuaacaaaacuuguuuuuuaaaaagaugauugcuggucuuaacuuuagguaacucugcugugcuggagaucaucuuuaagggcaaaggaguuggauugcugaauuacaaugaaacaugucuuauuacuaaagaaagugauuuacuccugguuaguacauucucagaggauucugaaccacuagaguuuccuugauucagacuuugaauguacuguucuauaguuuuucaggaucuuaaaacuaacacuuauaaaacucuuaucuugagucuaaaaaugaccucauauaguagugaggaacauaauucaugcaauuguauuuuguauacuauuauuguucuuucacuuauucagaacauuacaugccuucaaaaugggauuguacuauaccaguaagugccacuucugugucuuucuaauggaaaugaguagaauugcugaaagucucuauguuaaaaccuauaguguuugaauucaaaaagcuuauuuaucuggguaacccaaacuuuuucuguuuuguuuuuggaaggguuuuugugguaugucauuugguauucuauucugaaaaugccuuucuccuaccaaaaugugcuuaagccacuaaagaaaugaaguggcauuaauuaguaaauuauuagcauggucauguuugaauauucucacaucaagcuuuugcauuuuaauuguguugucuaaguauacuuuuaaaaaaucaaguggcacucuagaugcuuauaguacuuuaauauuuguagcauacagacuaauuuuucuaaaagggaaagucugucuagcugcuugugaaaaguuaugugguauucuguaagccauuuuuuucuuuaucuguucaaagacuuauuuuuuaagacaugaauuacauuuaaaauuagaauaugguuaauauuaaauaauaggccuuuuucuaggaaggcgaagguaguuaauaauuugaauagauaacagaugugcaagaaagucacauuuguuauguauguaggaguaaacguucgguggauccucugucuuuguaacugagguuagagcuagugugguuuugaggucucacuacacuuugaggaaggcagcuuuuaauucaguguuuccuuaugugugcguacauugcaacugcuuacauguaauuuauguaaugcauucagugcacccuuguuacuugggagaggugguagcuaaagaacauucugaguauagguuuuucuccauuuacagaugucuuuggucaaauauugaaagcaaacuugucauggucuucuuacauuaaguugaaacuagcuuauaauaacugguuuuuacuuccaaugcuaugaagucucugcagggcuuuuacaguuuucgaaguccuuuuaucacugugaucuuauucugaggggagaaaaaacuaucauagcucugaggcaagacuucgacuuuauagugcuaucaguuccccgauacagggucagaguaacccauacaguauuuuggucaggaagagaaaguggccauuuacacugaaugaguugcauucugauaaugucuuaucucuuauacguagaauaaauuugaaagacuauuugaucuuaaaaccaaaguaauuuuagaaugagugacauauuacauaggaauuuagugucaauuucauguguuuaaaaacaucaugggaaaaaugcuuagagguuacuauuuugacuacaaaguugaguuuuuuucuguaguuaccauaauuucauugaagcaaaugaaugaguuugagagguuuguuuuuauaguuguguuguauuacuuguuuaauaauaaucucuaauucugugaucagguacuuuuuuuguggggguuuuuuuuuuguuuuuuuuuuuuuguuguuguuuuugggccauuucuaagccuaccagaucugcuuuaugaaauccaggggaccaaugcauuuuaucacuaaaacuauuuuuauauaauuuuaagaauauaccaaaaguugucugauuuaaaguuguaauacaugauuucucacuuucauguaagguuauccacuuuugcugaagauauuuuuuauugaaucaaagauugaguuacaauuauacuuuucuuaccuaaguggauaaaauguacuuuugaugaaucagggaauuuuuuuaaaguuggaguuuaguucuaaauugacuuuacguauuacugcaguuaauuccuuuuuuggcuagggaugguuugauaaaccacaauuggcugauauugaaaaugaaagaaacuuaaaaggugggauggaucaugauuacugucgauaacugcagauaaauuugauuagaguaauaauuuugucauuuaaaaacacaguuguuuauacugcccauccuaggaugcucaccuuccaagauucaacguggcuaaaacaucuucugguaaauugugcguccauauucauuuugucaguagccaggagaaauggggaugggggaaauacgacuuagugaggcauagacaucccugguccauccuuucugucuccagcuguuucuuggaaccugcucuccugcuugcuggucccugacgcagagaccguugccucccccacagccguuugacugaaggcugcucuggagaccuagaguaaaacggcugauggaaguugugggacccacuuccauuuccuucagucauuagagguggaagggaggggucuccaaguuuggagauugagcagaugaggcuugggaugccccugcuuugacuucagccauggaugaggagugggauggcagcaagguggcuccuguggcaguggaguugugccagaaacaguggccaguuguaucgccuauaagacaggguaaggucugaagagcugagccuguaauucugcuguaauaaugauagugcucaagaagugccuugaguugguguacagugccauggccaucaagaaucccagauuucagguuuuauuacaaaauguaaguggucacuuggcgauuuuguaguacaugcaugaguuaccuuuuuucucuaugucugagaacugucagauuaaaacaagauggcaaagagaucguuagagugcacaacaaaaucacuaucccauuagacacaucaucaaaagcuuauuuuuauucuugcacuggaagaaucguaagucaacuguuucuugaccauggcaguguucuggcuccaaaugguagugauuccaaauaaugguucuguuaacacuuuggcagaaaaugccagcucagauauuuugagauacuaaggauuaucuuuggacauguacugcagcuucuugucucuguuuuggauuacuggaauacccaugggcccucucaagagugcuggacuucuaggacauuaagaugauugucaguacauuaaacuuuucaaucccauuaugcaaucuuguuuguaaauguaaacuucuaaaaauaugguuaauaacauucaaccuguuuauuacaacuuaaaaggaacuucagugaauuuguuuuuauuuuuuaacaagauuugugaacugaauaucaugaaccauguuuugauaccccuuuuucacguugugccaacggaauaggguguuugauauuucuucauauguuaaggagaugcuucaaaaugucaauugcuuuaaacuuaaauuaccucucaagagaccaagguacauuuaccucauuguguauauaauguuuaauauuugucagagcauucuccagguuugcaguuuuauuucuauaaaguauggguauuauguugcucaguuacucaaaugguacuguauuguuuauauuuguaccccaaauaacaucgucuguacuuucuguuuucuguauuguauuugugcaggauucuuuaggcuuuaucaguguaaucucugccuuuuaagauauguacagaaaauguccauauaaauuuccauugaagucgaaugauacugagaagccuguaaagaggagaaaaaaacauaagcuguguuuccccauaaguuuuuuuaaauuguauauuguauuuguaguaauauuccaaaagaauguaaauaggaaauagaagagugaugcuuauguuaaguccuaacacuacaguagaagaauggaagcagugcaaauaaauuacauuuuucccaagugccaguggcauauuuuaaaauaaaguguauacguuggaaugagucaugccauauguaguugcuguagauggcaacuagaaccuuugaguuacaagagucuuuagaaguuuucuaacccugccuagugcaaguuacaauauuauagcguguucggggagugcccuccugucugcaggugugucucugugccugggggcuuuucuccacaugcuuaggggugugggucuuccauuggggcaugauggaccugucuacaggugaucucuguugccuuugggucagcacauuuguuagucuccugggggugaaaacuuggcuuacaagagaacuggaaaaaugaugagaugugguccccaaacccuugauugacucuggggaggggcuuugugaauaggauugcucucacauuaaagauaguuacuucaauuugaaggcuggauuuagggauuuuuuuuuuuccuuauaacaaagacaucaccaggauaugaagcuuuuguugaaaguuggaaaaaaagugaaauuaaagacauucccagacaaa

SEQ ID NO: 115993 - RNA, 19 nt, Artificial Sequence
  Description of Artificial Sequence: Synthetic oligonucleotide
ggcgaggcgagguuugcug

SEQ ID NO: 115994 - RNA, 19 nt, Artificial Sequence
  Description of Artificial Sequence: Synthetic oligonucleotide
ggggugaggcagcggcgcg

SEQ ID NO: 115995 - RNA, 19 nt, Artificial Sequence
  Description of Artificial Sequence: Synthetic oligonucleotide
ggccgggccgggccgggcc

SEQ ID NO: 115996 - RNA, 19 nt, Artificial Sequence
  Description of Artificial Sequence: Synthetic oligonucleotide
cacaggcgguggcggcggg

SEQ ID NO: 115997 - RNA, 19 nt, Artificial Sequence
  Description of Artificial Sequence: Synthetic oligonucleotide
gaccauggaggcggcgguc

SEQ ID NO: 115998 - RNA, 19 nt, Artificial Sequence
  Description of Artificial Sequence: Synthetic oligonucleotide
cgcugcuccgcguccccgg

SEQ ID NO: 115999 - RNA, 19 nt, Artificial Sequence
  Description of Artificial Sequence: Synthetic oligonucleotide
gcugcuccuccucgugcug

SEQ ID NO: 116000 - RNA, 19 nt, Artificial Sequence
  Description of Artificial Sequence: Synthetic oligonucleotide
ggcggcggcggcggcggcg

SEQ ID NO: 116001 - RNA, 19 nt, Artificial Sequence
  Description of Artificial Sequence: Synthetic oligonucleotide
ggcggcggcgcugcucccg

SEQ ID NO: 116002 - RNA, 19 nt, Artificial Sequence
  Description of Artificial Sequence: Synthetic oligonucleotide
gggggcgacggcguuacag

SEQ ID NO: 116003 - RNA, 19 nt, Artificial Sequence
  Description of Artificial Sequence: Synthetic oligonucleotide
guguuucugccaccucugu

SEQ ID NO: 116004 - RNA, 19 nt, Artificial Sequence
  Description of Artificial Sequence: Synthetic oligonucleotide
uacaaaagacaauuuuacu

SEQ ID NO: 116005 - RNA, 19 nt, Artificial Sequence
  Description of Artificial Sequence: Synthetic oligonucleotide
uugugugacagaugggcuc

SEQ ID NO: 116006 - RNA, 19 nt, Artificial Sequence
  Description of Artificial Sequence: Synthetic oligonucleotide
cugcuuugucucugucaca

SEQ ID NO: 116007 - RNA, 19 nt, Artificial Sequence
  Description of Artificial Sequence: Synthetic oligonucleotide
agagaccacagacaaaguu

SEQ ID NO: 116008 - RNA, 19 nt, Artificial Sequence
  Description of Artificial Sequence: Synthetic oligonucleotide
uauacacaacagcaugugu

SEQ ID NO: 116009 - RNA, 19 nt, Artificial Sequence
  Description of Artificial Sequence: Synthetic oligonucleotide
uauagcugaaauugacuua

SEQ ID NO: 116010 - RNA, 19 nt, Artificial Sequence
  Description of Artificial Sequence: Synthetic oligonucleotide
aauuccucgagauaggccg

SEQ ID NO: 116011 - RNA, 19 nt, Artificial Sequence
  Description of Artificial Sequence: Synthetic oligonucleotide
guuuguaugugcacccucu

SEQ ID NO: 116012 - RNA, 19 nt, Artificial Sequence
  Description of Artificial Sequence: Synthetic oligonucleotide
uucaaaaacugggucugug

SEQ ID NO: 116013 - RNA, 19 nt, Artificial Sequence
  Description of Artificial Sequence: Synthetic oligonucleotide
gacuacaacauauugcugc

SEQ ID NO: 116014 - RNA, 19 nt, Artificial Sequence
  Description of Artificial Sequence: Synthetic oligonucleotide
caaucaggaccauugcaau

SEQ ID NO: 116015 - RNA, 19 nt, Artificial Sequence
  Description of Artificial Sequence: Synthetic oligonucleotide
uaaaauagaacuuccaacu

SEQ ID NO: 116016 - RNA, 19 nt, Artificial Sequence
  Description of Artificial Sequence: Synthetic oligonucleotide
uacuguaaagucaucaccu

SEQ ID NO: 116017 - RNA, 19 nt, Artificial Sequence
  Description of Artificial Sequence: Synthetic oligonucleotide
uggccuugguccuguggaa

SEQ ID NO: 116018 - RNA, 19 nt, Artificial Sequence
  Description of Artificial Sequence: Synthetic oligonucleotide
acuggcagcugucauugcu

SEQ ID NO: 116019 - RNA, 19 nt, Artificial Sequence
  Description of Artificial Sequence: Synthetic oligonucleotide
uggaccagugugcuucguc

SEQ ID NO: 116020 - RNA, 19 nt, Artificial Sequence
  Description of Artificial Sequence: Synthetic oligonucleotide
cugcaucucacucauguug

SEQ ID NO: 116021 - RNA, 19 nt, Artificial Sequence
  Description of Artificial Sequence: Synthetic oligonucleotide
gauggucuauaucugccac

SEQ ID NO: 116022 - RNA, 19 nt, Artificial Sequence
  Description of Artificial Sequence: Synthetic oligonucleotide
caaccgcacugucauucac

SEQ ID NO: 116023 - RNA, 19 nt, Artificial Sequence
  Description of Artificial Sequence: Synthetic oligonucleotide
ccaucgagugccaaaugaa

SEQ ID NO: 116024 - RNA, 19 nt, Artificial Sequence
  Description of Artificial Sequence: Synthetic oligonucleotide
agaggacccuucauuagau

SEQ ID NO: 116025 - RNA, 19 nt, Artificial Sequence
  Description of Artificial Sequence: Synthetic oligonucleotide
ucgcccuuuuauuucagag

SEQ ID NO: 116026 - RNA, 19 nt, Artificial Sequence
  Description of Artificial Sequence: Synthetic oligonucleotide
ggguacuacguugaaagac

SEQ ID NO: 116027 - RNA, 19 nt, Artificial Sequence
  Description of Artificial Sequence: Synthetic oligonucleotide
cuuaauuuaugauaugaca

SEQ ID NO: 116028 - RNA, 19 nt, Artificial Sequence
  Description of Artificial Sequence: Synthetic oligonucleotide
aacgucagguucuggcuca

SEQ ID NO: 116029 - RNA, 19 nt, Artificial Sequence
  Description of Artificial Sequence: Synthetic oligonucleotide
agguuuaccauugcuuguu

SEQ ID NO: 116030 - RNA, 19 nt, Artificial Sequence
  Description of Artificial Sequence: Synthetic oligonucleotide
ucagagaacaauugcgaga

SEQ ID NO: 116031 - RNA, 19 nt, Artificial Sequence
  Description of Artificial Sequence: Synthetic oligonucleotide
aacuauuguguuacaagaa

SEQ ID NO: 116032 - RNA, 19 nt, Artificial Sequence
  Description of Artificial Sequence: Synthetic oligonucleotide
aagcauuggcaaaggucga

SEQ ID NO: 116033 - RNA, 19 nt, Artificial Sequence
  Description of Artificial Sequence: Synthetic oligonucleotide
auuuggagaaguuuggaga

SEQ ID NO: 116034 - RNA, 19 nt, Artificial Sequence
  Description of Artificial Sequence: Synthetic oligonucleotide
aggaaaguggcggggagaa

SEQ ID NO: 116035 - RNA, 19 nt, Artificial Sequence
  Description of Artificial Sequence: Synthetic oligonucleotide
agaaguugcuguuaagaua

SEQ ID NO: 116036 - RNA, 19 nt, Artificial Sequence
  Description of Artificial Sequence: Synthetic oligonucleotide
auucuccucuagagaagaa

SEQ ID NO: 116037 - RNA, 19 nt, Artificial Sequence
  Description of Artificial Sequence: Synthetic oligonucleotide
acguucgugguuccgugag

SEQ ID NO: 116038 - RNA, 19 nt, Artificial Sequence
  Description of Artificial Sequence: Synthetic oligonucleotide
ggcagagauuuaucaaacu

SEQ ID NO: 116039 - RNA, 19 nt, Artificial Sequence
  Description of Artificial Sequence: Synthetic oligonucleotide
uguaauguuacgucaugaa

SEQ ID NO: 116040 - RNA, 19 nt, Artificial Sequence
  Description of Artificial Sequence: Synthetic oligonucleotide
aaacauccugggauuuaua

SEQ ID NO: 116041 - RNA, 19 nt, Artificial Sequence
  Description of Artificial Sequence: Synthetic oligonucleotide
agcagcagacaauaaagac

SEQ ID NO: 116042 - RNA, 19 nt, Artificial Sequence
  Description of Artificial Sequence: Synthetic oligonucleotide
caaugguacuuggacucag

SEQ ID NO: 116043 - RNA, 19 nt, Artificial Sequence
  Description of Artificial Sequence: Synthetic oligonucleotide
gcucugguuggugucagau

SEQ ID NO: 116044 - RNA, 19 nt, Artificial Sequence
  Description of Artificial Sequence: Synthetic oligonucleotide
uuaucaugagcauggaucc

SEQ ID NO: 116045 - RNA, 19 nt, Artificial Sequence
  Description of Artificial Sequence: Synthetic oligonucleotide
ccuuuuugauuacuuaaac

SEQ ID NO: 116046 - RNA, 19 nt, Artificial Sequence
  Description of Artificial Sequence: Synthetic oligonucleotide
cagauacacaguuacugug

SEQ ID NO: 116047 - RNA, 19 nt, Artificial Sequence
  Description of Artificial Sequence: Synthetic oligonucleotide
ggaaggaaugauaaaacuu

SEQ ID NO: 116048 - RNA, 19 nt, Artificial Sequence
  Description of Artificial Sequence: Synthetic oligonucleotide
ugcucuguccacggcgagc

SEQ ID NO: 116049 - RNA, 19 nt, Artificial Sequence
  Description of Artificial Sequence: Synthetic oligonucleotide
cggucuugcccaucuucac

SEQ ID NO: 116050 - RNA, 19 nt, Artificial Sequence
  Description of Artificial Sequence: Synthetic oligonucleotide
cauggagauuguugguacc

SEQ ID NO: 116051 - RNA, 19 nt, Artificial Sequence
  Description of Artificial Sequence: Synthetic oligonucleotide
ccaaggaaagccagccauu

SEQ ID NO: 116052 - RNA, 19 nt, Artificial Sequence
  Description of Artificial Sequence: Synthetic oligonucleotide
ugcucauagagauuugaaa

SEQ ID NO: 116053 - RNA, 19 nt, Artificial Sequence
  Description of Artificial Sequence: Synthetic oligonucleotide
aucaaagaauaucuuggua

SEQ ID NO: 116054 - RNA, 19 nt, Artificial Sequence
  Description of Artificial Sequence: Synthetic oligonucleotide
aaagaagaauggaacuugc

SEQ ID NO: 116055 - RNA, 19 nt, Artificial Sequence
  Description of Artificial Sequence: Synthetic oligonucleotide
cuguauugcagacuuagga

SEQ ID NO: 116056 - RNA, 19 nt, Artificial Sequence
  Description of Artificial Sequence: Synthetic oligonucleotide
acuggcaguaagacaugau

SEQ ID NO: 116057 - RNA, 19 nt, Artificial Sequence
  Description of Artificial Sequence: Synthetic oligonucleotide
uucagccacagauaccauu

SEQ ID NO: 116058 - RNA, 19 nt, Artificial Sequence
  Description of Artificial Sequence: Synthetic oligonucleotide
ugauauugcuccaaaccac

SEQ ID NO: 116059 - RNA, 19 nt, Artificial Sequence
  Description of Artificial Sequence: Synthetic oligonucleotide
cagagugggaacaaaaagg

SEQ ID NO: 116060 - RNA, 19 nt, Artificial Sequence
  Description of Artificial Sequence: Synthetic oligonucleotide
guacauggccccugaaguu

SEQ ID NO: 116061 - RNA, 19 nt, Artificial Sequence
  Description of Artificial Sequence: Synthetic oligonucleotide
ucucgaugauuccauaaau

SEQ ID NO: 116062 - RNA, 19 nt, Artificial Sequence
  Description of Artificial Sequence: Synthetic oligonucleotide
uaugaaacauuuugaaucc

SEQ ID NO: 116063 - RNA, 19 nt, Artificial Sequence
  Description of Artificial Sequence: Synthetic oligonucleotide
cuucaaacgugcugacauc

SEQ ID NO: 116064 - RNA, 19 nt, Artificial Sequence
  Description of Artificial Sequence: Synthetic oligonucleotide
cuaugcaaugggcuuagua

SEQ ID NO: 116065 - RNA, 19 nt, Artificial Sequence
  Description of Artificial Sequence: Synthetic oligonucleotide
auucugggaaauugcucga

SEQ ID NO: 116066 - RNA, 19 nt, Artificial Sequence
  Description of Artificial Sequence: Synthetic oligonucleotide
acgauguuccauuggugga

SEQ ID NO: 116067 - RNA, 19 nt, Artificial Sequence
  Description of Artificial Sequence: Synthetic oligonucleotide
aauucaugaagauuaccaa

SEQ ID NO: 116068 - RNA, 19 nt, Artificial Sequence
  Description of Artificial Sequence: Synthetic oligonucleotide
acugccuuauuaugaucuu

SEQ ID NO: 116069 - RNA, 19 nt, Artificial Sequence
  Description of Artificial Sequence: Synthetic oligonucleotide
uguaccuucugacccauca

SEQ ID NO: 116070 - RNA, 19 nt, Artificial Sequence
  Description of Artificial Sequence: Synthetic oligonucleotide
aguugaagaaaugagaaaa

SEQ ID NO: 116071 - RNA, 19 nt, Artificial Sequence
  Description of Artificial Sequence: Synthetic oligonucleotide
aguuguuugugaacagaag

SEQ ID NO: 116072 - RNA, 19 nt, Artificial Sequence
  Description of Artificial Sequence: Synthetic oligonucleotide
guuaaggccaaauauccca

SEQ ID NO: 116073 - RNA, 19 nt, Artificial Sequence
  Description of Artificial Sequence: Synthetic oligonucleotide
aaacagauggcagagcugu

SEQ ID NO: 116074 - RNA, 19 nt, Artificial Sequence
  Description of Artificial Sequence: Synthetic oligonucleotide
ugaagccuugagaguaaug

SEQ ID NO: 116075 - RNA, 19 nt, Artificial Sequence
  Description of Artificial Sequence: Synthetic oligonucleotide
ggcuaaaauuaugagagaa

SEQ ID NO: 116076 - RNA, 19 nt, Artificial Sequence
  Description of Artificial Sequence: Synthetic oligonucleotide
auguugguaugccaaugga

SEQ ID NO: 116077 - RNA, 19 nt, Artificial Sequence
  Description of Artificial Sequence: Synthetic oligonucleotide
agcagcuaggcuuacagca

SEQ ID NO: 116078 - RNA, 19 nt, Artificial Sequence
  Description of Artificial Sequence: Synthetic oligonucleotide
auugcggauuaagaaaaca

SEQ ID NO: 116079 - RNA, 19 nt, Artificial Sequence
  Description of Artificial Sequence: Synthetic oligonucleotide
auuaucgcaacucagucaa

SEQ ID NO: 116080 - RNA, 19 nt, Artificial Sequence
  Description of Artificial Sequence: Synthetic oligonucleotide
acaggaaggcaucaaaaug

SEQ ID NO: 116081 - RNA, 19 nt, Artificial Sequence
  Description of Artificial Sequence: Synthetic oligonucleotide
guaauucuacagcuuugcc

SEQ ID NO: 116082 - RNA, 19 nt, Artificial Sequence
  Description of Artificial Sequence: Synthetic oligonucleotide
cugaacucuccuuuuuucu

SEQ ID NO: 116083 - RNA, 19 nt, Artificial Sequence
  Description of Artificial Sequence: Synthetic oligonucleotide
uucagaucugcuccugggu

SEQ ID NO: 116084 - RNA, 19 nt, Artificial Sequence
  Description of Artificial Sequence: Synthetic oligonucleotide
uuuuaauuugggaggucaa

SEQ ID NO: 116085 - RNA, 19 nt, Artificial Sequence
  Description of Artificial Sequence: Synthetic oligonucleotide
auuguucuaccucacugag

SEQ ID NO: 116086 - RNA, 19 nt, Artificial Sequence
  Description of Artificial Sequence: Synthetic oligonucleotide
gagggaacagaaggauauu

SEQ ID NO: 116087 - RNA, 19 nt, Artificial Sequence
  Description of Artificial Sequence: Synthetic oligonucleotide
ugcuuccuuuugcagcagu

SEQ ID NO: 116088 - RNA, 19 nt, Artificial Sequence
  Description of Artificial Sequence: Synthetic oligonucleotide
uguaauaaagucaauuaaa

SEQ ID NO: 116089 - RNA, 19 nt, Artificial Sequence
  Description of Artificial Sequence: Synthetic oligonucleotide
aaacuucccaggauuucuu

SEQ ID NO: 116090 - RNA, 19 nt, Artificial Sequence
  Description of Artificial Sequence: Synthetic oligonucleotide
uuggacccaggaaacagcc

SEQ ID NO: 116091 - RNA, 19 nt, Artificial Sequence
  Description of Artificial Sequence: Synthetic oligonucleotide
cauguggguccuuucugug

SEQ ID NO: 116092 - RNA, 19 nt, Artificial Sequence
  Description of Artificial Sequence: Synthetic oligonucleotide
gcacuaugaacgcuucuuu

SEQ ID NO: 116093 - RNA, 19 nt, Artificial Sequence
  Description of Artificial Sequence: Synthetic oligonucleotide
ucccaggacagaaaaugug

SEQ ID NO: 116094 - RNA, 19 nt, Artificial Sequence
  Description of Artificial Sequence: Synthetic oligonucleotide
guagucuaccuuuauuuuu

SEQ ID NO: 116095 - RNA, 19 nt, Artificial Sequence
  Description of Artificial Sequence: Synthetic oligonucleotide
uuauuaacaaaacuuguuu

SEQ ID NO: 116096 - RNA, 19 nt, Artificial Sequence
  Description of Artificial Sequence: Synthetic oligonucleotide
uuuuaaaaagaugauugcu

SEQ ID NO: 116097 - RNA, 19 nt, Artificial Sequence
  Description of Artificial Sequence: Synthetic oligonucleotide
uggucuuaacuuuagguaa

SEQ ID NO: 116098 - RNA, 19 nt, Artificial Sequence
  Description of Artificial Sequence: Synthetic oligonucleotide
acucugcugugcuggagau

SEQ ID NO: 116099 - RNA, 19 nt, Artificial Sequence
  Description of Artificial Sequence: Synthetic oligonucleotide
ucaucuuuaagggcaaagg

SEQ ID NO: 116100 - RNA, 19 nt, Artificial Sequence
  Description of Artificial Sequence: Synthetic oligonucleotide
gaguuggauugcugaauua

SEQ ID NO: 116101 - RNA, 19 nt, Artificial Sequence
  Description of Artificial Sequence: Synthetic oligonucleotide
acaaugaaacaugucuuau

SEQ ID NO: 116102 - RNA, 19 nt, Artificial Sequence
  Description of Artificial Sequence: Synthetic oligonucleotide
uuacuaaagaaagugauuu

SEQ ID NO: 116103 - RNA, 19 nt, Artificial Sequence
  Description of Artificial Sequence: Synthetic oligonucleotide
uacuccugguuaguacauu

SEQ ID NO: 116104 - RNA, 19 nt, Artificial Sequence
  Description of Artificial Sequence: Synthetic oligonucleotide
ucucagaggauucugaacc

SEQ ID NO: 116105 - RNA, 19 nt, Artificial Sequence
  Description of Artificial Sequence: Synthetic oligonucleotide
cacuagaguuuccuugauu

SEQ ID NO: 116106 - RNA, 19 nt, Artificial Sequence
  Description of Artificial Sequence: Synthetic oligonucleotide
ucagacuuugaauguacug

SEQ ID NO: 116107 - RNA, 19 nt, Artificial Sequence
  Description of Artificial Sequence: Synthetic oligonucleotide
guucuauaguuuuucagga

SEQ ID NO: 116108 - RNA, 19 nt, Artificial Sequence
  Description of Artificial Sequence: Synthetic oligonucleotide
aucuuaaaacuaacacuua

SEQ ID NO: 116109 - RNA, 19 nt, Artificial Sequence
  Description of Artificial Sequence: Synthetic oligonucleotide
auaaaacucuuaucuugag

SEQ ID NO: 116110 - RNA, 19 nt, Artificial Sequence
  Description of Artificial Sequence: Synthetic oligonucleotide
gucuaaaaaugaccucaua

SEQ ID NO: 116111 - RNA, 19 nt, Artificial Sequence
  Description of Artificial Sequence: Synthetic oligonucleotide
auaguagugaggaacauaa

SEQ ID NO: 116112 - RNA, 19 nt, Artificial Sequence
  Description of Artificial Sequence: Synthetic oligonucleotide
auucaugcaauuguauuuu

SEQ ID NO: 116113 - RNA, 19 nt, Artificial Sequence
  Description of Artificial Sequence: Synthetic oligonucleotide
uguauacuauuauuguucu

SEQ ID NO: 116114 - RNA, 19 nt, Artificial Sequence
  Description of Artificial Sequence: Synthetic oligonucleotide
uuucacuuauucagaacau

SEQ ID NO: 116115 - RNA, 19 nt, Artificial Sequence
  Description of Artificial Sequence: Synthetic oligonucleotide
uuacaugccuucaaaaugg

SEQ ID NO: 116116 - RNA, 19 nt, Artificial Sequence
  Description of Artificial Sequence: Synthetic oligonucleotide
ggauuguacuauaccagua

SEQ ID NO: 116117 - RNA, 19 nt, Artificial Sequence
  Description of Artificial Sequence: Synthetic oligonucleotide
aagugccacuucugugucu

SEQ ID NO: 116118 - RNA, 19 nt, Artificial Sequence
  Description of Artificial Sequence: Synthetic oligonucleotide
uuucuaauggaaaugagua

SEQ ID NO: 116119 - RNA, 19 nt, Artificial Sequence
  Description of Artificial Sequence: Synthetic oligonucleotide
agaauugcugaaagucucu

SEQ ID NO: 116120 - RNA, 19 nt, Artificial Sequence
  Description of Artificial Sequence: Synthetic oligonucleotide
uauguuaaaaccuauagug

SEQ ID NO: 116121 - RNA, 19 nt, Artificial Sequence
  Description of Artificial Sequence: Synthetic oligonucleotide
guuugaauucaaaaagcuu

SEQ ID NO: 116122 - RNA, 19 nt, Artificial Sequence
  Description of Artificial Sequence: Synthetic oligonucleotide
uauuuaucuggguaaccca

SEQ ID NO: 116123 - RNA, 19 nt, Artificial Sequence
  Description of Artificial Sequence: Synthetic oligonucleotide
aaacuuuuucuguuuuguu

SEQ ID NO: 116124 - RNA, 19 nt, Artificial Sequence
  Description of Artificial Sequence: Synthetic oligonucleotide
uuuuggaaggguuuuugug

SEQ ID NO: 116125 - RNA, 19 nt, Artificial Sequence
  Description of Artificial Sequence: Synthetic oligonucleotide
gguaugucauuugguauuc

SEQ ID NO: 116126 - RNA, 19 nt, Artificial Sequence
  Description of Artificial Sequence: Synthetic oligonucleotide
cuauucugaaaaugccuuu

SEQ ID NO: 116127 - RNA, 19 nt, Artificial Sequence
  Description of Artificial Sequence: Synthetic oligonucleotide
ucuccuaccaaaaugugcu

SEQ ID NO: 116128 - RNA, 19 nt, Artificial Sequence
  Description of Artificial Sequence: Synthetic oligonucleotide
uuaagccacuaaagaaaug

SEQ ID NO: 116129 - RNA, 19 nt, Artificial Sequence
  Description of Artificial Sequence: Synthetic oligonucleotide
gaaguggcauuaauuagua

SEQ ID NO: 116130 - RNA, 19 nt, Artificial Sequence
  Description of Artificial Sequence: Synthetic oligonucleotide
aaauuauuagcauggucau

SEQ ID NO: 116131 - RNA, 19 nt, Artificial Sequence
  Description of Artificial Sequence: Synthetic oligonucleotide
uguuugaauauucucacau

SEQ ID NO: 116132 - RNA, 19 nt, Artificial Sequence
  Description of Artificial Sequence: Synthetic oligonucleotide
ucaagcuuuugcauuuuaa

SEQ ID NO: 116133 - RNA, 19 nt, Artificial Sequence
  Description of Artificial Sequence: Synthetic oligonucleotide
auuguguugucuaaguaua

SEQ ID NO: 116134 - RNA, 19 nt, Artificial Sequence
  Description of Artificial Sequence: Synthetic oligonucleotide
acuuuuaaaaaaucaagug

SEQ ID NO: 116135 - RNA, 19 nt, Artificial Sequence
  Description of Artificial Sequence: Synthetic oligonucleotide
ggcacucuagaugcuuaua

SEQ ID NO: 116136 - RNA, 19 nt, Artificial Sequence
  Description of Artificial Sequence: Synthetic oligonucleotide
aguacuuuaauauuuguag

SEQ ID NO: 116137 - RNA, 19 nt, Artificial Sequence
  Description of Artificial Sequence: Synthetic oligonucleotide
gcauacagacuaauuuuuc

SEQ ID NO: 116138 - RNA, 19 nt, Artificial Sequence
  Description of Artificial Sequence: Synthetic oligonucleotide
cuaaaagggaaagucuguc

SEQ ID NO: 116139 - RNA, 19 nt, Artificial Sequence
  Description of Artificial Sequence: Synthetic oligonucleotide
cuagcugcuugugaaaagu

SEQ ID NO: 116140 - RNA, 19 nt, Artificial Sequence
  Description of Artificial Sequence: Synthetic oligonucleotide
uuaugugguauucuguaag

SEQ ID NO: 116141 - RNA, 19 nt, Artificial Sequence
  Description of Artificial Sequence: Synthetic oligonucleotide
gccauuuuuuucuuuaucu

SEQ ID NO: 116142 - RNA, 19 nt, Artificial Sequence
  Description of Artificial Sequence: Synthetic oligonucleotide
uguucaaagacuuauuuuu

SEQ ID NO: 116143 - RNA, 19 nt, Artificial Sequence
  Description of Artificial Sequence: Synthetic oligonucleotide
uuaagacaugaauuacauu

SEQ ID NO: 116144 - RNA, 19 nt, Artificial Sequence
  Description of Artificial Sequence: Synthetic oligonucleotide
uuaaaauuagaauaugguu

SEQ ID NO: 116145 - RNA, 19 nt, Artificial Sequence
  Description of Artificial Sequence: Synthetic oligonucleotide
uaauauuaaauaauaggcc

SEQ ID NO: 116146 - RNA, 19 nt, Artificial Sequence
  Description of Artificial Sequence: Synthetic oligonucleotide
cuuuuucuaggaaggcgaa

SEQ ID NO: 116147 - RNA, 19 nt, Artificial Sequence
  Description of Artificial Sequence: Synthetic oligonucleotide
agguaguuaauaauuugaa

SEQ ID NO: 116148 - RNA, 19 nt, Artificial Sequence
  Description of Artificial Sequence: Synthetic oligonucleotide
auagauaacagaugugcaa

SEQ ID NO: 116149 - RNA, 19 nt, Artificial Sequence
  Description of Artificial Sequence: Synthetic oligonucleotide
agaaagucacauuuguuau

SEQ ID NO: 116150 - RNA, 19 nt, Artificial Sequence
  Description of Artificial Sequence: Synthetic oligonucleotide
uguauguaggaguaaacgu

SEQ ID NO: 116151 - RNA, 19 nt, Artificial Sequence
  Description of Artificial Sequence: Synthetic oligonucleotide
uucgguggauccucugucu

SEQ ID NO: 116152 - RNA, 19 nt, Artificial Sequence
  Description of Artificial Sequence: Synthetic oligonucleotide
uuuguaacugagguuagag

SEQ ID NO: 116153 - RNA, 19 nt, Artificial Sequence
  Description of Artificial Sequence: Synthetic oligonucleotide
gcuagugugguuuugaggu

SEQ ID NO: 116154 - RNA, 19 nt, Artificial Sequence
  Description of Artificial Sequence: Synthetic oligonucleotide
ucucacuacacuuugagga

SEQ ID NO: 116155 - RNA, 19 nt, Artificial Sequence
  Description of Artificial Sequence: Synthetic oligonucleotide
aaggcagcuuuuaauucag

SEQ ID NO: 116156 - RNA, 19 nt, Artificial Sequence
  Description of Artificial Sequence: Synthetic oligonucleotide
guguuuccuuaugugugcg

SEQ ID NO: 116157 - RNA, 19 nt, Artificial Sequence
  Description of Artificial Sequence: Synthetic oligonucleotide
guacauugcaacugcuuac

SEQ ID NO: 116158 - RNA, 19 nt, Artificial Sequence
  Description of Artificial Sequence: Synthetic oligonucleotide
cauguaauuuauguaaugc

SEQ ID NO: 116159 - RNA, 19 nt, Artificial Sequence
  Description of Artificial Sequence: Synthetic oligonucleotide
cauucagugcacccuuguu

SEQ ID NO: 116160 - RNA, 19 nt, Artificial Sequence
  Description of Artificial Sequence: Synthetic oligonucleotide
uacuugggagaggugguag

SEQ ID NO: 116161 - RNA, 19 nt, Artificial Sequence
  Description of Artificial Sequence: Synthetic oligonucleotide
gcuaaagaacauucugagu

SEQ ID NO: 116162 - RNA, 19 nt, Artificial Sequence
  Description of Artificial Sequence: Synthetic oligonucleotide
uauagguuuuucuccauuu

SEQ ID NO: 116163 - RNA, 19 nt, Artificial Sequence
  Description of Artificial Sequence: Synthetic oligonucleotide
uacagaugucuuuggucaa

SEQ ID NO: 116164 - RNA, 19 nt, Artificial Sequence
  Description of Artificial Sequence: Synthetic oligonucleotide
aauauugaaagcaaacuug

SEQ ID NO: 116165 - RNA, 19 nt, Artificial Sequence
  Description of Artificial Sequence: Synthetic oligonucleotide
gucauggucuucuuacauu

SEQ ID NO: 116166 - RNA, 19 nt, Artificial Sequence
  Description of Artificial Sequence: Synthetic oligonucleotide
uaaguugaaacuagcuuau

SEQ ID NO: 116167 - RNA, 19 nt, Artificial Sequence
  Description of Artificial Sequence: Synthetic oligonucleotide
uaauaacugguuuuuacuu

SEQ ID NO: 116168 - RNA, 19 nt, Artificial Sequence
  Description of Artificial Sequence: Synthetic oligonucleotide
uccaaugcuaugaagucuc

SEQ ID NO: 116169 - RNA, 19 nt, Artificial Sequence
  Description of Artificial Sequence: Synthetic oligonucleotide
cugcagggcuuuuacaguu

SEQ ID NO: 116170 - RNA, 19 nt, Artificial Sequence
  Description of Artificial Sequence: Synthetic oligonucleotide
uuucgaaguccuuuuauca

SEQ ID NO: 116171 - RNA, 19 nt, Artificial Sequence
  Description of Artificial Sequence: Synthetic oligonucleotide
acugugaucuuauucugag

SEQ ID NO: 116172 - RNA, 19 nt, Artificial Sequence
  Description of Artificial Sequence: Synthetic oligonucleotide
ggggagaaaaaacuaucau

SEQ ID NO: 116173 - RNA, 19 nt, Artificial Sequence
  Description of Artificial Sequence: Synthetic oligonucleotide
uagcucugaggcaagacuu

SEQ ID NO: 116174 - RNA, 19 nt, Artificial Sequence
  Description of Artificial Sequence: Synthetic oligonucleotide
ucgacuuuauagugcuauc

SEQ ID NO: 116175 - RNA, 19 nt, Artificial Sequence
  Description of Artificial Sequence: Synthetic oligonucleotide
caguuccccgauacagggu

SEQ ID NO: 116176 - RNA, 19 nt, Artificial Sequence
  Description of Artificial Sequence: Synthetic oligonucleotide
ucagaguaacccauacagu

SEQ ID NO: 116177 - RNA, 19 nt, Artificial Sequence
  Description of Artificial Sequence: Synthetic oligonucleotide
uauuuuggucaggaagaga

SEQ ID NO: 116178 - RNA, 19 nt, Artificial Sequence
  Description of Artificial Sequence: Synthetic oligonucleotide
aaaguggccauuuacacug

SEQ ID NO: 116179 - RNA, 19 nt, Artificial Sequence
  Description of Artificial Sequence: Synthetic oligonucleotide
gaaugaguugcauucugau

SEQ ID NO: 116180 - RNA, 19 nt, Artificial Sequence
  Description of Artificial Sequence: Synthetic oligonucleotide
uaaugucuuaucucuuaua

SEQ ID NO: 116181 - RNA, 19 nt, Artificial Sequence
  Description of Artificial Sequence: Synthetic oligonucleotide
acguagaauaaauuugaaa

SEQ ID NO: 116182 - RNA, 19 nt, Artificial Sequence
  Description of Artificial Sequence: Synthetic oligonucleotide
agacuauuugaucuuaaaa

SEQ ID NO: 116183 - RNA, 19 nt, Artificial Sequence
  Description of Artificial Sequence: Synthetic oligonucleotide
accaaaguaauuuuagaau

SEQ ID NO: 116184 - RNA, 19 nt, Artificial Sequence
  Description of Artificial Sequence: Synthetic oligonucleotide
ugagugacauauuacauag

SEQ ID NO: 116185 - RNA, 19 nt, Artificial Sequence
  Description of Artificial Sequence: Synthetic oligonucleotide
ggaauuuagugucaauuuc

SEQ ID NO: 116186 - RNA, 19 nt, Artificial Sequence
  Description of Artificial Sequence: Synthetic oligonucleotide
cauguguuuaaaaacauca

SEQ ID NO: 116187 - RNA, 19 nt, Artificial Sequence
  Description of Artificial Sequence: Synthetic oligonucleotide
augggaaaaaugcuuagag

SEQ ID NO: 116188 - RNA, 19 nt, Artificial Sequence
  Description of Artificial Sequence: Synthetic oligonucleotide
gguuacuauuuugacuaca

SEQ ID NO: 116189 - RNA, 19 nt, Artificial Sequence
  Description of Artificial Sequence: Synthetic oligonucleotide
aaaguugaguuuuuuucug

SEQ ID NO: 116190 - RNA, 19 nt, Artificial Sequence
  Description of Artificial Sequence: Synthetic oligonucleotide
guaguuaccauaauuucau

SEQ ID NO: 116191 - RNA, 19 nt, Artificial Sequence
  Description of Artificial Sequence: Synthetic oligonucleotide
uugaagcaaaugaaugagu

SEQ ID NO: 116192 - RNA, 19 nt, Artificial Sequence
  Description of Artificial Sequence: Synthetic oligonucleotide
uuugagagguuuguuuuua

SEQ ID NO: 116193 - RNA, 19 nt, Artificial Sequence
  Description of Artificial Sequence: Synthetic oligonucleotide
auaguuguguuguauuacu

SEQ ID NO: 116194 - RNA, 19 nt, Artificial Sequence
  Description of Artificial Sequence: Synthetic oligonucleotide
uuguuuaauaauaaucucu

SEQ ID NO: 116195 - RNA, 19 nt, Artificial Sequence
  Description of Artificial Sequence: Synthetic oligonucleotide
uaauucugugaucagguac

SEQ ID NO: 116196 - RNA, 19 nt, Artificial Sequence
  Description of Artificial Sequence: Synthetic oligonucleotide
cuuuuuuuguggggguuuu

SEQ ID NO: 116197 - RNA, 19 nt, Artificial Sequence
  Description of Artificial Sequence: Synthetic oligonucleotide
uuuguuguuguuuuugggc

SEQ ID NO: 116198 - RNA, 19 nt, Artificial Sequence
  Description of Artificial Sequence: Synthetic oligonucleotide
ccauuucuaagccuaccag

SEQ ID NO: 116199 - RNA, 19 nt, Artificial Sequence
  Description of Artificial Sequence: Synthetic oligonucleotide
gaucugcuuuaugaaaucc

SEQ ID NO: 116200 - RNA, 19 nt, Artificial Sequence
  Description of Artificial Sequence: Synthetic oligonucleotide
caggggaccaaugcauuuu

SEQ ID NO: 116201 - RNA, 19 nt, Artificial Sequence
  Description of Artificial Sequence: Synthetic oligonucleotide
uaucacuaaaacuauuuuu

SEQ ID NO: 116202 - RNA, 19 nt, Artificial Sequence
  Description of Artificial Sequence: Synthetic oligonucleotide
uauauaauuuuaagaauau

SEQ ID NO: 116203 - RNA, 19 nt, Artificial Sequence
  Description of Artificial Sequence: Synthetic oligonucleotide
uaccaaaaguugucugauu

SEQ ID NO: 116204 - RNA, 19 nt, Artificial Sequence
  Description of Artificial Sequence: Synthetic oligonucleotide
uuaaaguuguaauacauga

SEQ ID NO: 116205 - RNA, 19 nt, Artificial Sequence
  Description of Artificial Sequence: Synthetic oligonucleotide
auuucucacuuucauguaa

SEQ ID NO: 116206 - RNA, 19 nt, Artificial Sequence
  Description of Artificial Sequence: Synthetic oligonucleotide
agguuauccacuuuugcug

SEQ ID NO: 116207 - RNA, 19 nt, Artificial Sequence
  Description of Artificial Sequence: Synthetic oligonucleotide
gaagauauuuuuuauugaa

SEQ ID NO: 116208 - RNA, 19 nt, Artificial Sequence
  Description of Artificial Sequence: Synthetic oligonucleotide
aucaaagauugaguuacaa

SEQ ID NO: 116209 - RNA, 19 nt, Artificial Sequence
  Description of Artificial Sequence: Synthetic oligonucleotide
auuauacuuuucuuaccua

SEQ ID NO: 116210 - RNA, 19 nt, Artificial Sequence
  Description of Artificial Sequence: Synthetic oligonucleotide
aaguggauaaaauguacuu

SEQ ID NO: 116211 - RNA, 19 nt, Artificial Sequence
  Description of Artificial Sequence: Synthetic oligonucleotide
uuugaugaaucagggaauu

SEQ ID NO: 116212 - RNA, 19 nt, Artificial Sequence
  Description of Artificial Sequence: Synthetic oligonucleotide
uuuuuuaaaguuggaguuu

SEQ ID NO: 116213 - RNA, 19 nt, Artificial Sequence
  Description of Artificial Sequence: Synthetic oligonucleotide
uaguucuaaauugacuuua

SEQ ID NO: 116214 - RNA, 19 nt, Artificial Sequence
  Description of Artificial Sequence: Synthetic oligonucleotide
acguauuacugcaguuaau

SEQ ID NO: 116215 - RNA, 19 nt, Artificial Sequence
  Description of Artificial Sequence: Synthetic oligonucleotide
uuccuuuuuuggcuaggga

SEQ ID NO: 116216 - RNA, 19 nt, Artificial Sequence
  Description of Artificial Sequence: Synthetic oligonucleotide
augguuugauaaaccacaa

SEQ ID NO: 116217 - RNA, 19 nt, Artificial Sequence
  Description of Artificial Sequence: Synthetic oligonucleotide
auuggcugauauugaaaau

SEQ ID NO: 116218 - RNA, 19 nt, Artificial Sequence
  Description of Artificial Sequence: Synthetic oligonucleotide
ugaaagaaacuuaaaaggu

SEQ ID NO: 116219 - RNA, 19 nt, Artificial Sequence
  Description of Artificial Sequence: Synthetic oligonucleotide
ugggauggaucaugauuac

SEQ ID NO: 116220 - RNA, 19 nt, Artificial Sequence
  Description of Artificial Sequence: Synthetic oligonucleotide
cugucgauaacugcagaua

SEQ ID NO: 116221 - RNA, 19 nt, Artificial Sequence
  Description of Artificial Sequence: Synthetic oligonucleotide
aaauuugauuagaguaaua

SEQ ID NO: 116222 - RNA, 19 nt, Artificial Sequence
  Description of Artificial Sequence: Synthetic oligonucleotide
aauuuugucauuuaaaaac

SEQ ID NO: 116223 - RNA, 19 nt, Artificial Sequence
  Description of Artificial Sequence: Synthetic oligonucleotide
cacaguuguuuauacugcc

SEQ ID NO: 116224 - RNA, 19 nt, Artificial Sequence
  Description of Artificial Sequence: Synthetic oligonucleotide
ccauccuaggaugcucacc

SEQ ID NO: 116225 - RNA, 19 nt, Artificial Sequence
  Description of Artificial Sequence: Synthetic oligonucleotide
cuuccaagauucaacgugg

SEQ ID NO: 116226 - RNA, 19 nt, Artificial Sequence
  Description of Artificial Sequence: Synthetic oligonucleotide
gcuaaaacaucuucuggua

SEQ ID NO: 116227 - RNA, 19 nt, Artificial Sequence
  Description of Artificial Sequence: Synthetic oligonucleotide
aaauugugcguccauauuc

SEQ ID NO: 116228 - RNA, 19 nt, Artificial Sequence
  Description of Artificial Sequence: Synthetic oligonucleotide
cauuuugucaguagccagg

SEQ ID NO: 116229 - RNA, 19 nt, Artificial Sequence
  Description of Artificial Sequence: Synthetic oligonucleotide
gagaaauggggauggggga

SEQ ID NO: 116230 - RNA, 19 nt, Artificial Sequence
  Description of Artificial Sequence: Synthetic oligonucleotide
aaauacgacuuagugaggc

SEQ ID NO: 116231 - RNA, 19 nt, Artificial Sequence
  Description of Artificial Sequence: Synthetic oligonucleotide
cauagacaucccuggucca

SEQ ID NO: 116232 - RNA, 19 nt, Artificial Sequence
  Description of Artificial Sequence: Synthetic oligonucleotide
auccuuucugucuccagcu

SEQ ID NO: 116233 - RNA, 19 nt, Artificial Sequence
  Description of Artificial Sequence: Synthetic oligonucleotide
uguuucuuggaaccugcuc

SEQ ID NO: 116234 - RNA, 19 nt, Artificial Sequence
  Description of Artificial Sequence: Synthetic oligonucleotide
cuccugcuugcuggucccu

SEQ ID NO: 116235 - RNA, 19 nt, Artificial Sequence
  Description of Artificial Sequence: Synthetic oligonucleotide
ugacgcagagaccguugcc

SEQ ID NO: 116236 - RNA, 19 nt, Artificial Sequence
  Description of Artificial Sequence: Synthetic oligonucleotide
cucccccacagccguuuga

SEQ ID NO: 116237 - RNA, 19 nt, Artificial Sequence
  Description of Artificial Sequence: Synthetic oligonucleotide
acugaaggcugcucuggag

SEQ ID NO: 116238 - RNA, 19 nt, Artificial Sequence
  Description of Artificial Sequence: Synthetic oligonucleotide
gaccuagaguaaaacggcu

SEQ ID NO: 116239 - RNA, 19 nt, Artificial Sequence
  Description of Artificial Sequence: Synthetic oligonucleotide
ugauggaaguugugggacc

SEQ ID NO: 116240 - RNA, 19 nt, Artificial Sequence
  Description of Artificial Sequence: Synthetic oligonucleotide
ccacuuccauuuccuucag

SEQ ID NO: 116241 - RNA, 19 nt, Artificial Sequence
  Description of Artificial Sequence: Synthetic oligonucleotide
gucauuagagguggaaggg

SEQ ID NO: 116242 - RNA, 19 nt, Artificial Sequence
  Description of Artificial Sequence: Synthetic oligonucleotide
gaggggucuccaaguuugg

SEQ ID NO: 116243 - RNA, 19 nt, Artificial Sequence
  Description of Artificial Sequence: Synthetic oligonucleotide
gagauugagcagaugaggc

SEQ ID NO: 116244 - RNA, 19 nt, Artificial Sequence
  Description of Artificial Sequence: Synthetic oligonucleotide
cuugggaugccccugcuuu

SEQ ID NO: 116245 - RNA, 19 nt, Artificial Sequence
  Description of Artificial Sequence: Synthetic oligonucleotide
ugacuucagccauggauga

SEQ ID NO: 116246 - RNA, 19 nt, Artificial Sequence
  Description of Artificial Sequence: Synthetic oligonucleotide
aggagugggauggcagcaa

SEQ ID NO: 116247 - RNA, 19 nt, Artificial Sequence
  Description of Artificial Sequence: Synthetic oligonucleotide
agguggcuccuguggcagu

SEQ ID NO: 116248 - RNA, 19 nt, Artificial Sequence
  Description of Artificial Sequence: Synthetic oligonucleotide
uggaguugugccagaaaca

SEQ ID NO: 116249 - RNA, 19 nt, Artificial Sequence
  Description of Artificial Sequence: Synthetic oligonucleotide
aguggccaguuguaucgcc

SEQ ID NO: 116250 - RNA, 19 nt, Artificial Sequence
  Description of Artificial Sequence: Synthetic oligonucleotide
cuauaagacaggguaaggu

SEQ ID NO: 116251 - RNA, 19 nt, Artificial Sequence
  Description of Artificial Sequence: Synthetic oligonucleotide
ucugaagagcugagccugu

SEQ ID NO: 116252 - RNA, 19 nt, Artificial Sequence
  Description of Artificial Sequence: Synthetic oligonucleotide
uaauucugcuguaauaaug

SEQ ID NO: 116253 - RNA, 19 nt, Artificial Sequence
  Description of Artificial Sequence: Synthetic oligonucleotide
gauagugcucaagaagugc

SEQ ID NO: 116254 - RNA, 19 nt, Artificial Sequence
  Description of Artificial Sequence: Synthetic oligonucleotide
ccuugaguugguguacagu

SEQ ID NO: 116255 - RNA, 19 nt, Artificial Sequence
  Description of Artificial Sequence: Synthetic oligonucleotide
ugccauggccaucaagaau

SEQ ID NO: 116256 - RNA, 19 nt, Artificial Sequence
  Description of Artificial Sequence: Synthetic oligonucleotide
ucccagauuucagguuuua

SEQ ID NO: 116257 - RNA, 19 nt, Artificial Sequence
  Description of Artificial Sequence: Synthetic oligonucleotide
auuacaaaauguaaguggu

SEQ ID NO: 116258 - RNA, 19 nt, Artificial Sequence
  Description of Artificial Sequence: Synthetic oligonucleotide
ucacuuggcgauuuuguag

SEQ ID NO: 116259 - RNA, 19 nt, Artificial Sequence
  Description of Artificial Sequence: Synthetic oligonucleotide
guacaugcaugaguuaccu

SEQ ID NO: 116260 - RNA, 19 nt, Artificial Sequence
  Description of Artificial Sequence: Synthetic oligonucleotide
uuuuuucucuaugucugag

SEQ ID NO: 116261 - RNA, 19 nt, Artificial Sequence
  Description of Artificial Sequence: Synthetic oligonucleotide
gaacugucagauuaaaaca

SEQ ID NO: 116262 - RNA, 19 nt, Artificial Sequence
  Description of Artificial Sequence: Synthetic oligonucleotide
aagauggcaaagagaucgu

SEQ ID NO: 116263 - RNA, 19 nt, Artificial Sequence
  Description of Artificial Sequence: Synthetic oligonucleotide
uuagagugcacaacaaaau

SEQ ID NO: 116264 - RNA, 19 nt, Artificial Sequence
  Description of Artificial Sequence: Synthetic oligonucleotide
ucacuaucccauuagacac

SEQ ID NO: 116265 - RNA, 19 nt, Artificial Sequence
  Description of Artificial Sequence: Synthetic oligonucleotide
caucaucaaaagcuuauuu

SEQ ID NO: 116266 - RNA, 19 nt, Artificial Sequence
  Description of Artificial Sequence: Synthetic oligonucleotide
uuuauucuugcacuggaag

SEQ ID NO: 116267 - RNA, 19 nt, Artificial Sequence
  Description of Artificial Sequence: Synthetic oligonucleotide
gaaucguaagucaacuguu

SEQ ID NO: 116268 - RNA, 19 nt, Artificial Sequence
  Description of Artificial Sequence: Synthetic oligonucleotide
uucuugaccauggcagugu

SEQ ID NO: 116269 - RNA, 19 nt, Artificial Sequence
  Description of Artificial Sequence: Synthetic oligonucleotide
uucuggcuccaaaugguag

SEQ ID NO: 116270 - RNA, 19 nt, Artificial Sequence
  Description of Artificial Sequence: Synthetic oligonucleotide
gugauuccaaauaaugguu

SEQ ID NO: 116271 - RNA, 19 nt, Artificial Sequence
  Description of Artificial Sequence: Synthetic oligonucleotide
ucuguuaacacuuuggcag

SEQ ID NO: 116272 - RNA, 19 nt, Artificial Sequence
  Description of Artificial Sequence: Synthetic oligonucleotide
gaaaaugccagcucagaua

SEQ ID NO: 116273 - RNA, 19 nt, Artificial Sequence
  Description of Artificial Sequence: Synthetic oligonucleotide
auuuugagauacuaaggau

SEQ ID NO: 116274 - RNA, 19 nt, Artificial Sequence
  Description of Artificial Sequence: Synthetic oligonucleotide
uuaucuuuggacauguacu

SEQ ID NO: 116275 - RNA, 19 nt, Artificial Sequence
  Description of Artificial Sequence: Synthetic oligonucleotide
ugcagcuucuugucucugu

SEQ ID NO: 116276 - RNA, 19 nt, Artificial Sequence
  Description of Artificial Sequence: Synthetic oligonucleotide
uuuuggauuacuggaauac

SEQ ID NO: 116277 - RNA, 19 nt, Artificial Sequence
  Description of Artificial Sequence: Synthetic oligonucleotide
cccaugggcccucucaaga

SEQ ID NO: 116278 - RNA, 19 nt, Artificial Sequence
  Description of Artificial Sequence: Synthetic oligonucleotide
agugcuggacuucuaggac

SEQ ID NO: 116279 - RNA, 19 nt, Artificial Sequence
  Description of Artificial Sequence: Synthetic oligonucleotide
cauuaagaugauugucagu

SEQ ID NO: 116280 - RNA, 19 nt, Artificial Sequence
  Description of Artificial Sequence: Synthetic oligonucleotide
uacauuaaacuuuucaauc

SEQ ID NO: 116281 - RNA, 19 nt, Artificial Sequence
  Description of Artificial Sequence: Synthetic oligonucleotide
cccauuaugcaaucuuguu

SEQ ID NO: 116282 - RNA, 19 nt, Artificial Sequence
  Description of Artificial Sequence: Synthetic oligonucleotide
uuguaaauguaaacuucua

SEQ ID NO: 116283 - RNA, 19 nt, Artificial Sequence
  Description of Artificial Sequence: Synthetic oligonucleotide
aaaaauaugguuaauaaca

SEQ ID NO: 116284 - RNA, 19 nt, Artificial Sequence
  Description of Artificial Sequence: Synthetic oligonucleotide
auucaaccuguuuauuaca

SEQ ID NO: 116285 - RNA, 19 nt, Artificial Sequence
  Description of Artificial Sequence: Synthetic oligonucleotide
aacuuaaaaggaacuucag

SEQ ID NO: 116286 - RNA, 19 nt, Artificial Sequence
  Description of Artificial Sequence: Synthetic oligonucleotide
gugaauuuguuuuuauuuu

SEQ ID NO: 116287 - RNA, 19 nt, Artificial Sequence
  Description of Artificial Sequence: Synthetic oligonucleotide
uuuaacaagauuugugaac

SEQ ID NO: 116288 - RNA, 19 nt, Artificial Sequence
  Description of Artificial Sequence: Synthetic oligonucleotide
cugaauaucaugaaccaug

SEQ ID NO: 116289 - RNA, 19 nt, Artificial Sequence
  Description of Artificial Sequence: Synthetic oligonucleotide
guuuugauaccccuuuuuc

SEQ ID NO: 116290 - RNA, 19 nt, Artificial Sequence
  Description of Artificial Sequence: Synthetic oligonucleotide
cacguugugccaacggaau

SEQ ID NO: 116291 - RNA, 19 nt, Artificial Sequence
  Description of Artificial Sequence: Synthetic oligonucleotide
uaggguguuugauauuucu

SEQ ID NO: 116292 - RNA, 19 nt, Artificial Sequence
  Description of Artificial Sequence: Synthetic oligonucleotide
uucauauguuaaggagaug

SEQ ID NO: 116293 - RNA, 19 nt, Artificial Sequence
  Description of Artificial Sequence: Synthetic oligonucleotide
gcuucaaaaugucaauugc

SEQ ID NO: 116294 - RNA, 19 nt, Artificial Sequence
  Description of Artificial Sequence: Synthetic oligonucleotide
cuuuaaacuuaaauuaccu

SEQ ID NO: 116295 - RNA, 19 nt, Artificial Sequence
  Description of Artificial Sequence: Synthetic oligonucleotide
ucucaagagaccaagguac

SEQ ID NO: 116296 - RNA, 19 nt, Artificial Sequence
  Description of Artificial Sequence: Synthetic oligonucleotide
cauuuaccucauuguguau

SEQ ID NO: 116297 - RNA, 19 nt, Artificial Sequence
  Description of Artificial Sequence: Synthetic oligonucleotide
uauaauguuuaauauuugu

SEQ ID NO: 116298 - RNA, 19 nt, Artificial Sequence
  Description of Artificial Sequence: Synthetic oligonucleotide
ucagagcauucuccagguu

SEQ ID NO: 116299 - RNA, 19 nt, Artificial Sequence
  Description of Artificial Sequence: Synthetic oligonucleotide
uugcaguuuuauuucuaua

SEQ ID NO: 116300 - RNA, 19 nt, Artificial Sequence
  Description of Artificial Sequence: Synthetic oligonucleotide
aaaguauggguauuauguu

SEQ ID NO: 116301 - RNA, 19 nt, Artificial Sequence
  Description of Artificial Sequence: Synthetic oligonucleotide
ugcucaguuacucaaaugg

SEQ ID NO: 116302 - RNA, 19 nt, Artificial Sequence
  Description of Artificial Sequence: Synthetic oligonucleotide
guacuguauuguuuauauu

SEQ ID NO: 116303 - RNA, 19 nt, Artificial Sequence
  Description of Artificial Sequence: Synthetic oligonucleotide
uuguaccccaaauaacauc

SEQ ID NO: 116304 - RNA, 19 nt, Artificial Sequence
  Description of Artificial Sequence: Synthetic oligonucleotide
cgucuguacuuucuguuuu

SEQ ID NO: 116305 - RNA, 19 nt, Artificial Sequence
  Description of Artificial Sequence: Synthetic oligonucleotide
ucuguauuguauuugugca

SEQ ID NO: 116306 - RNA, 19 nt, Artificial Sequence
  Description of Artificial Sequence: Synthetic oligonucleotide
aggauucuuuaggcuuuau

SEQ ID NO: 116307 - RNA, 19 nt, Artificial Sequence
  Description of Artificial Sequence: Synthetic oligonucleotide
ucaguguaaucucugccuu

SEQ ID NO: 116308 - RNA, 19 nt, Artificial Sequence
  Description of Artificial Sequence: Synthetic oligonucleotide
uuuaagauauguacagaaa

SEQ ID NO: 116309 - RNA, 19 nt, Artificial Sequence
  Description of Artificial Sequence: Synthetic oligonucleotide
aauguccauauaaauuucc

SEQ ID NO: 116310 - RNA, 19 nt, Artificial Sequence
  Description of Artificial Sequence: Synthetic oligonucleotide
cauugaagucgaaugauac

SEQ ID NO: 116311 - RNA, 19 nt, Artificial Sequence
  Description of Artificial Sequence: Synthetic oligonucleotide
cugagaagccuguaaagag

SEQ ID NO: 116312 - RNA, 19 nt, Artificial Sequence
  Description of Artificial Sequence: Synthetic oligonucleotide
ggagaaaaaaacauaagcu

SEQ ID NO: 116313 - RNA, 19 nt, Artificial Sequence
  Description of Artificial Sequence: Synthetic oligonucleotide
uguguuuccccauaaguuu

SEQ ID NO: 116314 - RNA, 19 nt, Artificial Sequence
  Description of Artificial Sequence: Synthetic oligonucleotide
uuuuuaaauuguauauugu

SEQ ID NO: 116315 - RNA, 19 nt, Artificial Sequence
  Description of Artificial Sequence: Synthetic oligonucleotide
uauuuguaguaauauucca

SEQ ID NO: 116316 - RNA, 19 nt, Artificial Sequence
  Description of Artificial Sequence: Synthetic oligonucleotide
aaaagaauguaaauaggaa

SEQ ID NO: 116317 - RNA, 19 nt, Artificial Sequence
  Description of Artificial Sequence: Synthetic oligonucleotide
aauagaagagugaugcuua

SEQ ID NO: 116318 - RNA, 19 nt, Artificial Sequence
  Description of Artificial Sequence: Synthetic oligonucleotide
auguuaaguccuaacacua

SEQ ID NO: 116319 - RNA, 19 nt, Artificial Sequence
  Description of Artificial Sequence: Synthetic oligonucleotide
acaguagaagaauggaagc

SEQ ID NO: 116320 - RNA, 19 nt, Artificial Sequence
  Description of Artificial Sequence: Synthetic oligonucleotide
cagugcaaauaaauuacau

SEQ ID NO: 116321 - RNA, 19 nt, Artificial Sequence
  Description of Artificial Sequence: Synthetic oligonucleotide
uuuuucccaagugccagug

SEQ ID NO: 116322 - RNA, 19 nt, Artificial Sequence
  Description of Artificial Sequence: Synthetic oligonucleotide
ggcauauuuuaaaauaaag

SEQ ID NO: 116323 - RNA, 19 nt, Artificial Sequence
  Description of Artificial Sequence: Synthetic oligonucleotide
guguauacguuggaaugag

SEQ ID NO: 116324 - RNA, 19 nt, Artificial Sequence
  Description of Artificial Sequence: Synthetic oligonucleotide
gucaugccauauguaguug

SEQ ID NO: 116325 - RNA, 19 nt, Artificial Sequence
  Description of Artificial Sequence: Synthetic oligonucleotide
gcuguagauggcaacuaga

SEQ ID NO: 116326 - RNA, 19 nt, Artificial Sequence
  Description of Artificial Sequence: Synthetic oligonucleotide
aaccuuugaguuacaagag

SEQ ID NO: 116327 - RNA, 19 nt, Artificial Sequence
  Description of Artificial Sequence: Synthetic oligonucleotide
gucuuuagaaguuuucuaa

SEQ ID NO: 116328 - RNA, 19 nt, Artificial Sequence
  Description of Artificial Sequence: Synthetic oligonucleotide
acccugccuagugcaaguu

SEQ ID NO: 116329 - RNA, 19 nt, Artificial Sequence
  Description of Artificial Sequence: Synthetic oligonucleotide
uacaauauuauagcguguu

SEQ ID NO: 116330 - RNA, 19 nt, Artificial Sequence
  Description of Artificial Sequence: Synthetic oligonucleotide
ucggggagugcccuccugu

SEQ ID NO: 116331 - RNA, 19 nt, Artificial Sequence
  Description of Artificial Sequence: Synthetic oligonucleotide
ucugcaggugugucucugu

SEQ ID NO: 116332 - RNA, 19 nt, Artificial Sequence
  Description of Artificial Sequence: Synthetic oligonucleotide
ugccugggggcuuuucucc

SEQ ID NO: 116333 - RNA, 19 nt, Artificial Sequence
  Description of Artificial Sequence: Synthetic oligonucleotide
cacaugcuuaggggugugg

SEQ ID NO: 116334 - RNA, 19 nt, Artificial Sequence
  Description of Artificial Sequence: Synthetic oligonucleotide
ggucuuccauuggggcaug

SEQ ID NO: 116335 - RNA, 19 nt, Artificial Sequence
  Description of Artificial Sequence: Synthetic oligonucleotide
gauggaccugucuacaggu

SEQ ID NO: 116336 - RNA, 19 nt, Artificial Sequence
  Description of Artificial Sequence: Synthetic oligonucleotide
ugaucucuguugccuuugg

SEQ ID NO: 116337 - RNA, 19 nt, Artificial Sequence
  Description of Artificial Sequence: Synthetic oligonucleotide
ggucagcacauuuguuagu

SEQ ID NO: 116338 - RNA, 19 nt, Artificial Sequence
  Description of Artificial Sequence: Synthetic oligonucleotide
ucuccugggggugaaaacu

SEQ ID NO: 116339 - RNA, 19 nt, Artificial Sequence
  Description of Artificial Sequence: Synthetic oligonucleotide
uuggcuuacaagagaacug

SEQ ID NO: 116340 - RNA, 19 nt, Artificial Sequence
  Description of Artificial Sequence: Synthetic oligonucleotide
ggaaaaaugaugagaugug

SEQ ID NO: 116341 - RNA, 19 nt, Artificial Sequence
  Description of Artificial Sequence: Synthetic oligonucleotide
gguccccaaacccuugauu

SEQ ID NO: 116342 - RNA, 19 nt, Artificial Sequence
  Description of Artificial Sequence: Synthetic oligonucleotide
ugacucuggggaggggcuu

SEQ ID NO: 116343 - RNA, 19 nt, Artificial Sequence
  Description of Artificial Sequence: Synthetic oligonucleotide
uugugaauaggauugcucu

SEQ ID NO: 116344 - RNA, 19 nt, Artificial Sequence
  Description of Artificial Sequence: Synthetic oligonucleotide
ucacauuaaagauaguuac

SEQ ID NO: 116345 - RNA, 19 nt, Artificial Sequence
  Description of Artificial Sequence: Synthetic oligonucleotide
cuucaauuugaaggcugga

SEQ ID NO: 116346 - RNA, 19 nt, Artificial Sequence
  Description of Artificial Sequence: Synthetic oligonucleotide
uuccuuauaacaaagacau

SEQ ID NO: 116347 - RNA, 19 nt, Artificial Sequence
  Description of Artificial Sequence: Synthetic oligonucleotide
ucaccaggauaugaagcuu

SEQ ID NO: 116348 - RNA, 19 nt, Artificial Sequence
  Description of Artificial Sequence: Synthetic oligonucleotide
uuuguugaaaguuggaaaa

SEQ ID NO: 116349 - RNA, 19 nt, Artificial Sequence
  Description of Artificial Sequence: Synthetic oligonucleotide
aaaagugaaauuaaagaca

SEQ ID NO: 116350 - RNA, 19 nt, Artificial Sequence
  Description of Artificial Sequence: Synthetic oligonucleotide
aaagacauucccagacaaa

SEQ ID NO: 116351 - RNA, 25 nt, Artificial Sequence
  Description of Artificial Sequence: Synthetic oligonucleotide
ggcgaggcgagguuugcugggguga

SEQ ID NO: 116352 - RNA, 25 nt, Artificial Sequence
  Description of Artificial Sequence: Synthetic oligonucleotide
aggcagcggcgcggccgggccgggc

SEQ ID NO: 116353 - RNA, 25 nt, Artificial Sequence
  Description of Artificial Sequence: Synthetic oligonucleotide
ccgggccacaggcgguggcggcggg

SEQ ID NO: 116354 - RNA, 25 nt, Artificial Sequence
  Description of Artificial Sequence: Synthetic oligonucleotide
gaccauggaggcggcggucgcugcu

SEQ ID NO: 116355 - RNA, 25 nt, Artificial Sequence
  Description of Artificial Sequence: Synthetic oligonucleotide
uccgcguccccggcugcuccuccuc

SEQ ID NO: 116356 - RNA, 25 nt, Artificial Sequence
  Description of Artificial Sequence: Synthetic oligonucleotide
cgugcuggcggcggcggcggcggcg

SEQ ID NO: 116357 - RNA, 25 nt, Artificial Sequence
  Description of Artificial Sequence: Synthetic oligonucleotide
ggcggcggcgcugcucccgggggcg

SEQ ID NO: 116358 - RNA, 25 nt, Artificial Sequence
  Description of Artificial Sequence: Synthetic oligonucleotide
gacggcguuacaguguuucugccac

SEQ ID NO: 116359 - RNA, 25 nt, Artificial Sequence
  Description of Artificial Sequence: Synthetic oligonucleotide
ccucuguacaaaagacaauuuuacu

SEQ ID NO: 116360 - RNA, 25 nt, Artificial Sequence
  Description of Artificial Sequence: Synthetic oligonucleotide
uugugugacagaugggcucugcuuu

SEQ ID NO: 116361 - RNA, 25 nt, Artificial Sequence
  Description of Artificial Sequence: Synthetic oligonucleotide
ugucucugucacagagaccacagac

SEQ ID NO: 116362 - RNA, 25 nt, Artificial Sequence
  Description of Artificial Sequence: Synthetic oligonucleotide
caaaguuauacacaacagcaugugu

SEQ ID NO: 116363 - RNA, 25 nt, Artificial Sequence
  Description of Artificial Sequence: Synthetic oligonucleotide
uauagcugaaauugacuuaauuccu

SEQ ID NO: 116364 - RNA, 25 nt, Artificial Sequence
  Description of Artificial Sequence: Synthetic oligonucleotide
ucgagauaggccguuuguaugugca

SEQ ID NO: 116365 - RNA, 25 nt, Artificial Sequence
  Description of Artificial Sequence: Synthetic oligonucleotide
acccucuucaaaaacugggucugug

SEQ ID NO: 116366 - RNA, 25 nt, Artificial Sequence
  Description of Artificial Sequence: Synthetic oligonucleotide
gacuacaacauauugcugcaaucag

SEQ ID NO: 116367 - RNA, 25 nt, Artificial Sequence
  Description of Artificial Sequence: Synthetic oligonucleotide
ggaccauugcaauaaaauagaacuu

SEQ ID NO: 116368 - RNA, 25 nt, Artificial Sequence
  Description of Artificial Sequence: Synthetic oligonucleotide
uccaacuacuguaaagucaucaccu

SEQ ID NO: 116369 - RNA, 25 nt, Artificial Sequence
  Description of Artificial Sequence: Synthetic oligonucleotide
uggccuugguccuguggaacuggca

SEQ ID NO: 116370 - RNA, 25 nt, Artificial Sequence
  Description of Artificial Sequence: Synthetic oligonucleotide
agcugucauugcuggaccagugugc

SEQ ID NO: 116371 - RNA, 25 nt, Artificial Sequence
  Description of Artificial Sequence: Synthetic oligonucleotide
cuucgucugcaucucacucauguug

SEQ ID NO: 116372 - RNA, 25 nt, Artificial Sequence
  Description of Artificial Sequence: Synthetic oligonucleotide
gauggucuauaucugccacaaccgc

SEQ ID NO: 116373 - RNA, 25 nt, Artificial Sequence
  Description of Artificial Sequence: Synthetic oligonucleotide
cacugucauucaccaucgagugcca

SEQ ID NO: 116374 - RNA, 25 nt, Artificial Sequence
  Description of Artificial Sequence: Synthetic oligonucleotide
aaaugaagaggacccuucauuagau

SEQ ID NO: 116375 - RNA, 25 nt, Artificial Sequence
  Description of Artificial Sequence: Synthetic oligonucleotide
ucgcccuuuuauuucagaggguacu

SEQ ID NO: 116376 - RNA, 25 nt, Artificial Sequence
  Description of Artificial Sequence: Synthetic oligonucleotide
uacguugaaagacuuaauuuaugau

SEQ ID NO: 116377 - RNA, 25 nt, Artificial Sequence
  Description of Artificial Sequence: Synthetic oligonucleotide
uaugacaacgucagguucuggcuca

SEQ ID NO: 116378 - RNA, 25 nt, Artificial Sequence
  Description of Artificial Sequence: Synthetic oligonucleotide
agguuuaccauugcuuguucagaga

SEQ ID NO: 116379 - RNA, 25 nt, Artificial Sequence
  Description of Artificial Sequence: Synthetic oligonucleotide
aacaauugcgagaacuauuguguua

SEQ ID NO: 116380 - RNA, 25 nt, Artificial Sequence
  Description of Artificial Sequence: Synthetic oligonucleotide
acaagaaagcauuggcaaaggucga

SEQ ID NO: 116381 - RNA, 25 nt, Artificial Sequence
  Description of Artificial Sequence: Synthetic oligonucleotide
auuuggagaaguuuggagaggaaag

SEQ ID NO: 116382 - RNA, 25 nt, Artificial Sequence
  Description of Artificial Sequence: Synthetic oligonucleotide
guggcggggagaagaaguugcuguu

SEQ ID NO: 116383 - RNA, 25 nt, Artificial Sequence
  Description of Artificial Sequence: Synthetic oligonucleotide
uaagauauucuccucuagagaagaa

SEQ ID NO: 116384 - RNA, 25 nt, Artificial Sequence
  Description of Artificial Sequence: Synthetic oligonucleotide
acguucgugguuccgugaggcagag

SEQ ID NO: 116385 - RNA, 25 nt, Artificial Sequence
  Description of Artificial Sequence: Synthetic oligonucleotide
gauuuaucaaacuguaauguuacgu

SEQ ID NO: 116386 - RNA, 25 nt, Artificial Sequence
  Description of Artificial Sequence: Synthetic oligonucleotide
ucaugaaaacauccugggauuuaua

SEQ ID NO: 116387 - RNA, 25 nt, Artificial Sequence
  Description of Artificial Sequence: Synthetic oligonucleotide
agcagcagacaauaaagacaauggu

SEQ ID NO: 116388 - RNA, 25 nt, Artificial Sequence
  Description of Artificial Sequence: Synthetic oligonucleotide
uacuuggacucagcucugguuggug

SEQ ID NO: 116389 - RNA, 25 nt, Artificial Sequence
  Description of Artificial Sequence: Synthetic oligonucleotide
gucagauuaucaugagcauggaucc

SEQ ID NO: 116390 - RNA, 25 nt, Artificial Sequence
  Description of Artificial Sequence: Synthetic oligonucleotide
ccuuuuugauuacuuaaacagauac

SEQ ID NO: 116391 - RNA, 25 nt, Artificial Sequence
  Description of Artificial Sequence: Synthetic oligonucleotide
cacaguuacuguggaaggaaugaua

SEQ ID NO: 116392 - RNA, 25 nt, Artificial Sequence
  Description of Artificial Sequence: Synthetic oligonucleotide
aaaacuugcucuguccacggcgagc

SEQ ID NO: 116393 - RNA, 25 nt, Artificial Sequence
  Description of Artificial Sequence: Synthetic oligonucleotide
cggucuugcccaucuucacauggag

SEQ ID NO: 116394 - RNA, 25 nt, Artificial Sequence
  Description of Artificial Sequence: Synthetic oligonucleotide
gauuguugguacccaaggaaagcca

SEQ ID NO: 116395 - RNA, 25 nt, Artificial Sequence
  Description of Artificial Sequence: Synthetic oligonucleotide
agccauugcucauagagauuugaaa

SEQ ID NO: 116396 - RNA, 25 nt, Artificial Sequence
  Description of Artificial Sequence: Synthetic oligonucleotide
aucaaagaauaucuugguaaagaag

SEQ ID NO: 116397 - RNA, 25 nt, Artificial Sequence
  Description of Artificial Sequence: Synthetic oligonucleotide
gaauggaacuugcuguauugcagac

SEQ ID NO: 116398 - RNA, 25 nt, Artificial Sequence
  Description of Artificial Sequence: Synthetic oligonucleotide
cuuaggacuggcaguaagacaugau

SEQ ID NO: 116399 - RNA, 25 nt, Artificial Sequence
  Description of Artificial Sequence: Synthetic oligonucleotide
uucagccacagauaccauugauauu

SEQ ID NO: 116400 - RNA, 25 nt, Artificial Sequence
  Description of Artificial Sequence: Synthetic oligonucleotide
ugcuccaaaccacagagugggaaca

SEQ ID NO: 116401 - RNA, 25 nt, Artificial Sequence
  Description of Artificial Sequence: Synthetic oligonucleotide
aaaaagguacauggccccugaaguu

SEQ ID NO: 116402 - RNA, 25 nt, Artificial Sequence
  Description of Artificial Sequence: Synthetic oligonucleotide
ucucgaugauuccauaaauaugaaa

SEQ ID NO: 116403 - RNA, 25 nt, Artificial Sequence
  Description of Artificial Sequence: Synthetic oligonucleotide
acauuuugaauccuucaaacgugcu

SEQ ID NO: 116404 - RNA, 25 nt, Artificial Sequence
  Description of Artificial Sequence: Synthetic oligonucleotide
ugacaucuaugcaaugggcuuagua

SEQ ID NO: 116405 - RNA, 25 nt, Artificial Sequence
  Description of Artificial Sequence: Synthetic oligonucleotide
auucugggaaauugcucgacgaugu

SEQ ID NO: 116406 - RNA, 25 nt, Artificial Sequence
  Description of Artificial Sequence: Synthetic oligonucleotide
uuccauugguggaauucaugaagau

SEQ ID NO: 116407 - RNA, 25 nt, Artificial Sequence
  Description of Artificial Sequence: Synthetic oligonucleotide
uuaccaacugccuuauuaugaucuu

SEQ ID NO: 116408 - RNA, 25 nt, Artificial Sequence
  Description of Artificial Sequence: Synthetic oligonucleotide
uguaccuucugacccaucaguugaa

SEQ ID NO: 116409 - RNA, 25 nt, Artificial Sequence
  Description of Artificial Sequence: Synthetic oligonucleotide
agaaaugagaaaaguuguuugugaa

SEQ ID NO: 116410 - RNA, 25 nt, Artificial Sequence
  Description of Artificial Sequence: Synthetic oligonucleotide
acagaaguuaaggccaaauauccca

SEQ ID NO: 116411 - RNA, 25 nt, Artificial Sequence
  Description of Artificial Sequence: Synthetic oligonucleotide
aaacagauggcagagcugugaagcc

SEQ ID NO: 116412 - RNA, 25 nt, Artificial Sequence
  Description of Artificial Sequence: Synthetic oligonucleotide
cuugagaguaauggcuaaaauuaug

SEQ ID NO: 116413 - RNA, 25 nt, Artificial Sequence
  Description of Artificial Sequence: Synthetic oligonucleotide
gagagaauguugguaugccaaugga

SEQ ID NO: 116414 - RNA, 25 nt, Artificial Sequence
  Description of Artificial Sequence: Synthetic oligonucleotide
agcagcuaggcuuacagcauugcgg

SEQ ID NO: 116415 - RNA, 25 nt, Artificial Sequence
  Description of Artificial Sequence: Synthetic oligonucleotide
gauuaagaaaacauuaucgcaacuc

SEQ ID NO: 116416 - RNA, 25 nt, Artificial Sequence
  Description of Artificial Sequence: Synthetic oligonucleotide
cagucaacaggaaggcaucaaaaug

SEQ ID NO: 116417 - RNA, 25 nt, Artificial Sequence
  Description of Artificial Sequence: Synthetic oligonucleotide
guaauucuacagcuuugccugaacu

SEQ ID NO: 116418 - RNA, 25 nt, Artificial Sequence
  Description of Artificial Sequence: Synthetic oligonucleotide
ucuccuuuuuucuucagaucugcuc

SEQ ID NO: 116419 - RNA, 25 nt, Artificial Sequence
  Description of Artificial Sequence: Synthetic oligonucleotide
ccuggguuuuaauuugggaggucaa

SEQ ID NO: 116420 - RNA, 25 nt, Artificial Sequence
  Description of Artificial Sequence: Synthetic oligonucleotide
auuguucuaccucacugagagggaa

SEQ ID NO: 116421 - RNA, 25 nt, Artificial Sequence
  Description of Artificial Sequence: Synthetic oligonucleotide
acagaaggauauugcuuccuuuugc

SEQ ID NO: 116422 - RNA, 25 nt, Artificial Sequence
  Description of Artificial Sequence: Synthetic oligonucleotide
cagcaguguaauaaagucaauuaaa

SEQ ID NO: 116423 - RNA, 25 nt, Artificial Sequence
  Description of Artificial Sequence: Synthetic oligonucleotide
aaacuucccaggauuucuuuggacc

SEQ ID NO: 116424 - RNA, 25 nt, Artificial Sequence
  Description of Artificial Sequence: Synthetic oligonucleotide
ccaggaaacagccauguggguccuu

SEQ ID NO: 116425 - RNA, 25 nt, Artificial Sequence
  Description of Artificial Sequence: Synthetic oligonucleotide
uucugugcacuaugaacgcuucuuu

SEQ ID NO: 116426 - RNA, 25 nt, Artificial Sequence
  Description of Artificial Sequence: Synthetic oligonucleotide
ucccaggacagaaaauguguagucu

SEQ ID NO: 116427 - RNA, 25 nt, Artificial Sequence
  Description of Artificial Sequence: Synthetic oligonucleotide
uaccuuuauuuuuuauuaacaaaac

SEQ ID NO: 116428 - RNA, 25 nt, Artificial Sequence
  Description of Artificial Sequence: Synthetic oligonucleotide
cuuguuuuuuaaaaagaugauugcu

SEQ ID NO: 116429 - RNA, 25 nt, Artificial Sequence
  Description of Artificial Sequence: Synthetic oligonucleotide
uggucuuaacuuuagguaacucugc

SEQ ID NO: 116430 - RNA, 25 nt, Artificial Sequence
  Description of Artificial Sequence: Synthetic oligonucleotide
cugugcuggagaucaucuuuaaggg

SEQ ID NO: 116431 - RNA, 25 nt, Artificial Sequence
  Description of Artificial Sequence: Synthetic oligonucleotide
gcaaaggaguuggauugcugaauua

SEQ ID NO: 116432 - RNA, 25 nt, Artificial Sequence
  Description of Artificial Sequence: Synthetic oligonucleotide
acaaugaaacaugucuuauuacuaa

SEQ ID NO: 116433 - RNA, 25 nt, Artificial Sequence
  Description of Artificial Sequence: Synthetic oligonucleotide
aagaaagugauuuacuccugguuag

SEQ ID NO: 116434 - RNA, 25 nt, Artificial Sequence
  Description of Artificial Sequence: Synthetic oligonucleotide
guacauucucagaggauucugaacc

SEQ ID NO: 116435 - RNA, 25 nt, Artificial Sequence
  Description of Artificial Sequence: Synthetic oligonucleotide
cacuagaguuuccuugauucagacu

SEQ ID NO: 116436 - RNA, 25 nt, Artificial Sequence
  Description of Artificial Sequence: Synthetic oligonucleotide
uuugaauguacuguucuauaguuuu

SEQ ID NO: 116437 - RNA, 25 nt, Artificial Sequence
  Description of Artificial Sequence: Synthetic oligonucleotide
uucaggaucuuaaaacuaacacuua

SEQ ID NO: 116438 - RNA, 25 nt, Artificial Sequence
  Description of Artificial Sequence: Synthetic oligonucleotide
auaaaacucuuaucuugagucuaaa

SEQ ID NO: 116439 - RNA, 25 nt, Artificial Sequence
  Description of Artificial Sequence: Synthetic oligonucleotide
aaaugaccucauauaguagugagga

SEQ ID NO: 116440 - RNA, 25 nt, Artificial Sequence
  Description of Artificial Sequence: Synthetic oligonucleotide
aacauaauucaugcaauuguauuuu

SEQ ID NO: 116441 - RNA, 25 nt, Artificial Sequence
  Description of Artificial Sequence: Synthetic oligonucleotide
uguauacuauuauuguucuuucacu

SEQ ID NO: 116442 - RNA, 25 nt, Artificial Sequence
  Description of Artificial Sequence: Synthetic oligonucleotide
uuauucagaacauuacaugccuuca

SEQ ID NO: 116443 - RNA, 25 nt, Artificial Sequence
  Description of Artificial Sequence: Synthetic oligonucleotide
aaaaugggauuguacuauaccagua

SEQ ID NO: 116444 - RNA, 25 nt, Artificial Sequence
  Description of Artificial Sequence: Synthetic oligonucleotide
aagugccacuucugugucuuucuaa

SEQ ID NO: 116445 - RNA, 25 nt, Artificial Sequence
  Description of Artificial Sequence: Synthetic oligonucleotide
auggaaaugaguagaauugcugaaa

SEQ ID NO: 116446 - RNA, 25 nt, Artificial Sequence
  Description of Artificial Sequence: Synthetic oligonucleotide
agucucuauguuaaaaccuauagug

SEQ ID NO: 116447 - RNA, 25 nt, Artificial Sequence
  Description of Artificial Sequence: Synthetic oligonucleotide
guuugaauucaaaaagcuuauuuau

SEQ ID NO: 116448 - RNA, 25 nt, Artificial Sequence
  Description of Artificial Sequence: Synthetic oligonucleotide
ucuggguaacccaaacuuuuucugu

SEQ ID NO: 116449 - RNA, 25 nt, Artificial Sequence
  Description of Artificial Sequence: Synthetic oligonucleotide
uuuuguuuuuggaaggguuuuugug

SEQ ID NO: 116450 - RNA, 25 nt, Artificial Sequence
  Description of Artificial Sequence: Synthetic oligonucleotide
gguaugucauuugguauucuauucu

SEQ ID NO: 116451 - RNA, 25 nt, Artificial Sequence
  Description of Artificial Sequence: Synthetic oligonucleotide
ugaaaaugccuuucuccuaccaaaa

SEQ ID NO: 116452 - RNA, 25 nt, Artificial Sequence
  Description of Artificial Sequence: Synthetic oligonucleotide
augugcuuaagccacuaaagaaaug

SEQ ID NO: 116453 - RNA, 25 nt, Artificial Sequence
  Description of Artificial Sequence: Synthetic oligonucleotide
gaaguggcauuaauuaguaaauuau

SEQ ID NO: 116454 - RNA, 25 nt, Artificial Sequence
  Description of Artificial Sequence: Synthetic oligonucleotide
uuagcauggucauguuugaauauuc

SEQ ID NO: 116455 - RNA, 25 nt, Artificial Sequence
  Description of Artificial Sequence: Synthetic oligonucleotide
cucacaucaagcuuuugcauuuuaa

SEQ ID NO: 116456 - RNA, 25 nt, Artificial Sequence
  Description of Artificial Sequence: Synthetic oligonucleotide
auuguguugucuaaguauacuuuua

SEQ ID NO: 116457 - RNA, 25 nt, Artificial Sequence
  Description of Artificial Sequence: Synthetic oligonucleotide
aaaaaaucaaguggcacucuagaug

SEQ ID NO: 116458 - RNA, 25 nt, Artificial Sequence
  Description of Artificial Sequence: Synthetic oligonucleotide
gcuuauaguacuuuaauauuuguag

SEQ ID NO: 116459 - RNA, 25 nt, Artificial Sequence
  Description of Artificial Sequence: Synthetic oligonucleotide
gcauacagacuaauuuuucuaaaag

SEQ ID NO: 116460 - RNA, 25 nt, Artificial Sequence
  Description of Artificial Sequence: Synthetic oligonucleotide
gggaaagucugucuagcugcuugug

SEQ ID NO: 116461 - RNA, 25 nt, Artificial Sequence
  Description of Artificial Sequence: Synthetic oligonucleotide
gaaaaguuaugugguauucuguaag

SEQ ID NO: 116462 - RNA, 25 nt, Artificial Sequence
  Description of Artificial Sequence: Synthetic oligonucleotide
gccauuuuuuucuuuaucuguucaa

SEQ ID NO: 116463 - RNA, 25 nt, Artificial Sequence
  Description of Artificial Sequence: Synthetic oligonucleotide
aagacuuauuuuuuaagacaugaau

SEQ ID NO: 116464 - RNA, 25 nt, Artificial Sequence
  Description of Artificial Sequence: Synthetic oligonucleotide
uuacauuuaaaauuagaauaugguu

SEQ ID NO: 116465 - RNA, 25 nt, Artificial Sequence
  Description of Artificial Sequence: Synthetic oligonucleotide
uaauauuaaauaauaggccuuuuuc

SEQ ID NO: 116466 - RNA, 25 nt, Artificial Sequence
  Description of Artificial Sequence: Synthetic oligonucleotide
cuaggaaggcgaagguaguuaauaa

SEQ ID NO: 116467 - RNA, 25 nt, Artificial Sequence
  Description of Artificial Sequence: Synthetic oligonucleotide
auuugaauagauaacagaugugcaa

SEQ ID NO: 116468 - RNA, 25 nt, Artificial Sequence
  Description of Artificial Sequence: Synthetic oligonucleotide
agaaagucacauuuguuauguaugu

SEQ ID NO: 116469 - RNA, 25 nt, Artificial Sequence
  Description of Artificial Sequence: Synthetic oligonucleotide
uaggaguaaacguucgguggauccu

SEQ ID NO: 116470 - RNA, 25 nt, Artificial Sequence
  Description of Artificial Sequence: Synthetic oligonucleotide
ucugucuuuguaacugagguuagag

SEQ ID NO: 116471 - RNA, 25 nt, Artificial Sequence
  Description of Artificial Sequence: Synthetic oligonucleotide
gcuagugugguuuugaggucucacu

SEQ ID NO: 116472 - RNA, 25 nt, Artificial Sequence
  Description of Artificial Sequence: Synthetic oligonucleotide
uacacuuugaggaaggcagcuuuua

SEQ ID NO: 116473 - RNA, 25 nt, Artificial Sequence
  Description of Artificial Sequence: Synthetic oligonucleotide
aauucaguguuuccuuaugugugcg

SEQ ID NO: 116474 - RNA, 25 nt, Artificial Sequence
  Description of Artificial Sequence: Synthetic oligonucleotide
guacauugcaacugcuuacauguaa

SEQ ID NO: 116475 - RNA, 25 nt, Artificial Sequence
  Description of Artificial Sequence: Synthetic oligonucleotide
auuuauguaaugcauucagugcacc

SEQ ID NO: 116476 - RNA, 25 nt, Artificial Sequence
  Description of Artificial Sequence: Synthetic oligonucleotide
ccuuguuacuugggagaggugguag

SEQ ID NO: 116477 - RNA, 25 nt, Artificial Sequence
  Description of Artificial Sequence: Synthetic oligonucleotide
gcuaaagaacauucugaguauaggu

SEQ ID NO: 116478 - RNA, 25 nt, Artificial Sequence
  Description of Artificial Sequence: Synthetic oligonucleotide
uuuuucuccauuuacagaugucuuu

SEQ ID NO: 116479 - RNA, 25 nt, Artificial Sequence
  Description of Artificial Sequence: Synthetic oligonucleotide
uggucaaauauugaaagcaaacuug

SEQ ID NO: 116480 - RNA, 25 nt, Artificial Sequence
  Description of Artificial Sequence: Synthetic oligonucleotide
gucauggucuucuuacauuaaguug

SEQ ID NO: 116481 - RNA, 25 nt, Artificial Sequence
  Description of Artificial Sequence: Synthetic oligonucleotide
gaaacuagcuuauaauaacugguuu

SEQ ID NO: 116482 - RNA, 25 nt, Artificial Sequence
  Description of Artificial Sequence: Synthetic oligonucleotide
uuuacuuccaaugcuaugaagucuc

SEQ ID NO: 116483 - RNA, 25 nt, Artificial Sequence
  Description of Artificial Sequence: Synthetic oligonucleotide
cugcagggcuuuuacaguuuucgaa

SEQ ID NO: 116484 - RNA, 25 nt, Artificial Sequence
  Description of Artificial Sequence: Synthetic oligonucleotide
aguccuuuuaucacugugaucuuau

SEQ ID NO: 116485 - RNA, 25 nt, Artificial Sequence
  Description of Artificial Sequence: Synthetic oligonucleotide
uucugaggggagaaaaaacuaucau

SEQ ID NO: 116486 - RNA, 25 nt, Artificial Sequence
  Description of Artificial Sequence: Synthetic oligonucleotide
uagcucugaggcaagacuucgacuu

SEQ ID NO: 116487 - RNA, 25 nt, Artificial Sequence
  Description of Artificial Sequence: Synthetic oligonucleotide
uuauagugcuaucaguuccccgaua

SEQ ID NO: 116488 - RNA, 25 nt, Artificial Sequence
  Description of Artificial Sequence: Synthetic oligonucleotide
acagggucagaguaacccauacagu

SEQ ID NO: 116489 - RNA, 25 nt, Artificial Sequence
  Description of Artificial Sequence: Synthetic oligonucleotide
uauuuuggucaggaagagaaagugg

SEQ ID NO: 116490 - RNA, 25 nt, Artificial Sequence
  Description of Artificial Sequence: Synthetic oligonucleotide
gccauuuacacugaaugaguugcau

SEQ ID NO: 116491 - RNA, 25 nt, Artificial Sequence
  Description of Artificial Sequence: Synthetic oligonucleotide
uucugauaaugucuuaucucuuaua

SEQ ID NO: 116492 - RNA, 25 nt, Artificial Sequence
  Description of Artificial Sequence: Synthetic oligonucleotide
acguagaauaaauuugaaagacuau

SEQ ID NO: 116493 - RNA, 25 nt, Artificial Sequence
  Description of Artificial Sequence: Synthetic oligonucleotide
uuugaucuuaaaaccaaaguaauuu

SEQ ID NO: 116494 - RNA, 25 nt, Artificial Sequence
  Description of Artificial Sequence: Synthetic oligonucleotide
uuagaaugagugacauauuacauag

SEQ ID NO: 116495 - RNA, 25 nt, Artificial Sequence
  Description of Artificial Sequence: Synthetic oligonucleotide
ggaauuuagugucaauuucaugugu

SEQ ID NO: 116496 - RNA, 25 nt, Artificial Sequence
  Description of Artificial Sequence: Synthetic oligonucleotide
uuuaaaaacaucaugggaaaaaugc

SEQ ID NO: 116497 - RNA, 25 nt, Artificial Sequence
  Description of Artificial Sequence: Synthetic oligonucleotide
cuuagagguuacuauuuugacuaca

SEQ ID NO: 116498 - RNA, 25 nt, Artificial Sequence
  Description of Artificial Sequence: Synthetic oligonucleotide
aaaguugaguuuuuuucuguaguua

SEQ ID NO: 116499 - RNA, 25 nt, Artificial Sequence
  Description of Artificial Sequence: Synthetic oligonucleotide
accauaauuucauugaagcaaauga

SEQ ID NO: 116500 - RNA, 25 nt, Artificial Sequence
  Description of Artificial Sequence: Synthetic oligonucleotide
aaugaguuugagagguuuguuuuua

SEQ ID NO: 116501 - RNA, 25 nt, Artificial Sequence
  Description of Artificial Sequence: Synthetic oligonucleotide
auaguuguguuguauuacuuguuua

SEQ ID NO: 116502 - RNA, 25 nt, Artificial Sequence
  Description of Artificial Sequence: Synthetic oligonucleotide
aauaauaaucucuaauucugugauc

SEQ ID NO: 116503 - RNA, 25 nt, Artificial Sequence
  Description of Artificial Sequence: Synthetic oligonucleotide
cagguacuuuuuuuguggggguuuu

SEQ ID NO: 116504 - RNA, 25 nt, Artificial Sequence
  Description of Artificial Sequence: Synthetic oligonucleotide
guuguuuuugggccauuucuaagcc

SEQ ID NO: 116505 - RNA, 25 nt, Artificial Sequence
  Description of Artificial Sequence: Synthetic oligonucleotide
cuaccagaucugcuuuaugaaaucc

SEQ ID NO: 116506 - RNA, 25 nt, Artificial Sequence
  Description of Artificial Sequence: Synthetic oligonucleotide
caggggaccaaugcauuuuaucacu

SEQ ID NO: 116507 - RNA, 25 nt, Artificial Sequence
  Description of Artificial Sequence: Synthetic oligonucleotide
uaaaacuauuuuuauauaauuuuaa

SEQ ID NO: 116508 - RNA, 25 nt, Artificial Sequence
  Description of Artificial Sequence: Synthetic oligonucleotide
agaauauaccaaaaguugucugauu

SEQ ID NO: 116509 - RNA, 25 nt, Artificial Sequence
  Description of Artificial Sequence: Synthetic oligonucleotide
uuaaaguuguaauacaugauuucuc

SEQ ID NO: 116510 - RNA, 25 nt, Artificial Sequence
  Description of Artificial Sequence: Synthetic oligonucleotide
cacuuucauguaagguuauccacuu

SEQ ID NO: 116511 - RNA, 25 nt, Artificial Sequence
  Description of Artificial Sequence: Synthetic oligonucleotide
uuugcugaagauauuuuuuauugaa

SEQ ID NO: 116512 - RNA, 25 nt, Artificial Sequence
  Description of Artificial Sequence: Synthetic oligonucleotide
aucaaagauugaguuacaauuauac

SEQ ID NO: 116513 - RNA, 25 nt, Artificial Sequence
  Description of Artificial Sequence: Synthetic oligonucleotide
cuuuucuuaccuaaguggauaaaau

SEQ ID NO: 116514 - RNA, 25 nt, Artificial Sequence
  Description of Artificial Sequence: Synthetic oligonucleotide
uguacuuuugaugaaucagggaauu

SEQ ID NO: 116515 - RNA, 25 nt, Artificial Sequence
  Description of Artificial Sequence: Synthetic oligonucleotide
uuuuuuaaaguuggaguuuaguucu

SEQ ID NO: 116516 - RNA, 25 nt, Artificial Sequence
  Description of Artificial Sequence: Synthetic oligonucleotide
uaaauugacuuuacguauuacugca

SEQ ID NO: 116517 - RNA, 25 nt, Artificial Sequence
  Description of Artificial Sequence: Synthetic oligonucleotide
aguuaauuccuuuuuuggcuaggga

SEQ ID NO: 116518 - RNA, 25 nt, Artificial Sequence
  Description of Artificial Sequence: Synthetic oligonucleotide
augguuugauaaaccacaauuggcu

SEQ ID NO: 116519 - RNA, 25 nt, Artificial Sequence
  Description of Artificial Sequence: Synthetic oligonucleotide
ugauauugaaaaugaaagaaacuua

SEQ ID NO: 116520 - RNA, 25 nt, Artificial Sequence
  Description of Artificial Sequence: Synthetic oligonucleotide
aaaaggugggauggaucaugauuac

SEQ ID NO: 116521 - RNA, 25 nt, Artificial Sequence
  Description of Artificial Sequence: Synthetic oligonucleotide
cugucgauaacugcagauaaauuug

SEQ ID NO: 116522 - RNA, 25 nt, Artificial Sequence
  Description of Artificial Sequence: Synthetic oligonucleotide
gauuagaguaauaauuuugucauuu

SEQ ID NO: 116523 - RNA, 25 nt, Artificial Sequence
  Description of Artificial Sequence: Synthetic oligonucleotide
uaaaaacacaguuguuuauacugcc

SEQ ID NO: 116524 - RNA, 25 nt, Artificial Sequence
  Description of Artificial Sequence: Synthetic oligonucleotide
ccauccuaggaugcucaccuuccaa

SEQ ID NO: 116525 - RNA, 25 nt, Artificial Sequence
  Description of Artificial Sequence: Synthetic oligonucleotide
agauucaacguggcuaaaacaucuu

SEQ ID NO: 116526 - RNA, 25 nt, Artificial Sequence
  Description of Artificial Sequence: Synthetic oligonucleotide
ucugguaaauugugcguccauauuc

SEQ ID NO: 116527 - RNA, 25 nt, Artificial Sequence
  Description of Artificial Sequence: Synthetic oligonucleotide
cauuuugucaguagccaggagaaau

SEQ ID NO: 116528 - RNA, 25 nt, Artificial Sequence
  Description of Artificial Sequence: Synthetic oligonucleotide
uggggaugggggaaauacgacuuag

SEQ ID NO: 116529 - RNA, 25 nt, Artificial Sequence
  Description of Artificial Sequence: Synthetic oligonucleotide
gugaggcauagacaucccuggucca

SEQ ID NO: 116530 - RNA, 25 nt, Artificial Sequence
  Description of Artificial Sequence: Synthetic oligonucleotide
auccuuucugucuccagcuguuucu

SEQ ID NO: 116531 - RNA, 25 nt, Artificial Sequence
  Description of Artificial Sequence: Synthetic oligonucleotide
uuggaaccugcucuccugcuugcug

SEQ ID NO: 116532 - RNA, 25 nt, Artificial Sequence
  Description of Artificial Sequence: Synthetic oligonucleotide
ggucccugacgcagagaccguugcc

SEQ ID NO: 116533 - RNA, 25 nt, Artificial Sequence
  Description of Artificial Sequence: Synthetic oligonucleotide
cucccccacagccguuugacugaag

SEQ ID NO: 116534 - RNA, 25 nt, Artificial Sequence
  Description of Artificial Sequence: Synthetic oligonucleotide
ggcugcucuggagaccuagaguaaa

SEQ ID NO: 116535 - RNA, 25 nt, Artificial Sequence
  Description of Artificial Sequence: Synthetic oligonucleotide
aacggcugauggaaguugugggacc

SEQ ID NO: 116536 - RNA, 25 nt, Artificial Sequence
  Description of Artificial Sequence: Synthetic oligonucleotide
ccacuuccauuuccuucagucauua

SEQ ID NO: 116537 - RNA, 25 nt, Artificial Sequence
  Description of Artificial Sequence: Synthetic oligonucleotide
agagguggaagggaggggucuccaa

SEQ ID NO: 116538 - RNA, 25 nt, Artificial Sequence
  Description of Artificial Sequence: Synthetic oligonucleotide
aguuuggagauugagcagaugaggc

SEQ ID NO: 116539 - RNA, 25 nt, Artificial Sequence
  Description of Artificial Sequence: Synthetic oligonucleotide
cuugggaugccccugcuuugacuuc

SEQ ID NO: 116540 - RNA, 25 nt, Artificial Sequence
  Description of Artificial Sequence: Synthetic oligonucleotide
cagccauggaugaggagugggaugg

SEQ ID NO: 116541 - RNA, 25 nt, Artificial Sequence
  Description of Artificial Sequence: Synthetic oligonucleotide
gcagcaagguggcuccuguggcagu

SEQ ID NO: 116542 - RNA, 25 nt, Artificial Sequence
  Description of Artificial Sequence: Synthetic oligonucleotide
uggaguugugccagaaacaguggcc

SEQ ID NO: 116543 - RNA, 25 nt, Artificial Sequence
  Description of Artificial Sequence: Synthetic oligonucleotide
caguuguaucgccuauaagacaggg

SEQ ID NO: 116544 - RNA, 25 nt, Artificial Sequence
  Description of Artificial Sequence: Synthetic oligonucleotide
guaaggucugaagagcugagccugu

SEQ ID NO: 116545 - RNA, 25 nt, Artificial Sequence
  Description of Artificial Sequence: Synthetic oligonucleotide
uaauucugcuguaauaaugauagug

SEQ ID NO: 116546 - RNA, 25 nt, Artificial Sequence
  Description of Artificial Sequence: Synthetic oligonucleotide
gcucaagaagugccuugaguuggug

SEQ ID NO: 116547 - RNA, 25 nt, Artificial Sequence
  Description of Artificial Sequence: Synthetic oligonucleotide
guacagugccauggccaucaagaau

SEQ ID NO: 116548 - RNA, 25 nt, Artificial Sequence
  Description of Artificial Sequence: Synthetic oligonucleotide
ucccagauuucagguuuuauuacaa

SEQ ID NO: 116549 - RNA, 25 nt, Artificial Sequence
  Description of Artificial Sequence: Synthetic oligonucleotide
aaauguaaguggucacuuggcgauu

SEQ ID NO: 116550 - RNA, 25 nt, Artificial Sequence
  Description of Artificial Sequence: Synthetic oligonucleotide
uuuguaguacaugcaugaguuaccu

SEQ ID NO: 116551 - RNA, 25 nt, Artificial Sequence
  Description of Artificial Sequence: Synthetic oligonucleotide
uuuuuucucuaugucugagaacugu

SEQ ID NO: 116552 - RNA, 25 nt, Artificial Sequence
  Description of Artificial Sequence: Synthetic oligonucleotide
ucagauuaaaacaagauggcaaaga

SEQ ID NO: 116553 - RNA, 25 nt, Artificial Sequence
  Description of Artificial Sequence: Synthetic oligonucleotide
agaucguuagagugcacaacaaaau

SEQ ID NO: 116554 - RNA, 25 nt, Artificial Sequence
  Description of Artificial Sequence: Synthetic oligonucleotide
ucacuaucccauuagacacaucauc

SEQ ID NO: 116555 - RNA, 25 nt, Artificial Sequence
  Description of Artificial Sequence: Synthetic oligonucleotide
caaaagcuuauuuuuauucuugcac

SEQ ID NO: 116556 - RNA, 25 nt, Artificial Sequence
  Description of Artificial Sequence: Synthetic oligonucleotide
cuggaagaaucguaagucaacuguu

SEQ ID NO: 116557 - RNA, 25 nt, Artificial Sequence
  Description of Artificial Sequence: Synthetic oligonucleotide
uucuugaccauggcaguguucuggc

SEQ ID NO: 116558 - RNA, 25 nt, Artificial Sequence
  Description of Artificial Sequence: Synthetic oligonucleotide
cuccaaaugguagugauuccaaaua

SEQ ID NO: 116559 - RNA, 25 nt, Artificial Sequence
  Description of Artificial Sequence: Synthetic oligonucleotide
aaugguucuguuaacacuuuggcag

SEQ ID NO: 116560 - RNA, 25 nt, Artificial Sequence
  Description of Artificial Sequence: Synthetic oligonucleotide
gaaaaugccagcucagauauuuuga

SEQ ID NO: 116561 - RNA, 25 nt, Artificial Sequence
  Description of Artificial Sequence: Synthetic oligonucleotide
agauacuaaggauuaucuuuggaca

SEQ ID NO: 116562 - RNA, 25 nt, Artificial Sequence
  Description of Artificial Sequence: Synthetic oligonucleotide
auguacugcagcuucuugucucugu

SEQ ID NO: 116563 - RNA, 25 nt, Artificial Sequence
  Description of Artificial Sequence: Synthetic oligonucleotide
uuuuggauuacuggaauacccaugg

SEQ ID NO: 116564 - RNA, 25 nt, Artificial Sequence
  Description of Artificial Sequence: Synthetic oligonucleotide
ggcccucucaagagugcuggacuuc

SEQ ID NO: 116565 - RNA, 25 nt, Artificial Sequence
  Description of Artificial Sequence: Synthetic oligonucleotide
cuaggacauuaagaugauugucagu

SEQ ID NO: 116566 - RNA, 25 nt, Artificial Sequence
  Description of Artificial Sequence: Synthetic oligonucleotide
uacauuaaacuuuucaaucccauua

SEQ ID NO: 116567 - RNA, 25 nt, Artificial Sequence
  Description of Artificial Sequence: Synthetic oligonucleotide
augcaaucuuguuuguaaauguaaa

SEQ ID NO: 116568 - RNA, 25 nt, Artificial Sequence
  Description of Artificial Sequence: Synthetic oligonucleotide
acuucuaaaaauaugguuaauaaca

SEQ ID NO: 116569 - RNA, 25 nt, Artificial Sequence
  Description of Artificial Sequence: Synthetic oligonucleotide
auucaaccuguuuauuacaacuuaa

SEQ ID NO: 116570 - RNA, 25 nt, Artificial Sequence
  Description of Artificial Sequence: Synthetic oligonucleotide
aaaggaacuucagugaauuuguuuu

SEQ ID NO: 116571 - RNA, 25 nt, Artificial Sequence
  Description of Artificial Sequence: Synthetic oligonucleotide
uuauuuuuuaacaagauuugugaac

SEQ ID NO: 116572 - RNA, 25 nt, Artificial Sequence
  Description of Artificial Sequence: Synthetic oligonucleotide
cugaauaucaugaaccauguuuuga

SEQ ID NO: 116573 - RNA, 25 nt, Artificial Sequence
  Description of Artificial Sequence: Synthetic oligonucleotide
auaccccuuuuucacguugugccaa

SEQ ID NO: 116574 - RNA, 25 nt, Artificial Sequence
  Description of Artificial Sequence: Synthetic oligonucleotide
acggaauaggguguuugauauuucu

SEQ ID NO: 116575 - RNA, 25 nt, Artificial Sequence
  Description of Artificial Sequence: Synthetic oligonucleotide
uucauauguuaaggagaugcuucaa

SEQ ID NO: 116576 - RNA, 25 nt, Artificial Sequence
  Description of Artificial Sequence: Synthetic oligonucleotide
aaaugucaauugcuuuaaacuuaaa

SEQ ID NO: 116577 - RNA, 25 nt, Artificial Sequence
  Description of Artificial Sequence: Synthetic oligonucleotide
auuaccucucaagagaccaagguac

SEQ ID NO: 116578 - RNA, 25 nt, Artificial Sequence
  Description of Artificial Sequence: Synthetic oligonucleotide
cauuuaccucauuguguauauaaug

SEQ ID NO: 116579 - RNA, 25 nt, Artificial Sequence
  Description of Artificial Sequence: Synthetic oligonucleotide
guuuaauauuugucagagcauucuc

SEQ ID NO: 116580 - RNA, 25 nt, Artificial Sequence
  Description of Artificial Sequence: Synthetic oligonucleotide
ccagguuugcaguuuuauuucuaua

SEQ ID NO: 116581 - RNA, 25 nt, Artificial Sequence
  Description of Artificial Sequence: Synthetic oligonucleotide
aaaguauggguauuauguugcucag

SEQ ID NO: 116582 - RNA, 25 nt, Artificial Sequence
  Description of Artificial Sequence: Synthetic oligonucleotide
guuacucaaaugguacuguauuguu

SEQ ID NO: 116583 - RNA, 25 nt, Artificial Sequence
  Description of Artificial Sequence: Synthetic oligonucleotide
uuauauuuguaccccaaauaacauc

SEQ ID NO: 116584 - RNA, 25 nt, Artificial Sequence
  Description of Artificial Sequence: Synthetic oligonucleotide
cgucuguacuuucuguuuucuguau

SEQ ID NO: 116585 - RNA, 25 nt, Artificial Sequence
  Description of Artificial Sequence: Synthetic oligonucleotide
uuguauuugugcaggauucuuuagg

SEQ ID NO: 116586 - RNA, 25 nt, Artificial Sequence
  Description of Artificial Sequence: Synthetic oligonucleotide
gcuuuaucaguguaaucucugccuu

SEQ ID NO: 116587 - RNA, 25 nt, Artificial Sequence
  Description of Artificial Sequence: Synthetic oligonucleotide
uuuaagauauguacagaaaaugucc

SEQ ID NO: 116588 - RNA, 25 nt, Artificial Sequence
  Description of Artificial Sequence: Synthetic oligonucleotide
cauauaaauuuccauugaagucgaa

SEQ ID NO: 116589 - RNA, 25 nt, Artificial Sequence
  Description of Artificial Sequence: Synthetic oligonucleotide
augauacugagaagccuguaaagag

SEQ ID NO: 116590 - RNA, 25 nt, Artificial Sequence
  Description of Artificial Sequence: Synthetic oligonucleotide
ggagaaaaaaacauaagcuguguuu

SEQ ID NO: 116591 - RNA, 25 nt, Artificial Sequence
  Description of Artificial Sequence: Synthetic oligonucleotide
uccccauaaguuuuuuuaaauugua

SEQ ID NO: 116592 - RNA, 25 nt, Artificial Sequence
  Description of Artificial Sequence: Synthetic oligonucleotide
auauuguauuuguaguaauauucca

SEQ ID NO: 116593 - RNA, 25 nt, Artificial Sequence
  Description of Artificial Sequence: Synthetic oligonucleotide
aaaagaauguaaauaggaaauagaa

SEQ ID NO: 116594 - RNA, 25 nt, Artificial Sequence
  Description of Artificial Sequence: Synthetic oligonucleotide
agagugaugcuuauguuaaguccua

SEQ ID NO: 116595 - RNA, 25 nt, Artificial Sequence
  Description of Artificial Sequence: Synthetic oligonucleotide
aacacuacaguagaagaauggaagc

SEQ ID NO: 116596 - RNA, 25 nt, Artificial Sequence
  Description of Artificial Sequence: Synthetic oligonucleotide
cagugcaaauaaauuacauuuuucc

SEQ ID NO: 116597 - RNA, 25 nt, Artificial Sequence
  Description of Artificial Sequence: Synthetic oligonucleotide
ccaagugccaguggcauauuuuaaa

SEQ ID NO: 116598 - RNA, 25 nt, Artificial Sequence
  Description of Artificial Sequence: Synthetic oligonucleotide
aauaaaguguauacguuggaaugag

SEQ ID NO: 116599 - RNA, 25 nt, Artificial Sequence
  Description of Artificial Sequence: Synthetic oligonucleotide
gucaugccauauguaguugcuguag

SEQ ID NO: 116600 - RNA, 25 nt, Artificial Sequence
  Description of Artificial Sequence: Synthetic oligonucleotide
gauggcaacuagaaccuuugaguua

SEQ ID NO: 116601 - RNA, 25 nt, Artificial Sequence
  Description of Artificial Sequence: Synthetic oligonucleotide
acaagagucuuuagaaguuuucuaa

SEQ ID NO: 116602 - RNA, 25 nt, Artificial Sequence
  Description of Artificial Sequence: Synthetic oligonucleotide
acccugccuagugcaaguuacaaua

SEQ ID NO: 116603 - RNA, 25 nt, Artificial Sequence
  Description of Artificial Sequence: Synthetic oligonucleotide
auuauagcguguucggggagugccc

SEQ ID NO: 116604 - RNA, 25 nt, Artificial Sequence
  Description of Artificial Sequence: Synthetic oligonucleotide
cuccugucugcaggugugucucugu

SEQ ID NO: 116605 - RNA, 25 nt, Artificial Sequence
  Description of Artificial Sequence: Synthetic oligonucleotide
ugccugggggcuuuucuccacaugc

SEQ ID NO: 116606 - RNA, 25 nt, Artificial Sequence
  Description of Artificial Sequence: Synthetic oligonucleotide
cuuaggggugugggucuuccauugg

SEQ ID NO: 116607 - RNA, 25 nt, Artificial Sequence
  Description of Artificial Sequence: Synthetic oligonucleotide
gggcaugauggaccugucuacaggu

SEQ ID NO: 116608 - RNA, 25 nt, Artificial Sequence
  Description of Artificial Sequence: Synthetic oligonucleotide
ugaucucuguugccuuugggucagc

SEQ ID NO: 116609 - RNA, 25 nt, Artificial Sequence
  Description of Artificial Sequence: Synthetic oligonucleotide
cacauuuguuagucuccugggggug

SEQ ID NO: 116610 - RNA, 25 nt, Artificial Sequence
  Description of Artificial Sequence: Synthetic oligonucleotide
gaaaacuuggcuuacaagagaacug

SEQ ID NO: 116611 - RNA, 25 nt, Artificial Sequence
  Description of Artificial Sequence: Synthetic oligonucleotide
ggaaaaaugaugagauguggucccc

SEQ ID NO: 116612 - RNA, 25 nt, Artificial Sequence
  Description of Artificial Sequence: Synthetic oligonucleotide
caaacccuugauugacucuggggag

SEQ ID NO: 116613 - RNA, 25 nt, Artificial Sequence
  Description of Artificial Sequence: Synthetic oligonucleotide
ggggcuuugugaauaggauugcucu

SEQ ID NO: 116614 - RNA, 25 nt, Artificial Sequence
  Description of Artificial Sequence: Synthetic oligonucleotide
ucacauuaaagauaguuacuucaau

SEQ ID NO: 116615 - RNA, 25 nt, Artificial Sequence
  Description of Artificial Sequence: Synthetic oligonucleotide
uuugaaggcuggauuuagggauuuu

SEQ ID NO: 116616 - RNA, 25 nt, Artificial Sequence
  Description of Artificial Sequence: Synthetic oligonucleotide
uuuuuuuuccuuauaacaaagacau

SEQ ID NO: 116617 - RNA, 25 nt, Artificial Sequence
  Description of Artificial Sequence: Synthetic oligonucleotide
ucaccaggauaugaagcuuuuguug

SEQ ID NO: 116618 - RNA, 25 nt, Artificial Sequence
  Description of Artificial Sequence: Synthetic oligonucleotide
gaaaguuggaaaaaaagugaaauua

SEQ ID NO: 116619 - RNA, 25 nt, Artificial Sequence
  Description of Artificial Sequence: Synthetic oligonucleotide
gaaauuaaagacauucccagacaaa

SEQ ID NO: 116620 - RNA, 4704 nt, Homo sapiens
ggagagggagaaggcucucgggcggagagagguccugcccagcuguuggcgaggaguuuccuguuucccccgcagcgcugaguugaaguugagugagucacucgcgcgcacggagcgacgacacccccgcgcgugcacccgcucgggacaggagccggacuccugugcagcuucccucggccgccgggggccuccccgcgccucgccggccuccaggcccccuccuggcuggcgagcgggcgccacaucuggcccgcacaucugcgcugccggcccggcgcgggguccggagagggcgcggcgcggaggcgcagccagggguccgggaaggcgccguccgcugcgcugggggcucggucuaugacgagcagcggggucugccaugggucgggggcugcucaggggccuguggccgcugcacaucguccuguggacgcguaucgccagcacgaucccaccgcacguucagaagucggauguggaaauggaggcccagaaagaugaaaucaucugccccagcuguaauaggacugcccauccacugagacauauuaauaacgacaugauagucacugacaacaacggugcagucaaguuuccacaacuguguaaauuuugugaugugagauuuuccaccugugacaaccagaaauccugcaugagcaacugcagcaucaccuccaucugugagaagccacaggaagucuguguggcuguauggagaaagaaugacgagaacauaacacuagagacaguuugccaugaccccaagcuccccuaccaugacuuuauucuggaagaugcugcuucuccaaagugcauuaugaaggaaaaaaaaaagccuggugagacuuucuucauguguuccuguagcucugaugagugcaaugacaacaucaucuucucagaagaauauaacaccagcaauccugacuuguugcuagucauauuucaagugacaggcaucagccuccugccaccacugggaguugccauaucugucaucaucaucuucuacugcuaccgcguuaaccggcagcagaagcugaguucaaccugggaaaccggcaagacgcggaagcucauggaguucagcgagcacugugccaucauccuggaagaugaccgcucugacaucagcuccacgugugccaacaacaucaaccacaacacagagcugcugcccauugagcuggacacccugguggggaaaggucgcuuugcugaggucuauaaggccaagcugaagcagaacacuucagagcaguuugagacaguggcagucaagaucuuucccuaugaggaguaugccucuuggaagacagagaaggacaucuucucagacaucaaucugaagcaugagaacauacuccaguuccugacggcugaggagcggaagacggaguuggggaaacaauacuggcugaucaccgccuuccacgccaagggcaaccuacaggaguaccugacgcggcaugucaucagcugggaggaccugcgcaagcugggcagcucccucgcccgggggauugcucaccuccacagugaucacacuccaugugggaggcccaagaugcccaucgugcacagggaccucaagagcuccaauauccucgugaagaacgaccuaaccugcugccugugugacuuugggcuuucccugcgucuggacccuacucugucuguggaugaccuggcuaacagugggcaggugggaacugcaagauacauggcuccagaaguccuagaauccaggaugaauuuggagaauguugaguccuucaagcagaccgaugucuacuccauggcucuggugcucugggaaaugacaucucgcuguaaugcagugggagaaguaaaagauuaugagccuccauuugguuccaaggugcgggagcaccccugugucgaaagcaugaaggacaacguguugagagaucgagggcgaccagaaauucccagcuucuggcucaaccaccagggcauccagauggugugugagacguugacugagugcugggaccacgacccagaggcccgucucacagcccaguguguggcagaacgcuucagugagcuggagcaucuggacaggcucucggggaggagcugcucggaggagaagauuccugaagacggcucccuaaacacuaccaaauagcucuucuggggcaggcugggccauguccaaagaggcugccccucucaccaaagaacagaggcagcaggaagcugccccugaacugaugcuuccuggaaaaccaagggggucacuccccucccuguaagcuguggggauaagcagaaacaacagcagcagggagugggugacauagagcauucuaugccuuugacauugucauaggauaagcuguguuagcacuuccucaggaaaugagauugauuuuuacaauagccaauaacauuugcacuuuauuaaugccuguauauaaauaugaauagcuauguuuuauauauauauauauauaucuauauaugucuauagcucuauauauauagccauaccuugaaaagagacaaggaaaaacaucaaauauucccaggaaauugguuuuauuggagaacuccagaaccaagcagagaaggaagggacccaugacagcauuagcauuugacaaucacacaugcagugguucucugacuguaaaacagugaacuuugcaugaggaaagaggcuccaugucucacagccagcuaugaccacauugcacuugcuuuugcaaaauaaucauucccugccuagcacuucucuucuggccauggaacuaaguacaguggcacuguuugaggaccaguguucccgggguuccugugugcccuuauuucuccuggacuuuucauuuaagcuccaagccccaaaucuggggggcuaguuuagaaacucucccucaaccuaguuuagaaacucuaccccaucuuuaauaccuugaauguuuugaaccccacuuuuuaccuucauggguugcagaaaaaucagaacagauguccccauccaugcgauugccccaccaucuacuaaugaaaaauuguucuuuuuuucaucuuuccccugcacuuauguuacuauucucugcucccagccuucauccuuuucuaaaaaggagcaaauucucacucuaggcuuuaucguguuuacuuuuucauuacacuugacuugauuuucuaguuuucuauacaaacaccaauggguuccaucuuucugggcuccugauugcucaagcacaguuuggccugaugaagaggauuucaacuacacaauacuaucauugucaggacuaugaccucaggcacucuaaacauauguuuuguuuggucagcacagcguuucaaaaagugaagccacuuuauaaauauuuggagauuuugcaggaaaaucuggauccccagguaaggauagcagaugguuuucaguuaucuccaguccacguucacaaaaugugaagguguggagacacuuacaaagcugccucacuucucacuguaaacauuagcucuuuccacugccuaccuggaccccagucuaggaauuaaaucugcaccuaaccaaggucccuuguaagaaauguccauucaagcagucauucucuggguauauaauaugauuuugacuaccuuaucugguguuaagauuugaaguuggccuuuuauuggacuaaaggggaacuccuuuaagggucucaguuagcccaaguuucuuuugcuuauauguuaauaguuuuacccucugcauuggagagaggagugcuuuacuccaagaagcuuuccucaugguuaccguucucuccaucaugccagccuucucaaccuuugcagaaauuacuagagaggauuugaaugugggacacaaaggucccauuugcaguuagaaaauuuguguccacaaggacaagaacaaaguaugagcuuuaaaacuccauaggaaacuuguuaaucaacaaagaaguguuaaugcugcaaguaaucucuuuuuuaaaacuuuuugaagcuacuuauuuucagccaaauaggaauauuagagagggacugguagugagaauaucagcucuguuuggaugguggaaggucucauuuuauugagauuuuuaagauacaugcaaagguuuggaaauagaaccucuaggcacccuccucagugugggugggcugagaguuaaagacaguguggcugcaguagcauagaggcgccuagaaauuccacuugcaccguagggcaugcugauaccaucccaauagcuguugcccauugaccucuaguggugaguuucuagaauacugguccauucaugagauauucaagauucaagaguauucucacuucuggguuaucagcauaaacuggaauguagugucagaggauacuguggcuuguuuuguuuauguuuuuuuuucuuauucaagaaaaaagaccaaggaauaacauucuguaguuccuaaaaauacugacuuuuuucacuacuauacauaaagggaaaguuuuauucuuuuauggaacacuucagcuguacucauguauuaaaauaggaaugugaaugcuauauacucuuuuuauaucaaaagucucaagcacuuauuuuuauucuaugcauuguuugucuuuuacauaaauaaaauguuuauuagauugaauaaagcaaaauacucaggugagcauccugccuccuguucccauuccuaguagcuaaa

SEQ ID NO: 116621 - RNA, 4629 nt, Homo sapiens
ggagagggagaaggcucucgggcggagagagguccugcccagcuguuggcgaggaguuuccuguuucccccgcagcgcugaguugaaguugagugagucacucgcgcgcacggagcgacgacacccccgcgcgugcacccgcucgggacaggagccggacuccugugcagcuucccucggccgccgggggccuccccgcgccucgccggccuccaggcccccuccuggcuggcgagcgggcgccacaucuggcccgcacaucugcgcugccggcccggcgcgggguccggagagggcgcggcgcggaggcgcagccagggguccgggaaggcgccguccgcugcgcugggggcucggucuaugacgagcagcggggucugccaugggucgggggcugcucaggggccuguggccgcugcacaucguccuguggacgcguaucgccagcacgaucccaccgcacguucagaagucgguuaauaacgacaugauagucacugacaacaacggugcagucaaguuuccacaacuguguaaauuuugugaugugagauuuuccaccugugacaaccagaaauccugcaugagcaacugcagcaucaccuccaucugugagaagccacaggaagucuguguggcuguauggagaaagaaugacgagaacauaacacuagagacaguuugccaugaccccaagcuccccuaccaugacuuuauucuggaagaugcugcuucuccaaagugcauuaugaaggaaaaaaaaaagccuggugagacuuucuucauguguuccuguagcucugaugagugcaaugacaacaucaucuucucagaagaauauaacaccagcaauccugacuuguugcuagucauauuucaagugacaggcaucagccuccugccaccacugggaguugccauaucugucaucaucaucuucuacugcuaccgcguuaaccggcagcagaagcugaguucaaccugggaaaccggcaagacgcggaagcucauggaguucagcgagcacugugccaucauccuggaagaugaccgcucugacaucagcuccacgugugccaacaacaucaaccacaacacagagcugcugcccauugagcuggacacccugguggggaaaggucgcuuugcugaggucuauaaggccaagcugaagcagaacacuucagagcaguuugagacaguggcagucaagaucuuucccuaugaggaguaugccucuuggaagacagagaaggacaucuucucagacaucaaucugaagcaugagaacauacuccaguuccugacggcugaggagcggaagacggaguuggggaaacaauacuggcugaucaccgccuuccacgccaagggcaaccuacaggaguaccugacgcggcaugucaucagcugggaggaccugcgcaagcugggcagcucccucgcccgggggauugcucaccuccacagugaucacacuccaugugggaggcccaagaugcccaucgugcacagggaccucaagagcuccaauauccucgugaagaacgaccuaaccugcugccugugugacuuugggcuuucccugcgucuggacccuacucugucuguggaugaccuggcuaacagugggcaggugggaacugcaagauacauggcuccagaaguccuagaauccaggaugaauuuggagaauguugaguccuucaagcagaccgaugucuacuccauggcucuggugcucugggaaaugacaucucgcuguaaugcagugggagaaguaaaagauuaugagccuccauuugguuccaaggugcgggagcaccccugugucgaaagcaugaaggacaacguguugagagaucgagggcgaccagaaauucccagcuucuggcucaaccaccagggcauccagauggugugugagacguugacugagugcugggaccacgacccagaggcccgucucacagcccaguguguggcagaacgcuucagugagcuggagcaucuggacaggcucucggggaggagcugcucggaggagaagauuccugaagacggcucccuaaacacuaccaaauagcucuucuggggcaggcugggccauguccaaagaggcugccccucucaccaaagaacagaggcagcaggaagcugccccugaacugaugcuuccuggaaaaccaagggggucacuccccucccuguaagcuguggggauaagcagaaacaacagcagcagggagugggugacauagagcauucuaugccuuugacauugucauaggauaagcuguguuagcacuuccucaggaaaugagauugauuuuuacaauagccaauaacauuugcacuuuauuaaugccuguauauaaauaugaauagcuauguuuuauauauauauauauauaucuauauaugucuauagcucuauauauauagccauaccuugaaaagagacaaggaaaaacaucaaauauucccaggaaauugguuuuauuggagaacuccagaaccaagcagagaaggaagggacccaugacagcauuagcauuugacaaucacacaugcagugguucucugacuguaaaacagugaacuuugcaugaggaaagaggcuccaugucucacagccagcuaugaccacauugcacuugcuuuugcaaaauaaucauucccugccuagcacuucucuucuggccauggaacuaaguacaguggcacuguuugaggaccaguguucccgggguuccugugugcccuuauuucuccuggacuuuucauuuaagcuccaagccccaaaucuggggggcuaguuuagaaacucucccucaaccuaguuuagaaacucuaccccaucuuuaauaccuugaauguuuugaaccccacuuuuuaccuucauggguugcagaaaaaucagaacagauguccccauccaugcgauugccccaccaucuacuaaugaaaaauuguucuuuuuuucaucuuuccccugcacuuauguuacuauucucugcucccagccuucauccuuuucuaaaaaggagcaaauucucacucuaggcuuuaucguguuuacuuuuucauuacacuugacuugauuuucuaguuuucuauacaaacaccaauggguuccaucuuucugggcuccugauugcucaagcacaguuuggccugaugaagaggauuucaacuacacaauacuaucauugucaggacuaugaccucaggcacucuaaacauauguuuuguuuggucagcacagcguuucaaaaagugaagccacuuuauaaauauuuggagauuuugcaggaaaaucuggauccccagguaaggauagcagaugguuuucaguuaucuccaguccacguucacaaaaugugaagguguggagacacuuacaaagcugccucacuucucacuguaaacauuagcucuuuccacugccuaccuggaccccagucuaggaauuaaaucugcaccuaaccaaggucccuuguaagaaauguccauucaagcagucauucucuggguauauaauaugauuuugacuaccuuaucugguguuaagauuugaaguuggccuuuuauuggacuaaaggggaacuccuuuaagggucucaguuagcccaaguuucuuuugcuuauauguuaauaguuuuacccucugcauuggagagaggagugcuuuacuccaagaagcuuuccucaugguuaccguucucuccaucaugccagccuucucaaccuuugcagaaauuacuagagaggauuugaaugugggacacaaaggucccauuugcaguuagaaaauuuguguccacaaggacaagaacaaaguaugagcuuuaaaacuccauaggaaacuuguuaaucaacaaagaaguguuaaugcugcaaguaaucucuuuuuuaaaacuuuuugaagcuacuuauuuucagccaaauaggaauauuagagagggacugguagugagaauaucagcucuguuuggaugguggaaggucucauuuuauugagauuuuuaagauacaugcaaagguuuggaaauagaaccucuaggcacccuccucagugugggugggcugagaguuaaagacaguguggcugcaguagcauagaggcgccuagaaauuccacuugcaccguagggcaugcugauaccaucccaauagcuguugcccauugaccucuaguggugaguuucuagaauacugguccauucaugagauauucaagauucaagaguauucucacuucuggguuaucagcauaaacuggaauguagugucagaggauacuguggcuuguuuuguuuauguuuuuuuuucuuauucaagaaaaaagaccaaggaauaacauucuguaguuccuaaaaauacugacuuuuuucacuacuauacauaaagggaaaguuuuauucuuuuauggaacacuucagcuguacucauguauuaaaauaggaaugugaaugcuauauacucuuuuuauaucaaaagucucaagcacuuauuuuuauucuaugcauuguuugucuuuuacauaaauaaaauguuuauuagauugaauaaagcaaaauacucaggugagcauccugccuccuguucccauuccuaguagcuaaa

SEQ ID NO: 116622 - RNA, 19 nt, Artificial Sequence
  Description of Artificial Sequence: Synthetic oligonucleotide
ggagagggagaaggcucuc

SEQ ID NO: 116623 - RNA, 19 nt, Artificial Sequence
  Description of Artificial Sequence: Synthetic oligonucleotide
cgggcggagagagguccug

SEQ ID NO: 116624 - RNA, 19 nt, Artificial Sequence
  Description of Artificial Sequence: Synthetic oligonucleotide
gcccagcuguuggcgagga

SEQ ID NO: 116625 - RNA, 19 nt, Artificial Sequence
  Description of Artificial Sequence: Synthetic oligonucleotide
aguuuccuguuucccccgc

SEQ ID NO: 116626 - RNA, 19 nt, Artificial Sequence
  Description of Artificial Sequence: Synthetic oligonucleotide
cagcgcugaguugaaguug

SEQ ID NO: 116627 - RNA, 19 nt, Artificial Sequence
  Description of Artificial Sequence: Synthetic oligonucleotide
gagugagucacucgcgcgc

SEQ ID NO: 116628 - RNA, 19 nt, Artificial Sequence
  Description of Artificial Sequence: Synthetic oligonucleotide
cacggagcgacgacacccc

SEQ ID NO: 116629 - RNA, 19 nt, Artificial Sequence
  Description of Artificial Sequence: Synthetic oligonucleotide
ccgcgcgugcacccgcucg

SEQ ID NO: 116630 - RNA, 19 nt, Artificial Sequence
  Description of Artificial Sequence: Synthetic oligonucleotide
gggacaggagccggacucc

SEQ ID NO: 116631 - RNA, 19 nt, Artificial Sequence
  Description of Artificial Sequence: Synthetic oligonucleotide
cugugcagcuucccucggc

SEQ ID NO: 116632 - RNA, 19 nt, Artificial Sequence
  Description of Artificial Sequence: Synthetic oligonucleotide
ccgccgggggccuccccgc

SEQ ID NO: 116633 - RNA, 19 nt, Artificial Sequence
  Description of Artificial Sequence: Synthetic oligonucleotide
cgccucgccggccuccagg

SEQ ID NO: 116634 - RNA, 19 nt, Artificial Sequence
  Description of Artificial Sequence: Synthetic oligonucleotide
gcccccuccuggcuggcga

SEQ ID NO: 116635 - RNA, 19 nt, Artificial Sequence
  Description of Artificial Sequence: Synthetic oligonucleotide
agcgggcgccacaucuggc

SEQ ID NO: 116636 - RNA, 19 nt, Artificial Sequence
  Description of Artificial Sequence: Synthetic oligonucleotide
cccgcacaucugcgcugcc

SEQ ID NO: 116637 - RNA, 19 nt, Artificial Sequence
  Description of Artificial Sequence: Synthetic oligonucleotide
cggcccggcgcgggguccg

SEQ ID NO: 116638 - RNA, 19 nt, Artificial Sequence
  Description of Artificial Sequence: Synthetic oligonucleotide
ggagagggcgcggcgcgga

SEQ ID NO: 116639 - RNA, 19 nt, Artificial Sequence
  Description of Artificial Sequence: Synthetic oligonucleotide
aggcgcagccagggguccg

SEQ ID NO: 116640 - RNA, 19 nt, Artificial Sequence
  Description of Artificial Sequence: Synthetic oligonucleotide
gggaaggcgccguccgcug

SEQ ID NO: 116641 - RNA, 19 nt, Artificial Sequence
  Description of Artificial Sequence: Synthetic oligonucleotide
gcgcugggggcucggucua

SEQ ID NO: 116642 - RNA, 19 nt, Artificial Sequence
  Description of Artificial Sequence: Synthetic oligonucleotide
augacgagcagcggggucu

SEQ ID NO: 116643 - RNA, 19 nt, Artificial Sequence
  Description of Artificial Sequence: Synthetic oligonucleotide
ugccaugggucgggggcug

SEQ ID NO: 116644 - RNA, 19 nt, Artificial Sequence
  Description of Artificial Sequence: Synthetic oligonucleotide
gcucaggggccuguggccg

SEQ ID NO: 116645 - RNA, 19 nt, Artificial Sequence
  Description of Artificial Sequence: Synthetic oligonucleotide
gcugcacaucguccugugg

SEQ ID NO: 116646 - RNA, 19 nt, Artificial Sequence
  Description of Artificial Sequence: Synthetic oligonucleotide
gacgcguaucgccagcacg

SEQ ID NO: 116647 - RNA, 19 nt, Artificial Sequence
  Description of Artificial Sequence: Synthetic oligonucleotide
gaucccaccgcacguucag

SEQ ID NO: 116648 - RNA, 19 nt, Artificial Sequence
  Description of Artificial Sequence: Synthetic oligonucleotide
gaagucggauguggaaaug

SEQ ID NO: 116649 - RNA, 19 nt, Artificial Sequence
  Description of Artificial Sequence: Synthetic oligonucleotide
ggaggcccagaaagaugaa

SEQ ID NO: 116650 - RNA, 19 nt, Artificial Sequence
  Description of Artificial Sequence: Synthetic oligonucleotide
aaucaucugccccagcugu

SEQ ID NO: 116651 - RNA, 19 nt, Artificial Sequence
  Description of Artificial Sequence: Synthetic oligonucleotide
uaauaggacugcccaucca

SEQ ID NO: 116652 - RNA, 19 nt, Artificial Sequence
  Description of Artificial Sequence: Synthetic oligonucleotide
acugagacauauuaauaac

SEQ ID NO: 116653 - RNA, 19 nt, Artificial Sequence
  Description of Artificial Sequence: Synthetic oligonucleotide
cgacaugauagucacugac

SEQ ID NO: 116654 - RNA, 19 nt, Artificial Sequence
  Description of Artificial Sequence: Synthetic oligonucleotide
caacaacggugcagucaag

SEQ ID NO: 116655 - RNA, 19 nt, Artificial Sequence
  Description of Artificial Sequence: Synthetic oligonucleotide
guuuccacaacuguguaaa

SEQ ID NO: 116656 - RNA, 19 nt, Artificial Sequence
  Description of Artificial Sequence: Synthetic oligonucleotide
auuuugugaugugagauuu

SEQ ID NO: 116657 - RNA, 19 nt, Artificial Sequence
  Description of Artificial Sequence: Synthetic oligonucleotide
uuccaccugugacaaccag

SEQ ID NO: 116658 - RNA, 19 nt, Artificial Sequence
  Description of Artificial Sequence: Synthetic oligonucleotide
gaaauccugcaugagcaac

SEQ ID NO: 116659 - RNA, 19 nt, Artificial Sequence
  Description of Artificial Sequence: Synthetic oligonucleotide
cugcagcaucaccuccauc

SEQ ID NO: 116660 - RNA, 19 nt, Artificial Sequence
  Description of Artificial Sequence: Synthetic oligonucleotide
cugugagaagccacaggaa

SEQ ID NO: 116661 - RNA, 19 nt, Artificial Sequence
  Description of Artificial Sequence: Synthetic oligonucleotide
agucuguguggcuguaugg

SEQ ID NO: 116662 - RNA, 19 nt, Artificial Sequence
  Description of Artificial Sequence: Synthetic oligonucleotide
gagaaagaaugacgagaac

SEQ ID NO: 116663 - RNA, 19 nt, Artificial Sequence
  Description of Artificial Sequence: Synthetic oligonucleotide
cauaacacuagagacaguu

SEQ ID NO: 116664 - RNA, 19 nt, Artificial Sequence
  Description of Artificial Sequence: Synthetic oligonucleotide
uugccaugaccccaagcuc

SEQ ID NO: 116665 - RNA, 19 nt, Artificial Sequence
  Description of Artificial Sequence: Synthetic oligonucleotide
ccccuaccaugacuuuauu

SEQ ID NO: 116666 - RNA, 19 nt, Artificial Sequence
  Description of Artificial Sequence: Synthetic oligonucleotide
ucuggaagaugcugcuucu

SEQ ID NO: 116667 - RNA, 19 nt, Artificial Sequence
  Description of Artificial Sequence: Synthetic oligonucleotide
uccaaagugcauuaugaag

SEQ ID NO: 116668 - RNA, 19 nt, Artificial Sequence
  Description of Artificial Sequence: Synthetic oligonucleotide
ugagacuuucuucaugugu

SEQ ID NO: 116669 - RNA, 19 nt, Artificial Sequence
  Description of Artificial Sequence: Synthetic oligonucleotide
uuccuguagcucugaugag

SEQ ID NO: 116670 - RNA, 19 nt, Artificial Sequence
  Description of Artificial Sequence: Synthetic oligonucleotide
gugcaaugacaacaucauc

SEQ ID NO: 116671 - RNA, 19 nt, Artificial Sequence
  Description of Artificial Sequence: Synthetic oligonucleotide
cuucucagaagaauauaac

SEQ ID NO: 116672 - RNA, 19 nt, Artificial Sequence
  Description of Artificial Sequence: Synthetic oligonucleotide
caccagcaauccugacuug

SEQ ID NO: 116673 - RNA, 19 nt, Artificial Sequence
  Description of Artificial Sequence: Synthetic oligonucleotide
guugcuagucauauuucaa

SEQ ID NO: 116674 - RNA, 19 nt, Artificial Sequence
  Description of Artificial Sequence: Synthetic oligonucleotide
agugacaggcaucagccuc

SEQ ID NO: 116675 - RNA, 19 nt, Artificial Sequence
  Description of Artificial Sequence: Synthetic oligonucleotide
ccugccaccacugggaguu

SEQ ID NO: 116676 - RNA, 19 nt, Artificial Sequence
  Description of Artificial Sequence: Synthetic oligonucleotide
ugccauaucugucaucauc

SEQ ID NO: 116677 - RNA, 19 nt, Artificial Sequence
  Description of Artificial Sequence: Synthetic oligonucleotide
caucuucuacugcuaccgc

SEQ ID NO: 116678 - RNA, 19 nt, Artificial Sequence
  Description of Artificial Sequence: Synthetic oligonucleotide
cguuaaccggcagcagaag

SEQ ID NO: 116679 - RNA, 19 nt, Artificial Sequence
  Description of Artificial Sequence: Synthetic oligonucleotide
gcugaguucaaccugggaa

SEQ ID NO: 116680 - RNA, 19 nt, Artificial Sequence
  Description of Artificial Sequence: Synthetic oligonucleotide
aaccggcaagacgcggaag

SEQ ID NO: 116681 - RNA, 19 nt, Artificial Sequence
  Description of Artificial Sequence: Synthetic oligonucleotide
gcucauggaguucagcgag

SEQ ID NO: 116682 - RNA, 19 nt, Artificial Sequence
  Description of Artificial Sequence: Synthetic oligonucleotide
gcacugugccaucauccug

SEQ ID NO: 116683 - RNA, 19 nt, Artificial Sequence
  Description of Artificial Sequence: Synthetic oligonucleotide
ggaagaugaccgcucugac

SEQ ID NO: 116684 - RNA, 19 nt, Artificial Sequence
  Description of Artificial Sequence: Synthetic oligonucleotide
caucagcuccacgugugcc

SEQ ID NO: 116685 - RNA, 19 nt, Artificial Sequence
  Description of Artificial Sequence: Synthetic oligonucleotide
caacaacaucaaccacaac

SEQ ID NO: 116686 - RNA, 19 nt, Artificial Sequence
  Description of Artificial Sequence: Synthetic oligonucleotide
cacagagcugcugcccauu

SEQ ID NO: 116687 - RNA, 19 nt, Artificial Sequence
  Description of Artificial Sequence: Synthetic oligonucleotide
ugagcuggacacccuggug

SEQ ID NO: 116688 - RNA, 19 nt, Artificial Sequence
  Description of Artificial Sequence: Synthetic oligonucleotide
ggggaaaggucgcuuugcu

SEQ ID NO: 116689 - RNA, 19 nt, Artificial Sequence
  Description of Artificial Sequence: Synthetic oligonucleotide
ugaggucuauaaggccaag

SEQ ID NO: 116690 - RNA, 19 nt, Artificial Sequence
  Description of Artificial Sequence: Synthetic oligonucleotide
gcugaagcagaacacuuca

SEQ ID NO: 116691 - RNA, 19 nt, Artificial Sequence
  Description of Artificial Sequence: Synthetic oligonucleotide
agagcaguuugagacagug

SEQ ID NO: 116692 - RNA, 19 nt, Artificial Sequence
  Description of Artificial Sequence: Synthetic oligonucleotide
ggcagucaagaucuuuccc

SEQ ID NO: 116693 - RNA, 19 nt, Artificial Sequence
  Description of Artificial Sequence: Synthetic oligonucleotide
cuaugaggaguaugccucu

SEQ ID NO: 116694 - RNA, 19 nt, Artificial Sequence
  Description of Artificial Sequence: Synthetic oligonucleotide
uuggaagacagagaaggac

SEQ ID NO: 116695 - RNA, 19 nt, Artificial Sequence
  Description of Artificial Sequence: Synthetic oligonucleotide
caucuucucagacaucaau

SEQ ID NO: 116696 - RNA, 19 nt, Artificial Sequence
  Description of Artificial Sequence: Synthetic oligonucleotide
ucugaagcaugagaacaua

SEQ ID NO: 116697 - RNA, 19 nt, Artificial Sequence
  Description of Artificial Sequence: Synthetic oligonucleotide
acuccaguuccugacggcu

SEQ ID NO: 116698 - RNA, 19 nt, Artificial Sequence
  Description of Artificial Sequence: Synthetic oligonucleotide
ugaggagcggaagacggag

SEQ ID NO: 116699 - RNA, 19 nt, Artificial Sequence
  Description of Artificial Sequence: Synthetic oligonucleotide
guuggggaaacaauacugg

SEQ ID NO: 116700 - RNA, 19 nt, Artificial Sequence
  Description of Artificial Sequence: Synthetic oligonucleotide
gcugaucaccgccuuccac

SEQ ID NO: 116701 - RNA, 19 nt, Artificial Sequence
  Description of Artificial Sequence: Synthetic oligonucleotide
cgccaagggcaaccuacag

SEQ ID NO: 116702 - RNA, 19 nt, Artificial Sequence
  Description of Artificial Sequence: Synthetic oligonucleotide
ggaguaccugacgcggcau

SEQ ID NO: 116703 - RNA, 19 nt, Artificial Sequence
  Description of Artificial Sequence: Synthetic oligonucleotide
ugucaucagcugggaggac

SEQ ID NO: 116704 - RNA, 19 nt, Artificial Sequence
  Description of Artificial Sequence: Synthetic oligonucleotide
ccugcgcaagcugggcagc

SEQ ID NO: 116705 - RNA, 19 nt, Artificial Sequence
  Description of Artificial Sequence: Synthetic oligonucleotide
cucccucgcccgggggauu

SEQ ID NO: 116706 - RNA, 19 nt, Artificial Sequence
  Description of Artificial Sequence: Synthetic oligonucleotide
ugcucaccuccacagugau

SEQ ID NO: 116707 - RNA, 19 nt, Artificial Sequence
  Description of Artificial Sequence: Synthetic oligonucleotide
ucacacuccaugugggagg

SEQ ID NO: 116708 - RNA, 19 nt, Artificial Sequence
  Description of Artificial Sequence: Synthetic oligonucleotide
gcccaagaugcccaucgug

SEQ ID NO: 116709 - RNA, 19 nt, Artificial Sequence
  Description of Artificial Sequence: Synthetic oligonucleotide
gcacagggaccucaagagc

SEQ ID NO: 116710 - RNA, 19 nt, Artificial Sequence
  Description of Artificial Sequence: Synthetic oligonucleotide
cuccaauauccucgugaag

SEQ ID NO: 116711 - RNA, 19 nt, Artificial Sequence
  Description of Artificial Sequence: Synthetic oligonucleotide
gaacgaccuaaccugcugc

SEQ ID NO: 116712 - RNA, 19 nt, Artificial Sequence
  Description of Artificial Sequence: Synthetic oligonucleotide
ccugugugacuuugggcuu

SEQ ID NO: 116713 - RNA, 19 nt, Artificial Sequence
  Description of Artificial Sequence: Synthetic oligonucleotide
uucccugcgucuggacccu

SEQ ID NO: 116714 - RNA, 19 nt, Artificial Sequence
  Description of Artificial Sequence: Synthetic oligonucleotide
uacucugucuguggaugac

SEQ ID NO: 116715 - RNA, 19 nt, Artificial Sequence
  Description of Artificial Sequence: Synthetic oligonucleotide
ccuggcuaacagugggcag

SEQ ID NO: 116716 - RNA, 19 nt, Artificial Sequence
  Description of Artificial Sequence: Synthetic oligonucleotide
ggugggaacugcaagauac

SEQ ID NO: 116717 - RNA, 19 nt, Artificial Sequence
  Description of Artificial Sequence: Synthetic oligonucleotide
cauggcuccagaaguccua

SEQ ID NO: 116718 - RNA, 19 nt, Artificial Sequence
  Description of Artificial Sequence: Synthetic oligonucleotide
agaauccaggaugaauuug

SEQ ID NO: 116719 - RNA, 19 nt, Artificial Sequence
  Description of Artificial Sequence: Synthetic oligonucleotide
ggagaauguugaguccuuc

SEQ ID NO: 116720 - RNA, 19 nt, Artificial Sequence
  Description of Artificial Sequence: Synthetic oligonucleotide
caagcagaccgaugucuac

SEQ ID NO: 116721 - RNA, 19 nt, Artificial Sequence
  Description of Artificial Sequence: Synthetic oligonucleotide
cuccauggcucuggugcuc

SEQ ID NO: 116722 - RNA, 19 nt, Artificial Sequence
  Description of Artificial Sequence: Synthetic oligonucleotide
cugggaaaugacaucucgc

SEQ ID NO: 116723 - RNA, 19 nt, Artificial Sequence
  Description of Artificial Sequence: Synthetic oligonucleotide
cuguaaugcagugggagaa

SEQ ID NO: 116724 - RNA, 19 nt, Artificial Sequence
  Description of Artificial Sequence: Synthetic oligonucleotide
aguaaaagauuaugagccu

SEQ ID NO: 116725 - RNA, 19 nt, Artificial Sequence
  Description of Artificial Sequence: Synthetic oligonucleotide
uccauuugguuccaaggug

SEQ ID NO: 116726 - RNA, 19 nt, Artificial Sequence
  Description of Artificial Sequence: Synthetic oligonucleotide
gcgggagcaccccuguguc

SEQ ID NO: 116727 - RNA, 19 nt, Artificial Sequence
  Description of Artificial Sequence: Synthetic oligonucleotide
cgaaagcaugaaggacaac

SEQ ID NO: 116728 - RNA, 19 nt, Artificial Sequence
  Description of Artificial Sequence: Synthetic oligonucleotide
cguguugagagaucgaggg

SEQ ID NO: 116729 - RNA, 19 nt, Artificial Sequence
  Description of Artificial Sequence: Synthetic oligonucleotide
gcgaccagaaauucccagc

SEQ ID NO: 116730 - RNA, 19 nt, Artificial Sequence
  Description of Artificial Sequence: Synthetic oligonucleotide
cuucuggcucaaccaccag

SEQ ID NO: 116731 - RNA, 19 nt, Artificial Sequence
  Description of Artificial Sequence: Synthetic oligonucleotide
gggcauccagauggugugu

SEQ ID NO: 116732 - RNA, 19 nt, Artificial Sequence
  Description of Artificial Sequence: Synthetic oligonucleotide
ugagacguugacugagugc

SEQ ID NO: 116733 - RNA, 19 nt, Artificial Sequence
  Description of Artificial Sequence: Synthetic oligonucleotide
cugggaccacgacccagag

SEQ ID NO: 116734 - RNA, 19 nt, Artificial Sequence
  Description of Artificial Sequence: Synthetic oligonucleotide
ggcccgucucacagcccag

SEQ ID NO: 116735 - RNA, 19 nt, Artificial Sequence
  Description of Artificial Sequence: Synthetic oligonucleotide
guguguggcagaacgcuuc

SEQ ID NO: 116736 - RNA, 19 nt, Artificial Sequence
  Description of Artificial Sequence: Synthetic oligonucleotide
cagugagcuggagcaucug

SEQ ID NO: 116737 - RNA, 19 nt, Artificial Sequence
  Description of Artificial Sequence: Synthetic oligonucleotide
ggacaggcucucggggagg

SEQ ID NO: 116738 - RNA, 19 nt, Artificial Sequence
  Description of Artificial Sequence: Synthetic oligonucleotide
gagcugcucggaggagaag

SEQ ID NO: 116739 - RNA, 19 nt, Artificial Sequence
  Description of Artificial Sequence: Synthetic oligonucleotide
gauuccugaagacggcucc

SEQ ID NO: 116740 - RNA, 19 nt, Artificial Sequence
  Description of Artificial Sequence: Synthetic oligonucleotide
ccuaaacacuaccaaauag

SEQ ID NO: 116741 - RNA, 19 nt, Artificial Sequence
  Description of Artificial Sequence: Synthetic oligonucleotide
gcucuucuggggcaggcug

SEQ ID NO: 116742 - RNA, 19 nt, Artificial Sequence
  Description of Artificial Sequence: Synthetic oligonucleotide
gggccauguccaaagaggc

SEQ ID NO: 116743 - RNA, 19 nt, Artificial Sequence
  Description of Artificial Sequence: Synthetic oligonucleotide
cugccccucucaccaaaga

SEQ ID NO: 116744 - RNA, 19 nt, Artificial Sequence
  Description of Artificial Sequence: Synthetic oligonucleotide
aacagaggcagcaggaagc

SEQ ID NO: 116745 - RNA, 19 nt, Artificial Sequence
  Description of Artificial Sequence: Synthetic oligonucleotide
cugccccugaacugaugcu

SEQ ID NO: 116746 - RNA, 19 nt, Artificial Sequence
  Description of Artificial Sequence: Synthetic oligonucleotide
uuccuggaaaaccaagggg

SEQ ID NO: 116747 - RNA, 19 nt, Artificial Sequence
  Description of Artificial Sequence: Synthetic oligonucleotide
ggucacuccccucccugua

SEQ ID NO: 116748 - RNA, 19 nt, Artificial Sequence
  Description of Artificial Sequence: Synthetic oligonucleotide
aagcuguggggauaagcag

SEQ ID NO: 116749 - RNA, 19 nt, Artificial Sequence
  Description of Artificial Sequence: Synthetic oligonucleotide
gaaacaacagcagcaggga

SEQ ID NO: 116750 - RNA, 19 nt, Artificial Sequence
  Description of Artificial Sequence: Synthetic oligonucleotide
agugggugacauagagcau

SEQ ID NO: 116751 - RNA, 19 nt, Artificial Sequence
  Description of Artificial Sequence: Synthetic oligonucleotide
uucuaugccuuugacauug

SEQ ID NO: 116752 - RNA, 19 nt, Artificial Sequence
  Description of Artificial Sequence: Synthetic oligonucleotide
gucauaggauaagcugugu

SEQ ID NO: 116753 - RNA, 19 nt, Artificial Sequence
  Description of Artificial Sequence: Synthetic oligonucleotide
uuagcacuuccucaggaaa

SEQ ID NO: 116754 - RNA, 19 nt, Artificial Sequence
  Description of Artificial Sequence: Synthetic oligonucleotide
augagauugauuuuuacaa

SEQ ID NO: 116755 - RNA, 19 nt, Artificial Sequence
  Description of Artificial Sequence: Synthetic oligonucleotide
auagccaauaacauuugca

SEQ ID NO: 116756 - RNA, 19 nt, Artificial Sequence
  Description of Artificial Sequence: Synthetic oligonucleotide
acuuuauuaaugccuguau

SEQ ID NO: 116757 - RNA, 19 nt, Artificial Sequence
  Description of Artificial Sequence: Synthetic oligonucleotide
uauaaauaugaauagcuau

SEQ ID NO: 116758 - RNA, 19 nt, Artificial Sequence
  Description of Artificial Sequence: Synthetic oligonucleotide
uguuuuauauauauauaua

SEQ ID NO: 116759 - RNA, 19 nt, Artificial Sequence
  Description of Artificial Sequence: Synthetic oligonucleotide
auauaucuauauaugucua

SEQ ID NO: 116760 - RNA, 19 nt, Artificial Sequence
  Description of Artificial Sequence: Synthetic oligonucleotide
auagcucuauauauauagc

SEQ ID NO: 116761 - RNA, 19 nt, Artificial Sequence
  Description of Artificial Sequence: Synthetic oligonucleotide
ccauaccuugaaaagagac

SEQ ID NO: 116762 - RNA, 19 nt, Artificial Sequence
  Description of Artificial Sequence: Synthetic oligonucleotide
caaggaaaaacaucaaaua

SEQ ID NO: 116763 - RNA, 19 nt, Artificial Sequence
  Description of Artificial Sequence: Synthetic oligonucleotide
auucccaggaaauugguuu

SEQ ID NO: 116764 - RNA, 19 nt, Artificial Sequence
  Description of Artificial Sequence: Synthetic oligonucleotide
uuauuggagaacuccagaa

SEQ ID NO: 116765 - RNA, 19 nt, Artificial Sequence
  Description of Artificial Sequence: Synthetic oligonucleotide
accaagcagagaaggaagg

SEQ ID NO: 116766 - RNA, 19 nt, Artificial Sequence
  Description of Artificial Sequence: Synthetic oligonucleotide
ggacccaugacagcauuag

SEQ ID NO: 116767 - RNA, 19 nt, Artificial Sequence
  Description of Artificial Sequence: Synthetic oligonucleotide
gcauuugacaaucacacau

SEQ ID NO: 116768 - RNA, 19 nt, Artificial Sequence
  Description of Artificial Sequence: Synthetic oligonucleotide
ugcagugguucucugacug

SEQ ID NO: 116769 - RNA, 19 nt, Artificial Sequence
  Description of Artificial Sequence: Synthetic oligonucleotide
guaaaacagugaacuuugc

SEQ ID NO: 116770 - RNA, 19 nt, Artificial Sequence
  Description of Artificial Sequence: Synthetic oligonucleotide
caugaggaaagaggcucca

SEQ ID NO: 116771 - RNA, 19 nt, Artificial Sequence
  Description of Artificial Sequence: Synthetic oligonucleotide
augucucacagccagcuau

SEQ ID NO: 116772 - RNA, 19 nt, Artificial Sequence
  Description of Artificial Sequence: Synthetic oligonucleotide
ugaccacauugcacuugcu

SEQ ID NO: 116773 - RNA, 19 nt, Artificial Sequence
  Description of Artificial Sequence: Synthetic oligonucleotide
uuuugcaaaauaaucauuc

SEQ ID NO: 116774 - RNA, 19 nt, Artificial Sequence
  Description of Artificial Sequence: Synthetic oligonucleotide
cccugccuagcacuucucu

SEQ ID NO: 116775 - RNA, 19 nt, Artificial Sequence
  Description of Artificial Sequence: Synthetic oligonucleotide
uucuggccauggaacuaag

SEQ ID NO: 116776 - RNA, 19 nt, Artificial Sequence
  Description of Artificial Sequence: Synthetic oligonucleotide
guacaguggcacuguuuga

SEQ ID NO: 116777 - RNA, 19 nt, Artificial Sequence
  Description of Artificial Sequence: Synthetic oligonucleotide
aggaccaguguucccgggg

SEQ ID NO: 116778 - RNA, 19 nt, Artificial Sequence
  Description of Artificial Sequence: Synthetic oligonucleotide
guuccugugugcccuuauu

SEQ ID NO: 116779 - RNA, 19 nt, Artificial Sequence
  Description of Artificial Sequence: Synthetic oligonucleotide
uucuccuggacuuuucauu

SEQ ID NO: 116780 - RNA, 19 nt, Artificial Sequence
  Description of Artificial Sequence: Synthetic oligonucleotide
uuaagcuccaagccccaaa

SEQ ID NO: 116781 - RNA, 19 nt, Artificial Sequence
  Description of Artificial Sequence: Synthetic oligonucleotide
aucuggggggcuaguuuag

SEQ ID NO: 116782 - RNA, 19 nt, Artificial Sequence
  Description of Artificial Sequence: Synthetic oligonucleotide
gaaacucucccucaaccua

SEQ ID NO: 116783 - RNA, 19 nt, Artificial Sequence
  Description of Artificial Sequence: Synthetic oligonucleotide
aguuuagaaacucuacccc

SEQ ID NO: 116784 - RNA, 19 nt, Artificial Sequence
  Description of Artificial Sequence: Synthetic oligonucleotide
caucuuuaauaccuugaau

SEQ ID NO: 116785 - RNA, 19 nt, Artificial Sequence
  Description of Artificial Sequence: Synthetic oligonucleotide
uguuuugaaccccacuuuu

SEQ ID NO: 116786 - RNA, 19 nt, Artificial Sequence
  Description of Artificial Sequence: Synthetic oligonucleotide
uuaccuucauggguugcag

SEQ ID NO: 116787 - RNA, 19 nt, Artificial Sequence
  Description of Artificial Sequence: Synthetic oligonucleotide
gaaaaaucagaacagaugu

SEQ ID NO: 116788 - RNA, 19 nt, Artificial Sequence
  Description of Artificial Sequence: Synthetic oligonucleotide
uccccauccaugcgauugc

SEQ ID NO: 116789 - RNA, 19 nt, Artificial Sequence
  Description of Artificial Sequence: Synthetic oligonucleotide
ccccaccaucuacuaauga

SEQ ID NO: 116790 - RNA, 19 nt, Artificial Sequence
  Description of Artificial Sequence: Synthetic oligonucleotide
aaaaauuguucuuuuuuuc

SEQ ID NO: 116791 - RNA, 19 nt, Artificial Sequence
  Description of Artificial Sequence: Synthetic oligonucleotide
caucuuuccccugcacuua

SEQ ID NO: 116792 - RNA, 19 nt, Artificial Sequence
  Description of Artificial Sequence: Synthetic oligonucleotide
auguuacuauucucugcuc

SEQ ID NO: 116793 - RNA, 19 nt, Artificial Sequence
  Description of Artificial Sequence: Synthetic oligonucleotide
cccagccuucauccuuuuc

SEQ ID NO: 116794 - RNA, 19 nt, Artificial Sequence
  Description of Artificial Sequence: Synthetic oligonucleotide
cuaaaaaggagcaaauucu

SEQ ID NO: 116795 - RNA, 19 nt, Artificial Sequence
  Description of Artificial Sequence: Synthetic oligonucleotide
ucacucuaggcuuuaucgu

SEQ ID NO: 116796 - RNA, 19 nt, Artificial Sequence
  Description of Artificial Sequence: Synthetic oligonucleotide
uguuuacuuuuucauuaca

SEQ ID NO: 116797 - RNA, 19 nt, Artificial Sequence
  Description of Artificial Sequence: Synthetic oligonucleotide
acuugacuugauuuucuag

SEQ ID NO: 116798 - RNA, 19 nt, Artificial Sequence
  Description of Artificial Sequence: Synthetic oligonucleotide
guuuucuauacaaacacca

SEQ ID NO: 116799 - RNA, 19 nt, Artificial Sequence
  Description of Artificial Sequence: Synthetic oligonucleotide
aauggguuccaucuuucug

SEQ ID NO: 116800 - RNA, 19 nt, Artificial Sequence
  Description of Artificial Sequence: Synthetic oligonucleotide
gggcuccugauugcucaag

SEQ ID NO: 116801 - RNA, 19 nt, Artificial Sequence
  Description of Artificial Sequence: Synthetic oligonucleotide
gcacaguuuggccugauga

SEQ ID NO: 116802 - RNA, 19 nt, Artificial Sequence
  Description of Artificial Sequence: Synthetic oligonucleotide
aagaggauuucaacuacac

SEQ ID NO: 116803 - RNA, 19 nt, Artificial Sequence
  Description of Artificial Sequence: Synthetic oligonucleotide
caauacuaucauugucagg

SEQ ID NO: 116804 - RNA, 19 nt, Artificial Sequence
  Description of Artificial Sequence: Synthetic oligonucleotide
gacuaugaccucaggcacu

SEQ ID NO: 116805 - RNA, 19 nt, Artificial Sequence
  Description of Artificial Sequence: Synthetic oligonucleotide
ucuaaacauauguuuuguu

SEQ ID NO: 116806 - RNA, 19 nt, Artificial Sequence
  Description of Artificial Sequence: Synthetic oligonucleotide
uuggucagcacagcguuuc

SEQ ID NO: 116807 - RNA, 19 nt, Artificial Sequence
  Description of Artificial Sequence: Synthetic oligonucleotide
caaaaagugaagccacuuu

SEQ ID NO: 116808 - RNA, 19 nt, Artificial Sequence
  Description of Artificial Sequence: Synthetic oligonucleotide
uauaaauauuuggagauuu

SEQ ID NO: 116809 - RNA, 19 nt, Artificial Sequence
  Description of Artificial Sequence: Synthetic oligonucleotide
uugcaggaaaaucuggauc

SEQ ID NO: 116810 - RNA, 19 nt, Artificial Sequence
  Description of Artificial Sequence: Synthetic oligonucleotide
ccccagguaaggauagcag

SEQ ID NO: 116811 - RNA, 19 nt, Artificial Sequence
  Description of Artificial Sequence: Synthetic oligonucleotide
gaugguuuucaguuaucuc

SEQ ID NO: 116812 - RNA, 19 nt, Artificial Sequence
  Description of Artificial Sequence: Synthetic oligonucleotide
ccaguccacguucacaaaa

SEQ ID NO: 116813 - RNA, 19 nt, Artificial Sequence
  Description of Artificial Sequence: Synthetic oligonucleotide
augugaagguguggagaca

SEQ ID NO: 116814 - RNA, 19 nt, Artificial Sequence
  Description of Artificial Sequence: Synthetic oligonucleotide
acuuacaaagcugccucac

SEQ ID NO: 116815 - RNA, 19 nt, Artificial Sequence
  Description of Artificial Sequence: Synthetic oligonucleotide
cuucucacuguaaacauua

SEQ ID NO: 116816 - RNA, 19 nt, Artificial Sequence
  Description of Artificial Sequence: Synthetic oligonucleotide
agcucuuuccacugccuac

SEQ ID NO: 116817 - RNA, 19 nt, Artificial Sequence
  Description of Artificial Sequence: Synthetic oligonucleotide
ccuggaccccagucuagga

SEQ ID NO: 116818 - RNA, 19 nt, Artificial Sequence
  Description of Artificial Sequence: Synthetic oligonucleotide
aauuaaaucugcaccuaac

SEQ ID NO: 116819 - RNA, 19 nt, Artificial Sequence
  Description of Artificial Sequence: Synthetic oligonucleotide
ccaaggucccuuguaagaa

SEQ ID NO: 116820 - RNA, 19 nt, Artificial Sequence
  Description of Artificial Sequence: Synthetic oligonucleotide
aauguccauucaagcaguc

SEQ ID NO: 116821 - RNA, 19 nt, Artificial Sequence
  Description of Artificial Sequence: Synthetic oligonucleotide
cauucucuggguauauaau

SEQ ID NO: 116822 - RNA, 19 nt, Artificial Sequence
  Description of Artificial Sequence: Synthetic oligonucleotide
uaugauuuugacuaccuua

SEQ ID NO: 116823 - RNA, 19 nt, Artificial Sequence
  Description of Artificial Sequence: Synthetic oligonucleotide
aucugguguuaagauuuga

SEQ ID NO: 116824 - RNA, 19 nt, Artificial Sequence
  Description of Artificial Sequence: Synthetic oligonucleotide
aaguuggccuuuuauugga

SEQ ID NO: 116825 - RNA, 19 nt, Artificial Sequence
  Description of Artificial Sequence: Synthetic oligonucleotide
acuaaaggggaacuccuuu

SEQ ID NO: 116826 - RNA, 19 nt, Artificial Sequence
  Description of Artificial Sequence: Synthetic oligonucleotide
uaagggucucaguuagccc

SEQ ID NO: 116827 - RNA, 19 nt, Artificial Sequence
  Description of Artificial Sequence: Synthetic oligonucleotide
caaguuucuuuugcuuaua

SEQ ID NO: 116828 - RNA, 19 nt, Artificial Sequence
  Description of Artificial Sequence: Synthetic oligonucleotide
auguuaauaguuuuacccu

SEQ ID NO: 116829 - RNA, 19 nt, Artificial Sequence
  Description of Artificial Sequence: Synthetic oligonucleotide
ucugcauuggagagaggag

SEQ ID NO: 116830 - RNA, 19 nt, Artificial Sequence
  Description of Artificial Sequence: Synthetic oligonucleotide
gugcuuuacuccaagaagc

SEQ ID NO: 116831 - RNA, 19 nt, Artificial Sequence
  Description of Artificial Sequence: Synthetic oligonucleotide
cuuuccucaugguuaccgu

SEQ ID NO: 116832 - RNA, 19 nt, Artificial Sequence
  Description of Artificial Sequence: Synthetic oligonucleotide
uucucuccaucaugccagc

SEQ ID NO: 116833 - RNA, 19 nt, Artificial Sequence
  Description of Artificial Sequence: Synthetic oligonucleotide
ccuucucaaccuuugcaga

SEQ ID NO: 116834 - RNA, 19 nt, Artificial Sequence
  Description of Artificial Sequence: Synthetic oligonucleotide
aaauuacuagagaggauuu

SEQ ID NO: 116835 - RNA, 19 nt, Artificial Sequence
  Description of Artificial Sequence: Synthetic oligonucleotide
ugaaugugggacacaaagg

SEQ ID NO: 116836 - RNA, 19 nt, Artificial Sequence
  Description of Artificial Sequence: Synthetic oligonucleotide
gucccauuugcaguuagaa

SEQ ID NO: 116837 - RNA, 19 nt, Artificial Sequence
  Description of Artificial Sequence: Synthetic oligonucleotide
aaauuuguguccacaagga

SEQ ID NO: 116838 - RNA, 19 nt, Artificial Sequence
  Description of Artificial Sequence: Synthetic oligonucleotide
acaagaacaaaguaugagc

SEQ ID NO: 116839 - RNA, 19 nt, Artificial Sequence
  Description of Artificial Sequence: Synthetic oligonucleotide
cuuuaaaacuccauaggaa

SEQ ID NO: 116840 - RNA, 19 nt, Artificial Sequence
  Description of Artificial Sequence: Synthetic oligonucleotide
aacuuguuaaucaacaaag

SEQ ID NO: 116841 - RNA, 19 nt, Artificial Sequence
  Description of Artificial Sequence: Synthetic oligonucleotide
gaaguguuaaugcugcaag

SEQ ID NO: 116842 - RNA, 19 nt, Artificial Sequence
  Description of Artificial Sequence: Synthetic oligonucleotide
guaaucucuuuuuuaaaac

SEQ ID NO: 116843 - RNA, 19 nt, Artificial Sequence
  Description of Artificial Sequence: Synthetic oligonucleotide
cuuuuugaagcuacuuauu

SEQ ID NO: 116844 - RNA, 19 nt, Artificial Sequence
  Description of Artificial Sequence: Synthetic oligonucleotide
uuucagccaaauaggaaua

SEQ ID NO: 116845 - RNA, 19 nt, Artificial Sequence
  Description of Artificial Sequence: Synthetic oligonucleotide
auuagagagggacugguag

SEQ ID NO: 116846 - RNA, 19 nt, Artificial Sequence
  Description of Artificial Sequence: Synthetic oligonucleotide
gugagaauaucagcucugu

SEQ ID NO: 116847 - RNA, 19 nt, Artificial Sequence
  Description of Artificial Sequence: Synthetic oligonucleotide
uuuggaugguggaaggucu

SEQ ID NO: 116848 - RNA, 19 nt, Artificial Sequence
  Description of Artificial Sequence: Synthetic oligonucleotide
ucauuuuauugagauuuuu

SEQ ID NO: 116849 - RNA, 19 nt, Artificial Sequence
  Description of Artificial Sequence: Synthetic oligonucleotide
uaagauacaugcaaagguu

SEQ ID NO: 116850 - RNA, 19 nt, Artificial Sequence
  Description of Artificial Sequence: Synthetic oligonucleotide
uuggaaauagaaccucuag

SEQ ID NO: 116851 - RNA, 19 nt, Artificial Sequence
  Description of Artificial Sequence: Synthetic oligonucleotide
ggcacccuccucagugugg

SEQ ID NO: 116852 - RNA, 19 nt, Artificial Sequence
  Description of Artificial Sequence: Synthetic oligonucleotide
ggugggcugagaguuaaag

SEQ ID NO: 116853 - RNA, 19 nt, Artificial Sequence
  Description of Artificial Sequence: Synthetic oligonucleotide
gacaguguggcugcaguag

SEQ ID NO: 116854 - RNA, 19 nt, Artificial Sequence
  Description of Artificial Sequence: Synthetic oligonucleotide
gcauagaggcgccuagaaa

SEQ ID NO: 116855 - RNA, 19 nt, Artificial Sequence
  Description of Artificial Sequence: Synthetic oligonucleotide
auuccacuugcaccguagg

SEQ ID NO: 116856 - RNA, 19 nt, Artificial Sequence
  Description of Artificial Sequence: Synthetic oligonucleotide
ggcaugcugauaccauccc

SEQ ID NO: 116857 - RNA, 19 nt, Artificial Sequence
  Description of Artificial Sequence: Synthetic oligonucleotide
caauagcuguugcccauug

SEQ ID NO: 116858 - RNA, 19 nt, Artificial Sequence
  Description of Artificial Sequence: Synthetic oligonucleotide
gaccucuaguggugaguuu

SEQ ID NO: 116859 - RNA, 19 nt, Artificial Sequence
  Description of Artificial Sequence: Synthetic oligonucleotide
ucuagaauacugguccauu

SEQ ID NO: 116860 - RNA, 19 nt, Artificial Sequence
  Description of Artificial Sequence: Synthetic oligonucleotide
ucaugagauauucaagauu

SEQ ID NO: 116861 - RNA, 19 nt, Artificial Sequence
  Description of Artificial Sequence: Synthetic oligonucleotide
ucaagaguauucucacuuc

SEQ ID NO: 116862 - RNA, 19 nt, Artificial Sequence
  Description of Artificial Sequence: Synthetic oligonucleotide
cuggguuaucagcauaaac

SEQ ID NO: 116863 - RNA, 19 nt, Artificial Sequence
  Description of Artificial Sequence: Synthetic oligonucleotide
cuggaauguagugucagag

SEQ ID NO: 116864 - RNA, 19 nt, Artificial Sequence
  Description of Artificial Sequence: Synthetic oligonucleotide
ggauacuguggcuuguuuu

SEQ ID NO: 116865 - RNA, 19 nt, Artificial Sequence
  Description of Artificial Sequence: Synthetic oligonucleotide
uguuuauguuuuuuuuucu

SEQ ID NO: 116866 - RNA, 19 nt, Artificial Sequence
  Description of Artificial Sequence: Synthetic oligonucleotide
uuauucaagaaaaaagacc

SEQ ID NO: 116867 - RNA, 19 nt, Artificial Sequence
  Description of Artificial Sequence: Synthetic oligonucleotide
caaggaauaacauucugua

SEQ ID NO: 116868 - RNA, 19 nt, Artificial Sequence
  Description of Artificial Sequence: Synthetic oligonucleotide
aguuccuaaaaauacugac

SEQ ID NO: 116869 - RNA, 19 nt, Artificial Sequence
  Description of Artificial Sequence: Synthetic oligonucleotide
cuuuuuucacuacuauaca

SEQ ID NO: 116870 - RNA, 19 nt, Artificial Sequence
  Description of Artificial Sequence: Synthetic oligonucleotide
auaaagggaaaguuuuauu

SEQ ID NO: 116871 - RNA, 19 nt, Artificial Sequence
  Description of Artificial Sequence: Synthetic oligonucleotide
ucuuuuauggaacacuuca

SEQ ID NO: 116872 - RNA, 19 nt, Artificial Sequence
  Description of Artificial Sequence: Synthetic oligonucleotide
agcuguacucauguauuaa

SEQ ID NO: 116873 - RNA, 19 nt, Artificial Sequence
  Description of Artificial Sequence: Synthetic oligonucleotide
aaauaggaaugugaaugcu

SEQ ID NO: 116874 - RNA, 19 nt, Artificial Sequence
  Description of Artificial Sequence: Synthetic oligonucleotide
uauauacucuuuuuauauc

SEQ ID NO: 116875 - RNA, 19 nt, Artificial Sequence
  Description of Artificial Sequence: Synthetic oligonucleotide
caaaagucucaagcacuua

SEQ ID NO: 116876 - RNA, 19 nt, Artificial Sequence
  Description of Artificial Sequence: Synthetic oligonucleotide
auuuuuauucuaugcauug

SEQ ID NO: 116877 - RNA, 19 nt, Artificial Sequence
  Description of Artificial Sequence: Synthetic oligonucleotide
guuugucuuuuacauaaau

SEQ ID NO: 116878 - RNA, 19 nt, Artificial Sequence
  Description of Artificial Sequence: Synthetic oligonucleotide
uaaaauguuuauuagauug

SEQ ID NO: 116879 - RNA, 19 nt, Artificial Sequence
  Description of Artificial Sequence: Synthetic oligonucleotide
gaauaaagcaaaauacuca

SEQ ID NO: 116880 - RNA, 19 nt, Artificial Sequence
  Description of Artificial Sequence: Synthetic oligonucleotide
aggugagcauccugccucc

SEQ ID NO: 116881 - RNA, 19 nt, Artificial Sequence
  Description of Artificial Sequence: Synthetic oligonucleotide
cuguucccauuccuaguag

SEQ ID NO: 116882 - RNA, 19 nt, Artificial Sequence
  Description of Artificial Sequence: Synthetic oligonucleotide
cccauuccuaguagcuaaa

SEQ ID NO: 116883 - RNA, 19 nt, Artificial Sequence
  Description of Artificial Sequence: Synthetic oligonucleotide
gaagucgguuaauaacgac

SEQ ID NO: 116884 - RNA, 19 nt, Artificial Sequence
  Description of Artificial Sequence: Synthetic oligonucleotide
caugauagucacugacaac

SEQ ID NO: 116885 - RNA, 19 nt, Artificial Sequence
  Description of Artificial Sequence: Synthetic oligonucleotide
caacggugcagucaaguuu

SEQ ID NO: 116886 - RNA, 19 nt, Artificial Sequence
  Description of Artificial Sequence: Synthetic oligonucleotide
uccacaacuguguaaauuu

SEQ ID NO: 116887 - RNA, 19 nt, Artificial Sequence
  Description of Artificial Sequence: Synthetic oligonucleotide
uugugaugugagauuuucc

SEQ ID NO: 116888 - RNA, 19 nt, Artificial Sequence
  Description of Artificial Sequence: Synthetic oligonucleotide
caccugugacaaccagaaa

SEQ ID NO: 116889 - RNA, 19 nt, Artificial Sequence
  Description of Artificial Sequence: Synthetic oligonucleotide
auccugcaugagcaacugc

SEQ ID NO: 116890 - RNA, 19 nt, Artificial Sequence
  Description of Artificial Sequence: Synthetic oligonucleotide
cagcaucaccuccaucugu

SEQ ID NO: 116891 - RNA, 19 nt, Artificial Sequence
  Description of Artificial Sequence: Synthetic oligonucleotide
ugagaagccacaggaaguc

SEQ ID NO: 116892 - RNA, 19 nt, Artificial Sequence
  Description of Artificial Sequence: Synthetic oligonucleotide
cuguguggcuguauggaga

SEQ ID NO: 116893 - RNA, 19 nt, Artificial Sequence
  Description of Artificial Sequence: Synthetic oligonucleotide
aaagaaugacgagaacaua

SEQ ID NO: 116894 - RNA, 19 nt, Artificial Sequence
  Description of Artificial Sequence: Synthetic oligonucleotide
aacacuagagacaguuugc

SEQ ID NO: 116895 - RNA, 19 nt, Artificial Sequence
  Description of Artificial Sequence: Synthetic oligonucleotide
ccaugaccccaagcucccc

SEQ ID NO: 116896 - RNA, 19 nt, Artificial Sequence
  Description of Artificial Sequence: Synthetic oligonucleotide
cuaccaugacuuuauucug

SEQ ID NO: 116897 - RNA, 19 nt, Artificial Sequence
  Description of Artificial Sequence: Synthetic oligonucleotide
ggaagaugcugcuucucca

SEQ ID NO: 116898 - RNA, 19 nt, Artificial Sequence
  Description of Artificial Sequence: Synthetic oligonucleotide
aaagugcauuaugaaggaa

SEQ ID NO: 116899 - RNA, 19 nt, Artificial Sequence
  Description of Artificial Sequence: Synthetic oligonucleotide
aaaaaaaaagccuggugag

SEQ ID NO: 116900 - RNA, 19 nt, Artificial Sequence
  Description of Artificial Sequence: Synthetic oligonucleotide
gacuuucuucauguguucc

SEQ ID NO: 116901 - RNA, 19 nt, Artificial Sequence
  Description of Artificial Sequence: Synthetic oligonucleotide
cuguagcucugaugagugc

SEQ ID NO: 116902 - RNA, 19 nt, Artificial Sequence
  Description of Artificial Sequence: Synthetic oligonucleotide
caaugacaacaucaucuuc

SEQ ID NO: 116903 - RNA, 19 nt, Artificial Sequence
  Description of Artificial Sequence: Synthetic oligonucleotide
cucagaagaauauaacacc

SEQ ID NO: 116904 - RNA, 19 nt, Artificial Sequence
  Description of Artificial Sequence: Synthetic oligonucleotide
cagcaauccugacuuguug

SEQ ID NO: 116905 - RNA, 19 nt, Artificial Sequence
  Description of Artificial Sequence: Synthetic oligonucleotide
gcuagucauauuucaagug

SEQ ID NO: 116906 - RNA, 19 nt, Artificial Sequence
  Description of Artificial Sequence: Synthetic oligonucleotide
gacaggcaucagccuccug

SEQ ID NO: 116907 - RNA, 19 nt, Artificial Sequence
  Description of Artificial Sequence: Synthetic oligonucleotide
gccaccacugggaguugcc

SEQ ID NO: 116908 - RNA, 19 nt, Artificial Sequence
  Description of Artificial Sequence: Synthetic oligonucleotide
cauaucugucaucaucauc

SEQ ID NO: 116909 - RNA, 19 nt, Artificial Sequence
  Description of Artificial Sequence: Synthetic oligonucleotide
cuucuacugcuaccgcguu

SEQ ID NO: 116910 - RNA, 19 nt, Artificial Sequence
  Description of Artificial Sequence: Synthetic oligonucleotide
uaaccggcagcagaagcug

SEQ ID NO: 116911 - RNA, 19 nt, Artificial Sequence
  Description of Artificial Sequence: Synthetic oligonucleotide
gaguucaaccugggaaacc

SEQ ID NO: 116912 - RNA, 19 nt, Artificial Sequence
  Description of Artificial Sequence: Synthetic oligonucleotide
cggcaagacgcggaagcuc

SEQ ID NO: 116913 - RNA, 19 nt, Artificial Sequence
  Description of Artificial Sequence: Synthetic oligonucleotide
cauggaguucagcgagcac

SEQ ID NO: 116914 - RNA, 19 nt, Artificial Sequence
  Description of Artificial Sequence: Synthetic oligonucleotide
cugugccaucauccuggaa

SEQ ID NO: 116915 - RNA, 19 nt, Artificial Sequence
  Description of Artificial Sequence: Synthetic oligonucleotide
agaugaccgcucugacauc

SEQ ID NO: 116916 - RNA, 19 nt, Artificial Sequence
  Description of Artificial Sequence: Synthetic oligonucleotide
cagcuccacgugugccaac

SEQ ID NO: 116917 - RNA, 19 nt, Artificial Sequence
  Description of Artificial Sequence: Synthetic oligonucleotide
caacaucaaccacaacaca

SEQ ID NO: 116918 - RNA, 19 nt, Artificial Sequence
  Description of Artificial Sequence: Synthetic oligonucleotide
agagcugcugcccauugag

SEQ ID NO: 116919 - RNA, 19 nt, Artificial Sequence
  Description of Artificial Sequence: Synthetic oligonucleotide
gcuggacacccuggugggg

SEQ ID NO: 116920 - RNA, 19 nt, Artificial Sequence
  Description of Artificial Sequence: Synthetic oligonucleotide
gaaaggucgcuuugcugag

SEQ ID NO: 116921 - RNA, 19 nt, Artificial Sequence
  Description of Artificial Sequence: Synthetic oligonucleotide
ggucuauaaggccaagcug

SEQ ID NO: 116922 - RNA, 19 nt, Artificial Sequence
  Description of Artificial Sequence: Synthetic oligonucleotide
gaagcagaacacuucagag

SEQ ID NO: 116923 - RNA, 19 nt, Artificial Sequence
  Description of Artificial Sequence: Synthetic oligonucleotide
gcaguuugagacaguggca

SEQ ID NO: 116924 - RNA, 19 nt, Artificial Sequence
  Description of Artificial Sequence: Synthetic oligonucleotide
agucaagaucuuucccuau

SEQ ID NO: 116925 - RNA, 19 nt, Artificial Sequence
  Description of Artificial Sequence: Synthetic oligonucleotide
ugaggaguaugccucuugg

SEQ ID NO: 116926 - RNA, 19 nt, Artificial Sequence
  Description of Artificial Sequence: Synthetic oligonucleotide
gaagacagagaaggacauc

SEQ ID NO: 116927 - RNA, 19 nt, Artificial Sequence
  Description of Artificial Sequence: Synthetic oligonucleotide
cuucucagacaucaaucug

SEQ ID NO: 116928 - RNA, 19 nt, Artificial Sequence
  Description of Artificial Sequence: Synthetic oligonucleotide
gaagcaugagaacauacuc

SEQ ID NO: 116929 - RNA, 19 nt, Artificial Sequence
  Description of Artificial Sequence: Synthetic oligonucleotide
ccaguuccugacggcugag

SEQ ID NO: 116930 - RNA, 19 nt, Artificial Sequence
  Description of Artificial Sequence: Synthetic oligonucleotide
ggagcggaagacggaguug

SEQ ID NO: 116931 - RNA, 19 nt, Artificial Sequence
  Description of Artificial Sequence: Synthetic oligonucleotide
ggggaaacaauacuggcug

SEQ ID NO: 116932 - RNA, 19 nt, Artificial Sequence
  Description of Artificial Sequence: Synthetic oligonucleotide
gaucaccgccuuccacgcc

SEQ ID NO: 116933 - RNA, 19 nt, Artificial Sequence
  Description of Artificial Sequence: Synthetic oligonucleotide
caagggcaaccuacaggag

SEQ ID NO: 116934 - RNA, 19 nt, Artificial Sequence
  Description of Artificial Sequence: Synthetic oligonucleotide
guaccugacgcggcauguc

SEQ ID NO: 116935 - RNA, 19 nt, Artificial Sequence
  Description of Artificial Sequence: Synthetic oligonucleotide
caucagcugggaggaccug

SEQ ID NO: 116936 - RNA, 19 nt, Artificial Sequence
  Description of Artificial Sequence: Synthetic oligonucleotide
gcgcaagcugggcagcucc

SEQ ID NO: 116937 - RNA, 19 nt, Artificial Sequence
  Description of Artificial Sequence: Synthetic oligonucleotide
ccucgcccgggggauugcu

SEQ ID NO: 116938 - RNA, 19 nt, Artificial Sequence
  Description of Artificial Sequence: Synthetic oligonucleotide
ucaccuccacagugaucac

SEQ ID NO: 116939 - RNA, 19 nt, Artificial Sequence
  Description of Artificial Sequence: Synthetic oligonucleotide
cacuccaugugggaggccc

SEQ ID NO: 116940 - RNA, 19 nt, Artificial Sequence
  Description of Artificial Sequence: Synthetic oligonucleotide
caagaugcccaucgugcac

SEQ ID NO: 116941 - RNA, 19 nt, Artificial Sequence
  Description of Artificial Sequence: Synthetic oligonucleotide
cagggaccucaagagcucc

SEQ ID NO: 116942 - RNA, 19 nt, Artificial Sequence
  Description of Artificial Sequence: Synthetic oligonucleotide
caauauccucgugaagaac

SEQ ID NO: 116943 - RNA, 19 nt, Artificial Sequence
  Description of Artificial Sequence: Synthetic oligonucleotide
cgaccuaaccugcugccug

SEQ ID NO: 116944 - RNA, 19 nt, Artificial Sequence
  Description of Artificial Sequence: Synthetic oligonucleotide
gugugacuuugggcuuucc

SEQ ID NO: 116945 - RNA, 19 nt, Artificial Sequence
  Description of Artificial Sequence: Synthetic oligonucleotide
ccugcgucuggacccuacu

SEQ ID NO: 116946 - RNA, 19 nt, Artificial Sequence
  Description of Artificial Sequence: Synthetic oligonucleotide
ucugucuguggaugaccug

SEQ ID NO: 116947 - RNA, 19 nt, Artificial Sequence
  Description of Artificial Sequence: Synthetic oligonucleotide
ggcuaacagugggcaggug

SEQ ID NO: 116948 - RNA, 19 nt, Artificial Sequence
  Description of Artificial Sequence: Synthetic oligonucleotide
gggaacugcaagauacaug

SEQ ID NO: 116949 - RNA, 19 nt, Artificial Sequence
  Description of Artificial Sequence: Synthetic oligonucleotide
ggcuccagaaguccuagaa

SEQ ID NO: 116950 - RNA, 19 nt, Artificial Sequence
  Description of Artificial Sequence: Synthetic oligonucleotide
auccaggaugaauuuggag

SEQ ID NO: 116951 - RNA, 19 nt, Artificial Sequence
  Description of Artificial Sequence: Synthetic oligonucleotide
gaauguugaguccuucaag

SEQ ID NO: 116952 - RNA, 19 nt, Artificial Sequence
  Description of Artificial Sequence: Synthetic oligonucleotide
gcagaccgaugucuacucc

SEQ ID NO: 116953 - RNA, 19 nt, Artificial Sequence
  Description of Artificial Sequence: Synthetic oligonucleotide
cauggcucuggugcucugg

SEQ ID NO: 116954 - RNA, 19 nt, Artificial Sequence
  Description of Artificial Sequence: Synthetic oligonucleotide
ggaaaugacaucucgcugu

SEQ ID NO: 116955 - RNA, 19 nt, Artificial Sequence
  Description of Artificial Sequence: Synthetic oligonucleotide
uaaugcagugggagaagua

SEQ ID NO: 116956 - RNA, 19 nt, Artificial Sequence
  Description of Artificial Sequence: Synthetic oligonucleotide
aaaagauuaugagccucca

SEQ ID NO: 116957 - RNA, 19 nt, Artificial Sequence
  Description of Artificial Sequence: Synthetic oligonucleotide
auuugguuccaaggugcgg

SEQ ID NO: 116958 - RNA, 19 nt, Artificial Sequence
  Description of Artificial Sequence: Synthetic oligonucleotide
ggagcaccccugugucgaa

SEQ ID NO: 116959 - RNA, 19 nt, Artificial Sequence
  Description of Artificial Sequence: Synthetic oligonucleotide
aagcaugaaggacaacgug

SEQ ID NO: 116960 - RNA, 19 nt, Artificial Sequence
  Description of Artificial Sequence: Synthetic oligonucleotide
guugagagaucgagggcga

SEQ ID NO: 116961 - RNA, 19 nt, Artificial Sequence
  Description of Artificial Sequence: Synthetic oligonucleotide
accagaaauucccagcuuc

SEQ ID NO: 116962 - RNA, 19 nt, Artificial Sequence
  Description of Artificial Sequence: Synthetic oligonucleotide
cuggcucaaccaccagggc

SEQ ID NO: 116963 - RNA, 19 nt, Artificial Sequence
  Description of Artificial Sequence: Synthetic oligonucleotide
cauccagauggugugugag

SEQ ID NO: 116964 - RNA, 19 nt, Artificial Sequence
  Description of Artificial Sequence: Synthetic oligonucleotide
gacguugacugagugcugg

SEQ ID NO: 116965 - RNA, 19 nt, Artificial Sequence
  Description of Artificial Sequence: Synthetic oligonucleotide
ggaccacgacccagaggcc

SEQ ID NO: 116966 - RNA, 19 nt, Artificial Sequence
  Description of Artificial Sequence: Synthetic oligonucleotide
ccgucucacagcccagugu

SEQ ID NO: 116967 - RNA, 19 nt, Artificial Sequence
  Description of Artificial Sequence: Synthetic oligonucleotide
uguggcagaacgcuucagu

SEQ ID NO: 116968 - RNA, 19 nt, Artificial Sequence
  Description of Artificial Sequence: Synthetic oligonucleotide
ugagcuggagcaucuggac

SEQ ID NO: 116969 - RNA, 19 nt, Artificial Sequence
  Description of Artificial Sequence: Synthetic oligonucleotide
caggcucucggggaggagc

SEQ ID NO: 116970 - RNA, 19 nt, Artificial Sequence
  Description of Artificial Sequence: Synthetic oligonucleotide
cugcucggaggagaagauu

SEQ ID NO: 116971 - RNA, 19 nt, Artificial Sequence
  Description of Artificial Sequence: Synthetic oligonucleotide
uccugaagacggcucccua

SEQ ID NO: 116972 - RNA, 19 nt, Artificial Sequence
  Description of Artificial Sequence: Synthetic oligonucleotide
aaacacuaccaaauagcuc

SEQ ID NO: 116973 - RNA, 19 nt, Artificial Sequence
  Description of Artificial Sequence: Synthetic oligonucleotide
cuucuggggcaggcugggc

SEQ ID NO: 116974 - RNA, 19 nt, Artificial Sequence
  Description of Artificial Sequence: Synthetic oligonucleotide
ccauguccaaagaggcugc

SEQ ID NO: 116975 - RNA, 19 nt, Artificial Sequence
  Description of Artificial Sequence: Synthetic oligonucleotide
ccccucucaccaaagaaca

SEQ ID NO: 116976 - RNA, 19 nt, Artificial Sequence
  Description of Artificial Sequence: Synthetic oligonucleotide
agaggcagcaggaagcugc

SEQ ID NO: 116977 - RNA, 19 nt, Artificial Sequence
  Description of Artificial Sequence: Synthetic oligonucleotide
ccccugaacugaugcuucc

SEQ ID NO: 116978 - RNA, 19 nt, Artificial Sequence
  Description of Artificial Sequence: Synthetic oligonucleotide
cuggaaaaccaaggggguc

SEQ ID NO: 116979 - RNA, 19 nt, Artificial Sequence
  Description of Artificial Sequence: Synthetic oligonucleotide
cacuccccucccuguaagc

SEQ ID NO: 116980 - RNA, 19 nt, Artificial Sequence
  Description of Artificial Sequence: Synthetic oligonucleotide
cuguggggauaagcagaaa

SEQ ID NO: 116981 - RNA, 19 nt, Artificial Sequence
  Description of Artificial Sequence: Synthetic oligonucleotide
acaacagcagcagggagug

SEQ ID NO: 116982 - RNA, 19 nt, Artificial Sequence
  Description of Artificial Sequence: Synthetic oligonucleotide
gggugacauagagcauucu

SEQ ID NO: 116983 - RNA, 19 nt, Artificial Sequence
  Description of Artificial Sequence: Synthetic oligonucleotide
uaugccuuugacauuguca

SEQ ID NO: 116984 - RNA, 19 nt, Artificial Sequence
  Description of Artificial Sequence: Synthetic oligonucleotide
auaggauaagcuguguuag

SEQ ID NO: 116985 - RNA, 19 nt, Artificial Sequence
  Description of Artificial Sequence: Synthetic oligonucleotide
gcacuuccucaggaaauga

SEQ ID NO: 116986 - RNA, 19 nt, Artificial Sequence
  Description of Artificial Sequence: Synthetic oligonucleotide
agauugauuuuuacaauag

SEQ ID NO: 116987 - RNA, 19 nt, Artificial Sequence
  Description of Artificial Sequence: Synthetic oligonucleotide
gccaauaacauuugcacuu

SEQ ID NO: 116988 - RNA, 19 nt, Artificial Sequence
  Description of Artificial Sequence: Synthetic oligonucleotide
uuauuaaugccuguauaua

SEQ ID NO: 116989 - RNA, 19 nt, Artificial Sequence
  Description of Artificial Sequence: Synthetic oligonucleotide
aaauaugaauagcuauguu

SEQ ID NO: 116990 - RNA, 19 nt, Artificial Sequence
  Description of Artificial Sequence: Synthetic oligonucleotide
uuuauauauauauauauau

SEQ ID NO: 116991 - RNA, 19 nt, Artificial Sequence
  Description of Artificial Sequence: Synthetic oligonucleotide
uaucuauauaugucuauag

SEQ ID NO: 116992 - RNA, 19 nt, Artificial Sequence
  Description of Artificial Sequence: Synthetic oligonucleotide
gcucuauauauauagccau

SEQ ID NO: 116993 - RNA, 19 nt, Artificial Sequence
  Description of Artificial Sequence: Synthetic oligonucleotide
uaccuugaaaagagacaag

SEQ ID NO: 116994 - RNA, 19 nt, Artificial Sequence
  Description of Artificial Sequence: Synthetic oligonucleotide
ggaaaaacaucaaauauuc

SEQ ID NO: 116995 - RNA, 19 nt, Artificial Sequence
  Description of Artificial Sequence: Synthetic oligonucleotide
cccaggaaauugguuuuau

SEQ ID NO: 116996 - RNA, 19 nt, Artificial Sequence
  Description of Artificial Sequence: Synthetic oligonucleotide
uuggagaacuccagaacca

SEQ ID NO: 116997 - RNA, 19 nt, Artificial Sequence
  Description of Artificial Sequence: Synthetic oligonucleotide
aagcagagaaggaagggac

SEQ ID NO: 116998 - RNA, 19 nt, Artificial Sequence
  Description of Artificial Sequence: Synthetic oligonucleotide
cccaugacagcauuagcau

SEQ ID NO: 116999 - RNA, 19 nt, Artificial Sequence
  Description of Artificial Sequence: Synthetic oligonucleotide
uuugacaaucacacaugca

SEQ ID NO: 117000 - RNA, 19 nt, Artificial Sequence
  Description of Artificial Sequence: Synthetic oligonucleotide
agugguucucugacuguaa

SEQ ID NO: 117001 - RNA, 19 nt, Artificial Sequence
  Description of Artificial Sequence: Synthetic oligonucleotide
aaacagugaacuuugcaug

SEQ ID NO: 117002 - RNA, 19 nt, Artificial Sequence
  Description of Artificial Sequence: Synthetic oligonucleotide
gaggaaagaggcuccaugu

SEQ ID NO: 117003 - RNA, 19 nt, Artificial Sequence
  Description of Artificial Sequence: Synthetic oligonucleotide
ucucacagccagcuaugac

SEQ ID NO: 117004 - RNA, 19 nt, Artificial Sequence
  Description of Artificial Sequence: Synthetic oligonucleotide
ccacauugcacuugcuuuu

SEQ ID NO: 117005 - RNA, 19 nt, Artificial Sequence
  Description of Artificial Sequence: Synthetic oligonucleotide
ugcaaaauaaucauucccu

SEQ ID NO: 117006 - RNA, 19 nt, Artificial Sequence
  Description of Artificial Sequence: Synthetic oligonucleotide
ugccuagcacuucucuucu

SEQ ID NO: 117007 - RNA, 19 nt, Artificial Sequence
  Description of Artificial Sequence: Synthetic oligonucleotide
uggccauggaacuaaguac

SEQ ID NO: 117008 - RNA, 19 nt, Artificial Sequence
  Description of Artificial Sequence: Synthetic oligonucleotide
caguggcacuguuugagga

SEQ ID NO: 117009 - RNA, 19 nt, Artificial Sequence
  Description of Artificial Sequence: Synthetic oligonucleotide
accaguguucccgggguuc

SEQ ID NO: 117010 - RNA, 19 nt, Artificial Sequence
  Description of Artificial Sequence: Synthetic oligonucleotide
ccugugugcccuuauuucu

SEQ ID NO: 117011 - RNA, 19 nt, Artificial Sequence
  Description of Artificial Sequence: Synthetic oligonucleotide
uccuggacuuuucauuuaa

SEQ ID NO: 117012 - RNA, 19 nt, Artificial Sequence
  Description of Artificial Sequence: Synthetic oligonucleotide
agcuccaagccccaaaucu

SEQ ID NO: 117013 - RNA, 19 nt, Artificial Sequence
  Description of Artificial Sequence: Synthetic oligonucleotide
uggggggcuaguuuagaaa

SEQ ID NO: 117014 - RNA, 19 nt, Artificial Sequence
  Description of Artificial Sequence: Synthetic oligonucleotide
acucucccucaaccuaguu

SEQ ID NO: 117015 - RNA, 19 nt, Artificial Sequence
  Description of Artificial Sequence: Synthetic oligonucleotide
uuagaaacucuaccccauc

SEQ ID NO: 117016 - RNA, 19 nt, Artificial Sequence
  Description of Artificial Sequence: Synthetic oligonucleotide
cuuuaauaccuugaauguu

SEQ ID NO: 117017 - RNA, 19 nt, Artificial Sequence
  Description of Artificial Sequence: Synthetic oligonucleotide
uuugaaccccacuuuuuac

SEQ ID NO: 117018 - RNA, 19 nt, Artificial Sequence
  Description of Artificial Sequence: Synthetic oligonucleotide
ccuucauggguugcagaaa

SEQ ID NO: 117019 - RNA, 19 nt, Artificial Sequence
  Description of Artificial Sequence: Synthetic oligonucleotide
aaaucagaacagauguccc

SEQ ID NO: 117020 - RNA, 19 nt, Artificial Sequence
  Description of Artificial Sequence: Synthetic oligonucleotide
ccauccaugcgauugcccc

SEQ ID NO: 117021 - RNA, 19 nt, Artificial Sequence
  Description of Artificial Sequence: Synthetic oligonucleotide
caccaucuacuaaugaaaa

SEQ ID NO: 117022 - RNA, 19 nt, Artificial Sequence
  Description of Artificial Sequence: Synthetic oligonucleotide
aauuguucuuuuuuucauc

SEQ ID NO: 117023 - RNA, 19 nt, Artificial Sequence
  Description of Artificial Sequence: Synthetic oligonucleotide
cuuuccccugcacuuaugu

SEQ ID NO: 117024 - RNA, 19 nt, Artificial Sequence
  Description of Artificial Sequence: Synthetic oligonucleotide
uuacuauucucugcuccca

SEQ ID NO: 117025 - RNA, 19 nt, Artificial Sequence
  Description of Artificial Sequence: Synthetic oligonucleotide
agccuucauccuuuucuaa

SEQ ID NO: 117026 - RNA, 19 nt, Artificial Sequence
  Description of Artificial Sequence: Synthetic oligonucleotide
aaaaggagcaaauucucac

SEQ ID NO: 117027 - RNA, 19 nt, Artificial Sequence
  Description of Artificial Sequence: Synthetic oligonucleotide
cucuaggcuuuaucguguu

SEQ ID NO: 117028 - RNA, 19 nt, Artificial Sequence
  Description of Artificial Sequence: Synthetic oligonucleotide
uuacuuuuucauuacacuu

SEQ ID NO: 117029 - RNA, 19 nt, Artificial Sequence
  Description of Artificial Sequence: Synthetic oligonucleotide
ugacuugauuuucuaguuu

SEQ ID NO: 117030 - RNA, 19 nt, Artificial Sequence
  Description of Artificial Sequence: Synthetic oligonucleotide
uucuauacaaacaccaaug

SEQ ID NO: 117031 - RNA, 19 nt, Artificial Sequence
  Description of Artificial Sequence: Synthetic oligonucleotide
ggguuccaucuuucugggc

SEQ ID NO: 117032 - RNA, 19 nt, Artificial Sequence
  Description of Artificial Sequence: Synthetic oligonucleotide
cuccugauugcucaagcac

SEQ ID NO: 117033 - RNA, 19 nt, Artificial Sequence
  Description of Artificial Sequence: Synthetic oligonucleotide
caguuuggccugaugaaga

SEQ ID NO: 117034 - RNA, 19 nt, Artificial Sequence
  Description of Artificial Sequence: Synthetic oligonucleotide
aggauuucaacuacacaau

SEQ ID NO: 117035 - RNA, 19 nt, Artificial Sequence
  Description of Artificial Sequence: Synthetic oligonucleotide
uacuaucauugucaggacu

SEQ ID NO: 117036 - RNA, 19 nt, Artificial Sequence
  Description of Artificial Sequence: Synthetic oligonucleotide
uaugaccucaggcacucua

SEQ ID NO: 117037 - RNA, 19 nt, Artificial Sequence
  Description of Artificial Sequence: Synthetic oligonucleotide
aaacauauguuuuguuugg

SEQ ID NO: 117038 - RNA, 19 nt, Artificial Sequence
  Description of Artificial Sequence: Synthetic oligonucleotide
gucagcacagcguuucaaa

SEQ ID NO: 117039 - RNA, 19 nt, Artificial Sequence
  Description of Artificial Sequence: Synthetic oligonucleotide
aaagugaagccacuuuaua

SEQ ID NO: 117040 - RNA, 19 nt, Artificial Sequence
  Description of Artificial Sequence: Synthetic oligonucleotide
aaauauuuggagauuuugc

SEQ ID NO: 117041 - RNA, 19 nt, Artificial Sequence
  Description of Artificial Sequence: Synthetic oligonucleotide
caggaaaaucuggaucccc

SEQ ID NO: 117042 - RNA, 19 nt, Artificial Sequence
  Description of Artificial Sequence: Synthetic oligonucleotide
cagguaaggauagcagaug

SEQ ID NO: 117043 - RNA, 19 nt, Artificial Sequence
  Description of Artificial Sequence: Synthetic oligonucleotide
gguuuucaguuaucuccag

SEQ ID NO: 117044 - RNA, 19 nt, Artificial Sequence
  Description of Artificial Sequence: Synthetic oligonucleotide
guccacguucacaaaaugu

SEQ ID NO: 117045 - RNA, 19 nt, Artificial Sequence
  Description of Artificial Sequence: Synthetic oligonucleotide
ugaagguguggagacacuu

SEQ ID NO: 117046 - RNA, 19 nt, Artificial Sequence
  Description of Artificial Sequence: Synthetic oligonucleotide
uacaaagcugccucacuuc

SEQ ID NO: 117047 - RNA, 19 nt, Artificial Sequence
  Description of Artificial Sequence: Synthetic oligonucleotide
cucacuguaaacauuagcu

SEQ ID NO: 117048 - RNA, 19 nt, Artificial Sequence
  Description of Artificial Sequence: Synthetic oligonucleotide
ucuuuccacugccuaccug

SEQ ID NO: 117049 - RNA, 19 nt, Artificial Sequence
  Description of Artificial Sequence: Synthetic oligonucleotide
ggaccccagucuaggaauu

SEQ ID NO: 117050 - RNA, 19 nt, Artificial Sequence
  Description of Artificial Sequence: Synthetic oligonucleotide
uaaaucugcaccuaaccaa

SEQ ID NO: 117051 - RNA, 19 nt, Artificial Sequence
  Description of Artificial Sequence: Synthetic oligonucleotide
aggucccuuguaagaaaug

SEQ ID NO: 117052 - RNA, 19 nt, Artificial Sequence
  Description of Artificial Sequence: Synthetic oligonucleotide
guccauucaagcagucauu

SEQ ID NO: 117053 - RNA, 19 nt, Artificial Sequence
  Description of Artificial Sequence: Synthetic oligonucleotide
ucucuggguauauaauaug

SEQ ID NO: 117054 - RNA, 19 nt, Artificial Sequence
  Description of Artificial Sequence: Synthetic oligonucleotide
gauuuugacuaccuuaucu

SEQ ID NO: 117055 - RNA, 19 nt, Artificial Sequence
  Description of Artificial Sequence: Synthetic oligonucleotide
ugguguuaagauuugaagu

SEQ ID NO: 117056 - RNA, 19 nt, Artificial Sequence
  Description of Artificial Sequence: Synthetic oligonucleotide
uuggccuuuuauuggacua

SEQ ID NO: 117057 - RNA, 19 nt, Artificial Sequence
  Description of Artificial Sequence: Synthetic oligonucleotide
aaaggggaacuccuuuaag

SEQ ID NO: 117058 - RNA, 19 nt, Artificial Sequence
  Description of Artificial Sequence: Synthetic oligonucleotide
gggucucaguuagcccaag

SEQ ID NO: 117059 - RNA, 19 nt, Artificial Sequence
  Description of Artificial Sequence: Synthetic oligonucleotide
guuucuuuugcuuauaugu

SEQ ID NO: 117060 - RNA, 19 nt, Artificial Sequence
  Description of Artificial Sequence: Synthetic oligonucleotide
uuaauaguuuuacccucug

SEQ ID NO: 117061 - RNA, 19 nt, Artificial Sequence
  Description of Artificial Sequence: Synthetic oligonucleotide
gcauuggagagaggagugc

SEQ ID NO: 117062 - RNA, 19 nt, Artificial Sequence
  Description of Artificial Sequence: Synthetic oligonucleotide
cuuuacuccaagaagcuuu

SEQ ID NO: 117063 - RNA, 19 nt, Artificial Sequence
  Description of Artificial Sequence: Synthetic oligonucleotide
uccucaugguuaccguucu

SEQ ID NO: 117064 - RNA, 19 nt, Artificial Sequence
  Description of Artificial Sequence: Synthetic oligonucleotide
ucuccaucaugccagccuu

SEQ ID NO: 117065 - RNA, 19 nt, Artificial Sequence
  Description of Artificial Sequence: Synthetic oligonucleotide
ucucaaccuuugcagaaau

SEQ ID NO: 117066 - RNA, 19 nt, Artificial Sequence
  Description of Artificial Sequence: Synthetic oligonucleotide
uuacuagagaggauuugaa

SEQ ID NO: 117067 - RNA, 19 nt, Artificial Sequence
  Description of Artificial Sequence: Synthetic oligonucleotide
augugggacacaaaggucc

SEQ ID NO: 117068 - RNA, 19 nt, Artificial Sequence
  Description of Artificial Sequence: Synthetic oligonucleotide
ccauuugcaguuagaaaau

SEQ ID NO: 117069 - RNA, 19 nt, Artificial Sequence
  Description of Artificial Sequence: Synthetic oligonucleotide
uuuguguccacaaggacaa

SEQ ID NO: 117070 - RNA, 19 nt, Artificial Sequence
  Description of Artificial Sequence: Synthetic oligonucleotide
agaacaaaguaugagcuuu

SEQ ID NO: 117071 - RNA, 19 nt, Artificial Sequence
  Description of Artificial Sequence: Synthetic oligonucleotide
uaaaacuccauaggaaacu

SEQ ID NO: 117072 - RNA, 19 nt, Artificial Sequence
  Description of Artificial Sequence: Synthetic oligonucleotide
uuguuaaucaacaaagaag

SEQ ID NO: 117073 - RNA, 19 nt, Artificial Sequence
  Description of Artificial Sequence: Synthetic oligonucleotide
guguuaaugcugcaaguaa

SEQ ID NO: 117074 - RNA, 19 nt, Artificial Sequence
  Description of Artificial Sequence: Synthetic oligonucleotide
aucucuuuuuuaaaacuuu

SEQ ID NO: 117075 - RNA, 19 nt, Artificial Sequence
  Description of Artificial Sequence: Synthetic oligonucleotide
uuugaagcuacuuauuuuc

SEQ ID NO: 117076 - RNA, 19 nt, Artificial Sequence
  Description of Artificial Sequence: Synthetic oligonucleotide
cagccaaauaggaauauua

SEQ ID NO: 117077 - RNA, 19 nt, Artificial Sequence
  Description of Artificial Sequence: Synthetic oligonucleotide
agagagggacugguaguga

SEQ ID NO: 117078 - RNA, 19 nt, Artificial Sequence
  Description of Artificial Sequence: Synthetic oligonucleotide
agaauaucagcucuguuug

SEQ ID NO: 117079 - RNA, 19 nt, Artificial Sequence
  Description of Artificial Sequence: Synthetic oligonucleotide
ggaugguggaaggucucau

SEQ ID NO: 117080 - RNA, 19 nt, Artificial Sequence
  Description of Artificial Sequence: Synthetic oligonucleotide
uuuuauugagauuuuuaag

SEQ ID NO: 117081 - RNA, 19 nt, Artificial Sequence
  Description of Artificial Sequence: Synthetic oligonucleotide
gauacaugcaaagguuugg

SEQ ID NO: 117082 - RNA, 19 nt, Artificial Sequence
  Description of Artificial Sequence: Synthetic oligonucleotide
gaaauagaaccucuaggca

SEQ ID NO: 117083 - RNA, 19 nt, Artificial Sequence
  Description of Artificial Sequence: Synthetic oligonucleotide
acccuccucagugugggug

SEQ ID NO: 117084 - RNA, 19 nt, Artificial Sequence
  Description of Artificial Sequence: Synthetic oligonucleotide
gggcugagaguuaaagaca

SEQ ID NO: 117085 - RNA, 19 nt, Artificial Sequence
  Description of Artificial Sequence: Synthetic oligonucleotide
aguguggcugcaguagcau

SEQ ID NO: 117086 - RNA, 19 nt, Artificial Sequence
  Description of Artificial Sequence: Synthetic oligonucleotide
uagaggcgccuagaaauuc

SEQ ID NO: 117087 - RNA, 19 nt, Artificial Sequence
  Description of Artificial Sequence: Synthetic oligonucleotide
ccacuugcaccguagggca

SEQ ID NO: 117088 - RNA, 19 nt, Artificial Sequence
  Description of Artificial Sequence: Synthetic oligonucleotide
augcugauaccaucccaau

SEQ ID NO: 117089 - RNA, 19 nt, Artificial Sequence
  Description of Artificial Sequence: Synthetic oligonucleotide
uagcuguugcccauugacc

SEQ ID NO: 117090 - RNA, 19 nt, Artificial Sequence
  Description of Artificial Sequence: Synthetic oligonucleotide
cucuaguggugaguuucua

SEQ ID NO: 117091 - RNA, 19 nt, Artificial Sequence
  Description of Artificial Sequence: Synthetic oligonucleotide
agaauacugguccauucau

SEQ ID NO: 117092 - RNA, 19 nt, Artificial Sequence
  Description of Artificial Sequence: Synthetic oligonucleotide
ugagauauucaagauucaa

SEQ ID NO: 117093 - RNA, 19 nt, Artificial Sequence
  Description of Artificial Sequence: Synthetic oligonucleotide
agaguauucucacuucugg

SEQ ID NO: 117094 - RNA, 19 nt, Artificial Sequence
  Description of Artificial Sequence: Synthetic oligonucleotide
gguuaucagcauaaacugg

SEQ ID NO: 117095 - RNA, 19 nt, Artificial Sequence
  Description of Artificial Sequence: Synthetic oligonucleotide
gaauguagugucagaggau

SEQ ID NO: 117096 - RNA, 19 nt, Artificial Sequence
  Description of Artificial Sequence: Synthetic oligonucleotide
uacuguggcuuguuuuguu

SEQ ID NO: 117097 - RNA, 19 nt, Artificial Sequence
  Description of Artificial Sequence: Synthetic oligonucleotide
uuauguuuuuuuuucuuau

SEQ ID NO: 117098 - RNA, 19 nt, Artificial Sequence
  Description of Artificial Sequence: Synthetic oligonucleotide
uucaagaaaaaagaccaag

SEQ ID NO: 117099 - RNA, 19 nt, Artificial Sequence
  Description of Artificial Sequence: Synthetic oligonucleotide
ggaauaacauucuguaguu

SEQ ID NO: 117100 - RNA, 19 nt, Artificial Sequence
  Description of Artificial Sequence: Synthetic oligonucleotide
uccuaaaaauacugacuuu

SEQ ID NO: 117101 - RNA, 19 nt, Artificial Sequence
  Description of Artificial Sequence: Synthetic oligonucleotide
uuuucacuacuauacauaa

SEQ ID NO: 117102 - RNA, 19 nt, Artificial Sequence
  Description of Artificial Sequence: Synthetic oligonucleotide
aagggaaaguuuuauucuu

SEQ ID NO: 117103 - RNA, 19 nt, Artificial Sequence
  Description of Artificial Sequence: Synthetic oligonucleotide
uuuauggaacacuucagcu

SEQ ID NO: 117104 - RNA, 19 nt, Artificial Sequence
  Description of Artificial Sequence: Synthetic oligonucleotide
uguacucauguauuaaaau

SEQ ID NO: 117105 - RNA, 19 nt, Artificial Sequence
  Description of Artificial Sequence: Synthetic oligonucleotide
uaggaaugugaaugcuaua

SEQ ID NO: 117106 - RNA, 19 nt, Artificial Sequence
  Description of Artificial Sequence: Synthetic oligonucleotide
auacucuuuuuauaucaaa

SEQ ID NO: 117107 - RNA, 19 nt, Artificial Sequence
  Description of Artificial Sequence: Synthetic oligonucleotide
aagucucaagcacuuauuu

SEQ ID NO: 117108 - RNA, 19 nt, Artificial Sequence
  Description of Artificial Sequence: Synthetic oligonucleotide
uuuauucuaugcauuguuu

SEQ ID NO: 117109 - RNA, 19 nt, Artificial Sequence
  Description of Artificial Sequence: Synthetic oligonucleotide
ugucuuuuacauaaauaaa

SEQ ID NO: 117110 - RNA, 19 nt, Artificial Sequence
  Description of Artificial Sequence: Synthetic oligonucleotide
aauguuuauuagauugaau

SEQ ID NO: 117111 - RNA, 19 nt, Artificial Sequence
  Description of Artificial Sequence: Synthetic oligonucleotide
uaaagcaaaauacucaggu

SEQ ID NO: 117112 - RNA, 19 nt, Artificial Sequence
  Description of Artificial Sequence: Synthetic oligonucleotide
ugagcauccugccuccugu

SEQ ID NO: 117113 - RNA, 19 nt, Artificial Sequence
  Description of Artificial Sequence: Synthetic oligonucleotide
uucccauuccuaguagcua

SEQ ID NO: 117114 - RNA, 25 nt, Artificial Sequence
  Description of Artificial Sequence: Synthetic oligonucleotide
ggagagggagaaggcucucgggcgg

SEQ ID NO: 117115 - RNA, 25 nt, Artificial Sequence
  Description of Artificial Sequence: Synthetic oligonucleotide
gagagagguccugcccagcuguugg

SEQ ID NO: 117116 - RNA, 25 nt, Artificial Sequence
  Description of Artificial Sequence: Synthetic oligonucleotide
gcgaggaguuuccuguuucccccgc

SEQ ID NO: 117117 - RNA, 25 nt, Artificial Sequence
  Description of Artificial Sequence: Synthetic oligonucleotide
cagcgcugaguugaaguugagugag

SEQ ID NO: 117118 - RNA, 25 nt, Artificial Sequence
  Description of Artificial Sequence: Synthetic oligonucleotide
gucacucgcgcgcacggagcgacga

SEQ ID NO: 117119 - RNA, 25 nt, Artificial Sequence
  Description of Artificial Sequence: Synthetic oligonucleotide
acacccccgcgcgugcacccgcucg

SEQ ID NO: 117120 - RNA, 25 nt, Artificial Sequence
  Description of Artificial Sequence: Synthetic oligonucleotide
gggacaggagccggacuccugugca

SEQ ID NO: 117121 - RNA, 25 nt, Artificial Sequence
  Description of Artificial Sequence: Synthetic oligonucleotide
agcuucccucggccgccgggggccu

SEQ ID NO: 117122 - RNA, 25 nt, Artificial Sequence
  Description of Artificial Sequence: Synthetic oligonucleotide
uccccgcgccucgccggccuccagg

SEQ ID NO: 117123 - RNA, 25 nt, Artificial Sequence
  Description of Artificial Sequence: Synthetic oligonucleotide
gcccccuccuggcuggcgagcgggc

SEQ ID NO: 117124 - RNA, 25 nt, Artificial Sequence
  Description of Artificial Sequence: Synthetic oligonucleotide
cgccacaucuggcccgcacaucugc

SEQ ID NO: 117125 - RNA, 25 nt, Artificial Sequence
  Description of Artificial Sequence: Synthetic oligonucleotide
cgcugccggcccggcgcgggguccg

SEQ ID NO: 117126 - RNA, 25 nt, Artificial Sequence
  Description of Artificial Sequence: Synthetic oligonucleotide
ggagagggcgcggcgcggaggcgca

SEQ ID NO: 117127 - RNA, 25 nt, Artificial Sequence
  Description of Artificial Sequence: Synthetic oligonucleotide
agccagggguccgggaaggcgccgu

SEQ ID NO: 117128 - RNA, 25 nt, Artificial Sequence
  Description of Artificial Sequence: Synthetic oligonucleotide
uccgcugcgcugggggcucggucua

SEQ ID NO: 117129 - RNA, 25 nt, Artificial Sequence
  Description of Artificial Sequence: Synthetic oligonucleotide
augacgagcagcggggucugccaug

SEQ ID NO: 117130 - RNA, 25 nt, Artificial Sequence
  Description of Artificial Sequence: Synthetic oligonucleotide
gggucgggggcugcucaggggccug

SEQ ID NO: 117131 - RNA, 25 nt, Artificial Sequence
  Description of Artificial Sequence: Synthetic oligonucleotide
guggccgcugcacaucguccugugg

SEQ ID NO: 117132 - RNA, 25 nt, Artificial Sequence
  Description of Artificial Sequence: Synthetic oligonucleotide
gacgcguaucgccagcacgauccca

SEQ ID NO: 117133 - RNA, 25 nt, Artificial Sequence
  Description of Artificial Sequence: Synthetic oligonucleotide
accgcacguucagaagucggaugug

SEQ ID NO: 117134 - RNA, 25 nt, Artificial Sequence
  Description of Artificial Sequence: Synthetic oligonucleotide
ggaaauggaggcccagaaagaugaa

SEQ ID NO: 117135 - RNA, 25 nt, Artificial Sequence
  Description of Artificial Sequence: Synthetic oligonucleotide
aaucaucugccccagcuguaauagg

SEQ ID NO: 117136 - RNA, 25 nt, Artificial Sequence
  Description of Artificial Sequence: Synthetic oligonucleotide
gacugcccauccacugagacauauu

SEQ ID NO: 117137 - RNA, 25 nt, Artificial Sequence
  Description of Artificial Sequence: Synthetic oligonucleotide
uaauaacgacaugauagucacugac

SEQ ID NO: 117138 - RNA, 25 nt, Artificial Sequence
  Description of Artificial Sequence: Synthetic oligonucleotide
caacaacggugcagucaaguuucca

SEQ ID NO: 117139 - RNA, 25 nt, Artificial Sequence
  Description of Artificial Sequence: Synthetic oligonucleotide
acaacuguguaaauuuugugaugug

SEQ ID NO: 117140 - RNA, 25 nt, Artificial Sequence
  Description of Artificial Sequence: Synthetic oligonucleotide
gagauuuuccaccugugacaaccag

SEQ ID NO: 117141 - RNA, 25 nt, Artificial Sequence
  Description of Artificial Sequence: Synthetic oligonucleotide
gaaauccugcaugagcaacugcagc

SEQ ID NO: 117142 - RNA, 25 nt, Artificial Sequence
  Description of Artificial Sequence: Synthetic oligonucleotide
caucaccuccaucugugagaagcca

SEQ ID NO: 117143 - RNA, 25 nt, Artificial Sequence
  Description of Artificial Sequence: Synthetic oligonucleotide
acaggaagucuguguggcuguaugg

SEQ ID NO: 117144 - RNA, 25 nt, Artificial Sequence
  Description of Artificial Sequence: Synthetic oligonucleotide
gagaaagaaugacgagaacauaaca

SEQ ID NO: 117145 - RNA, 25 nt, Artificial Sequence
  Description of Artificial Sequence: Synthetic oligonucleotide
acuagagacaguuugccaugacccc

SEQ ID NO: 117146 - RNA, 25 nt, Artificial Sequence
  Description of Artificial Sequence: Synthetic oligonucleotide
caagcuccccuaccaugacuuuauu

SEQ ID NO: 117147 - RNA, 25 nt, Artificial Sequence
  Description of Artificial Sequence: Synthetic oligonucleotide
ucuggaagaugcugcuucuccaaag

SEQ ID NO: 117148 - RNA, 25 nt, Artificial Sequence
  Description of Artificial Sequence: Synthetic oligonucleotide
gccuggugagacuuucuucaugugu

SEQ ID NO: 117149 - RNA, 25 nt, Artificial Sequence
  Description of Artificial Sequence: Synthetic oligonucleotide
uuccuguagcucugaugagugcaau

SEQ ID NO: 117150 - RNA, 25 nt, Artificial Sequence
  Description of Artificial Sequence: Synthetic oligonucleotide
ugacaacaucaucuucucagaagaa

SEQ ID NO: 117151 - RNA, 25 nt, Artificial Sequence
  Description of Artificial Sequence: Synthetic oligonucleotide
auauaacaccagcaauccugacuug

SEQ ID NO: 117152 - RNA, 25 nt, Artificial Sequence
  Description of Artificial Sequence: Synthetic oligonucleotide
guugcuagucauauuucaagugaca

SEQ ID NO: 117153 - RNA, 25 nt, Artificial Sequence
  Description of Artificial Sequence: Synthetic oligonucleotide
aggcaucagccuccugccaccacug

SEQ ID NO: 117154 - RNA, 25 nt, Artificial Sequence
  Description of Artificial Sequence: Synthetic oligonucleotide
gggaguugccauaucugucaucauc

SEQ ID NO: 117155 - RNA, 25 nt, Artificial Sequence
  Description of Artificial Sequence: Synthetic oligonucleotide
caucuucuacugcuaccgcguuaac

SEQ ID NO: 117156 - RNA, 25 nt, Artificial Sequence
  Description of Artificial Sequence: Synthetic oligonucleotide
ccggcagcagaagcugaguucaacc

SEQ ID NO: 117157 - RNA, 25 nt, Artificial Sequence
  Description of Artificial Sequence: Synthetic oligonucleotide
cugggaaaccggcaagacgcggaag

SEQ ID NO: 117158 - RNA, 25 nt, Artificial Sequence
  Description of Artificial Sequence: Synthetic oligonucleotide
gcucauggaguucagcgagcacugu

SEQ ID NO: 117159 - RNA, 25 nt, Artificial Sequence
  Description of Artificial Sequence: Synthetic oligonucleotide
ugccaucauccuggaagaugaccgc

SEQ ID NO: 117160 - RNA, 25 nt, Artificial Sequence
  Description of Artificial Sequence: Synthetic oligonucleotide
cucugacaucagcuccacgugugcc

SEQ ID NO: 117161 - RNA, 25 nt, Artificial Sequence
  Description of Artificial Sequence: Synthetic oligonucleotide
caacaacaucaaccacaacacagag

SEQ ID NO: 117162 - RNA, 25 nt, Artificial Sequence
  Description of Artificial Sequence: Synthetic oligonucleotide
gcugcugcccauugagcuggacacc

SEQ ID NO: 117163 - RNA, 25 nt, Artificial Sequence
  Description of Artificial Sequence: Synthetic oligonucleotide
ccugguggggaaaggucgcuuugcu

SEQ ID NO: 117164 - RNA, 25 nt, Artificial Sequence
  Description of Artificial Sequence: Synthetic oligonucleotide
ugaggucuauaaggccaagcugaag

SEQ ID NO: 117165 - RNA, 25 nt, Artificial Sequence
  Description of Artificial Sequence: Synthetic oligonucleotide
gcagaacacuucagagcaguuugag

SEQ ID NO: 117166 - RNA, 25 nt, Artificial Sequence
  Description of Artificial Sequence: Synthetic oligonucleotide
gacaguggcagucaagaucuuuccc

SEQ ID NO: 117167 - RNA, 25 nt, Artificial Sequence
  Description of Artificial Sequence: Synthetic oligonucleotide
cuaugaggaguaugccucuuggaag

SEQ ID NO: 117168 - RNA, 25 nt, Artificial Sequence
  Description of Artificial Sequence: Synthetic oligonucleotide
gacagagaaggacaucuucucagac

SEQ ID NO: 117169 - RNA, 25 nt, Artificial Sequence
  Description of Artificial Sequence: Synthetic oligonucleotide
caucaaucugaagcaugagaacaua

SEQ ID NO: 117170 - RNA, 25 nt, Artificial Sequence
  Description of Artificial Sequence: Synthetic oligonucleotide
acuccaguuccugacggcugaggag

SEQ ID NO: 117171 - RNA, 25 nt, Artificial Sequence
  Description of Artificial Sequence: Synthetic oligonucleotide
gcggaagacggaguuggggaaacaa

SEQ ID NO: 117172 - RNA, 25 nt, Artificial Sequence
  Description of Artificial Sequence: Synthetic oligonucleotide
auacuggcugaucaccgccuuccac

SEQ ID NO: 117173 - RNA, 25 nt, Artificial Sequence
  Description of Artificial Sequence: Synthetic oligonucleotide
cgccaagggcaaccuacaggaguac

SEQ ID NO: 117174 - RNA, 25 nt, Artificial Sequence
  Description of Artificial Sequence: Synthetic oligonucleotide
ccugacgcggcaugucaucagcugg

SEQ ID NO: 117175 - RNA, 25 nt, Artificial Sequence
  Description of Artificial Sequence: Synthetic oligonucleotide
ggaggaccugcgcaagcugggcagc

SEQ ID NO: 117176 - RNA, 25 nt, Artificial Sequence
  Description of Artificial Sequence: Synthetic oligonucleotide
cucccucgcccgggggauugcucac

SEQ ID NO: 117177 - RNA, 25 nt, Artificial Sequence
  Description of Artificial Sequence: Synthetic oligonucleotide
ccuccacagugaucacacuccaugu

SEQ ID NO: 117178 - RNA, 25 nt, Artificial Sequence
  Description of Artificial Sequence: Synthetic oligonucleotide
ugggaggcccaagaugcccaucgug

SEQ ID NO: 117179 - RNA, 25 nt, Artificial Sequence
  Description of Artificial Sequence: Synthetic oligonucleotide
gcacagggaccucaagagcuccaau

SEQ ID NO: 117180 - RNA, 25 nt, Artificial Sequence
  Description of Artificial Sequence: Synthetic oligonucleotide
uauccucgugaagaacgaccuaacc

SEQ ID NO: 117181 - RNA, 25 nt, Artificial Sequence
  Description of Artificial Sequence: Synthetic oligonucleotide
cugcugccugugugacuuugggcuu

SEQ ID NO: 117182 - RNA, 25 nt, Artificial Sequence
  Description of Artificial Sequence: Synthetic oligonucleotide
uucccugcgucuggacccuacucug

SEQ ID NO: 117183 - RNA, 25 nt, Artificial Sequence
  Description of Artificial Sequence: Synthetic oligonucleotide
gucuguggaugaccuggcuaacagu

SEQ ID NO: 117184 - RNA, 25 nt, Artificial Sequence
  Description of Artificial Sequence: Synthetic oligonucleotide
ugggcaggugggaacugcaagauac

SEQ ID NO: 117185 - RNA, 25 nt, Artificial Sequence
  Description of Artificial Sequence: Synthetic oligonucleotide
cauggcuccagaaguccuagaaucc

SEQ ID NO: 117186 - RNA, 25 nt, Artificial Sequence
  Description of Artificial Sequence: Synthetic oligonucleotide
caggaugaauuuggagaauguugag

SEQ ID NO: 117187 - RNA, 25 nt, Artificial Sequence
  Description of Artificial Sequence: Synthetic oligonucleotide
guccuucaagcagaccgaugucuac

SEQ ID NO: 117188 - RNA, 25 nt, Artificial Sequence
  Description of Artificial Sequence: Synthetic oligonucleotide
cuccauggcucuggugcucugggaa

SEQ ID NO: 117189 - RNA, 25 nt, Artificial Sequence
  Description of Artificial Sequence: Synthetic oligonucleotide
aaugacaucucgcuguaaugcagug

SEQ ID NO: 117190 - RNA, 25 nt, Artificial Sequence
  Description of Artificial Sequence: Synthetic oligonucleotide
gggagaaguaaaagauuaugagccu

SEQ ID NO: 117191 - RNA, 25 nt, Artificial Sequence
  Description of Artificial Sequence: Synthetic oligonucleotide
uccauuugguuccaaggugcgggag

SEQ ID NO: 117192 - RNA, 25 nt, Artificial Sequence
  Description of Artificial Sequence: Synthetic oligonucleotide
gcaccccugugucgaaagcaugaag

SEQ ID NO: 117193 - RNA, 25 nt, Artificial Sequence
  Description of Artificial Sequence: Synthetic oligonucleotide
ggacaacguguugagagaucgaggg

SEQ ID NO: 117194 - RNA, 25 nt, Artificial Sequence
  Description of Artificial Sequence: Synthetic oligonucleotide
gcgaccagaaauucccagcuucugg

SEQ ID NO: 117195 - RNA, 25 nt, Artificial Sequence
  Description of Artificial Sequence: Synthetic oligonucleotide
gcucaaccaccagggcauccagaug

SEQ ID NO: 117196 - RNA, 25 nt, Artificial Sequence
  Description of Artificial Sequence: Synthetic oligonucleotide
ggugugugagacguugacugagugc

SEQ ID NO: 117197 - RNA, 25 nt, Artificial Sequence
  Description of Artificial Sequence: Synthetic oligonucleotide
cugggaccacgacccagaggcccgu

SEQ ID NO: 117198 - RNA, 25 nt, Artificial Sequence
  Description of Artificial Sequence: Synthetic oligonucleotide
ucucacagcccaguguguggcagaa

SEQ ID NO: 117199 - RNA, 25 nt, Artificial Sequence
  Description of Artificial Sequence: Synthetic oligonucleotide
acgcuucagugagcuggagcaucug

SEQ ID NO: 117200 - RNA, 25 nt, Artificial Sequence
  Description of Artificial Sequence: Synthetic oligonucleotide
ggacaggcucucggggaggagcugc

SEQ ID NO: 117201 - RNA, 25 nt, Artificial Sequence
  Description of Artificial Sequence: Synthetic oligonucleotide
cucggaggagaagauuccugaagac

SEQ ID NO: 117202 - RNA, 25 nt, Artificial Sequence
  Description of Artificial Sequence: Synthetic oligonucleotide
cggcucccuaaacacuaccaaauag

SEQ ID NO: 117203 - RNA, 25 nt, Artificial Sequence
  Description of Artificial Sequence: Synthetic oligonucleotide
gcucuucuggggcaggcugggccau

SEQ ID NO: 117204 - RNA, 25 nt, Artificial Sequence
  Description of Artificial Sequence: Synthetic oligonucleotide
uguccaaagaggcugccccucucac

SEQ ID NO: 117205 - RNA, 25 nt, Artificial Sequence
  Description of Artificial Sequence: Synthetic oligonucleotide
ccaaagaacagaggcagcaggaagc

SEQ ID NO: 117206 - RNA, 25 nt, Artificial Sequence
  Description of Artificial Sequence: Synthetic oligonucleotide
cugccccugaacugaugcuuccugg

SEQ ID NO: 117207 - RNA, 25 nt, Artificial Sequence
  Description of Artificial Sequence: Synthetic oligonucleotide
gaaaaccaagggggucacuccccuc

SEQ ID NO: 117208 - RNA, 25 nt, Artificial Sequence
  Description of Artificial Sequence: Synthetic oligonucleotide
cccuguaagcuguggggauaagcag

SEQ ID NO: 117209 - RNA, 25 nt, Artificial Sequence
  Description of Artificial Sequence: Synthetic oligonucleotide
gaaacaacagcagcagggagugggu

SEQ ID NO: 117210 - RNA, 25 nt, Artificial Sequence
  Description of Artificial Sequence: Synthetic oligonucleotide
ugacauagagcauucuaugccuuug

SEQ ID NO: 117211 - RNA, 25 nt, Artificial Sequence
  Description of Artificial Sequence: Synthetic oligonucleotide
gacauugucauaggauaagcugugu

SEQ ID NO: 117212 - RNA, 25 nt, Artificial Sequence
  Description of Artificial Sequence: Synthetic oligonucleotide
uuagcacuuccucaggaaaugagau

SEQ ID NO: 117213 - RNA, 25 nt, Artificial Sequence
  Description of Artificial Sequence: Synthetic oligonucleotide
uugauuuuuacaauagccaauaaca

SEQ ID NO: 117214 - RNA, 25 nt, Artificial Sequence
  Description of Artificial Sequence: Synthetic oligonucleotide
auuugcacuuuauuaaugccuguau

SEQ ID NO: 117215 - RNA, 25 nt, Artificial Sequence
  Description of Artificial Sequence: Synthetic oligonucleotide
uauaaauaugaauagcuauguuuua

SEQ ID NO: 117216 - RNA, 25 nt, Artificial Sequence
  Description of Artificial Sequence: Synthetic oligonucleotide
auauauauauauauauaucuauaua

SEQ ID NO: 117217 - RNA, 25 nt, Artificial Sequence
  Description of Artificial Sequence: Synthetic oligonucleotide
augucuauagcucuauauauauagc

SEQ ID NO: 117218 - RNA, 25 nt, Artificial Sequence
  Description of Artificial Sequence: Synthetic oligonucleotide
ccauaccuugaaaagagacaaggaa

SEQ ID NO: 117219 - RNA, 25 nt, Artificial Sequence
  Description of Artificial Sequence: Synthetic oligonucleotide
aaaacaucaaauauucccaggaaau

SEQ ID NO: 117220 - RNA, 25 nt, Artificial Sequence
  Description of Artificial Sequence: Synthetic oligonucleotide
uugguuuuauuggagaacuccagaa

SEQ ID NO: 117221 - RNA, 25 nt, Artificial Sequence
  Description of Artificial Sequence: Synthetic oligonucleotide
accaagcagagaaggaagggaccca

SEQ ID NO: 117222 - RNA, 25 nt, Artificial Sequence
  Description of Artificial Sequence: Synthetic oligonucleotide
augacagcauuagcauuugacaauc

SEQ ID NO: 117223 - RNA, 25 nt, Artificial Sequence
  Description of Artificial Sequence: Synthetic oligonucleotide
cacacaugcagugguucucugacug

SEQ ID NO: 117224 - RNA, 25 nt, Artificial Sequence
  Description of Artificial Sequence: Synthetic oligonucleotide
guaaaacagugaacuuugcaugagg

SEQ ID NO: 117225 - RNA, 25 nt, Artificial Sequence
  Description of Artificial Sequence: Synthetic oligonucleotide
gaaagaggcuccaugucucacagcc

SEQ ID NO: 117226 - RNA, 25 nt, Artificial Sequence
  Description of Artificial Sequence: Synthetic oligonucleotide
cagcuaugaccacauugcacuugcu

SEQ ID NO: 117227 - RNA, 25 nt, Artificial Sequence
  Description of Artificial Sequence: Synthetic oligonucleotide
uuuugcaaaauaaucauucccugcc

SEQ ID NO: 117228 - RNA, 25 nt, Artificial Sequence
  Description of Artificial Sequence: Synthetic oligonucleotide
cuagcacuucucuucuggccaugga

SEQ ID NO: 117229 - RNA, 25 nt, Artificial Sequence
  Description of Artificial Sequence: Synthetic oligonucleotide
aacuaaguacaguggcacuguuuga

SEQ ID NO: 117230 - RNA, 25 nt, Artificial Sequence
  Description of Artificial Sequence: Synthetic oligonucleotide
aggaccaguguucccgggguuccug

SEQ ID NO: 117231 - RNA, 25 nt, Artificial Sequence
  Description of Artificial Sequence: Synthetic oligonucleotide
gugugcccuuauuucuccuggacuu

SEQ ID NO: 117232 - RNA, 25 nt, Artificial Sequence
  Description of Artificial Sequence: Synthetic oligonucleotide
uuucauuuaagcuccaagccccaaa

SEQ ID NO: 117233 - RNA, 25 nt, Artificial Sequence
  Description of Artificial Sequence: Synthetic oligonucleotide
aucuggggggcuaguuuagaaacuc

SEQ ID NO: 117234 - RNA, 25 nt, Artificial Sequence
  Description of Artificial Sequence: Synthetic oligonucleotide
cucccucaaccuaguuuagaaacuc

SEQ ID NO: 117235 - RNA, 25 nt, Artificial Sequence
  Description of Artificial Sequence: Synthetic oligonucleotide
cuaccccaucuuuaauaccuugaau

SEQ ID NO: 117236 - RNA, 25 nt, Artificial Sequence
  Description of Artificial Sequence: Synthetic oligonucleotide
uguuuugaaccccacuuuuuaccuu

SEQ ID NO: 117237 - RNA, 25 nt, Artificial Sequence
  Description of Artificial Sequence: Synthetic oligonucleotide
ucauggguugcagaaaaaucagaac

SEQ ID NO: 117238 - RNA, 25 nt, Artificial Sequence
  Description of Artificial Sequence: Synthetic oligonucleotide
cagauguccccauccaugcgauugc

SEQ ID NO: 117239 - RNA, 25 nt, Artificial Sequence
  Description of Artificial Sequence: Synthetic oligonucleotide
ccccaccaucuacuaaugaaaaauu

SEQ ID NO: 117240 - RNA, 25 nt, Artificial Sequence
  Description of Artificial Sequence: Synthetic oligonucleotide
uguucuuuuuuucaucuuuccccug

SEQ ID NO: 117241 - RNA, 25 nt, Artificial Sequence
  Description of Artificial Sequence: Synthetic oligonucleotide
gcacuuauguuacuauucucugcuc

SEQ ID NO: 117242 - RNA, 25 nt, Artificial Sequence
  Description of Artificial Sequence: Synthetic oligonucleotide
cccagccuucauccuuuucuaaaaa

SEQ ID NO: 117243 - RNA, 25 nt, Artificial Sequence
  Description of Artificial Sequence: Synthetic oligonucleotide
aggagcaaauucucacucuaggcuu

SEQ ID NO: 117244 - RNA, 25 nt, Artificial Sequence
  Description of Artificial Sequence: Synthetic oligonucleotide
uuaucguguuuacuuuuucauuaca

SEQ ID NO: 117245 - RNA, 25 nt, Artificial Sequence
  Description of Artificial Sequence: Synthetic oligonucleotide
acuugacuugauuuucuaguuuucu

SEQ ID NO: 117246 - RNA, 25 nt, Artificial Sequence
  Description of Artificial Sequence: Synthetic oligonucleotide
uauacaaacaccaauggguuccauc

SEQ ID NO: 117247 - RNA, 25 nt, Artificial Sequence
  Description of Artificial Sequence: Synthetic oligonucleotide
cuuucugggcuccugauugcucaag

SEQ ID NO: 117248 - RNA, 25 nt, Artificial Sequence
  Description of Artificial Sequence: Synthetic oligonucleotide
gcacaguuuggccugaugaagagga

SEQ ID NO: 117249 - RNA, 25 nt, Artificial Sequence
  Description of Artificial Sequence: Synthetic oligonucleotide
auuucaacuacacaauacuaucauu

SEQ ID NO: 117250 - RNA, 25 nt, Artificial Sequence
  Description of Artificial Sequence: Synthetic oligonucleotide
ugucaggacuaugaccucaggcacu

SEQ ID NO: 117251 - RNA, 25 nt, Artificial Sequence
  Description of Artificial Sequence: Synthetic oligonucleotide
ucuaaacauauguuuuguuugguca

SEQ ID NO: 117252 - RNA, 25 nt, Artificial Sequence
  Description of Artificial Sequence: Synthetic oligonucleotide
agcacagcguuucaaaaagugaagc

SEQ ID NO: 117253 - RNA, 25 nt, Artificial Sequence
  Description of Artificial Sequence: Synthetic oligonucleotide
ccacuuuauaaauauuuggagauuu

SEQ ID NO: 117254 - RNA, 25 nt, Artificial Sequence
  Description of Artificial Sequence: Synthetic oligonucleotide
uugcaggaaaaucuggauccccagg

SEQ ID NO: 117255 - RNA, 25 nt, Artificial Sequence
  Description of Artificial Sequence: Synthetic oligonucleotide
guaaggauagcagaugguuuucagu

SEQ ID NO: 117256 - RNA, 25 nt, Artificial Sequence
  Description of Artificial Sequence: Synthetic oligonucleotide
uuaucuccaguccacguucacaaaa

SEQ ID NO: 117257 - RNA, 25 nt, Artificial Sequence
  Description of Artificial Sequence: Synthetic oligonucleotide
augugaagguguggagacacuuaca

SEQ ID NO: 117258 - RNA, 25 nt, Artificial Sequence
  Description of Artificial Sequence: Synthetic oligonucleotide
aaagcugccucacuucucacuguaa

SEQ ID NO: 117259 - RNA, 25 nt, Artificial Sequence
  Description of Artificial Sequence: Synthetic oligonucleotide
aacauuagcucuuuccacugccuac

SEQ ID NO: 117260 - RNA, 25 nt, Artificial Sequence
  Description of Artificial Sequence: Synthetic oligonucleotide
ccuggaccccagucuaggaauuaaa

SEQ ID NO: 117261 - RNA, 25 nt, Artificial Sequence
  Description of Artificial Sequence: Synthetic oligonucleotide
aucugcaccuaaccaaggucccuug

SEQ ID NO: 117262 - RNA, 25 nt, Artificial Sequence
  Description of Artificial Sequence: Synthetic oligonucleotide
guaagaaauguccauucaagcaguc

SEQ ID NO: 117263 - RNA, 25 nt, Artificial Sequence
  Description of Artificial Sequence: Synthetic oligonucleotide
cauucucuggguauauaauaugauu

SEQ ID NO: 117264 - RNA, 25 nt, Artificial Sequence
  Description of Artificial Sequence: Synthetic oligonucleotide
uuugacuaccuuaucugguguuaag

SEQ ID NO: 117265 - RNA, 25 nt, Artificial Sequence
  Description of Artificial Sequence: Synthetic oligonucleotide
gauuugaaguuggccuuuuauugga

SEQ ID NO: 117266 - RNA, 25 nt, Artificial Sequence
  Description of Artificial Sequence: Synthetic oligonucleotide
acuaaaggggaacuccuuuaagggu

SEQ ID NO: 117267 - RNA, 25 nt, Artificial Sequence
  Description of Artificial Sequence: Synthetic oligonucleotide
ucucaguuagcccaaguuucuuuug

SEQ ID NO: 117268 - RNA, 25 nt, Artificial Sequence
  Description of Artificial Sequence: Synthetic oligonucleotide
gcuuauauguuaauaguuuuacccu

SEQ ID NO: 117269 - RNA, 25 nt, Artificial Sequence
  Description of Artificial Sequence: Synthetic oligonucleotide
ucugcauuggagagaggagugcuuu

SEQ ID NO: 117270 - RNA, 25 nt, Artificial Sequence
  Description of Artificial Sequence: Synthetic oligonucleotide
uacuccaagaagcuuuccucauggu

SEQ ID NO: 117271 - RNA, 25 nt, Artificial Sequence
  Description of Artificial Sequence: Synthetic oligonucleotide
uuaccguucucuccaucaugccagc

SEQ ID NO: 117272 - RNA, 25 nt, Artificial Sequence
  Description of Artificial Sequence: Synthetic oligonucleotide
ccuucucaaccuuugcagaaauuac

SEQ ID NO: 117273 - RNA, 25 nt, Artificial Sequence
  Description of Artificial Sequence: Synthetic oligonucleotide
cuagagaggauuugaaugugggaca

SEQ ID NO: 117274 - RNA, 25 nt, Artificial Sequence
  Description of Artificial Sequence: Synthetic oligonucleotide
acaaaggucccauuugcaguuagaa

SEQ ID NO: 117275 - RNA, 25 nt, Artificial Sequence
  Description of Artificial Sequence: Synthetic oligonucleotide
aaauuuguguccacaaggacaagaa

SEQ ID NO: 117276 - RNA, 25 nt, Artificial Sequence
  Description of Artificial Sequence: Synthetic oligonucleotide
acaaaguaugagcuuuaaaacucca

SEQ ID NO: 117277 - RNA, 25 nt, Artificial Sequence
  Description of Artificial Sequence: Synthetic oligonucleotide
auaggaaacuuguuaaucaacaaag

SEQ ID NO: 117278 - RNA, 25 nt, Artificial Sequence
  Description of Artificial Sequence: Synthetic oligonucleotide
gaaguguuaaugcugcaaguaaucu

SEQ ID NO: 117279 - RNA, 25 nt, Artificial Sequence
  Description of Artificial Sequence: Synthetic oligonucleotide
ucuuuuuuaaaacuuuuugaagcua

SEQ ID NO: 117280 - RNA, 25 nt, Artificial Sequence
  Description of Artificial Sequence: Synthetic oligonucleotide
acuuauuuucagccaaauaggaaua

SEQ ID NO: 117281 - RNA, 25 nt, Artificial Sequence
  Description of Artificial Sequence: Synthetic oligonucleotide
auuagagagggacugguagugagaa

SEQ ID NO: 117282 - RNA, 25 nt, Artificial Sequence
  Description of Artificial Sequence: Synthetic oligonucleotide
auaucagcucuguuuggauggugga

SEQ ID NO: 117283 - RNA, 25 nt, Artificial Sequence
  Description of Artificial Sequence: Synthetic oligonucleotide
aaggucucauuuuauugagauuuuu

SEQ ID NO: 117284 - RNA, 25 nt, Artificial Sequence
  Description of Artificial Sequence: Synthetic oligonucleotide
uaagauacaugcaaagguuuggaaa

SEQ ID NO: 117285 - RNA, 25 nt, Artificial Sequence
  Description of Artificial Sequence: Synthetic oligonucleotide
auagaaccucuaggcacccuccuca

SEQ ID NO: 117286 - RNA, 25 nt, Artificial Sequence
  Description of Artificial Sequence: Synthetic oligonucleotide
agugugggugggcugagaguuaaag

SEQ ID NO: 117287 - RNA, 25 nt, Artificial Sequence
  Description of Artificial Sequence: Synthetic oligonucleotide
gacaguguggcugcaguagcauaga

SEQ ID NO: 117288 - RNA, 25 nt, Artificial Sequence
  Description of Artificial Sequence: Synthetic oligonucleotide
aggcgccuagaaauuccacuugcac

SEQ ID NO: 117289 - RNA, 25 nt, Artificial Sequence
  Description of Artificial Sequence: Synthetic oligonucleotide
ccguagggcaugcugauaccauccc

SEQ ID NO: 117290 - RNA, 25 nt, Artificial Sequence
  Description of Artificial Sequence: Synthetic oligonucleotide
caauagcuguugcccauugaccucu

SEQ ID NO: 117291 - RNA, 25 nt, Artificial Sequence
  Description of Artificial Sequence: Synthetic oligonucleotide
uaguggugaguuucuagaauacugg

SEQ ID NO: 117292 - RNA, 25 nt, Artificial Sequence
  Description of Artificial Sequence: Synthetic oligonucleotide
guccauucaugagauauucaagauu

SEQ ID NO: 117293 - RNA, 25 nt, Artificial Sequence
  Description of Artificial Sequence: Synthetic oligonucleotide
ucaagaguauucucacuucuggguu

SEQ ID NO: 117294 - RNA, 25 nt, Artificial Sequence
  Description of Artificial Sequence: Synthetic oligonucleotide
uaucagcauaaacuggaauguagug

SEQ ID NO: 117295 - RNA, 25 nt, Artificial Sequence
  Description of Artificial Sequence: Synthetic oligonucleotide
gucagaggauacuguggcuuguuuu

SEQ ID NO: 117296 - RNA, 25 nt, Artificial Sequence
  Description of Artificial Sequence: Synthetic oligonucleotide
uguuuauguuuuuuuuucuuauuca

SEQ ID NO: 117297 - RNA, 25 nt, Artificial Sequence
  Description of Artificial Sequence: Synthetic oligonucleotide
aagaaaaaagaccaaggaauaacau

SEQ ID NO: 117298 - RNA, 25 nt, Artificial Sequence
  Description of Artificial Sequence: Synthetic oligonucleotide
uucuguaguuccuaaaaauacugac

SEQ ID NO: 117299 - RNA, 25 nt, Artificial Sequence
  Description of Artificial Sequence: Synthetic oligonucleotide
cuuuuuucacuacuauacauaaagg

SEQ ID NO: 117300 - RNA, 25 nt, Artificial Sequence
  Description of Artificial Sequence: Synthetic oligonucleotide
ggaaaguuuuauucuuuuauggaac

SEQ ID NO: 117301 - RNA, 25 nt, Artificial Sequence
  Description of Artificial Sequence: Synthetic oligonucleotide
cacuucagcuguacucauguauuaa

SEQ ID NO: 117302 - RNA, 25 nt, Artificial Sequence
  Description of Artificial Sequence: Synthetic oligonucleotide
aaauaggaaugugaaugcuauauac

SEQ ID NO: 117303 - RNA, 25 nt, Artificial Sequence
  Description of Artificial Sequence: Synthetic oligonucleotide
cucuuuuuauaucaaaagucucaag

SEQ ID NO: 117304 - RNA, 25 nt, Artificial Sequence
  Description of Artificial Sequence: Synthetic oligonucleotide
gcacuuauuuuuauucuaugcauug

SEQ ID NO: 117305 - RNA, 25 nt, Artificial Sequence
  Description of Artificial Sequence: Synthetic oligonucleotide
guuugucuuuuacauaaauaaaaug

SEQ ID NO: 117306 - RNA, 25 nt, Artificial Sequence
  Description of Artificial Sequence: Synthetic oligonucleotide
guuuauuagauugaauaaagcaaaa

SEQ ID NO: 117307 - RNA, 25 nt, Artificial Sequence
  Description of Artificial Sequence: Synthetic oligonucleotide
auacucaggugagcauccugccucc

SEQ ID NO: 117308 - RNA, 25 nt, Artificial Sequence
  Description of Artificial Sequence: Synthetic oligonucleotide
ccuguucccauuccuaguagcuaaa

SEQ ID NO: 117309 - RNA, 25 nt, Artificial Sequence
  Description of Artificial Sequence: Synthetic oligonucleotide
accgcacguucagaagucgguuaau

SEQ ID NO: 117310 - RNA, 25 nt, Artificial Sequence
  Description of Artificial Sequence: Synthetic oligonucleotide
uaacgacaugauagucacugacaac

SEQ ID NO: 117311 - RNA, 25 nt, Artificial Sequence
  Description of Artificial Sequence: Synthetic oligonucleotide
caacggugcagucaaguuuccacaa

SEQ ID NO: 117312 - RNA, 25 nt, Artificial Sequence
  Description of Artificial Sequence: Synthetic oligonucleotide
acuguguaaauuuugugaugugaga

SEQ ID NO: 117313 - RNA, 25 nt, Artificial Sequence
  Description of Artificial Sequence: Synthetic oligonucleotide
auuuuccaccugugacaaccagaaa

SEQ ID NO: 117314 - RNA, 25 nt, Artificial Sequence
  Description of Artificial Sequence: Synthetic oligonucleotide
auccugcaugagcaacugcagcauc

SEQ ID NO: 117315 - RNA, 25 nt, Artificial Sequence
  Description of Artificial Sequence: Synthetic oligonucleotide
caccuccaucugugagaagccacag

SEQ ID NO: 117316 - RNA, 25 nt, Artificial Sequence
  Description of Artificial Sequence: Synthetic oligonucleotide
ggaagucuguguggcuguauggaga

SEQ ID NO: 117317 - RNA, 25 nt, Artificial Sequence
  Description of Artificial Sequence: Synthetic oligonucleotide
aaagaaugacgagaacauaacacua

SEQ ID NO: 117318 - RNA, 25 nt, Artificial Sequence
  Description of Artificial Sequence: Synthetic oligonucleotide
agagacaguuugccaugaccccaag

SEQ ID NO: 117319 - RNA, 25 nt, Artificial Sequence
  Description of Artificial Sequence: Synthetic oligonucleotide
gcuccccuaccaugacuuuauucug

SEQ ID NO: 117320 - RNA, 25 nt, Artificial Sequence
  Description of Artificial Sequence: Synthetic oligonucleotide
ggaagaugcugcuucuccaaagugc

SEQ ID NO: 117321 - RNA, 25 nt, Artificial Sequence
  Description of Artificial Sequence: Synthetic oligonucleotide
uggugagacuuucuucauguguucc

SEQ ID NO: 117322 - RNA, 25 nt, Artificial Sequence
  Description of Artificial Sequence: Synthetic oligonucleotide
cuguagcucugaugagugcaaugac

SEQ ID NO: 117323 - RNA, 25 nt, Artificial Sequence
  Description of Artificial Sequence: Synthetic oligonucleotide
caacaucaucuucucagaagaauau

SEQ ID NO: 117324 - RNA, 25 nt, Artificial Sequence
  Description of Artificial Sequence: Synthetic oligonucleotide
uaacaccagcaauccugacuuguug

SEQ ID NO: 117325 - RNA, 25 nt, Artificial Sequence
  Description of Artificial Sequence: Synthetic oligonucleotide
gcuagucauauuucaagugacaggc

SEQ ID NO: 117326 - RNA, 25 nt, Artificial Sequence
  Description of Artificial Sequence: Synthetic oligonucleotide
caucagccuccugccaccacuggga

SEQ ID NO: 117327 - RNA, 25 nt, Artificial Sequence
  Description of Artificial Sequence: Synthetic oligonucleotide
aguugccauaucugucaucaucauc

SEQ ID NO: 117328 - RNA, 25 nt, Artificial Sequence
  Description of Artificial Sequence: Synthetic oligonucleotide
cuucuacugcuaccgcguuaaccgg

SEQ ID NO: 117329 - RNA, 25 nt, Artificial Sequence
  Description of Artificial Sequence: Synthetic oligonucleotide
gcagcagaagcugaguucaaccugg

SEQ ID NO: 117330 - RNA, 25 nt, Artificial Sequence
  Description of Artificial Sequence: Synthetic oligonucleotide
ggaaaccggcaagacgcggaagcuc

SEQ ID NO: 117331 - RNA, 25 nt, Artificial Sequence
  Description of Artificial Sequence: Synthetic oligonucleotide
cauggaguucagcgagcacugugcc

SEQ ID NO: 117332 - RNA, 25 nt, Artificial Sequence
  Description of Artificial Sequence: Synthetic oligonucleotide
caucauccuggaagaugaccgcucu

SEQ ID NO: 117333 - RNA, 25 nt, Artificial Sequence
  Description of Artificial Sequence: Synthetic oligonucleotide
ugacaucagcuccacgugugccaac

SEQ ID NO: 117334 - RNA, 25 nt, Artificial Sequence
  Description of Artificial Sequence: Synthetic oligonucleotide
caacaucaaccacaacacagagcug

SEQ ID NO: 117335 - RNA, 25 nt, Artificial Sequence
  Description of Artificial Sequence: Synthetic oligonucleotide
gcugcccauugagcuggacacccug

SEQ ID NO: 117336 - RNA, 25 nt, Artificial Sequence
  Description of Artificial Sequence: Synthetic oligonucleotide
gguggggaaaggucgcuuugcugag

SEQ ID NO: 117337 - RNA, 25 nt, Artificial Sequence
  Description of Artificial Sequence: Synthetic oligonucleotide
ggucuauaaggccaagcugaagcag

SEQ ID NO: 117338 - RNA, 25 nt, Artificial Sequence
  Description of Artificial Sequence: Synthetic oligonucleotide
gaacacuucagagcaguuugagaca

SEQ ID NO: 117339 - RNA, 25 nt, Artificial Sequence
  Description of Artificial Sequence: Synthetic oligonucleotide
aguggcagucaagaucuuucccuau

SEQ ID NO: 117340 - RNA, 25 nt, Artificial Sequence
  Description of Artificial Sequence: Synthetic oligonucleotide
ugaggaguaugccucuuggaagaca

SEQ ID NO: 117341 - RNA, 25 nt, Artificial Sequence
  Description of Artificial Sequence: Synthetic oligonucleotide
agagaaggacaucuucucagacauc

SEQ ID NO: 117342 - RNA, 25 nt, Artificial Sequence
  Description of Artificial Sequence: Synthetic oligonucleotide
caaucugaagcaugagaacauacuc

SEQ ID NO: 117343 - RNA, 25 nt, Artificial Sequence
  Description of Artificial Sequence: Synthetic oligonucleotide
ccaguuccugacggcugaggagcgg

SEQ ID NO: 117344 - RNA, 25 nt, Artificial Sequence
  Description of Artificial Sequence: Synthetic oligonucleotide
gaagacggaguuggggaaacaauac

SEQ ID NO: 117345 - RNA, 25 nt, Artificial Sequence
  Description of Artificial Sequence: Synthetic oligonucleotide
cuggcugaucaccgccuuccacgcc

SEQ ID NO: 117346 - RNA, 25 nt, Artificial Sequence
  Description of Artificial Sequence: Synthetic oligonucleotide
caagggcaaccuacaggaguaccug

SEQ ID NO: 117347 - RNA, 25 nt, Artificial Sequence
  Description of Artificial Sequence: Synthetic oligonucleotide
gacgcggcaugucaucagcugggag

SEQ ID NO: 117348 - RNA, 25 nt, Artificial Sequence
  Description of Artificial Sequence: Synthetic oligonucleotide
ggaccugcgcaagcugggcagcucc

SEQ ID NO: 117349 - RNA, 25 nt, Artificial Sequence
  Description of Artificial Sequence: Synthetic oligonucleotide
ccucgcccgggggauugcucaccuc

SEQ ID NO: 117350 - RNA, 25 nt, Artificial Sequence
  Description of Artificial Sequence: Synthetic oligonucleotide
ccacagugaucacacuccauguggg

SEQ ID NO: 117351 - RNA, 25 nt, Artificial Sequence
  Description of Artificial Sequence: Synthetic oligonucleotide
gaggcccaagaugcccaucgugcac

SEQ ID NO: 117352 - RNA, 25 nt, Artificial Sequence
  Description of Artificial Sequence: Synthetic oligonucleotide
cagggaccucaagagcuccaauauc

SEQ ID NO: 117353 - RNA, 25 nt, Artificial Sequence
  Description of Artificial Sequence: Synthetic oligonucleotide
ccucgugaagaacgaccuaaccugc

SEQ ID NO: 117354 - RNA, 25 nt, Artificial Sequence
  Description of Artificial Sequence: Synthetic oligonucleotide
cugccugugugacuuugggcuuucc

SEQ ID NO: 117355 - RNA, 25 nt, Artificial Sequence
  Description of Artificial Sequence: Synthetic oligonucleotide
ccugcgucuggacccuacucugucu

SEQ ID NO: 117356 - RNA, 25 nt, Artificial Sequence
  Description of Artificial Sequence: Synthetic oligonucleotide
uguggaugaccuggcuaacaguggg

SEQ ID NO: 117357 - RNA, 25 nt, Artificial Sequence
  Description of Artificial Sequence: Synthetic oligonucleotide
gcaggugggaacugcaagauacaug

SEQ ID NO: 117358 - RNA, 25 nt, Artificial Sequence
  Description of Artificial Sequence: Synthetic oligonucleotide
ggcuccagaaguccuagaauccagg

SEQ ID NO: 117359 - RNA, 25 nt, Artificial Sequence
  Description of Artificial Sequence: Synthetic oligonucleotide
gaugaauuuggagaauguugagucc

SEQ ID NO: 117360 - RNA, 25 nt, Artificial Sequence
  Description of Artificial Sequence: Synthetic oligonucleotide
cuucaagcagaccgaugucuacucc

SEQ ID NO: 117361 - RNA, 25 nt, Artificial Sequence
  Description of Artificial Sequence: Synthetic oligonucleotide
cauggcucuggugcucugggaaaug

SEQ ID NO: 117362 - RNA, 25 nt, Artificial Sequence
  Description of Artificial Sequence: Synthetic oligonucleotide
gacaucucgcuguaaugcaguggga

SEQ ID NO: 117363 - RNA, 25 nt, Artificial Sequence
  Description of Artificial Sequence: Synthetic oligonucleotide
agaaguaaaagauuaugagccucca

SEQ ID NO: 117364 - RNA, 25 nt, Artificial Sequence
  Description of Artificial Sequence: Synthetic oligonucleotide
auuugguuccaaggugcgggagcac

SEQ ID NO: 117365 - RNA, 25 nt, Artificial Sequence
  Description of Artificial Sequence: Synthetic oligonucleotide
ccccugugucgaaagcaugaaggac

SEQ ID NO: 117366 - RNA, 25 nt, Artificial Sequence
  Description of Artificial Sequence: Synthetic oligonucleotide
caacguguugagagaucgagggcga

SEQ ID NO: 117367 - RNA, 25 nt, Artificial Sequence
  Description of Artificial Sequence: Synthetic oligonucleotide
accagaaauucccagcuucuggcuc

SEQ ID NO: 117368 - RNA, 25 nt, Artificial Sequence
  Description of Artificial Sequence: Synthetic oligonucleotide
caaccaccagggcauccagauggug

SEQ ID NO: 117369 - RNA, 25 nt, Artificial Sequence
  Description of Artificial Sequence: Synthetic oligonucleotide
gugugagacguugacugagugcugg

SEQ ID NO: 117370 - RNA, 25 nt, Artificial Sequence
  Description of Artificial Sequence: Synthetic oligonucleotide
ggaccacgacccagaggcccgucuc

SEQ ID NO: 117371 - RNA, 25 nt, Artificial Sequence
  Description of Artificial Sequence: Synthetic oligonucleotide
cacagcccaguguguggcagaacgc

SEQ ID NO: 117372 - RNA, 25 nt, Artificial Sequence
  Description of Artificial Sequence: Synthetic oligonucleotide
cuucagugagcuggagcaucuggac

SEQ ID NO: 117373 - RNA, 25 nt, Artificial Sequence
  Description of Artificial Sequence: Synthetic oligonucleotide
caggcucucggggaggagcugcucg

SEQ ID NO: 117374 - RNA, 25 nt, Artificial Sequence
  Description of Artificial Sequence: Synthetic oligonucleotide
ggaggagaagauuccugaagacggc

SEQ ID NO: 117375 - RNA, 25 nt, Artificial Sequence
  Description of Artificial Sequence: Synthetic oligonucleotide
cucccuaaacacuaccaaauagcuc

SEQ ID NO: 117376 - RNA, 25 nt, Artificial Sequence
  Description of Artificial Sequence: Synthetic oligonucleotide
cuucuggggcaggcugggccauguc

SEQ ID NO: 117377 - RNA, 25 nt, Artificial Sequence
  Description of Artificial Sequence: Synthetic oligonucleotide
ccaaagaggcugccccucucaccaa

SEQ ID NO: 117378 - RNA, 25 nt, Artificial Sequence
  Description of Artificial Sequence: Synthetic oligonucleotide
aagaacagaggcagcaggaagcugc

SEQ ID NO: 117379 - RNA, 25 nt, Artificial Sequence
  Description of Artificial Sequence: Synthetic oligonucleotide
ccccugaacugaugcuuccuggaaa

SEQ ID NO: 117380 - RNA, 25 nt, Artificial Sequence
  Description of Artificial Sequence: Synthetic oligonucleotide
aaccaagggggucacuccccucccu

SEQ ID NO: 117381 - RNA, 25 nt, Artificial Sequence
  Description of Artificial Sequence: Synthetic oligonucleotide
uguaagcuguggggauaagcagaaa

SEQ ID NO: 117382 - RNA, 25 nt, Artificial Sequence
  Description of Artificial Sequence: Synthetic oligonucleotide
acaacagcagcagggagugggugac

SEQ ID NO: 117383 - RNA, 25 nt, Artificial Sequence
  Description of Artificial Sequence: Synthetic oligonucleotide
cauagagcauucuaugccuuugaca

SEQ ID NO: 117384 - RNA, 25 nt, Artificial Sequence
  Description of Artificial Sequence: Synthetic oligonucleotide
auugucauaggauaagcuguguuag

SEQ ID NO: 117385 - RNA, 25 nt, Artificial Sequence
  Description of Artificial Sequence: Synthetic oligonucleotide
gcacuuccucaggaaaugagauuga

SEQ ID NO: 117386 - RNA, 25 nt, Artificial Sequence
  Description of Artificial Sequence: Synthetic oligonucleotide
auuuuuacaauagccaauaacauuu

SEQ ID NO: 117387 - RNA, 25 nt, Artificial Sequence
  Description of Artificial Sequence: Synthetic oligonucleotide
ugcacuuuauuaaugccuguauaua

SEQ ID NO: 117388 - RNA, 25 nt, Artificial Sequence
  Description of Artificial Sequence: Synthetic oligonucleotide
aaauaugaauagcuauguuuuauau

SEQ ID NO: 117389 - RNA, 25 nt, Artificial Sequence
  Description of Artificial Sequence: Synthetic oligonucleotide
uauauauauauauaucuauauaugu

SEQ ID NO: 117390 - RNA, 25 nt, Artificial Sequence
  Description of Artificial Sequence: Synthetic oligonucleotide
ucuauagcucuauauauauagccau

SEQ ID NO: 117391 - RNA, 25 nt, Artificial Sequence
  Description of Artificial Sequence: Synthetic oligonucleotide
uaccuugaaaagagacaaggaaaaa

SEQ ID NO: 117392 - RNA, 25 nt, Artificial Sequence
  Description of Artificial Sequence: Synthetic oligonucleotide
acaucaaauauucccaggaaauugg

SEQ ID NO: 117393 - RNA, 25 nt, Artificial Sequence
  Description of Artificial Sequence: Synthetic oligonucleotide
guuuuauuggagaacuccagaacca

SEQ ID NO: 117394 - RNA, 25 nt, Artificial Sequence
  Description of Artificial Sequence: Synthetic oligonucleotide
aagcagagaaggaagggacccauga

SEQ ID NO: 117395 - RNA, 25 nt, Artificial Sequence
  Description of Artificial Sequence: Synthetic oligonucleotide
acagcauuagcauuugacaaucaca

SEQ ID NO: 117396 - RNA, 25 nt, Artificial Sequence
  Description of Artificial Sequence: Synthetic oligonucleotide
acaugcagugguucucugacuguaa

SEQ ID NO: 117397 - RNA, 25 nt, Artificial Sequence
  Description of Artificial Sequence: Synthetic oligonucleotide
aaacagugaacuuugcaugaggaaa

SEQ ID NO: 117398 - RNA, 25 nt, Artificial Sequence
  Description of Artificial Sequence: Synthetic oligonucleotide
agaggcuccaugucucacagccagc

SEQ ID NO: 117399 - RNA, 25 nt, Artificial Sequence
  Description of Artificial Sequence: Synthetic oligonucleotide
cuaugaccacauugcacuugcuuuu

SEQ ID NO: 117400 - RNA, 25 nt, Artificial Sequence
  Description of Artificial Sequence: Synthetic oligonucleotide
ugcaaaauaaucauucccugccuag

SEQ ID NO: 117401 - RNA, 25 nt, Artificial Sequence
  Description of Artificial Sequence: Synthetic oligonucleotide
gcacuucucuucuggccauggaacu

SEQ ID NO: 117402 - RNA, 25 nt, Artificial Sequence
  Description of Artificial Sequence: Synthetic oligonucleotide
uaaguacaguggcacuguuugagga

SEQ ID NO: 117403 - RNA, 25 nt, Artificial Sequence
  Description of Artificial Sequence: Synthetic oligonucleotide
accaguguucccgggguuccugugu

SEQ ID NO: 117404 - RNA, 25 nt, Artificial Sequence
  Description of Artificial Sequence: Synthetic oligonucleotide
ugcccuuauuucuccuggacuuuuc

SEQ ID NO: 117405 - RNA, 25 nt, Artificial Sequence
  Description of Artificial Sequence: Synthetic oligonucleotide
cauuuaagcuccaagccccaaaucu

SEQ ID NO: 117406 - RNA, 25 nt, Artificial Sequence
  Description of Artificial Sequence: Synthetic oligonucleotide
uggggggcuaguuuagaaacucucc

SEQ ID NO: 117407 - RNA, 25 nt, Artificial Sequence
  Description of Artificial Sequence: Synthetic oligonucleotide
ccucaaccuaguuuagaaacucuac

SEQ ID NO: 117408 - RNA, 25 nt, Artificial Sequence
  Description of Artificial Sequence: Synthetic oligonucleotide
ccccaucuuuaauaccuugaauguu

SEQ ID NO: 117409 - RNA, 25 nt, Artificial Sequence
  Description of Artificial Sequence: Synthetic oligonucleotide
uuugaaccccacuuuuuaccuucau

SEQ ID NO: 117410 - RNA, 25 nt, Artificial Sequence
  Description of Artificial Sequence: Synthetic oligonucleotide
uggguugcagaaaaaucagaacaga

SEQ ID NO: 117411 - RNA, 25 nt, Artificial Sequence
  Description of Artificial Sequence: Synthetic oligonucleotide
auguccccauccaugcgauugcccc

SEQ ID NO: 117412 - RNA, 25 nt, Artificial Sequence
  Description of Artificial Sequence: Synthetic oligonucleotide
caccaucuacuaaugaaaaauuguu

SEQ ID NO: 117413 - RNA, 25 nt, Artificial Sequence
  Description of Artificial Sequence: Synthetic oligonucleotide
ucuuuuuuucaucuuuccccugcac

SEQ ID NO: 117414 - RNA, 25 nt, Artificial Sequence
  Description of Artificial Sequence: Synthetic oligonucleotide
cuuauguuacuauucucugcuccca

SEQ ID NO: 117415 - RNA, 25 nt, Artificial Sequence
  Description of Artificial Sequence: Synthetic oligonucleotide
agccuucauccuuuucuaaaaagga

SEQ ID NO: 117416 - RNA, 25 nt, Artificial Sequence
  Description of Artificial Sequence: Synthetic oligonucleotide
agcaaauucucacucuaggcuuuau

SEQ ID NO: 117417 - RNA, 25 nt, Artificial Sequence
  Description of Artificial Sequence: Synthetic oligonucleotide
ucguguuuacuuuuucauuacacuu

SEQ ID NO: 117418 - RNA, 25 nt, Artificial Sequence
  Description of Artificial Sequence: Synthetic oligonucleotide
ugacuugauuuucuaguuuucuaua

SEQ ID NO: 117419 - RNA, 25 nt, Artificial Sequence
  Description of Artificial Sequence: Synthetic oligonucleotide
acaaacaccaauggguuccaucuuu

SEQ ID NO: 117420 - RNA, 25 nt, Artificial Sequence
  Description of Artificial Sequence: Synthetic oligonucleotide
ucugggcuccugauugcucaagcac

SEQ ID NO: 117421 - RNA, 25 nt, Artificial Sequence
  Description of Artificial Sequence: Synthetic oligonucleotide
caguuuggccugaugaagaggauuu

SEQ ID NO: 117422 - RNA, 25 nt, Artificial Sequence
  Description of Artificial Sequence: Synthetic oligonucleotide
ucaacuacacaauacuaucauuguc

SEQ ID NO: 117423 - RNA, 25 nt, Artificial Sequence
  Description of Artificial Sequence: Synthetic oligonucleotide
caggacuaugaccucaggcacucua

SEQ ID NO: 117424 - RNA, 25 nt, Artificial Sequence
  Description of Artificial Sequence: Synthetic oligonucleotide
aaacauauguuuuguuuggucagca

SEQ ID NO: 117425 - RNA, 25 nt, Artificial Sequence
  Description of Artificial Sequence: Synthetic oligonucleotide
acagcguuucaaaaagugaagccac

SEQ ID NO: 117426 - RNA, 25 nt, Artificial Sequence
  Description of Artificial Sequence: Synthetic oligonucleotide
cuuuauaaauauuuggagauuuugc

SEQ ID NO: 117427 - RNA, 25 nt, Artificial Sequence
  Description of Artificial Sequence: Synthetic oligonucleotide
caggaaaaucuggauccccagguaa

SEQ ID NO: 117428 - RNA, 25 nt, Artificial Sequence
  Description of Artificial Sequence: Synthetic oligonucleotide
aggauagcagaugguuuucaguuau

SEQ ID NO: 117429 - RNA, 25 nt, Artificial Sequence
  Description of Artificial Sequence: Synthetic oligonucleotide
ucuccaguccacguucacaaaaugu

SEQ ID NO: 117430 - RNA, 25 nt, Artificial Sequence
  Description of Artificial Sequence: Synthetic oligonucleotide
ugaagguguggagacacuuacaaag

SEQ ID NO: 117431 - RNA, 25 nt, Artificial Sequence
  Description of Artificial Sequence: Synthetic oligonucleotide
gcugccucacuucucacuguaaaca

SEQ ID NO: 117432 - RNA, 25 nt, Artificial Sequence
  Description of Artificial Sequence: Synthetic oligonucleotide
auuagcucuuuccacugccuaccug

SEQ ID NO: 117433 - RNA, 25 nt, Artificial Sequence
  Description of Artificial Sequence: Synthetic oligonucleotide
ggaccccagucuaggaauuaaaucu

SEQ ID NO: 117434 - RNA, 25 nt, Artificial Sequence
  Description of Artificial Sequence: Synthetic oligonucleotide
ugcaccuaaccaaggucccuuguaa

SEQ ID NO: 117435 - RNA, 25 nt, Artificial Sequence
  Description of Artificial Sequence: Synthetic oligonucleotide
agaaauguccauucaagcagucauu

SEQ ID NO: 117436 - RNA, 25 nt, Artificial Sequence
  Description of Artificial Sequence: Synthetic oligonucleotide
ucucuggguauauaauaugauuuug

SEQ ID NO: 117437 - RNA, 25 nt, Artificial Sequence
  Description of Artificial Sequence: Synthetic oligonucleotide
gacuaccuuaucugguguuaagauu

SEQ ID NO: 117438 - RNA, 25 nt, Artificial Sequence
  Description of Artificial Sequence: Synthetic oligonucleotide
uugaaguuggccuuuuauuggacua

SEQ ID NO: 117439 - RNA, 25 nt, Artificial Sequence
  Description of Artificial Sequence: Synthetic oligonucleotide
aaaggggaacuccuuuaagggucuc

SEQ ID NO: 117440 - RNA, 25 nt, Artificial Sequence
  Description of Artificial Sequence: Synthetic oligonucleotide
caguuagcccaaguuucuuuugcuu

SEQ ID NO: 117441 - RNA, 25 nt, Artificial Sequence
  Description of Artificial Sequence: Synthetic oligonucleotide
uauauguuaauaguuuuacccucug

SEQ ID NO: 117442 - RNA, 25 nt, Artificial Sequence
  Description of Artificial Sequence: Synthetic oligonucleotide
gcauuggagagaggagugcuuuacu

SEQ ID NO: 117443 - RNA, 25 nt, Artificial Sequence
  Description of Artificial Sequence: Synthetic oligonucleotide
uccaagaagcuuuccucaugguuac

SEQ ID NO: 117444 - RNA, 25 nt, Artificial Sequence
  Description of Artificial Sequence: Synthetic oligonucleotide
ccguucucuccaucaugccagccuu

SEQ ID NO: 117445 - RNA, 25 nt, Artificial Sequence
  Description of Artificial Sequence: Synthetic oligonucleotide
ucucaaccuuugcagaaauuacuag

SEQ ID NO: 117446 - RNA, 25 nt, Artificial Sequence
  Description of Artificial Sequence: Synthetic oligonucleotide
gagaggauuugaaugugggacacaa

SEQ ID NO: 117447 - RNA, 25 nt, Artificial Sequence
  Description of Artificial Sequence: Synthetic oligonucleotide
aaggucccauuugcaguuagaaaau

SEQ ID NO: 117448 - RNA, 25 nt, Artificial Sequence
  Description of Artificial Sequence: Synthetic oligonucleotide
uuuguguccacaaggacaagaacaa

SEQ ID NO: 117449 - RNA, 25 nt, Artificial Sequence
  Description of Artificial Sequence: Synthetic oligonucleotide
aaguaugagcuuuaaaacuccauag

SEQ ID NO: 117450 - RNA, 25 nt, Artificial Sequence
  Description of Artificial Sequence: Synthetic oligonucleotide
ggaaacuuguuaaucaacaaagaag

SEQ ID NO: 117451 - RNA, 25 nt, Artificial Sequence
  Description of Artificial Sequence: Synthetic oligonucleotide
guguuaaugcugcaaguaaucucuu

SEQ ID NO: 117452 - RNA, 25 nt, Artificial Sequence
  Description of Artificial Sequence: Synthetic oligonucleotide
uuuuuaaaacuuuuugaagcuacuu

SEQ ID NO: 117453 - RNA, 25 nt, Artificial Sequence
  Description of Artificial Sequence: Synthetic oligonucleotide
uauuuucagccaaauaggaauauua

SEQ ID NO: 117454 - RNA, 25 nt, Artificial Sequence
  Description of Artificial Sequence: Synthetic oligonucleotide
agagagggacugguagugagaauau

SEQ ID NO: 117455 - RNA, 25 nt, Artificial Sequence
  Description of Artificial Sequence: Synthetic oligonucleotide
ucagcucuguuuggaugguggaagg

SEQ ID NO: 117456 - RNA, 25 nt, Artificial Sequence
  Description of Artificial Sequence: Synthetic oligonucleotide
gucucauuuuauugagauuuuuaag

SEQ ID NO: 117457 - RNA, 25 nt, Artificial Sequence
  Description of Artificial Sequence: Synthetic oligonucleotide
gauacaugcaaagguuuggaaauag

SEQ ID NO: 117458 - RNA, 25 nt, Artificial Sequence
  Description of Artificial Sequence: Synthetic oligonucleotide
gaaccucuaggcacccuccucagug

SEQ ID NO: 117459 - RNA, 25 nt, Artificial Sequence
  Description of Artificial Sequence: Synthetic oligonucleotide
gugggugggcugagaguuaaagaca

SEQ ID NO: 117460 - RNA, 25 nt, Artificial Sequence
  Description of Artificial Sequence: Synthetic oligonucleotide
aguguggcugcaguagcauagaggc

SEQ ID NO: 117461 - RNA, 25 nt, Artificial Sequence
  Description of Artificial Sequence: Synthetic oligonucleotide
cgccuagaaauuccacuugcaccgu

SEQ ID NO: 117462 - RNA, 25 nt, Artificial Sequence
  Description of Artificial Sequence: Synthetic oligonucleotide
uagggcaugcugauaccaucccaau

SEQ ID NO: 117463 - RNA, 25 nt, Artificial Sequence
  Description of Artificial Sequence: Synthetic oligonucleotide
uagcuguugcccauugaccucuagu

SEQ ID NO: 117464 - RNA, 25 nt, Artificial Sequence
  Description of Artificial Sequence: Synthetic oligonucleotide
uggugaguuucuagaauacuggucc

SEQ ID NO: 117465 - RNA, 25 nt, Artificial Sequence
  Description of Artificial Sequence: Synthetic oligonucleotide
cauucaugagauauucaagauucaa

SEQ ID NO: 117466 - RNA, 25 nt, Artificial Sequence
  Description of Artificial Sequence: Synthetic oligonucleotide
agaguauucucacuucuggguuauc

SEQ ID NO: 117467 - RNA, 25 nt, Artificial Sequence
  Description of Artificial Sequence: Synthetic oligonucleotide
cagcauaaacuggaauguaguguca

SEQ ID NO: 117468 - RNA, 25 nt, Artificial Sequence
  Description of Artificial Sequence: Synthetic oligonucleotide
agaggauacuguggcuuguuuuguu

SEQ ID NO: 117469 - RNA, 25 nt, Artificial Sequence
  Description of Artificial Sequence: Synthetic oligonucleotide
uuauguuuuuuuuucuuauucaaga

SEQ ID NO: 117470 - RNA, 25 nt, Artificial Sequence
  Description of Artificial Sequence: Synthetic oligonucleotide
aaaaaagaccaaggaauaacauucu

SEQ ID NO: 117471 - RNA, 25 nt, Artificial Sequence
  Description of Artificial Sequence: Synthetic oligonucleotide
uguaguuccuaaaaauacugacuuu

SEQ ID NO: 117472 - RNA, 25 nt, Artificial Sequence
  Description of Artificial Sequence: Synthetic oligonucleotide
uuuucacuacuauacauaaagggaa

SEQ ID NO: 117473 - RNA, 25 nt, Artificial Sequence
  Description of Artificial Sequence: Synthetic oligonucleotide
aaguuuuauucuuuuauggaacacu

SEQ ID NO: 117474 - RNA, 25 nt, Artificial Sequence
  Description of Artificial Sequence: Synthetic oligonucleotide
uucagcuguacucauguauuaaaau

SEQ ID NO: 117475 - RNA, 25 nt, Artificial Sequence
  Description of Artificial Sequence: Synthetic oligonucleotide
uaggaaugugaaugcuauauacucu

SEQ ID NO: 117476 - RNA, 25 nt, Artificial Sequence
  Description of Artificial Sequence: Synthetic oligonucleotide
uuuuuauaucaaaagucucaagcac

SEQ ID NO: 117477 - RNA, 25 nt, Artificial Sequence
  Description of Artificial Sequence: Synthetic oligonucleotide
cuuauuuuuauucuaugcauuguuu

SEQ ID NO: 117478 - RNA, 25 nt, Artificial Sequence
  Description of Artificial Sequence: Synthetic oligonucleotide
ugucuuuuacauaaauaaaauguuu

SEQ ID NO: 117479 - RNA, 25 nt, Artificial Sequence
  Description of Artificial Sequence: Synthetic oligonucleotide
uauuagauugaauaaagcaaaauac

SEQ ID NO: 117480 - RNA, 25 nt, Artificial Sequence
  Description of Artificial Sequence: Synthetic oligonucleotide
cucaggugagcauccugccuccugu

SEQ ID NO: 117481 - RNA, 4199 nt, Homo sapiens
ggagggcagucggcggcucucgcgccccggccacuuucccugcgcgauucccggagcucccugcaggaggugagaguccccagcggguccggauggcguaguuuugccgcggcgcagcagcugccggagcucgccgccgccgagcgcugggcggggaaacuugccgccgcuuuccuccaacuugcugcggguggaucuccgcuggacacaccgccuccgaggcaguuugaaaauugcaaggagggacuuuaagacuacuucugauuugcaaagauugucugugcucugagcaggcugaagugacuggacgagacgcacuguuggagaaauaaaaaugacuucccauuaugugauugccaucuuugcccugaugagcuccuguuuagccacugcagguccagagccuggugcacugugugaacugucaccugucagugccucccauccuguccaggccuugauggagagcuucacuguuuugucaggcugugccagcagaggcacaacugggcugccacaggaggugcauguccugaaucuccgcacugcgggccaggggccuggccagcuacagagagaggucacacuucaccugaaucccaucuccucaguccacauccaccacaagucuguuguguuccugcucaacuccccacacccccugguguggcaucugaagacagagagacuugccacuggggucuccagacuguuuuuggugucugaggguucugugguccaguuuucaucagcaaacuucuccuugacagcagaaacagaagaaaggaacuucccccauggaaaugaacaucuguuaaauugggcccgaaaagaguauggagcaguuacuucauucaccgaacucaagauagcaagaaacauuuauauuaaagugggggaagaucaaguguucccuccaaagugcaacauagggaagaauuuucucucacucaauuaccuugcugaguaccuucaacccaaagcagcagaagggugugugauguccagccagccccagaaugaggaaguacacaucaucgagcuaaucacccccaacucuaaccccuacagugcuuuccagguggauauaacaauugauauaagaccuucucaagaggaucuugaaguggucaaaaaucucauccugaucuugaagugcaaaaagucugucaacugggugaucaaaucuuuugauguuaagggaagccugaaaauuauugcuccuaacaguauuggcuuuggaaaagagagugaaagaucuaugacaaugaccaaaucaauaagagaugacauuccuucaacccaagggaaucuggugaagugggcuuuggacaauggcuauaguccaauaacuucauacacaauggcuccuguggcuaauagauuucaucuucggcuugaaaauaaugcagaggagaugggagaugaggaaguccacacuauuccuccugagcuacggauccugcuggacccuggugcccugccugcccugcagaacccgcccauccggggaggggaaggccaaaauggaggccuuccguuuccuuucccagauauuuccaggagagucuggaaugaagagggagaagaugggcucccucggccaaaggacccugucauucccagcauacaacuguuuccuggucucagagagccagaagaggugcaagggagcguggauauugcccugucugucaaaugugacaaugagaagaugaucguggcuguagaaaaagauucuuuucaggccaguggcuacucggggauggacgucacccuguuggauccuaccugcaaggccaagaugaauggcacacacuuuguuuuggagucuccucugaauggcugcgguacucggccccgguggucagcccuugaugguguggucuacuauaacuccauugugauacagguuccagcccuuggggacaguagugguuggccagaugguuaugaagaucuggagucaggugauaauggauuuccgggagauauggaugaaggagaugcuucccuguucacccgaccugaaaucgugguguuuaauugcagccuucagcaggugaggaaccccagcagcuuccaggaacagccccacggaaacaucaccuucaacauggagcuauacaacacugaccucuuuuuggugcccucccagggcgucuucucugugccagagaauggacacguuuauguugagguaucuguuacuaaggcugaacaagaacugggauuugccauccaaacgugcuuuaucucuccauauucgaacccugauaggaugucucauuacaccauuauugagaauauuuguccuaaagaugaaucugugaaauucuacagucccaagagagugcacuucccuaucccgcaagcugacauggauaagaagcgauucagcuuugucuucaagccugucuucaacaccucacugcucuuucuacagugugagcugacgcuguguacgaagauggagaagcacccccagaaguugccuaagugugugccuccugacgaagccugcaccucgcuggacgccucgauaaucugggccaugaugcagaauaagaagacguucaccaagccccuugcugugauccaccaugaagcagaaucuaaagaaaaagguccaagcaugaaggaaccaaauccaauuucuccaccaauuuuccauggucuggacacccuaaccgugaugggcauugcguuugcagccuuugugaucggagcacuccugacgggggccuugugguacaucuauucucacacaggggagacagcaggaaggcagcaaguccccaccuccccgccagccucggaaaacagcagugcugcccacagcaucggcagcacgcagagcacgccuugcuccagcagcagcacggccuagcccaacccagcccaacccggcccaacccagcccagcccagcucagcucagcuacugccaagggcaggaccaauggcugagccucguguccagacucagagggcuggauuuugguucccuuguaaagacagagugaauuucaguauaaagaucacccguuguauucaccccacacccagggcuaguauaaacaugacccugggcuucuguaccacacuagaauucaugugagaaagcuaaaaugguggucuucuccaccagccccucacaggcuuggggguuuucaaugugaaacacaugccaguuuuuaaaaugcugcuuuguccaggugagaacauccauaauuuggggcccugaguuuuacccagacucaaggaguugguaaaggguuaauagccagauaguagaaccagugaggagaugcggccaaagauucuuuauaucugaaccaagauguaaaacaagaaaugcuuugaggcuuucuaagcgauccuccugucuaauuugcaccuuugucuggaugcacacuucugaccuugcugccacaaccuguggggucugaugugucccuugaugggugcugcccucagggacugcacccugacaaguguuaaggcaacauuccuuucuugugcccugggccaaaaccaaugcugaugaccuuaucagcuuccuguuucuucccauacuugcauacaccacugcaaaaugucuuaaugcaaauuuuguauuucuuacaggccuacagaaauugaaaaugaccaaaaucaggaaccacagauuugugcccauuccuaauauuuuguucugcaaauuaauguauaauuugaggugaaauucaguuauaaagucaaggacgaauuugcacagugauauauuucuauguguaugcaaguacaaguauauaauaugucaccuggcacauucauuuucucaguugaagaagagaaaauuugaaaauguccuuaugcuuuuagaguugcaacuuaaguauauuugguagggugaguguuuccacucaaaauaugucaacuuaaaaaaaaauaggcccuuucauaaaaaccaaacuguagcaagaugcaaaugcauggcaaauccugucggucuccaguugguuaucugaauagugucaccaauuccaccaagacagugcugagauuggaaaagggcacucauuuggauugccuuacuucucuugccuuaaauauaucccauauauuuaauaugucaaaaagggcuugaggugaauuucauuaaauggaauaauaugaugccacuuugcagcuaaaauaagcucagugauaccuccu

SEQ ID NO: 117482 - RNA, 19 nt, Artificial Sequence
  Description of Artificial Sequence: Synthetic oligonucleotide
ggagggcagucggcggcuc

SEQ ID NO: 117483 - RNA, 19 nt, Artificial Sequence
  Description of Artificial Sequence: Synthetic oligonucleotide
cucgcgccccggccacuuu

SEQ ID NO: 117484 - RNA, 19 nt, Artificial Sequence
  Description of Artificial Sequence: Synthetic oligonucleotide
ucccugcgcgauucccgga

SEQ ID NO: 117485 - RNA, 19 nt, Artificial Sequence
  Description of Artificial Sequence: Synthetic oligonucleotide
agcucccugcaggagguga

SEQ ID NO: 117486 - RNA, 19 nt, Artificial Sequence
  Description of Artificial Sequence: Synthetic oligonucleotide
agaguccccagcggguccg

SEQ ID NO: 117487 - RNA, 19 nt, Artificial Sequence
  Description of Artificial Sequence: Synthetic oligonucleotide
ggauggcguaguuuugccg

SEQ ID NO: 117488 - RNA, 19 nt, Artificial Sequence
  Description of Artificial Sequence: Synthetic oligonucleotide
gcggcgcagcagcugccgg

SEQ ID NO: 117489 - RNA, 19 nt, Artificial Sequence
  Description of Artificial Sequence: Synthetic oligonucleotide
gagcucgccgccgccgagc

SEQ ID NO: 117490 - RNA, 19 nt, Artificial Sequence
  Description of Artificial Sequence: Synthetic oligonucleotide
cgcugggcggggaaacuug

SEQ ID NO: 117491 - RNA, 19 nt, Artificial Sequence
  Description of Artificial Sequence: Synthetic oligonucleotide
gccgccgcuuuccuccaac

SEQ ID NO: 117492 - RNA, 19 nt, Artificial Sequence
  Description of Artificial Sequence: Synthetic oligonucleotide
cuugcugcggguggaucuc

SEQ ID NO: 117493 - RNA, 19 nt, Artificial Sequence
  Description of Artificial Sequence: Synthetic oligonucleotide
ccgcuggacacaccgccuc

SEQ ID NO: 117494 - RNA, 19 nt, Artificial Sequence
  Description of Artificial Sequence: Synthetic oligonucleotide
ccgaggcaguuugaaaauu

SEQ ID NO: 117495 - RNA, 19 nt, Artificial Sequence
  Description of Artificial Sequence: Synthetic oligonucleotide
ugcaaggagggacuuuaag

SEQ ID NO: 117496 - RNA, 19 nt, Artificial Sequence
  Description of Artificial Sequence: Synthetic oligonucleotide
gacuacuucugauuugcaa

SEQ ID NO: 117497 - RNA, 19 nt, Artificial Sequence
  Description of Artificial Sequence: Synthetic oligonucleotide
aagauugucugugcucuga

SEQ ID NO: 117498 - RNA, 19 nt, Artificial Sequence
  Description of Artificial Sequence: Synthetic oligonucleotide
agcaggcugaagugacugg

SEQ ID NO: 117499 - RNA, 19 nt, Artificial Sequence
  Description of Artificial Sequence: Synthetic oligonucleotide
gacgagacgcacuguugga

SEQ ID NO: 117500 - RNA, 19 nt, Artificial Sequence
  Description of Artificial Sequence: Synthetic oligonucleotide
agaaauaaaaaugacuucc

SEQ ID NO: 117501 - RNA, 19 nt, Artificial Sequence
  Description of Artificial Sequence: Synthetic oligonucleotide
ccauuaugugauugccauc

SEQ ID NO: 117502 - RNA, 19 nt, Artificial Sequence
  Description of Artificial Sequence: Synthetic oligonucleotide
cuuugcccugaugagcucc

SEQ ID NO: 117503 - RNA, 19 nt, Artificial Sequence
  Description of Artificial Sequence: Synthetic oligonucleotide
cuguuuagccacugcaggu

SEQ ID NO: 117504 - RNA, 19 nt, Artificial Sequence
  Description of Artificial Sequence: Synthetic oligonucleotide
uccagagccuggugcacug

SEQ ID NO: 117505 - RNA, 19 nt, Artificial Sequence
  Description of Artificial Sequence: Synthetic oligonucleotide
gugugaacugucaccuguc

SEQ ID NO: 117506 - RNA, 19 nt, Artificial Sequence
  Description of Artificial Sequence: Synthetic oligonucleotide
cagugccucccauccuguc

SEQ ID NO: 117507 - RNA, 19 nt, Artificial Sequence
  Description of Artificial Sequence: Synthetic oligonucleotide
ccaggccuugauggagagc

SEQ ID NO: 117508 - RNA, 19 nt, Artificial Sequence
  Description of Artificial Sequence: Synthetic oligonucleotide
cuucacuguuuugucaggc

SEQ ID NO: 117509 - RNA, 19 nt, Artificial Sequence
  Description of Artificial Sequence: Synthetic oligonucleotide
cugugccagcagaggcaca

SEQ ID NO: 117510 - RNA, 19 nt, Artificial Sequence
  Description of Artificial Sequence: Synthetic oligonucleotide
aacugggcugccacaggag

SEQ ID NO: 117511 - RNA, 19 nt, Artificial Sequence
  Description of Artificial Sequence: Synthetic oligonucleotide
ggugcauguccugaaucuc

SEQ ID NO: 117512 - RNA, 19 nt, Artificial Sequence
  Description of Artificial Sequence: Synthetic oligonucleotide
ccgcacugcgggccagggg

SEQ ID NO: 117513 - RNA, 19 nt, Artificial Sequence
  Description of Artificial Sequence: Synthetic oligonucleotide
gccuggccagcuacagaga

SEQ ID NO: 117514 - RNA, 19 nt, Artificial Sequence
  Description of Artificial Sequence: Synthetic oligonucleotide
agaggucacacuucaccug

SEQ ID NO: 117515 - RNA, 19 nt, Artificial Sequence
  Description of Artificial Sequence: Synthetic oligonucleotide
gaaucccaucuccucaguc

SEQ ID NO: 117516 - RNA, 19 nt, Artificial Sequence
  Description of Artificial Sequence: Synthetic oligonucleotide
ccacauccaccacaagucu

SEQ ID NO: 117517 - RNA, 19 nt, Artificial Sequence
  Description of Artificial Sequence: Synthetic oligonucleotide
uguuguguuccugcucaac

SEQ ID NO: 117518 - RNA, 19 nt, Artificial Sequence
  Description of Artificial Sequence: Synthetic oligonucleotide
cuccccacacccccuggug

SEQ ID NO: 117519 - RNA, 19 nt, Artificial Sequence
  Description of Artificial Sequence: Synthetic oligonucleotide
guggcaucugaagacagag

SEQ ID NO: 117520 - RNA, 19 nt, Artificial Sequence
  Description of Artificial Sequence: Synthetic oligonucleotide
gagacuugccacugggguc

SEQ ID NO: 117521 - RNA, 19 nt, Artificial Sequence
  Description of Artificial Sequence: Synthetic oligonucleotide
cuccagacuguuuuuggug

SEQ ID NO: 117522 - RNA, 19 nt, Artificial Sequence
  Description of Artificial Sequence: Synthetic oligonucleotide
gucugaggguucugugguc

SEQ ID NO: 117523 - RNA, 19 nt, Artificial Sequence
  Description of Artificial Sequence: Synthetic oligonucleotide
ccaguuuucaucagcaaac

SEQ ID NO: 117524 - RNA, 19 nt, Artificial Sequence
  Description of Artificial Sequence: Synthetic oligonucleotide
cuucuccuugacagcagaa

SEQ ID NO: 117525 - RNA, 19 nt, Artificial Sequence
  Description of Artificial Sequence: Synthetic oligonucleotide
aacagaagaaaggaacuuc

SEQ ID NO: 117526 - RNA, 19 nt, Artificial Sequence
  Description of Artificial Sequence: Synthetic oligonucleotide
cccccauggaaaugaacau

SEQ ID NO: 117527 - RNA, 19 nt, Artificial Sequence
  Description of Artificial Sequence: Synthetic oligonucleotide
ucuguuaaauugggcccga

SEQ ID NO: 117528 - RNA, 19 nt, Artificial Sequence
  Description of Artificial Sequence: Synthetic oligonucleotide
aaaagaguauggagcaguu

SEQ ID NO: 117529 - RNA, 19 nt, Artificial Sequence
  Description of Artificial Sequence: Synthetic oligonucleotide
uacuucauucaccgaacuc

SEQ ID NO: 117530 - RNA, 19 nt, Artificial Sequence
  Description of Artificial Sequence: Synthetic oligonucleotide
caagauagcaagaaacauu

SEQ ID NO: 117531 - RNA, 19 nt, Artificial Sequence
  Description of Artificial Sequence: Synthetic oligonucleotide
uuauauuaaagugggggaa

SEQ ID NO: 117532 - RNA, 19 nt, Artificial Sequence
  Description of Artificial Sequence: Synthetic oligonucleotide
agaucaaguguucccucca

SEQ ID NO: 117533 - RNA, 19 nt, Artificial Sequence
  Description of Artificial Sequence: Synthetic oligonucleotide
aaagugcaacauagggaag

SEQ ID NO: 117534 - RNA, 19 nt, Artificial Sequence
  Description of Artificial Sequence: Synthetic oligonucleotide
gaauuuucucucacucaau

SEQ ID NO: 117535 - RNA, 19 nt, Artificial Sequence
  Description of Artificial Sequence: Synthetic oligonucleotide
uuaccuugcugaguaccuu

SEQ ID NO: 117536 - RNA, 19 nt, Artificial Sequence
  Description of Artificial Sequence: Synthetic oligonucleotide
ucaacccaaagcagcagaa

SEQ ID NO: 117537 - RNA, 19 nt, Artificial Sequence
  Description of Artificial Sequence: Synthetic oligonucleotide
agggugugugauguccagc

SEQ ID NO: 117538 - RNA, 19 nt, Artificial Sequence
  Description of Artificial Sequence: Synthetic oligonucleotide
ccagccccagaaugaggaa

SEQ ID NO: 117539 - RNA, 19 nt, Artificial Sequence
  Description of Artificial Sequence: Synthetic oligonucleotide
aguacacaucaucgagcua

SEQ ID NO: 117540 - RNA, 19 nt, Artificial Sequence
  Description of Artificial Sequence: Synthetic oligonucleotide
aaucacccccaacucuaac

SEQ ID NO: 117541 - RNA, 19 nt, Artificial Sequence
  Description of Artificial Sequence: Synthetic oligonucleotide
ccccuacagugcuuuccag

SEQ ID NO: 117542 - RNA, 19 nt, Artificial Sequence
  Description of Artificial Sequence: Synthetic oligonucleotide
gguggauauaacaauugau

SEQ ID NO: 117543 - RNA, 19 nt, Artificial Sequence
  Description of Artificial Sequence: Synthetic oligonucleotide
uauaagaccuucucaagag

SEQ ID NO: 117544 - RNA, 19 nt, Artificial Sequence
  Description of Artificial Sequence: Synthetic oligonucleotide
ggaucuugaaguggucaaa

SEQ ID NO: 117545 - RNA, 19 nt, Artificial Sequence
  Description of Artificial Sequence: Synthetic oligonucleotide
aaaucucauccugaucuug

SEQ ID NO: 117546 - RNA, 19 nt, Artificial Sequence
  Description of Artificial Sequence: Synthetic oligonucleotide
gaagugcaaaaagucuguc

SEQ ID NO: 117547 - RNA, 19 nt, Artificial Sequence
  Description of Artificial Sequence: Synthetic oligonucleotide
caacugggugaucaaaucu

SEQ ID NO: 117548 - RNA, 19 nt, Artificial Sequence
  Description of Artificial Sequence: Synthetic oligonucleotide
uuuugauguuaagggaagc

SEQ ID NO: 117549 - RNA, 19 nt, Artificial Sequence
  Description of Artificial Sequence: Synthetic oligonucleotide
ccugaaaauuauugcuccu

SEQ ID NO: 117550 - RNA, 19 nt, Artificial Sequence
  Description of Artificial Sequence: Synthetic oligonucleotide
uaacaguauuggcuuugga

SEQ ID NO: 117551 - RNA, 19 nt, Artificial Sequence
  Description of Artificial Sequence: Synthetic oligonucleotide
aaaagagagugaaagaucu

SEQ ID NO: 117552 - RNA, 19 nt, Artificial Sequence
  Description of Artificial Sequence: Synthetic oligonucleotide
uaugacaaugaccaaauca

SEQ ID NO: 117553 - RNA, 19 nt, Artificial Sequence
  Description of Artificial Sequence: Synthetic oligonucleotide
aauaagagaugacauuccu

SEQ ID NO: 117554 - RNA, 19 nt, Artificial Sequence
  Description of Artificial Sequence: Synthetic oligonucleotide
uucaacccaagggaaucug

SEQ ID NO: 117555 - RNA, 19 nt, Artificial Sequence
  Description of Artificial Sequence: Synthetic oligonucleotide
ggugaagugggcuuuggac

SEQ ID NO: 117556 - RNA, 19 nt, Artificial Sequence
  Description of Artificial Sequence: Synthetic oligonucleotide
caauggcuauaguccaaua

SEQ ID NO: 117557 - RNA, 19 nt, Artificial Sequence
  Description of Artificial Sequence: Synthetic oligonucleotide
aacuucauacacaauggcu

SEQ ID NO: 117558 - RNA, 19 nt, Artificial Sequence
  Description of Artificial Sequence: Synthetic oligonucleotide
uccuguggcuaauagauuu

SEQ ID NO: 117559 - RNA, 19 nt, Artificial Sequence
  Description of Artificial Sequence: Synthetic oligonucleotide
ucaucuucggcuugaaaau

SEQ ID NO: 117560 - RNA, 19 nt, Artificial Sequence
  Description of Artificial Sequence: Synthetic oligonucleotide
uaaugcagaggagauggga

SEQ ID NO: 117561 - RNA, 19 nt, Artificial Sequence
  Description of Artificial Sequence: Synthetic oligonucleotide
agaugaggaaguccacacu

SEQ ID NO: 117562 - RNA, 19 nt, Artificial Sequence
  Description of Artificial Sequence: Synthetic oligonucleotide
uauuccuccugagcuacgg

SEQ ID NO: 117563 - RNA, 19 nt, Artificial Sequence
  Description of Artificial Sequence: Synthetic oligonucleotide
gauccugcuggacccuggu

SEQ ID NO: 117564 - RNA, 19 nt, Artificial Sequence
  Description of Artificial Sequence: Synthetic oligonucleotide
ugcccugccugcccugcag

SEQ ID NO: 117565 - RNA, 19 nt, Artificial Sequence
  Description of Artificial Sequence: Synthetic oligonucleotide
gaacccgcccauccgggga

SEQ ID NO: 117566 - RNA, 19 nt, Artificial Sequence
  Description of Artificial Sequence: Synthetic oligonucleotide
aggggaaggccaaaaugga

SEQ ID NO: 117567 - RNA, 19 nt, Artificial Sequence
  Description of Artificial Sequence: Synthetic oligonucleotide
aggccuuccguuuccuuuc

SEQ ID NO: 117568 - RNA, 19 nt, Artificial Sequence
  Description of Artificial Sequence: Synthetic oligonucleotide
cccagauauuuccaggaga

SEQ ID NO: 117569 - RNA, 19 nt, Artificial Sequence
  Description of Artificial Sequence: Synthetic oligonucleotide
agucuggaaugaagaggga

SEQ ID NO: 117570 - RNA, 19 nt, Artificial Sequence
  Description of Artificial Sequence: Synthetic oligonucleotide
agaagaugggcucccucgg

SEQ ID NO: 117571 - RNA, 19 nt, Artificial Sequence
  Description of Artificial Sequence: Synthetic oligonucleotide
gccaaaggacccugucauu

SEQ ID NO: 117572 - RNA, 19 nt, Artificial Sequence
  Description of Artificial Sequence: Synthetic oligonucleotide
ucccagcauacaacuguuu

SEQ ID NO: 117573 - RNA, 19 nt, Artificial Sequence
  Description of Artificial Sequence: Synthetic oligonucleotide
uccuggucucagagagcca

SEQ ID NO: 117574 - RNA, 19 nt, Artificial Sequence
  Description of Artificial Sequence: Synthetic oligonucleotide
agaagaggugcaagggagc

SEQ ID NO: 117575 - RNA, 19 nt, Artificial Sequence
  Description of Artificial Sequence: Synthetic oligonucleotide
cguggauauugcccugucu

SEQ ID NO: 117576 - RNA, 19 nt, Artificial Sequence
  Description of Artificial Sequence: Synthetic oligonucleotide
ugucaaaugugacaaugag

SEQ ID NO: 117577 - RNA, 19 nt, Artificial Sequence
  Description of Artificial Sequence: Synthetic oligonucleotide
gaagaugaucguggcugua

SEQ ID NO: 117578 - RNA, 19 nt, Artificial Sequence
  Description of Artificial Sequence: Synthetic oligonucleotide
agaaaaagauucuuuucag

SEQ ID NO: 117579 - RNA, 19 nt, Artificial Sequence
  Description of Artificial Sequence: Synthetic oligonucleotide
ggccaguggcuacucgggg

SEQ ID NO: 117580 - RNA, 19 nt, Artificial Sequence
  Description of Artificial Sequence: Synthetic oligonucleotide
gauggacgucacccuguug

SEQ ID NO: 117581 - RNA, 19 nt, Artificial Sequence
  Description of Artificial Sequence: Synthetic oligonucleotide
ggauccuaccugcaaggcc

SEQ ID NO: 117582 - RNA, 19 nt, Artificial Sequence
  Description of Artificial Sequence: Synthetic oligonucleotide
caagaugaauggcacacac

SEQ ID NO: 117583 - RNA, 19 nt, Artificial Sequence
  Description of Artificial Sequence: Synthetic oligonucleotide
cuuuguuuuggagucuccu

SEQ ID NO: 117584 - RNA, 19 nt, Artificial Sequence
  Description of Artificial Sequence: Synthetic oligonucleotide
ucugaauggcugcgguacu

SEQ ID NO: 117585 - RNA, 19 nt, Artificial Sequence
  Description of Artificial Sequence: Synthetic oligonucleotide
ucggccccgguggucagcc

SEQ ID NO: 117586 - RNA, 19 nt, Artificial Sequence
  Description of Artificial Sequence: Synthetic oligonucleotide
ccuugaugguguggucuac

SEQ ID NO: 117587 - RNA, 19 nt, Artificial Sequence
  Description of Artificial Sequence: Synthetic oligonucleotide
cuauaacuccauugugaua

SEQ ID NO: 117588 - RNA, 19 nt, Artificial Sequence
  Description of Artificial Sequence: Synthetic oligonucleotide
acagguuccagcccuuggg

SEQ ID NO: 117589 - RNA, 19 nt, Artificial Sequence
  Description of Artificial Sequence: Synthetic oligonucleotide
ggacaguagugguuggcca

SEQ ID NO: 117590 - RNA, 19 nt, Artificial Sequence
  Description of Artificial Sequence: Synthetic oligonucleotide
agaugguuaugaagaucug

SEQ ID NO: 117591 - RNA, 19 nt, Artificial Sequence
  Description of Artificial Sequence: Synthetic oligonucleotide
ggagucaggugauaaugga

SEQ ID NO: 117592 - RNA, 19 nt, Artificial Sequence
  Description of Artificial Sequence: Synthetic oligonucleotide
auuuccgggagauauggau

SEQ ID NO: 117593 - RNA, 19 nt, Artificial Sequence
  Description of Artificial Sequence: Synthetic oligonucleotide
ugaaggagaugcuucccug

SEQ ID NO: 117594 - RNA, 19 nt, Artificial Sequence
  Description of Artificial Sequence: Synthetic oligonucleotide
guucacccgaccugaaauc

SEQ ID NO: 117595 - RNA, 19 nt, Artificial Sequence
  Description of Artificial Sequence: Synthetic oligonucleotide
cgugguguuuaauugcagc

SEQ ID NO: 117596 - RNA, 19 nt, Artificial Sequence
  Description of Artificial Sequence: Synthetic oligonucleotide
ccuucagcaggugaggaac

SEQ ID NO: 117597 - RNA, 19 nt, Artificial Sequence
  Description of Artificial Sequence: Synthetic oligonucleotide
ccccagcagcuuccaggaa

SEQ ID NO: 117598 - RNA, 19 nt, Artificial Sequence
  Description of Artificial Sequence: Synthetic oligonucleotide
acagccccacggaaacauc

SEQ ID NO: 117599 - RNA, 19 nt, Artificial Sequence
  Description of Artificial Sequence: Synthetic oligonucleotide
caccuucaacauggagcua

SEQ ID NO: 117600 - RNA, 19 nt, Artificial Sequence
  Description of Artificial Sequence: Synthetic oligonucleotide
auacaacacugaccucuuu

SEQ ID NO: 117601 - RNA, 19 nt, Artificial Sequence
  Description of Artificial Sequence: Synthetic oligonucleotide
uuuggugcccucccagggc

SEQ ID NO: 117602 - RNA, 19 nt, Artificial Sequence
  Description of Artificial Sequence: Synthetic oligonucleotide
cgucuucucugugccagag

SEQ ID NO: 117603 - RNA, 19 nt, Artificial Sequence
  Description of Artificial Sequence: Synthetic oligonucleotide
gaauggacacguuuauguu

SEQ ID NO: 117604 - RNA, 19 nt, Artificial Sequence
  Description of Artificial Sequence: Synthetic oligonucleotide
ugagguaucuguuacuaag

SEQ ID NO: 117605 - RNA, 19 nt, Artificial Sequence
  Description of Artificial Sequence: Synthetic oligonucleotide
ggcugaacaagaacuggga

SEQ ID NO: 117606 - RNA, 19 nt, Artificial Sequence
  Description of Artificial Sequence: Synthetic oligonucleotide
auuugccauccaaacgugc

SEQ ID NO: 117607 - RNA, 19 nt, Artificial Sequence
  Description of Artificial Sequence: Synthetic oligonucleotide
cuuuaucucuccauauucg

SEQ ID NO: 117608 - RNA, 19 nt, Artificial Sequence
  Description of Artificial Sequence: Synthetic oligonucleotide
gaacccugauaggaugucu

SEQ ID NO: 117609 - RNA, 19 nt, Artificial Sequence
  Description of Artificial Sequence: Synthetic oligonucleotide
ucauuacaccauuauugag

SEQ ID NO: 117610 - RNA, 19 nt, Artificial Sequence
  Description of Artificial Sequence: Synthetic oligonucleotide
gaauauuuguccuaaagau

SEQ ID NO: 117611 - RNA, 19 nt, Artificial Sequence
  Description of Artificial Sequence: Synthetic oligonucleotide
ugaaucugugaaauucuac

SEQ ID NO: 117612 - RNA, 19 nt, Artificial Sequence
  Description of Artificial Sequence: Synthetic oligonucleotide
cagucccaagagagugcac

SEQ ID NO: 117613 - RNA, 19 nt, Artificial Sequence
  Description of Artificial Sequence: Synthetic oligonucleotide
cuucccuaucccgcaagcu

SEQ ID NO: 117614 - RNA, 19 nt, Artificial Sequence
  Description of Artificial Sequence: Synthetic oligonucleotide
ugacauggauaagaagcga

SEQ ID NO: 117615 - RNA, 19 nt, Artificial Sequence
  Description of Artificial Sequence: Synthetic oligonucleotide
auucagcuuugucuucaag

SEQ ID NO: 117616 - RNA, 19 nt, Artificial Sequence
  Description of Artificial Sequence: Synthetic oligonucleotide
gccugucuucaacaccuca

SEQ ID NO: 117617 - RNA, 19 nt, Artificial Sequence
  Description of Artificial Sequence: Synthetic oligonucleotide
acugcucuuucuacagugu

SEQ ID NO: 117618 - RNA, 19 nt, Artificial Sequence
  Description of Artificial Sequence: Synthetic oligonucleotide
ugagcugacgcuguguacg

SEQ ID NO: 117619 - RNA, 19 nt, Artificial Sequence
  Description of Artificial Sequence: Synthetic oligonucleotide
gaagauggagaagcacccc

SEQ ID NO: 117620 - RNA, 19 nt, Artificial Sequence
  Description of Artificial Sequence: Synthetic oligonucleotide
ccagaaguugccuaagugu

SEQ ID NO: 117621 - RNA, 19 nt, Artificial Sequence
  Description of Artificial Sequence: Synthetic oligonucleotide
ugugccuccugacgaagcc

SEQ ID NO: 117622 - RNA, 19 nt, Artificial Sequence
  Description of Artificial Sequence: Synthetic oligonucleotide
cugcaccucgcuggacgcc

SEQ ID NO: 117623 - RNA, 19 nt, Artificial Sequence
  Description of Artificial Sequence: Synthetic oligonucleotide
cucgauaaucugggccaug

SEQ ID NO: 117624 - RNA, 19 nt, Artificial Sequence
  Description of Artificial Sequence: Synthetic oligonucleotide
gaugcagaauaagaagacg

SEQ ID NO: 117625 - RNA, 19 nt, Artificial Sequence
  Description of Artificial Sequence: Synthetic oligonucleotide
guucaccaagccccuugcu

SEQ ID NO: 117626 - RNA, 19 nt, Artificial Sequence
  Description of Artificial Sequence: Synthetic oligonucleotide
ugugauccaccaugaagca

SEQ ID NO: 117627 - RNA, 19 nt, Artificial Sequence
  Description of Artificial Sequence: Synthetic oligonucleotide
agaaucuaaagaaaaaggu

SEQ ID NO: 117628 - RNA, 19 nt, Artificial Sequence
  Description of Artificial Sequence: Synthetic oligonucleotide
uccaagcaugaaggaacca

SEQ ID NO: 117629 - RNA, 19 nt, Artificial Sequence
  Description of Artificial Sequence: Synthetic oligonucleotide
aaauccaauuucuccacca

SEQ ID NO: 117630 - RNA, 19 nt, Artificial Sequence
  Description of Artificial Sequence: Synthetic oligonucleotide
aauuuuccauggucuggac

SEQ ID NO: 117631 - RNA, 19 nt, Artificial Sequence
  Description of Artificial Sequence: Synthetic oligonucleotide
cacccuaaccgugaugggc

SEQ ID NO: 117632 - RNA, 19 nt, Artificial Sequence
  Description of Artificial Sequence: Synthetic oligonucleotide
cauugcguuugcagccuuu

SEQ ID NO: 117633 - RNA, 19 nt, Artificial Sequence
  Description of Artificial Sequence: Synthetic oligonucleotide
ugugaucggagcacuccug

SEQ ID NO: 117634 - RNA, 19 nt, Artificial Sequence
  Description of Artificial Sequence: Synthetic oligonucleotide
gacgggggccuugugguac

SEQ ID NO: 117635 - RNA, 19 nt, Artificial Sequence
  Description of Artificial Sequence: Synthetic oligonucleotide
caucuauucucacacaggg

SEQ ID NO: 117636 - RNA, 19 nt, Artificial Sequence
  Description of Artificial Sequence: Synthetic oligonucleotide
ggagacagcaggaaggcag

SEQ ID NO: 117637 - RNA, 19 nt, Artificial Sequence
  Description of Artificial Sequence: Synthetic oligonucleotide
gcaaguccccaccuccccg

SEQ ID NO: 117638 - RNA, 19 nt, Artificial Sequence
  Description of Artificial Sequence: Synthetic oligonucleotide
gccagccucggaaaacagc

SEQ ID NO: 117639 - RNA, 19 nt, Artificial Sequence
  Description of Artificial Sequence: Synthetic oligonucleotide
cagugcugcccacagcauc

SEQ ID NO: 117640 - RNA, 19 nt, Artificial Sequence
  Description of Artificial Sequence: Synthetic oligonucleotide
cggcagcacgcagagcacg

SEQ ID NO: 117641 - RNA, 19 nt, Artificial Sequence
  Description of Artificial Sequence: Synthetic oligonucleotide
gccuugcuccagcagcagc

SEQ ID NO: 117642 - RNA, 19 nt, Artificial Sequence
  Description of Artificial Sequence: Synthetic oligonucleotide
cacggccuagcccaaccca

SEQ ID NO: 117643 - RNA, 19 nt, Artificial Sequence
  Description of Artificial Sequence: Synthetic oligonucleotide
agcccaacccggcccaacc

SEQ ID NO: 117644 - RNA, 19 nt, Artificial Sequence
  Description of Artificial Sequence: Synthetic oligonucleotide
ccagcccagcccagcucag

SEQ ID NO: 117645 - RNA, 19 nt, Artificial Sequence
  Description of Artificial Sequence: Synthetic oligonucleotide
gcucagcuacugccaaggg

SEQ ID NO: 117646 - RNA, 19 nt, Artificial Sequence
  Description of Artificial Sequence: Synthetic oligonucleotide
gcaggaccaauggcugagc

SEQ ID NO: 117647 - RNA, 19 nt, Artificial Sequence
  Description of Artificial Sequence: Synthetic oligonucleotide
ccucguguccagacucaga

SEQ ID NO: 117648 - RNA, 19 nt, Artificial Sequence
  Description of Artificial Sequence: Synthetic oligonucleotide
agggcuggauuuugguucc

SEQ ID NO: 117649 - RNA, 19 nt, Artificial Sequence
  Description of Artificial Sequence: Synthetic oligonucleotide
ccuuguaaagacagaguga

SEQ ID NO: 117650 - RNA, 19 nt, Artificial Sequence
  Description of Artificial Sequence: Synthetic oligonucleotide
aauuucaguauaaagauca

SEQ ID NO: 117651 - RNA, 19 nt, Artificial Sequence
  Description of Artificial Sequence: Synthetic oligonucleotide
acccguuguauucacccca

SEQ ID NO: 117652 - RNA, 19 nt, Artificial Sequence
  Description of Artificial Sequence: Synthetic oligonucleotide
acacccagggcuaguauaa

SEQ ID NO: 117653 - RNA, 19 nt, Artificial Sequence
  Description of Artificial Sequence: Synthetic oligonucleotide
aacaugacccugggcuucu

SEQ ID NO: 117654 - RNA, 19 nt, Artificial Sequence
  Description of Artificial Sequence: Synthetic oligonucleotide
uguaccacacuagaauuca

SEQ ID NO: 117655 - RNA, 19 nt, Artificial Sequence
  Description of Artificial Sequence: Synthetic oligonucleotide
augugagaaagcuaaaaug

SEQ ID NO: 117656 - RNA, 19 nt, Artificial Sequence
  Description of Artificial Sequence: Synthetic oligonucleotide
gguggucuucuccaccagc

SEQ ID NO: 117657 - RNA, 19 nt, Artificial Sequence
  Description of Artificial Sequence: Synthetic oligonucleotide
ccccucacaggcuuggggg

SEQ ID NO: 117658 - RNA, 19 nt, Artificial Sequence
  Description of Artificial Sequence: Synthetic oligonucleotide
guuuucaaugugaaacaca

SEQ ID NO: 117659 - RNA, 19 nt, Artificial Sequence
  Description of Artificial Sequence: Synthetic oligonucleotide
augccaguuuuuaaaaugc

SEQ ID NO: 117660 - RNA, 19 nt, Artificial Sequence
  Description of Artificial Sequence: Synthetic oligonucleotide
cugcuuuguccaggugaga

SEQ ID NO: 117661 - RNA, 19 nt, Artificial Sequence
  Description of Artificial Sequence: Synthetic oligonucleotide
aacauccauaauuuggggc

SEQ ID NO: 117662 - RNA, 19 nt, Artificial Sequence
  Description of Artificial Sequence: Synthetic oligonucleotide
cccugaguuuuacccagac

SEQ ID NO: 117663 - RNA, 19 nt, Artificial Sequence
  Description of Artificial Sequence: Synthetic oligonucleotide
cucaaggaguugguaaagg

SEQ ID NO: 117664 - RNA, 19 nt, Artificial Sequence
  Description of Artificial Sequence: Synthetic oligonucleotide
gguuaauagccagauagua

SEQ ID NO: 117665 - RNA, 19 nt, Artificial Sequence
  Description of Artificial Sequence: Synthetic oligonucleotide
agaaccagugaggagaugc

SEQ ID NO: 117666 - RNA, 19 nt, Artificial Sequence
  Description of Artificial Sequence: Synthetic oligonucleotide
cggccaaagauucuuuaua

SEQ ID NO: 117667 - RNA, 19 nt, Artificial Sequence
  Description of Artificial Sequence: Synthetic oligonucleotide
aucugaaccaagauguaaa

SEQ ID NO: 117668 - RNA, 19 nt, Artificial Sequence
  Description of Artificial Sequence: Synthetic oligonucleotide
aacaagaaaugcuuugagg

SEQ ID NO: 117669 - RNA, 19 nt, Artificial Sequence
  Description of Artificial Sequence: Synthetic oligonucleotide
gcuuucuaagcgauccucc

SEQ ID NO: 117670 - RNA, 19 nt, Artificial Sequence
  Description of Artificial Sequence: Synthetic oligonucleotide
cugucuaauuugcaccuuu

SEQ ID NO: 117671 - RNA, 19 nt, Artificial Sequence
  Description of Artificial Sequence: Synthetic oligonucleotide
ugucuggaugcacacuucu

SEQ ID NO: 117672 - RNA, 19 nt, Artificial Sequence
  Description of Artificial Sequence: Synthetic oligonucleotide
ugaccuugcugccacaacc

SEQ ID NO: 117673 - RNA, 19 nt, Artificial Sequence
  Description of Artificial Sequence: Synthetic oligonucleotide
cuguggggucugauguguc

SEQ ID NO: 117674 - RNA, 19 nt, Artificial Sequence
  Description of Artificial Sequence: Synthetic oligonucleotide
cccuugaugggugcugccc

SEQ ID NO: 117675 - RNA, 19 nt, Artificial Sequence
  Description of Artificial Sequence: Synthetic oligonucleotide
cucagggacugcacccuga

SEQ ID NO: 117676 - RNA, 19 nt, Artificial Sequence
  Description of Artificial Sequence: Synthetic oligonucleotide
acaaguguuaaggcaacau

SEQ ID NO: 117677 - RNA, 19 nt, Artificial Sequence
  Description of Artificial Sequence: Synthetic oligonucleotide
uuccuuucuugugcccugg

SEQ ID NO: 117678 - RNA, 19 nt, Artificial Sequence
  Description of Artificial Sequence: Synthetic oligonucleotide
ggccaaaaccaaugcugau

SEQ ID NO: 117679 - RNA, 19 nt, Artificial Sequence
  Description of Artificial Sequence: Synthetic oligonucleotide
ugaccuuaucagcuuccug

SEQ ID NO: 117680 - RNA, 19 nt, Artificial Sequence
  Description of Artificial Sequence: Synthetic oligonucleotide
guuucuucccauacuugca

SEQ ID NO: 117681 - RNA, 19 nt, Artificial Sequence
  Description of Artificial Sequence: Synthetic oligonucleotide
auacaccacugcaaaaugu

SEQ ID NO: 117682 - RNA, 19 nt, Artificial Sequence
  Description of Artificial Sequence: Synthetic oligonucleotide
ucuuaaugcaaauuuugua

SEQ ID NO: 117683 - RNA, 19 nt, Artificial Sequence
  Description of Artificial Sequence: Synthetic oligonucleotide
auuucuuacaggccuacag

SEQ ID NO: 117684 - RNA, 19 nt, Artificial Sequence
  Description of Artificial Sequence: Synthetic oligonucleotide
gaaauugaaaaugaccaaa

SEQ ID NO: 117685 - RNA, 19 nt, Artificial Sequence
  Description of Artificial Sequence: Synthetic oligonucleotide
aaucaggaaccacagauuu

SEQ ID NO: 117686 - RNA, 19 nt, Artificial Sequence
  Description of Artificial Sequence: Synthetic oligonucleotide
ugugcccauuccuaauauu

SEQ ID NO: 117687 - RNA, 19 nt, Artificial Sequence
  Description of Artificial Sequence: Synthetic oligonucleotide
uuuguucugcaaauuaaug

SEQ ID NO: 117688 - RNA, 19 nt, Artificial Sequence
  Description of Artificial Sequence: Synthetic oligonucleotide
guauaauuugaggugaaau

SEQ ID NO: 117689 - RNA, 19 nt, Artificial Sequence
  Description of Artificial Sequence: Synthetic oligonucleotide
uucaguuauaaagucaagg

SEQ ID NO: 117690 - RNA, 19 nt, Artificial Sequence
  Description of Artificial Sequence: Synthetic oligonucleotide
gacgaauuugcacagugau

SEQ ID NO: 117691 - RNA, 19 nt, Artificial Sequence
  Description of Artificial Sequence: Synthetic oligonucleotide
uauauuucuauguguaugc

SEQ ID NO: 117692 - RNA, 19 nt, Artificial Sequence
  Description of Artificial Sequence: Synthetic oligonucleotide
caaguacaaguauauaaua

SEQ ID NO: 117693 - RNA, 19 nt, Artificial Sequence
  Description of Artificial Sequence: Synthetic oligonucleotide
augucaccuggcacauuca

SEQ ID NO: 117694 - RNA, 19 nt, Artificial Sequence
  Description of Artificial Sequence: Synthetic oligonucleotide
auuuucucaguugaagaag

SEQ ID NO: 117695 - RNA, 19 nt, Artificial Sequence
  Description of Artificial Sequence: Synthetic oligonucleotide
gagaaaauuugaaaauguc

SEQ ID NO: 117696 - RNA, 19 nt, Artificial Sequence
  Description of Artificial Sequence: Synthetic oligonucleotide
ccuuaugcuuuuagaguug

SEQ ID NO: 117697 - RNA, 19 nt, Artificial Sequence
  Description of Artificial Sequence: Synthetic oligonucleotide
gcaacuuaaguauauuugg

SEQ ID NO: 117698 - RNA, 19 nt, Artificial Sequence
  Description of Artificial Sequence: Synthetic oligonucleotide
guagggugaguguuuccac

SEQ ID NO: 117699 - RNA, 19 nt, Artificial Sequence
  Description of Artificial Sequence: Synthetic oligonucleotide
cucaaaauaugucaacuua

SEQ ID NO: 117700 - RNA, 19 nt, Artificial Sequence
  Description of Artificial Sequence: Synthetic oligonucleotide
aaaaaaaaauaggcccuuu

SEQ ID NO: 117701 - RNA, 19 nt, Artificial Sequence
  Description of Artificial Sequence: Synthetic oligonucleotide
ucauaaaaaccaaacugua

SEQ ID NO: 117702 - RNA, 19 nt, Artificial Sequence
  Description of Artificial Sequence: Synthetic oligonucleotide
agcaagaugcaaaugcaug

SEQ ID NO: 117703 - RNA, 19 nt, Artificial Sequence
  Description of Artificial Sequence: Synthetic oligonucleotide
ggcaaauccugucggucuc

SEQ ID NO: 117704 - RNA, 19 nt, Artificial Sequence
  Description of Artificial Sequence: Synthetic oligonucleotide
ccaguugguuaucugaaua

SEQ ID NO: 117705 - RNA, 19 nt, Artificial Sequence
  Description of Artificial Sequence: Synthetic oligonucleotide
agugucaccaauuccacca

SEQ ID NO: 117706 - RNA, 19 nt, Artificial Sequence
  Description of Artificial Sequence: Synthetic oligonucleotide
aagacagugcugagauugg

SEQ ID NO: 117707 - RNA, 19 nt, Artificial Sequence
  Description of Artificial Sequence: Synthetic oligonucleotide
gaaaagggcacucauuugg

SEQ ID NO: 117708 - RNA, 19 nt, Artificial Sequence
  Description of Artificial Sequence: Synthetic oligonucleotide
gauugccuuacuucucuug

SEQ ID NO: 117709 - RNA, 19 nt, Artificial Sequence
  Description of Artificial Sequence: Synthetic oligonucleotide
gccuuaaauauaucccaua

SEQ ID NO: 117710 - RNA, 19 nt, Artificial Sequence
  Description of Artificial Sequence: Synthetic oligonucleotide
auauuuaauaugucaaaaa

SEQ ID NO: 117711 - RNA, 19 nt, Artificial Sequence
  Description of Artificial Sequence: Synthetic oligonucleotide
agggcuugaggugaauuuc

SEQ ID NO: 117712 - RNA, 19 nt, Artificial Sequence
  Description of Artificial Sequence: Synthetic oligonucleotide
cauuaaauggaauaauaug

SEQ ID NO: 117713 - RNA, 19 nt, Artificial Sequence
  Description of Artificial Sequence: Synthetic oligonucleotide
gaugccacuuugcagcuaa

SEQ ID NO: 117714 - RNA, 19 nt, Artificial Sequence
  Description of Artificial Sequence: Synthetic oligonucleotide
aaauaagcucagugauacc

SEQ ID NO: 117715 - RNA, 19 nt, Artificial Sequence
  Description of Artificial Sequence: Synthetic oligonucleotide
aagcucagugauaccuccu

SEQ ID NO: 117716 - RNA, 25 nt, Artificial Sequence
  Description of Artificial Sequence: Synthetic oligonucleotide
ggagggcagucggcggcucucgcgc

SEQ ID NO: 117717 - RNA, 25 nt, Artificial Sequence
  Description of Artificial Sequence: Synthetic oligonucleotide
ccccggccacuuucccugcgcgauu

SEQ ID NO: 117718 - RNA, 25 nt, Artificial Sequence
  Description of Artificial Sequence: Synthetic oligonucleotide
ucccggagcucccugcaggagguga

SEQ ID NO: 117719 - RNA, 25 nt, Artificial Sequence
  Description of Artificial Sequence: Synthetic oligonucleotide
agaguccccagcggguccggauggc

SEQ ID NO: 117720 - RNA, 25 nt, Artificial Sequence
  Description of Artificial Sequence: Synthetic oligonucleotide
cguaguuuugccgcggcgcagcagc

SEQ ID NO: 117721 - RNA, 25 nt, Artificial Sequence
  Description of Artificial Sequence: Synthetic oligonucleotide
cugccggagcucgccgccgccgagc

SEQ ID NO: 117722 - RNA, 25 nt, Artificial Sequence
  Description of Artificial Sequence: Synthetic oligonucleotide
cgcugggcggggaaacuugccgccg

SEQ ID NO: 117723 - RNA, 25 nt, Artificial Sequence
  Description of Artificial Sequence: Synthetic oligonucleotide
gcuuuccuccaacuugcugcgggug

SEQ ID NO: 117724 - RNA, 25 nt, Artificial Sequence
  Description of Artificial Sequence: Synthetic oligonucleotide
ggaucuccgcuggacacaccgccuc

SEQ ID NO: 117725 - RNA, 25 nt, Artificial Sequence
  Description of Artificial Sequence: Synthetic oligonucleotide
ccgaggcaguuugaaaauugcaagg

SEQ ID NO: 117726 - RNA, 25 nt, Artificial Sequence
  Description of Artificial Sequence: Synthetic oligonucleotide
gagggacuuuaagacuacuucugau

SEQ ID NO: 117727 - RNA, 25 nt, Artificial Sequence
  Description of Artificial Sequence: Synthetic oligonucleotide
uuugcaaagauugucugugcucuga

SEQ ID NO: 117728 - RNA, 25 nt, Artificial Sequence
  Description of Artificial Sequence: Synthetic oligonucleotide
agcaggcugaagugacuggacgaga

SEQ ID NO: 117729 - RNA, 25 nt, Artificial Sequence
  Description of Artificial Sequence: Synthetic oligonucleotide
acgcacuguuggagaaauaaaaaug

SEQ ID NO: 117730 - RNA, 25 nt, Artificial Sequence
  Description of Artificial Sequence: Synthetic oligonucleotide
gacuucccauuaugugauugccauc

SEQ ID NO: 117731 - RNA, 25 nt, Artificial Sequence
  Description of Artificial Sequence: Synthetic oligonucleotide
cuuugcccugaugagcuccuguuua

SEQ ID NO: 117732 - RNA, 25 nt, Artificial Sequence
  Description of Artificial Sequence: Synthetic oligonucleotide
agccacugcagguccagagccuggu

SEQ ID NO: 117733 - RNA, 25 nt, Artificial Sequence
  Description of Artificial Sequence: Synthetic oligonucleotide
ugcacugugugaacugucaccuguc

SEQ ID NO: 117734 - RNA, 25 nt, Artificial Sequence
  Description of Artificial Sequence: Synthetic oligonucleotide
cagugccucccauccuguccaggcc

SEQ ID NO: 117735 - RNA, 25 nt, Artificial Sequence
  Description of Artificial Sequence: Synthetic oligonucleotide
cuugauggagagcuucacuguuuug

SEQ ID NO: 117736 - RNA, 25 nt, Artificial Sequence
  Description of Artificial Sequence: Synthetic oligonucleotide
gucaggcugugccagcagaggcaca

SEQ ID NO: 117737 - RNA, 25 nt, Artificial Sequence
  Description of Artificial Sequence: Synthetic oligonucleotide
aacugggcugccacaggaggugcau

SEQ ID NO: 117738 - RNA, 25 nt, Artificial Sequence
  Description of Artificial Sequence: Synthetic oligonucleotide
uguccugaaucuccgcacugcgggc

SEQ ID NO: 117739 - RNA, 25 nt, Artificial Sequence
  Description of Artificial Sequence: Synthetic oligonucleotide
ccaggggccuggccagcuacagaga

SEQ ID NO: 117740 - RNA, 25 nt, Artificial Sequence
  Description of Artificial Sequence: Synthetic oligonucleotide
agaggucacacuucaccugaauccc

SEQ ID NO: 117741 - RNA, 25 nt, Artificial Sequence
  Description of Artificial Sequence: Synthetic oligonucleotide
caucuccucaguccacauccaccac

SEQ ID NO: 117742 - RNA, 25 nt, Artificial Sequence
  Description of Artificial Sequence: Synthetic oligonucleotide
caagucuguuguguuccugcucaac

SEQ ID NO: 117743 - RNA, 25 nt, Artificial Sequence
  Description of Artificial Sequence: Synthetic oligonucleotide
cuccccacacccccugguguggcau

SEQ ID NO: 117744 - RNA, 25 nt, Artificial Sequence
  Description of Artificial Sequence: Synthetic oligonucleotide
ucugaagacagagagacuugccacu

SEQ ID NO: 117745 - RNA, 25 nt, Artificial Sequence
  Description of Artificial Sequence: Synthetic oligonucleotide
uggggucuccagacuguuuuuggug

SEQ ID NO: 117746 - RNA, 25 nt, Artificial Sequence
  Description of Artificial Sequence: Synthetic oligonucleotide
gucugaggguucugugguccaguuu

SEQ ID NO: 117747 - RNA, 25 nt, Artificial Sequence
  Description of Artificial Sequence: Synthetic oligonucleotide
uucaucagcaaacuucuccuugaca

SEQ ID NO: 117748 - RNA, 25 nt, Artificial Sequence
  Description of Artificial Sequence: Synthetic oligonucleotide
agcagaaacagaagaaaggaacuuc

SEQ ID NO: 117749 - RNA, 25 nt, Artificial Sequence
  Description of Artificial Sequence: Synthetic oligonucleotide
cccccauggaaaugaacaucuguua

SEQ ID NO: 117750 - RNA, 25 nt, Artificial Sequence
  Description of Artificial Sequence: Synthetic oligonucleotide
aaauugggcccgaaaagaguaugga

SEQ ID NO: 117751 - RNA, 25 nt, Artificial Sequence
  Description of Artificial Sequence: Synthetic oligonucleotide
agcaguuacuucauucaccgaacuc

SEQ ID NO: 117752 - RNA, 25 nt, Artificial Sequence
  Description of Artificial Sequence: Synthetic oligonucleotide
caagauagcaagaaacauuuauauu

SEQ ID NO: 117753 - RNA, 25 nt, Artificial Sequence
  Description of Artificial Sequence: Synthetic oligonucleotide
uaaagugggggaagaucaaguguuc

SEQ ID NO: 117754 - RNA, 25 nt, Artificial Sequence
  Description of Artificial Sequence: Synthetic oligonucleotide
cccuccaaagugcaacauagggaag

SEQ ID NO: 117755 - RNA, 25 nt, Artificial Sequence
  Description of Artificial Sequence: Synthetic oligonucleotide
gaauuuucucucacucaauuaccuu

SEQ ID NO: 117756 - RNA, 25 nt, Artificial Sequence
  Description of Artificial Sequence: Synthetic oligonucleotide
ugcugaguaccuucaacccaaagca

SEQ ID NO: 117757 - RNA, 25 nt, Artificial Sequence
  Description of Artificial Sequence: Synthetic oligonucleotide
agcagaagggugugugauguccagc

SEQ ID NO: 117758 - RNA, 25 nt, Artificial Sequence
  Description of Artificial Sequence: Synthetic oligonucleotide
ccagccccagaaugaggaaguacac

SEQ ID NO: 117759 - RNA, 25 nt, Artificial Sequence
  Description of Artificial Sequence: Synthetic oligonucleotide
caucaucgagcuaaucacccccaac

SEQ ID NO: 117760 - RNA, 25 nt, Artificial Sequence
  Description of Artificial Sequence: Synthetic oligonucleotide
cucuaaccccuacagugcuuuccag

SEQ ID NO: 117761 - RNA, 25 nt, Artificial Sequence
  Description of Artificial Sequence: Synthetic oligonucleotide
gguggauauaacaauugauauaaga

SEQ ID NO: 117762 - RNA, 25 nt, Artificial Sequence
  Description of Artificial Sequence: Synthetic oligonucleotide
accuucucaagaggaucuugaagug

SEQ ID NO: 117763 - RNA, 25 nt, Artificial Sequence
  Description of Artificial Sequence: Synthetic oligonucleotide
ggucaaaaaucucauccugaucuug

SEQ ID NO: 117764 - RNA, 25 nt, Artificial Sequence
  Description of Artificial Sequence: Synthetic oligonucleotide
gaagugcaaaaagucugucaacugg

SEQ ID NO: 117765 - RNA, 25 nt, Artificial Sequence
  Description of Artificial Sequence: Synthetic oligonucleotide
ggugaucaaaucuuuugauguuaag

SEQ ID NO: 117766 - RNA, 25 nt, Artificial Sequence
  Description of Artificial Sequence: Synthetic oligonucleotide
gggaagccugaaaauuauugcuccu

SEQ ID NO: 117767 - RNA, 25 nt, Artificial Sequence
  Description of Artificial Sequence: Synthetic oligonucleotide
uaacaguauuggcuuuggaaaagag

SEQ ID NO: 117768 - RNA, 25 nt, Artificial Sequence
  Description of Artificial Sequence: Synthetic oligonucleotide
gagugaaagaucuaugacaaugacc

SEQ ID NO: 117769 - RNA, 25 nt, Artificial Sequence
  Description of Artificial Sequence: Synthetic oligonucleotide
caaaucaauaagagaugacauuccu

SEQ ID NO: 117770 - RNA, 25 nt, Artificial Sequence
  Description of Artificial Sequence: Synthetic oligonucleotide
uucaacccaagggaaucuggugaag

SEQ ID NO: 117771 - RNA, 25 nt, Artificial Sequence
  Description of Artificial Sequence: Synthetic oligonucleotide
gugggcuuuggacaauggcuauagu

SEQ ID NO: 117772 - RNA, 25 nt, Artificial Sequence
  Description of Artificial Sequence: Synthetic oligonucleotide
uccaauaacuucauacacaauggcu

SEQ ID NO: 117773 - RNA, 25 nt, Artificial Sequence
  Description of Artificial Sequence: Synthetic oligonucleotide
uccuguggcuaauagauuucaucuu

SEQ ID NO: 117774 - RNA, 25 nt, Artificial Sequence
  Description of Artificial Sequence: Synthetic oligonucleotide
ucggcuugaaaauaaugcagaggag

SEQ ID NO: 117775 - RNA, 25 nt, Artificial Sequence
  Description of Artificial Sequence: Synthetic oligonucleotide
gaugggagaugaggaaguccacacu

SEQ ID NO: 117776 - RNA, 25 nt, Artificial Sequence
  Description of Artificial Sequence: Synthetic oligonucleotide
uauuccuccugagcuacggauccug

SEQ ID NO: 117777 - RNA, 25 nt, Artificial Sequence
  Description of Artificial Sequence: Synthetic oligonucleotide
gcuggacccuggugcccugccugcc

SEQ ID NO: 117778 - RNA, 25 nt, Artificial Sequence
  Description of Artificial Sequence: Synthetic oligonucleotide
ccugcagaacccgcccauccgggga

SEQ ID NO: 117779 - RNA, 25 nt, Artificial Sequence
  Description of Artificial Sequence: Synthetic oligonucleotide
aggggaaggccaaaauggaggccuu

SEQ ID NO: 117780 - RNA, 25 nt, Artificial Sequence
  Description of Artificial Sequence: Synthetic oligonucleotide
uccguuuccuuucccagauauuucc

SEQ ID NO: 117781 - RNA, 25 nt, Artificial Sequence
  Description of Artificial Sequence: Synthetic oligonucleotide
caggagagucuggaaugaagaggga

SEQ ID NO: 117782 - RNA, 25 nt, Artificial Sequence
  Description of Artificial Sequence: Synthetic oligonucleotide
agaagaugggcucccucggccaaag

SEQ ID NO: 117783 - RNA, 25 nt, Artificial Sequence
  Description of Artificial Sequence: Synthetic oligonucleotide
ggacccugucauucccagcauacaa

SEQ ID NO: 117784 - RNA, 25 nt, Artificial Sequence
  Description of Artificial Sequence: Synthetic oligonucleotide
acuguuuccuggucucagagagcca

SEQ ID NO: 117785 - RNA, 25 nt, Artificial Sequence
  Description of Artificial Sequence: Synthetic oligonucleotide
agaagaggugcaagggagcguggau

SEQ ID NO: 117786 - RNA, 25 nt, Artificial Sequence
  Description of Artificial Sequence: Synthetic oligonucleotide
uauugcccugucugucaaaugugac

SEQ ID NO: 117787 - RNA, 25 nt, Artificial Sequence
  Description of Artificial Sequence: Synthetic oligonucleotide
caaugagaagaugaucguggcugua

SEQ ID NO: 117788 - RNA, 25 nt, Artificial Sequence
  Description of Artificial Sequence: Synthetic oligonucleotide
agaaaaagauucuuuucaggccagu

SEQ ID NO: 117789 - RNA, 25 nt, Artificial Sequence
  Description of Artificial Sequence: Synthetic oligonucleotide
uggcuacucggggauggacgucacc

SEQ ID NO: 117790 - RNA, 25 nt, Artificial Sequence
  Description of Artificial Sequence: Synthetic oligonucleotide
ccuguuggauccuaccugcaaggcc

SEQ ID NO: 117791 - RNA, 25 nt, Artificial Sequence
  Description of Artificial Sequence: Synthetic oligonucleotide
caagaugaauggcacacacuuuguu

SEQ ID NO: 117792 - RNA, 25 nt, Artificial Sequence
  Description of Artificial Sequence: Synthetic oligonucleotide
uuuggagucuccucugaauggcugc

SEQ ID NO: 117793 - RNA, 25 nt, Artificial Sequence
  Description of Artificial Sequence: Synthetic oligonucleotide
cgguacucggccccgguggucagcc

SEQ ID NO: 117794 - RNA, 25 nt, Artificial Sequence
  Description of Artificial Sequence: Synthetic oligonucleotide
ccuugaugguguggucuacuauaac

SEQ ID NO: 117795 - RNA, 25 nt, Artificial Sequence
  Description of Artificial Sequence: Synthetic oligonucleotide
cuccauugugauacagguuccagcc

SEQ ID NO: 117796 - RNA, 25 nt, Artificial Sequence
  Description of Artificial Sequence: Synthetic oligonucleotide
ccuuggggacaguagugguuggcca

SEQ ID NO: 117797 - RNA, 25 nt, Artificial Sequence
  Description of Artificial Sequence: Synthetic oligonucleotide
agaugguuaugaagaucuggaguca

SEQ ID NO: 117798 - RNA, 25 nt, Artificial Sequence
  Description of Artificial Sequence: Synthetic oligonucleotide
aggugauaauggauuuccgggagau

SEQ ID NO: 117799 - RNA, 25 nt, Artificial Sequence
  Description of Artificial Sequence: Synthetic oligonucleotide
uauggaugaaggagaugcuucccug

SEQ ID NO: 117800 - RNA, 25 nt, Artificial Sequence
  Description of Artificial Sequence: Synthetic oligonucleotide
guucacccgaccugaaaucguggug

SEQ ID NO: 117801 - RNA, 25 nt, Artificial Sequence
  Description of Artificial Sequence: Synthetic oligonucleotide
guuuaauugcagccuucagcaggug

SEQ ID NO: 117802 - RNA, 25 nt, Artificial Sequence
  Description of Artificial Sequence: Synthetic oligonucleotide
gaggaaccccagcagcuuccaggaa

SEQ ID NO: 117803 - RNA, 25 nt, Artificial Sequence
  Description of Artificial Sequence: Synthetic oligonucleotide
acagccccacggaaacaucaccuuc

SEQ ID NO: 117804 - RNA, 25 nt, Artificial Sequence
  Description of Artificial Sequence: Synthetic oligonucleotide
caacauggagcuauacaacacugac

SEQ ID NO: 117805 - RNA, 25 nt, Artificial Sequence
  Description of Artificial Sequence: Synthetic oligonucleotide
ccucuuuuuggugcccucccagggc

SEQ ID NO: 117806 - RNA, 25 nt, Artificial Sequence
  Description of Artificial Sequence: Synthetic oligonucleotide
cgucuucucugugccagagaaugga

SEQ ID NO: 117807 - RNA, 25 nt, Artificial Sequence
  Description of Artificial Sequence: Synthetic oligonucleotide
acacguuuauguugagguaucuguu

SEQ ID NO: 117808 - RNA, 25 nt, Artificial Sequence
  Description of Artificial Sequence: Synthetic oligonucleotide
uacuaaggcugaacaagaacuggga

SEQ ID NO: 117809 - RNA, 25 nt, Artificial Sequence
  Description of Artificial Sequence: Synthetic oligonucleotide
auuugccauccaaacgugcuuuauc

SEQ ID NO: 117810 - RNA, 25 nt, Artificial Sequence
  Description of Artificial Sequence: Synthetic oligonucleotide
cucuccauauucgaacccugauagg

SEQ ID NO: 117811 - RNA, 25 nt, Artificial Sequence
  Description of Artificial Sequence: Synthetic oligonucleotide
gaugucucauuacaccauuauugag

SEQ ID NO: 117812 - RNA, 25 nt, Artificial Sequence
  Description of Artificial Sequence: Synthetic oligonucleotide
gaauauuuguccuaaagaugaaucu

SEQ ID NO: 117813 - RNA, 25 nt, Artificial Sequence
  Description of Artificial Sequence: Synthetic oligonucleotide
ugugaaauucuacagucccaagaga

SEQ ID NO: 117814 - RNA, 25 nt, Artificial Sequence
  Description of Artificial Sequence: Synthetic oligonucleotide
agugcacuucccuaucccgcaagcu

SEQ ID NO: 117815 - RNA, 25 nt, Artificial Sequence
  Description of Artificial Sequence: Synthetic oligonucleotide
ugacauggauaagaagcgauucagc

SEQ ID NO: 117816 - RNA, 25 nt, Artificial Sequence
  Description of Artificial Sequence: Synthetic oligonucleotide
cuuugucuucaagccugucuucaac

SEQ ID NO: 117817 - RNA, 25 nt, Artificial Sequence
  Description of Artificial Sequence: Synthetic oligonucleotide
caccucacugcucuuucuacagugu

SEQ ID NO: 117818 - RNA, 25 nt, Artificial Sequence
  Description of Artificial Sequence: Synthetic oligonucleotide
ugagcugacgcuguguacgaagaug

SEQ ID NO: 117819 - RNA, 25 nt, Artificial Sequence
  Description of Artificial Sequence: Synthetic oligonucleotide
ggagaagcacccccagaaguugccu

SEQ ID NO: 117820 - RNA, 25 nt, Artificial Sequence
  Description of Artificial Sequence: Synthetic oligonucleotide
uaagugugugccuccugacgaagcc

SEQ ID NO: 117821 - RNA, 25 nt, Artificial Sequence
  Description of Artificial Sequence: Synthetic oligonucleotide
cugcaccucgcuggacgccucgaua

SEQ ID NO: 117822 - RNA, 25 nt, Artificial Sequence
  Description of Artificial Sequence: Synthetic oligonucleotide
aaucugggccaugaugcagaauaag

SEQ ID NO: 117823 - RNA, 25 nt, Artificial Sequence
  Description of Artificial Sequence: Synthetic oligonucleotide
gaagacguucaccaagccccuugcu

SEQ ID NO: 117824 - RNA, 25 nt, Artificial Sequence
  Description of Artificial Sequence: Synthetic oligonucleotide
ugugauccaccaugaagcagaaucu

SEQ ID NO: 117825 - RNA, 25 nt, Artificial Sequence
  Description of Artificial Sequence: Synthetic oligonucleotide
uaaagaaaaagguccaagcaugaag

SEQ ID NO: 117826 - RNA, 25 nt, Artificial Sequence
  Description of Artificial Sequence: Synthetic oligonucleotide
ggaaccaaauccaauuucuccacca

SEQ ID NO: 117827 - RNA, 25 nt, Artificial Sequence
  Description of Artificial Sequence: Synthetic oligonucleotide
aauuuuccauggucuggacacccua

SEQ ID NO: 117828 - RNA, 25 nt, Artificial Sequence
  Description of Artificial Sequence: Synthetic oligonucleotide
aaccgugaugggcauugcguuugca

SEQ ID NO: 117829 - RNA, 25 nt, Artificial Sequence
  Description of Artificial Sequence: Synthetic oligonucleotide
agccuuugugaucggagcacuccug

SEQ ID NO: 117830 - RNA, 25 nt, Artificial Sequence
  Description of Artificial Sequence: Synthetic oligonucleotide
gacgggggccuugugguacaucuau

SEQ ID NO: 117831 - RNA, 25 nt, Artificial Sequence
  Description of Artificial Sequence: Synthetic oligonucleotide
uucucacacaggggagacagcagga

SEQ ID NO: 117832 - RNA, 25 nt, Artificial Sequence
  Description of Artificial Sequence: Synthetic oligonucleotide
aaggcagcaaguccccaccuccccg

SEQ ID NO: 117833 - RNA, 25 nt, Artificial Sequence
  Description of Artificial Sequence: Synthetic oligonucleotide
gccagccucggaaaacagcagugcu

SEQ ID NO: 117834 - RNA, 25 nt, Artificial Sequence
  Description of Artificial Sequence: Synthetic oligonucleotide
ugcccacagcaucggcagcacgcag

SEQ ID NO: 117835 - RNA, 25 nt, Artificial Sequence
  Description of Artificial Sequence: Synthetic oligonucleotide
gagcacgccuugcuccagcagcagc

SEQ ID NO: 117836 - RNA, 25 nt, Artificial Sequence
  Description of Artificial Sequence: Synthetic oligonucleotide
cacggccuagcccaacccagcccaa

SEQ ID NO: 117837 - RNA, 25 nt, Artificial Sequence
  Description of Artificial Sequence: Synthetic oligonucleotide
acccggcccaacccagcccagccca

SEQ ID NO: 117838 - RNA, 25 nt, Artificial Sequence
  Description of Artificial Sequence: Synthetic oligonucleotide
agcucagcucagcuacugccaaggg

SEQ ID NO: 117839 - RNA, 25 nt, Artificial Sequence
  Description of Artificial Sequence: Synthetic oligonucleotide
gcaggaccaauggcugagccucgug

SEQ ID NO: 117840 - RNA, 25 nt, Artificial Sequence
  Description of Artificial Sequence: Synthetic oligonucleotide
guccagacucagagggcuggauuuu

SEQ ID NO: 117841 - RNA, 25 nt, Artificial Sequence
  Description of Artificial Sequence: Synthetic oligonucleotide
ugguucccuuguaaagacagaguga

SEQ ID NO: 117842 - RNA, 25 nt, Artificial Sequence
  Description of Artificial Sequence: Synthetic oligonucleotide
aauuucaguauaaagaucacccguu

SEQ ID NO: 117843 - RNA, 25 nt, Artificial Sequence
  Description of Artificial Sequence: Synthetic oligonucleotide
uguauucaccccacacccagggcua

SEQ ID NO: 117844 - RNA, 25 nt, Artificial Sequence
  Description of Artificial Sequence: Synthetic oligonucleotide
aguauaaacaugacccugggcuucu

SEQ ID NO: 117845 - RNA, 25 nt, Artificial Sequence
  Description of Artificial Sequence: Synthetic oligonucleotide
uguaccacacuagaauucaugugag

SEQ ID NO: 117846 - RNA, 25 nt, Artificial Sequence
  Description of Artificial Sequence: Synthetic oligonucleotide
gaaagcuaaaaugguggucuucucc

SEQ ID NO: 117847 - RNA, 25 nt, Artificial Sequence
  Description of Artificial Sequence: Synthetic oligonucleotide
caccagccccucacaggcuuggggg

SEQ ID NO: 117848 - RNA, 25 nt, Artificial Sequence
  Description of Artificial Sequence: Synthetic oligonucleotide
guuuucaaugugaaacacaugccag

SEQ ID NO: 117849 - RNA, 25 nt, Artificial Sequence
  Description of Artificial Sequence: Synthetic oligonucleotide
guuuuuaaaaugcugcuuuguccag

SEQ ID NO: 117850 - RNA, 25 nt, Artificial Sequence
  Description of Artificial Sequence: Synthetic oligonucleotide
ggugagaacauccauaauuuggggc

SEQ ID NO: 117851 - RNA, 25 nt, Artificial Sequence
  Description of Artificial Sequence: Synthetic oligonucleotide
cccugaguuuuacccagacucaagg

SEQ ID NO: 117852 - RNA, 25 nt, Artificial Sequence
  Description of Artificial Sequence: Synthetic oligonucleotide
gaguugguaaaggguuaauagccag

SEQ ID NO: 117853 - RNA, 25 nt, Artificial Sequence
  Description of Artificial Sequence: Synthetic oligonucleotide
gauaguagaaccagugaggagaugc

SEQ ID NO: 117854 - RNA, 25 nt, Artificial Sequence
  Description of Artificial Sequence: Synthetic oligonucleotide
cggccaaagauucuuuauaucugaa

SEQ ID NO: 117855 - RNA, 25 nt, Artificial Sequence
  Description of Artificial Sequence: Synthetic oligonucleotide
accaagauguaaaacaagaaaugcu

SEQ ID NO: 117856 - RNA, 25 nt, Artificial Sequence
  Description of Artificial Sequence: Synthetic oligonucleotide
uuugaggcuuucuaagcgauccucc

SEQ ID NO: 117857 - RNA, 25 nt, Artificial Sequence
  Description of Artificial Sequence: Synthetic oligonucleotide
cugucuaauuugcaccuuugucugg

SEQ ID NO: 117858 - RNA, 25 nt, Artificial Sequence
  Description of Artificial Sequence: Synthetic oligonucleotide
gaugcacacuucugaccuugcugcc

SEQ ID NO: 117859 - RNA, 25 nt, Artificial Sequence
  Description of Artificial Sequence: Synthetic oligonucleotide
cacaaccuguggggucugauguguc

SEQ ID NO: 117860 - RNA, 25 nt, Artificial Sequence
  Description of Artificial Sequence: Synthetic oligonucleotide
cccuugaugggugcugcccucaggg

SEQ ID NO: 117861 - RNA, 25 nt, Artificial Sequence
  Description of Artificial Sequence: Synthetic oligonucleotide
gacugcacccugacaaguguuaagg

SEQ ID NO: 117862 - RNA, 25 nt, Artificial Sequence
  Description of Artificial Sequence: Synthetic oligonucleotide
gcaacauuccuuucuugugcccugg

SEQ ID NO: 117863 - RNA, 25 nt, Artificial Sequence
  Description of Artificial Sequence: Synthetic oligonucleotide
ggccaaaaccaaugcugaugaccuu

SEQ ID NO: 117864 - RNA, 25 nt, Artificial Sequence
  Description of Artificial Sequence: Synthetic oligonucleotide
uaucagcuuccuguuucuucccaua

SEQ ID NO: 117865 - RNA, 25 nt, Artificial Sequence
  Description of Artificial Sequence: Synthetic oligonucleotide
acuugcauacaccacugcaaaaugu

SEQ ID NO: 117866 - RNA, 25 nt, Artificial Sequence
  Description of Artificial Sequence: Synthetic oligonucleotide
ucuuaaugcaaauuuuguauuucuu

SEQ ID NO: 117867 - RNA, 25 nt, Artificial Sequence
  Description of Artificial Sequence: Synthetic oligonucleotide
uacaggccuacagaaauugaaaaug

SEQ ID NO: 117868 - RNA, 25 nt, Artificial Sequence
  Description of Artificial Sequence: Synthetic oligonucleotide
gaccaaaaucaggaaccacagauuu

SEQ ID NO: 117869 - RNA, 25 nt, Artificial Sequence
  Description of Artificial Sequence: Synthetic oligonucleotide
ugugcccauuccuaauauuuuguuc

SEQ ID NO: 117870 - RNA, 25 nt, Artificial Sequence
  Description of Artificial Sequence: Synthetic oligonucleotide
cugcaaauuaauguauaauuugagg

SEQ ID NO: 117871 - RNA, 25 nt, Artificial Sequence
  Description of Artificial Sequence: Synthetic oligonucleotide
gugaaauucaguuauaaagucaagg

SEQ ID NO: 117872 - RNA, 25 nt, Artificial Sequence
  Description of Artificial Sequence: Synthetic oligonucleotide
gacgaauuugcacagugauauauuu

SEQ ID NO: 117873 - RNA, 25 nt, Artificial Sequence
  Description of Artificial Sequence: Synthetic oligonucleotide
ucuauguguaugcaaguacaaguau

SEQ ID NO: 117874 - RNA, 25 nt, Artificial Sequence
  Description of Artificial Sequence: Synthetic oligonucleotide
uauaauaugucaccuggcacauuca

SEQ ID NO: 117875 - RNA, 25 nt, Artificial Sequence
  Description of Artificial Sequence: Synthetic oligonucleotide
auuuucucaguugaagaagagaaaa

SEQ ID NO: 117876 - RNA, 25 nt, Artificial Sequence
  Description of Artificial Sequence: Synthetic oligonucleotide
auuugaaaauguccuuaugcuuuua

SEQ ID NO: 117877 - RNA, 25 nt, Artificial Sequence
  Description of Artificial Sequence: Synthetic oligonucleotide
agaguugcaacuuaaguauauuugg

SEQ ID NO: 117878 - RNA, 25 nt, Artificial Sequence
  Description of Artificial Sequence: Synthetic oligonucleotide
guagggugaguguuuccacucaaaa

SEQ ID NO: 117879 - RNA, 25 nt, Artificial Sequence
  Description of Artificial Sequence: Synthetic oligonucleotide
auaugucaacuuaaaaaaaaauagg

SEQ ID NO: 117880 - RNA, 25 nt, Artificial Sequence
  Description of Artificial Sequence: Synthetic oligonucleotide
gcccuuucauaaaaaccaaacugua

SEQ ID NO: 117881 - RNA, 25 nt, Artificial Sequence
  Description of Artificial Sequence: Synthetic oligonucleotide
agcaagaugcaaaugcauggcaaau

SEQ ID NO: 117882 - RNA, 25 nt, Artificial Sequence
  Description of Artificial Sequence: Synthetic oligonucleotide
uccugucggucuccaguugguuauc

SEQ ID NO: 117883 - RNA, 25 nt, Artificial Sequence
  Description of Artificial Sequence: Synthetic oligonucleotide
cugaauagugucaccaauuccacca

SEQ ID NO: 117884 - RNA, 25 nt, Artificial Sequence
  Description of Artificial Sequence: Synthetic oligonucleotide
aagacagugcugagauuggaaaagg

SEQ ID NO: 117885 - RNA, 25 nt, Artificial Sequence
  Description of Artificial Sequence: Synthetic oligonucleotide
ggcacucauuuggauugccuuacuu

SEQ ID NO: 117886 - RNA, 25 nt, Artificial Sequence
  Description of Artificial Sequence: Synthetic oligonucleotide
ucucuugccuuaaauauaucccaua

SEQ ID NO: 117887 - RNA, 25 nt, Artificial Sequence
  Description of Artificial Sequence: Synthetic oligonucleotide
auauuuaauaugucaaaaagggcuu

SEQ ID NO: 117888 - RNA, 25 nt, Artificial Sequence
  Description of Artificial Sequence: Synthetic oligonucleotide
ugaggugaauuucauuaaauggaau

SEQ ID NO: 117889 - RNA, 25 nt, Artificial Sequence
  Description of Artificial Sequence: Synthetic oligonucleotide
uaauaugaugccacuuugcagcuaa

SEQ ID NO: 117890 - RNA, 25 nt, Artificial Sequence
  Description of Artificial Sequence: Synthetic oligonucleotide
uaaaauaagcucagugauaccuccu

SEQ ID NO: 117891 - DNA, 21 bp, Artificial Sequence
  Description of Artificial Sequence: Synthetic oligonucleotide
  Description of Combined DNA/RNA Molecule: Synthetic oligonucleotide
cuacacaaaucagcgauuutt

SEQ ID NO: 117892 - DNA, 21 bp, Artificial Sequence
  Description of Artificial Sequence: Synthetic oligonucleotide
  Description of Combined DNA/RNA Molecule: Synthetic oligonucleotide
aaaucgcugauuuguguagtt

SEQ ID NO: 117893 - DNA, 25 bp, Artificial Sequence
  Description of Artificial Sequence: Synthetic oligonucleotide
  Description of Combined DNA/RNA Molecule: Synthetic oligonucleotide
cuacacaaaucagcgauuuccaugt

SEQ ID NO: 117894 - RNA, 27 nt, Artificial Sequence
  Description of Artificial Sequence: Synthetic oligonucleotide
acauggaaaucgcugauuuguguaguc

SEQ ID NO: 117895 - RNA, 13 nt, Artificial Sequence
  Description of Artificial Sequence: Synthetic oligonucleotide
cuacacaaaucag

SEQ ID NO: 117896 - DNA, 11 bp, Artificial Sequence
  Description of Artificial Sequence: Synthetic oligonucleotide
  Description of Combined DNA/RNA Molecule: Synthetic oligonucleotide
gauuuccaugt

SEQ ID NO: 117897 - DNA, 21 bp, Artificial Sequence
  Description of Artificial Sequence: Synthetic oligonucleotide
  Description of Combined DNA/RNA Molecule: Synthetic oligonucleotide
ggaucuuauuucuucggagtt

SEQ ID NO: 117898 - DNA, 21 bp, Artificial Sequence
  Description of Artificial Sequence: Synthetic oligonucleotide
  Description of Combined DNA/RNA Molecule: Synthetic oligonucleotide
cuccgaagaaauaagaucctt

SEQ ID NO: 117899 - RNA, 11 nt, Artificial Sequence
  Description of Artificial Sequence: Synthetic oligonucleotide
ggaucuuauuu

SEQ ID NO: 117900 - DNA, 10 bp, Artificial Sequence
  Description of Artificial Sequence: Synthetic oligonucleotide
  Description of Combined DNA/RNA Molecule: Synthetic oligonucleotide
cuucggagtt

SEQ ID NO: 117901 - RNA, 27 nt, Artificial Sequence
  Description of Artificial Sequence: Synthetic oligonucleotide
cauugucuccgaagaaauaagauccuu

SEQ ID NO: 117902 - RNA, 8 nt, Artificial Sequence
  Description of Artificial Sequence: Synthetic oligonucleotide
  modified_base (2): LNA-G
ggaucuua

SEQ ID NO: 117903 - DNA, 17 bp, Artificial Sequence
  Description of Artificial Sequence: Synthetic oligonucleotide
  Description of Combined DNA/RNA Molecule: Synthetic oligonucleotide
uuucuucggagacaatg

SEQ ID NO: 117904 - DNA, 16 bp, Artificial Sequence
  Description of Artificial Sequence: Synthetic oligonucleotide
  Description of Combined DNA/RNA Molecule: Synthetic oligonucleotide
uucuucggagacaatg

SEQ ID NO: 117905 - DNA, 15 bp, Artificial Sequence
  Description of Artificial Sequence: Synthetic oligonucleotide
  Description of Combined DNA/RNA Molecule: Synthetic oligonucleotide
ucuucggagacaatg

SEQ ID NO: 117906 - DNA, 14 bp, Artificial Sequence
  Description of Artificial Sequence: Synthetic oligonucleotide
  Description of Combined DNA/RNA Molecule: Synthetic oligonucleotide
cuucggagacaatg

SEQ ID NO: 117907 - DNA, 13 bp, Artificial Sequence
  Description of Artificial Sequence: Synthetic oligonucleotide
  Description of Combined DNA/RNA Molecule: Synthetic oligonucleotide
uucggagacaatg

SEQ ID NO: 117908 - DNA, 12 bp, Artificial Sequence
  Description of Artificial Sequence: Synthetic oligonucleotide
  Description of Combined DNA/RNA Molecule: Synthetic oligonucleotide
ucggagacaatg

SEQ ID NO: 117909 - DNA, 11 bp, Artificial Sequence
  Description of Artificial Sequence: Synthetic oligonucleotide
  Description of Combined DNA/RNA Molecule: Synthetic oligonucleotide
cggagacaatg

SEQ ID NO: 117910 - RNA, 9 nt, Artificial Sequence
  Description of Artificial Sequence: Synthetic oligonucleotide
  modified_base (2): LNA-G
ggaucuuau

SEQ ID NO: 117911 - RNA, 10 nt, Artificial Sequence
  Description of Artificial Sequence: Synthetic oligonucleotide
  modified_base (2): LNA-G
ggaucuuauu

SEQ ID NO: 117912 - RNA, 11 nt, Artificial Sequence
  Description of Artificial Sequence: Synthetic oligonucleotide
  modified_base (2): LNA-G
ggaucuuauuu

SEQ ID NO: 117913 - RNA, 12 nt, Artificial Sequence
  Description of Artificial Sequence: Synthetic oligonucleotide
  modified_base (2): LNA-G
ggaucuuauuuc

SEQ ID NO: 117914 - RNA, 8 nt, Artificial Sequence
  Description of Artificial Sequence: Synthetic oligonucleotide
  modified_base (3): LNA-A
cuacacaa

SEQ ID NO: 117915 - DNA, 13 bp, Artificial Sequence
  Description of Artificial Sequence: Synthetic oligonucleotide
  Description of Combined DNA/RNA Molecule: Synthetic oligonucleotide
  modified_base (8): LNA-A
aucagcgauuutt

SEQ ID NO: 117916 - DNA, 12 bp, Artificial Sequence
  Description of Artificial Sequence: Synthetic oligonucleotide
  Description of Combined DNA/RNA Molecule: Synthetic oligonucleotide
  modified_base (7): LNA-A
ucagcgauuutt

SEQ ID NO: 117917 - DNA, 11 bp, Artificial Sequence
  Description of Artificial Sequence: Synthetic oligonucleotide
  Description of Combined DNA/RNA Molecule: Synthetic oligonucleotide
  modified_base (6): LNA-A
cagcgauuutt

SEQ ID NO: 117918 - DNA, 10 bp, Artificial Sequence
  Description of Artificial Sequence: Synthetic oligonucleotide
  Description of Combined DNA/RNA Molecule: Synthetic oligonucleotide
  modified_base (5): LNA-A
agcgauuutt

SEQ ID NO: 117919 - DNA, 9 bp, Artificial Sequence
  Description of Artificial Sequence: Synthetic oligonucleotide
  Description of Combined DNA/RNA Molecule: Synthetic oligonucleotide
  modified_base (4): LNA-A
gcgauuutt

SEQ ID NO: 117920 - DNA, 8 bp, Artificial Sequence
  Description of Artificial Sequence: Synthetic oligonucleotide
  Description of Combined DNA/RNA Molecule: Synthetic oligonucleotide
  modified_base (3): LNA-A
cgauuutt

SEQ ID NO: 117921 - DNA, 7 bp, Artificial Sequence
  Description of Artificial Sequence: Synthetic oligonucleotide
  Description of Combined DNA/RNA Molecule: Synthetic oligonucleotide
  modified_base (2): LNA-A
gauuutt

SEQ ID NO: 117922 - RNA, 9 nt, Artificial Sequence
  Description of Artificial Sequence: Synthetic oligonucleotide
  modified_base (3): LNA-A
cuacacaaa

SEQ ID NO: 117923 - RNA, 10 nt, Artificial Sequence
  Description of Artificial Sequence: Synthetic oligonucleotide
  modified_base (3): LNA-A
cuacacaaau

SEQ ID NO: 117924 - RNA, 11 nt, Artificial Sequence
  Description of Artificial Sequence: Synthetic oligonucleotide
  modified_base (3): LNA-A
cuacacaaauc

SEQ ID NO: 117925 - RNA, 12 nt, Artificial Sequence
  Description of Artificial Sequence: Synthetic oligonucleotide
  modified_base (3): LNA-A
cuacacaaauca

SEQ ID NO: 117926 - RNA, 13 nt, Artificial Sequence
  Description of Artificial Sequence: Synthetic oligonucleotide
  modified_base (3): LNA-A
cuacacaaaucag

SEQ ID NO: 117927 - RNA, 14 nt, Artificial Sequence
  Description of Artificial Sequence: Synthetic oligonucleotide
  modified_base (3): LNA-A
cuacacaaaucagc

SEQ ID NO: 117928 - RNA, 13 nt, Artificial Sequence
  Description of Artificial Sequence: Synthetic oligonucleotide
  modified_base (2): LNA-G
ggaucuuauuucu

SEQ ID NO: 117929 - RNA, 14 nt, Artificial Sequence
  Description of Artificial Sequence: Synthetic oligonucleotide
  modified_base (2): LNA-G
ggaucuuauuucuu

SEQ ID NO: 117930 - RNA, 8 nt, Artificial Sequence
  Description of Artificial Sequence: Synthetic oligonucleotide
  modified_base (2): LNA-G
  modified_base (8): LNA-A
ggaucuua

SEQ ID NO: 117931 - RNA, 9 nt, Artificial Sequence
  Description of Artificial Sequence: Synthetic oligonucleotide
  modified_base (2): LNA-G
  modified_base (9): LNA-U
ggaucuuau

SEQ ID NO: 117932 - RNA, 10 nt, Artificial Sequence
  Description of Artificial Sequence: Synthetic oligonucleotide
  modified_base (2): LNA-G
  modified_base (10): LNA-U
ggaucuuauu

SEQ ID NO: 117933 - RNA, 11 nt, Artificial Sequence
  Description of Artificial Sequence: Synthetic oligonucleotide
  modified_base (2): LNA-G
  modified_base (11): LNA-U
ggaucuuauuu

SEQ ID NO: 117934 - RNA, 12 nt, Artificial Sequence
  Description of Artificial Sequence: Synthetic oligonucleotide
  modified_base (2): LNA-G
  modified_base (12): LNA-C
ggaucuuauuuc

SEQ ID NO: 117935 - RNA, 13 nt, Artificial Sequence
  Description of Artificial Sequence: Synthetic oligonucleotide
  modified_base (2): LNA-G
  modified_base (13): LNA-U
ggaucuuauuucu

SEQ ID NO: 117936 - RNA, 14 nt, Artificial Sequence
  Description of Artificial Sequence: Synthetic oligonucleotide
  modified_base (2): LNA-G
  modified_base (14): LNA-U
ggaucuuauuucuu

SEQ ID NO: 117937 - DNA, 13 bp, Artificial Sequence
  Description of Artificial Sequence: Synthetic oligonucleotide
  Description of Combined DNA/RNA Molecule: Synthetic oligonucleotide
  modified_base (8): LNA-G
uuucuucggagtt

SEQ ID NO: 117938 - DNA, 12 bp, Artificial Sequence
  Description of Artificial Sequence: Synthetic oligonucleotide
  Description of Combined DNA/RNA Molecule: Synthetic oligonucleotide
  modified_base (7): LNA-G
uucuucggagtt

SEQ ID NO: 117939 - DNA, 11 bp, Artificial Sequence
  Description of Artificial Sequence: Synthetic oligonucleotide
  Description of Combined DNA/RNA Molecule: Synthetic oligonucleotide
  modified_base (6): LNA-G
ucuucggagtt

SEQ ID NO: 117940 - DNA, 10 bp, Artificial Sequence
  Description of Artificial Sequence: Synthetic oligonucleotide
  Description of Combined DNA/RNA Molecule: Synthetic oligonucleotide
  modified_base (5): LNA-G
cuucggagtt

SEQ ID NO: 117941 - DNA, 9 bp, Artificial Sequence
  Description of Artificial Sequence: Synthetic oligonucleotide
  Description of Combined DNA/RNA Molecule: Synthetic oligonucleotide
  modified_base (4): LNA-G
uucggagtt

SEQ ID NO: 117942 - DNA, 8 bp, Artificial Sequence
  Description of Artificial Sequence: Synthetic oligonucleotide
  Description of Combined DNA/RNA Molecule: Synthetic oligonucleotide
  modified_base (3): LNA-G
ucggagtt

SEQ ID NO: 117943 - DNA, 7 bp, Artificial Sequence
  Description of Artificial Sequence: Synthetic oligonucleotide
  Description of Combined DNA/RNA Molecule: Synthetic oligonucleotide
  modified_base (2): LNA-G
cggagtt

SEQ ID NO: 117944 - DNA, 13 bp, Artificial Sequence
  Description of Artificial Sequence: Synthetic oligonucleotide
  Description of Combined DNA/RNA Molecule: Synthetic oligonucleotide
  modified_base (1): LNA-U
  modified_base (8): LNA-G
uuucuucggagtt

SEQ ID NO: 117945 - DNA, 12 bp, Artificial Sequence
  Description of Artificial Sequence: Synthetic oligonucleotide
  Description of Combined DNA/RNA Molecule: Synthetic oligonucleotide
  modified_base (1): LNA-U
  modified_base (7): LNA-G
uucuucggagtt

SEQ ID NO: 117946 - DNA, 11 bp, Artificial Sequence
  Description of Artificial Sequence: Synthetic oligonucleotide
  Description of Combined DNA/RNA Molecule: Synthetic oligonucleotide
  modified_base (1): LNA-U
  modified_base (6): LNA-G
ucuucggagtt

SEQ ID NO: 117947 - DNA, 10 bp, Artificial Sequence
  Description of Artificial Sequence: Synthetic oligonucleotide
  Description of Combined DNA/RNA Molecule: Synthetic oligonucleotide
  modified_base (1): LNA-C
  modified_base (5): LNA-G
cuucggagtt

SEQ ID NO: 117948 - DNA, 9 bp, Artificial Sequence
  Description of Artificial Sequence: Synthetic oligonucleotide
  Description of Combined DNA/RNA Molecule: Synthetic oligonucleotide
  modified_base (1): LNA-U
  modified_base (4): LNA-G
uucggagtt

SEQ ID NO: 117949 - DNA, 8 bp, Artificial Sequence
  Description of Artificial Sequence: Synthetic oligonucleotide
  Description of Combined DNA/RNA Molecule: Synthetic oligonucleotide
  modified_base (1): LNA-U
  modified_base (3): LNA-G
ucggagtt

SEQ ID NO: 117950 - DNA, 7 bp, Artificial Sequence
  Description of Artificial Sequence: Synthetic oligonucleotide
  Description of Combined DNA/RNA Molecule: Synthetic oligonucleotide
  modified_base (1): LNA-C
  modified_base (2): LNA-G
cggagtt

SEQ ID NO: 117951 - DNA, 21 bp, Artificial Sequence
  Description of Artificial Sequence: Synthetic oligonucleotide
  Description of Combined DNA/RNA Molecule: Synthetic oligonucleotide
  modified_base (2): LNA-G
  modified_base (16): LNA-G
ggaucuuauuucuucggagtt

SEQ ID NO: 117952 - DNA, 25 bp, Artificial Sequence
  Description of Artificial Sequence: Synthetic oligonucleotide
  Description of Combined DNA/RNA Molecule: Synthetic oligonucleotide
ggaucuuauuucuucggagacaatg

SEQ ID NO: 117953 - RNA, 25 nt, Artificial Sequence
  Description of Artificial Sequence: Synthetic oligonucleotide
guauuuugaugaggaguucacggcc

SEQ ID NO: 117954 - RNA, 25 nt, Artificial Sequence
  Description of Artificial Sequence: Synthetic oligonucleotide
ggcccagaugaucaccaucacacca

SEQ ID NO: 117955 - RNA, 25 nt, Artificial Sequence
  Description of Artificial Sequence: Synthetic oligonucleotide
gggaagaaaacuauccugcggguuu

SEQ ID NO: 117956 - RNA, 25 nt, Artificial Sequence
  Description of Artificial Sequence: Synthetic oligonucleotide
guuuuaauuuauuucauccaguuug

SEQ ID NO: 117957 - RNA, 25 nt, Artificial Sequence
  Description of Artificial Sequence: Synthetic oligonucleotide
acguagggaaauguuaaggacuucu

SEQ ID NO: 117958 - RNA, 25 nt, Artificial Sequence
  Description of Artificial Sequence: Synthetic oligonucleotide
ccaggguuuacccagugggacagag

SEQ ID NO: 117959 - RNA, 25 nt, Artificial Sequence
  Description of Artificial Sequence: Synthetic oligonucleotide
agcaagguuuaaauuuguuauugug

SEQ ID NO: 117960 - RNA, 25 nt, Artificial Sequence
  Description of Artificial Sequence: Synthetic oligonucleotide
uguauuauguuguucaaaugcauuu

SEQ ID NO: 117961 - RNA, 25 nt, Artificial Sequence
  Description of Artificial Sequence: Synthetic oligonucleotide
uuuuaaucuuugugacaggaaagcc

SEQ ID NO: 117962 - RNA, 25 nt, Artificial Sequence
  Description of Artificial Sequence: Synthetic oligonucleotide
uuaaucuuugugacaggaaagcccu

SEQ ID NO: 117963 - RNA, 25 nt, Artificial Sequence
  Description of Artificial Sequence: Synthetic oligonucleotide
gcugcuuaugucucccagcauggcc

SEQ ID NO: 117964 - RNA, 25 nt, Artificial Sequence
  Description of Artificial Sequence: Synthetic oligonucleotide
aaguguuucagaagcuucucccuga

SEQ ID NO: 117965 - RNA, 25 nt, Artificial Sequence
  Description of Artificial Sequence: Synthetic oligonucleotide
gaccaucaauaaggaagaagcccuu

SEQ ID NO: 117966 - RNA, 25 nt, Artificial Sequence
  Description of Artificial Sequence: Synthetic oligonucleotide
ccaucaauaaggaagaagcccuuca

SEQ ID NO: 117967 - RNA, 25 nt, Artificial Sequence
  Description of Artificial Sequence: Synthetic oligonucleotide
ucaauaaggaagaagcccuucagcg

SEQ ID NO: 117968 - RNA, 25 nt, Artificial Sequence
  Description of Artificial Sequence: Synthetic oligonucleotide
aauaaggaagaagcccuucagcggc

SEQ ID NO: 117969 - RNA, 25 nt, Artificial Sequence
  Description of Artificial Sequence: Synthetic oligonucleotide
aggaagaagcccuucagcggccagu

SEQ ID NO: 117970 - RNA, 25 nt, Artificial Sequence
  Description of Artificial Sequence: Synthetic oligonucleotide
gcauaacuaaaggugaaaagcuccg

SEQ ID NO: 117971 - RNA, 25 nt, Artificial Sequence
  Description of Artificial Sequence: Synthetic oligonucleotide
cauaacuaaaggugaaaagcuccgg

SEQ ID NO: 117972 - RNA, 25 nt, Artificial Sequence
  Description of Artificial Sequence: Synthetic oligonucleotide
cuacaucacgccagucaacagucug

SEQ ID NO: 117973 - RNA, 25 nt, Artificial Sequence
  Description of Artificial Sequence: Synthetic oligonucleotide
acuggauuuaagcagaguucaaaag

SEQ ID NO: 117974 - RNA, 25 nt, Artificial Sequence
  Description of Artificial Sequence: Synthetic oligonucleotide
cuggauuuaagcagaguucaaaagc

SEQ ID NO: 117975 - RNA, 25 nt, Artificial Sequence
  Description of Artificial Sequence: Synthetic oligonucleotide
gauuuaagcagaguucaaaagcccu

SEQ ID NO: 117976 - RNA, 25 nt, Artificial Sequence
  Description of Artificial Sequence: Synthetic oligonucleotide
auuuaagcagaguucaaaagcccuu

SEQ ID NO: 117977 - RNA, 25 nt, Artificial Sequence
  Description of Artificial Sequence: Synthetic oligonucleotide
uuaagcagaguucaaaagcccuuca

SEQ ID NO: 117978 - RNA, 25 nt, Artificial Sequence
  Description of Artificial Sequence: Synthetic oligonucleotide
uaagcagaguucaaaagcccuucag

SEQ ID NO: 117979 - RNA, 25 nt, Artificial Sequence
  Description of Artificial Sequence: Synthetic oligonucleotide
agcagaguucaaaagcccuucagcg

SEQ ID NO: 117980 - RNA, 25 nt, Artificial Sequence
  Description of Artificial Sequence: Synthetic oligonucleotide
cucagggucugagugaagccgcucg

SEQ ID NO: 117981 - RNA, 25 nt, Artificial Sequence
  Description of Artificial Sequence: Synthetic oligonucleotide
caagcaacuacaucacgccagucaa

SEQ ID NO: 117982 - RNA, 25 nt, Artificial Sequence
  Description of Artificial Sequence: Synthetic oligonucleotide
aucaauggcagcuucuuggugcgug

SEQ ID NO: 117983 - RNA, 25 nt, Artificial Sequence
  Description of Artificial Sequence: Synthetic oligonucleotide
uuccagcccacauuggauucaucag

SEQ ID NO: 117984 - RNA, 25 nt, Artificial Sequence
  Description of Artificial Sequence: Synthetic oligonucleotide
cagcugagaauguggaauaccuaag

SEQ ID NO: 117985 - RNA, 25 nt, Artificial Sequence
  Description of Artificial Sequence: Synthetic oligonucleotide
aacguaucuccuaauuugaggcuca

SEQ ID NO: 117986 - RNA, 25 nt, Artificial Sequence
  Description of Artificial Sequence: Synthetic oligonucleotide
ccuaaaauaauuucucuacaauugg

SEQ ID NO: 117987 - RNA, 25 nt, Artificial Sequence
  Description of Artificial Sequence: Synthetic oligonucleotide
uggaagauucagcuaguuaggagcc

SEQ ID NO: 117988 - RNA, 25 nt, Artificial Sequence
  Description of Artificial Sequence: Synthetic oligonucleotide
uuaaacucuccuagucaauauccac

SEQ ID NO: 117989 - RNA, 25 nt, Artificial Sequence
  Description of Artificial Sequence: Synthetic oligonucleotide
cagccuacaguuauguucagucaca

SEQ ID NO: 117990 - RNA, 25 nt, Artificial Sequence
  Description of Artificial Sequence: Synthetic oligonucleotide
guuauguucagucacacacacauac

SEQ ID NO: 117991 - RNA, 25 nt, Artificial Sequence
  Description of Artificial Sequence: Synthetic oligonucleotide
cacauacaaaauguuccuuuugcuu

SEQ ID NO: 117992 - RNA, 25 nt, Artificial Sequence
  Description of Artificial Sequence: Synthetic oligonucleotide
uccuuuugcuuuuaaaguaauuuuu

SEQ ID NO: 117993 - RNA, 25 nt, Artificial Sequence
  Description of Artificial Sequence: Synthetic oligonucleotide
ugaccugugaagcaacagucaaugg

SEQ ID NO: 117994 - RNA, 25 nt, Artificial Sequence
  Description of Artificial Sequence: Synthetic oligonucleotide
cuaucucacacaucgacaaaccaau

SEQ ID NO: 117995 - RNA, 25 nt, Artificial Sequence
  Description of Artificial Sequence: Synthetic oligonucleotide
uguccucaauuguacugcuaccacu

SEQ ID NO: 117996 - RNA, 25 nt, Artificial Sequence
  Description of Artificial Sequence: Synthetic oligonucleotide
aaaccguagcuggcaagcggucuua

SEQ ID NO: 117997 - RNA, 25 nt, Artificial Sequence
  Description of Artificial Sequence: Synthetic oligonucleotide
uagcuggcaagcggucuuaccggcu

SEQ ID NO: 117998 - RNA, 25 nt, Artificial Sequence
  Description of Artificial Sequence: Synthetic oligonucleotide
uuguaugguuaaaagauggguuacc

SEQ ID NO: 117999 - RNA, 25 nt, Artificial Sequence
  Description of Artificial Sequence: Synthetic oligonucleotide
ugguuaaaagauggguuaccugcga

SEQ ID NO: 118000 - RNA, 25 nt, Artificial Sequence
  Description of Artificial Sequence: Synthetic oligonucleotide
cagggaauuauacaaucuugcugag

SEQ ID NO: 118001 - RNA, 25 nt, Artificial Sequence
  Description of Artificial Sequence: Synthetic oligonucleotide
acaaucuugcugagcauaaaacagu

SEQ ID NO: 118002 - RNA, 25 nt, Artificial Sequence
  Description of Artificial Sequence: Synthetic oligonucleotide
ccaauaaugaagaguccuuuauccu

SEQ ID NO: 118003 - RNA, 25 nt, Artificial Sequence
  Description of Artificial Sequence: Synthetic oligonucleotide
acuuuggauguuccaacgcaaguug

SEQ ID NO: 118004 - RNA, 25 nt, Artificial Sequence
  Description of Artificial Sequence: Synthetic oligonucleotide
aaugcuuccacuaaacugaaaccau

SEQ ID NO: 118005 - RNA, 25 nt, Artificial Sequence
  Description of Artificial Sequence: Synthetic oligonucleotide
gagaaaguuugacuuuguuaaauau

SEQ ID NO: 118006 - RNA, 25 nt, Artificial Sequence
  Description of Artificial Sequence: Synthetic oligonucleotide
aaagaacuacuguauauuaaaaguu

SEQ ID NO: 118007 - RNA, 25 nt, Artificial Sequence
  Description of Artificial Sequence: Synthetic oligonucleotide
uuagaaauacggguuuugacuuaac

SEQ ID NO: 118008 - RNA, 25 nt, Artificial Sequence
  Description of Artificial Sequence: Synthetic oligonucleotide
aacauggguacagcaaacucagcac

SEQ ID NO: 118009 - RNA, 25 nt, Artificial Sequence
  Description of Artificial Sequence: Synthetic oligonucleotide
aaagacacagaagaugcugaccuca

SEQ ID NO: 118010 - RNA, 25 nt, Artificial Sequence
  Description of Artificial Sequence: Synthetic oligonucleotide
uaguagggagguuuauucagaucgc

SEQ ID NO: 118011 - RNA, 25 nt, Artificial Sequence
  Description of Artificial Sequence: Synthetic oligonucleotide
gccuucugcagcaggguucugggau

SEQ ID NO: 118012 - RNA, 25 nt, Artificial Sequence
  Description of Artificial Sequence: Synthetic oligonucleotide
ggucugguacauauuggaaauuaug

SEQ ID NO: 118013 - RNA, 25 nt, Artificial Sequence
  Description of Artificial Sequence: Synthetic oligonucleotide
cuaguccuuccgauggaagcacuag

SEQ ID NO: 118014 - RNA, 25 nt, Artificial Sequence
  Description of Artificial Sequence: Synthetic oligonucleotide
ccagugaauauuguuuuuaugugga

SEQ ID NO: 118015 - RNA, 25 nt, Artificial Sequence
  Description of Artificial Sequence: Synthetic oligonucleotide
augaauucaaguuggaauugguaga

SEQ ID NO: 118016 - RNA, 25 nt, Artificial Sequence
  Description of Artificial Sequence: Synthetic oligonucleotide
caggacacagauuuagacuuggaga

SEQ ID NO: 118017 - RNA, 25 nt, Artificial Sequence
  Description of Artificial Sequence: Synthetic oligonucleotide
cucaaagcacaguuacaguauucca

SEQ ID NO: 118018 - RNA, 25 nt, Artificial Sequence
  Description of Artificial Sequence: Synthetic oligonucleotide
accacugccaccacugaugaauuaa

SEQ ID NO: 118019 - RNA, 25 nt, Artificial Sequence
  Description of Artificial Sequence: Synthetic oligonucleotide
gaaacuacuagugccacaucaucac

SEQ ID NO: 118020 - RNA, 25 nt, Artificial Sequence
  Description of Artificial Sequence: Synthetic oligonucleotide
aagucggacagccucaccaaacaga

SEQ ID NO: 118021 - RNA, 25 nt, Artificial Sequence
  Description of Artificial Sequence: Synthetic oligonucleotide
gaaagcgaaaaauggaacaugaugg

SEQ ID NO: 118022 - RNA, 25 nt, Artificial Sequence
  Description of Artificial Sequence: Synthetic oligonucleotide
cccucugauuuagcauguagacugc

SEQ ID NO: 118023 - RNA, 25 nt, Artificial Sequence
  Description of Artificial Sequence: Synthetic oligonucleotide
ugagcuauuuaaggaucuauuuaug

SEQ ID NO: 118024 - RNA, 25 nt, Artificial Sequence
  Description of Artificial Sequence: Synthetic oligonucleotide
aaaaggugaaaaagcacuauuauca

SEQ ID NO: 118025 - RNA, 25 nt, Artificial Sequence
  Description of Artificial Sequence: Synthetic oligonucleotide
gaaaaagcacuauuaucaguucugc

SEQ ID NO: 118026 - RNA, 25 nt, Artificial Sequence
  Description of Artificial Sequence: Synthetic oligonucleotide
ggcugaaaagaaagauuaaaccuac

SEQ ID NO: 118027 - RNA, 25 nt, Artificial Sequence
  Description of Artificial Sequence: Synthetic oligonucleotide
uaaacccuuauaauaaaauccuucu

SEQ ID NO: 118028 - RNA, 25 nt, Artificial Sequence
  Description of Artificial Sequence: Synthetic oligonucleotide
cauacuauuagccaaugcuguagac

SEQ ID NO: 118029 - RNA, 25 nt, Artificial Sequence
  Description of Artificial Sequence: Synthetic oligonucleotide
gacagaagcauuuugauaggaauag

SEQ ID NO: 118030 - RNA, 25 nt, Artificial Sequence
  Description of Artificial Sequence: Synthetic oligonucleotide
agagcaaauaagauaauggcccuga

SEQ ID NO: 118031 - RNA, 25 nt, Artificial Sequence
  Description of Artificial Sequence: Synthetic oligonucleotide
ccaacauuuuucucuuccucaagca

SEQ ID NO: 118032 - RNA, 25 nt, Artificial Sequence
  Description of Artificial Sequence: Synthetic oligonucleotide
uuaaguaugagaaaaguucagccca

SEQ ID NO: 118033 - RNA, 25 nt, Artificial Sequence
  Description of Artificial Sequence: Synthetic oligonucleotide
caggaauaaagauggcugcugaacc

SEQ ID NO: 118034 - RNA, 25 nt, Artificial Sequence
  Description of Artificial Sequence: Synthetic oligonucleotide
aauuugaaugaccaaguucucuuca

SEQ ID NO: 118035 - RNA, 25 nt, Artificial Sequence
  Description of Artificial Sequence: Synthetic oligonucleotide
auguauaaagauagccagccuagag

SEQ ID NO: 118036 - RNA, 25 nt, Artificial Sequence
  Description of Artificial Sequence: Synthetic oligonucleotide
ggcuguaacuaucucugugaagugu

SEQ ID NO: 118037 - RNA, 25 nt, Artificial Sequence
  Description of Artificial Sequence: Synthetic oligonucleotide
ucugugaagugugagaaaauuucaa

SEQ ID NO: 118038 - RNA, 25 nt, Artificial Sequence
  Description of Artificial Sequence: Synthetic oligonucleotide
ccuuuaaggaaaugaauccuccuga

SEQ ID NO: 118039 - RNA, 25 nt, Artificial Sequence
  Description of Artificial Sequence: Synthetic oligonucleotide
aaggauacaaaaagugacaucauau

SEQ ID NO: 118040 - RNA, 25 nt, Artificial Sequence
  Description of Artificial Sequence: Synthetic oligonucleotide
agaugcaauuugaaucuucaucaua

SEQ ID NO: 118041 - RNA, 25 nt, Artificial Sequence
  Description of Artificial Sequence: Synthetic oligonucleotide
guucaaaacgaagacuagcuauuaa

SEQ ID NO: 118042 - RNA, 25 nt, Artificial Sequence
  Description of Artificial Sequence: Synthetic oligonucleotide
gugaaaccucaucucuacuaaaaau

SEQ ID NO: 118043 - RNA, 25 nt, Artificial Sequence
  Description of Artificial Sequence: Synthetic oligonucleotide
acgaaagagaagcucuaucucgccu

SEQ ID NO: 118044 - RNA, 25 nt, Artificial Sequence
  Description of Artificial Sequence: Synthetic oligonucleotide
cuccacaagcgccuucgguccaguu

SEQ ID NO: 118045 - RNA, 25 nt, Artificial Sequence
  Description of Artificial Sequence: Synthetic oligonucleotide
gagaagauuccaaagauguagccgc

SEQ ID NO: 118046 - RNA, 25 nt, Artificial Sequence
  Description of Artificial Sequence: Synthetic oligonucleotide
aaucuggauucaaugaggagacuug

SEQ ID NO: 118047 - RNA, 25 nt, Artificial Sequence
  Description of Artificial Sequence: Synthetic oligonucleotide
agaacagauuugagaguagugagga

SEQ ID NO: 118048 - RNA, 25 nt, Artificial Sequence
  Description of Artificial Sequence: Synthetic oligonucleotide
ccagagcugugcagaugaguacaaa

SEQ ID NO: 118049 - RNA, 25 nt, Artificial Sequence
  Description of Artificial Sequence: Synthetic oligonucleotide
ccucagauuguuguuguuaaugggc

SEQ ID NO: 118050 - RNA, 25 nt, Artificial Sequence
  Description of Artificial Sequence: Synthetic oligonucleotide
cuauuuuaauuauuuuuaauuuauu

SEQ ID NO: 118051 - RNA, 25 nt, Artificial Sequence
  Description of Artificial Sequence: Synthetic oligonucleotide
uuuaauuuauuaauauuuaaauaug

SEQ ID NO: 118052 - RNA, 25 nt, Artificial Sequence
  Description of Artificial Sequence: Synthetic oligonucleotide
augcaguuugaauauccuuuguuuc

SEQ ID NO: 118053 - RNA, 25 nt, Artificial Sequence
  Description of Artificial Sequence: Synthetic oligonucleotide
caugcugcuggcgucuaaguguuug

SEQ ID NO: 118054 - RNA, 25 nt, Artificial Sequence
  Description of Artificial Sequence: Synthetic oligonucleotide
agaugugcauuucaccugugacaaa

SEQ ID NO: 118055 - RNA, 25 nt, Artificial Sequence
  Description of Artificial Sequence: Synthetic oligonucleotide
ucaaaaccugugccaggcugaauua

SEQ ID NO: 118056 - RNA, 25 nt, Artificial Sequence
  Description of Artificial Sequence: Synthetic oligonucleotide
gaauguggguagucauucuuacaau

SEQ ID NO: 118057 - RNA, 25 nt, Artificial Sequence
  Description of Artificial Sequence: Synthetic oligonucleotide
auguggguagucauucuuacaauug

SEQ ID NO: 118058 - RNA, 25 nt, Artificial Sequence
  Description of Artificial Sequence: Synthetic oligonucleotide
ugaaaaugagcaucagagaguguac

SEQ ID NO: 118059 - RNA, 25 nt, Artificial Sequence
  Description of Artificial Sequence: Synthetic oligonucleotide
uugcuuuucauguagaacucagcag

SEQ ID NO: 118060 - RNA, 25 nt, Artificial Sequence
  Description of Artificial Sequence: Synthetic oligonucleotide
uguauuucuauauuuauuuucagua

SEQ ID NO: 118061 - RNA, 25 nt, Artificial Sequence
  Description of Artificial Sequence: Synthetic oligonucleotide
uuugauuaauguuucuuaaauggaa

SEQ ID NO: 118062 - RNA, 25 nt, Artificial Sequence
  Description of Artificial Sequence: Synthetic oligonucleotide
caacguguauagugccuaaaauugu

SEQ ID NO: 118063 - RNA, 25 nt, Artificial Sequence
  Description of Artificial Sequence: Synthetic oligonucleotide
cauauccuuggcuacuaacaucugg

SEQ ID NO: 118064 - RNA, 25 nt, Artificial Sequence
  Description of Artificial Sequence: Synthetic oligonucleotide
uacuaacaucuggagacugugagcu

SEQ ID NO: 118065 - RNA, 25 nt, Artificial Sequence
  Description of Artificial Sequence: Synthetic oligonucleotide
cauaaguugugugcuuuuuauuaau

SEQ ID NO: 118066 - RNA, 25 nt, Artificial Sequence
  Description of Artificial Sequence: Synthetic oligonucleotide
gcaucauuuuggcucuucuuacauu

SEQ ID NO: 118067 - RNA, 25 nt, Artificial Sequence
  Description of Artificial Sequence: Synthetic oligonucleotide
gcucuucuuacauuuguaaaaaugu

SEQ ID NO: 118068 - RNA, 25 nt, Artificial Sequence
  Description of Artificial Sequence: Synthetic oligonucleotide
agauuaggucaucuuaauucauauu

SEQ ID NO: 118069 - RNA, 25 nt, Artificial Sequence
  Description of Artificial Sequence: Synthetic oligonucleotide
auggaauugaaagaacuaaucauga

SEQ ID NO: 118070 - RNA, 25 nt, Artificial Sequence
  Description of Artificial Sequence: Synthetic oligonucleotide
cacacucauuccuucugcucuuggg

SEQ ID NO: 118071 - RNA, 25 nt, Artificial Sequence
  Description of Artificial Sequence: Synthetic oligonucleotide
uguagagguaaccaguagcuuugag

SEQ ID NO: 118072 - RNA, 25 nt, Artificial Sequence
  Description of Artificial Sequence: Synthetic oligonucleotide
caaccacaugccacguaauauuuca

SEQ ID NO: 118073 - RNA, 25 nt, Artificial Sequence
  Description of Artificial Sequence: Synthetic oligonucleotide
ucggaaacaaguuauucucuucacu

SEQ ID NO: 118074 - RNA, 25 nt, Artificial Sequence
  Description of Artificial Sequence: Synthetic oligonucleotide
acucccaauaacuaaugcuaagaaa

SEQ ID NO: 118075 - RNA, 25 nt, Artificial Sequence
  Description of Artificial Sequence: Synthetic oligonucleotide
aaugcuaagaaaugcugaaaaucaa

SEQ ID NO: 118076 - RNA, 25 nt, Artificial Sequence
  Description of Artificial Sequence: Synthetic oligonucleotide
gucuuucucuaaauaugauuacuuu

SEQ ID NO: 118077 - RNA, 25 nt, Artificial Sequence
  Description of Artificial Sequence: Synthetic oligonucleotide
ugaauuucaggcauuuuguucuaca

SEQ ID NO: 118078 - RNA, 25 nt, Artificial Sequence
  Description of Artificial Sequence: Synthetic oligonucleotide
cgauucccucucacccgggacucuc

SEQ ID NO: 118079 - RNA, 25 nt, Artificial Sequence
  Description of Artificial Sequence: Synthetic oligonucleotide
aggaaagugaaccuuuaaaguaaag

SEQ ID NO: 118080 - RNA, 25 nt, Artificial Sequence
  Description of Artificial Sequence: Synthetic oligonucleotide
gaggcugcaugcucuggaagccugg

SEQ ID NO: 118081 - RNA, 25 nt, Artificial Sequence
  Description of Artificial Sequence: Synthetic oligonucleotide
ucucugaacagaaaacaaaagagag

SEQ ID NO: 118082 - RNA, 25 nt, Artificial Sequence
  Description of Artificial Sequence: Synthetic oligonucleotide
aacuuggcuguaaucaguuaugccg

SEQ ID NO: 118083 - RNA, 25 nt, Artificial Sequence
  Description of Artificial Sequence: Synthetic oligonucleotide
agaagccaaaauuaaaagaagucca

SEQ ID NO: 118084 - RNA, 25 nt, Artificial Sequence
  Description of Artificial Sequence: Synthetic oligonucleotide
auuaaaagaaguccaggugagguua

SEQ ID NO: 118085 - RNA, 25 nt, Artificial Sequence
  Description of Artificial Sequence: Synthetic oligonucleotide
gaauccggauuaucgggaagaggac

SEQ ID NO: 118086 - RNA, 25 nt, Artificial Sequence
  Description of Artificial Sequence: Synthetic oligonucleotide
aaugugacaucaaagcaaguauugu

SEQ ID NO: 118087 - RNA, 25 nt, Artificial Sequence
  Description of Artificial Sequence: Synthetic oligonucleotide
caucaaagcaaguauuguagcacuc

SEQ ID NO: 118088 - RNA, 25 nt, Artificial Sequence
  Description of Artificial Sequence: Synthetic oligonucleotide
agagagagaaaacaaaaccacaaau

SEQ ID NO: 118089 - RNA, 25 nt, Artificial Sequence
  Description of Artificial Sequence: Synthetic oligonucleotide
ucgcuguaguauuuaagcccauaca

SEQ ID NO: 118090 - RNA, 25 nt, Artificial Sequence
  Description of Artificial Sequence: Synthetic oligonucleotide
cgcuguaguauuuaagcccauacag

SEQ ID NO: 118091 - RNA, 25 nt, Artificial Sequence
  Description of Artificial Sequence: Synthetic oligonucleotide
auuuaagcccauacagaaaccuucc

SEQ ID NO: 118092 - RNA, 25 nt, Artificial Sequence
  Description of Artificial Sequence: Synthetic oligonucleotide
auuaaaauaaacaugguauaccuac

SEQ ID NO: 118093 - RNA, 25 nt, Artificial Sequence
  Description of Artificial Sequence: Synthetic oligonucleotide
cuguucugaucggccaguuuucgga

SEQ ID NO: 118094 - RNA, 25 nt, Artificial Sequence
  Description of Artificial Sequence: Synthetic oligonucleotide
aaauaauuugaacuuuggaacaggg

SEQ ID NO: 118095 - RNA, 25 nt, Artificial Sequence
  Description of Artificial Sequence: Synthetic oligonucleotide
ugcgaccuuaauuuaacuuuccagu

SEQ ID NO: 118096 - RNA, 25 nt, Artificial Sequence
  Description of Artificial Sequence: Synthetic oligonucleotide
cugagaaagcuaaaguuugguuuug

SEQ ID NO: 118097 - RNA, 25 nt, Artificial Sequence
  Description of Artificial Sequence: Synthetic oligonucleotide
aguaaagaugcuacuucccacugua

SEQ ID NO: 118098 - RNA, 25 nt, Artificial Sequence
  Description of Artificial Sequence: Synthetic oligonucleotide
cugcuuaauugcugauaccauauga

SEQ ID NO: 118099 - RNA, 25 nt, Artificial Sequence
  Description of Artificial Sequence: Synthetic oligonucleotide
uaccauaugaaugaaacaugggcug

SEQ ID NO: 118100 - RNA, 25 nt, Artificial Sequence
  Description of Artificial Sequence: Synthetic oligonucleotide
aacuuucuuauccaacuuuuucaua

SEQ ID NO: 118101 - RNA, 25 nt, Artificial Sequence
  Description of Artificial Sequence: Synthetic oligonucleotide
ccuugcaugacaucaugaggccgga

SEQ ID NO: 118102 - RNA, 25 nt, Artificial Sequence
  Description of Artificial Sequence: Synthetic oligonucleotide
ugaauuuguauaugacugcauuugu

SEQ ID NO: 118103 - RNA, 25 nt, Artificial Sequence
  Description of Artificial Sequence: Synthetic oligonucleotide
gaauccuaguagaauguuuacuacc

SEQ ID NO: 118104 - RNA, 25 nt, Artificial Sequence
  Description of Artificial Sequence: Synthetic oligonucleotide
gaaagggaagaauuuuuugaugaaa

SEQ ID NO: 118105 - RNA, 25 nt, Artificial Sequence
  Description of Artificial Sequence: Synthetic oligonucleotide
uaucggcaugccagugugugaauuu

SEQ ID NO: 118106 - RNA, 25 nt, Artificial Sequence
  Description of Artificial Sequence: Synthetic oligonucleotide
caccucauaguagagcaauguaugu

SEQ ID NO: 118107 - RNA, 25 nt, Artificial Sequence
  Description of Artificial Sequence: Synthetic oligonucleotide
ccagaauugccaaagcacauauaua

SEQ ID NO: 118108 - RNA, 25 nt, Artificial Sequence
  Description of Artificial Sequence: Synthetic oligonucleotide
uggugaucuggguaauaguuucucc

SEQ ID NO: 118109 - RNA, 25 nt, Artificial Sequence
  Description of Artificial Sequence: Synthetic oligonucleotide
gaucuggguaauaguuucuccaaau

SEQ ID NO: 118110 - RNA, 25 nt, Artificial Sequence
  Description of Artificial Sequence: Synthetic oligonucleotide
ggaugugaugaauacuuccuagaaa

SEQ ID NO: 118111 - RNA, 25 nt, Artificial Sequence
  Description of Artificial Sequence: Synthetic oligonucleotide
cauuuccacagcuacaccauauaug

SEQ ID NO: 118112 - RNA, 25 nt, Artificial Sequence
  Description of Artificial Sequence: Synthetic oligonucleotide
acagcuacaccauauaugaauggag

SEQ ID NO: 118113 - RNA, 25 nt, Artificial Sequence
  Description of Artificial Sequence: Synthetic oligonucleotide
ugcaguucuuacacgagaagaagau

SEQ ID NO: 118114 - RNA, 25 nt, Artificial Sequence
  Description of Artificial Sequence: Synthetic oligonucleotide
acgagaagaagaucauuuacaggga

SEQ ID NO: 118115 - RNA, 25 nt, Artificial Sequence
  Description of Artificial Sequence: Synthetic oligonucleotide
cgagaagaagaucauuuacagggac

SEQ ID NO: 118116 - RNA, 25 nt, Artificial Sequence
  Description of Artificial Sequence: Synthetic oligonucleotide
aagaagaucauuuacagggaccuga

SEQ ID NO: 118117 - RNA, 25 nt, Artificial Sequence
  Description of Artificial Sequence: Synthetic oligonucleotide
agaggaagagguguuugacugcauc

SEQ ID NO: 118118 - RNA, 25 nt, Artificial Sequence
  Description of Artificial Sequence: Synthetic oligonucleotide
gaggaagagguguuugacugcaucg

SEQ ID NO: 118119 - RNA, 25 nt, Artificial Sequence
  Description of Artificial Sequence: Synthetic oligonucleotide
cuacuuugagggcgaguucacaggg

SEQ ID NO: 118120 - RNA, 25 nt, Artificial Sequence
  Description of Artificial Sequence: Synthetic oligonucleotide
agggcaucuccuggcaccucugucc

SEQ ID NO: 118121 - RNA, 25 nt, Artificial Sequence
  Description of Artificial Sequence: Synthetic oligonucleotide
ggagugauaugguuugucuuuuuaa

SEQ ID NO: 118122 - RNA, 25 nt, Artificial Sequence
  Description of Artificial Sequence: Synthetic oligonucleotide
gagugauaugguuugucuuuuuaag

SEQ ID NO: 118123 - RNA, 25 nt, Artificial Sequence
  Description of Artificial Sequence: Synthetic oligonucleotide
ugcaguaaagauccuaaagguuguc

SEQ ID NO: 118124 - RNA, 25 nt, Artificial Sequence
  Description of Artificial Sequence: Synthetic oligonucleotide
aguaaagauccuaaagguugucgac

SEQ ID NO: 118125 - RNA, 25 nt, Artificial Sequence
  Description of Artificial Sequence: Synthetic oligonucleotide
ugacaaaggacaaccuggcaauugu

SEQ ID NO: 118126 - RNA, 25 nt, Artificial Sequence
  Description of Artificial Sequence: Synthetic oligonucleotide
gcaauugugacccaguggugcgagg

SEQ ID NO: 118127 - RNA, 25 nt, Artificial Sequence
  Description of Artificial Sequence: Synthetic oligonucleotide
aacaucauccauagagacaugaaau

SEQ ID NO: 118128 - RNA, 25 nt, Artificial Sequence
  Description of Artificial Sequence: Synthetic oligonucleotide
ugaaauccaacaauauauuucucca

SEQ ID NO: 118129 - RNA, 25 nt, Artificial Sequence
  Description of Artificial Sequence: Synthetic oligonucleotide
aacaauauauuucuccaugaaggcu

SEQ ID NO: 118130 - RNA, 25 nt, Artificial Sequence
  Description of Artificial Sequence: Synthetic oligonucleotide
aacaguaaagucacgcuggaguggu

SEQ ID NO: 118131 - RNA, 25 nt, Artificial Sequence
  Description of Artificial Sequence: Synthetic oligonucleotide
ugugaagaaaguaaaggaagagagg

SEQ ID NO: 118132 - RNA, 25 nt, Artificial Sequence
  Description of Artificial Sequence: Synthetic oligonucleotide
cuuccgagccauccuugcaucgggc

SEQ ID NO: 118133 - RNA, 25 nt, Artificial Sequence
  Description of Artificial Sequence: Synthetic oligonucleotide
aauggagguugaauauccuacugug

SEQ ID NO: 118134 - RNA, 25 nt, Artificial Sequence
  Description of Artificial Sequence: Synthetic oligonucleotide
ggagguugaauauccuacuguguaa

SEQ ID NO: 118135 - RNA, 25 nt, Artificial Sequence
  Description of Artificial Sequence: Synthetic oligonucleotide
auuuugaguuuucccuuguagugua

SEQ ID NO: 118136 - RNA, 25 nt, Artificial Sequence
  Description of Artificial Sequence: Synthetic oligonucleotide
uauccuguuuguucuuuguugauug

SEQ ID NO: 118137 - RNA, 25 nt, Artificial Sequence
  Description of Artificial Sequence: Synthetic oligonucleotide
ccuguuuguucuuuguugauugaaa

SEQ ID NO: 118138 - RNA, 25 nt, Artificial Sequence
  Description of Artificial Sequence: Synthetic oligonucleotide
cucuacagccuucuuuuucuuccau

SEQ ID NO: 118139 - RNA, 25 nt, Artificial Sequence
  Description of Artificial Sequence: Synthetic oligonucleotide
ucuuccauagcuaaucuuccuucua

SEQ ID NO: 118140 - RNA, 25 nt, Artificial Sequence
  Description of Artificial Sequence: Synthetic oligonucleotide
auaaucuuccuguugaaugcuucau

SEQ ID NO: 118141 - RNA, 25 nt, Artificial Sequence
  Description of Artificial Sequence: Synthetic oligonucleotide
uaaucuuccuguugaaugcuucaug

SEQ ID NO: 118142 - RNA, 25 nt, Artificial Sequence
  Description of Artificial Sequence: Synthetic oligonucleotide
cuucaugacuugaauucuacuuuga

SEQ ID NO: 118143 - RNA, 25 nt, Artificial Sequence
  Description of Artificial Sequence: Synthetic oligonucleotide
aagagggagagaagcaacuacagac

SEQ ID NO: 118144 - RNA, 25 nt, Artificial Sequence
  Description of Artificial Sequence: Synthetic oligonucleotide
cgucuccuaccagaccaaggucaac

SEQ ID NO: 118145 - RNA, 25 nt, Artificial Sequence
  Description of Artificial Sequence: Synthetic oligonucleotide
gaucaaucggcccgacuaucucgac

SEQ ID NO: 118146 - RNA, 25 nt, Artificial Sequence
  Description of Artificial Sequence: Synthetic oligonucleotide
ggacgaacauccaaccuucccaaac

SEQ ID NO: 118147 - RNA, 25 nt, Artificial Sequence
  Description of Artificial Sequence: Synthetic oligonucleotide
agggucggaacccaagcuuagaacu

SEQ ID NO: 118148 - RNA, 25 nt, Artificial Sequence
  Description of Artificial Sequence: Synthetic oligonucleotide
ucggaacccaagcuuagaacuuuaa

SEQ ID NO: 118149 - RNA, 25 nt, Artificial Sequence
  Description of Artificial Sequence: Synthetic oligonucleotide
acccaagcuuagaacuuuaagcaac

SEQ ID NO: 118150 - RNA, 25 nt, Artificial Sequence
  Description of Artificial Sequence: Synthetic oligonucleotide
gaacuuuaagcaacaagaccaccac

SEQ ID NO: 118151 - RNA, 25 nt, Artificial Sequence
  Description of Artificial Sequence: Synthetic oligonucleotide
acuauucaguggcgagaaauaaagu

SEQ ID NO: 118152 - RNA, 25 nt, Artificial Sequence
  Description of Artificial Sequence: Synthetic oligonucleotide
cuauucaguggcgagaaauaaaguu

SEQ ID NO: 118153 - RNA, 25 nt, Artificial Sequence
  Description of Artificial Sequence: Synthetic oligonucleotide
aaacacagauaacaggaaaugaucc

SEQ ID NO: 118154 - RNA, 25 nt, Artificial Sequence
  Description of Artificial Sequence: Synthetic oligonucleotide
cuuaagaaaagagaagaaaugaaac

SEQ ID NO: 118155 - RNA, 25 nt, Artificial Sequence
  Description of Artificial Sequence: Synthetic oligonucleotide
cugaaggaguguguuuccauccucc

SEQ ID NO: 118156 - RNA, 25 nt, Artificial Sequence
  Description of Artificial Sequence: Synthetic oligonucleotide
ucaccgcgggacugaaaaucuuuga

SEQ ID NO: 118157 - RNA, 25 nt, Artificial Sequence
  Description of Artificial Sequence: Synthetic oligonucleotide
agcagaaauaagcgugccguucagg

SEQ ID NO: 118158 - RNA, 25 nt, Artificial Sequence
  Description of Artificial Sequence: Synthetic oligonucleotide
aagcgugccguucaggguccagaag

SEQ ID NO: 118159 - RNA, 25 nt, Artificial Sequence
  Description of Artificial Sequence: Synthetic oligonucleotide
agaaacagucacucaagacugcuug

SEQ ID NO: 118160 - RNA, 25 nt, Artificial Sequence
  Description of Artificial Sequence: Synthetic oligonucleotide
agaggaagaagguccaugucuuugg

SEQ ID NO: 118161 - RNA, 25 nt, Artificial Sequence
  Description of Artificial Sequence: Synthetic oligonucleotide
uguauucaaaauaugccugaaacac

SEQ ID NO: 118162 - RNA, 25 nt, Artificial Sequence
  Description of Artificial Sequence: Synthetic oligonucleotide
auuuuccucccuuucucuguaccuc

SEQ ID NO: 118163 - RNA, 25 nt, Artificial Sequence
  Description of Artificial Sequence: Synthetic oligonucleotide
caaagaaagauagagcaagacaaga

SEQ ID NO: 118164 - RNA, 25 nt, Artificial Sequence
  Description of Artificial Sequence: Synthetic oligonucleotide
aagaaagauagagcaagacaagaaa

SEQ ID NO: 118165 - RNA, 25 nt, Artificial Sequence
  Description of Artificial Sequence: Synthetic oligonucleotide
gaaagcauuuguuuguacaagaucc

SEQ ID NO: 118166 - RNA, 25 nt, Artificial Sequence
  Description of Artificial Sequence: Synthetic oligonucleotide
ugaguuaaacgaacguacuugcaga

SEQ ID NO: 118167 - RNA, 25 nt, Artificial Sequence
  Description of Artificial Sequence: Synthetic oligonucleotide
acugauacagaacgaucgauacaga

SEQ ID NO: 118168 - RNA, 25 nt, Artificial Sequence
  Description of Artificial Sequence: Synthetic oligonucleotide
auauuauauauauauaaaaauaaau

SEQ ID NO: 118169 - RNA, 25 nt, Artificial Sequence
  Description of Artificial Sequence: Synthetic oligonucleotide
auuauauauauauaaaaauaaauau

SEQ ID NO: 118170 - RNA, 25 nt, Artificial Sequence
  Description of Artificial Sequence: Synthetic oligonucleotide
ucacuggauguauuugacugcugug

SEQ ID NO: 118171 - RNA, 25 nt, Artificial Sequence
  Description of Artificial Sequence: Synthetic oligonucleotide
cagggaagaggaggagaugagagac

SEQ ID NO: 118172 - RNA, 25 nt, Artificial Sequence
  Description of Artificial Sequence: Synthetic oligonucleotide
augaucuuuuuuuugucccacuugg

SEQ ID NO: 118173 - RNA, 27 nt, Artificial Sequence
  Description of Artificial Sequence: Synthetic oligonucleotide
ggccgugaacuccucaucaaaauaccu

SEQ ID NO: 118174 - RNA, 27 nt, Artificial Sequence
  Description of Artificial Sequence: Synthetic oligonucleotide
uggugugauggugaucaucugggccgu

SEQ ID NO: 118175 - RNA, 27 nt, Artificial Sequence
  Description of Artificial Sequence: Synthetic oligonucleotide
aaacccgcaggauaguuuucuucccua

SEQ ID NO: 118176 - RNA, 27 nt, Artificial Sequence
  Description of Artificial Sequence: Synthetic oligonucleotide
caaacuggaugaaauaaauuaaaaccc

SEQ ID NO: 118177 - RNA, 27 nt, Artificial Sequence
  Description of Artificial Sequence: Synthetic oligonucleotide
agaaguccuuaacauuucccuacguga

SEQ ID NO: 118178 - RNA, 27 nt, Artificial Sequence
  Description of Artificial Sequence: Synthetic oligonucleotide
cucugucccacuggguaaacccuggcc

SEQ ID NO: 118179 - RNA, 27 nt, Artificial Sequence
  Description of Artificial Sequence: Synthetic oligonucleotide
cacaauaacaaauuuaaaccuugcucc

SEQ ID NO: 118180 - RNA, 27 nt, Artificial Sequence
  Description of Artificial Sequence: Synthetic oligonucleotide
aaaugcauuugaacaacauaauacaca

SEQ ID NO: 118181 - RNA, 27 nt, Artificial Sequence
  Description of Artificial Sequence: Synthetic oligonucleotide
ggcuuuccugucacaaagauuaaaaac

SEQ ID NO: 118182 - RNA, 27 nt, Artificial Sequence
  Description of Artificial Sequence: Synthetic oligonucleotide
agggcuuuccugucacaaagauuaaaa

SEQ ID NO: 118183 - RNA, 27 nt, Artificial Sequence
  Description of Artificial Sequence: Synthetic oligonucleotide
ggccaugcugggagacauaagcagcag

SEQ ID NO: 118184 - RNA, 27 nt, Artificial Sequence
  Description of Artificial Sequence: Synthetic oligonucleotide
ucagggagaagcuucugaaacacuucu

SEQ ID NO: 118185 - RNA, 27 nt, Artificial Sequence
  Description of Artificial Sequence: Synthetic oligonucleotide
aagggcuucuuccuuauugauggucag

SEQ ID NO: 118186 - RNA, 27 nt, Artificial Sequence
  Description of Artificial Sequence: Synthetic oligonucleotide
ugaagggcuucuuccuuauugaugguc

SEQ ID NO: 118187 - RNA, 27 nt, Artificial Sequence
  Description of Artificial Sequence: Synthetic oligonucleotide
cgcugaagggcuucuuccuuauugaug

SEQ ID NO: 118188 - RNA, 27 nt, Artificial Sequence
  Description of Artificial Sequence: Synthetic oligonucleotide
gccgcugaagggcuucuuccuuauuga

SEQ ID NO: 118189 - RNA, 27 nt, Artificial Sequence
  Description of Artificial Sequence: Synthetic oligonucleotide
acuggccgcugaagggcuucuuccuua

SEQ ID NO: 118190 - RNA, 27 nt, Artificial Sequence
  Description of Artificial Sequence: Synthetic oligonucleotide
cggagcuuuucaccuuuaguuaugcuu

SEQ ID NO: 118191 - RNA, 27 nt, Artificial Sequence
  Description of Artificial Sequence: Synthetic oligonucleotide
ccggagcuuuucaccuuuaguuaugcu

SEQ ID NO: 118192 - RNA, 27 nt, Artificial Sequence
  Description of Artificial Sequence: Synthetic oligonucleotide
cagacuguugacuggcgugauguaguu

SEQ ID NO: 118193 - RNA, 27 nt, Artificial Sequence
  Description of Artificial Sequence: Synthetic oligonucleotide
cuuuugaacucugcuuaaauccagugg

SEQ ID NO: 118194 - RNA, 27 nt, Artificial Sequence
  Description of Artificial Sequence: Synthetic oligonucleotide
gcuuuugaacucugcuuaaauccagug

SEQ ID NO: 118195 - RNA, 27 nt, Artificial Sequence
  Description of Artificial Sequence: Synthetic oligonucleotide
agggcuuuugaacucugcuuaaaucca

SEQ ID NO: 118196 - RNA, 27 nt, Artificial Sequence
  Description of Artificial Sequence: Synthetic oligonucleotide
aagggcuuuugaacucugcuuaaaucc

SEQ ID NO: 118197 - RNA, 27 nt, Artificial Sequence
  Description of Artificial Sequence: Synthetic oligonucleotide
ugaagggcuuuugaacucugcuuaaau

SEQ ID NO: 118198 - RNA, 27 nt, Artificial Sequence
  Description of Artificial Sequence: Synthetic oligonucleotide
cugaagggcuuuugaacucugcuuaaa

SEQ ID NO: 118199 - RNA, 27 nt, Artificial Sequence
  Description of Artificial Sequence: Synthetic oligonucleotide
cgcugaagggcuuuugaacucugcuua

SEQ ID NO: 118200 - RNA, 27 nt, Artificial Sequence
  Description of Artificial Sequence: Synthetic oligonucleotide
cgagcggcuucacucagacccugaggc

SEQ ID NO: 118201 - RNA, 27 nt, Artificial Sequence
  Description of Artificial Sequence: Synthetic oligonucleotide
uugacuggcgugauguaguugcuuggg

SEQ ID NO: 118202 - RNA, 27 nt, Artificial Sequence
  Description of Artificial Sequence: Synthetic oligonucleotide
cacgcaccaagaagcugccauugaucc

SEQ ID NO: 118203 - RNA, 27 nt, Artificial Sequence
  Description of Artificial Sequence: Synthetic oligonucleotide
cugaugaauccaaugugggcuggaauc

SEQ ID NO: 118204 - RNA, 27 nt, Artificial Sequence
  Description of Artificial Sequence: Synthetic oligonucleotide
cuuagguauuccacauucucagcugug

SEQ ID NO: 118205 - RNA, 27 nt, Artificial Sequence
  Description of Artificial Sequence: Synthetic oligonucleotide
ugagccucaaauuaggagauacguuuu

SEQ ID NO: 118206 - RNA, 27 nt, Artificial Sequence
  Description of Artificial Sequence: Synthetic oligonucleotide
ccaauuguagagaaauuauuuuaggaa

SEQ ID NO: 118207 - RNA, 27 nt, Artificial Sequence
  Description of Artificial Sequence: Synthetic oligonucleotide
ggcuccuaacuagcugaaucuuccaau

SEQ ID NO: 118208 - RNA, 27 nt, Artificial Sequence
  Description of Artificial Sequence: Synthetic oligonucleotide
guggauauugacuaggagaguuuaaaa

SEQ ID NO: 118209 - RNA, 27 nt, Artificial Sequence
  Description of Artificial Sequence: Synthetic oligonucleotide
ugugacugaacauaacuguaggcugaa

SEQ ID NO: 118210 - RNA, 27 nt, Artificial Sequence
  Description of Artificial Sequence: Synthetic oligonucleotide
guaugugugugugacugaacauaacug

SEQ ID NO: 118211 - RNA, 27 nt, Artificial Sequence
  Description of Artificial Sequence: Synthetic oligonucleotide
aagcaaaaggaacauuuuguaugugug

SEQ ID NO: 118212 - RNA, 27 nt, Artificial Sequence
  Description of Artificial Sequence: Synthetic oligonucleotide
aaaaauuacuuuaaaagcaaaaggaac

SEQ ID NO: 118213 - RNA, 27 nt, Artificial Sequence
  Description of Artificial Sequence: Synthetic oligonucleotide
ccauugacuguugcuucacaggucaga

SEQ ID NO: 118214 - RNA, 27 nt, Artificial Sequence
  Description of Artificial Sequence: Synthetic oligonucleotide
auugguuugucgaugugugagauaguu

SEQ ID NO: 118215 - RNA, 27 nt, Artificial Sequence
  Description of Artificial Sequence: Synthetic oligonucleotide
agugguagcaguacaauugaggacaag

SEQ ID NO: 118216 - RNA, 27 nt, Artificial Sequence
  Description of Artificial Sequence: Synthetic oligonucleotide
uaagaccgcuugccagcuacgguuuca

SEQ ID NO: 118217 - RNA, 27 nt, Artificial Sequence
  Description of Artificial Sequence: Synthetic oligonucleotide
agccgguaagaccgcuugccagcuacg

SEQ ID NO: 118218 - RNA, 27 nt, Artificial Sequence
  Description of Artificial Sequence: Synthetic oligonucleotide
gguaacccaucuuuuaaccauacaacu

SEQ ID NO: 118219 - RNA, 27 nt, Artificial Sequence
  Description of Artificial Sequence: Synthetic oligonucleotide
ucgcagguaacccaucuuuuaaccaua

SEQ ID NO: 118220 - RNA, 27 nt, Artificial Sequence
  Description of Artificial Sequence: Synthetic oligonucleotide
cucagcaagauuguauaauucccugca

SEQ ID NO: 118221 - RNA, 27 nt, Artificial Sequence
  Description of Artificial Sequence: Synthetic oligonucleotide
acuguuuuaugcucagcaagauuguau

SEQ ID NO: 118222 - RNA, 27 nt, Artificial Sequence
  Description of Artificial Sequence: Synthetic oligonucleotide
aggauaaaggacucuucauuauuggaa

SEQ ID NO: 118223 - RNA, 27 nt, Artificial Sequence
  Description of Artificial Sequence: Synthetic oligonucleotide
caacuugcguuggaacauccaaagugu

SEQ ID NO: 118224 - RNA, 27 nt, Artificial Sequence
  Description of Artificial Sequence: Synthetic oligonucleotide
augguuucaguuuaguggaagcauuua

SEQ ID NO: 118225 - RNA, 27 nt, Artificial Sequence
  Description of Artificial Sequence: Synthetic oligonucleotide
auauuuaacaaagucaaacuuucucac

SEQ ID NO: 118226 - RNA, 27 nt, Artificial Sequence
  Description of Artificial Sequence: Synthetic oligonucleotide
aacuuuuaauauacaguaguucuuuuc

SEQ ID NO: 118227 - RNA, 27 nt, Artificial Sequence
  Description of Artificial Sequence: Synthetic oligonucleotide
guuaagucaaaacccguauuucuaaag

SEQ ID NO: 118228 - RNA, 27 nt, Artificial Sequence
  Description of Artificial Sequence: Synthetic oligonucleotide
gugcugaguuugcuguacccauguuga

SEQ ID NO: 118229 - RNA, 27 nt, Artificial Sequence
  Description of Artificial Sequence: Synthetic oligonucleotide
ugaggucagcaucuucugugucuuuac

SEQ ID NO: 118230 - RNA, 27 nt, Artificial Sequence
  Description of Artificial Sequence: Synthetic oligonucleotide
gcgaucugaauaaaccucccuacuagc

SEQ ID NO: 118231 - RNA, 27 nt, Artificial Sequence
  Description of Artificial Sequence: Synthetic oligonucleotide
aucccagaacccugcugcagaaggcca

SEQ ID NO: 118232 - RNA, 27 nt, Artificial Sequence
  Description of Artificial Sequence: Synthetic oligonucleotide
cauaauuuccaauauguaccagaccuu

SEQ ID NO: 118233 - RNA, 27 nt, Artificial Sequence
  Description of Artificial Sequence: Synthetic oligonucleotide
cuagugcuuccaucggaaggacuaggu

SEQ ID NO: 118234 - RNA, 27 nt, Artificial Sequence
  Description of Artificial Sequence: Synthetic oligonucleotide
uccacauaaaaacaauauucacuggga

SEQ ID NO: 118235 - RNA, 27 nt, Artificial Sequence
  Description of Artificial Sequence: Synthetic oligonucleotide
ucuaccaauuccaacuugaauucauug

SEQ ID NO: 118236 - RNA, 27 nt, Artificial Sequence
  Description of Artificial Sequence: Synthetic oligonucleotide
ucuccaagucuaaaucuguguccugag

SEQ ID NO: 118237 - RNA, 27 nt, Artificial Sequence
  Description of Artificial Sequence: Synthetic oligonucleotide
uggaauacuguaacugugcuuugagga

SEQ ID NO: 118238 - RNA, 27 nt, Artificial Sequence
  Description of Artificial Sequence: Synthetic oligonucleotide
uuaauucaucagugguggcagugguag

SEQ ID NO: 118239 - RNA, 27 nt, Artificial Sequence
  Description of Artificial Sequence: Synthetic oligonucleotide
gugaugauguggcacuaguaguuucuu

SEQ ID NO: 118240 - RNA, 27 nt, Artificial Sequence
  Description of Artificial Sequence: Synthetic oligonucleotide
ucuguuuggugaggcuguccgacuuug

SEQ ID NO: 118241 - RNA, 27 nt, Artificial Sequence
  Description of Artificial Sequence: Synthetic oligonucleotide
ccaucauguuccauuuuucgcuuucuc

SEQ ID NO: 118242 - RNA, 27 nt, Artificial Sequence
  Description of Artificial Sequence: Synthetic oligonucleotide
gcagucuacaugcuaaaucagagggua

SEQ ID NO: 118243 - RNA, 27 nt, Artificial Sequence
  Description of Artificial Sequence: Synthetic oligonucleotide
cauaaauagauccuuaaauagcucaaa

SEQ ID NO: 118244 - RNA, 27 nt, Artificial Sequence
  Description of Artificial Sequence: Synthetic oligonucleotide
ugauaauagugcuuuuucaccuuuuuc

SEQ ID NO: 118245 - RNA, 27 nt, Artificial Sequence
  Description of Artificial Sequence: Synthetic oligonucleotide
gcagaacugauaauagugcuuuuucac

SEQ ID NO: 118246 - RNA, 27 nt, Artificial Sequence
  Description of Artificial Sequence: Synthetic oligonucleotide
guagguuuaaucuuucuuuucagccau

SEQ ID NO: 118247 - RNA, 27 nt, Artificial Sequence
  Description of Artificial Sequence: Synthetic oligonucleotide
agaaggauuuuauuauaaggguuuaau

SEQ ID NO: 118248 - RNA, 27 nt, Artificial Sequence
  Description of Artificial Sequence: Synthetic oligonucleotide
gucuacagcauuggcuaauaguaugaa

SEQ ID NO: 118249 - RNA, 27 nt, Artificial Sequence
  Description of Artificial Sequence: Synthetic oligonucleotide
cuauuccuaucaaaaugcuucugucua

SEQ ID NO: 118250 - RNA, 27 nt, Artificial Sequence
  Description of Artificial Sequence: Synthetic oligonucleotide
ucagggccauuaucuuauuugcucuau

SEQ ID NO: 118251 - RNA, 27 nt, Artificial Sequence
  Description of Artificial Sequence: Synthetic oligonucleotide
ugcuugaggaagagaaaaauguugguc

SEQ ID NO: 118252 - RNA, 27 nt, Artificial Sequence
  Description of Artificial Sequence: Synthetic oligonucleotide
ugggcugaacuuuucucauacuuaaag

SEQ ID NO: 118253 - RNA, 27 nt, Artificial Sequence
  Description of Artificial Sequence: Synthetic oligonucleotide
gguucagcagccaucuuuauuccugcg

SEQ ID NO: 118254 - RNA, 27 nt, Artificial Sequence
  Description of Artificial Sequence: Synthetic oligonucleotide
ugaagagaacuuggucauucaaauuuc

SEQ ID NO: 118255 - RNA, 27 nt, Artificial Sequence
  Description of Artificial Sequence: Synthetic oligonucleotide
cucuaggcuggcuaucuuuauacauac

SEQ ID NO: 118256 - RNA, 27 nt, Artificial Sequence
  Description of Artificial Sequence: Synthetic oligonucleotide
acacuucacagagauaguuacagccau

SEQ ID NO: 118257 - RNA, 27 nt, Artificial Sequence
  Description of Artificial Sequence: Synthetic oligonucleotide
uugaaauuuucucacacuucacagaga

SEQ ID NO: 118258 - RNA, 27 nt, Artificial Sequence
  Description of Artificial Sequence: Synthetic oligonucleotide
ucaggaggauucauuuccuuaaaggaa

SEQ ID NO: 118259 - RNA, 27 nt, Artificial Sequence
  Description of Artificial Sequence: Synthetic oligonucleotide
auaugaugucacuuuuuguauccuuga

SEQ ID NO: 118260 - RNA, 27 nt, Artificial Sequence
  Description of Artificial Sequence: Synthetic oligonucleotide
uaugaugaagauucaaauugcaucuua

SEQ ID NO: 118261 - RNA, 27 nt, Artificial Sequence
  Description of Artificial Sequence: Synthetic oligonucleotide
uuaauagcuagucuucguuuugaacag

SEQ ID NO: 118262 - RNA, 27 nt, Artificial Sequence
  Description of Artificial Sequence: Synthetic oligonucleotide
auuuuuaguagagaugagguuucacca

SEQ ID NO: 118263 - RNA, 27 nt, Artificial Sequence
  Description of Artificial Sequence: Synthetic oligonucleotide
aggcgagauagagcuucucuuucguuc

SEQ ID NO: 118264 - RNA, 27 nt, Artificial Sequence
  Description of Artificial Sequence: Synthetic oligonucleotide
aacuggaccgaaggcgcuuguggagaa

SEQ ID NO: 118265 - RNA, 27 nt, Artificial Sequence
  Description of Artificial Sequence: Synthetic oligonucleotide
gcggcuacaucuuuggaaucuucuccu

SEQ ID NO: 118266 - RNA, 27 nt, Artificial Sequence
  Description of Artificial Sequence: Synthetic oligonucleotide
caagucuccucauugaauccagauugg

SEQ ID NO: 118267 - RNA, 27 nt, Artificial Sequence
  Description of Artificial Sequence: Synthetic oligonucleotide
uccucacuacucucaaaucuguucugg

SEQ ID NO: 118268 - RNA, 27 nt, Artificial Sequence
  Description of Artificial Sequence: Synthetic oligonucleotide
uuuguacucaucugcacagcucuggcu

SEQ ID NO: 118269 - RNA, 27 nt, Artificial Sequence
  Description of Artificial Sequence: Synthetic oligonucleotide
gcccauuaacaacaacaaucugaggug

SEQ ID NO: 118270 - RNA, 27 nt, Artificial Sequence
  Description of Artificial Sequence: Synthetic oligonucleotide
aauaaauuaaaaauaauuaaaauagug

SEQ ID NO: 118271 - RNA, 27 nt, Artificial Sequence
  Description of Artificial Sequence: Synthetic oligonucleotide
cauauuuaaauauuaauaaauuaaaaa

SEQ ID NO: 118272 - RNA, 27 nt, Artificial Sequence
  Description of Artificial Sequence: Synthetic oligonucleotide
gaaacaaaggauauucaaacugcauag

SEQ ID NO: 118273 - RNA, 27 nt, Artificial Sequence
  Description of Artificial Sequence: Synthetic oligonucleotide
caaacacuuagacgccagcagcauggg

SEQ ID NO: 118274 - RNA, 27 nt, Artificial Sequence
  Description of Artificial Sequence: Synthetic oligonucleotide
uuugucacaggugaaaugcacaucuga

SEQ ID NO: 118275 - RNA, 27 nt, Artificial Sequence
  Description of Artificial Sequence: Synthetic oligonucleotide
uaauucagccuggcacagguuuugauc

SEQ ID NO: 118276 - RNA, 27 nt, Artificial Sequence
  Description of Artificial Sequence: Synthetic oligonucleotide
auuguaagaaugacuacccacauucac

SEQ ID NO: 118277 - RNA, 27 nt, Artificial Sequence
  Description of Artificial Sequence: Synthetic oligonucleotide
caauuguaagaaugacuacccacauuc

SEQ ID NO: 118278 - RNA, 27 nt, Artificial Sequence
  Description of Artificial Sequence: Synthetic oligonucleotide
guacacucucugaugcucauuuucaua

SEQ ID NO: 118279 - RNA, 27 nt, Artificial Sequence
  Description of Artificial Sequence: Synthetic oligonucleotide
cugcugaguucuacaugaaaagcaaau

SEQ ID NO: 118280 - RNA, 27 nt, Artificial Sequence
  Description of Artificial Sequence: Synthetic oligonucleotide
uacugaaaauaaauauagaaauacaac

SEQ ID NO: 118281 - RNA, 27 nt, Artificial Sequence
  Description of Artificial Sequence: Synthetic oligonucleotide
uuccauuuaagaaacauuaaucaaaac

SEQ ID NO: 118282 - RNA, 27 nt, Artificial Sequence
  Description of Artificial Sequence: Synthetic oligonucleotide
acaauuuuaggcacuauacacguuguu

SEQ ID NO: 118283 - RNA, 27 nt, Artificial Sequence
  Description of Artificial Sequence: Synthetic oligonucleotide
ccagauguuaguagccaaggauauggu

SEQ ID NO: 118284 - RNA, 27 nt, Artificial Sequence
  Description of Artificial Sequence: Synthetic oligonucleotide
agcucacagucuccagauguuaguagc

SEQ ID NO: 118285 - RNA, 27 nt, Artificial Sequence
  Description of Artificial Sequence: Synthetic oligonucleotide
auuaauaaaaagcacacaacuuauggc

SEQ ID NO: 118286 - RNA, 27 nt, Artificial Sequence
  Description of Artificial Sequence: Synthetic oligonucleotide
aauguaagaagagccaaaaugaugcau

SEQ ID NO: 118287 - RNA, 27 nt, Artificial Sequence
  Description of Artificial Sequence: Synthetic oligonucleotide
acauuuuuacaaauguaagaagagcca

SEQ ID NO: 118288 - RNA, 27 nt, Artificial Sequence
  Description of Artificial Sequence: Synthetic oligonucleotide
aauaugaauuaagaugaccuaaucugu

SEQ ID NO: 118289 - RNA, 27 nt, Artificial Sequence
  Description of Artificial Sequence: Synthetic oligonucleotide
ucaugauuaguucuuucaauuccaucc

SEQ ID NO: 118290 - RNA, 27 nt, Artificial Sequence
  Description of Artificial Sequence: Synthetic oligonucleotide
cccaagagcagaaggaaugagugugca

SEQ ID NO: 118291 - RNA, 27 nt, Artificial Sequence
  Description of Artificial Sequence: Synthetic oligonucleotide
cucaaagcuacugguuaccucuacacc

SEQ ID NO: 118292 - RNA, 27 nt, Artificial Sequence
  Description of Artificial Sequence: Synthetic oligonucleotide
ugaaauauuacguggcaugugguuggg

SEQ ID NO: 118293 - RNA, 27 nt, Artificial Sequence
  Description of Artificial Sequence: Synthetic oligonucleotide
agugaagagaauaacuuguuuccgaag

SEQ ID NO: 118294 - RNA, 27 nt, Artificial Sequence
  Description of Artificial Sequence: Synthetic oligonucleotide
uuucuuagcauuaguuauugggaguga

SEQ ID NO: 118295 - RNA, 27 nt, Artificial Sequence
  Description of Artificial Sequence: Synthetic oligonucleotide
uugauuuucagcauuucuuagcauuag

SEQ ID NO: 118296 - RNA, 27 nt, Artificial Sequence
  Description of Artificial Sequence: Synthetic oligonucleotide
aaaguaaucauauuuagagaaagacag

SEQ ID NO: 118297 - RNA, 27 nt, Artificial Sequence
  Description of Artificial Sequence: Synthetic oligonucleotide
uguagaacaaaaugccugaaauucagc

SEQ ID NO: 118298 - RNA, 27 nt, Artificial Sequence
  Description of Artificial Sequence: Synthetic oligonucleotide
gagagucccgggugagagggaaucgcc

SEQ ID NO: 118299 - RNA, 27 nt, Artificial Sequence
  Description of Artificial Sequence: Synthetic oligonucleotide
cuuuacuuuaaagguucacuuuccuug

SEQ ID NO: 118300 - RNA, 27 nt, Artificial Sequence
  Description of Artificial Sequence: Synthetic oligonucleotide
ccaggcuuccagagcaugcagccuccu

SEQ ID NO: 118301 - RNA, 27 nt, Artificial Sequence
  Description of Artificial Sequence: Synthetic oligonucleotide
cucucuuuuguuuucuguucagagaaa

SEQ ID NO: 118302 - RNA, 27 nt, Artificial Sequence
  Description of Artificial Sequence: Synthetic oligonucleotide
cggcauaacugauuacagccaaguuca

SEQ ID NO: 118303 - RNA, 27 nt, Artificial Sequence
  Description of Artificial Sequence: Synthetic oligonucleotide
uggacuucuuuuaauuuuggcuucuuc

SEQ ID NO: 118304 - RNA, 27 nt, Artificial Sequence
  Description of Artificial Sequence: Synthetic oligonucleotide
uaaccucaccuggacuucuuuuaauuu

SEQ ID NO: 118305 - RNA, 27 nt, Artificial Sequence
  Description of Artificial Sequence: Synthetic oligonucleotide
guccucuucccgauaauccggauucag

SEQ ID NO: 118306 - RNA, 27 nt, Artificial Sequence
  Description of Artificial Sequence: Synthetic oligonucleotide
acaauacuugcuuugaugucacauuaa

SEQ ID NO: 118307 - RNA, 27 nt, Artificial Sequence
  Description of Artificial Sequence: Synthetic oligonucleotide
gagugcuacaauacuugcuuugauguc

SEQ ID NO: 118308 - RNA, 27 nt, Artificial Sequence
  Description of Artificial Sequence: Synthetic oligonucleotide
auuugugguuuuguuuucucucucucu

SEQ ID NO: 118309 - RNA, 27 nt, Artificial Sequence
  Description of Artificial Sequence: Synthetic oligonucleotide
uguaugggcuuaaauacuacagcgagg

SEQ ID NO: 118310 - RNA, 27 nt, Artificial Sequence
  Description of Artificial Sequence: Synthetic oligonucleotide
cuguaugggcuuaaauacuacagcgag

SEQ ID NO: 118311 - RNA, 27 nt, Artificial Sequence
  Description of Artificial Sequence: Synthetic oligonucleotide
ggaagguuucuguaugggcuuaaauac

SEQ ID NO: 118312 - RNA, 27 nt, Artificial Sequence
  Description of Artificial Sequence: Synthetic oligonucleotide
guagguauaccauguuuauuuuaauac

SEQ ID NO: 118313 - RNA, 27 nt, Artificial Sequence
  Description of Artificial Sequence: Synthetic oligonucleotide
uccgaaaacuggccgaucagaacagcc

SEQ ID NO: 118314 - RNA, 27 nt, Artificial Sequence
  Description of Artificial Sequence: Synthetic oligonucleotide
cccuguuccaaaguucaaauuauuugu

SEQ ID NO: 118315 - RNA, 27 nt, Artificial Sequence
  Description of Artificial Sequence: Synthetic oligonucleotide
acuggaaaguuaaauuaaggucgcaau

SEQ ID NO: 118316 - RNA, 27 nt, Artificial Sequence
  Description of Artificial Sequence: Synthetic oligonucleotide
caaaaccaaacuuuagcuuucucagcc

SEQ ID NO: 118317 - RNA, 27 nt, Artificial Sequence
  Description of Artificial Sequence: Synthetic oligonucleotide
uacagugggaaguagcaucuuuacuuu

SEQ ID NO: 118318 - RNA, 27 nt, Artificial Sequence
  Description of Artificial Sequence: Synthetic oligonucleotide
ucauaugguaucagcaauuaagcagua

SEQ ID NO: 118319 - RNA, 27 nt, Artificial Sequence
  Description of Artificial Sequence: Synthetic oligonucleotide
cagcccauguuucauucauaugguauc

SEQ ID NO: 118320 - RNA, 27 nt, Artificial Sequence
  Description of Artificial Sequence: Synthetic oligonucleotide
uaugaaaaaguuggauaagaaaguugg

SEQ ID NO: 118321 - RNA, 27 nt, Artificial Sequence
  Description of Artificial Sequence: Synthetic oligonucleotide
uccggccucaugaugucaugcaaggcu

SEQ ID NO: 118322 - RNA, 27 nt, Artificial Sequence
  Description of Artificial Sequence: Synthetic oligonucleotide
acaaaugcagucauauacaaauucagg

SEQ ID NO: 118323 - RNA, 27 nt, Artificial Sequence
  Description of Artificial Sequence: Synthetic oligonucleotide
gguaguaaacauucuacuaggauucuu

SEQ ID NO: 118324 - RNA, 27 nt, Artificial Sequence
  Description of Artificial Sequence: Synthetic oligonucleotide
uuucaucaaaaaauucuucccuuucug

SEQ ID NO: 118325 - RNA, 27 nt, Artificial Sequence
  Description of Artificial Sequence: Synthetic oligonucleotide
aaauucacacacuggcaugccgauagc

SEQ ID NO: 118326 - RNA, 27 nt, Artificial Sequence
  Description of Artificial Sequence: Synthetic oligonucleotide
acauacauugcucuacuaugaggugaa

SEQ ID NO: 118327 - RNA, 27 nt, Artificial Sequence
  Description of Artificial Sequence: Synthetic oligonucleotide
uauauaugugcuuuggcaauucuggug

SEQ ID NO: 118328 - RNA, 27 nt, Artificial Sequence
  Description of Artificial Sequence: Synthetic oligonucleotide
ggagaaacuauuacccagaucaccacu

SEQ ID NO: 118329 - RNA, 27 nt, Artificial Sequence
  Description of Artificial Sequence: Synthetic oligonucleotide
auuuggagaaacuauuacccagaucac

SEQ ID NO: 118330 - RNA, 27 nt, Artificial Sequence
  Description of Artificial Sequence: Synthetic oligonucleotide
uuucuaggaaguauucaucacauccac

SEQ ID NO: 118331 - RNA, 27 nt, Artificial Sequence
  Description of Artificial Sequence: Synthetic oligonucleotide
cauauaugguguagcuguggaaaugcg

SEQ ID NO: 118332 - RNA, 27 nt, Artificial Sequence
  Description of Artificial Sequence: Synthetic oligonucleotide
cuccauucauauaugguguagcugugg

SEQ ID NO: 118333 - RNA, 27 nt, Artificial Sequence
  Description of Artificial Sequence: Synthetic oligonucleotide
aucuucuucucguguaagaacugcagc

SEQ ID NO: 118334 - RNA, 27 nt, Artificial Sequence
  Description of Artificial Sequence: Synthetic oligonucleotide
ucccuguaaaugaucuucuucucgugu

SEQ ID NO: 118335 - RNA, 27 nt, Artificial Sequence
  Description of Artificial Sequence: Synthetic oligonucleotide
gucccuguaaaugaucuucuucucgug

SEQ ID NO: 118336 - RNA, 27 nt, Artificial Sequence
  Description of Artificial Sequence: Synthetic oligonucleotide
ucaggucccuguaaaugaucuucuucu

SEQ ID NO: 118337 - RNA, 27 nt, Artificial Sequence
  Description of Artificial Sequence: Synthetic oligonucleotide
gaugcagucaaacaccucuuccucugu

SEQ ID NO: 118338 - RNA, 27 nt, Artificial Sequence
  Description of Artificial Sequence: Synthetic oligonucleotide
cgaugcagucaaacaccucuuccucug

SEQ ID NO: 118339 - RNA, 27 nt, Artificial Sequence
  Description of Artificial Sequence: Synthetic oligonucleotide
cccugugaacucgcccucaaaguagcg

SEQ ID NO: 118340 - RNA, 27 nt, Artificial Sequence
  Description of Artificial Sequence: Synthetic oligonucleotide
ggacagaggugccaggagaugcccuca

SEQ ID NO: 118341 - RNA, 27 nt, Artificial Sequence
  Description of Artificial Sequence: Synthetic oligonucleotide
uuaaaaagacaaaccauaucacuccuu

SEQ ID NO: 118342 - RNA, 27 nt, Artificial Sequence
  Description of Artificial Sequence: Synthetic oligonucleotide
cuuaaaaagacaaaccauaucacuccu

SEQ ID NO: 118343 - RNA, 27 nt, Artificial Sequence
  Description of Artificial Sequence: Synthetic oligonucleotide
gacaaccuuuaggaucuuuacugcaac

SEQ ID NO: 118344 - RNA, 27 nt, Artificial Sequence
  Description of Artificial Sequence: Synthetic oligonucleotide
gucgacaaccuuuaggaucuuuacugc

SEQ ID NO: 118345 - RNA, 27 nt, Artificial Sequence
  Description of Artificial Sequence: Synthetic oligonucleotide
acaauugccagguuguccuuugucaug

SEQ ID NO: 118346 - RNA, 27 nt, Artificial Sequence
  Description of Artificial Sequence: Synthetic oligonucleotide
ccucgcaccacugggucacaauugcca

SEQ ID NO: 118347 - RNA, 27 nt, Artificial Sequence
  Description of Artificial Sequence: Synthetic oligonucleotide
auuucaugucucuauggaugauguucu

SEQ ID NO: 118348 - RNA, 27 nt, Artificial Sequence
  Description of Artificial Sequence: Synthetic oligonucleotide
uggagaaauauauuguuggauuucaug

SEQ ID NO: 118349 - RNA, 27 nt, Artificial Sequence
  Description of Artificial Sequence: Synthetic oligonucleotide
agccuucauggagaaauauauuguugg

SEQ ID NO: 118350 - RNA, 27 nt, Artificial Sequence
  Description of Artificial Sequence: Synthetic oligonucleotide
accacuccagcgugacuuuacuguugc

SEQ ID NO: 118351 - RNA, 27 nt, Artificial Sequence
  Description of Artificial Sequence: Synthetic oligonucleotide
ccucucuuccuuuacuuucuucacaca

SEQ ID NO: 118352 - RNA, 27 nt, Artificial Sequence
  Description of Artificial Sequence: Synthetic oligonucleotide
gcccgaugcaaggauggcucggaagcg

SEQ ID NO: 118353 - RNA, 27 nt, Artificial Sequence
  Description of Artificial Sequence: Synthetic oligonucleotide
cacaguaggauauucaaccuccauuuc

SEQ ID NO: 118354 - RNA, 27 nt, Artificial Sequence
  Description of Artificial Sequence: Synthetic oligonucleotide
uuacacaguaggauauucaaccuccau

SEQ ID NO: 118355 - RNA, 27 nt, Artificial Sequence
  Description of Artificial Sequence: Synthetic oligonucleotide
uacacuacaagggaaaacucaaaaucu

SEQ ID NO: 118356 - RNA, 27 nt, Artificial Sequence
  Description of Artificial Sequence: Synthetic oligonucleotide
caaucaacaaagaacaaacaggauaaa

SEQ ID NO: 118357 - RNA, 27 nt, Artificial Sequence
  Description of Artificial Sequence: Synthetic oligonucleotide
uuucaaucaacaaagaacaaacaggau

SEQ ID NO: 118358 - RNA, 27 nt, Artificial Sequence
  Description of Artificial Sequence: Synthetic oligonucleotide
auggaagaaaaagaaggcuguagagaa

SEQ ID NO: 118359 - RNA, 27 nt, Artificial Sequence
  Description of Artificial Sequence: Synthetic oligonucleotide
uagaaggaagauuagcuauggaagaaa

SEQ ID NO: 118360 - RNA, 27 nt, Artificial Sequence
  Description of Artificial Sequence: Synthetic oligonucleotide
augaagcauucaacaggaagauuauuu

SEQ ID NO: 118361 - RNA, 27 nt, Artificial Sequence
  Description of Artificial Sequence: Synthetic oligonucleotide
caugaagcauucaacaggaagauuauu

SEQ ID NO: 118362 - RNA, 27 nt, Artificial Sequence
  Description of Artificial Sequence: Synthetic oligonucleotide
ucaaaguagaauucaagucaugaagca

SEQ ID NO: 118363 - RNA, 27 nt, Artificial Sequence
  Description of Artificial Sequence: Synthetic oligonucleotide
gucuguaguugcuucucucccucuuag

SEQ ID NO: 118364 - RNA, 27 nt, Artificial Sequence
  Description of Artificial Sequence: Synthetic oligonucleotide
guugaccuuggucugguaggagacggc

SEQ ID NO: 118365 - RNA, 27 nt, Artificial Sequence
  Description of Artificial Sequence: Synthetic oligonucleotide
gucgagauagucgggccgauugaucuc

SEQ ID NO: 118366 - RNA, 27 nt, Artificial Sequence
  Description of Artificial Sequence: Synthetic oligonucleotide
guuugggaagguuggauguucguccuc

SEQ ID NO: 118367 - RNA, 27 nt, Artificial Sequence
  Description of Artificial Sequence: Synthetic oligonucleotide
aguucuaagcuuggguuccgacccuaa

SEQ ID NO: 118368 - RNA, 27 nt, Artificial Sequence
  Description of Artificial Sequence: Synthetic oligonucleotide
uuaaaguucuaagcuuggguuccgacc

SEQ ID NO: 118369 - RNA, 27 nt, Artificial Sequence
  Description of Artificial Sequence: Synthetic oligonucleotide
guugcuuaaaguucuaagcuuggguuc

SEQ ID NO: 118370 - RNA, 27 nt, Artificial Sequence
  Description of Artificial Sequence: Synthetic oligonucleotide
gugguggucuuguugcuuaaaguucua

SEQ ID NO: 118371 - RNA, 27 nt, Artificial Sequence
  Description of Artificial Sequence: Synthetic oligonucleotide
acuuuauuucucgccacugaauaguag

SEQ ID NO: 118372 - RNA, 27 nt, Artificial Sequence
  Description of Artificial Sequence: Synthetic oligonucleotide
aacuuuauuucucgccacugaauagua

SEQ ID NO: 118373 - RNA, 27 nt, Artificial Sequence
  Description of Artificial Sequence: Synthetic oligonucleotide
ggaucauuuccuguuaucuguguuugu

SEQ ID NO: 118374 - RNA, 27 nt, Artificial Sequence
  Description of Artificial Sequence: Synthetic oligonucleotide
guuucauuucuucucuuuucuuaaggc

SEQ ID NO: 118375 - RNA, 27 nt, Artificial Sequence
  Description of Artificial Sequence: Synthetic oligonucleotide
ggaggauggaaacacacuccuucaguu

SEQ ID NO: 118376 - RNA, 27 nt, Artificial Sequence
  Description of Artificial Sequence: Synthetic oligonucleotide
ucaaagauuuucagucccgcggugaca

SEQ ID NO: 118377 - RNA, 27 nt, Artificial Sequence
  Description of Artificial Sequence: Synthetic oligonucleotide
ccugaacggcacgcuuauuucugcugu

SEQ ID NO: 118378 - RNA, 27 nt, Artificial Sequence
  Description of Artificial Sequence: Synthetic oligonucleotide
cuucuggacccugaacggcacgcuuau

SEQ ID NO: 118379 - RNA, 27 nt, Artificial Sequence
  Description of Artificial Sequence: Synthetic oligonucleotide
caagcagucuugagugacuguuucuuc

SEQ ID NO: 118380 - RNA, 27 nt, Artificial Sequence
  Description of Artificial Sequence: Synthetic oligonucleotide
ccaaagacauggaccuucuuccucuga

SEQ ID NO: 118381 - RNA, 27 nt, Artificial Sequence
  Description of Artificial Sequence: Synthetic oligonucleotide
guguuucaggcauauuuugaauacauc

SEQ ID NO: 118382 - RNA, 27 nt, Artificial Sequence
  Description of Artificial Sequence: Synthetic oligonucleotide
gagguacagagaaagggaggaaaauag

SEQ ID NO: 118383 - RNA, 27 nt, Artificial Sequence
  Description of Artificial Sequence: Synthetic oligonucleotide
ucuugucuugcucuaucuuucuuuggu

SEQ ID NO: 118384 - RNA, 27 nt, Artificial Sequence
  Description of Artificial Sequence: Synthetic oligonucleotide
uuucuugucuugcucuaucuuucuuug

SEQ ID NO: 118385 - RNA, 27 nt, Artificial Sequence
  Description of Artificial Sequence: Synthetic oligonucleotide
ggaucuuguacaaacaaaugcuuucuc

SEQ ID NO: 118386 - RNA, 27 nt, Artificial Sequence
  Description of Artificial Sequence: Synthetic oligonucleotide
ucugcaaguacguucguuuaacucaag

SEQ ID NO: 118387 - RNA, 27 nt, Artificial Sequence
  Description of Artificial Sequence: Synthetic oligonucleotide
ucuguaucgaucguucuguaucagucu

SEQ ID NO: 118388 - RNA, 27 nt, Artificial Sequence
  Description of Artificial Sequence: Synthetic oligonucleotide
auuuauuuuuauauauauauaauauau

SEQ ID NO: 118389 - RNA, 27 nt, Artificial Sequence
  Description of Artificial Sequence: Synthetic oligonucleotide
auauuuauuuuuauauauauauaauau

SEQ ID NO: 118390 - RNA, 27 nt, Artificial Sequence
  Description of Artificial Sequence: Synthetic oligonucleotide
cacagcagucaaauacauccagugaag

SEQ ID NO: 118391 - RNA, 27 nt, Artificial Sequence
  Description of Artificial Sequence: Synthetic oligonucleotide
gucucucaucuccuccucuucccuguc

SEQ ID NO: 118392 - RNA, 27 nt, Artificial Sequence
  Description of Artificial Sequence: Synthetic oligonucleotide
ccaagugggacaaaaaaaagaucaugc

SEQ ID NO: 118393 - RNA, 14 nt, Artificial Sequence
  Description of Artificial Sequence: Synthetic oligonucleotide
guauuuugaugagg

SEQ ID NO: 118394 - RNA, 12 nt, Artificial Sequence
  Description of Artificial Sequence: Synthetic oligonucleotide
ggcccagaugau

SEQ ID NO: 118395 - RNA, 14 nt, Artificial Sequence
  Description of Artificial Sequence: Synthetic oligonucleotide
gggaagaaaacuau

SEQ ID NO: 118396 - RNA, 15 nt, Artificial Sequence
  Description of Artificial Sequence: Synthetic oligonucleotide
guuuuaauuuauuuc

SEQ ID NO: 118397 - RNA, 12 nt, Artificial Sequence
  Description of Artificial Sequence: Synthetic oligonucleotide
acguagggaaau

SEQ ID NO: 118398 - RNA, 12 nt, Artificial Sequence
  Description of Artificial Sequence: Synthetic oligonucleotide
ccaggguuuacc

SEQ ID NO: 118399 - RNA, 11 nt, Artificial Sequence
  Description of Artificial Sequence: Synthetic oligonucleotide
agcaagguuua

SEQ ID NO: 118400 - RNA, 12 nt, Artificial Sequence
  Description of Artificial Sequence: Synthetic oligonucleotide
uguauuauguug

SEQ ID NO: 118401 - RNA, 15 nt, Artificial Sequence
  Description of Artificial Sequence: Synthetic oligonucleotide
uuuuaaucuuuguga

SEQ ID NO: 118402 - RNA, 14 nt, Artificial Sequence
  Description of Artificial Sequence: Synthetic oligonucleotide
uuaaucuuugugac

SEQ ID NO: 118403 - RNA, 13 nt, Artificial Sequence
  Description of Artificial Sequence: Synthetic oligonucleotide
gcugcuuaugucu

SEQ ID NO: 118404 - RNA, 14 nt, Artificial Sequence
  Description of Artificial Sequence: Synthetic oligonucleotide
aaguguuucagaag

SEQ ID NO: 118405 - RNA, 13 nt, Artificial Sequence
  Description of Artificial Sequence: Synthetic oligonucleotide
gaccaucaauaag

SEQ ID NO: 118406 - RNA, 13 nt, Artificial Sequence
  Description of Artificial Sequence: Synthetic oligonucleotide
ccaucaauaagga

SEQ ID NO: 118407 - RNA, 14 nt, Artificial Sequence
  Description of Artificial Sequence: Synthetic oligonucleotide
ucaauaaggaagaa

SEQ ID NO: 118408 - RNA, 14 nt, Artificial Sequence
  Description of Artificial Sequence: Synthetic oligonucleotide
aauaaggaagaagc

SEQ ID NO: 118409 - RNA, 13 nt, Artificial Sequence
  Description of Artificial Sequence: Synthetic oligonucleotide
aggaagaagcccu

SEQ ID NO: 118410 - RNA, 13 nt, Artificial Sequence
  Description of Artificial Sequence: Synthetic oligonucleotide
gcauaacuaaagg

SEQ ID NO: 118411 - RNA, 14 nt, Artificial Sequence
  Description of Artificial Sequence: Synthetic oligonucleotide
cauaacuaaaggug

SEQ ID NO: 118412 - RNA, 12 nt, Artificial Sequence
  Description of Artificial Sequence: Synthetic oligonucleotide
cuacaucacgcc

SEQ ID NO: 118413 - RNA, 12 nt, Artificial Sequence
  Description of Artificial Sequence: Synthetic oligonucleotide
acuggauuuaag

SEQ ID NO: 118414 - RNA, 12 nt, Artificial Sequence
  Description of Artificial Sequence: Synthetic oligonucleotide
cuggauuuaagc

SEQ ID NO: 118415 - RNA, 13 nt, Artificial Sequence
  Description of Artificial Sequence: Synthetic oligonucleotide
gauuuaagcagag

SEQ ID NO: 118416 - RNA, 13 nt, Artificial Sequence
  Description of Artificial Sequence: Synthetic oligonucleotide
auuuaagcagagu

SEQ ID NO: 118417 - RNA, 13 nt, Artificial Sequence
  Description of Artificial Sequence: Synthetic oligonucleotide
uuaagcagaguuc

SEQ ID NO: 118418 - RNA, 13 nt, Artificial Sequence
  Description of Artificial Sequence: Synthetic oligonucleotide
uaagcagaguuca

SEQ ID NO: 118419 - RNA, 14 nt, Artificial Sequence
  Description of Artificial Sequence: Synthetic oligonucleotide
agcagaguucaaaa

SEQ ID NO: 118420 - RNA, 12 nt, Artificial Sequence
  Description of Artificial Sequence: Synthetic oligonucleotide
cucagggucuga

SEQ ID NO: 118421 - RNA, 13 nt, Artificial Sequence
  Description of Artificial Sequence: Synthetic oligonucleotide
caagcaacuacau

SEQ ID NO: 118422 - RNA, 12 nt, Artificial Sequence
  Description of Artificial Sequence: Synthetic oligonucleotide
aucaauggcagc

SEQ ID NO: 118423 - RNA, 11 nt, Artificial Sequence
  Description of Artificial Sequence: Synthetic oligonucleotide
uuccagcccac

SEQ ID NO: 118424 - RNA, 12 nt, Artificial Sequence
  Description of Artificial Sequence: Synthetic oligonucleotide
cagcugagaaug

SEQ ID NO: 118425 - RNA, 13 nt, Artificial Sequence
  Description of Artificial Sequence: Synthetic oligonucleotide
aacguaucuccua

SEQ ID NO: 118426 - RNA, 14 nt, Artificial Sequence
  Description of Artificial Sequence: Synthetic oligonucleotide
ccuaaaauaauuuc

SEQ ID NO: 118427 - RNA, 13 nt, Artificial Sequence
  Description of Artificial Sequence: Synthetic oligonucleotide
uggaagauucagc

SEQ ID NO: 118428 - RNA, 12 nt, Artificial Sequence
  Description of Artificial Sequence: Synthetic oligonucleotide
uuaaacucuccu

SEQ ID NO: 118429 - RNA, 12 nt, Artificial Sequence
  Description of Artificial Sequence: Synthetic oligonucleotide
cagccuacaguu

SEQ ID NO: 118430 - RNA, 13 nt, Artificial Sequence
  Description of Artificial Sequence: Synthetic oligonucleotide
guuauguucaguc

SEQ ID NO: 118431 - RNA, 13 nt, Artificial Sequence
  Description of Artificial Sequence: Synthetic oligonucleotide
cacauacaaaaug

SEQ ID NO: 118432 - RNA, 9 nt, Artificial Sequence
  Description of Artificial Sequence: Synthetic oligonucleotide
uccuuuugc

SEQ ID NO: 118433 - RNA, 12 nt, Artificial Sequence
  Description of Artificial Sequence: Synthetic oligonucleotide
ugaccugugaag

SEQ ID NO: 118434 - RNA, 12 nt, Artificial Sequence
  Description of Artificial Sequence: Synthetic oligonucleotide
cuaucucacaca

SEQ ID NO: 118435 - RNA, 13 nt, Artificial Sequence
  Description of Artificial Sequence: Synthetic oligonucleotide
uguccucaauugu

SEQ ID NO: 118436 - RNA, 12 nt, Artificial Sequence
  Description of Artificial Sequence: Synthetic oligonucleotide
aaaccguagcug

SEQ ID NO: 118437 - RNA, 12 nt, Artificial Sequence
  Description of Artificial Sequence: Synthetic oligonucleotide
uagcuggcaagc

SEQ ID NO: 118438 - RNA, 14 nt, Artificial Sequence
  Description of Artificial Sequence: Synthetic oligonucleotide
uuguaugguuaaaa

SEQ ID NO: 118439 - RNA, 14 nt, Artificial Sequence
  Description of Artificial Sequence: Synthetic oligonucleotide
ugguuaaaagaugg

SEQ ID NO: 118440 - RNA, 13 nt, Artificial Sequence
  Description of Artificial Sequence: Synthetic oligonucleotide
cagggaauuauac

SEQ ID NO: 118441 - RNA, 12 nt, Artificial Sequence
  Description of Artificial Sequence: Synthetic oligonucleotide
acaaucuugcug

SEQ ID NO: 118442 - RNA, 13 nt, Artificial Sequence
  Description of Artificial Sequence: Synthetic oligonucleotide
ccaauaaugaaga

SEQ ID NO: 118443 - RNA, 13 nt, Artificial Sequence
  Description of Artificial Sequence: Synthetic oligonucleotide
acuuuggauguuc

SEQ ID NO: 118444 - RNA, 12 nt, Artificial Sequence
  Description of Artificial Sequence: Synthetic oligonucleotide
aaugcuuccacu

SEQ ID NO: 118445 - RNA, 11 nt, Artificial Sequence
  Description of Artificial Sequence: Synthetic oligonucleotide
gagaaaguuug

SEQ ID NO: 118446 - RNA, 11 nt, Artificial Sequence
  Description of Artificial Sequence: Synthetic oligonucleotide
aaagaacuacu

SEQ ID NO: 118447 - RNA, 12 nt, Artificial Sequence
  Description of Artificial Sequence: Synthetic oligonucleotide
uuagaaauacgg

SEQ ID NO: 118448 - RNA, 12 nt, Artificial Sequence
  Description of Artificial Sequence: Synthetic oligonucleotide
aacauggguaca

SEQ ID NO: 118449 - RNA, 14 nt, Artificial Sequence
  Description of Artificial Sequence: Synthetic oligonucleotide
aaagacacagaaga

SEQ ID NO: 118450 - RNA, 11 nt, Artificial Sequence
  Description of Artificial Sequence: Synthetic oligonucleotide
uaguagggagg

SEQ ID NO: 118451 - RNA, 12 nt, Artificial Sequence
  Description of Artificial Sequence: Synthetic oligonucleotide
gccuucugcagc

SEQ ID NO: 118452 - RNA, 10 nt, Artificial Sequence
  Description of Artificial Sequence: Synthetic oligonucleotide
ggucugguac

SEQ ID NO: 118453 - RNA, 12 nt, Artificial Sequence
  Description of Artificial Sequence: Synthetic oligonucleotide
cuaguccuuccg

SEQ ID NO: 118454 - RNA, 12 nt, Artificial Sequence
  Description of Artificial Sequence: Synthetic oligonucleotide
ccagugaauauu

SEQ ID NO: 118455 - RNA, 13 nt, Artificial Sequence
  Description of Artificial Sequence: Synthetic oligonucleotide
augaauucaaguu

SEQ ID NO: 118456 - RNA, 12 nt, Artificial Sequence
  Description of Artificial Sequence: Synthetic oligonucleotide
caggacacagau

SEQ ID NO: 118457 - RNA, 12 nt, Artificial Sequence
  Description of Artificial Sequence: Synthetic oligonucleotide
cucaaagcacag

SEQ ID NO: 118458 - RNA, 10 nt, Artificial Sequence
  Description of Artificial Sequence: Synthetic oligonucleotide
accacugcca

SEQ ID NO: 118459 - RNA, 13 nt, Artificial Sequence
  Description of Artificial Sequence: Synthetic oligonucleotide
gaaacuacuagug

SEQ ID NO: 118460 - RNA, 12 nt, Artificial Sequence
  Description of Artificial Sequence: Synthetic oligonucleotide
aagucggacagc

SEQ ID NO: 118461 - RNA, 13 nt, Artificial Sequence
  Description of Artificial Sequence: Synthetic oligonucleotide
gaaagcgaaaaau

SEQ ID NO: 118462 - RNA, 13 nt, Artificial Sequence
  Description of Artificial Sequence: Synthetic oligonucleotide
cccucugauuuag

SEQ ID NO: 118463 - RNA, 12 nt, Artificial Sequence
  Description of Artificial Sequence: Synthetic oligonucleotide
ugagcuauuuaa

SEQ ID NO: 118464 - RNA, 13 nt, Artificial Sequence
  Description of Artificial Sequence: Synthetic oligonucleotide
aaaaggugaaaaa

SEQ ID NO: 118465 - RNA, 14 nt, Artificial Sequence
  Description of Artificial Sequence: Synthetic oligonucleotide
gaaaaagcacuauu

SEQ ID NO: 118466 - RNA, 12 nt, Artificial Sequence
  Description of Artificial Sequence: Synthetic oligonucleotide
ggcugaaaagaa

SEQ ID NO: 118467 - RNA, 12 nt, Artificial Sequence
  Description of Artificial Sequence: Synthetic oligonucleotide
uaaacccuuaua

SEQ ID NO: 118468 - RNA, 13 nt, Artificial Sequence
  Description of Artificial Sequence: Synthetic oligonucleotide
cauacuauuagcc

SEQ ID NO: 118469 - RNA, 12 nt, Artificial Sequence
  Description of Artificial Sequence: Synthetic oligonucleotide
gacagaagcauu

SEQ ID NO: 118470 - RNA, 14 nt, Artificial Sequence
  Description of Artificial Sequence: Synthetic oligonucleotide
agagcaaauaagau

SEQ ID NO: 118471 - RNA, 14 nt, Artificial Sequence
  Description of Artificial Sequence: Synthetic oligonucleotide
ccaacauuuuucuc

SEQ ID NO: 118472 - RNA, 15 nt, Artificial Sequence
  Description of Artificial Sequence: Synthetic oligonucleotide
uuaaguaugagaaaa

SEQ ID NO: 118473 - RNA, 14 nt, Artificial Sequence
  Description of Artificial Sequence: Synthetic oligonucleotide
caggaauaaagaug

SEQ ID NO: 118474 - RNA, 13 nt, Artificial Sequence
  Description of Artificial Sequence: Synthetic oligonucleotide
aauuugaaugacc

SEQ ID NO: 118475 - RNA, 14 nt, Artificial Sequence
  Description of Artificial Sequence: Synthetic oligonucleotide
auguauaaagauag

SEQ ID NO: 118476 - RNA, 12 nt, Artificial Sequence
  Description of Artificial Sequence: Synthetic oligonucleotide
ggcuguaacuau

SEQ ID NO: 118477 - RNA, 11 nt, Artificial Sequence
  Description of Artificial Sequence: Synthetic oligonucleotide
ucugugaagug

SEQ ID NO: 118478 - RNA, 14 nt, Artificial Sequence
  Description of Artificial Sequence: Synthetic oligonucleotide
ccuuuaaggaaaug

SEQ ID NO: 118479 - RNA, 13 nt, Artificial Sequence
  Description of Artificial Sequence: Synthetic oligonucleotide
aaggauacaaaaa

SEQ ID NO: 118480 - RNA, 12 nt, Artificial Sequence
  Description of Artificial Sequence: Synthetic oligonucleotide
agaugcaauuug

SEQ ID NO: 118481 - RNA, 12 nt, Artificial Sequence
  Description of Artificial Sequence: Synthetic oligonucleotide
guucaaaacgaa

SEQ ID NO: 118482 - RNA, 11 nt, Artificial Sequence
  Description of Artificial Sequence: Synthetic oligonucleotide
gugaaaccuca

SEQ ID NO: 118483 - RNA, 13 nt, Artificial Sequence
  Description of Artificial Sequence: Synthetic oligonucleotide
acgaaagagaagc

SEQ ID NO: 118484 - RNA, 12 nt, Artificial Sequence
  Description of Artificial Sequence: Synthetic oligonucleotide
cuccacaagcgc

SEQ ID NO: 118485 - RNA, 14 nt, Artificial Sequence
  Description of Artificial Sequence: Synthetic oligonucleotide
gagaagauuccaaa

SEQ ID NO: 118486 - RNA, 13 nt, Artificial Sequence
  Description of Artificial Sequence: Synthetic oligonucleotide
aaucuggauucaa

SEQ ID NO: 118487 - RNA, 13 nt, Artificial Sequence
  Description of Artificial Sequence: Synthetic oligonucleotide
agaacagauuuga

SEQ ID NO: 118488 - RNA, 11 nt, Artificial Sequence
  Description of Artificial Sequence: Synthetic oligonucleotide
ccagagcugug

SEQ ID NO: 118489 - RNA, 12 nt, Artificial Sequence
  Description of Artificial Sequence: Synthetic oligonucleotide
ccucagauuguu

SEQ ID NO: 118490 - RNA, 12 nt, Artificial Sequence
  Description of Artificial Sequence: Synthetic oligonucleotide
cuauuuuaauua

SEQ ID NO: 118491 - RNA, 13 nt, Artificial Sequence
  Description of Artificial Sequence: Synthetic oligonucleotide
uuuaauuuauuaa

SEQ ID NO: 118492 - RNA, 12 nt, Artificial Sequence
  Description of Artificial Sequence: Synthetic oligonucleotide
augcaguuugaa

SEQ ID NO: 118493 - RNA, 11 nt, Artificial Sequence
  Description of Artificial Sequence: Synthetic oligonucleotide
caugcugcugg

SEQ ID NO: 118494 - RNA, 13 nt, Artificial Sequence
  Description of Artificial Sequence: Synthetic oligonucleotide
agaugugcauuuc

SEQ ID NO: 118495 - RNA, 12 nt, Artificial Sequence
  Description of Artificial Sequence: Synthetic oligonucleotide
ucaaaaccugug

SEQ ID NO: 118496 - RNA, 11 nt, Artificial Sequence
  Description of Artificial Sequence: Synthetic oligonucleotide
gaaugugggua

SEQ ID NO: 118497 - RNA, 10 nt, Artificial Sequence
  Description of Artificial Sequence: Synthetic oligonucleotide
auguggguag

SEQ ID NO: 118498 - RNA, 13 nt, Artificial Sequence
  Description of Artificial Sequence: Synthetic oligonucleotide
ugaaaaugagcau

SEQ ID NO: 118499 - RNA, 13 nt, Artificial Sequence
  Description of Artificial Sequence: Synthetic oligonucleotide
uugcuuuucaugu

SEQ ID NO: 118500 - RNA, 12 nt, Artificial Sequence
  Description of Artificial Sequence: Synthetic oligonucleotide
uguauuucuaua

SEQ ID NO: 118501 - RNA, 13 nt, Artificial Sequence
  Description of Artificial Sequence: Synthetic oligonucleotide
uuugauuaauguu

SEQ ID NO: 118502 - RNA, 12 nt, Artificial Sequence
  Description of Artificial Sequence: Synthetic oligonucleotide
caacguguauag

SEQ ID NO: 118503 - RNA, 12 nt, Artificial Sequence
  Description of Artificial Sequence: Synthetic oligonucleotide
cauauccuuggc

SEQ ID NO: 118504 - RNA, 13 nt, Artificial Sequence
  Description of Artificial Sequence: Synthetic oligonucleotide
uacuaacaucugg

SEQ ID NO: 118505 - RNA, 11 nt, Artificial Sequence
  Description of Artificial Sequence: Synthetic oligonucleotide
cauaaguugug

SEQ ID NO: 118506 - RNA, 12 nt, Artificial Sequence
  Description of Artificial Sequence: Synthetic oligonucleotide
gcaucauuuugg

SEQ ID NO: 118507 - RNA, 10 nt, Artificial Sequence
  Description of Artificial Sequence: Synthetic oligonucleotide
gcucuucuua

SEQ ID NO: 118508 - RNA, 10 nt, Artificial Sequence
  Description of Artificial Sequence: Synthetic oligonucleotide
agauuagguc

SEQ ID NO: 118509 - RNA, 12 nt, Artificial Sequence
  Description of Artificial Sequence: Synthetic oligonucleotide
auggaauugaaa

SEQ ID NO: 118510 - RNA, 13 nt, Artificial Sequence
  Description of Artificial Sequence: Synthetic oligonucleotide
cacacucauuccu

SEQ ID NO: 118511 - RNA, 12 nt, Artificial Sequence
  Description of Artificial Sequence: Synthetic oligonucleotide
uguagagguaac

SEQ ID NO: 118512 - RNA, 11 nt, Artificial Sequence
  Description of Artificial Sequence: Synthetic oligonucleotide
caaccacaugc

SEQ ID NO: 118513 - RNA, 12 nt, Artificial Sequence
  Description of Artificial Sequence: Synthetic oligonucleotide
ucggaaacaagu

SEQ ID NO: 118514 - RNA, 11 nt, Artificial Sequence
  Description of Artificial Sequence: Synthetic oligonucleotide
acucccaauaa

SEQ ID NO: 118515 - RNA, 13 nt, Artificial Sequence
  Description of Artificial Sequence: Synthetic oligonucleotide
aaugcuaagaaau

SEQ ID NO: 118516 - RNA, 11 nt, Artificial Sequence
  Description of Artificial Sequence: Synthetic oligonucleotide
gucuuucucua

SEQ ID NO: 118517 - RNA, 11 nt, Artificial Sequence
  Description of Artificial Sequence: Synthetic oligonucleotide
ugaauuucagg

SEQ ID NO: 118518 - RNA, 13 nt, Artificial Sequence
  Description of Artificial Sequence: Synthetic oligonucleotide
cgauucccucuca

SEQ ID NO: 118519 - RNA, 11 nt, Artificial Sequence
  Description of Artificial Sequence: Synthetic oligonucleotide
aggaaagugaa

SEQ ID NO: 118520 - RNA, 12 nt, Artificial Sequence
  Description of Artificial Sequence: Synthetic oligonucleotide
gaggcugcaugc

SEQ ID NO: 118521 - RNA, 11 nt, Artificial Sequence
  Description of Artificial Sequence: Synthetic oligonucleotide
ucucugaacag

SEQ ID NO: 118522 - RNA, 12 nt, Artificial Sequence
  Description of Artificial Sequence: Synthetic oligonucleotide
aacuuggcugua

SEQ ID NO: 118523 - RNA, 12 nt, Artificial Sequence
  Description of Artificial Sequence: Synthetic oligonucleotide
agaagccaaaau

SEQ ID NO: 118524 - RNA, 14 nt, Artificial Sequence
  Description of Artificial Sequence: Synthetic oligonucleotide
auuaaaagaagucc

SEQ ID NO: 118525 - RNA, 14 nt, Artificial Sequence
  Description of Artificial Sequence: Synthetic oligonucleotide
gaauccggauuauc

SEQ ID NO: 118526 - RNA, 12 nt, Artificial Sequence
  Description of Artificial Sequence: Synthetic oligonucleotide
aaugugacauca

SEQ ID NO: 118527 - RNA, 13 nt, Artificial Sequence
  Description of Artificial Sequence: Synthetic oligonucleotide
caucaaagcaagu

SEQ ID NO: 118528 - RNA, 11 nt, Artificial Sequence
  Description of Artificial Sequence: Synthetic oligonucleotide
agagagagaaa

SEQ ID NO: 118529 - RNA, 13 nt, Artificial Sequence
  Description of Artificial Sequence: Synthetic oligonucleotide
ucgcuguaguauu

SEQ ID NO: 118530 - RNA, 14 nt, Artificial Sequence
  Description of Artificial Sequence: Synthetic oligonucleotide
cgcuguaguauuua

SEQ ID NO: 118531 - RNA, 13 nt, Artificial Sequence
  Description of Artificial Sequence: Synthetic oligonucleotide
auuuaagcccaua

SEQ ID NO: 118532 - RNA, 15 nt, Artificial Sequence
  Description of Artificial Sequence: Synthetic oligonucleotide
auuaaaauaaacaug

SEQ ID NO: 118533 - RNA, 12 nt, Artificial Sequence
  Description of Artificial Sequence: Synthetic oligonucleotide
cuguucugaucg

SEQ ID NO: 118534 - RNA, 16 nt, Artificial Sequence
  Description of Artificial Sequence: Synthetic oligonucleotide
aaauaauuugaacuuu

SEQ ID NO: 118535 - RNA, 12 nt, Artificial Sequence
  Description of Artificial Sequence: Synthetic oligonucleotide
ugcgaccuuaau

SEQ ID NO: 118536 - RNA, 11 nt, Artificial Sequence
  Description of Artificial Sequence: Synthetic oligonucleotide
cugagaaagcu

SEQ ID NO: 118537 - RNA, 13 nt, Artificial Sequence
  Description of Artificial Sequence: Synthetic oligonucleotide
aguaaagaugcua

SEQ ID NO: 118538 - RNA, 12 nt, Artificial Sequence
  Description of Artificial Sequence: Synthetic oligonucleotide
cugcuuaauugc

SEQ ID NO: 118539 - RNA, 14 nt, Artificial Sequence
  Description of Artificial Sequence: Synthetic oligonucleotide
uaccauaugaauga

SEQ ID NO: 118540 - RNA, 12 nt, Artificial Sequence
  Description of Artificial Sequence: Synthetic oligonucleotide
aacuuucuuauc

SEQ ID NO: 118541 - RNA, 13 nt, Artificial Sequence
  Description of Artificial Sequence: Synthetic oligonucleotide
ccuugcaugacau

SEQ ID NO: 118542 - RNA, 14 nt, Artificial Sequence
  Description of Artificial Sequence: Synthetic oligonucleotide
ugaauuuguauaug

SEQ ID NO: 118543 - RNA, 12 nt, Artificial Sequence
  Description of Artificial Sequence: Synthetic oligonucleotide
gaauccuaguag

SEQ ID NO: 118544 - RNA, 10 nt, Artificial Sequence
  Description of Artificial Sequence: Synthetic oligonucleotide
gaaagggaag

SEQ ID NO: 118545 - RNA, 11 nt, Artificial Sequence
  Description of Artificial Sequence: Synthetic oligonucleotide
uaucggcaugc

SEQ ID NO: 118546 - RNA, 12 nt, Artificial Sequence
  Description of Artificial Sequence: Synthetic oligonucleotide
caccucauagua

SEQ ID NO: 118547 - RNA, 11 nt, Artificial Sequence
  Description of Artificial Sequence: Synthetic oligonucleotide
ccagaauugcc

SEQ ID NO: 118548 - RNA, 11 nt, Artificial Sequence
  Description of Artificial Sequence: Synthetic oligonucleotide
uggugaucugg

SEQ ID NO: 118549 - RNA, 12 nt, Artificial Sequence
  Description of Artificial Sequence: Synthetic oligonucleotide
gaucuggguaau

SEQ ID NO: 118550 - RNA, 12 nt, Artificial Sequence
  Description of Artificial Sequence: Synthetic oligonucleotide
ggaugugaugaa

SEQ ID NO: 118551 - RNA, 12 nt, Artificial Sequence
  Description of Artificial Sequence: Synthetic oligonucleotide
cauuuccacagc

SEQ ID NO: 118552 - RNA, 11 nt, Artificial Sequence
  Description of Artificial Sequence: Synthetic oligonucleotide
acagcuacacc

SEQ ID NO: 118553 - RNA, 12 nt, Artificial Sequence
  Description of Artificial Sequence: Synthetic oligonucleotide
ugcaguucuuac

SEQ ID NO: 118554 - RNA, 12 nt, Artificial Sequence
  Description of Artificial Sequence: Synthetic oligonucleotide
acgagaagaaga

SEQ ID NO: 118555 - RNA, 12 nt, Artificial Sequence
  Description of Artificial Sequence: Synthetic oligonucleotide
cgagaagaagau

SEQ ID NO: 118556 - RNA, 15 nt, Artificial Sequence
  Description of Artificial Sequence: Synthetic oligonucleotide
aagaagaucauuuac

SEQ ID NO: 118557 - RNA, 11 nt, Artificial Sequence
  Description of Artificial Sequence: Synthetic oligonucleotide
agaggaagagg

SEQ ID NO: 118558 - RNA, 12 nt, Artificial Sequence
  Description of Artificial Sequence: Synthetic oligonucleotide
gaggaagaggug

SEQ ID NO: 118559 - RNA, 13 nt, Artificial Sequence
  Description of Artificial Sequence: Synthetic oligonucleotide
cuacuuugagggc

SEQ ID NO: 118560 - RNA, 12 nt, Artificial Sequence
  Description of Artificial Sequence: Synthetic oligonucleotide
agggcaucuccu

SEQ ID NO: 118561 - RNA, 10 nt, Artificial Sequence
  Description of Artificial Sequence: Synthetic oligonucleotide
ggagugauau

SEQ ID NO: 118562 - RNA, 11 nt, Artificial Sequence
  Description of Artificial Sequence: Synthetic oligonucleotide
gagugauaugg

SEQ ID NO: 118563 - RNA, 12 nt, Artificial Sequence
  Description of Artificial Sequence: Synthetic oligonucleotide
ugcaguaaagau

SEQ ID NO: 118564 - RNA, 13 nt, Artificial Sequence
  Description of Artificial Sequence: Synthetic oligonucleotide
aguaaagauccua

SEQ ID NO: 118565 - RNA, 12 nt, Artificial Sequence
  Description of Artificial Sequence: Synthetic oligonucleotide
ugacaaaggaca

SEQ ID NO: 118566 - RNA, 13 nt, Artificial Sequence
  Description of Artificial Sequence: Synthetic oligonucleotide
gcaauugugaccc

SEQ ID NO: 118567 - RNA, 12 nt, Artificial Sequence
  Description of Artificial Sequence: Synthetic oligonucleotide
aacaucauccau

SEQ ID NO: 118568 - RNA, 12 nt, Artificial Sequence
  Description of Artificial Sequence: Synthetic oligonucleotide
ugaaauccaaca

SEQ ID NO: 118569 - RNA, 15 nt, Artificial Sequence
  Description of Artificial Sequence: Synthetic oligonucleotide
aacaauauauuucuc

SEQ ID NO: 118570 - RNA, 14 nt, Artificial Sequence
  Description of Artificial Sequence: Synthetic oligonucleotide
aacaguaaagucac

SEQ ID NO: 118571 - RNA, 14 nt, Artificial Sequence
  Description of Artificial Sequence: Synthetic oligonucleotide
ugugaagaaaguaa

SEQ ID NO: 118572 - RNA, 13 nt, Artificial Sequence
  Description of Artificial Sequence: Synthetic oligonucleotide
cuuccgagccauc

SEQ ID NO: 118573 - RNA, 12 nt, Artificial Sequence
  Description of Artificial Sequence: Synthetic oligonucleotide
aauggagguuga

SEQ ID NO: 118574 - RNA, 12 nt, Artificial Sequence
  Description of Artificial Sequence: Synthetic oligonucleotide
ggagguugaaua

SEQ ID NO: 118575 - RNA, 13 nt, Artificial Sequence
  Description of Artificial Sequence: Synthetic oligonucleotide
auuuugaguuuuc

SEQ ID NO: 118576 - RNA, 12 nt, Artificial Sequence
  Description of Artificial Sequence: Synthetic oligonucleotide
uauccuguuugu

SEQ ID NO: 118577 - RNA, 11 nt, Artificial Sequence
  Description of Artificial Sequence: Synthetic oligonucleotide
ccuguuuguuc

SEQ ID NO: 118578 - RNA, 10 nt, Artificial Sequence
  Description of Artificial Sequence: Synthetic oligonucleotide
cucuacagcc

SEQ ID NO: 118579 - RNA, 12 nt, Artificial Sequence
  Description of Artificial Sequence: Synthetic oligonucleotide
ucuuccauagcu

SEQ ID NO: 118580 - RNA, 12 nt, Artificial Sequence
  Description of Artificial Sequence: Synthetic oligonucleotide
auaaucuuccug

SEQ ID NO: 118581 - RNA, 12 nt, Artificial Sequence
  Description of Artificial Sequence: Synthetic oligonucleotide
uaaucuuccugu

SEQ ID NO: 118582 - RNA, 12 nt, Artificial Sequence
  Description of Artificial Sequence: Synthetic oligonucleotide
cuucaugacuug

SEQ ID NO: 118583 - RNA, 12 nt, Artificial Sequence
  Description of Artificial Sequence: Synthetic oligonucleotide
aagagggagaga

SEQ ID NO: 118584 - RNA, 12 nt, Artificial Sequence
  Description of Artificial Sequence: Synthetic oligonucleotide
cgucuccuacca

SEQ ID NO: 118585 - RNA, 12 nt, Artificial Sequence
  Description of Artificial Sequence: Synthetic oligonucleotide
gaucaaucggcc

SEQ ID NO: 118586 - RNA, 12 nt, Artificial Sequence
  Description of Artificial Sequence: Synthetic oligonucleotide
ggacgaacaucc

SEQ ID NO: 118587 - RNA, 11 nt, Artificial Sequence
  Description of Artificial Sequence: Synthetic oligonucleotide
agggucggaac

SEQ ID NO: 118588 - RNA, 10 nt, Artificial Sequence
  Description of Artificial Sequence: Synthetic oligonucleotide
ucggaaccca

SEQ ID NO: 118589 - RNA, 11 nt, Artificial Sequence
  Description of Artificial Sequence: Synthetic oligonucleotide
acccaagcuua

SEQ ID NO: 118590 - RNA, 14 nt, Artificial Sequence
  Description of Artificial Sequence: Synthetic oligonucleotide
gaacuuuaagcaac

SEQ ID NO: 118591 - RNA, 11 nt, Artificial Sequence
  Description of Artificial Sequence: Synthetic oligonucleotide
acuauucagug

SEQ ID NO: 118592 - RNA, 11 nt, Artificial Sequence
  Description of Artificial Sequence: Synthetic oligonucleotide
cuauucagugg

SEQ ID NO: 118593 - RNA, 13 nt, Artificial Sequence
  Description of Artificial Sequence: Synthetic oligonucleotide
aaacacagauaac

SEQ ID NO: 118594 - RNA, 12 nt, Artificial Sequence
  Description of Artificial Sequence: Synthetic oligonucleotide
cuuaagaaaaga

SEQ ID NO: 118595 - RNA, 12 nt, Artificial Sequence
  Description of Artificial Sequence: Synthetic oligonucleotide
cugaaggagugu

SEQ ID NO: 118596 - RNA, 10 nt, Artificial Sequence
  Description of Artificial Sequence: Synthetic oligonucleotide
ucaccgcggg

SEQ ID NO: 118597 - RNA, 14 nt, Artificial Sequence
  Description of Artificial Sequence: Synthetic oligonucleotide
agcagaaauaagcg

SEQ ID NO: 118598 - RNA, 12 nt, Artificial Sequence
  Description of Artificial Sequence: Synthetic oligonucleotide
aagcgugccguu

SEQ ID NO: 118599 - RNA, 12 nt, Artificial Sequence
  Description of Artificial Sequence: Synthetic oligonucleotide
agaaacagucac

SEQ ID NO: 118600 - RNA, 12 nt, Artificial Sequence
  Description of Artificial Sequence: Synthetic oligonucleotide
agaggaagaagg

SEQ ID NO: 118601 - RNA, 14 nt, Artificial Sequence
  Description of Artificial Sequence: Synthetic oligonucleotide
uguauucaaaauau

SEQ ID NO: 118602 - RNA, 13 nt, Artificial Sequence
  Description of Artificial Sequence: Synthetic oligonucleotide
auuuuccucccuu

SEQ ID NO: 118603 - RNA, 13 nt, Artificial Sequence
  Description of Artificial Sequence: Synthetic oligonucleotide
caaagaaagauag

SEQ ID NO: 118604 - RNA, 12 nt, Artificial Sequence
  Description of Artificial Sequence: Synthetic oligonucleotide
aagaaagauaga

SEQ ID NO: 118605 - RNA, 13 nt, Artificial Sequence
  Description of Artificial Sequence: Synthetic oligonucleotide
gaaagcauuuguu

SEQ ID NO: 118606 - RNA, 13 nt, Artificial Sequence
  Description of Artificial Sequence: Synthetic oligonucleotide
ugaguuaaacgaa

SEQ ID NO: 118607 - RNA, 12 nt, Artificial Sequence
  Description of Artificial Sequence: Synthetic oligonucleotide
acugauacagaa

SEQ ID NO: 118608 - RNA, 12 nt, Artificial Sequence
  Description of Artificial Sequence: Synthetic oligonucleotide
auauuauauaua

SEQ ID NO: 118609 - RNA, 12 nt, Artificial Sequence
  Description of Artificial Sequence: Synthetic oligonucleotide
auuauauauaua

SEQ ID NO: 118610 - RNA, 12 nt, Artificial Sequence
  Description of Artificial Sequence: Synthetic oligonucleotide
ucacuggaugua

SEQ ID NO: 118611 - RNA, 12 nt, Artificial Sequence
  Description of Artificial Sequence: Synthetic oligonucleotide
cagggaagagga

SEQ ID NO: 118612 - RNA, 15 nt, Artificial Sequence
  Description of Artificial Sequence: Synthetic oligonucleotide
augaucuuuuuuuug

SEQ ID NO: 118613 - RNA, 11 nt, Artificial Sequence
  Description of Artificial Sequence: Synthetic oligonucleotide
aguucacggcc

SEQ ID NO: 118614 - RNA, 13 nt, Artificial Sequence
  Description of Artificial Sequence: Synthetic oligonucleotide
caccaucacacca

SEQ ID NO: 118615 - RNA, 11 nt, Artificial Sequence
  Description of Artificial Sequence: Synthetic oligonucleotide
ccugcggguuu

SEQ ID NO: 118616 - RNA, 10 nt, Artificial Sequence
  Description of Artificial Sequence: Synthetic oligonucleotide
auccaguuug

SEQ ID NO: 118617 - RNA, 13 nt, Artificial Sequence
  Description of Artificial Sequence: Synthetic oligonucleotide
guuaaggacuucu

SEQ ID NO: 118618 - RNA, 13 nt, Artificial Sequence
  Description of Artificial Sequence: Synthetic oligonucleotide
cagugggacagag

SEQ ID NO: 118619 - RNA, 14 nt, Artificial Sequence
  Description of Artificial Sequence: Synthetic oligonucleotide
aauuuguuauugug

SEQ ID NO: 118620 - RNA, 13 nt, Artificial Sequence
  Description of Artificial Sequence: Synthetic oligonucleotide
uucaaaugcauuu

SEQ ID NO: 118621 - RNA, 10 nt, Artificial Sequence
  Description of Artificial Sequence: Synthetic oligonucleotide
caggaaagcc

SEQ ID NO: 118622 - RNA, 11 nt, Artificial Sequence
  Description of Artificial Sequence: Synthetic oligonucleotide
aggaaagcccu

SEQ ID NO: 118623 - RNA, 12 nt, Artificial Sequence
  Description of Artificial Sequence: Synthetic oligonucleotide
cccagcauggcc

SEQ ID NO: 118624 - RNA, 11 nt, Artificial Sequence
  Description of Artificial Sequence: Synthetic oligonucleotide
cuucucccuga

SEQ ID NO: 118625 - RNA, 12 nt, Artificial Sequence
  Description of Artificial Sequence: Synthetic oligonucleotide
gaagaagcccuu

SEQ ID NO: 118626 - RNA, 12 nt, Artificial Sequence
  Description of Artificial Sequence: Synthetic oligonucleotide
agaagcccuuca

SEQ ID NO: 118627 - RNA, 11 nt, Artificial Sequence
  Description of Artificial Sequence: Synthetic oligonucleotide
gcccuucagcg

SEQ ID NO: 118628 - RNA, 11 nt, Artificial Sequence
  Description of Artificial Sequence: Synthetic oligonucleotide
ccuucagcggc

SEQ ID NO: 118629 - RNA, 12 nt, Artificial Sequence
  Description of Artificial Sequence: Synthetic oligonucleotide
ucagcggccagu

SEQ ID NO: 118630 - RNA, 12 nt, Artificial Sequence
  Description of Artificial Sequence: Synthetic oligonucleotide
ugaaaagcuccg

SEQ ID NO: 118631 - RNA, 11 nt, Artificial Sequence
  Description of Artificial Sequence: Synthetic oligonucleotide
aaaagcuccgg

SEQ ID NO: 118632 - RNA, 13 nt, Artificial Sequence
  Description of Artificial Sequence: Synthetic oligonucleotide
agucaacagucug

SEQ ID NO: 118633 - RNA, 13 nt, Artificial Sequence
  Description of Artificial Sequence: Synthetic oligonucleotide
cagaguucaaaag

SEQ ID NO: 118634 - RNA, 13 nt, Artificial Sequence
  Description of Artificial Sequence: Synthetic oligonucleotide
agaguucaaaagc

SEQ ID NO: 118635 - RNA, 12 nt, Artificial Sequence
  Description of Artificial Sequence: Synthetic oligonucleotide
uucaaaagcccu

SEQ ID NO: 118636 - RNA, 12 nt, Artificial Sequence
  Description of Artificial Sequence: Synthetic oligonucleotide
ucaaaagcccuu

SEQ ID NO: 118637 - RNA, 12 nt, Artificial Sequence
  Description of Artificial Sequence: Synthetic oligonucleotide
aaaagcccuuca

SEQ ID NO: 118638 - RNA, 12 nt, Artificial Sequence
  Description of Artificial Sequence: Synthetic oligonucleotide
aaagcccuucag

SEQ ID NO: 118639 - RNA, 13 nt, Artificial Sequence
  Description of Artificial Sequence: Synthetic oligonucleotide
gugaagccgcucg

SEQ ID NO: 118640 - RNA, 12 nt, Artificial Sequence
  Description of Artificial Sequence: Synthetic oligonucleotide
cacgccagucaa

SEQ ID NO: 118641 - RNA, 13 nt, Artificial Sequence
  Description of Artificial Sequence: Synthetic oligonucleotide
uucuuggugcgug

SEQ ID NO: 118642 - RNA, 14 nt, Artificial Sequence
  Description of Artificial Sequence: Synthetic oligonucleotide
auuggauucaucag

SEQ ID NO: 118643 - RNA, 13 nt, Artificial Sequence
  Description of Artificial Sequence: Synthetic oligonucleotide
uggaauaccuaag

SEQ ID NO: 118644 - RNA, 12 nt, Artificial Sequence
  Description of Artificial Sequence: Synthetic oligonucleotide
auuugaggcuca

SEQ ID NO: 118645 - RNA, 11 nt, Artificial Sequence
  Description of Artificial Sequence: Synthetic oligonucleotide
ucuacaauugg

SEQ ID NO: 118646 - RNA, 12 nt, Artificial Sequence
  Description of Artificial Sequence: Synthetic oligonucleotide
uaguuaggagcc

SEQ ID NO: 118647 - RNA, 13 nt, Artificial Sequence
  Description of Artificial Sequence: Synthetic oligonucleotide
agucaauauccac

SEQ ID NO: 118648 - RNA, 13 nt, Artificial Sequence
  Description of Artificial Sequence: Synthetic oligonucleotide
auguucagucaca

SEQ ID NO: 118649 - RNA, 12 nt, Artificial Sequence
  Description of Artificial Sequence: Synthetic oligonucleotide
acacacacauac

SEQ ID NO: 118650 - RNA, 12 nt, Artificial Sequence
  Description of Artificial Sequence: Synthetic oligonucleotide
uuccuuuugcuu

SEQ ID NO: 118651 - RNA, 16 nt, Artificial Sequence
  Description of Artificial Sequence: Synthetic oligonucleotide
uuuuaaaguaauuuuu

SEQ ID NO: 118652 - RNA, 13 nt, Artificial Sequence
  Description of Artificial Sequence: Synthetic oligonucleotide
caacagucaaugg

SEQ ID NO: 118653 - RNA, 13 nt, Artificial Sequence
  Description of Artificial Sequence: Synthetic oligonucleotide
ucgacaaaccaau

SEQ ID NO: 118654 - RNA, 12 nt, Artificial Sequence
  Description of Artificial Sequence: Synthetic oligonucleotide
acugcuaccacu

SEQ ID NO: 118655 - RNA, 13 nt, Artificial Sequence
  Description of Artificial Sequence: Synthetic oligonucleotide
gcaagcggucuua

SEQ ID NO: 118656 - RNA, 13 nt, Artificial Sequence
  Description of Artificial Sequence: Synthetic oligonucleotide
ggucuuaccggcu

SEQ ID NO: 118657 - RNA, 11 nt, Artificial Sequence
  Description of Artificial Sequence: Synthetic oligonucleotide
gauggguuacc

SEQ ID NO: 118658 - RNA, 11 nt, Artificial Sequence
  Description of Artificial Sequence: Synthetic oligonucleotide
guuaccugcga

SEQ ID NO: 118659 - RNA, 12 nt, Artificial Sequence
  Description of Artificial Sequence: Synthetic oligonucleotide
aaucuugcugag

SEQ ID NO: 118660 - RNA, 13 nt, Artificial Sequence
  Description of Artificial Sequence: Synthetic oligonucleotide
agcauaaaacagu

SEQ ID NO: 118661 - RNA, 12 nt, Artificial Sequence
  Description of Artificial Sequence: Synthetic oligonucleotide
guccuuuauccu

SEQ ID NO: 118662 - RNA, 12 nt, Artificial Sequence
  Description of Artificial Sequence: Synthetic oligonucleotide
caacgcaaguug

SEQ ID NO: 118663 - RNA, 13 nt, Artificial Sequence
  Description of Artificial Sequence: Synthetic oligonucleotide
aaacugaaaccau

SEQ ID NO: 118664 - RNA, 14 nt, Artificial Sequence
  Description of Artificial Sequence: Synthetic oligonucleotide
acuuuguuaaauau

SEQ ID NO: 118665 - RNA, 14 nt, Artificial Sequence
  Description of Artificial Sequence: Synthetic oligonucleotide
guauauuaaaaguu

SEQ ID NO: 118666 - RNA, 13 nt, Artificial Sequence
  Description of Artificial Sequence: Synthetic oligonucleotide
guuuugacuuaac

SEQ ID NO: 118667 - RNA, 13 nt, Artificial Sequence
  Description of Artificial Sequence: Synthetic oligonucleotide
gcaaacucagcac

SEQ ID NO: 118668 - RNA, 11 nt, Artificial Sequence
  Description of Artificial Sequence: Synthetic oligonucleotide
ugcugaccuca

SEQ ID NO: 118669 - RNA, 14 nt, Artificial Sequence
  Description of Artificial Sequence: Synthetic oligonucleotide
uuuauucagaucgc

SEQ ID NO: 118670 - RNA, 13 nt, Artificial Sequence
  Description of Artificial Sequence: Synthetic oligonucleotide
aggguucugggau

SEQ ID NO: 118671 - RNA, 15 nt, Artificial Sequence
  Description of Artificial Sequence: Synthetic oligonucleotide
auauuggaaauuaug

SEQ ID NO: 118672 - RNA, 13 nt, Artificial Sequence
  Description of Artificial Sequence: Synthetic oligonucleotide
auggaagcacuag

SEQ ID NO: 118673 - RNA, 13 nt, Artificial Sequence
  Description of Artificial Sequence: Synthetic oligonucleotide
guuuuuaugugga

SEQ ID NO: 118674 - RNA, 12 nt, Artificial Sequence
  Description of Artificial Sequence: Synthetic oligonucleotide
ggaauugguaga

SEQ ID NO: 118675 - RNA, 13 nt, Artificial Sequence
  Description of Artificial Sequence: Synthetic oligonucleotide
uuagacuuggaga

SEQ ID NO: 118676 - RNA, 13 nt, Artificial Sequence
  Description of Artificial Sequence: Synthetic oligonucleotide
uuacaguauucca

SEQ ID NO: 118677 - RNA, 15 nt, Artificial Sequence
  Description of Artificial Sequence: Synthetic oligonucleotide
ccacugaugaauuaa

SEQ ID NO: 118678 - RNA, 12 nt, Artificial Sequence
  Description of Artificial Sequence: Synthetic oligonucleotide
ccacaucaucac

SEQ ID NO: 118679 - RNA, 13 nt, Artificial Sequence
  Description of Artificial Sequence: Synthetic oligonucleotide
cucaccaaacaga

SEQ ID NO: 118680 - RNA, 12 nt, Artificial Sequence
  Description of Artificial Sequence: Synthetic oligonucleotide
ggaacaugaugg

SEQ ID NO: 118681 - RNA, 12 nt, Artificial Sequence
  Description of Artificial Sequence: Synthetic oligonucleotide
cauguagacugc

SEQ ID NO: 118682 - RNA, 13 nt, Artificial Sequence
  Description of Artificial Sequence: Synthetic oligonucleotide
ggaucuauuuaug

SEQ ID NO: 118683 - RNA, 12 nt, Artificial Sequence
  Description of Artificial Sequence: Synthetic oligonucleotide
gcacuauuauca

SEQ ID NO: 118684 - RNA, 11 nt, Artificial Sequence
  Description of Artificial Sequence: Synthetic oligonucleotide
aucaguucugc

SEQ ID NO: 118685 - RNA, 13 nt, Artificial Sequence
  Description of Artificial Sequence: Synthetic oligonucleotide
agauuaaaccuac

SEQ ID NO: 118686 - RNA, 13 nt, Artificial Sequence
  Description of Artificial Sequence: Synthetic oligonucleotide
auaaaauccuucu

SEQ ID NO: 118687 - RNA, 12 nt, Artificial Sequence
  Description of Artificial Sequence: Synthetic oligonucleotide
aaugcuguagac

SEQ ID NO: 118688 - RNA, 13 nt, Artificial Sequence
  Description of Artificial Sequence: Synthetic oligonucleotide
uugauaggaauag

SEQ ID NO: 118689 - RNA, 11 nt, Artificial Sequence
  Description of Artificial Sequence: Synthetic oligonucleotide
aauggcccuga

SEQ ID NO: 118690 - RNA, 11 nt, Artificial Sequence
  Description of Artificial Sequence: Synthetic oligonucleotide
uuccucaagca

SEQ ID NO: 118691 - RNA, 10 nt, Artificial Sequence
  Description of Artificial Sequence: Synthetic oligonucleotide
guucagccca

SEQ ID NO: 118692 - RNA, 11 nt, Artificial Sequence
  Description of Artificial Sequence: Synthetic oligonucleotide
gcugcugaacc

SEQ ID NO: 118693 - RNA, 12 nt, Artificial Sequence
  Description of Artificial Sequence: Synthetic oligonucleotide
aaguucucuuca

SEQ ID NO: 118694 - RNA, 11 nt, Artificial Sequence
  Description of Artificial Sequence: Synthetic oligonucleotide
ccagccuagag

SEQ ID NO: 118695 - RNA, 13 nt, Artificial Sequence
  Description of Artificial Sequence: Synthetic oligonucleotide
cucugugaagugu

SEQ ID NO: 118696 - RNA, 14 nt, Artificial Sequence
  Description of Artificial Sequence: Synthetic oligonucleotide
ugagaaaauuucaa

SEQ ID NO: 118697 - RNA, 11 nt, Artificial Sequence
  Description of Artificial Sequence: Synthetic oligonucleotide
aauccuccuga

SEQ ID NO: 118698 - RNA, 12 nt, Artificial Sequence
  Description of Artificial Sequence: Synthetic oligonucleotide
gugacaucauau

SEQ ID NO: 118699 - RNA, 13 nt, Artificial Sequence
  Description of Artificial Sequence: Synthetic oligonucleotide
aaucuucaucaua

SEQ ID NO: 118700 - RNA, 13 nt, Artificial Sequence
  Description of Artificial Sequence: Synthetic oligonucleotide
gacuagcuauuaa

SEQ ID NO: 118701 - RNA, 14 nt, Artificial Sequence
  Description of Artificial Sequence: Synthetic oligonucleotide
ucucuacuaaaaau

SEQ ID NO: 118702 - RNA, 12 nt, Artificial Sequence
  Description of Artificial Sequence: Synthetic oligonucleotide
ucuaucucgccu

SEQ ID NO: 118703 - RNA, 13 nt, Artificial Sequence
  Description of Artificial Sequence: Synthetic oligonucleotide
cuucgguccaguu

SEQ ID NO: 118704 - RNA, 11 nt, Artificial Sequence
  Description of Artificial Sequence: Synthetic oligonucleotide
gauguagccgc

SEQ ID NO: 118705 - RNA, 12 nt, Artificial Sequence
  Description of Artificial Sequence: Synthetic oligonucleotide
ugaggagacuug

SEQ ID NO: 118706 - RNA, 12 nt, Artificial Sequence
  Description of Artificial Sequence: Synthetic oligonucleotide
gaguagugagga

SEQ ID NO: 118707 - RNA, 14 nt, Artificial Sequence
  Description of Artificial Sequence: Synthetic oligonucleotide
cagaugaguacaaa

SEQ ID NO: 118708 - RNA, 13 nt, Artificial Sequence
  Description of Artificial Sequence: Synthetic oligonucleotide
guuguuaaugggc

SEQ ID NO: 118709 - RNA, 13 nt, Artificial Sequence
  Description of Artificial Sequence: Synthetic oligonucleotide
uuuuuaauuuauu

SEQ ID NO: 118710 - RNA, 12 nt, Artificial Sequence
  Description of Artificial Sequence: Synthetic oligonucleotide
uauuuaaauaug

SEQ ID NO: 118711 - RNA, 13 nt, Artificial Sequence
  Description of Artificial Sequence: Synthetic oligonucleotide
uauccuuuguuuc

SEQ ID NO: 118712 - RNA, 14 nt, Artificial Sequence
  Description of Artificial Sequence: Synthetic oligonucleotide
cgucuaaguguuug

SEQ ID NO: 118713 - RNA, 12 nt, Artificial Sequence
  Description of Artificial Sequence: Synthetic oligonucleotide
accugugacaaa

SEQ ID NO: 118714 - RNA, 13 nt, Artificial Sequence
  Description of Artificial Sequence: Synthetic oligonucleotide
ccaggcugaauua

SEQ ID NO: 118715 - RNA, 14 nt, Artificial Sequence
  Description of Artificial Sequence: Synthetic oligonucleotide
gucauucuuacaau

SEQ ID NO: 118716 - RNA, 15 nt, Artificial Sequence
  Description of Artificial Sequence: Synthetic oligonucleotide
ucauucuuacaauug

SEQ ID NO: 118717 - RNA, 12 nt, Artificial Sequence
  Description of Artificial Sequence: Synthetic oligonucleotide
cagagaguguac

SEQ ID NO: 118718 - RNA, 12 nt, Artificial Sequence
  Description of Artificial Sequence: Synthetic oligonucleotide
agaacucagcag

SEQ ID NO: 118719 - RNA, 13 nt, Artificial Sequence
  Description of Artificial Sequence: Synthetic oligonucleotide
uuuauuuucagua

SEQ ID NO: 118720 - RNA, 12 nt, Artificial Sequence
  Description of Artificial Sequence: Synthetic oligonucleotide
ucuuaaauggaa

SEQ ID NO: 118721 - RNA, 13 nt, Artificial Sequence
  Description of Artificial Sequence: Synthetic oligonucleotide
ugccuaaaauugu

SEQ ID NO: 118722 - RNA, 12 nt, Artificial Sequence
  Description of Artificial Sequence: Synthetic oligonucleotide
agacugugagcu

SEQ ID NO: 118723 - RNA, 14 nt, Artificial Sequence
  Description of Artificial Sequence: Synthetic oligonucleotide
ugcuuuuuauuaau

SEQ ID NO: 118724 - RNA, 13 nt, Artificial Sequence
  Description of Artificial Sequence: Synthetic oligonucleotide
cucuucuuacauu

SEQ ID NO: 118725 - RNA, 15 nt, Artificial Sequence
  Description of Artificial Sequence: Synthetic oligonucleotide
cauuuguaaaaaugu

SEQ ID NO: 118726 - RNA, 15 nt, Artificial Sequence
  Description of Artificial Sequence: Synthetic oligonucleotide
aucuuaauucauauu

SEQ ID NO: 118727 - RNA, 13 nt, Artificial Sequence
  Description of Artificial Sequence: Synthetic oligonucleotide
gaacuaaucauga

SEQ ID NO: 118728 - RNA, 12 nt, Artificial Sequence
  Description of Artificial Sequence: Synthetic oligonucleotide
ucugcucuuggg

SEQ ID NO: 118729 - RNA, 13 nt, Artificial Sequence
  Description of Artificial Sequence: Synthetic oligonucleotide
caguagcuuugag

SEQ ID NO: 118730 - RNA, 14 nt, Artificial Sequence
  Description of Artificial Sequence: Synthetic oligonucleotide
cacguaauauuuca

SEQ ID NO: 118731 - RNA, 13 nt, Artificial Sequence
  Description of Artificial Sequence: Synthetic oligonucleotide
uauucucuucacu

SEQ ID NO: 118732 - RNA, 14 nt, Artificial Sequence
  Description of Artificial Sequence: Synthetic oligonucleotide
cuaaugcuaagaaa

SEQ ID NO: 118733 - RNA, 12 nt, Artificial Sequence
  Description of Artificial Sequence: Synthetic oligonucleotide
gcugaaaaucaa

SEQ ID NO: 118734 - RNA, 14 nt, Artificial Sequence
  Description of Artificial Sequence: Synthetic oligonucleotide
aauaugauuacuuu

SEQ ID NO: 118735 - RNA, 14 nt, Artificial Sequence
  Description of Artificial Sequence: Synthetic oligonucleotide
cauuuuguucuaca

SEQ ID NO: 118736 - RNA, 12 nt, Artificial Sequence
  Description of Artificial Sequence: Synthetic oligonucleotide
cccgggacucuc

SEQ ID NO: 118737 - RNA, 14 nt, Artificial Sequence
  Description of Artificial Sequence: Synthetic oligonucleotide
ccuuuaaaguaaag

SEQ ID NO: 118738 - RNA, 13 nt, Artificial Sequence
  Description of Artificial Sequence: Synthetic oligonucleotide
ucuggaagccugg

SEQ ID NO: 118739 - RNA, 14 nt, Artificial Sequence
  Description of Artificial Sequence: Synthetic oligonucleotide
aaaacaaaagagag

SEQ ID NO: 118740 - RNA, 13 nt, Artificial Sequence
  Description of Artificial Sequence: Synthetic oligonucleotide
aucaguuaugccg

SEQ ID NO: 118741 - RNA, 13 nt, Artificial Sequence
  Description of Artificial Sequence: Synthetic oligonucleotide
uaaaagaagucca

SEQ ID NO: 118742 - RNA, 11 nt, Artificial Sequence
  Description of Artificial Sequence: Synthetic oligonucleotide
aggugagguua

SEQ ID NO: 118743 - RNA, 11 nt, Artificial Sequence
  Description of Artificial Sequence: Synthetic oligonucleotide
gggaagaggac

SEQ ID NO: 118744 - RNA, 13 nt, Artificial Sequence
  Description of Artificial Sequence: Synthetic oligonucleotide
aagcaaguauugu

SEQ ID NO: 118745 - RNA, 12 nt, Artificial Sequence
  Description of Artificial Sequence: Synthetic oligonucleotide
auuguagcacuc

SEQ ID NO: 118746 - RNA, 14 nt, Artificial Sequence
  Description of Artificial Sequence: Synthetic oligonucleotide
acaaaaccacaaau

SEQ ID NO: 118747 - RNA, 12 nt, Artificial Sequence
  Description of Artificial Sequence: Synthetic oligonucleotide
uaagcccauaca

SEQ ID NO: 118748 - RNA, 11 nt, Artificial Sequence
  Description of Artificial Sequence: Synthetic oligonucleotide
agcccauacag

SEQ ID NO: 118749 - RNA, 12 nt, Artificial Sequence
  Description of Artificial Sequence: Synthetic oligonucleotide
cagaaaccuucc

SEQ ID NO: 118750 - RNA, 10 nt, Artificial Sequence
  Description of Artificial Sequence: Synthetic oligonucleotide
guauaccuac

SEQ ID NO: 118751 - RNA, 13 nt, Artificial Sequence
  Description of Artificial Sequence: Synthetic oligonucleotide
gccaguuuucgga

SEQ ID NO: 118752 - RNA, 9 nt, Artificial Sequence
  Description of Artificial Sequence: Synthetic oligonucleotide
ggaacaggg

SEQ ID NO: 118753 - RNA, 13 nt, Artificial Sequence
  Description of Artificial Sequence: Synthetic oligonucleotide
uuaacuuuccagu

SEQ ID NO: 118754 - RNA, 14 nt, Artificial Sequence
  Description of Artificial Sequence: Synthetic oligonucleotide
aaaguuugguuuug

SEQ ID NO: 118755 - RNA, 12 nt, Artificial Sequence
  Description of Artificial Sequence: Synthetic oligonucleotide
cuucccacugua

SEQ ID NO: 118756 - RNA, 13 nt, Artificial Sequence
  Description of Artificial Sequence: Synthetic oligonucleotide
ugauaccauauga

SEQ ID NO: 118757 - RNA, 11 nt, Artificial Sequence
  Description of Artificial Sequence: Synthetic oligonucleotide
aacaugggcug

SEQ ID NO: 118758 - RNA, 13 nt, Artificial Sequence
  Description of Artificial Sequence: Synthetic oligonucleotide
caacuuuuucaua

SEQ ID NO: 118759 - RNA, 12 nt, Artificial Sequence
  Description of Artificial Sequence: Synthetic oligonucleotide
caugaggccgga

SEQ ID NO: 118760 - RNA, 11 nt, Artificial Sequence
  Description of Artificial Sequence: Synthetic oligonucleotide
acugcauuugu

SEQ ID NO: 118761 - RNA, 13 nt, Artificial Sequence
  Description of Artificial Sequence: Synthetic oligonucleotide
aauguuuacuacc

SEQ ID NO: 118762 - RNA, 15 nt, Artificial Sequence
  Description of Artificial Sequence: Synthetic oligonucleotide
aauuuuuugaugaaa

SEQ ID NO: 118763 - RNA, 14 nt, Artificial Sequence
  Description of Artificial Sequence: Synthetic oligonucleotide
cagugugugaauuu

SEQ ID NO: 118764 - RNA, 13 nt, Artificial Sequence
  Description of Artificial Sequence: Synthetic oligonucleotide
gagcaauguaugu

SEQ ID NO: 118765 - RNA, 14 nt, Artificial Sequence
  Description of Artificial Sequence: Synthetic oligonucleotide
aaagcacauauaua

SEQ ID NO: 118766 - RNA, 14 nt, Artificial Sequence
  Description of Artificial Sequence: Synthetic oligonucleotide
guaauaguuucucc

SEQ ID NO: 118767 - RNA, 13 nt, Artificial Sequence
  Description of Artificial Sequence: Synthetic oligonucleotide
aguuucuccaaau

SEQ ID NO: 118768 - RNA, 13 nt, Artificial Sequence
  Description of Artificial Sequence: Synthetic oligonucleotide
uacuuccuagaaa

SEQ ID NO: 118769 - RNA, 13 nt, Artificial Sequence
  Description of Artificial Sequence: Synthetic oligonucleotide
uacaccauauaug

SEQ ID NO: 118770 - RNA, 14 nt, Artificial Sequence
  Description of Artificial Sequence: Synthetic oligonucleotide
auauaugaauggag

SEQ ID NO: 118771 - RNA, 13 nt, Artificial Sequence
  Description of Artificial Sequence: Synthetic oligonucleotide
acgagaagaagau

SEQ ID NO: 118772 - RNA, 13 nt, Artificial Sequence
  Description of Artificial Sequence: Synthetic oligonucleotide
ucauuuacaggga

SEQ ID NO: 118773 - RNA, 13 nt, Artificial Sequence
  Description of Artificial Sequence: Synthetic oligonucleotide
cauuuacagggac

SEQ ID NO: 118774 - RNA, 10 nt, Artificial Sequence
  Description of Artificial Sequence: Synthetic oligonucleotide
agggaccuga

SEQ ID NO: 118775 - RNA, 14 nt, Artificial Sequence
  Description of Artificial Sequence: Synthetic oligonucleotide
uguuugacugcauc

SEQ ID NO: 118776 - RNA, 13 nt, Artificial Sequence
  Description of Artificial Sequence: Synthetic oligonucleotide
uuugacugcaucg

SEQ ID NO: 118777 - RNA, 12 nt, Artificial Sequence
  Description of Artificial Sequence: Synthetic oligonucleotide
gaguucacaggg

SEQ ID NO: 118778 - RNA, 13 nt, Artificial Sequence
  Description of Artificial Sequence: Synthetic oligonucleotide
ggcaccucugucc

SEQ ID NO: 118779 - RNA, 15 nt, Artificial Sequence
  Description of Artificial Sequence: Synthetic oligonucleotide
gguuugucuuuuuaa

SEQ ID NO: 118780 - RNA, 14 nt, Artificial Sequence
  Description of Artificial Sequence: Synthetic oligonucleotide
uuugucuuuuuaag

SEQ ID NO: 118781 - RNA, 13 nt, Artificial Sequence
  Description of Artificial Sequence: Synthetic oligonucleotide
ccuaaagguuguc

SEQ ID NO: 118782 - RNA, 12 nt, Artificial Sequence
  Description of Artificial Sequence: Synthetic oligonucleotide
aagguugucgac

SEQ ID NO: 118783 - RNA, 13 nt, Artificial Sequence
  Description of Artificial Sequence: Synthetic oligonucleotide
accuggcaauugu

SEQ ID NO: 118784 - RNA, 12 nt, Artificial Sequence
  Description of Artificial Sequence: Synthetic oligonucleotide
aguggugcgagg

SEQ ID NO: 118785 - RNA, 13 nt, Artificial Sequence
  Description of Artificial Sequence: Synthetic oligonucleotide
agagacaugaaau

SEQ ID NO: 118786 - RNA, 13 nt, Artificial Sequence
  Description of Artificial Sequence: Synthetic oligonucleotide
auauauuucucca

SEQ ID NO: 118787 - RNA, 10 nt, Artificial Sequence
  Description of Artificial Sequence: Synthetic oligonucleotide
caugaaggcu

SEQ ID NO: 118788 - RNA, 11 nt, Artificial Sequence
  Description of Artificial Sequence: Synthetic oligonucleotide
gcuggaguggu

SEQ ID NO: 118789 - RNA, 11 nt, Artificial Sequence
  Description of Artificial Sequence: Synthetic oligonucleotide
aggaagagagg

SEQ ID NO: 118790 - RNA, 12 nt, Artificial Sequence
  Description of Artificial Sequence: Synthetic oligonucleotide
cuugcaucgggc

SEQ ID NO: 118791 - RNA, 13 nt, Artificial Sequence
  Description of Artificial Sequence: Synthetic oligonucleotide
auauccuacugug

SEQ ID NO: 118792 - RNA, 13 nt, Artificial Sequence
  Description of Artificial Sequence: Synthetic oligonucleotide
uccuacuguguaa

SEQ ID NO: 118793 - RNA, 12 nt, Artificial Sequence
  Description of Artificial Sequence: Synthetic oligonucleotide
ccuuguagugua

SEQ ID NO: 118794 - RNA, 13 nt, Artificial Sequence
  Description of Artificial Sequence: Synthetic oligonucleotide
ucuuuguugauug

SEQ ID NO: 118795 - RNA, 14 nt, Artificial Sequence
  Description of Artificial Sequence: Synthetic oligonucleotide
uuuguugauugaaa

SEQ ID NO: 118796 - RNA, 15 nt, Artificial Sequence
  Description of Artificial Sequence: Synthetic oligonucleotide
uucuuuuucuuccau

SEQ ID NO: 118797 - RNA, 13 nt, Artificial Sequence
  Description of Artificial Sequence: Synthetic oligonucleotide
aaucuuccuucua

SEQ ID NO: 118798 - RNA, 13 nt, Artificial Sequence
  Description of Artificial Sequence: Synthetic oligonucleotide
uugaaugcuucau

SEQ ID NO: 118799 - RNA, 13 nt, Artificial Sequence
  Description of Artificial Sequence: Synthetic oligonucleotide
ugaaugcuucaug

SEQ ID NO: 118800 - RNA, 13 nt, Artificial Sequence
  Description of Artificial Sequence: Synthetic oligonucleotide
aauucuacuuuga

SEQ ID NO: 118801 - RNA, 13 nt, Artificial Sequence
  Description of Artificial Sequence: Synthetic oligonucleotide
agcaacuacagac

SEQ ID NO: 118802 - RNA, 13 nt, Artificial Sequence
  Description of Artificial Sequence: Synthetic oligonucleotide
gaccaaggucaac

SEQ ID NO: 118803 - RNA, 13 nt, Artificial Sequence
  Description of Artificial Sequence: Synthetic oligonucleotide
cgacuaucucgac

SEQ ID NO: 118804 - RNA, 13 nt, Artificial Sequence
  Description of Artificial Sequence: Synthetic oligonucleotide
aaccuucccaaac

SEQ ID NO: 118805 - RNA, 14 nt, Artificial Sequence
  Description of Artificial Sequence: Synthetic oligonucleotide
ccaagcuuagaacu

SEQ ID NO: 118806 - RNA, 15 nt, Artificial Sequence
  Description of Artificial Sequence: Synthetic oligonucleotide
agcuuagaacuuuaa

SEQ ID NO: 118807 - RNA, 11 nt, Artificial Sequence
  Description of Artificial Sequence: Synthetic oligonucleotide
aagaccaccac

SEQ ID NO: 118808 - RNA, 14 nt, Artificial Sequence
  Description of Artificial Sequence: Synthetic oligonucleotide
gcgagaaauaaagu

SEQ ID NO: 118809 - RNA, 14 nt, Artificial Sequence
  Description of Artificial Sequence: Synthetic oligonucleotide
cgagaaauaaaguu

SEQ ID NO: 118810 - RNA, 12 nt, Artificial Sequence
  Description of Artificial Sequence: Synthetic oligonucleotide
aggaaaugaucc

SEQ ID NO: 118811 - RNA, 13 nt, Artificial Sequence
  Description of Artificial Sequence: Synthetic oligonucleotide
gaagaaaugaaac

SEQ ID NO: 118812 - RNA, 13 nt, Artificial Sequence
  Description of Artificial Sequence: Synthetic oligonucleotide
guuuccauccucc

SEQ ID NO: 118813 - RNA, 15 nt, Artificial Sequence
  Description of Artificial Sequence: Synthetic oligonucleotide
acugaaaaucuuuga

SEQ ID NO: 118814 - RNA, 11 nt, Artificial Sequence
  Description of Artificial Sequence: Synthetic oligonucleotide
ugccguucagg

SEQ ID NO: 118815 - RNA, 13 nt, Artificial Sequence
  Description of Artificial Sequence: Synthetic oligonucleotide
caggguccagaag

SEQ ID NO: 118816 - RNA, 13 nt, Artificial Sequence
  Description of Artificial Sequence: Synthetic oligonucleotide
ucaagacugcuug

SEQ ID NO: 118817 - RNA, 13 nt, Artificial Sequence
  Description of Artificial Sequence: Synthetic oligonucleotide
uccaugucuuugg

SEQ ID NO: 118818 - RNA, 11 nt, Artificial Sequence
  Description of Artificial Sequence: Synthetic oligonucleotide
gccugaaacac

SEQ ID NO: 118819 - RNA, 12 nt, Artificial Sequence
  Description of Artificial Sequence: Synthetic oligonucleotide
ucucuguaccuc

SEQ ID NO: 118820 - RNA, 12 nt, Artificial Sequence
  Description of Artificial Sequence: Synthetic oligonucleotide
agcaagacaaga

SEQ ID NO: 118821 - RNA, 13 nt, Artificial Sequence
  Description of Artificial Sequence: Synthetic oligonucleotide
gcaagacaagaaa

SEQ ID NO: 118822 - RNA, 12 nt, Artificial Sequence
  Description of Artificial Sequence: Synthetic oligonucleotide
uguacaagaucc

SEQ ID NO: 118823 - RNA, 12 nt, Artificial Sequence
  Description of Artificial Sequence: Synthetic oligonucleotide
cguacuugcaga

SEQ ID NO: 118824 - RNA, 13 nt, Artificial Sequence
  Description of Artificial Sequence: Synthetic oligonucleotide
cgaucgauacaga

SEQ ID NO: 118825 - RNA, 13 nt, Artificial Sequence
  Description of Artificial Sequence: Synthetic oligonucleotide
uauaaaaauaaau

SEQ ID NO: 118826 - RNA, 13 nt, Artificial Sequence
  Description of Artificial Sequence: Synthetic oligonucleotide
uaaaaauaaauau

SEQ ID NO: 118827 - RNA, 13 nt, Artificial Sequence
  Description of Artificial Sequence: Synthetic oligonucleotide
uuugacugcugug

SEQ ID NO: 118828 - RNA, 13 nt, Artificial Sequence
  Description of Artificial Sequence: Synthetic oligonucleotide
ggagaugagagac

SEQ ID NO: 118829 - RNA, 10 nt, Artificial Sequence
  Description of Artificial Sequence: Synthetic oligonucleotide
ucccacuugg

SEQ ID NO: 118830 - RNA, 10 nt, Artificial Sequence
  Description of Artificial Sequence: Synthetic oligonucleotide
guucacggcc

SEQ ID NO: 118831 - RNA, 12 nt, Artificial Sequence
  Description of Artificial Sequence: Synthetic oligonucleotide
accaucacacca

SEQ ID NO: 118832 - RNA, 10 nt, Artificial Sequence
  Description of Artificial Sequence: Synthetic oligonucleotide
cugcggguuu

SEQ ID NO: 118833 - RNA, 9 nt, Artificial Sequence
  Description of Artificial Sequence: Synthetic oligonucleotide
uccaguuug

SEQ ID NO: 118834 - RNA, 12 nt, Artificial Sequence
  Description of Artificial Sequence: Synthetic oligonucleotide
uuaaggacuucu

SEQ ID NO: 118835 - RNA, 12 nt, Artificial Sequence
  Description of Artificial Sequence: Synthetic oligonucleotide
agugggacagag

SEQ ID NO: 118836 - RNA, 13 nt, Artificial Sequence
  Description of Artificial Sequence: Synthetic oligonucleotide
auuuguuauugug

SEQ ID NO: 118837 - RNA, 12 nt, Artificial Sequence
  Description of Artificial Sequence: Synthetic oligonucleotide
ucaaaugcauuu

SEQ ID NO: 118838 - RNA, 9 nt, Artificial Sequence
  Description of Artificial Sequence: Synthetic oligonucleotide
aggaaagcc

SEQ ID NO: 118839 - RNA, 10 nt, Artificial Sequence
  Description of Artificial Sequence: Synthetic oligonucleotide
ggaaagcccu

SEQ ID NO: 118840 - RNA, 11 nt, Artificial Sequence
  Description of Artificial Sequence: Synthetic oligonucleotide
ccagcauggcc

SEQ ID NO: 118841 - RNA, 10 nt, Artificial Sequence
  Description of Artificial Sequence: Synthetic oligonucleotide
uucucccuga

SEQ ID NO: 118842 - RNA, 11 nt, Artificial Sequence
  Description of Artificial Sequence: Synthetic oligonucleotide
aagaagcccuu

SEQ ID NO: 118843 - RNA, 11 nt, Artificial Sequence
  Description of Artificial Sequence: Synthetic oligonucleotide
gaagcccuuca

SEQ ID NO: 118844 - RNA, 10 nt, Artificial Sequence
  Description of Artificial Sequence: Synthetic oligonucleotide
cccuucagcg

SEQ ID NO: 118845 - RNA, 10 nt, Artificial Sequence
  Description of Artificial Sequence: Synthetic oligonucleotide
cuucagcggc

SEQ ID NO: 118846 - RNA, 11 nt, Artificial Sequence
  Description of Artificial Sequence: Synthetic oligonucleotide
cagcggccagu

SEQ ID NO: 118847 - RNA, 11 nt, Artificial Sequence
  Description of Artificial Sequence: Synthetic oligonucleotide
gaaaagcuccg

SEQ ID NO: 118848 - RNA, 10 nt, Artificial Sequence
  Description of Artificial Sequence: Synthetic oligonucleotide
aaagcuccgg

SEQ ID NO: 118849 - RNA, 12 nt, Artificial Sequence
  Description of Artificial Sequence: Synthetic oligonucleotide
gucaacagucug

SEQ ID NO: 118850 - RNA, 12 nt, Artificial Sequence
  Description of Artificial Sequence: Synthetic oligonucleotide
agaguucaaaag

SEQ ID NO: 118851 - RNA, 12 nt, Artificial Sequence
  Description of Artificial Sequence: Synthetic oligonucleotide
gaguucaaaagc

SEQ ID NO: 118852 - RNA, 11 nt, Artificial Sequence
  Description of Artificial Sequence: Synthetic oligonucleotide
ucaaaagcccu

SEQ ID NO: 118853 - RNA, 11 nt, Artificial Sequence
  Description of Artificial Sequence: Synthetic oligonucleotide
caaaagcccuu

SEQ ID NO: 118854 - RNA, 11 nt, Artificial Sequence
  Description of Artificial Sequence: Synthetic oligonucleotide
aaagcccuuca

SEQ ID NO: 118855 - RNA, 11 nt, Artificial Sequence
  Description of Artificial Sequence: Synthetic oligonucleotide
aagcccuucag

SEQ ID NO: 118856 - RNA, 12 nt, Artificial Sequence
  Description of Artificial Sequence: Synthetic oligonucleotide
ugaagccgcucg

SEQ ID NO: 118857 - RNA, 11 nt, Artificial Sequence
  Description of Artificial Sequence: Synthetic oligonucleotide
acgccagucaa

SEQ ID NO: 118858 - RNA, 12 nt, Artificial Sequence
  Description of Artificial Sequence: Synthetic oligonucleotide
ucuuggugcgug

SEQ ID NO: 118859 - RNA, 13 nt, Artificial Sequence
  Description of Artificial Sequence: Synthetic oligonucleotide
uuggauucaucag

SEQ ID NO: 118860 - RNA, 12 nt, Artificial Sequence
  Description of Artificial Sequence: Synthetic oligonucleotide
ggaauaccuaag

SEQ ID NO: 118861 - RNA, 11 nt, Artificial Sequence
  Description of Artificial Sequence: Synthetic oligonucleotide
uuugaggcuca

SEQ ID NO: 118862 - RNA, 10 nt, Artificial Sequence
  Description of Artificial Sequence: Synthetic oligonucleotide
cuacaauugg

SEQ ID NO: 118863 - RNA, 11 nt, Artificial Sequence
  Description of Artificial Sequence: Synthetic oligonucleotide
aguuaggagcc

SEQ ID NO: 118864 - RNA, 12 nt, Artificial Sequence
  Description of Artificial Sequence: Synthetic oligonucleotide
gucaauauccac

SEQ ID NO: 118865 - RNA, 12 nt, Artificial Sequence
  Description of Artificial Sequence: Synthetic oligonucleotide
uguucagucaca

SEQ ID NO: 118866 - RNA, 11 nt, Artificial Sequence
  Description of Artificial Sequence: Synthetic oligonucleotide
cacacacauac

SEQ ID NO: 118867 - RNA, 11 nt, Artificial Sequence
  Description of Artificial Sequence: Synthetic oligonucleotide
uccuuuugcuu

SEQ ID NO: 118868 - RNA, 15 nt, Artificial Sequence
  Description of Artificial Sequence: Synthetic oligonucleotide
uuuaaaguaauuuuu

SEQ ID NO: 118869 - RNA, 12 nt, Artificial Sequence
  Description of Artificial Sequence: Synthetic oligonucleotide
aacagucaaugg

SEQ ID NO: 118870 - RNA, 12 nt, Artificial Sequence
  Description of Artificial Sequence: Synthetic oligonucleotide
cgacaaaccaau

SEQ ID NO: 118871 - RNA, 11 nt, Artificial Sequence
  Description of Artificial Sequence: Synthetic oligonucleotide
cugcuaccacu

SEQ ID NO: 118872 - RNA, 12 nt, Artificial Sequence
  Description of Artificial Sequence: Synthetic oligonucleotide
caagcggucuua

SEQ ID NO: 118873 - RNA, 12 nt, Artificial Sequence
  Description of Artificial Sequence: Synthetic oligonucleotide
gucuuaccggcu

SEQ ID NO: 118874 - RNA, 10 nt, Artificial Sequence
  Description of Artificial Sequence: Synthetic oligonucleotide
auggguuacc

SEQ ID NO: 118875 - RNA, 10 nt, Artificial Sequence
  Description of Artificial Sequence: Synthetic oligonucleotide
uuaccugcga

SEQ ID NO: 118876 - RNA, 11 nt, Artificial Sequence
  Description of Artificial Sequence: Synthetic oligonucleotide
aucuugcugag

SEQ ID NO: 118877 - RNA, 12 nt, Artificial Sequence
  Description of Artificial Sequence: Synthetic oligonucleotide
gcauaaaacagu

SEQ ID NO: 118878 - RNA, 11 nt, Artificial Sequence
  Description of Artificial Sequence: Synthetic oligonucleotide
uccuuuauccu

SEQ ID NO: 118879 - RNA, 11 nt, Artificial Sequence
  Description of Artificial Sequence: Synthetic oligonucleotide
aacgcaaguug

SEQ ID NO: 118880 - RNA, 12 nt, Artificial Sequence
  Description of Artificial Sequence: Synthetic oligonucleotide
aacugaaaccau

SEQ ID NO: 118881 - RNA, 13 nt, Artificial Sequence
  Description of Artificial Sequence: Synthetic oligonucleotide
cuuuguuaaauau

SEQ ID NO: 118882 - RNA, 13 nt, Artificial Sequence
  Description of Artificial Sequence: Synthetic oligonucleotide
uauauuaaaaguu

SEQ ID NO: 118883 - RNA, 12 nt, Artificial Sequence
  Description of Artificial Sequence: Synthetic oligonucleotide
uuuugacuuaac

SEQ ID NO: 118884 - RNA, 12 nt, Artificial Sequence
  Description of Artificial Sequence: Synthetic oligonucleotide
caaacucagcac

SEQ ID NO: 118885 - RNA, 10 nt, Artificial Sequence
  Description of Artificial Sequence: Synthetic oligonucleotide
gcugaccuca

SEQ ID NO: 118886 - RNA, 13 nt, Artificial Sequence
  Description of Artificial Sequence: Synthetic oligonucleotide
uuauucagaucgc

SEQ ID NO: 118887 - RNA, 12 nt, Artificial Sequence
  Description of Artificial Sequence: Synthetic oligonucleotide
ggguucugggau

SEQ ID NO: 118888 - RNA, 14 nt, Artificial Sequence
  Description of Artificial Sequence: Synthetic oligonucleotide
uauuggaaauuaug

SEQ ID NO: 118889 - RNA, 12 nt, Artificial Sequence
  Description of Artificial Sequence: Synthetic oligonucleotide
uggaagcacuag

SEQ ID NO: 118890 - RNA, 12 nt, Artificial Sequence
  Description of Artificial Sequence: Synthetic oligonucleotide
uuuuuaugugga

SEQ ID NO: 118891 - RNA, 11 nt, Artificial Sequence
  Description of Artificial Sequence: Synthetic oligonucleotide
gaauugguaga

SEQ ID NO: 118892 - RNA, 12 nt, Artificial Sequence
  Description of Artificial Sequence: Synthetic oligonucleotide
uagacuuggaga

SEQ ID NO: 118893 - RNA, 12 nt, Artificial Sequence
  Description of Artificial Sequence: Synthetic oligonucleotide
uacaguauucca

SEQ ID NO: 118894 - RNA, 14 nt, Artificial Sequence
  Description of Artificial Sequence: Synthetic oligonucleotide
cacugaugaauuaa

SEQ ID NO: 118895 - RNA, 11 nt, Artificial Sequence
  Description of Artificial Sequence: Synthetic oligonucleotide
cacaucaucac

SEQ ID NO: 118896 - RNA, 12 nt, Artificial Sequence
  Description of Artificial Sequence: Synthetic oligonucleotide
ucaccaaacaga

SEQ ID NO: 118897 - RNA, 11 nt, Artificial Sequence
  Description of Artificial Sequence: Synthetic oligonucleotide
gaacaugaugg

SEQ ID NO: 118898 - RNA, 11 nt, Artificial Sequence
  Description of Artificial Sequence: Synthetic oligonucleotide
auguagacugc

SEQ ID NO: 118899 - RNA, 12 nt, Artificial Sequence
  Description of Artificial Sequence: Synthetic oligonucleotide
gaucuauuuaug

SEQ ID NO: 118900 - RNA, 11 nt, Artificial Sequence
  Description of Artificial Sequence: Synthetic oligonucleotide
cacuauuauca

SEQ ID NO: 118901 - RNA, 10 nt, Artificial Sequence
  Description of Artificial Sequence: Synthetic oligonucleotide
ucaguucugc

SEQ ID NO: 118902 - RNA, 12 nt, Artificial Sequence
  Description of Artificial Sequence: Synthetic oligonucleotide
gauuaaaccuac

SEQ ID NO: 118903 - RNA, 12 nt, Artificial Sequence
  Description of Artificial Sequence: Synthetic oligonucleotide
uaaaauccuucu

SEQ ID NO: 118904 - RNA, 11 nt, Artificial Sequence
  Description of Artificial Sequence: Synthetic oligonucleotide
augcuguagac

SEQ ID NO: 118905 - RNA, 12 nt, Artificial Sequence
  Description of Artificial Sequence: Synthetic oligonucleotide
ugauaggaauag

SEQ ID NO: 118906 - RNA, 10 nt, Artificial Sequence
  Description of Artificial Sequence: Synthetic oligonucleotide
auggcccuga

SEQ ID NO: 118907 - RNA, 10 nt, Artificial Sequence
  Description of Artificial Sequence: Synthetic oligonucleotide
uccucaagca

SEQ ID NO: 118908 - RNA, 9 nt, Artificial Sequence
  Description of Artificial Sequence: Synthetic oligonucleotide
uucagccca

SEQ ID NO: 118909 - RNA, 10 nt, Artificial Sequence
  Description of Artificial Sequence: Synthetic oligonucleotide
cugcugaacc

SEQ ID NO: 118910 - RNA, 11 nt, Artificial Sequence
  Description of Artificial Sequence: Synthetic oligonucleotide
aguucucuuca

SEQ ID NO: 118911 - RNA, 10 nt, Artificial Sequence
  Description of Artificial Sequence: Synthetic oligonucleotide
cagccuagag

SEQ ID NO: 118912 - RNA, 12 nt, Artificial Sequence
  Description of Artificial Sequence: Synthetic oligonucleotide
ucugugaagugu

SEQ ID NO: 118913 - RNA, 13 nt, Artificial Sequence
  Description of Artificial Sequence: Synthetic oligonucleotide
gagaaaauuucaa

SEQ ID NO: 118914 - RNA, 10 nt, Artificial Sequence
  Description of Artificial Sequence: Synthetic oligonucleotide
auccuccuga

SEQ ID NO: 118915 - RNA, 11 nt, Artificial Sequence
  Description of Artificial Sequence: Synthetic oligonucleotide
ugacaucauau

SEQ ID NO: 118916 - RNA, 12 nt, Artificial Sequence
  Description of Artificial Sequence: Synthetic oligonucleotide
aucuucaucaua

SEQ ID NO: 118917 - RNA, 12 nt, Artificial Sequence
  Description of Artificial Sequence: Synthetic oligonucleotide
acuagcuauuaa

SEQ ID NO: 118918 - RNA, 13 nt, Artificial Sequence
  Description of Artificial Sequence: Synthetic oligonucleotide
cucuacuaaaaau

SEQ ID NO: 118919 - RNA, 11 nt, Artificial Sequence
  Description of Artificial Sequence: Synthetic oligonucleotide
cuaucucgccu

SEQ ID NO: 118920 - RNA, 12 nt, Artificial Sequence
  Description of Artificial Sequence: Synthetic oligonucleotide
uucgguccaguu

SEQ ID NO: 118921 - RNA, 10 nt, Artificial Sequence
  Description of Artificial Sequence: Synthetic oligonucleotide
auguagccgc

SEQ ID NO: 118922 - RNA, 11 nt, Artificial Sequence
  Description of Artificial Sequence: Synthetic oligonucleotide
gaggagacuug

SEQ ID NO: 118923 - RNA, 11 nt, Artificial Sequence
  Description of Artificial Sequence: Synthetic oligonucleotide
aguagugagga

SEQ ID NO: 118924 - RNA, 13 nt, Artificial Sequence
  Description of Artificial Sequence: Synthetic oligonucleotide
agaugaguacaaa

SEQ ID NO: 118925 - RNA, 12 nt, Artificial Sequence
  Description of Artificial Sequence: Synthetic oligonucleotide
uuguuaaugggc

SEQ ID NO: 118926 - RNA, 12 nt, Artificial Sequence
  Description of Artificial Sequence: Synthetic oligonucleotide
uuuuaauuuauu

SEQ ID NO: 118927 - RNA, 11 nt, Artificial Sequence
  Description of Artificial Sequence: Synthetic oligonucleotide
auuuaaauaug

SEQ ID NO: 118928 - RNA, 12 nt, Artificial Sequence
  Description of Artificial Sequence: Synthetic oligonucleotide
auccuuuguuuc

SEQ ID NO: 118929 - RNA, 13 nt, Artificial Sequence
  Description of Artificial Sequence: Synthetic oligonucleotide
gucuaaguguuug

SEQ ID NO: 118930 - RNA, 11 nt, Artificial Sequence
  Description of Artificial Sequence: Synthetic oligonucleotide
ccugugacaaa

SEQ ID NO: 118931 - RNA, 12 nt, Artificial Sequence
  Description of Artificial Sequence: Synthetic oligonucleotide
caggcugaauua

SEQ ID NO: 118932 - RNA, 13 nt, Artificial Sequence
  Description of Artificial Sequence: Synthetic oligonucleotide
ucauucuuacaau

SEQ ID NO: 118933 - RNA, 14 nt, Artificial Sequence
  Description of Artificial Sequence: Synthetic oligonucleotide
cauucuuacaauug

SEQ ID NO: 118934 - RNA, 11 nt, Artificial Sequence
  Description of Artificial Sequence: Synthetic oligonucleotide
agagaguguac

SEQ ID NO: 118935 - RNA, 11 nt, Artificial Sequence
  Description of Artificial Sequence: Synthetic oligonucleotide
gaacucagcag

SEQ ID NO: 118936 - RNA, 12 nt, Artificial Sequence
  Description of Artificial Sequence: Synthetic oligonucleotide
uuauuuucagua

SEQ ID NO: 118937 - RNA, 11 nt, Artificial Sequence
  Description of Artificial Sequence: Synthetic oligonucleotide
cuuaaauggaa

SEQ ID NO: 118938 - RNA, 12 nt, Artificial Sequence
  Description of Artificial Sequence: Synthetic oligonucleotide
gccuaaaauugu

SEQ ID NO: 118939 - RNA, 12 nt, Artificial Sequence
  Description of Artificial Sequence: Synthetic oligonucleotide
acuaacaucugg

SEQ ID NO: 118940 - RNA, 11 nt, Artificial Sequence
  Description of Artificial Sequence: Synthetic oligonucleotide
gacugugagcu

SEQ ID NO: 118941 - RNA, 13 nt, Artificial Sequence
  Description of Artificial Sequence: Synthetic oligonucleotide
gcuuuuuauuaau

SEQ ID NO: 118942 - RNA, 12 nt, Artificial Sequence
  Description of Artificial Sequence: Synthetic oligonucleotide
ucuucuuacauu

SEQ ID NO: 118943 - RNA, 14 nt, Artificial Sequence
  Description of Artificial Sequence: Synthetic oligonucleotide
auuuguaaaaaugu

SEQ ID NO: 118944 - RNA, 14 nt, Artificial Sequence
  Description of Artificial Sequence: Synthetic oligonucleotide
ucuuaauucauauu

SEQ ID NO: 118945 - RNA, 12 nt, Artificial Sequence
  Description of Artificial Sequence: Synthetic oligonucleotide
aacuaaucauga

SEQ ID NO: 118946 - RNA, 11 nt, Artificial Sequence
  Description of Artificial Sequence: Synthetic oligonucleotide
cugcucuuggg

SEQ ID NO: 118947 - RNA, 12 nt, Artificial Sequence
  Description of Artificial Sequence: Synthetic oligonucleotide
aguagcuuugag

SEQ ID NO: 118948 - RNA, 13 nt, Artificial Sequence
  Description of Artificial Sequence: Synthetic oligonucleotide
acguaauauuuca

SEQ ID NO: 118949 - RNA, 12 nt, Artificial Sequence
  Description of Artificial Sequence: Synthetic oligonucleotide
auucucuucacu

SEQ ID NO: 118950 - RNA, 13 nt, Artificial Sequence
  Description of Artificial Sequence: Synthetic oligonucleotide
uaaugcuaagaaa

SEQ ID NO: 118951 - RNA, 11 nt, Artificial Sequence
  Description of Artificial Sequence: Synthetic oligonucleotide
cugaaaaucaa

SEQ ID NO: 118952 - RNA, 13 nt, Artificial Sequence
  Description of Artificial Sequence: Synthetic oligonucleotide
auaugauuacuuu

SEQ ID NO: 118953 - RNA, 13 nt, Artificial Sequence
  Description of Artificial Sequence: Synthetic oligonucleotide
auuuuguucuaca

SEQ ID NO: 118954 - RNA, 11 nt, Artificial Sequence
  Description of Artificial Sequence: Synthetic oligonucleotide
ccgggacucuc

SEQ ID NO: 118955 - RNA, 13 nt, Artificial Sequence
  Description of Artificial Sequence: Synthetic oligonucleotide
cuuuaaaguaaag

SEQ ID NO: 118956 - RNA, 12 nt, Artificial Sequence
  Description of Artificial Sequence: Synthetic oligonucleotide
cuggaagccugg

SEQ ID NO: 118957 - RNA, 13 nt, Artificial Sequence
  Description of Artificial Sequence: Synthetic oligonucleotide
aaacaaaagagag

SEQ ID NO: 118958 - RNA, 12 nt, Artificial Sequence
  Description of Artificial Sequence: Synthetic oligonucleotide
ucaguuaugccg

SEQ ID NO: 118959 - RNA, 12 nt, Artificial Sequence
  Description of Artificial Sequence: Synthetic oligonucleotide
aaaagaagucca

SEQ ID NO: 118960 - RNA, 10 nt, Artificial Sequence
  Description of Artificial Sequence: Synthetic oligonucleotide
ggugagguua

SEQ ID NO: 118961 - RNA, 10 nt, Artificial Sequence
  Description of Artificial Sequence: Synthetic oligonucleotide
ggaagaggac

SEQ ID NO: 118962 - RNA, 12 nt, Artificial Sequence
  Description of Artificial Sequence: Synthetic oligonucleotide
agcaaguauugu

SEQ ID NO: 118963 - RNA, 11 nt, Artificial Sequence
  Description of Artificial Sequence: Synthetic oligonucleotide
uuguagcacuc

SEQ ID NO: 118964 - RNA, 13 nt, Artificial Sequence
  Description of Artificial Sequence: Synthetic oligonucleotide
caaaaccacaaau

SEQ ID NO: 118965 - RNA, 11 nt, Artificial Sequence
  Description of Artificial Sequence: Synthetic oligonucleotide
aagcccauaca

SEQ ID NO: 118966 - RNA, 10 nt, Artificial Sequence
  Description of Artificial Sequence: Synthetic oligonucleotide
gcccauacag

SEQ ID NO: 118967 - RNA, 11 nt, Artificial Sequence
  Description of Artificial Sequence: Synthetic oligonucleotide
agaaaccuucc

SEQ ID NO: 118968 - RNA, 9 nt, Artificial Sequence
  Description of Artificial Sequence: Synthetic oligonucleotide
uauaccuac

SEQ ID NO: 118969 - RNA, 12 nt, Artificial Sequence
  Description of Artificial Sequence: Synthetic oligonucleotide
ccaguuuucgga

SEQ ID NO: 118970 - RNA, 8 nt, Artificial Sequence
  Description of Artificial Sequence: Synthetic oligonucleotide
gaacaggg

SEQ ID NO: 118971 - RNA, 12 nt, Artificial Sequence
  Description of Artificial Sequence: Synthetic oligonucleotide
uaacuuuccagu

SEQ ID NO: 118972 - RNA, 13 nt, Artificial Sequence
  Description of Artificial Sequence: Synthetic oligonucleotide
aaguuugguuuug

SEQ ID NO: 118973 - RNA, 11 nt, Artificial Sequence
  Description of Artificial Sequence: Synthetic oligonucleotide
uucccacugua

SEQ ID NO: 118974 - RNA, 12 nt, Artificial Sequence
  Description of Artificial Sequence: Synthetic oligonucleotide
gauaccauauga

SEQ ID NO: 118975 - RNA, 10 nt, Artificial Sequence
  Description of Artificial Sequence: Synthetic oligonucleotide
acaugggcug

SEQ ID NO: 118976 - RNA, 12 nt, Artificial Sequence
  Description of Artificial Sequence: Synthetic oligonucleotide
aacuuuuucaua

SEQ ID NO: 118977 - RNA, 11 nt, Artificial Sequence
  Description of Artificial Sequence: Synthetic oligonucleotide
augaggccgga

SEQ ID NO: 118978 - RNA, 10 nt, Artificial Sequence
  Description of Artificial Sequence: Synthetic oligonucleotide
cugcauuugu

SEQ ID NO: 118979 - RNA, 12 nt, Artificial Sequence
  Description of Artificial Sequence: Synthetic oligonucleotide
auguuuacuacc

SEQ ID NO: 118980 - RNA, 14 nt, Artificial Sequence
  Description of Artificial Sequence: Synthetic oligonucleotide
auuuuuugaugaaa

SEQ ID NO: 118981 - RNA, 13 nt, Artificial Sequence
  Description of Artificial Sequence: Synthetic oligonucleotide
agugugugaauuu

SEQ ID NO: 118982 - RNA, 12 nt, Artificial Sequence
  Description of Artificial Sequence: Synthetic oligonucleotide
agcaauguaugu

SEQ ID NO: 118983 - RNA, 13 nt, Artificial Sequence
  Description of Artificial Sequence: Synthetic oligonucleotide
aagcacauauaua

SEQ ID NO: 118984 - RNA, 13 nt, Artificial Sequence
  Description of Artificial Sequence: Synthetic oligonucleotide
uaauaguuucucc

SEQ ID NO: 118985 - RNA, 12 nt, Artificial Sequence
  Description of Artificial Sequence: Synthetic oligonucleotide
guuucuccaaau

SEQ ID NO: 118986 - RNA, 12 nt, Artificial Sequence
  Description of Artificial Sequence: Synthetic oligonucleotide
acuuccuagaaa

SEQ ID NO: 118987 - RNA, 12 nt, Artificial Sequence
  Description of Artificial Sequence: Synthetic oligonucleotide
acaccauauaug

SEQ ID NO: 118988 - RNA, 13 nt, Artificial Sequence
  Description of Artificial Sequence: Synthetic oligonucleotide
uauaugaauggag

SEQ ID NO: 118989 - RNA, 12 nt, Artificial Sequence
  Description of Artificial Sequence: Synthetic oligonucleotide
cauuuacaggga

SEQ ID NO: 118990 - RNA, 12 nt, Artificial Sequence
  Description of Artificial Sequence: Synthetic oligonucleotide
auuuacagggac

SEQ ID NO: 118991 - RNA, 9 nt, Artificial Sequence
  Description of Artificial Sequence: Synthetic oligonucleotide
gggaccuga

SEQ ID NO: 118992 - RNA, 13 nt, Artificial Sequence
  Description of Artificial Sequence: Synthetic oligonucleotide
guuugacugcauc

SEQ ID NO: 118993 - RNA, 12 nt, Artificial Sequence
  Description of Artificial Sequence: Synthetic oligonucleotide
uugacugcaucg

SEQ ID NO: 118994 - RNA, 11 nt, Artificial Sequence
  Description of Artificial Sequence: Synthetic oligonucleotide
aguucacaggg

SEQ ID NO: 118995 - RNA, 12 nt, Artificial Sequence
  Description of Artificial Sequence: Synthetic oligonucleotide
gcaccucugucc

SEQ ID NO: 118996 - RNA, 14 nt, Artificial Sequence
  Description of Artificial Sequence: Synthetic oligonucleotide
guuugucuuuuuaa

SEQ ID NO: 118997 - RNA, 13 nt, Artificial Sequence
  Description of Artificial Sequence: Synthetic oligonucleotide
uugucuuuuuaag

SEQ ID NO: 118998 - RNA, 12 nt, Artificial Sequence
  Description of Artificial Sequence: Synthetic oligonucleotide
cuaaagguuguc

SEQ ID NO: 118999 - RNA, 11 nt, Artificial Sequence
  Description of Artificial Sequence: Synthetic oligonucleotide
agguugucgac

SEQ ID NO: 119000 - RNA, 12 nt, Artificial Sequence
  Description of Artificial Sequence: Synthetic oligonucleotide
ccuggcaauugu

SEQ ID NO: 119001 - RNA, 11 nt, Artificial Sequence
  Description of Artificial Sequence: Synthetic oligonucleotide
guggugcgagg

SEQ ID NO: 119002 - RNA, 12 nt, Artificial Sequence
  Description of Artificial Sequence: Synthetic oligonucleotide
gagacaugaaau

SEQ ID NO: 119003 - RNA, 12 nt, Artificial Sequence
  Description of Artificial Sequence: Synthetic oligonucleotide
uauauuucucca

SEQ ID NO: 119004 - RNA, 9 nt, Artificial Sequence
  Description of Artificial Sequence: Synthetic oligonucleotide
augaaggcu

SEQ ID NO: 119005 - RNA, 10 nt, Artificial Sequence
  Description of Artificial Sequence: Synthetic oligonucleotide
cuggaguggu

SEQ ID NO: 119006 - RNA, 10 nt, Artificial Sequence
  Description of Artificial Sequence: Synthetic oligonucleotide
ggaagagagg

SEQ ID NO: 119007 - RNA, 11 nt, Artificial Sequence
  Description of Artificial Sequence: Synthetic oligonucleotide
uugcaucgggc

SEQ ID NO: 119008 - RNA, 12 nt, Artificial Sequence
  Description of Artificial Sequence: Synthetic oligonucleotide
uauccuacugug

SEQ ID NO: 119009 - RNA, 12 nt, Artificial Sequence
  Description of Artificial Sequence: Synthetic oligonucleotide
ccuacuguguaa

SEQ ID NO: 119010 - RNA, 11 nt, Artificial Sequence
  Description of Artificial Sequence: Synthetic oligonucleotide
cuuguagugua

SEQ ID NO: 119011 - RNA, 12 nt, Artificial Sequence
  Description of Artificial Sequence: Synthetic oligonucleotide
cuuuguugauug

SEQ ID NO: 119012 - RNA, 13 nt, Artificial Sequence
  Description of Artificial Sequence: Synthetic oligonucleotide
uuguugauugaaa

SEQ ID NO: 119013 - RNA, 14 nt, Artificial Sequence
  Description of Artificial Sequence: Synthetic oligonucleotide
ucuuuuucuuccau

SEQ ID NO: 119014 - RNA, 12 nt, Artificial Sequence
  Description of Artificial Sequence: Synthetic oligonucleotide
aucuuccuucua

SEQ ID NO: 119015 - RNA, 12 nt, Artificial Sequence
  Description of Artificial Sequence: Synthetic oligonucleotide
ugaaugcuucau

SEQ ID NO: 119016 - RNA, 12 nt, Artificial Sequence
  Description of Artificial Sequence: Synthetic oligonucleotide
gaaugcuucaug

SEQ ID NO: 119017 - RNA, 12 nt, Artificial Sequence
  Description of Artificial Sequence: Synthetic oligonucleotide
auucuacuuuga

SEQ ID NO: 119018 - RNA, 12 nt, Artificial Sequence
  Description of Artificial Sequence: Synthetic oligonucleotide
gcaacuacagac

SEQ ID NO: 119019 - RNA, 12 nt, Artificial Sequence
  Description of Artificial Sequence: Synthetic oligonucleotide
accaaggucaac

SEQ ID NO: 119020 - RNA, 12 nt, Artificial Sequence
  Description of Artificial Sequence: Synthetic oligonucleotide
gacuaucucgac

SEQ ID NO: 119021 - RNA, 12 nt, Artificial Sequence
  Description of Artificial Sequence: Synthetic oligonucleotide
accuucccaaac

SEQ ID NO: 119022 - RNA, 13 nt, Artificial Sequence
  Description of Artificial Sequence: Synthetic oligonucleotide
caagcuuagaacu

SEQ ID NO: 119023 - RNA, 14 nt, Artificial Sequence
  Description of Artificial Sequence: Synthetic oligonucleotide
gcuuagaacuuuaa

SEQ ID NO: 119024 - RNA, 13 nt, Artificial Sequence
  Description of Artificial Sequence: Synthetic oligonucleotide
aacuuuaagcaac

SEQ ID NO: 119025 - RNA, 10 nt, Artificial Sequence
  Description of Artificial Sequence: Synthetic oligonucleotide
agaccaccac

SEQ ID NO: 119026 - RNA, 13 nt, Artificial Sequence
  Description of Artificial Sequence: Synthetic oligonucleotide
cgagaaauaaagu

SEQ ID NO: 119027 - RNA, 13 nt, Artificial Sequence
  Description of Artificial Sequence: Synthetic oligonucleotide
gagaaauaaaguu

SEQ ID NO: 119028 - RNA, 11 nt, Artificial Sequence
  Description of Artificial Sequence: Synthetic oligonucleotide
ggaaaugaucc

SEQ ID NO: 119029 - RNA, 12 nt, Artificial Sequence
  Description of Artificial Sequence: Synthetic oligonucleotide
aagaaaugaaac

SEQ ID NO: 119030 - RNA, 12 nt, Artificial Sequence
  Description of Artificial Sequence: Synthetic oligonucleotide
uuuccauccucc

SEQ ID NO: 119031 - RNA, 14 nt, Artificial Sequence
  Description of Artificial Sequence: Synthetic oligonucleotide
cugaaaaucuuuga

SEQ ID NO: 119032 - RNA, 10 nt, Artificial Sequence
  Description of Artificial Sequence: Synthetic oligonucleotide
gccguucagg

SEQ ID NO: 119033 - RNA, 12 nt, Artificial Sequence
  Description of Artificial Sequence: Synthetic oligonucleotide
aggguccagaag

SEQ ID NO: 119034 - RNA, 12 nt, Artificial Sequence
  Description of Artificial Sequence: Synthetic oligonucleotide
caagacugcuug

SEQ ID NO: 119035 - RNA, 12 nt, Artificial Sequence
  Description of Artificial Sequence: Synthetic oligonucleotide
ccaugucuuugg

SEQ ID NO: 119036 - RNA, 10 nt, Artificial Sequence
  Description of Artificial Sequence: Synthetic oligonucleotide
ccugaaacac

SEQ ID NO: 119037 - RNA, 11 nt, Artificial Sequence
  Description of Artificial Sequence: Synthetic oligonucleotide
cucuguaccuc

SEQ ID NO: 119038 - RNA, 11 nt, Artificial Sequence
  Description of Artificial Sequence: Synthetic oligonucleotide
gcaagacaaga

SEQ ID NO: 119039 - RNA, 12 nt, Artificial Sequence
  Description of Artificial Sequence: Synthetic oligonucleotide
caagacaagaaa

SEQ ID NO: 119040 - RNA, 11 nt, Artificial Sequence
  Description of Artificial Sequence: Synthetic oligonucleotide
guacaagaucc

SEQ ID NO: 119041 - RNA, 11 nt, Artificial Sequence
  Description of Artificial Sequence: Synthetic oligonucleotide
guacuugcaga

SEQ ID NO: 119042 - RNA, 12 nt, Artificial Sequence
  Description of Artificial Sequence: Synthetic oligonucleotide
gaucgauacaga

SEQ ID NO: 119043 - RNA, 12 nt, Artificial Sequence
  Description of Artificial Sequence: Synthetic oligonucleotide
auaaaaauaaau

SEQ ID NO: 119044 - RNA, 12 nt, Artificial Sequence
  Description of Artificial Sequence: Synthetic oligonucleotide
aaaaauaaauau

SEQ ID NO: 119045 - RNA, 12 nt, Artificial Sequence
  Description of Artificial Sequence: Synthetic oligonucleotide
uugacugcugug

SEQ ID NO: 119046 - RNA, 12 nt, Artificial Sequence
  Description of Artificial Sequence: Synthetic oligonucleotide
gagaugagagac

SEQ ID NO: 119047 - RNA, 9 nt, Artificial Sequence
  Description of Artificial Sequence: Synthetic oligonucleotide
cccacuugg

SEQ ID NO: 119048 - RNA, 1528 nt, Homo sapiens
cggcgagcgagcaccuucgacgcgguccggggacccccucgucgcuguccucccgacgcggacccgcgugccccaggccucgcgcugcccggccggcuccucgugucccacucccggcgcacgcccucccgcgagucccgggccccucccgcgccccucuucucggcgcgcgcgcagcauggcgcccccgcagguccucgcguucgggcuucugcuugccgcggcgacggcgacuuuugccgcagcucaggaagaaugugucugugaaaacuacaagcuggccguaaacugcuuugugaauaauaaucgucaaugccaguguacuucaguuggugcacaaaauacugucauuugcucaaagcuggcugccaaauguuuggugaugaaggcagaaaugaauggcucaaaacuugggagaagagcaaaaccugaaggggcccuccagaacaaugaugggcuuuaugauccugacugcgaugagagcgggcucuuuaaggccaagcagugcaacggcaccuccacgugcuggugugugaacacugcuggggucagaagaacagacaaggacacugaaauaaccugcucugagcgagugagaaccuacuggaucaucauugaacuaaaacacaaagcaagagaaaaaccuuaugauaguaaaaguuugcggacugcacuucagaaggagaucacaacgcguuaucaacuggauccaaaauuuaucacgaguauuuuguaugagaauaauguuaucacuauugaucugguucaaaauucuucucaaaaaacucagaaugauguggacauagcugauguggcuuauuauuuugaaaaagauguuaaaggugaauccuuguuucauucuaagaaaauggaccugacaguaaauggggaacaacuggaucuggauccuggucaaacuuuaauuuauuauguugaugaaaaagcaccugaauucucaaugcagggucuaaaagcugguguuauugcuguuauugugguuguggugauagcaguuguugcuggaauuguugugcugguuauuuccagaaagaagagaauggcaaaguaugagaaggcugagauaaaggagaugggugagaugcauagggaacucaaugcauaacuauauaauuugaagauuauagaagaagggaaauagcaaauggacacaaauuacaaaugugugugcgugggacgaagacaucuuugaaggucaugaguuuguuaguuuaacaucauauauuuguaauagugaaaccuguacucaaaauauaagcagcuugaaacuggcuuuaccaaucuugaaauuugaccacaagugucuuauauaugcagaucuaauguaaaauccagaacuuggacuccaucguuaaaauuauuuauguguaacauucaaaugugugcauuaaauaugcuuccacaguaaaaucugaaaaacugauuugugauugaaagcugccuuucuauuuacuugagucuuguacauacauacuuuuuuaugagcuaugaaauaaaacauuuuaaacug

SEQ ID NO: 119049 - RNA, 19 nt, Artificial Sequence
  Description of Artificial Sequence: Synthetic oligonucleotide
cggcgagcgagcaccuucg

SEQ ID NO: 119050 - RNA, 19 nt, Artificial Sequence
  Description of Artificial Sequence: Synthetic oligonucleotide
gacgcgguccggggacccc

SEQ ID NO: 119051 - RNA, 19 nt, Artificial Sequence
  Description of Artificial Sequence: Synthetic oligonucleotide
ccucgucgcuguccucccg

SEQ ID NO: 119052 - RNA, 19 nt, Artificial Sequence
  Description of Artificial Sequence: Synthetic oligonucleotide
gacgcggacccgcgugccc

SEQ ID NO: 119053 - RNA, 19 nt, Artificial Sequence
  Description of Artificial Sequence: Synthetic oligonucleotide
ccaggccucgcgcugcccg

SEQ ID NO: 119054 - RNA, 19 nt, Artificial Sequence
  Description of Artificial Sequence: Synthetic oligonucleotide
ggccggcuccucguguccc

SEQ ID NO: 119055 - RNA, 19 nt, Artificial Sequence
  Description of Artificial Sequence: Synthetic oligonucleotide
cacucccggcgcacgcccu

SEQ ID NO: 119056 - RNA, 19 nt, Artificial Sequence
  Description of Artificial Sequence: Synthetic oligonucleotide
ucccgcgagucccgggccc

SEQ ID NO: 119057 - RNA, 19 nt, Artificial Sequence
  Description of Artificial Sequence: Synthetic oligonucleotide
ccucccgcgccccucuucu

SEQ ID NO: 119058 - RNA, 19 nt, Artificial Sequence
  Description of Artificial Sequence: Synthetic oligonucleotide
ucggcgcgcgcgcagcaug

SEQ ID NO: 119059 - RNA, 19 nt, Artificial Sequence
  Description of Artificial Sequence: Synthetic oligonucleotide
ggcgcccccgcagguccuc

SEQ ID NO: 119060 - RNA, 19 nt, Artificial Sequence
  Description of Artificial Sequence: Synthetic oligonucleotide
cgcguucgggcuucugcuu

SEQ ID NO: 119061 - RNA, 19 nt, Artificial Sequence
  Description of Artificial Sequence: Synthetic oligonucleotide
ugccgcggcgacggcgacu

SEQ ID NO: 119062 - RNA, 19 nt, Artificial Sequence
  Description of Artificial Sequence: Synthetic oligonucleotide
uuuugccgcagcucaggaa

SEQ ID NO: 119063 - RNA, 19 nt, Artificial Sequence
  Description of Artificial Sequence: Synthetic oligonucleotide
agaaugugucugugaaaac

SEQ ID NO: 119064 - RNA, 19 nt, Artificial Sequence
  Description of Artificial Sequence: Synthetic oligonucleotide
cuacaagcuggccguaaac

SEQ ID NO: 119065 - RNA, 19 nt, Artificial Sequence
  Description of Artificial Sequence: Synthetic oligonucleotide
cugcuuugugaauaauaau

SEQ ID NO: 119066 - RNA, 19 nt, Artificial Sequence
  Description of Artificial Sequence: Synthetic oligonucleotide
ucgucaaugccaguguacu

SEQ ID NO: 119067 - RNA, 19 nt, Artificial Sequence
  Description of Artificial Sequence: Synthetic oligonucleotide
uucaguuggugcacaaaau

SEQ ID NO: 119068 - RNA, 19 nt, Artificial Sequence
  Description of Artificial Sequence: Synthetic oligonucleotide
uacugucauuugcucaaag

SEQ ID NO: 119069 - RNA, 19 nt, Artificial Sequence
  Description of Artificial Sequence: Synthetic oligonucleotide
gcuggcugccaaauguuug

SEQ ID NO: 119070 - RNA, 19 nt, Artificial Sequence
  Description of Artificial Sequence: Synthetic oligonucleotide
ggugaugaaggcagaaaug

SEQ ID NO: 119071 - RNA, 19 nt, Artificial Sequence
  Description of Artificial Sequence: Synthetic oligonucleotide
gaauggcucaaaacuuggg

SEQ ID NO: 119072 - RNA, 19 nt, Artificial Sequence
  Description of Artificial Sequence: Synthetic oligonucleotide
gagaagagcaaaaccugaa

SEQ ID NO: 119073 - RNA, 19 nt, Artificial Sequence
  Description of Artificial Sequence: Synthetic oligonucleotide
aggggcccuccagaacaau

SEQ ID NO: 119074 - RNA, 19 nt, Artificial Sequence
  Description of Artificial Sequence: Synthetic oligonucleotide
ugaugggcuuuaugauccu

SEQ ID NO: 119075 - RNA, 19 nt, Artificial Sequence
  Description of Artificial Sequence: Synthetic oligonucleotide
ugacugcgaugagagcggg

SEQ ID NO: 119076 - RNA, 19 nt, Artificial Sequence
  Description of Artificial Sequence: Synthetic oligonucleotide
gcucuuuaaggccaagcag

SEQ ID NO: 119077 - RNA, 19 nt, Artificial Sequence
  Description of Artificial Sequence: Synthetic oligonucleotide
gugcaacggcaccuccacg

SEQ ID NO: 119078 - RNA, 19 nt, Artificial Sequence
  Description of Artificial Sequence: Synthetic oligonucleotide
gugcuggugugugaacacu

SEQ ID NO: 119079 - RNA, 19 nt, Artificial Sequence
  Description of Artificial Sequence: Synthetic oligonucleotide
ugcuggggucagaagaaca

SEQ ID NO: 119080 - RNA, 19 nt, Artificial Sequence
  Description of Artificial Sequence: Synthetic oligonucleotide
agacaaggacacugaaaua

SEQ ID NO: 119081 - RNA, 19 nt, Artificial Sequence
  Description of Artificial Sequence: Synthetic oligonucleotide
aaccugcucugagcgagug

SEQ ID NO: 119082 - RNA, 19 nt, Artificial Sequence
  Description of Artificial Sequence: Synthetic oligonucleotide
gagaaccuacuggaucauc

SEQ ID NO: 119083 - RNA, 19 nt, Artificial Sequence
  Description of Artificial Sequence: Synthetic oligonucleotide
cauugaacuaaaacacaaa

SEQ ID NO: 119084 - RNA, 19 nt, Artificial Sequence
  Description of Artificial Sequence: Synthetic oligonucleotide
agcaagagaaaaaccuuau

SEQ ID NO: 119085 - RNA, 19 nt, Artificial Sequence
  Description of Artificial Sequence: Synthetic oligonucleotide
ugauaguaaaaguuugcgg

SEQ ID NO: 119086 - RNA, 19 nt, Artificial Sequence
  Description of Artificial Sequence: Synthetic oligonucleotide
gacugcacuucagaaggag

SEQ ID NO: 119087 - RNA, 19 nt, Artificial Sequence
  Description of Artificial Sequence: Synthetic oligonucleotide
gaucacaacgcguuaucaa

SEQ ID NO: 119088 - RNA, 19 nt, Artificial Sequence
  Description of Artificial Sequence: Synthetic oligonucleotide
acuggauccaaaauuuauc

SEQ ID NO: 119089 - RNA, 19 nt, Artificial Sequence
  Description of Artificial Sequence: Synthetic oligonucleotide
cacgaguauuuuguaugag

SEQ ID NO: 119090 - RNA, 19 nt, Artificial Sequence
  Description of Artificial Sequence: Synthetic oligonucleotide
gaauaauguuaucacuauu

SEQ ID NO: 119091 - RNA, 19 nt, Artificial Sequence
  Description of Artificial Sequence: Synthetic oligonucleotide
ugaucugguucaaaauucu

SEQ ID NO: 119092 - RNA, 19 nt, Artificial Sequence
  Description of Artificial Sequence: Synthetic oligonucleotide
uucucaaaaaacucagaau

SEQ ID NO: 119093 - RNA, 19 nt, Artificial Sequence
  Description of Artificial Sequence: Synthetic oligonucleotide
ugauguggacauagcugau

SEQ ID NO: 119094 - RNA, 19 nt, Artificial Sequence
  Description of Artificial Sequence: Synthetic oligonucleotide
uguggcuuauuauuuugaa

SEQ ID NO: 119095 - RNA, 19 nt, Artificial Sequence
  Description of Artificial Sequence: Synthetic oligonucleotide
aaaagauguuaaaggugaa

SEQ ID NO: 119096 - RNA, 19 nt, Artificial Sequence
  Description of Artificial Sequence: Synthetic oligonucleotide
auccuuguuucauucuaag

SEQ ID NO: 119097 - RNA, 19 nt, Artificial Sequence
  Description of Artificial Sequence: Synthetic oligonucleotide
gaaaauggaccugacagua

SEQ ID NO: 119098 - RNA, 19 nt, Artificial Sequence
  Description of Artificial Sequence: Synthetic oligonucleotide
aaauggggaacaacuggau

SEQ ID NO: 119099 - RNA, 19 nt, Artificial Sequence
  Description of Artificial Sequence: Synthetic oligonucleotide
ucuggauccuggucaaacu

SEQ ID NO: 119100 - RNA, 19 nt, Artificial Sequence
  Description of Artificial Sequence: Synthetic oligonucleotide
uuuaauuuauuauguugau

SEQ ID NO: 119101 - RNA, 19 nt, Artificial Sequence
  Description of Artificial Sequence: Synthetic oligonucleotide
ugaaaaagcaccugaauuc

SEQ ID NO: 119102 - RNA, 19 nt, Artificial Sequence
  Description of Artificial Sequence: Synthetic oligonucleotide
cucaaugcagggucuaaaa

SEQ ID NO: 119103 - RNA, 19 nt, Artificial Sequence
  Description of Artificial Sequence: Synthetic oligonucleotide
agcugguguuauugcuguu

SEQ ID NO: 119104 - RNA, 19 nt, Artificial Sequence
  Description of Artificial Sequence: Synthetic oligonucleotide
uauugugguuguggugaua

SEQ ID NO: 119105 - RNA, 19 nt, Artificial Sequence
  Description of Artificial Sequence: Synthetic oligonucleotide
agcaguuguugcuggaauu

SEQ ID NO: 119106 - RNA, 19 nt, Artificial Sequence
  Description of Artificial Sequence: Synthetic oligonucleotide
uguugugcugguuauuucc

SEQ ID NO: 119107 - RNA, 19 nt, Artificial Sequence
  Description of Artificial Sequence: Synthetic oligonucleotide
cagaaagaagagaauggca

SEQ ID NO: 119108 - RNA, 19 nt, Artificial Sequence
  Description of Artificial Sequence: Synthetic oligonucleotide
aaaguaugagaaggcugag

SEQ ID NO: 119109 - RNA, 19 nt, Artificial Sequence
  Description of Artificial Sequence: Synthetic oligonucleotide
gauaaaggagaugggugag

SEQ ID NO: 119110 - RNA, 19 nt, Artificial Sequence
  Description of Artificial Sequence: Synthetic oligonucleotide
gaugcauagggaacucaau

SEQ ID NO: 119111 - RNA, 19 nt, Artificial Sequence
  Description of Artificial Sequence: Synthetic oligonucleotide
ugcauaacuauauaauuug

SEQ ID NO: 119112 - RNA, 19 nt, Artificial Sequence
  Description of Artificial Sequence: Synthetic oligonucleotide
gaagauuauagaagaaggg

SEQ ID NO: 119113 - RNA, 19 nt, Artificial Sequence
  Description of Artificial Sequence: Synthetic oligonucleotide
gaaauagcaaauggacaca

SEQ ID NO: 119114 - RNA, 19 nt, Artificial Sequence
  Description of Artificial Sequence: Synthetic oligonucleotide
aaauuacaaaugugugugc

SEQ ID NO: 119115 - RNA, 19 nt, Artificial Sequence
  Description of Artificial Sequence: Synthetic oligonucleotide
cgugggacgaagacaucuu

SEQ ID NO: 119116 - RNA, 19 nt, Artificial Sequence
  Description of Artificial Sequence: Synthetic oligonucleotide
uugaaggucaugaguuugu

SEQ ID NO: 119117 - RNA, 19 nt, Artificial Sequence
  Description of Artificial Sequence: Synthetic oligonucleotide
uuaguuuaacaucauauau

SEQ ID NO: 119118 - RNA, 19 nt, Artificial Sequence
  Description of Artificial Sequence: Synthetic oligonucleotide
uuuguaauagugaaaccug

SEQ ID NO: 119119 - RNA, 19 nt, Artificial Sequence
  Description of Artificial Sequence: Synthetic oligonucleotide
guacucaaaauauaagcag

SEQ ID NO: 119120 - RNA, 19 nt, Artificial Sequence
  Description of Artificial Sequence: Synthetic oligonucleotide
gcuugaaacuggcuuuacc

SEQ ID NO: 119121 - RNA, 19 nt, Artificial Sequence
  Description of Artificial Sequence: Synthetic oligonucleotide
caaucuugaaauuugacca

SEQ ID NO: 119122 - RNA, 19 nt, Artificial Sequence
  Description of Artificial Sequence: Synthetic oligonucleotide
acaagugucuuauauaugc

SEQ ID NO: 119123 - RNA, 19 nt, Artificial Sequence
  Description of Artificial Sequence: Synthetic oligonucleotide
cagaucuaauguaaaaucc

SEQ ID NO: 119124 - RNA, 19 nt, Artificial Sequence
  Description of Artificial Sequence: Synthetic oligonucleotide
cagaacuuggacuccaucg

SEQ ID NO: 119125 - RNA, 19 nt, Artificial Sequence
  Description of Artificial Sequence: Synthetic oligonucleotide
guuaaaauuauuuaugugu

SEQ ID NO: 119126 - RNA, 19 nt, Artificial Sequence
  Description of Artificial Sequence: Synthetic oligonucleotide
uaacauucaaaugugugca

SEQ ID NO: 119127 - RNA, 19 nt, Artificial Sequence
  Description of Artificial Sequence: Synthetic oligonucleotide
auuaaauaugcuuccacag

SEQ ID NO: 119128 - RNA, 19 nt, Artificial Sequence
  Description of Artificial Sequence: Synthetic oligonucleotide
guaaaaucugaaaaacuga

SEQ ID NO: 119129 - RNA, 19 nt, Artificial Sequence
  Description of Artificial Sequence: Synthetic oligonucleotide
auuugugauugaaagcugc

SEQ ID NO: 119130 - RNA, 19 nt, Artificial Sequence
  Description of Artificial Sequence: Synthetic oligonucleotide
ccuuucuauuuacuugagu

SEQ ID NO: 119131 - RNA, 19 nt, Artificial Sequence
  Description of Artificial Sequence: Synthetic oligonucleotide
ucuuguacauacauacuuu

SEQ ID NO: 119132 - RNA, 19 nt, Artificial Sequence
  Description of Artificial Sequence: Synthetic oligonucleotide
uuuuaugagcuaugaaaua

SEQ ID NO: 119133 - RNA, 19 nt, Artificial Sequence
  Description of Artificial Sequence: Synthetic oligonucleotide
aauaaaacauuuuaaacug

SEQ ID NO: 119134 - RNA, 25 nt, Artificial Sequence
  Description of Artificial Sequence: Synthetic oligonucleotide
cggcgagcgagcaccuucgacgcgg

SEQ ID NO: 119135 - RNA, 25 nt, Artificial Sequence
  Description of Artificial Sequence: Synthetic oligonucleotide
guccggggacccccucgucgcuguc

SEQ ID NO: 119136 - RNA, 25 nt, Artificial Sequence
  Description of Artificial Sequence: Synthetic oligonucleotide
ccucccgacgcggacccgcgugccc

SEQ ID NO: 119137 - RNA, 25 nt, Artificial Sequence
  Description of Artificial Sequence: Synthetic oligonucleotide
ccaggccucgcgcugcccggccggc

SEQ ID NO: 119138 - RNA, 25 nt, Artificial Sequence
  Description of Artificial Sequence: Synthetic oligonucleotide
cuccucgugucccacucccggcgca

SEQ ID NO: 119139 - RNA, 25 nt, Artificial Sequence
  Description of Artificial Sequence: Synthetic oligonucleotide
acgcccucccgcgagucccgggccc

SEQ ID NO: 119140 - RNA, 25 nt, Artificial Sequence
  Description of Artificial Sequence: Synthetic oligonucleotide
ccucccgcgccccucuucucggcgc

SEQ ID NO: 119141 - RNA, 25 nt, Artificial Sequence
  Description of Artificial Sequence: Synthetic oligonucleotide
cgcgcgcagcauggcgcccccgcag

SEQ ID NO: 119142 - RNA, 25 nt, Artificial Sequence
  Description of Artificial Sequence: Synthetic oligonucleotide
gguccucgcguucgggcuucugcuu

SEQ ID NO: 119143 - RNA, 25 nt, Artificial Sequence
  Description of Artificial Sequence: Synthetic oligonucleotide
ugccgcggcgacggcgacuuuugcc

SEQ ID NO: 119144 - RNA, 25 nt, Artificial Sequence
  Description of Artificial Sequence: Synthetic oligonucleotide
cgcagcucaggaagaaugugucugu

SEQ ID NO: 119145 - RNA, 25 nt, Artificial Sequence
  Description of Artificial Sequence: Synthetic oligonucleotide
ugaaaacuacaagcuggccguaaac

SEQ ID NO: 119146 - RNA, 25 nt, Artificial Sequence
  Description of Artificial Sequence: Synthetic oligonucleotide
cugcuuugugaauaauaaucgucaa

SEQ ID NO: 119147 - RNA, 25 nt, Artificial Sequence
  Description of Artificial Sequence: Synthetic oligonucleotide
augccaguguacuucaguuggugca

SEQ ID NO: 119148 - RNA, 25 nt, Artificial Sequence
  Description of Artificial Sequence: Synthetic oligonucleotide
acaaaauacugucauuugcucaaag

SEQ ID NO: 119149 - RNA, 25 nt, Artificial Sequence
  Description of Artificial Sequence: Synthetic oligonucleotide
gcuggcugccaaauguuuggugaug

SEQ ID NO: 119150 - RNA, 25 nt, Artificial Sequence
  Description of Artificial Sequence: Synthetic oligonucleotide
gaaggcagaaaugaauggcucaaaa

SEQ ID NO: 119151 - RNA, 25 nt, Artificial Sequence
  Description of Artificial Sequence: Synthetic oligonucleotide
acuugggagaagagcaaaaccugaa

SEQ ID NO: 119152 - RNA, 25 nt, Artificial Sequence
  Description of Artificial Sequence: Synthetic oligonucleotide
aggggcccuccagaacaaugauggg

SEQ ID NO: 119153 - RNA, 25 nt, Artificial Sequence
  Description of Artificial Sequence: Synthetic oligonucleotide
gcuuuaugauccugacugcgaugag

SEQ ID NO: 119154 - RNA, 25 nt, Artificial Sequence
  Description of Artificial Sequence: Synthetic oligonucleotide
gagcgggcucuuuaaggccaagcag

SEQ ID NO: 119155 - RNA, 25 nt, Artificial Sequence
  Description of Artificial Sequence: Synthetic oligonucleotide
gugcaacggcaccuccacgugcugg

SEQ ID NO: 119156 - RNA, 25 nt, Artificial Sequence
  Description of Artificial Sequence: Synthetic oligonucleotide
gugugugaacacugcuggggucaga

SEQ ID NO: 119157 - RNA, 25 nt, Artificial Sequence
  Description of Artificial Sequence: Synthetic oligonucleotide
aagaacagacaaggacacugaaaua

SEQ ID NO: 119158 - RNA, 25 nt, Artificial Sequence
  Description of Artificial Sequence: Synthetic oligonucleotide
aaccugcucugagcgagugagaacc

SEQ ID NO: 119159 - RNA, 25 nt, Artificial Sequence
  Description of Artificial Sequence: Synthetic oligonucleotide
cuacuggaucaucauugaacuaaaa

SEQ ID NO: 119160 - RNA, 25 nt, Artificial Sequence
  Description of Artificial Sequence: Synthetic oligonucleotide
acacaaagcaagagaaaaaccuuau

SEQ ID NO: 119161 - RNA, 25 nt, Artificial Sequence
  Description of Artificial Sequence: Synthetic oligonucleotide
ugauaguaaaaguuugcggacugca

SEQ ID NO: 119162 - RNA, 25 nt, Artificial Sequence
  Description of Artificial Sequence: Synthetic oligonucleotide
acuucagaaggagaucacaacgcgu

SEQ ID NO: 119163 - RNA, 25 nt, Artificial Sequence
  Description of Artificial Sequence: Synthetic oligonucleotide
uuaucaacuggauccaaaauuuauc

SEQ ID NO: 119164 - RNA, 25 nt, Artificial Sequence
  Description of Artificial Sequence: Synthetic oligonucleotide
cacgaguauuuuguaugagaauaau

SEQ ID NO: 119165 - RNA, 25 nt, Artificial Sequence
  Description of Artificial Sequence: Synthetic oligonucleotide
uguuaucacuauugaucugguucaa

SEQ ID NO: 119166 - RNA, 25 nt, Artificial Sequence
  Description of Artificial Sequence: Synthetic oligonucleotide
aaauucuucucaaaaaacucagaau

SEQ ID NO: 119167 - RNA, 25 nt, Artificial Sequence
  Description of Artificial Sequence: Synthetic oligonucleotide
ugauguggacauagcugauguggcu

SEQ ID NO: 119168 - RNA, 25 nt, Artificial Sequence
  Description of Artificial Sequence: Synthetic oligonucleotide
uuauuauuuugaaaaagauguuaaa

SEQ ID NO: 119169 - RNA, 25 nt, Artificial Sequence
  Description of Artificial Sequence: Synthetic oligonucleotide
aggugaauccuuguuucauucuaag

SEQ ID NO: 119170 - RNA, 25 nt, Artificial Sequence
  Description of Artificial Sequence: Synthetic oligonucleotide
gaaaauggaccugacaguaaauggg

SEQ ID NO: 119171 - RNA, 25 nt, Artificial Sequence
  Description of Artificial Sequence: Synthetic oligonucleotide
ggaacaacuggaucuggauccuggu

SEQ ID NO: 119172 - RNA, 25 nt, Artificial Sequence
  Description of Artificial Sequence: Synthetic oligonucleotide
ucaaacuuuaauuuauuauguugau

SEQ ID NO: 119173 - RNA, 25 nt, Artificial Sequence
  Description of Artificial Sequence: Synthetic oligonucleotide
ugaaaaagcaccugaauucucaaug

SEQ ID NO: 119174 - RNA, 25 nt, Artificial Sequence
  Description of Artificial Sequence: Synthetic oligonucleotide
gcagggucuaaaagcugguguuauu

SEQ ID NO: 119175 - RNA, 25 nt, Artificial Sequence
  Description of Artificial Sequence: Synthetic oligonucleotide
ugcuguuauugugguuguggugaua

SEQ ID NO: 119176 - RNA, 25 nt, Artificial Sequence
  Description of Artificial Sequence: Synthetic oligonucleotide
agcaguuguugcuggaauuguugug

SEQ ID NO: 119177 - RNA, 25 nt, Artificial Sequence
  Description of Artificial Sequence: Synthetic oligonucleotide
gcugguuauuuccagaaagaagaga

SEQ ID NO: 119178 - RNA, 25 nt, Artificial Sequence
  Description of Artificial Sequence: Synthetic oligonucleotide
aauggcaaaguaugagaaggcugag

SEQ ID NO: 119179 - RNA, 25 nt, Artificial Sequence
  Description of Artificial Sequence: Synthetic oligonucleotide
gauaaaggagaugggugagaugcau

SEQ ID NO: 119180 - RNA, 25 nt, Artificial Sequence
  Description of Artificial Sequence: Synthetic oligonucleotide
uagggaacucaaugcauaacuauau

SEQ ID NO: 119181 - RNA, 25 nt, Artificial Sequence
  Description of Artificial Sequence: Synthetic oligonucleotide
uaauuugaagauuauagaagaaggg

SEQ ID NO: 119182 - RNA, 25 nt, Artificial Sequence
  Description of Artificial Sequence: Synthetic oligonucleotide
gaaauagcaaauggacacaaauuac

SEQ ID NO: 119183 - RNA, 25 nt, Artificial Sequence
  Description of Artificial Sequence: Synthetic oligonucleotide
caaaugugugugcgugggacgaaga

SEQ ID NO: 119184 - RNA, 25 nt, Artificial Sequence
  Description of Artificial Sequence: Synthetic oligonucleotide
acaucuuugaaggucaugaguuugu

SEQ ID NO: 119185 - RNA, 25 nt, Artificial Sequence
  Description of Artificial Sequence: Synthetic oligonucleotide
uuaguuuaacaucauauauuuguaa

SEQ ID NO: 119186 - RNA, 25 nt, Artificial Sequence
  Description of Artificial Sequence: Synthetic oligonucleotide
auagugaaaccuguacucaaaauau

SEQ ID NO: 119187 - RNA, 25 nt, Artificial Sequence
  Description of Artificial Sequence: Synthetic oligonucleotide
uaagcagcuugaaacuggcuuuacc

SEQ ID NO: 119188 - RNA, 25 nt, Artificial Sequence
  Description of Artificial Sequence: Synthetic oligonucleotide
caaucuugaaauuugaccacaagug

SEQ ID NO: 119189 - RNA, 25 nt, Artificial Sequence
  Description of Artificial Sequence: Synthetic oligonucleotide
gucuuauauaugcagaucuaaugua

SEQ ID NO: 119190 - RNA, 25 nt, Artificial Sequence
  Description of Artificial Sequence: Synthetic oligonucleotide
aaaauccagaacuuggacuccaucg

SEQ ID NO: 119191 - RNA, 25 nt, Artificial Sequence
  Description of Artificial Sequence: Synthetic oligonucleotide
guuaaaauuauuuauguguaacauu

SEQ ID NO: 119192 - RNA, 25 nt, Artificial Sequence
  Description of Artificial Sequence: Synthetic oligonucleotide
ucaaaugugugcauuaaauaugcuu

SEQ ID NO: 119193 - RNA, 25 nt, Artificial Sequence
  Description of Artificial Sequence: Synthetic oligonucleotide
uccacaguaaaaucugaaaaacuga

SEQ ID NO: 119194 - RNA, 25 nt, Artificial Sequence
  Description of Artificial Sequence: Synthetic oligonucleotide
auuugugauugaaagcugccuuucu

SEQ ID NO: 119195 - RNA, 25 nt, Artificial Sequence
  Description of Artificial Sequence: Synthetic oligonucleotide
uauuuacuugagucuuguacauaca

SEQ ID NO: 119196 - RNA, 25 nt, Artificial Sequence
  Description of Artificial Sequence: Synthetic oligonucleotide
auacuuuuuuaugagcuaugaaaua

SEQ ID NO: 119197 - RNA, 25 nt, Artificial Sequence
  Description of Artificial Sequence: Synthetic oligonucleotide
cuaugaaauaaaacauuuuaaacug

SEQ ID NO: 119198 - DNA, 21 bp, Artificial Sequence
  Description of Artificial Sequence: Synthetic oligonucleotide
  Description of Combined DNA/RNA Molecule: Synthetic oligonucleotide
cuacacaaaucagcgauuutt

SEQ ID NO: 119199 - DNA, 21 bp, Artificial Sequence
  Description of Artificial Sequence: Synthetic oligonucleotide
  Description of Combined DNA/RNA Molecule: Synthetic oligonucleotide
aaaucgcugauuuguguagtt

SEQ ID NO: 119200 - DNA, 25 bp, Artificial Sequence
  Description of Artificial Sequence: Synthetic oligonucleotide
  Description of Combined DNA/RNA Molecule: Synthetic oligonucleotide
cuacacaaaucagcgauuuccaugt

SEQ ID NO: 119201 - RNA, 27 nt, Artificial Sequence
  Description of Artificial Sequence: Synthetic oligonucleotide
acauggaaaucgcugauuuguguaguc

SEQ ID NO: 119202 - RNA, 13 nt, Artificial Sequence
  Description of Artificial Sequence: Synthetic oligonucleotide
cuacacaaaucag

SEQ ID NO: 119203 - DNA, 11 bp, Artificial Sequence
  Description of Artificial Sequence: Synthetic oligonucleotide
  Description of Combined DNA/RNA Molecule: Synthetic oligonucleotide
gauuuccaugt

SEQ ID NO: 119204 - DNA, 21 bp, Artificial Sequence
  Description of Artificial Sequence: Synthetic oligonucleotide
  Description of Combined DNA/RNA Molecule: Synthetic oligonucleotide
ggaucuuauuucuucggagtt

SEQ ID NO: 119205 - DNA, 21 bp, Artificial Sequence
  Description of Artificial Sequence: Synthetic oligonucleotide
  Description of Combined DNA/RNA Molecule: Synthetic oligonucleotide
cuccgaagaaauaagaucctt

SEQ ID NO: 119206 - RNA, 11 nt, Artificial Sequence
  Description of Artificial Sequence: Synthetic oligonucleotide
ggaucuuauuu

SEQ ID NO: 119207 - DNA, 10 bp, Artificial Sequence
  Description of Artificial Sequence: Synthetic oligonucleotide
  Description of Combined DNA/RNA Molecule: Synthetic oligonucleotide
cuucggagtt

SEQ ID NO: 119208 - RNA, 27 nt, Artificial Sequence
  Description of Artificial Sequence: Synthetic oligonucleotide
cauugucuccgaagaaauaagauccuu

SEQ ID NO: 119209 - RNA, 8 nt, Artificial Sequence
  Description of Artificial Sequence: Synthetic oligonucleotide
  modified_base (2): LNA-G
ggaucuua

SEQ ID NO: 119210 - DNA, 17 bp, Artificial Sequence
  Description of Artificial Sequence: Synthetic oligonucleotide
  Description of Combined DNA/RNA Molecule: Synthetic oligonucleotide
uuucuucggagacaatg

SEQ ID NO: 119211 - DNA, 16 bp, Artificial Sequence
  Description of Artificial Sequence: Synthetic oligonucleotide
  Description of Combined DNA/RNA Molecule: Synthetic oligonucleotide
uucuucggagacaatg

SEQ ID NO: 119212 - DNA, 15 bp, Artificial Sequence
  Description of Artificial Sequence: Synthetic oligonucleotide
  Description of Combined DNA/RNA Molecule: Synthetic oligonucleotide
ucuucggagacaatg

SEQ ID NO: 119213 - DNA, 14 bp, Artificial Sequence
  Description of Artificial Sequence: Synthetic oligonucleotide
  Description of Combined DNA/RNA Molecule: Synthetic oligonucleotide
cuucggagacaatg

SEQ ID NO: 119214 - DNA, 13 bp, Artificial Sequence
  Description of Artificial Sequence: Synthetic oligonucleotide
  Description of Combined DNA/RNA Molecule: Synthetic oligonucleotide
uucggagacaatg

SEQ ID NO: 119215 - DNA, 12 bp, Artificial Sequence
  Description of Artificial Sequence: Synthetic oligonucleotide
  Description of Combined DNA/RNA Molecule: Synthetic oligonucleotide
ucggagacaatg

SEQ ID NO: 119216 - DNA, 11 bp, Artificial Sequence
  Description of Artificial Sequence: Synthetic oligonucleotide
  Description of Combined DNA/RNA Molecule: Synthetic oligonucleotide
cggagacaatg

SEQ ID NO: 119217 - RNA, 9 nt, Artificial Sequence
  Description of Artificial Sequence: Synthetic oligonucleotide
  modified_base (2): LNA-G
ggaucuuau

SEQ ID NO: 119218 - RNA, 10 nt, Artificial Sequence
  Description of Artificial Sequence: Synthetic oligonucleotide
  modified_base (2): LNA-G
ggaucuuauu

SEQ ID NO: 119219 - RNA, 11 nt, Artificial Sequence
  Description of Artificial Sequence: Synthetic oligonucleotide
  modified_base (2): LNA-G
ggaucuuauuu

SEQ ID NO: 119220 - RNA, 12 nt, Artificial Sequence
  Description of Artificial Sequence: Synthetic oligonucleotide
  modified_base (2): LNA-G
ggaucuuauuuc

SEQ ID NO: 119221 - RNA, 8 nt, Artificial Sequence
  Description of Artificial Sequence: Synthetic oligonucleotide
  modified_base (3): LNA-A
cuacacaa

SEQ ID NO: 119222 - DNA, 13 bp, Artificial Sequence
  Description of Artificial Sequence: Synthetic oligonucleotide
  Description of Combined DNA/RNA Molecule: Synthetic oligonucleotide
  modified_base (8): LNA-A
aucagcgauuutt

SEQ ID NO: 119223 - DNA, 12 bp, Artificial Sequence
  Description of Artificial Sequence: Synthetic oligonucleotide
  Description of Combined DNA/RNA Molecule: Synthetic oligonucleotide
  modified_base (7): LNA-A
ucagcgauuutt

SEQ ID NO: 119224 - DNA, 11 bp, Artificial Sequence
  Description of Artificial Sequence: Synthetic oligonucleotide
  Description of Combined DNA/RNA Molecule: Synthetic oligonucleotide
  modified_base (6): LNA-A
cagcgauuutt

SEQ ID NO: 119225 - DNA, 10 bp, Artificial Sequence
  Description of Artificial Sequence: Synthetic oligonucleotide
  Description of Combined DNA/RNA Molecule: Synthetic oligonucleotide
  modified_base (5): LNA-A
agcgauuutt

SEQ ID NO: 119226 - DNA, 9 bp, Artificial Sequence
  Description of Artificial Sequence: Synthetic oligonucleotide
  Description of Combined DNA/RNA Molecule: Synthetic oligonucleotide
  modified_base (4): LNA-A
gcgauuutt

SEQ ID NO: 119227 - DNA, 8 bp, Artificial Sequence
  Description of Artificial Sequence: Synthetic oligonucleotide
  Description of Combined DNA/RNA Molecule: Synthetic oligonucleotide
  modified_base (3): LNA-A
cgauuutt

SEQ ID NO: 119228 - DNA, 7 bp, Artificial Sequence
  Description of Artificial Sequence: Synthetic oligonucleotide
  Description of Combined DNA/RNA Molecule: Synthetic oligonucleotide
  modified_base (2): LNA-A
gauuutt

SEQ ID NO: 119229 - RNA, 9 nt, Artificial Sequence
  Description of Artificial Sequence: Synthetic oligonucleotide
  modified_base (3): LNA-A
cuacacaaa

SEQ ID NO: 119230 - RNA, 10 nt, Artificial Sequence
  Description of Artificial Sequence: Synthetic oligonucleotide
  modified_base (3): LNA-A
cuacacaaau

SEQ ID NO: 119231 - RNA, 11 nt, Artificial Sequence
  Description of Artificial Sequence: Synthetic oligonucleotide
  modified_base (3): LNA-A
cuacacaaauc

SEQ ID NO: 119232 - RNA, 12 nt, Artificial Sequence
  Description of Artificial Sequence: Synthetic oligonucleotide
  modified_base (3): LNA-A
cuacacaaauca

SEQ ID NO: 119233 - RNA, 13 nt, Artificial Sequence
  Description of Artificial Sequence: Synthetic oligonucleotide
  modified_base (3): LNA-A
cuacacaaaucag

SEQ ID NO: 119234 - RNA, 14 nt, Artificial Sequence
  Description of Artificial Sequence: Synthetic oligonucleotide
  modified_base (3): LNA-A
cuacacaaaucagc

SEQ ID NO: 119235 - RNA, 13 nt, Artificial Sequence
  Description of Artificial Sequence: Synthetic oligonucleotide
  modified_base (2): LNA-G
ggaucuuauuucu

SEQ ID NO: 119236 - RNA, 14 nt, Artificial Sequence
  Description of Artificial Sequence: Synthetic oligonucleotide
  modified_base (2): LNA-G
ggaucuuauuucuu

SEQ ID NO: 119237 - RNA, 8 nt, Artificial Sequence
  Description of Artificial Sequence: Synthetic oligonucleotide
  modified_base (2): LNA-G
  modified_base (8): LNA-A
ggaucuua

SEQ ID NO: 119238 - RNA, 9 nt, Artificial Sequence
  Description of Artificial Sequence: Synthetic oligonucleotide
  modified_base (2): LNA-G
  modified_base (9): LNA-U
ggaucuuau

SEQ ID NO: 119239 - RNA, 10 nt, Artificial Sequence
  Description of Artificial Sequence: Synthetic oligonucleotide
  modified_base (2): LNA-G
  modified_base (10): LNA-U
ggaucuuauu

SEQ ID NO: 119240 - RNA, 11 nt, Artificial Sequence
  Description of Artificial Sequence: Synthetic oligonucleotide
  modified_base (2): LNA-G
  modified_base (11): LNA-U
ggaucuuauuu

SEQ ID NO: 119241 - RNA, 12 nt, Artificial Sequence
  Description of Artificial Sequence: Synthetic oligonucleotide
  modified_base (2): LNA-G
  modified_base (12): LNA-C
ggaucuuauuuc

SEQ ID NO: 119242 - RNA, 13 nt, Artificial Sequence
  Description of Artificial Sequence: Synthetic oligonucleotide
  modified_base (2): LNA-G
  modified_base (13): LNA-U
ggaucuuauuucu

SEQ ID NO: 119243 - RNA, 14 nt, Artificial Sequence
  Description of Artificial Sequence: Synthetic oligonucleotide
  modified_base (2): LNA-G
  modified_base (14): LNA-U
ggaucuuauuucuu

SEQ ID NO: 119244 - DNA, 13 bp, Artificial Sequence
  Description of Artificial Sequence: Synthetic oligonucleotide
  Description of Combined DNA/RNA Molecule: Synthetic oligonucleotide
  modified_base (8): LNA-G
uuucuucggagtt

SEQ ID NO: 119245 - DNA, 12 bp, Artificial Sequence
  Description of Artificial Sequence: Synthetic oligonucleotide
  Description of Combined DNA/RNA Molecule: Synthetic oligonucleotide
  modified_base (7): LNA-G
uucuucggagtt

SEQ ID NO: 119246 - DNA, 11 bp, Artificial Sequence
  Description of Artificial Sequence: Synthetic oligonucleotide
  Description of Combined DNA/RNA Molecule: Synthetic oligonucleotide
  modified_base (6): LNA-G
ucuucggagtt

SEQ ID NO: 119247 - DNA, 10 bp, Artificial Sequence
  Description of Artificial Sequence: Synthetic oligonucleotide
  Description of Combined DNA/RNA Molecule: Synthetic oligonucleotide
  modified_base (5): LNA-G
cuucggagtt

SEQ ID NO: 119248 - DNA, 9 bp, Artificial Sequence
  Description of Artificial Sequence: Synthetic oligonucleotide
  Description of Combined DNA/RNA Molecule: Synthetic oligonucleotide
  modified_base (4): LNA-G
uucggagtt

SEQ ID NO: 119249 - DNA, 8 bp, Artificial Sequence
  Description of Artificial Sequence: Synthetic oligonucleotide
  Description of Combined DNA/RNA Molecule: Synthetic oligonucleotide
  modified_base (3): LNA-G
ucggagtt

SEQ ID NO: 119250 - DNA, 7 bp, Artificial Sequence
  Description of Artificial Sequence: Synthetic oligonucleotide
  Description of Combined DNA/RNA Molecule: Synthetic oligonucleotide
  modified_base (2): LNA-G
cggagtt

SEQ ID NO: 119251 - DNA, 13 bp, Artificial Sequence
  Description of Artificial Sequence: Synthetic oligonucleotide
  Description of Combined DNA/RNA Molecule: Synthetic oligonucleotide
  modified_base (1): LNA-U
  modified_base (8): LNA-G
uuucuucggagtt

SEQ ID NO: 119252 - DNA, 12 bp, Artificial Sequence
  Description of Artificial Sequence: Synthetic oligonucleotide
  Description of Combined DNA/RNA Molecule: Synthetic oligonucleotide
  modified_base (1): LNA-U
  modified_base (7): LNA-G
uucuucggagtt

SEQ ID NO: 119253 - DNA, 11 bp, Artificial Sequence
  Description of Artificial Sequence: Synthetic oligonucleotide
  Description of Combined DNA/RNA Molecule: Synthetic oligonucleotide
  modified_base (1): LNA-U
  modified_base (6): LNA-G
ucuucggagtt

SEQ ID NO: 119254 - DNA, 10 bp, Artificial Sequence
  Description of Artificial Sequence: Synthetic oligonucleotide
  Description of Combined DNA/RNA Molecule: Synthetic oligonucleotide
  modified_base (1): LNA-C
  modified_base (5): LNA-G
cuucggagtt

SEQ ID NO: 119255 - DNA, 9 bp, Artificial Sequence
  Description of Artificial Sequence: Synthetic oligonucleotide
  Description of Combined DNA/RNA Molecule: Synthetic oligonucleotide
  modified_base (1): LNA-U
  modified_base (4): LNA-G
uucggagtt

SEQ ID NO: 119256 - DNA, 8 bp, Artificial Sequence
  Description of Artificial Sequence: Synthetic oligonucleotide
  Description of Combined DNA/RNA Molecule: Synthetic oligonucleotide
  modified_base (1): LNA-U
  modified_base (3): LNA-G
ucggagtt

SEQ ID NO: 119257 - DNA, 7 bp, Artificial Sequence
  Description of Artificial Sequence: Synthetic oligonucleotide
  Description of Combined DNA/RNA Molecule: Synthetic oligonucleotide
  modified_base (1): LNA-C
  modified_base (2): LNA-G
cggagtt

SEQ ID NO: 119258 - DNA, 21 bp, Artificial Sequence
  Description of Artificial Sequence: Synthetic oligonucleotide
  Description of Combined DNA/RNA Molecule: Synthetic oligonucleotide
  modified_base (2): LNA-G
  modified_base (16): LNA-G
ggaucuuauuucuucggagtt

SEQ ID NO: 119259 - DNA, 25 bp, Artificial Sequence
  Description of Artificial Sequence: Synthetic oligonucleotide
  Description of Combined DNA/RNA Molecule: Synthetic oligonucleotide
ggaucuuauuucuucggagacaatg

SEQ ID NO: 119260 - RNA, 25 nt, Artificial Sequence
  Description of Artificial Sequence: Synthetic oligonucleotide
guauuuugaugaggaguucacggcc

SEQ ID NO: 119261 - RNA, 25 nt, Artificial Sequence
  Description of Artificial Sequence: Synthetic oligonucleotide
ggcccagaugaucaccaucacacca

SEQ ID NO: 119262 - RNA, 25 nt, Artificial Sequence
  Description of Artificial Sequence: Synthetic oligonucleotide
gggaagaaaacuauccugcggguuu

SEQ ID NO: 119263 - RNA, 25 nt, Artificial Sequence
  Description of Artificial Sequence: Synthetic oligonucleotide
guuuuaauuuauuucauccaguuug

SEQ ID NO: 119264 - RNA, 25 nt, Artificial Sequence
  Description of Artificial Sequence: Synthetic oligonucleotide
acguagggaaauguuaaggacuucu

SEQ ID NO: 119265 - RNA, 25 nt, Artificial Sequence
  Description of Artificial Sequence: Synthetic oligonucleotide
ccaggguuuacccagugggacagag

SEQ ID NO: 119266 - RNA, 25 nt, Artificial Sequence
  Description of Artificial Sequence: Synthetic oligonucleotide
agcaagguuuaaauuuguuauugug

SEQ ID NO: 119267 - RNA, 25 nt, Artificial Sequence
  Description of Artificial Sequence: Synthetic oligonucleotide
uguauuauguuguucaaaugcauuu

SEQ ID NO: 119268 - RNA, 25 nt, Artificial Sequence
  Description of Artificial Sequence: Synthetic oligonucleotide
uuuuaaucuuugugacaggaaagcc

SEQ ID NO: 119269 - RNA, 25 nt, Artificial Sequence
  Description of Artificial Sequence: Synthetic oligonucleotide
uuaaucuuugugacaggaaagcccu

SEQ ID NO: 119270 - RNA, 25 nt, Artificial Sequence
  Description of Artificial Sequence: Synthetic oligonucleotide
gcugcuuaugucucccagcauggcc

SEQ ID NO: 119271 - RNA, 25 nt, Artificial Sequence
  Description of Artificial Sequence: Synthetic oligonucleotide
aaguguuucagaagcuucucccuga

SEQ ID NO: 119272 - RNA, 25 nt, Artificial Sequence
  Description of Artificial Sequence: Synthetic oligonucleotide
gaccaucaauaaggaagaagcccuu

SEQ ID NO: 119273 - RNA, 25 nt, Artificial Sequence
  Description of Artificial Sequence: Synthetic oligonucleotide
ccaucaauaaggaagaagcccuuca

SEQ ID NO: 119274 - RNA, 25 nt, Artificial Sequence
  Description of Artificial Sequence: Synthetic oligonucleotide
ucaauaaggaagaagcccuucagcg

SEQ ID NO: 119275 - RNA, 25 nt, Artificial Sequence
  Description of Artificial Sequence: Synthetic oligonucleotide
aauaaggaagaagcccuucagcggc

SEQ ID NO: 119276 - RNA, 25 nt, Artificial Sequence
  Description of Artificial Sequence: Synthetic oligonucleotide
aggaagaagcccuucagcggccagu

SEQ ID NO: 119277 - RNA, 25 nt, Artificial Sequence
  Description of Artificial Sequence: Synthetic oligonucleotide
gcauaacuaaaggugaaaagcuccg

SEQ ID NO: 119278 - RNA, 25 nt, Artificial Sequence
  Description of Artificial Sequence: Synthetic oligonucleotide
cauaacuaaaggugaaaagcuccgg

SEQ ID NO: 119279 - RNA, 25 nt, Artificial Sequence
  Description of Artificial Sequence: Synthetic oligonucleotide
cuacaucacgccagucaacagucug

SEQ ID NO: 119280 - RNA, 25 nt, Artificial Sequence
  Description of Artificial Sequence: Synthetic oligonucleotide
acuggauuuaagcagaguucaaaag

SEQ ID NO: 119281 - RNA, 25 nt, Artificial Sequence
  Description of Artificial Sequence: Synthetic oligonucleotide
cuggauuuaagcagaguucaaaagc

SEQ ID NO: 119282 - RNA, 25 nt, Artificial Sequence
  Description of Artificial Sequence: Synthetic oligonucleotide
gauuuaagcagaguucaaaagcccu

SEQ ID NO: 119283 - RNA, 25 nt, Artificial Sequence
  Description of Artificial Sequence: Synthetic oligonucleotide
auuuaagcagaguucaaaagcccuu

SEQ ID NO: 119284 - RNA, 25 nt, Artificial Sequence
  Description of Artificial Sequence: Synthetic oligonucleotide
uuaagcagaguucaaaagcccuuca

SEQ ID NO: 119285 - RNA, 25 nt, Artificial Sequence
  Description of Artificial Sequence: Synthetic oligonucleotide
uaagcagaguucaaaagcccuucag

SEQ ID NO: 119286 - RNA, 25 nt, Artificial Sequence
  Description of Artificial Sequence: Synthetic oligonucleotide
agcagaguucaaaagcccuucagcg

SEQ ID NO: 119287 - RNA, 25 nt, Artificial Sequence
  Description of Artificial Sequence: Synthetic oligonucleotide
cucagggucugagugaagccgcucg

SEQ ID NO: 119288 - RNA, 25 nt, Artificial Sequence
  Description of Artificial Sequence: Synthetic oligonucleotide
caagcaacuacaucacgccagucaa

SEQ ID NO: 119289 - RNA, 25 nt, Artificial Sequence
  Description of Artificial Sequence: Synthetic oligonucleotide
aucaauggcagcuucuuggugcgug

SEQ ID NO: 119290 - RNA, 25 nt, Artificial Sequence
  Description of Artificial Sequence: Synthetic oligonucleotide
uuccagcccacauuggauucaucag

SEQ ID NO: 119291 - RNA, 25 nt, Artificial Sequence
  Description of Artificial Sequence: Synthetic oligonucleotide
cagcugagaauguggaauaccuaag

SEQ ID NO: 119292 - RNA, 25 nt, Artificial Sequence
  Description of Artificial Sequence: Synthetic oligonucleotide
aacguaucuccuaauuugaggcuca

SEQ ID NO: 119293 - RNA, 25 nt, Artificial Sequence
  Description of Artificial Sequence: Synthetic oligonucleotide
ccuaaaauaauuucucuacaauugg

SEQ ID NO: 119294 - RNA, 25 nt, Artificial Sequence
  Description of Artificial Sequence: Synthetic oligonucleotide
uggaagauucagcuaguuaggagcc

SEQ ID NO: 119295 - RNA, 25 nt, Artificial Sequence
  Description of Artificial Sequence: Synthetic oligonucleotide
uuaaacucuccuagucaauauccac

SEQ ID NO: 119296 - RNA, 25 nt, Artificial Sequence
  Description of Artificial Sequence: Synthetic oligonucleotide
cagccuacaguuauguucagucaca

SEQ ID NO: 119297 - RNA, 25 nt, Artificial Sequence
  Description of Artificial Sequence: Synthetic oligonucleotide
guuauguucagucacacacacauac

SEQ ID NO: 119298 - RNA, 25 nt, Artificial Sequence
  Description of Artificial Sequence: Synthetic oligonucleotide
cacauacaaaauguuccuuuugcuu

SEQ ID NO: 119299 - RNA, 25 nt, Artificial Sequence
  Description of Artificial Sequence: Synthetic oligonucleotide
uccuuuugcuuuuaaaguaauuuuu

SEQ ID NO: 119300 - RNA, 25 nt, Artificial Sequence
  Description of Artificial Sequence: Synthetic oligonucleotide
ugaccugugaagcaacagucaaugg

SEQ ID NO: 119301 - RNA, 25 nt, Artificial Sequence
  Description of Artificial Sequence: Synthetic oligonucleotide
cuaucucacacaucgacaaaccaau

SEQ ID NO: 119302 - RNA, 25 nt, Artificial Sequence
  Description of Artificial Sequence: Synthetic oligonucleotide
uguccucaauuguacugcuaccacu

SEQ ID NO: 119303 - RNA, 25 nt, Artificial Sequence
  Description of Artificial Sequence: Synthetic oligonucleotide
aaaccguagcuggcaagcggucuua

SEQ ID NO: 119304 - RNA, 25 nt, Artificial Sequence
  Description of Artificial Sequence: Synthetic oligonucleotide
uagcuggcaagcggucuuaccggcu

SEQ ID NO: 119305 - RNA, 25 nt, Artificial Sequence
  Description of Artificial Sequence: Synthetic oligonucleotide
uuguaugguuaaaagauggguuacc

SEQ ID NO: 119306 - RNA, 25 nt, Artificial Sequence
  Description of Artificial Sequence: Synthetic oligonucleotide
ugguuaaaagauggguuaccugcga

SEQ ID NO: 119307 - RNA, 25 nt, Artificial Sequence
  Description of Artificial Sequence: Synthetic oligonucleotide
cagggaauuauacaaucuugcugag

SEQ ID NO: 119308 - RNA, 25 nt, Artificial Sequence
  Description of Artificial Sequence: Synthetic oligonucleotide
acaaucuugcugagcauaaaacagu

SEQ ID NO: 119309 - RNA, 25 nt, Artificial Sequence
  Description of Artificial Sequence: Synthetic oligonucleotide
ccaauaaugaagaguccuuuauccu

SEQ ID NO: 119310 - RNA, 25 nt, Artificial Sequence
  Description of Artificial Sequence: Synthetic oligonucleotide
acuuuggauguuccaacgcaaguug

SEQ ID NO: 119311 - RNA, 25 nt, Artificial Sequence
  Description of Artificial Sequence: Synthetic oligonucleotide
aaugcuuccacuaaacugaaaccau

SEQ ID NO: 119312 - RNA, 25 nt, Artificial Sequence
  Description of Artificial Sequence: Synthetic oligonucleotide
gagaaaguuugacuuuguuaaauau

SEQ ID NO: 119313 - RNA, 25 nt, Artificial Sequence
  Description of Artificial Sequence: Synthetic oligonucleotide
aaagaacuacuguauauuaaaaguu

SEQ ID NO: 119314 - RNA, 25 nt, Artificial Sequence
  Description of Artificial Sequence: Synthetic oligonucleotide
uuagaaauacggguuuugacuuaac

SEQ ID NO: 119315 - RNA, 25 nt, Artificial Sequence
  Description of Artificial Sequence: Synthetic oligonucleotide
aacauggguacagcaaacucagcac

SEQ ID NO: 119316 - RNA, 25 nt, Artificial Sequence
  Description of Artificial Sequence: Synthetic oligonucleotide
aaagacacagaagaugcugaccuca

SEQ ID NO: 119317 - RNA, 25 nt, Artificial Sequence
  Description of Artificial Sequence: Synthetic oligonucleotide
uaguagggagguuuauucagaucgc

SEQ ID NO: 119318 - RNA, 25 nt, Artificial Sequence
  Description of Artificial Sequence: Synthetic oligonucleotide
gccuucugcagcaggguucugggau

SEQ ID NO: 119319 - RNA, 25 nt, Artificial Sequence
  Description of Artificial Sequence: Synthetic oligonucleotide
ggucugguacauauuggaaauuaug

SEQ ID NO: 119320 - RNA, 25 nt, Artificial Sequence
  Description of Artificial Sequence: Synthetic oligonucleotide
cuaguccuuccgauggaagcacuag

SEQ ID NO: 119321 - RNA, 25 nt, Artificial Sequence
  Description of Artificial Sequence: Synthetic oligonucleotide
ccagugaauauuguuuuuaugugga

SEQ ID NO: 119322 - RNA, 25 nt, Artificial Sequence
  Description of Artificial Sequence: Synthetic oligonucleotide
augaauucaaguuggaauugguaga

SEQ ID NO: 119323 - RNA, 25 nt, Artificial Sequence
  Description of Artificial Sequence: Synthetic oligonucleotide
caggacacagauuuagacuuggaga

SEQ ID NO: 119324 - RNA, 25 nt, Artificial Sequence
  Description of Artificial Sequence: Synthetic oligonucleotide
cucaaagcacaguuacaguauucca

SEQ ID NO: 119325 - RNA, 25 nt, Artificial Sequence
  Description of Artificial Sequence: Synthetic oligonucleotide
accacugccaccacugaugaauuaa

SEQ ID NO: 119326 - RNA, 25 nt, Artificial Sequence
  Description of Artificial Sequence: Synthetic oligonucleotide
gaaacuacuagugccacaucaucac

SEQ ID NO: 119327 - RNA, 25 nt, Artificial Sequence
  Description of Artificial Sequence: Synthetic oligonucleotide
aagucggacagccucaccaaacaga

SEQ ID NO: 119328 - RNA, 25 nt, Artificial Sequence
  Description of Artificial Sequence: Synthetic oligonucleotide
gaaagcgaaaaauggaacaugaugg

SEQ ID NO: 119329 - RNA, 25 nt, Artificial Sequence
  Description of Artificial Sequence: Synthetic oligonucleotide
cccucugauuuagcauguagacugc

SEQ ID NO: 119330 - RNA, 25 nt, Artificial Sequence
  Description of Artificial Sequence: Synthetic oligonucleotide
ugagcuauuuaaggaucuauuuaug

SEQ ID NO: 119331 - RNA, 25 nt, Artificial Sequence
  Description of Artificial Sequence: Synthetic oligonucleotide
aaaaggugaaaaagcacuauuauca

SEQ ID NO: 119332 - RNA, 25 nt, Artificial Sequence
  Description of Artificial Sequence: Synthetic oligonucleotide
gaaaaagcacuauuaucaguucugc

SEQ ID NO: 119333 - RNA, 25 nt, Artificial Sequence
  Description of Artificial Sequence: Synthetic oligonucleotide
ggcugaaaagaaagauuaaaccuac

SEQ ID NO: 119334 - RNA, 25 nt, Artificial Sequence
  Description of Artificial Sequence: Synthetic oligonucleotide
uaaacccuuauaauaaaauccuucu

SEQ ID NO: 119335 - RNA, 25 nt, Artificial Sequence
  Description of Artificial Sequence: Synthetic oligonucleotide
cauacuauuagccaaugcuguagac

SEQ ID NO: 119336 - RNA, 25 nt, Artificial Sequence
  Description of Artificial Sequence: Synthetic oligonucleotide
gacagaagcauuuugauaggaauag

SEQ ID NO: 119337 - RNA, 25 nt, Artificial Sequence
  Description of Artificial Sequence: Synthetic oligonucleotide
agagcaaauaagauaauggcccuga

SEQ ID NO: 119338 - RNA, 25 nt, Artificial Sequence
  Description of Artificial Sequence: Synthetic oligonucleotide
ccaacauuuuucucuuccucaagca

SEQ ID NO: 119339 - RNA, 25 nt, Artificial Sequence
  Description of Artificial Sequence: Synthetic oligonucleotide
uuaaguaugagaaaaguucagccca

SEQ ID NO: 119340 - RNA, 25 nt, Artificial Sequence
  Description of Artificial Sequence: Synthetic oligonucleotide
caggaauaaagauggcugcugaacc

SEQ ID NO: 119341 - RNA, 25 nt, Artificial Sequence
  Description of Artificial Sequence: Synthetic oligonucleotide
aauuugaaugaccaaguucucuuca

SEQ ID NO: 119342 - RNA, 25 nt, Artificial Sequence
  Description of Artificial Sequence: Synthetic oligonucleotide
auguauaaagauagccagccuagag

SEQ ID NO: 119343 - RNA, 25 nt, Artificial Sequence
  Description of Artificial Sequence: Synthetic oligonucleotide
ggcuguaacuaucucugugaagugu

SEQ ID NO: 119344 - RNA, 25 nt, Artificial Sequence
  Description of Artificial Sequence: Synthetic oligonucleotide
ucugugaagugugagaaaauuucaa

SEQ ID NO: 119345 - RNA, 25 nt, Artificial Sequence
  Description of Artificial Sequence: Synthetic oligonucleotide
ccuuuaaggaaaugaauccuccuga

SEQ ID NO: 119346 - RNA, 25 nt, Artificial Sequence
  Description of Artificial Sequence: Synthetic oligonucleotide
aaggauacaaaaagugacaucauau

SEQ ID NO: 119347 - RNA, 25 nt, Artificial Sequence
  Description of Artificial Sequence: Synthetic oligonucleotide
agaugcaauuugaaucuucaucaua

SEQ ID NO: 119348 - RNA, 25 nt, Artificial Sequence
  Description of Artificial Sequence: Synthetic oligonucleotide
guucaaaacgaagacuagcuauuaa

SEQ ID NO: 119349 - RNA, 25 nt, Artificial Sequence
  Description of Artificial Sequence: Synthetic oligonucleotide
gugaaaccucaucucuacuaaaaau

SEQ ID NO: 119350 - RNA, 25 nt, Artificial Sequence
  Description of Artificial Sequence: Synthetic oligonucleotide
acgaaagagaagcucuaucucgccu

SEQ ID NO: 119351 - RNA, 25 nt, Artificial Sequence
  Description of Artificial Sequence: Synthetic oligonucleotide
cuccacaagcgccuucgguccaguu

SEQ ID NO: 119352 - RNA, 25 nt, Artificial Sequence
  Description of Artificial Sequence: Synthetic oligonucleotide
gagaagauuccaaagauguagccgc

SEQ ID NO: 119353 - RNA, 25 nt, Artificial Sequence
  Description of Artificial Sequence: Synthetic oligonucleotide
aaucuggauucaaugaggagacuug

SEQ ID NO: 119354 - RNA, 25 nt, Artificial Sequence
  Description of Artificial Sequence: Synthetic oligonucleotide
agaacagauuugagaguagugagga

SEQ ID NO: 119355 - RNA, 25 nt, Artificial Sequence
  Description of Artificial Sequence: Synthetic oligonucleotide
ccagagcugugcagaugaguacaaa

SEQ ID NO: 119356 - RNA, 25 nt, Artificial Sequence
  Description of Artificial Sequence: Synthetic oligonucleotide
ccucagauuguuguuguuaaugggc

SEQ ID NO: 119357 - RNA, 25 nt, Artificial Sequence
  Description of Artificial Sequence: Synthetic oligonucleotide
cuauuuuaauuauuuuuaauuuauu

SEQ ID NO: 119358 - RNA, 25 nt, Artificial Sequence
  Description of Artificial Sequence: Synthetic oligonucleotide
uuuaauuuauuaauauuuaaauaug

SEQ ID NO: 119359 - RNA, 25 nt, Artificial Sequence
  Description of Artificial Sequence: Synthetic oligonucleotide
augcaguuugaauauccuuuguuuc

SEQ ID NO: 119360 - RNA, 25 nt, Artificial Sequence
  Description of Artificial Sequence: Synthetic oligonucleotide
caugcugcuggcgucuaaguguuug

SEQ ID NO: 119361 - RNA, 25 nt, Artificial Sequence
  Description of Artificial Sequence: Synthetic oligonucleotide
agaugugcauuucaccugugacaaa

SEQ ID NO: 119362 - RNA, 25 nt, Artificial Sequence
  Description of Artificial Sequence: Synthetic oligonucleotide
ucaaaaccugugccaggcugaauua

SEQ ID NO: 119363 - RNA, 25 nt, Artificial Sequence
  Description of Artificial Sequence: Synthetic oligonucleotide
gaauguggguagucauucuuacaau

SEQ ID NO: 119364 - RNA, 25 nt, Artificial Sequence
  Description of Artificial Sequence: Synthetic oligonucleotide
auguggguagucauucuuacaauug

SEQ ID NO: 119365 - RNA, 25 nt, Artificial Sequence
  Description of Artificial Sequence: Synthetic oligonucleotide
ugaaaaugagcaucagagaguguac

SEQ ID NO: 119366 - RNA, 25 nt, Artificial Sequence
  Description of Artificial Sequence: Synthetic oligonucleotide
uugcuuuucauguagaacucagcag

SEQ ID NO: 119367 - RNA, 25 nt, Artificial Sequence
  Description of Artificial Sequence: Synthetic oligonucleotide
uguauuucuauauuuauuuucagua

SEQ ID NO: 119368 - RNA, 25 nt, Artificial Sequence
  Description of Artificial Sequence: Synthetic oligonucleotide
uuugauuaauguuucuuaaauggaa

SEQ ID NO: 119369 - RNA, 25 nt, Artificial Sequence
  Description of Artificial Sequence: Synthetic oligonucleotide
caacguguauagugccuaaaauugu

SEQ ID NO: 119370 - RNA, 25 nt, Artificial Sequence
  Description of Artificial Sequence: Synthetic oligonucleotide
cauauccuuggcuacuaacaucugg

SEQ ID NO: 119371 - RNA, 25 nt, Artificial Sequence
  Description of Artificial Sequence: Synthetic oligonucleotide
uacuaacaucuggagacugugagcu

SEQ ID NO: 119372 - RNA, 25 nt, Artificial Sequence
  Description of Artificial Sequence: Synthetic oligonucleotide
cauaaguugugugcuuuuuauuaau

SEQ ID NO: 119373 - RNA, 25 nt, Artificial Sequence
  Description of Artificial Sequence: Synthetic oligonucleotide
gcaucauuuuggcucuucuuacauu

SEQ ID NO: 119374 - RNA, 25 nt, Artificial Sequence
  Description of Artificial Sequence: Synthetic oligonucleotide
gcucuucuuacauuuguaaaaaugu

SEQ ID NO: 119375 - RNA, 25 nt, Artificial Sequence
  Description of Artificial Sequence: Synthetic oligonucleotide
agauuaggucaucuuaauucauauu

SEQ ID NO: 119376 - RNA, 25 nt, Artificial Sequence
  Description of Artificial Sequence: Synthetic oligonucleotide
auggaauugaaagaacuaaucauga

SEQ ID NO: 119377 - RNA, 25 nt, Artificial Sequence
  Description of Artificial Sequence: Synthetic oligonucleotide
cacacucauuccuucugcucuuggg

SEQ ID NO: 119378 - RNA, 25 nt, Artificial Sequence
  Description of Artificial Sequence: Synthetic oligonucleotide
uguagagguaaccaguagcuuugag

SEQ ID NO: 119379 - RNA, 25 nt, Artificial Sequence
  Description of Artificial Sequence: Synthetic oligonucleotide
caaccacaugccacguaauauuuca

SEQ ID NO: 119380 - RNA, 25 nt, Artificial Sequence
  Description of Artificial Sequence: Synthetic oligonucleotide
ucggaaacaaguuauucucuucacu

SEQ ID NO: 119381 - RNA, 25 nt, Artificial Sequence
  Description of Artificial Sequence: Synthetic oligonucleotide
acucccaauaacuaaugcuaagaaa

SEQ ID NO: 119382 - RNA, 25 nt, Artificial Sequence
  Description of Artificial Sequence: Synthetic oligonucleotide
aaugcuaagaaaugcugaaaaucaa

SEQ ID NO: 119383 - RNA, 25 nt, Artificial Sequence
  Description of Artificial Sequence: Synthetic oligonucleotide
gucuuucucuaaauaugauuacuuu

SEQ ID NO: 119384 - RNA, 25 nt, Artificial Sequence
  Description of Artificial Sequence: Synthetic oligonucleotide
ugaauuucaggcauuuuguucuaca

SEQ ID NO: 119385 - RNA, 25 nt, Artificial Sequence
  Description of Artificial Sequence: Synthetic oligonucleotide
cgauucccucucacccgggacucuc

SEQ ID NO: 119386 - RNA, 25 nt, Artificial Sequence
  Description of Artificial Sequence: Synthetic oligonucleotide
aggaaagugaaccuuuaaaguaaag

SEQ ID NO: 119387 - RNA, 25 nt, Artificial Sequence
  Description of Artificial Sequence: Synthetic oligonucleotide
gaggcugcaugcucuggaagccugg

SEQ ID NO: 119388 - RNA, 25 nt, Artificial Sequence
  Description of Artificial Sequence: Synthetic oligonucleotide
ucucugaacagaaaacaaaagagag

SEQ ID NO: 119389 - RNA, 25 nt, Artificial Sequence
  Description of Artificial Sequence: Synthetic oligonucleotide
aacuuggcuguaaucaguuaugccg

SEQ ID NO: 119390 - RNA, 25 nt, Artificial Sequence
  Description of Artificial Sequence: Synthetic oligonucleotide
agaagccaaaauuaaaagaagucca

SEQ ID NO: 119391 - RNA, 25 nt, Artificial Sequence
  Description of Artificial Sequence: Synthetic oligonucleotide
auuaaaagaaguccaggugagguua

SEQ ID NO: 119392 - RNA, 25 nt, Artificial Sequence
  Description of Artificial Sequence: Synthetic oligonucleotide
gaauccggauuaucgggaagaggac

SEQ ID NO: 119393 - RNA, 25 nt, Artificial Sequence
  Description of Artificial Sequence: Synthetic oligonucleotide
aaugugacaucaaagcaaguauugu

SEQ ID NO: 119394 - RNA, 25 nt, Artificial Sequence
  Description of Artificial Sequence: Synthetic oligonucleotide
caucaaagcaaguauuguagcacuc

SEQ ID NO: 119395 - RNA, 25 nt, Artificial Sequence
  Description of Artificial Sequence: Synthetic oligonucleotide
agagagagaaaacaaaaccacaaau

SEQ ID NO: 119396 - RNA, 25 nt, Artificial Sequence
  Description of Artificial Sequence: Synthetic oligonucleotide
ucgcuguaguauuuaagcccauaca

SEQ ID NO: 119397 - RNA, 25 nt, Artificial Sequence
  Description of Artificial Sequence: Synthetic oligonucleotide
cgcuguaguauuuaagcccauacag

SEQ ID NO: 119398 - RNA, 25 nt, Artificial Sequence
  Description of Artificial Sequence: Synthetic oligonucleotide
auuuaagcccauacagaaaccuucc

SEQ ID NO: 119399 - RNA, 25 nt, Artificial Sequence
  Description of Artificial Sequence: Synthetic oligonucleotide
auuaaaauaaacaugguauaccuac

SEQ ID NO: 119400 - RNA, 25 nt, Artificial Sequence
  Description of Artificial Sequence: Synthetic oligonucleotide
cuguucugaucggccaguuuucgga

SEQ ID NO: 119401 - RNA, 25 nt, Artificial Sequence
  Description of Artificial Sequence: Synthetic oligonucleotide
aaauaauuugaacuuuggaacaggg

SEQ ID NO: 119402 - RNA, 25 nt, Artificial Sequence
  Description of Artificial Sequence: Synthetic oligonucleotide
ugcgaccuuaauuuaacuuuccagu

SEQ ID NO: 119403 - RNA, 25 nt, Artificial Sequence
  Description of Artificial Sequence: Synthetic oligonucleotide
cugagaaagcuaaaguuugguuuug

SEQ ID NO: 119404 - RNA, 25 nt, Artificial Sequence
  Description of Artificial Sequence: Synthetic oligonucleotide
aguaaagaugcuacuucccacugua

SEQ ID NO: 119405 - RNA, 25 nt, Artificial Sequence
  Description of Artificial Sequence: Synthetic oligonucleotide
cugcuuaauugcugauaccauauga

SEQ ID NO: 119406 - RNA, 25 nt, Artificial Sequence
  Description of Artificial Sequence: Synthetic oligonucleotide
uaccauaugaaugaaacaugggcug

SEQ ID NO: 119407 - RNA, 25 nt, Artificial Sequence
  Description of Artificial Sequence: Synthetic oligonucleotide
aacuuucuuauccaacuuuuucaua

SEQ ID NO: 119408 - RNA, 25 nt, Artificial Sequence
  Description of Artificial Sequence: Synthetic oligonucleotide
ccuugcaugacaucaugaggccgga

SEQ ID NO: 119409 - RNA, 25 nt, Artificial Sequence
  Description of Artificial Sequence: Synthetic oligonucleotide
ugaauuuguauaugacugcauuugu

SEQ ID NO: 119410 - RNA, 25 nt, Artificial Sequence
  Description of Artificial Sequence: Synthetic oligonucleotide
gaauccuaguagaauguuuacuacc

SEQ ID NO: 119411 - RNA, 25 nt, Artificial Sequence
  Description of Artificial Sequence: Synthetic oligonucleotide
gaaagggaagaauuuuuugaugaaa

SEQ ID NO: 119412 - RNA, 25 nt, Artificial Sequence
  Description of Artificial Sequence: Synthetic oligonucleotide
uaucggcaugccagugugugaauuu

SEQ ID NO: 119413 - RNA, 25 nt, Artificial Sequence
  Description of Artificial Sequence: Synthetic oligonucleotide
caccucauaguagagcaauguaugu

SEQ ID NO: 119414 - RNA, 25 nt, Artificial Sequence
  Description of Artificial Sequence: Synthetic oligonucleotide
ccagaauugccaaagcacauauaua

SEQ ID NO: 119415 - RNA, 25 nt, Artificial Sequence
  Description of Artificial Sequence: Synthetic oligonucleotide
uggugaucuggguaauaguuucucc

SEQ ID NO: 119416 - RNA, 25 nt, Artificial Sequence
  Description of Artificial Sequence: Synthetic oligonucleotide
gaucuggguaauaguuucuccaaau

SEQ ID NO: 119417 - RNA, 25 nt, Artificial Sequence
  Description of Artificial Sequence: Synthetic oligonucleotide
ggaugugaugaauacuuccuagaaa

SEQ ID NO: 119418 - RNA, 25 nt, Artificial Sequence
  Description of Artificial Sequence: Synthetic oligonucleotide
cauuuccacagcuacaccauauaug

SEQ ID NO: 119419 - RNA, 25 nt, Artificial Sequence
  Description of Artificial Sequence: Synthetic oligonucleotide
acagcuacaccauauaugaauggag

SEQ ID NO: 119420 - RNA, 25 nt, Artificial Sequence
  Description of Artificial Sequence: Synthetic oligonucleotide
ugcaguucuuacacgagaagaagau

SEQ ID NO: 119421 - RNA, 25 nt, Artificial Sequence
  Description of Artificial Sequence: Synthetic oligonucleotide
acgagaagaagaucauuuacaggga

SEQ ID NO: 119422 - RNA, 25 nt, Artificial Sequence
  Description of Artificial Sequence: Synthetic oligonucleotide
cgagaagaagaucauuuacagggac

SEQ ID NO: 119423 - RNA, 25 nt, Artificial Sequence
  Description of Artificial Sequence: Synthetic oligonucleotide
aagaagaucauuuacagggaccuga

SEQ ID NO: 119424 - RNA, 25 nt, Artificial Sequence
  Description of Artificial Sequence: Synthetic oligonucleotide
agaggaagagguguuugacugcauc

SEQ ID NO: 119425 - RNA, 25 nt, Artificial Sequence
  Description of Artificial Sequence: Synthetic oligonucleotide
gaggaagagguguuugacugcaucg

SEQ ID NO: 119426 - RNA, 25 nt, Artificial Sequence
  Description of Artificial Sequence: Synthetic oligonucleotide
cuacuuugagggcgaguucacaggg

SEQ ID NO: 119427 - RNA, 25 nt, Artificial Sequence
  Description of Artificial Sequence: Synthetic oligonucleotide
agggcaucuccuggcaccucugucc

SEQ ID NO: 119428 - RNA, 25 nt, Artificial Sequence
  Description of Artificial Sequence: Synthetic oligonucleotide
ggagugauaugguuugucuuuuuaa

SEQ ID NO: 119429 - RNA, 25 nt, Artificial Sequence
  Description of Artificial Sequence: Synthetic oligonucleotide
gagugauaugguuugucuuuuuaag

SEQ ID NO: 119430 - RNA, 25 nt, Artificial Sequence
  Description of Artificial Sequence: Synthetic oligonucleotide
ugcaguaaagauccuaaagguuguc

SEQ ID NO: 119431 - RNA, 25 nt, Artificial Sequence
  Description of Artificial Sequence: Synthetic oligonucleotide
aguaaagauccuaaagguugucgac

SEQ ID NO: 119432 - RNA, 25 nt, Artificial Sequence
  Description of Artificial Sequence: Synthetic oligonucleotide
ugacaaaggacaaccuggcaauugu

SEQ ID NO: 119433 - RNA, 25 nt, Artificial Sequence
  Description of Artificial Sequence: Synthetic oligonucleotide
gcaauugugacccaguggugcgagg

SEQ ID NO: 119434 - RNA, 25 nt, Artificial Sequence
  Description of Artificial Sequence: Synthetic oligonucleotide
aacaucauccauagagacaugaaau

SEQ ID NO: 119435 - RNA, 25 nt, Artificial Sequence
  Description of Artificial Sequence: Synthetic oligonucleotide
ugaaauccaacaauauauuucucca

SEQ ID NO: 119436 - RNA, 25 nt, Artificial Sequence
  Description of Artificial Sequence: Synthetic oligonucleotide
aacaauauauuucuccaugaaggcu

SEQ ID NO: 119437 - RNA, 25 nt, Artificial Sequence
  Description of Artificial Sequence: Synthetic oligonucleotide
aacaguaaagucacgcuggaguggu

SEQ ID NO: 119438 - RNA, 25 nt, Artificial Sequence
  Description of Artificial Sequence: Synthetic oligonucleotide
ugugaagaaaguaaaggaagagagg

SEQ ID NO: 119439 - RNA, 25 nt, Artificial Sequence
  Description of Artificial Sequence: Synthetic oligonucleotide
cuuccgagccauccuugcaucgggc

SEQ ID NO: 119440 - RNA, 25 nt, Artificial Sequence
  Description of Artificial Sequence: Synthetic oligonucleotide
aauggagguugaauauccuacugug

SEQ ID NO: 119441 - RNA, 25 nt, Artificial Sequence
  Description of Artificial Sequence: Synthetic oligonucleotide
ggagguugaauauccuacuguguaa

SEQ ID NO: 119442 - RNA, 25 nt, Artificial Sequence
  Description of Artificial Sequence: Synthetic oligonucleotide
auuuugaguuuucccuuguagugua

SEQ ID NO: 119443 - RNA, 25 nt, Artificial Sequence
  Description of Artificial Sequence: Synthetic oligonucleotide
uauccuguuuguucuuuguugauug

SEQ ID NO: 119444 - RNA, 25 nt, Artificial Sequence
  Description of Artificial Sequence: Synthetic oligonucleotide
ccuguuuguucuuuguugauugaaa

SEQ ID NO: 119445 - RNA, 25 nt, Artificial Sequence
  Description of Artificial Sequence: Synthetic oligonucleotide
cucuacagccuucuuuuucuuccau

SEQ ID NO: 119446 - RNA, 25 nt, Artificial Sequence
  Description of Artificial Sequence: Synthetic oligonucleotide
ucuuccauagcuaaucuuccuucua

SEQ ID NO: 119447 - RNA, 25 nt, Artificial Sequence
  Description of Artificial Sequence: Synthetic oligonucleotide
auaaucuuccuguugaaugcuucau

SEQ ID NO: 119448 - RNA, 25 nt, Artificial Sequence
  Description of Artificial Sequence: Synthetic oligonucleotide
uaaucuuccuguugaaugcuucaug

SEQ ID NO: 119449 - RNA, 25 nt, Artificial Sequence
  Description of Artificial Sequence: Synthetic oligonucleotide
cuucaugacuugaauucuacuuuga

SEQ ID NO: 119450 - RNA, 25 nt, Artificial Sequence
  Description of Artificial Sequence: Synthetic oligonucleotide
aagagggagagaagcaacuacagac

SEQ ID NO: 119451 - RNA, 25 nt, Artificial Sequence
  Description of Artificial Sequence: Synthetic oligonucleotide
cgucuccuaccagaccaaggucaac

SEQ ID NO: 119452 - RNA, 25 nt, Artificial Sequence
  Description of Artificial Sequence: Synthetic oligonucleotide
gaucaaucggcccgacuaucucgac

SEQ ID NO: 119453 - RNA, 25 nt, Artificial Sequence
  Description of Artificial Sequence: Synthetic oligonucleotide
ggacgaacauccaaccuucccaaac

SEQ ID NO: 119454 - RNA, 25 nt, Artificial Sequence
  Description of Artificial Sequence: Synthetic oligonucleotide
agggucggaacccaagcuuagaacu

SEQ ID NO: 119455 - RNA, 25 nt, Artificial Sequence
  Description of Artificial Sequence: Synthetic oligonucleotide
ucggaacccaagcuuagaacuuuaa

SEQ ID NO: 119456 - RNA, 25 nt, Artificial Sequence
  Description of Artificial Sequence: Synthetic oligonucleotide
acccaagcuuagaacuuuaagcaac

SEQ ID NO: 119457 - RNA, 25 nt, Artificial Sequence
  Description of Artificial Sequence: Synthetic oligonucleotide
gaacuuuaagcaacaagaccaccac

SEQ ID NO: 119458 - RNA, 25 nt, Artificial Sequence
  Description of Artificial Sequence: Synthetic oligonucleotide
acuauucaguggcgagaaauaaagu

SEQ ID NO: 119459 - RNA, 25 nt, Artificial Sequence
  Description of Artificial Sequence: Synthetic oligonucleotide
cuauucaguggcgagaaauaaaguu

SEQ ID NO: 119460 - RNA, 25 nt, Artificial Sequence
  Description of Artificial Sequence: Synthetic oligonucleotide
aaacacagauaacaggaaaugaucc

SEQ ID NO: 119461 - RNA, 25 nt, Artificial Sequence
  Description of Artificial Sequence: Synthetic oligonucleotide
cuuaagaaaagagaagaaaugaaac

SEQ ID NO: 119462 - RNA, 25 nt, Artificial Sequence
  Description of Artificial Sequence: Synthetic oligonucleotide
cugaaggaguguguuuccauccucc

SEQ ID NO: 119463 - RNA, 25 nt, Artificial Sequence
  Description of Artificial Sequence: Synthetic oligonucleotide
ucaccgcgggacugaaaaucuuuga

SEQ ID NO: 119464 - RNA, 25 nt, Artificial Sequence
  Description of Artificial Sequence: Synthetic oligonucleotide
agcagaaauaagcgugccguucagg

SEQ ID NO: 119465 - RNA, 25 nt, Artificial Sequence
  Description of Artificial Sequence: Synthetic oligonucleotide
aagcgugccguucaggguccagaag

SEQ ID NO: 119466 - RNA, 25 nt, Artificial Sequence
  Description of Artificial Sequence: Synthetic oligonucleotide
agaaacagucacucaagacugcuug

SEQ ID NO: 119467 - RNA, 25 nt, Artificial Sequence
  Description of Artificial Sequence: Synthetic oligonucleotide
agaggaagaagguccaugucuuugg

SEQ ID NO: 119468 - RNA, 25 nt, Artificial Sequence
  Description of Artificial Sequence: Synthetic oligonucleotide
uguauucaaaauaugccugaaacac

SEQ ID NO: 119469 - RNA, 25 nt, Artificial Sequence
  Description of Artificial Sequence: Synthetic oligonucleotide
auuuuccucccuuucucuguaccuc

SEQ ID NO: 119470 - RNA, 25 nt, Artificial Sequence
  Description of Artificial Sequence: Synthetic oligonucleotide
caaagaaagauagagcaagacaaga

SEQ ID NO: 119471 - RNA, 25 nt, Artificial Sequence
  Description of Artificial Sequence: Synthetic oligonucleotide
aagaaagauagagcaagacaagaaa

SEQ ID NO: 119472 - RNA, 25 nt, Artificial Sequence
  Description of Artificial Sequence: Synthetic oligonucleotide
gaaagcauuuguuuguacaagaucc

SEQ ID NO: 119473 - RNA, 25 nt, Artificial Sequence
  Description of Artificial Sequence: Synthetic oligonucleotide
ugaguuaaacgaacguacuugcaga

SEQ ID NO: 119474 - RNA, 25 nt, Artificial Sequence
  Description of Artificial Sequence: Synthetic oligonucleotide
acugauacagaacgaucgauacaga

SEQ ID NO: 119475 - RNA, 25 nt, Artificial Sequence
  Description of Artificial Sequence: Synthetic oligonucleotide
auauuauauauauauaaaaauaaau

SEQ ID NO: 119476 - RNA, 25 nt, Artificial Sequence
  Description of Artificial Sequence: Synthetic oligonucleotide
auuauauauauauaaaaauaaauau

SEQ ID NO: 119477 - RNA, 25 nt, Artificial Sequence
  Description of Artificial Sequence: Synthetic oligonucleotide
ucacuggauguauuugacugcugug

SEQ ID NO: 119478 - RNA, 25 nt, Artificial Sequence
  Description of Artificial Sequence: Synthetic oligonucleotide
cagggaagaggaggagaugagagac

SEQ ID NO: 119479 - RNA, 25 nt, Artificial Sequence
  Description of Artificial Sequence: Synthetic oligonucleotide
augaucuuuuuuuugucccacuugg

SEQ ID NO: 119480 - RNA, 27 nt, Artificial Sequence
  Description of Artificial Sequence: Synthetic oligonucleotide
ggccgugaacuccucaucaaaauaccu

SEQ ID NO: 119481 - RNA, 27 nt, Artificial Sequence
  Description of Artificial Sequence: Synthetic oligonucleotide
uggugugauggugaucaucugggccgu

SEQ ID NO: 119482 - RNA, 27 nt, Artificial Sequence
  Description of Artificial Sequence: Synthetic oligonucleotide
aaacccgcaggauaguuuucuucccua

SEQ ID NO: 119483 - RNA, 27 nt, Artificial Sequence
  Description of Artificial Sequence: Synthetic oligonucleotide
caaacuggaugaaauaaauuaaaaccc

SEQ ID NO: 119484 - RNA, 27 nt, Artificial Sequence
  Description of Artificial Sequence: Synthetic oligonucleotide
agaaguccuuaacauuucccuacguga

SEQ ID NO: 119485 - RNA, 27 nt, Artificial Sequence
  Description of Artificial Sequence: Synthetic oligonucleotide
cucugucccacuggguaaacccuggcc

SEQ ID NO: 119486 - RNA, 27 nt, Artificial Sequence
  Description of Artificial Sequence: Synthetic oligonucleotide
cacaauaacaaauuuaaaccuugcucc

SEQ ID NO: 119487 - RNA, 27 nt, Artificial Sequence
  Description of Artificial Sequence: Synthetic oligonucleotide
aaaugcauuugaacaacauaauacaca

SEQ ID NO: 119488 - RNA, 27 nt, Artificial Sequence
  Description of Artificial Sequence: Synthetic oligonucleotide
ggcuuuccugucacaaagauuaaaaac

SEQ ID NO: 119489 - RNA, 27 nt, Artificial Sequence
  Description of Artificial Sequence: Synthetic oligonucleotide
agggcuuuccugucacaaagauuaaaa

SEQ ID NO: 119490 - RNA, 27 nt, Artificial Sequence
  Description of Artificial Sequence: Synthetic oligonucleotide
ggccaugcugggagacauaagcagcag

SEQ ID NO: 119491 - RNA, 27 nt, Artificial Sequence
  Description of Artificial Sequence: Synthetic oligonucleotide
ucagggagaagcuucugaaacacuucu

SEQ ID NO: 119492 - RNA, 27 nt, Artificial Sequence
  Description of Artificial Sequence: Synthetic oligonucleotide
aagggcuucuuccuuauugauggucag

SEQ ID NO: 119493 - RNA, 27 nt, Artificial Sequence
  Description of Artificial Sequence: Synthetic oligonucleotide
ugaagggcuucuuccuuauugaugguc

SEQ ID NO: 119494 - RNA, 27 nt, Artificial Sequence
  Description of Artificial Sequence: Synthetic oligonucleotide
cgcugaagggcuucuuccuuauugaug

SEQ ID NO: 119495 - RNA, 27 nt, Artificial Sequence
  Description of Artificial Sequence: Synthetic oligonucleotide
gccgcugaagggcuucuuccuuauuga

SEQ ID NO: 119496 - RNA, 27 nt, Artificial Sequence
  Description of Artificial Sequence: Synthetic oligonucleotide
acuggccgcugaagggcuucuuccuua

SEQ ID NO: 119497 - RNA, 27 nt, Artificial Sequence
  Description of Artificial Sequence: Synthetic oligonucleotide
cggagcuuuucaccuuuaguuaugcuu

SEQ ID NO: 119498 - RNA, 27 nt, Artificial Sequence
  Description of Artificial Sequence: Synthetic oligonucleotide
ccggagcuuuucaccuuuaguuaugcu

SEQ ID NO: 119499 - RNA, 27 nt, Artificial Sequence
  Description of Artificial Sequence: Synthetic oligonucleotide
cagacuguugacuggcgugauguaguu

SEQ ID NO: 119500 - RNA, 27 nt, Artificial Sequence
  Description of Artificial Sequence: Synthetic oligonucleotide
cuuuugaacucugcuuaaauccagugg

SEQ ID NO: 119501 - RNA, 27 nt, Artificial Sequence
  Description of Artificial Sequence: Synthetic oligonucleotide
gcuuuugaacucugcuuaaauccagug

SEQ ID NO: 119502 - RNA, 27 nt, Artificial Sequence
  Description of Artificial Sequence: Synthetic oligonucleotide
agggcuuuugaacucugcuuaaaucca

SEQ ID NO: 119503 - RNA, 27 nt, Artificial Sequence
  Description of Artificial Sequence: Synthetic oligonucleotide
aagggcuuuugaacucugcuuaaaucc

SEQ ID NO: 119504 - RNA, 27 nt, Artificial Sequence
  Description of Artificial Sequence: Synthetic oligonucleotide
ugaagggcuuuugaacucugcuuaaau

SEQ ID NO: 119505 - RNA, 27 nt, Artificial Sequence
  Description of Artificial Sequence: Synthetic oligonucleotide
cugaagggcuuuugaacucugcuuaaa

SEQ ID NO: 119506 - RNA, 27 nt, Artificial Sequence
  Description of Artificial Sequence: Synthetic oligonucleotide
cgcugaagggcuuuugaacucugcuua

SEQ ID NO: 119507 - RNA, 27 nt, Artificial Sequence
  Description of Artificial Sequence: Synthetic oligonucleotide
cgagcggcuucacucagacccugaggc

SEQ ID NO: 119508 - RNA, 27 nt, Artificial Sequence
  Description of Artificial Sequence: Synthetic oligonucleotide
uugacuggcgugauguaguugcuuggg

SEQ ID NO: 119509 - RNA, 27 nt, Artificial Sequence
  Description of Artificial Sequence: Synthetic oligonucleotide
cacgcaccaagaagcugccauugaucc

SEQ ID NO: 119510 - RNA, 27 nt, Artificial Sequence
  Description of Artificial Sequence: Synthetic oligonucleotide
cugaugaauccaaugugggcuggaauc

SEQ ID NO: 119511 - RNA, 27 nt, Artificial Sequence
  Description of Artificial Sequence: Synthetic oligonucleotide
cuuagguauuccacauucucagcugug

SEQ ID NO: 119512 - RNA, 27 nt, Artificial Sequence
  Description of Artificial Sequence: Synthetic oligonucleotide
ugagccucaaauuaggagauacguuuu

SEQ ID NO: 119513 - RNA, 27 nt, Artificial Sequence
  Description of Artificial Sequence: Synthetic oligonucleotide
ccaauuguagagaaauuauuuuaggaa

SEQ ID NO: 119514 - RNA, 27 nt, Artificial Sequence
  Description of Artificial Sequence: Synthetic oligonucleotide
ggcuccuaacuagcugaaucuuccaau

SEQ ID NO: 119515 - RNA, 27 nt, Artificial Sequence
  Description of Artificial Sequence: Synthetic oligonucleotide
guggauauugacuaggagaguuuaaaa

SEQ ID NO: 119516 - RNA, 27 nt, Artificial Sequence
  Description of Artificial Sequence: Synthetic oligonucleotide
ugugacugaacauaacuguaggcugaa

SEQ ID NO: 119517 - RNA, 27 nt, Artificial Sequence
  Description of Artificial Sequence: Synthetic oligonucleotide
guaugugugugugacugaacauaacug

SEQ ID NO: 119518 - RNA, 27 nt, Artificial Sequence
  Description of Artificial Sequence: Synthetic oligonucleotide
aagcaaaaggaacauuuuguaugugug

SEQ ID NO: 119519 - RNA, 27 nt, Artificial Sequence
  Description of Artificial Sequence: Synthetic oligonucleotide
aaaaauuacuuuaaaagcaaaaggaac

SEQ ID NO: 119520 - RNA, 27 nt, Artificial Sequence
  Description of Artificial Sequence: Synthetic oligonucleotide
ccauugacuguugcuucacaggucaga

SEQ ID NO: 119521 - RNA, 27 nt, Artificial Sequence
  Description of Artificial Sequence: Synthetic oligonucleotide
auugguuugucgaugugugagauaguu

SEQ ID NO: 119522 - RNA, 27 nt, Artificial Sequence
  Description of Artificial Sequence: Synthetic oligonucleotide
agugguagcaguacaauugaggacaag

SEQ ID NO: 119523 - RNA, 27 nt, Artificial Sequence
  Description of Artificial Sequence: Synthetic oligonucleotide
uaagaccgcuugccagcuacgguuuca

SEQ ID NO: 119524 - RNA, 27 nt, Artificial Sequence
  Description of Artificial Sequence: Synthetic oligonucleotide
agccgguaagaccgcuugccagcuacg

SEQ ID NO: 119525 - RNA, 27 nt, Artificial Sequence
  Description of Artificial Sequence: Synthetic oligonucleotide
gguaacccaucuuuuaaccauacaacu

SEQ ID NO: 119526 - RNA, 27 nt, Artificial Sequence
  Description of Artificial Sequence: Synthetic oligonucleotide
ucgcagguaacccaucuuuuaaccaua

SEQ ID NO: 119527 - RNA, 27 nt, Artificial Sequence
  Description of Artificial Sequence: Synthetic oligonucleotide
cucagcaagauuguauaauucccugca

SEQ ID NO: 119528 - RNA, 27 nt, Artificial Sequence
  Description of Artificial Sequence: Synthetic oligonucleotide
acuguuuuaugcucagcaagauuguau

SEQ ID NO: 119529 - RNA, 27 nt, Artificial Sequence
  Description of Artificial Sequence: Synthetic oligonucleotide
aggauaaaggacucuucauuauuggaa

SEQ ID NO: 119530 - RNA, 27 nt, Artificial Sequence
  Description of Artificial Sequence: Synthetic oligonucleotide
caacuugcguuggaacauccaaagugu

SEQ ID NO: 119531 - RNA, 27 nt, Artificial Sequence
  Description of Artificial Sequence: Synthetic oligonucleotide
augguuucaguuuaguggaagcauuua

SEQ ID NO: 119532 - RNA, 27 nt, Artificial Sequence
  Description of Artificial Sequence: Synthetic oligonucleotide
auauuuaacaaagucaaacuuucucac

SEQ ID NO: 119533 - RNA, 27 nt, Artificial Sequence
  Description of Artificial Sequence: Synthetic oligonucleotide
aacuuuuaauauacaguaguucuuuuc

SEQ ID NO: 119534 - RNA, 27 nt, Artificial Sequence
  Description of Artificial Sequence: Synthetic oligonucleotide
guuaagucaaaacccguauuucuaaag

SEQ ID NO: 119535 - RNA, 27 nt, Artificial Sequence
  Description of Artificial Sequence: Synthetic oligonucleotide
gugcugaguuugcuguacccauguuga

SEQ ID NO: 119536 - RNA, 27 nt, Artificial Sequence
  Description of Artificial Sequence: Synthetic oligonucleotide
ugaggucagcaucuucugugucuuuac

SEQ ID NO: 119537 - RNA, 27 nt, Artificial Sequence
  Description of Artificial Sequence: Synthetic oligonucleotide
gcgaucugaauaaaccucccuacuagc

SEQ ID NO: 119538 - RNA, 27 nt, Artificial Sequence
  Description of Artificial Sequence: Synthetic oligonucleotide
aucccagaacccugcugcagaaggcca

SEQ ID NO: 119539 - RNA, 27 nt, Artificial Sequence
  Description of Artificial Sequence: Synthetic oligonucleotide
cauaauuuccaauauguaccagaccuu

SEQ ID NO: 119540 - RNA, 27 nt, Artificial Sequence
  Description of Artificial Sequence: Synthetic oligonucleotide
cuagugcuuccaucggaaggacuaggu

SEQ ID NO: 119541 - RNA, 27 nt, Artificial Sequence
  Description of Artificial Sequence: Synthetic oligonucleotide
uccacauaaaaacaauauucacuggga

SEQ ID NO: 119542 - RNA, 27 nt, Artificial Sequence
  Description of Artificial Sequence: Synthetic oligonucleotide
ucuaccaauuccaacuugaauucauug

SEQ ID NO: 119543 - RNA, 27 nt, Artificial Sequence
  Description of Artificial Sequence: Synthetic oligonucleotide
ucuccaagucuaaaucuguguccugag

SEQ ID NO: 119544 - RNA, 27 nt, Artificial Sequence
  Description of Artificial Sequence: Synthetic oligonucleotide
uggaauacuguaacugugcuuugagga

SEQ ID NO: 119545 - RNA, 27 nt, Artificial Sequence
  Description of Artificial Sequence: Synthetic oligonucleotide
uuaauucaucagugguggcagugguag

SEQ ID NO: 119546 - RNA, 27 nt, Artificial Sequence
  Description of Artificial Sequence: Synthetic oligonucleotide
gugaugauguggcacuaguaguuucuu

SEQ ID NO: 119547 - RNA, 27 nt, Artificial Sequence
  Description of Artificial Sequence: Synthetic oligonucleotide
ucuguuuggugaggcuguccgacuuug

SEQ ID NO: 119548 - RNA, 27 nt, Artificial Sequence
  Description of Artificial Sequence: Synthetic oligonucleotide
ccaucauguuccauuuuucgcuuucuc

SEQ ID NO: 119549 - RNA, 27 nt, Artificial Sequence
  Description of Artificial Sequence: Synthetic oligonucleotide
gcagucuacaugcuaaaucagagggua

SEQ ID NO: 119550 - RNA, 27 nt, Artificial Sequence
  Description of Artificial Sequence: Synthetic oligonucleotide
cauaaauagauccuuaaauagcucaaa

SEQ ID NO: 119551 - RNA, 27 nt, Artificial Sequence
  Description of Artificial Sequence: Synthetic oligonucleotide
ugauaauagugcuuuuucaccuuuuuc

SEQ ID NO: 119552 - RNA, 27 nt, Artificial Sequence
  Description of Artificial Sequence: Synthetic oligonucleotide
gcagaacugauaauagugcuuuuucac

SEQ ID NO: 119553 - RNA, 27 nt, Artificial Sequence
  Description of Artificial Sequence: Synthetic oligonucleotide
guagguuuaaucuuucuuuucagccau

SEQ ID NO: 119554 - RNA, 27 nt, Artificial Sequence
  Description of Artificial Sequence: Synthetic oligonucleotide
agaaggauuuuauuauaaggguuuaau

SEQ ID NO: 119555 - RNA, 27 nt, Artificial Sequence
  Description of Artificial Sequence: Synthetic oligonucleotide
gucuacagcauuggcuaauaguaugaa

SEQ ID NO: 119556 - RNA, 27 nt, Artificial Sequence
  Description of Artificial Sequence: Synthetic oligonucleotide
cuauuccuaucaaaaugcuucugucua

SEQ ID NO: 119557 - RNA, 27 nt, Artificial Sequence
  Description of Artificial Sequence: Synthetic oligonucleotide
ucagggccauuaucuuauuugcucuau

SEQ ID NO: 119558 - RNA, 27 nt, Artificial Sequence
  Description of Artificial Sequence: Synthetic oligonucleotide
ugcuugaggaagagaaaaauguugguc

SEQ ID NO: 119559 - RNA, 27 nt, Artificial Sequence
  Description of Artificial Sequence: Synthetic oligonucleotide
ugggcugaacuuuucucauacuuaaag

SEQ ID NO: 119560 - RNA, 27 nt, Artificial Sequence
  Description of Artificial Sequence: Synthetic oligonucleotide
gguucagcagccaucuuuauuccugcg

SEQ ID NO: 119561 - RNA, 27 nt, Artificial Sequence
  Description of Artificial Sequence: Synthetic oligonucleotide
ugaagagaacuuggucauucaaauuuc

SEQ ID NO: 119562 - RNA, 27 nt, Artificial Sequence
  Description of Artificial Sequence: Synthetic oligonucleotide
cucuaggcuggcuaucuuuauacauac

SEQ ID NO: 119563 - RNA, 27 nt, Artificial Sequence
  Description of Artificial Sequence: Synthetic oligonucleotide
acacuucacagagauaguuacagccau

SEQ ID NO: 119564 - RNA, 27 nt, Artificial Sequence
  Description of Artificial Sequence: Synthetic oligonucleotide
uugaaauuuucucacacuucacagaga

SEQ ID NO: 119565 - RNA, 27 nt, Artificial Sequence
  Description of Artificial Sequence: Synthetic oligonucleotide
ucaggaggauucauuuccuuaaaggaa

SEQ ID NO: 119566 - RNA, 27 nt, Artificial Sequence
  Description of Artificial Sequence: Synthetic oligonucleotide
auaugaugucacuuuuuguauccuuga

SEQ ID NO: 119567 - RNA, 27 nt, Artificial Sequence
  Description of Artificial Sequence: Synthetic oligonucleotide
uaugaugaagauucaaauugcaucuua

SEQ ID NO: 119568 - RNA, 27 nt, Artificial Sequence
  Description of Artificial Sequence: Synthetic oligonucleotide
uuaauagcuagucuucguuuugaacag

SEQ ID NO: 119569 - RNA, 27 nt, Artificial Sequence
  Description of Artificial Sequence: Synthetic oligonucleotide
auuuuuaguagagaugagguuucacca

SEQ ID NO: 119570 - RNA, 27 nt, Artificial Sequence
  Description of Artificial Sequence: Synthetic oligonucleotide
aggcgagauagagcuucucuuucguuc

SEQ ID NO: 119571 - RNA, 27 nt, Artificial Sequence
  Description of Artificial Sequence: Synthetic oligonucleotide
aacuggaccgaaggcgcuuguggagaa

SEQ ID NO: 119572 - RNA, 27 nt, Artificial Sequence
  Description of Artificial Sequence: Synthetic oligonucleotide
gcggcuacaucuuuggaaucuucuccu

SEQ ID NO: 119573 - RNA, 27 nt, Artificial Sequence
  Description of Artificial Sequence: Synthetic oligonucleotide
caagucuccucauugaauccagauugg

SEQ ID NO: 119574 - RNA, 27 nt, Artificial Sequence
  Description of Artificial Sequence: Synthetic oligonucleotide
uccucacuacucucaaaucuguucugg

SEQ ID NO: 119575 - RNA, 27 nt, Artificial Sequence
  Description of Artificial Sequence: Synthetic oligonucleotide
uuuguacucaucugcacagcucuggcu

SEQ ID NO: 119576 - RNA, 27 nt, Artificial Sequence
  Description of Artificial Sequence: Synthetic oligonucleotide
gcccauuaacaacaacaaucugaggug

SEQ ID NO: 119577 - RNA, 27 nt, Artificial Sequence
  Description of Artificial Sequence: Synthetic oligonucleotide
aauaaauuaaaaauaauuaaaauagug

SEQ ID NO: 119578 - RNA, 27 nt, Artificial Sequence
  Description of Artificial Sequence: Synthetic oligonucleotide
cauauuuaaauauuaauaaauuaaaaa

SEQ ID NO: 119579 - RNA, 27 nt, Artificial Sequence
  Description of Artificial Sequence: Synthetic oligonucleotide
gaaacaaaggauauucaaacugcauag

SEQ ID NO: 119580 - RNA, 27 nt, Artificial Sequence
  Description of Artificial Sequence: Synthetic oligonucleotide
caaacacuuagacgccagcagcauggg

SEQ ID NO: 119581 - RNA, 27 nt, Artificial Sequence
  Description of Artificial Sequence: Synthetic oligonucleotide
uuugucacaggugaaaugcacaucuga

SEQ ID NO: 119582 - RNA, 27 nt, Artificial Sequence
  Description of Artificial Sequence: Synthetic oligonucleotide
uaauucagccuggcacagguuuugauc

SEQ ID NO: 119583 - RNA, 27 nt, Artificial Sequence
  Description of Artificial Sequence: Synthetic oligonucleotide
auuguaagaaugacuacccacauucac

SEQ ID NO: 119584 - RNA, 27 nt, Artificial Sequence
  Description of Artificial Sequence: Synthetic oligonucleotide
caauuguaagaaugacuacccacauuc

SEQ ID NO: 119585 - RNA, 27 nt, Artificial Sequence
  Description of Artificial Sequence: Synthetic oligonucleotide
guacacucucugaugcucauuuucaua

SEQ ID NO: 119586 - RNA, 27 nt, Artificial Sequence
  Description of Artificial Sequence: Synthetic oligonucleotide
cugcugaguucuacaugaaaagcaaau

SEQ ID NO: 119587 - RNA, 27 nt, Artificial Sequence
  Description of Artificial Sequence: Synthetic oligonucleotide
uacugaaaauaaauauagaaauacaac

SEQ ID NO: 119588 - RNA, 27 nt, Artificial Sequence
  Description of Artificial Sequence: Synthetic oligonucleotide
uuccauuuaagaaacauuaaucaaaac

SEQ ID NO: 119589 - RNA, 27 nt, Artificial Sequence
  Description of Artificial Sequence: Synthetic oligonucleotide
acaauuuuaggcacuauacacguuguu

SEQ ID NO: 119590 - RNA, 27 nt, Artificial Sequence
  Description of Artificial Sequence: Synthetic oligonucleotide
ccagauguuaguagccaaggauauggu

SEQ ID NO: 119591 - RNA, 27 nt, Artificial Sequence
  Description of Artificial Sequence: Synthetic oligonucleotide
agcucacagucuccagauguuaguagc

SEQ ID NO: 119592 - RNA, 27 nt, Artificial Sequence
  Description of Artificial Sequence: Synthetic oligonucleotide
auuaauaaaaagcacacaacuuauggc

SEQ ID NO: 119593 - RNA, 27 nt, Artificial Sequence
  Description of Artificial Sequence: Synthetic oligonucleotide
aauguaagaagagccaaaaugaugcau

SEQ ID NO: 119594 - RNA, 27 nt, Artificial Sequence
  Description of Artificial Sequence: Synthetic oligonucleotide
acauuuuuacaaauguaagaagagcca

SEQ ID NO: 119595 - RNA, 27 nt, Artificial Sequence
  Description of Artificial Sequence: Synthetic oligonucleotide
aauaugaauuaagaugaccuaaucugu

SEQ ID NO: 119596 - RNA, 27 nt, Artificial Sequence
  Description of Artificial Sequence: Synthetic oligonucleotide
ucaugauuaguucuuucaauuccaucc

SEQ ID NO: 119597 - RNA, 27 nt, Artificial Sequence
  Description of Artificial Sequence: Synthetic oligonucleotide
cccaagagcagaaggaaugagugugca

SEQ ID NO: 119598 - RNA, 27 nt, Artificial Sequence
  Description of Artificial Sequence: Synthetic oligonucleotide
cucaaagcuacugguuaccucuacacc

SEQ ID NO: 119599 - RNA, 27 nt, Artificial Sequence
  Description of Artificial Sequence: Synthetic oligonucleotide
ugaaauauuacguggcaugugguuggg

SEQ ID NO: 119600 - RNA, 27 nt, Artificial Sequence
  Description of Artificial Sequence: Synthetic oligonucleotide
agugaagagaauaacuuguuuccgaag

SEQ ID NO: 119601 - RNA, 27 nt, Artificial Sequence
  Description of Artificial Sequence: Synthetic oligonucleotide
uuucuuagcauuaguuauugggaguga

SEQ ID NO: 119602 - RNA, 27 nt, Artificial Sequence
  Description of Artificial Sequence: Synthetic oligonucleotide
uugauuuucagcauuucuuagcauuag

SEQ ID NO: 119603 - RNA, 27 nt, Artificial Sequence
  Description of Artificial Sequence: Synthetic oligonucleotide
aaaguaaucauauuuagagaaagacag

SEQ ID NO: 119604 - RNA, 27 nt, Artificial Sequence
  Description of Artificial Sequence: Synthetic oligonucleotide
uguagaacaaaaugccugaaauucagc

SEQ ID NO: 119605 - RNA, 27 nt, Artificial Sequence
  Description of Artificial Sequence: Synthetic oligonucleotide
gagagucccgggugagagggaaucgcc

SEQ ID NO: 119606 - RNA, 27 nt, Artificial Sequence
  Description of Artificial Sequence: Synthetic oligonucleotide
cuuuacuuuaaagguucacuuuccuug

SEQ ID NO: 119607 - RNA, 27 nt, Artificial Sequence
  Description of Artificial Sequence: Synthetic oligonucleotide
ccaggcuuccagagcaugcagccuccu

SEQ ID NO: 119608 - RNA, 27 nt, Artificial Sequence
  Description of Artificial Sequence: Synthetic oligonucleotide
cucucuuuuguuuucuguucagagaaa

SEQ ID NO: 119609 - RNA, 27 nt, Artificial Sequence
  Description of Artificial Sequence: Synthetic oligonucleotide
cggcauaacugauuacagccaaguuca

SEQ ID NO: 119610 - RNA, 27 nt, Artificial Sequence
  Description of Artificial Sequence: Synthetic oligonucleotide
uggacuucuuuuaauuuuggcuucuuc

SEQ ID NO: 119611 - RNA, 27 nt, Artificial Sequence
  Description of Artificial Sequence: Synthetic oligonucleotide
uaaccucaccuggacuucuuuuaauuu

SEQ ID NO: 119612 - RNA, 27 nt, Artificial Sequence
  Description of Artificial Sequence: Synthetic oligonucleotide
guccucuucccgauaauccggauucag

SEQ ID NO: 119613 - RNA, 27 nt, Artificial Sequence
  Description of Artificial Sequence: Synthetic oligonucleotide
acaauacuugcuuugaugucacauuaa

SEQ ID NO: 119614 - RNA, 27 nt, Artificial Sequence
  Description of Artificial Sequence: Synthetic oligonucleotide
gagugcuacaauacuugcuuugauguc

SEQ ID NO: 119615 - RNA, 27 nt, Artificial Sequence
  Description of Artificial Sequence: Synthetic oligonucleotide
auuugugguuuuguuuucucucucucu

SEQ ID NO: 119616 - RNA, 27 nt, Artificial Sequence
  Description of Artificial Sequence: Synthetic oligonucleotide
uguaugggcuuaaauacuacagcgagg

SEQ ID NO: 119617 - RNA, 27 nt, Artificial Sequence
  Description of Artificial Sequence: Synthetic oligonucleotide
cuguaugggcuuaaauacuacagcgag

SEQ ID NO: 119618 - RNA, 27 nt, Artificial Sequence
  Description of Artificial Sequence: Synthetic oligonucleotide
ggaagguuucuguaugggcuuaaauac

SEQ ID NO: 119619 - RNA, 27 nt, Artificial Sequence
  Description of Artificial Sequence: Synthetic oligonucleotide
guagguauaccauguuuauuuuaauac

SEQ ID NO: 119620 - RNA, 27 nt, Artificial Sequence
  Description of Artificial Sequence: Synthetic oligonucleotide
uccgaaaacuggccgaucagaacagcc

SEQ ID NO: 119621 - RNA, 27 nt, Artificial Sequence
  Description of Artificial Sequence: Synthetic oligonucleotide
cccuguuccaaaguucaaauuauuugu

SEQ ID NO: 119622 - RNA, 27 nt, Artificial Sequence
  Description of Artificial Sequence: Synthetic oligonucleotide
acuggaaaguuaaauuaaggucgcaau

SEQ ID NO: 119623 - RNA, 27 nt, Artificial Sequence
  Description of Artificial Sequence: Synthetic oligonucleotide
caaaaccaaacuuuagcuuucucagcc

SEQ ID NO: 119624 - RNA, 27 nt, Artificial Sequence
  Description of Artificial Sequence: Synthetic oligonucleotide
uacagugggaaguagcaucuuuacuuu

SEQ ID NO: 119625 - RNA, 27 nt, Artificial Sequence
  Description of Artificial Sequence: Synthetic oligonucleotide
ucauaugguaucagcaauuaagcagua

SEQ ID NO: 119626 - RNA, 27 nt, Artificial Sequence
  Description of Artificial Sequence: Synthetic oligonucleotide
cagcccauguuucauucauaugguauc

SEQ ID NO: 119627 - RNA, 27 nt, Artificial Sequence
  Description of Artificial Sequence: Synthetic oligonucleotide
uaugaaaaaguuggauaagaaaguugg

SEQ ID NO: 119628 - RNA, 27 nt, Artificial Sequence
  Description of Artificial Sequence: Synthetic oligonucleotide
uccggccucaugaugucaugcaaggcu

SEQ ID NO: 119629 - RNA, 27 nt, Artificial Sequence
  Description of Artificial Sequence: Synthetic oligonucleotide
acaaaugcagucauauacaaauucagg

SEQ ID NO: 119630 - RNA, 27 nt, Artificial Sequence
  Description of Artificial Sequence: Synthetic oligonucleotide
gguaguaaacauucuacuaggauucuu

SEQ ID NO: 119631 - RNA, 27 nt, Artificial Sequence
  Description of Artificial Sequence: Synthetic oligonucleotide
uuucaucaaaaaauucuucccuuucug

SEQ ID NO: 119632 - RNA, 27 nt, Artificial Sequence
  Description of Artificial Sequence: Synthetic oligonucleotide
aaauucacacacuggcaugccgauagc

SEQ ID NO: 119633 - RNA, 27 nt, Artificial Sequence
  Description of Artificial Sequence: Synthetic oligonucleotide
acauacauugcucuacuaugaggugaa

SEQ ID NO: 119634 - RNA, 27 nt, Artificial Sequence
  Description of Artificial Sequence: Synthetic oligonucleotide
uauauaugugcuuuggcaauucuggug

SEQ ID NO: 119635 - RNA, 27 nt, Artificial Sequence
  Description of Artificial Sequence: Synthetic oligonucleotide
ggagaaacuauuacccagaucaccacu

SEQ ID NO: 119636 - RNA, 27 nt, Artificial Sequence
  Description of Artificial Sequence: Synthetic oligonucleotide
auuuggagaaacuauuacccagaucac

SEQ ID NO: 119637 - RNA, 27 nt, Artificial Sequence
  Description of Artificial Sequence: Synthetic oligonucleotide
uuucuaggaaguauucaucacauccac

SEQ ID NO: 119638 - RNA, 27 nt, Artificial Sequence
  Description of Artificial Sequence: Synthetic oligonucleotide
cauauaugguguagcuguggaaaugcg

SEQ ID NO: 119639 - RNA, 27 nt, Artificial Sequence
  Description of Artificial Sequence: Synthetic oligonucleotide
cuccauucauauaugguguagcugugg

SEQ ID NO: 119640 - RNA, 27 nt, Artificial Sequence
  Description of Artificial Sequence: Synthetic oligonucleotide
aucuucuucucguguaagaacugcagc

SEQ ID NO: 119641 - RNA, 27 nt, Artificial Sequence
  Description of Artificial Sequence: Synthetic oligonucleotide
ucccuguaaaugaucuucuucucgugu

SEQ ID NO: 119642 - RNA, 27 nt, Artificial Sequence
  Description of Artificial Sequence: Synthetic oligonucleotide
gucccuguaaaugaucuucuucucgug

SEQ ID NO: 119643 - RNA, 27 nt, Artificial Sequence
  Description of Artificial Sequence: Synthetic oligonucleotide
ucaggucccuguaaaugaucuucuucu

SEQ ID NO: 119644 - RNA, 27 nt, Artificial Sequence
  Description of Artificial Sequence: Synthetic oligonucleotide
gaugcagucaaacaccucuuccucugu

SEQ ID NO: 119645 - RNA, 27 nt, Artificial Sequence
  Description of Artificial Sequence: Synthetic oligonucleotide
cgaugcagucaaacaccucuuccucug

SEQ ID NO: 119646 - RNA, 27 nt, Artificial Sequence
  Description of Artificial Sequence: Synthetic oligonucleotide
cccugugaacucgcccucaaaguagcg

SEQ ID NO: 119647 - RNA, 27 nt, Artificial Sequence
  Description of Artificial Sequence: Synthetic oligonucleotide
ggacagaggugccaggagaugcccuca

SEQ ID NO: 119648 - RNA, 27 nt, Artificial Sequence
  Description of Artificial Sequence: Synthetic oligonucleotide
uuaaaaagacaaaccauaucacuccuu

SEQ ID NO: 119649 - RNA, 27 nt, Artificial Sequence
  Description of Artificial Sequence: Synthetic oligonucleotide
cuuaaaaagacaaaccauaucacuccu

SEQ ID NO: 119650 - RNA, 27 nt, Artificial Sequence
  Description of Artificial Sequence: Synthetic oligonucleotide
gacaaccuuuaggaucuuuacugcaac

SEQ ID NO: 119651 - RNA, 27 nt, Artificial Sequence
  Description of Artificial Sequence: Synthetic oligonucleotide
gucgacaaccuuuaggaucuuuacugc

SEQ ID NO: 119652 - RNA, 27 nt, Artificial Sequence
  Description of Artificial Sequence: Synthetic oligonucleotide
acaauugccagguuguccuuugucaug

SEQ ID NO: 119653 - RNA, 27 nt, Artificial Sequence
  Description of Artificial Sequence: Synthetic oligonucleotide
ccucgcaccacugggucacaauugcca

SEQ ID NO: 119654 - RNA, 27 nt, Artificial Sequence
  Description of Artificial Sequence: Synthetic oligonucleotide
auuucaugucucuauggaugauguucu

SEQ ID NO: 119655 - RNA, 27 nt, Artificial Sequence
  Description of Artificial Sequence: Synthetic oligonucleotide
uggagaaauauauuguuggauuucaug

SEQ ID NO: 119656 - RNA, 27 nt, Artificial Sequence
  Description of Artificial Sequence: Synthetic oligonucleotide
agccuucauggagaaauauauuguugg

SEQ ID NO: 119657 - RNA, 27 nt, Artificial Sequence
  Description of Artificial Sequence: Synthetic oligonucleotide
accacuccagcgugacuuuacuguugc

SEQ ID NO: 119658 - RNA, 27 nt, Artificial Sequence
  Description of Artificial Sequence: Synthetic oligonucleotide
ccucucuuccuuuacuuucuucacaca

SEQ ID NO: 119659 - RNA, 27 nt, Artificial Sequence
  Description of Artificial Sequence: Synthetic oligonucleotide
gcccgaugcaaggauggcucggaagcg

SEQ ID NO: 119660 - RNA, 27 nt, Artificial Sequence
  Description of Artificial Sequence: Synthetic oligonucleotide
cacaguaggauauucaaccuccauuuc

SEQ ID NO: 119661 - RNA, 27 nt, Artificial Sequence
  Description of Artificial Sequence: Synthetic oligonucleotide
uuacacaguaggauauucaaccuccau

SEQ ID NO: 119662 - RNA, 27 nt, Artificial Sequence
  Description of Artificial Sequence: Synthetic oligonucleotide
uacacuacaagggaaaacucaaaaucu

SEQ ID NO: 119663 - RNA, 27 nt, Artificial Sequence
  Description of Artificial Sequence: Synthetic oligonucleotide
caaucaacaaagaacaaacaggauaaa

SEQ ID NO: 119664 - RNA, 27 nt, Artificial Sequence
  Description of Artificial Sequence: Synthetic oligonucleotide
uuucaaucaacaaagaacaaacaggau

SEQ ID NO: 119665 - RNA, 27 nt, Artificial Sequence
  Description of Artificial Sequence: Synthetic oligonucleotide
auggaagaaaaagaaggcuguagagaa

SEQ ID NO: 119666 - RNA, 27 nt, Artificial Sequence
  Description of Artificial Sequence: Synthetic oligonucleotide
uagaaggaagauuagcuauggaagaaa

SEQ ID NO: 119667 - RNA, 27 nt, Artificial Sequence
  Description of Artificial Sequence: Synthetic oligonucleotide
augaagcauucaacaggaagauuauuu

SEQ ID NO: 119668 - RNA, 27 nt, Artificial Sequence
  Description of Artificial Sequence: Synthetic oligonucleotide
caugaagcauucaacaggaagauuauu

SEQ ID NO: 119669 - RNA, 27 nt, Artificial Sequence
  Description of Artificial Sequence: Synthetic oligonucleotide
ucaaaguagaauucaagucaugaagca

SEQ ID NO: 119670 - RNA, 27 nt, Artificial Sequence
  Description of Artificial Sequence: Synthetic oligonucleotide
gucuguaguugcuucucucccucuuag

SEQ ID NO: 119671 - RNA, 27 nt, Artificial Sequence
  Description of Artificial Sequence: Synthetic oligonucleotide
guugaccuuggucugguaggagacggc

SEQ ID NO: 119672 - RNA, 27 nt, Artificial Sequence
  Description of Artificial Sequence: Synthetic oligonucleotide
gucgagauagucgggccgauugaucuc

SEQ ID NO: 119673 - RNA, 27 nt, Artificial Sequence
  Description of Artificial Sequence: Synthetic oligonucleotide
guuugggaagguuggauguucguccuc

SEQ ID NO: 119674 - RNA, 27 nt, Artificial Sequence
  Description of Artificial Sequence: Synthetic oligonucleotide
aguucuaagcuuggguuccgacccuaa

SEQ ID NO: 119675 - RNA, 27 nt, Artificial Sequence
  Description of Artificial Sequence: Synthetic oligonucleotide
uuaaaguucuaagcuuggguuccgacc

SEQ ID NO: 119676 - RNA, 27 nt, Artificial Sequence
  Description of Artificial Sequence: Synthetic oligonucleotide
guugcuuaaaguucuaagcuuggguuc

SEQ ID NO: 119677 - RNA, 27 nt, Artificial Sequence
  Description of Artificial Sequence: Synthetic oligonucleotide
gugguggucuuguugcuuaaaguucua

SEQ ID NO: 119678 - RNA, 27 nt, Artificial Sequence
  Description of Artificial Sequence: Synthetic oligonucleotide
acuuuauuucucgccacugaauaguag

SEQ ID NO: 119679 - RNA, 27 nt, Artificial Sequence
  Description of Artificial Sequence: Synthetic oligonucleotide
aacuuuauuucucgccacugaauagua

SEQ ID NO: 119680 - RNA, 27 nt, Artificial Sequence
  Description of Artificial Sequence: Synthetic oligonucleotide
ggaucauuuccuguuaucuguguuugu

SEQ ID NO: 119681 - RNA, 27 nt, Artificial Sequence
  Description of Artificial Sequence: Synthetic oligonucleotide
guuucauuucuucucuuuucuuaaggc

SEQ ID NO: 119682 - RNA, 27 nt, Artificial Sequence
  Description of Artificial Sequence: Synthetic oligonucleotide
ggaggauggaaacacacuccuucaguu

SEQ ID NO: 119683 - RNA, 27 nt, Artificial Sequence
  Description of Artificial Sequence: Synthetic oligonucleotide
ucaaagauuuucagucccgcggugaca

SEQ ID NO: 119684 - RNA, 27 nt, Artificial Sequence
  Description of Artificial Sequence: Synthetic oligonucleotide
ccugaacggcacgcuuauuucugcugu

SEQ ID NO: 119685 - RNA, 27 nt, Artificial Sequence
  Description of Artificial Sequence: Synthetic oligonucleotide
cuucuggacccugaacggcacgcuuau

SEQ ID NO: 119686 - RNA, 27 nt, Artificial Sequence
  Description of Artificial Sequence: Synthetic oligonucleotide
caagcagucuugagugacuguuucuuc

SEQ ID NO: 119687 - RNA, 27 nt, Artificial Sequence
  Description of Artificial Sequence: Synthetic oligonucleotide
ccaaagacauggaccuucuuccucuga

SEQ ID NO: 119688 - RNA, 27 nt, Artificial Sequence
  Description of Artificial Sequence: Synthetic oligonucleotide
guguuucaggcauauuuugaauacauc

SEQ ID NO: 119689 - RNA, 27 nt, Artificial Sequence
  Description of Artificial Sequence: Synthetic oligonucleotide
gagguacagagaaagggaggaaaauag

SEQ ID NO: 119690 - RNA, 27 nt, Artificial Sequence
  Description of Artificial Sequence: Synthetic oligonucleotide
ucuugucuugcucuaucuuucuuuggu

SEQ ID NO: 119691 - RNA, 27 nt, Artificial Sequence
  Description of Artificial Sequence: Synthetic oligonucleotide
uuucuugucuugcucuaucuuucuuug

SEQ ID NO: 119692 - RNA, 27 nt, Artificial Sequence
  Description of Artificial Sequence: Synthetic oligonucleotide
ggaucuuguacaaacaaaugcuuucuc

SEQ ID NO: 119693 - RNA, 27 nt, Artificial Sequence
  Description of Artificial Sequence: Synthetic oligonucleotide
ucugcaaguacguucguuuaacucaag

SEQ ID NO: 119694 - RNA, 27 nt, Artificial Sequence
  Description of Artificial Sequence: Synthetic oligonucleotide
ucuguaucgaucguucuguaucagucu

SEQ ID NO: 119695 - RNA, 27 nt, Artificial Sequence
  Description of Artificial Sequence: Synthetic oligonucleotide
auuuauuuuuauauauauauaauauau

SEQ ID NO: 119696 - RNA, 27 nt, Artificial Sequence
  Description of Artificial Sequence: Synthetic oligonucleotide
auauuuauuuuuauauauauauaauau

SEQ ID NO: 119697 - RNA, 27 nt, Artificial Sequence
  Description of Artificial Sequence: Synthetic oligonucleotide
cacagcagucaaauacauccagugaag

SEQ ID NO: 119698 - RNA, 27 nt, Artificial Sequence
  Description of Artificial Sequence: Synthetic oligonucleotide
gucucucaucuccuccucuucccuguc

SEQ ID NO: 119699 - RNA, 27 nt, Artificial Sequence
  Description of Artificial Sequence: Synthetic oligonucleotide
ccaagugggacaaaaaaaagaucaugc

SEQ ID NO: 119700 - RNA, 14 nt, Artificial Sequence
  Description of Artificial Sequence: Synthetic oligonucleotide
guauuuugaugagg

SEQ ID NO: 119701 - RNA, 12 nt, Artificial Sequence
  Description of Artificial Sequence: Synthetic oligonucleotide
ggcccagaugau

SEQ ID NO: 119702 - RNA, 14 nt, Artificial Sequence
  Description of Artificial Sequence: Synthetic oligonucleotide
gggaagaaaacuau

SEQ ID NO: 119703 - RNA, 15 nt, Artificial Sequence
  Description of Artificial Sequence: Synthetic oligonucleotide
guuuuaauuuauuuc

SEQ ID NO: 119704 - RNA, 12 nt, Artificial Sequence
  Description of Artificial Sequence: Synthetic oligonucleotide
acguagggaaau

SEQ ID NO: 119705 - RNA, 12 nt, Artificial Sequence
  Description of Artificial Sequence: Synthetic oligonucleotide
ccaggguuuacc

SEQ ID NO: 119706 - RNA, 11 nt, Artificial Sequence
  Description of Artificial Sequence: Synthetic oligonucleotide
agcaagguuua

SEQ ID NO: 119707 - RNA, 12 nt, Artificial Sequence
  Description of Artificial Sequence: Synthetic oligonucleotide
uguauuauguug

SEQ ID NO: 119708 - RNA, 15 nt, Artificial Sequence
  Description of Artificial Sequence: Synthetic oligonucleotide
uuuuaaucuuuguga

SEQ ID NO: 119709 - RNA, 14 nt, Artificial Sequence
  Description of Artificial Sequence: Synthetic oligonucleotide
uuaaucuuugugac

SEQ ID NO: 119710 - RNA, 13 nt, Artificial Sequence
  Description of Artificial Sequence: Synthetic oligonucleotide
gcugcuuaugucu

SEQ ID NO: 119711 - RNA, 14 nt, Artificial Sequence
  Description of Artificial Sequence: Synthetic oligonucleotide
aaguguuucagaag

SEQ ID NO: 119712 - RNA, 13 nt, Artificial Sequence
  Description of Artificial Sequence: Synthetic oligonucleotide
gaccaucaauaag

SEQ ID NO: 119713 - RNA, 13 nt, Artificial Sequence
  Description of Artificial Sequence: Synthetic oligonucleotide
ccaucaauaagga

SEQ ID NO: 119714 - RNA, 14 nt, Artificial Sequence
  Description of Artificial Sequence: Synthetic oligonucleotide
ucaauaaggaagaa

SEQ ID NO: 119715 - RNA, 14 nt, Artificial Sequence
  Description of Artificial Sequence: Synthetic oligonucleotide
aauaaggaagaagc

SEQ ID NO: 119716 - RNA, 13 nt, Artificial Sequence
  Description of Artificial Sequence: Synthetic oligonucleotide
aggaagaagcccu

SEQ ID NO: 119717 - RNA, 13 nt, Artificial Sequence
  Description of Artificial Sequence: Synthetic oligonucleotide
gcauaacuaaagg

SEQ ID NO: 119718 - RNA, 14 nt, Artificial Sequence
  Description of Artificial Sequence: Synthetic oligonucleotide
cauaacuaaaggug

SEQ ID NO: 119719 - RNA, 12 nt, Artificial Sequence
  Description of Artificial Sequence: Synthetic oligonucleotide
cuacaucacgcc

SEQ ID NO: 119720 - RNA, 12 nt, Artificial Sequence
  Description of Artificial Sequence: Synthetic oligonucleotide
acuggauuuaag

SEQ ID NO: 119721 - RNA, 12 nt, Artificial Sequence
  Description of Artificial Sequence: Synthetic oligonucleotide
cuggauuuaagc

SEQ ID NO: 119722 - RNA, 13 nt, Artificial Sequence
  Description of Artificial Sequence: Synthetic oligonucleotide
gauuuaagcagag

SEQ ID NO: 119723 - RNA, 13 nt, Artificial Sequence
  Description of Artificial Sequence: Synthetic oligonucleotide
auuuaagcagagu

SEQ ID NO: 119724 - RNA, 13 nt, Artificial Sequence
  Description of Artificial Sequence: Synthetic oligonucleotide
uuaagcagaguuc

SEQ ID NO: 119725 - RNA, 13 nt, Artificial Sequence
  Description of Artificial Sequence: Synthetic oligonucleotide
uaagcagaguuca

SEQ ID NO: 119726 - RNA, 14 nt, Artificial Sequence
  Description of Artificial Sequence: Synthetic oligonucleotide
agcagaguucaaaa

SEQ ID NO: 119727 - RNA, 12 nt, Artificial Sequence
  Description of Artificial Sequence: Synthetic oligonucleotide
cucagggucuga

SEQ ID NO: 119728 - RNA, 13 nt, Artificial Sequence
  Description of Artificial Sequence: Synthetic oligonucleotide
caagcaacuacau

SEQ ID NO: 119729 - RNA, 12 nt, Artificial Sequence
  Description of Artificial Sequence: Synthetic oligonucleotide
aucaauggcagc

SEQ ID NO: 119730 - RNA, 11 nt, Artificial Sequence
  Description of Artificial Sequence: Synthetic oligonucleotide
uuccagcccac

SEQ ID NO: 119731 - RNA, 12 nt, Artificial Sequence
  Description of Artificial Sequence: Synthetic oligonucleotide
cagcugagaaug

SEQ ID NO: 119732 - RNA, 13 nt, Artificial Sequence
  Description of Artificial Sequence: Synthetic oligonucleotide
aacguaucuccua

SEQ ID NO: 119733 - RNA, 14 nt, Artificial Sequence
  Description of Artificial Sequence: Synthetic oligonucleotide
ccuaaaauaauuuc

SEQ ID NO: 119734 - RNA, 13 nt, Artificial Sequence
  Description of Artificial Sequence: Synthetic oligonucleotide
uggaagauucagc

SEQ ID NO: 119735 - RNA, 12 nt, Artificial Sequence
  Description of Artificial Sequence: Synthetic oligonucleotide
uuaaacucuccu

SEQ ID NO: 119736 - RNA, 12 nt, Artificial Sequence
  Description of Artificial Sequence: Synthetic oligonucleotide
cagccuacaguu

SEQ ID NO: 119737 - RNA, 13 nt, Artificial Sequence
  Description of Artificial Sequence: Synthetic oligonucleotide
guuauguucaguc

SEQ ID NO: 119738 - RNA, 13 nt, Artificial Sequence
  Description of Artificial Sequence: Synthetic oligonucleotide
cacauacaaaaug

SEQ ID NO: 119739 - RNA, 9 nt, Artificial Sequence
  Description of Artificial Sequence: Synthetic oligonucleotide
uccuuuugc

SEQ ID NO: 119740 - RNA, 12 nt, Artificial Sequence
  Description of Artificial Sequence: Synthetic oligonucleotide
ugaccugugaag

SEQ ID NO: 119741 - RNA, 12 nt, Artificial Sequence
  Description of Artificial Sequence: Synthetic oligonucleotide
cuaucucacaca

SEQ ID NO: 119742 - RNA, 13 nt, Artificial Sequence
  Description of Artificial Sequence: Synthetic oligonucleotide
uguccucaauugu

SEQ ID NO: 119743 - RNA, 12 nt, Artificial Sequence
  Description of Artificial Sequence: Synthetic oligonucleotide
aaaccguagcug

SEQ ID NO: 119744 - RNA, 12 nt, Artificial Sequence
  Description of Artificial Sequence: Synthetic oligonucleotide
uagcuggcaagc

SEQ ID NO: 119745 - RNA, 14 nt, Artificial Sequence
  Description of Artificial Sequence: Synthetic oligonucleotide
uuguaugguuaaaa

SEQ ID NO: 119746 - RNA, 14 nt, Artificial Sequence
  Description of Artificial Sequence: Synthetic oligonucleotide
ugguuaaaagaugg

SEQ ID NO: 119747 - RNA, 13 nt, Artificial Sequence
  Description of Artificial Sequence: Synthetic oligonucleotide
cagggaauuauac

SEQ ID NO: 119748 - RNA, 12 nt, Artificial Sequence
  Description of Artificial Sequence: Synthetic oligonucleotide
acaaucuugcug

SEQ ID NO: 119749 - RNA, 13 nt, Artificial Sequence
  Description of Artificial Sequence: Synthetic oligonucleotide
ccaauaaugaaga

SEQ ID NO: 119750 - RNA, 13 nt, Artificial Sequence
  Description of Artificial Sequence: Synthetic oligonucleotide
acuuuggauguuc

SEQ ID NO: 119751 - RNA, 12 nt, Artificial Sequence
  Description of Artificial Sequence: Synthetic oligonucleotide
aaugcuuccacu

SEQ ID NO: 119752 - RNA, 11 nt, Artificial Sequence
  Description of Artificial Sequence: Synthetic oligonucleotide
gagaaaguuug

SEQ ID NO: 119753 - RNA, 11 nt, Artificial Sequence
  Description of Artificial Sequence: Synthetic oligonucleotide
aaagaacuacu

SEQ ID NO: 119754 - RNA, 12 nt, Artificial Sequence
  Description of Artificial Sequence: Synthetic oligonucleotide
uuagaaauacgg

SEQ ID NO: 119755 - RNA, 12 nt, Artificial Sequence
  Description of Artificial Sequence: Synthetic oligonucleotide
aacauggguaca

SEQ ID NO: 119756 - RNA, 14 nt, Artificial Sequence
  Description of Artificial Sequence: Synthetic oligonucleotide
aaagacacagaaga

SEQ ID NO: 119757 - RNA, 11 nt, Artificial Sequence
  Description of Artificial Sequence: Synthetic oligonucleotide
uaguagggagg

SEQ ID NO: 119758 - RNA, 12 nt, Artificial Sequence
  Description of Artificial Sequence: Synthetic oligonucleotide
gccuucugcagc

SEQ ID NO: 119759 - RNA, 10 nt, Artificial Sequence
  Description of Artificial Sequence: Synthetic oligonucleotide
ggucugguac

SEQ ID NO: 119760 - RNA, 12 nt, Artificial Sequence
  Description of Artificial Sequence: Synthetic oligonucleotide
cuaguccuuccg

SEQ ID NO: 119761 - RNA, 12 nt, Artificial Sequence
  Description of Artificial Sequence: Synthetic oligonucleotide
ccagugaauauu

SEQ ID NO: 119762 - RNA, 13 nt, Artificial Sequence
  Description of Artificial Sequence: Synthetic oligonucleotide
augaauucaaguu

SEQ ID NO: 119763 - RNA, 12 nt, Artificial Sequence
  Description of Artificial Sequence: Synthetic oligonucleotide
caggacacagau

SEQ ID NO: 119764 - RNA, 12 nt, Artificial Sequence
  Description of Artificial Sequence: Synthetic oligonucleotide
cucaaagcacag

SEQ ID NO: 119765 - RNA, 10 nt, Artificial Sequence
  Description of Artificial Sequence: Synthetic oligonucleotide
accacugcca

SEQ ID NO: 119766 - RNA, 13 nt, Artificial Sequence
  Description of Artificial Sequence: Synthetic oligonucleotide
gaaacuacuagug

SEQ ID NO: 119767 - RNA, 12 nt, Artificial Sequence
  Description of Artificial Sequence: Synthetic oligonucleotide
aagucggacagc

SEQ ID NO: 119768 - RNA, 13 nt, Artificial Sequence
  Description of Artificial Sequence: Synthetic oligonucleotide
gaaagcgaaaaau

SEQ ID NO: 119769 - RNA, 13 nt, Artificial Sequence
  Description of Artificial Sequence: Synthetic oligonucleotide
cccucugauuuag

SEQ ID NO: 119770 - RNA, 12 nt, Artificial Sequence
  Description of Artificial Sequence: Synthetic oligonucleotide
ugagcuauuuaa

SEQ ID NO: 119771 - RNA, 13 nt, Artificial Sequence
  Description of Artificial Sequence: Synthetic oligonucleotide
aaaaggugaaaaa

SEQ ID NO: 119772 - RNA, 14 nt, Artificial Sequence
  Description of Artificial Sequence: Synthetic oligonucleotide
gaaaaagcacuauu

SEQ ID NO: 119773 - RNA, 12 nt, Artificial Sequence
  Description of Artificial Sequence: Synthetic oligonucleotide
ggcugaaaagaa

SEQ ID NO: 119774 - RNA, 12 nt, Artificial Sequence
  Description of Artificial Sequence: Synthetic oligonucleotide
uaaacccuuaua

SEQ ID NO: 119775 - RNA, 13 nt, Artificial Sequence
  Description of Artificial Sequence: Synthetic oligonucleotide
cauacuauuagcc

SEQ ID NO: 119776 - RNA, 12 nt, Artificial Sequence
  Description of Artificial Sequence: Synthetic oligonucleotide
gacagaagcauu

SEQ ID NO: 119777 - RNA, 14 nt, Artificial Sequence
  Description of Artificial Sequence: Synthetic oligonucleotide
agagcaaauaagau

SEQ ID NO: 119778 - RNA, 14 nt, Artificial Sequence
  Description of Artificial Sequence: Synthetic oligonucleotide
ccaacauuuuucuc

SEQ ID NO: 119779 - RNA, 15 nt, Artificial Sequence
  Description of Artificial Sequence: Synthetic oligonucleotide
uuaaguaugagaaaa

SEQ ID NO: 119780 - RNA, 14 nt, Artificial Sequence
  Description of Artificial Sequence: Synthetic oligonucleotide
caggaauaaagaug

SEQ ID NO: 119781 - RNA, 13 nt, Artificial Sequence
  Description of Artificial Sequence: Synthetic oligonucleotide
aauuugaaugacc

SEQ ID NO: 119782 - RNA, 14 nt, Artificial Sequence
  Description of Artificial Sequence: Synthetic oligonucleotide
auguauaaagauag

SEQ ID NO: 119783 - RNA, 12 nt, Artificial Sequence
  Description of Artificial Sequence: Synthetic oligonucleotide
ggcuguaacuau

SEQ ID NO: 119784 - RNA, 11 nt, Artificial Sequence
  Description of Artificial Sequence: Synthetic oligonucleotide
ucugugaagug

SEQ ID NO: 119785 - RNA, 14 nt, Artificial Sequence
  Description of Artificial Sequence: Synthetic oligonucleotide
ccuuuaaggaaaug

SEQ ID NO: 119786 - RNA, 13 nt, Artificial Sequence
  Description of Artificial Sequence: Synthetic oligonucleotide
aaggauacaaaaa

SEQ ID NO: 119787 - RNA, 12 nt, Artificial Sequence
  Description of Artificial Sequence: Synthetic oligonucleotide
agaugcaauuug

SEQ ID NO: 119788 - RNA, 12 nt, Artificial Sequence
  Description of Artificial Sequence: Synthetic oligonucleotide
guucaaaacgaa

SEQ ID NO: 119789 - RNA, 11 nt, Artificial Sequence
  Description of Artificial Sequence: Synthetic oligonucleotide
gugaaaccuca

SEQ ID NO: 119790 - RNA, 13 nt, Artificial Sequence
  Description of Artificial Sequence: Synthetic oligonucleotide
acgaaagagaagc

SEQ ID NO: 119791 - RNA, 12 nt, Artificial Sequence
  Description of Artificial Sequence: Synthetic oligonucleotide
cuccacaagcgc

SEQ ID NO: 119792 - RNA, 14 nt, Artificial Sequence
  Description of Artificial Sequence: Synthetic oligonucleotide
gagaagauuccaaa

SEQ ID NO: 119793 - RNA, 13 nt, Artificial Sequence
  Description of Artificial Sequence: Synthetic oligonucleotide
aaucuggauucaa

SEQ ID NO: 119794 - RNA, 13 nt, Artificial Sequence
  Description of Artificial Sequence: Synthetic oligonucleotide
agaacagauuuga

SEQ ID NO: 119795 - RNA, 11 nt, Artificial Sequence
  Description of Artificial Sequence: Synthetic oligonucleotide
ccagagcugug

SEQ ID NO: 119796 - RNA, 12 nt, Artificial Sequence
  Description of Artificial Sequence: Synthetic oligonucleotide
ccucagauuguu

SEQ ID NO: 119797 - RNA, 12 nt, Artificial Sequence
  Description of Artificial Sequence: Synthetic oligonucleotide
cuauuuuaauua

SEQ ID NO: 119798 - RNA, 13 nt, Artificial Sequence
  Description of Artificial Sequence: Synthetic oligonucleotide
uuuaauuuauuaa

SEQ ID NO: 119799 - RNA, 12 nt, Artificial Sequence
  Description of Artificial Sequence: Synthetic oligonucleotide
augcaguuugaa

SEQ ID NO: 119800 - RNA, 11 nt, Artificial Sequence
  Description of Artificial Sequence: Synthetic oligonucleotide
caugcugcugg

SEQ ID NO: 119801 - RNA, 13 nt, Artificial Sequence
  Description of Artificial Sequence: Synthetic oligonucleotide
agaugugcauuuc

SEQ ID NO: 119802 - RNA, 12 nt, Artificial Sequence
  Description of Artificial Sequence: Synthetic oligonucleotide
ucaaaaccugug

SEQ ID NO: 119803 - RNA, 11 nt, Artificial Sequence
  Description of Artificial Sequence: Synthetic oligonucleotide
gaaugugggua

SEQ ID NO: 119804 - RNA, 10 nt, Artificial Sequence
  Description of Artificial Sequence: Synthetic oligonucleotide
auguggguag

SEQ ID NO: 119805 - RNA, 13 nt, Artificial Sequence
  Description of Artificial Sequence: Synthetic oligonucleotide
ugaaaaugagcau

SEQ ID NO: 119806 - RNA, 13 nt, Artificial Sequence
  Description of Artificial Sequence: Synthetic oligonucleotide
uugcuuuucaugu

SEQ ID NO: 119807 - RNA, 12 nt, Artificial Sequence
  Description of Artificial Sequence: Synthetic oligonucleotide
uguauuucuaua

SEQ ID NO: 119808 - RNA, 13 nt, Artificial Sequence
  Description of Artificial Sequence: Synthetic oligonucleotide
uuugauuaauguu

SEQ ID NO: 119809 - RNA, 12 nt, Artificial Sequence
  Description of Artificial Sequence: Synthetic oligonucleotide
caacguguauag

SEQ ID NO: 119810 - RNA, 12 nt, Artificial Sequence
  Description of Artificial Sequence: Synthetic oligonucleotide
cauauccuuggc

SEQ ID NO: 119811 - RNA, 13 nt, Artificial Sequence
  Description of Artificial Sequence: Synthetic oligonucleotide
uacuaacaucugg

SEQ ID NO: 119812 - RNA, 11 nt, Artificial Sequence
  Description of Artificial Sequence: Synthetic oligonucleotide
cauaaguugug

SEQ ID NO: 119813 - RNA, 12 nt, Artificial Sequence
  Description of Artificial Sequence: Synthetic oligonucleotide
gcaucauuuugg

SEQ ID NO: 119814 - RNA, 10 nt, Artificial Sequence
  Description of Artificial Sequence: Synthetic oligonucleotide
gcucuucuua

SEQ ID NO: 119815 - RNA, 10 nt, Artificial Sequence
  Description of Artificial Sequence: Synthetic oligonucleotide
agauuagguc

SEQ ID NO: 119816 - RNA, 12 nt, Artificial Sequence
  Description of Artificial Sequence: Synthetic oligonucleotide
auggaauugaaa

SEQ ID NO: 119817 - RNA, 13 nt, Artificial Sequence
  Description of Artificial Sequence: Synthetic oligonucleotide
cacacucauuccu

SEQ ID NO: 119818 - RNA, 12 nt, Artificial Sequence
  Description of Artificial Sequence: Synthetic oligonucleotide
uguagagguaac

SEQ ID NO: 119819 - RNA, 11 nt, Artificial Sequence
  Description of Artificial Sequence: Synthetic oligonucleotide
caaccacaugc

SEQ ID NO: 119820 - RNA, 12 nt, Artificial Sequence
  Description of Artificial Sequence: Synthetic oligonucleotide
ucggaaacaagu

SEQ ID NO: 119821 - RNA, 11 nt, Artificial Sequence
  Description of Artificial Sequence: Synthetic oligonucleotide
acucccaauaa

SEQ ID NO: 119822 - RNA, 13 nt, Artificial Sequence
  Description of Artificial Sequence: Synthetic oligonucleotide
aaugcuaagaaau

SEQ ID NO: 119823 - RNA, 11 nt, Artificial Sequence
  Description of Artificial Sequence: Synthetic oligonucleotide
gucuuucucua

SEQ ID NO: 119824 - RNA, 11 nt, Artificial Sequence
  Description of Artificial Sequence: Synthetic oligonucleotide
ugaauuucagg

SEQ ID NO: 119825 - RNA, 13 nt, Artificial Sequence
  Description of Artificial Sequence: Synthetic oligonucleotide
cgauucccucuca

SEQ ID NO: 119826 - RNA, 11 nt, Artificial Sequence
  Description of Artificial Sequence: Synthetic oligonucleotide
aggaaagugaa

SEQ ID NO: 119827 - RNA, 12 nt, Artificial Sequence
  Description of Artificial Sequence: Synthetic oligonucleotide
gaggcugcaugc

SEQ ID NO: 119828 - RNA, 11 nt, Artificial Sequence
  Description of Artificial Sequence: Synthetic oligonucleotide
ucucugaacag

SEQ ID NO: 119829 - RNA, 12 nt, Artificial Sequence
  Description of Artificial Sequence: Synthetic oligonucleotide
aacuuggcugua

SEQ ID NO: 119830 - RNA, 12 nt, Artificial Sequence
  Description of Artificial Sequence: Synthetic oligonucleotide
agaagccaaaau

SEQ ID NO: 119831 - RNA, 14 nt, Artificial Sequence
  Description of Artificial Sequence: Synthetic oligonucleotide
auuaaaagaagucc

SEQ ID NO: 119832 - RNA, 14 nt, Artificial Sequence
  Description of Artificial Sequence: Synthetic oligonucleotide
gaauccggauuauc

SEQ ID NO: 119833 - RNA, 12 nt, Artificial Sequence
  Description of Artificial Sequence: Synthetic oligonucleotide
aaugugacauca

SEQ ID NO: 119834 - RNA, 13 nt, Artificial Sequence
  Description of Artificial Sequence: Synthetic oligonucleotide
caucaaagcaagu

SEQ ID NO: 119835 - RNA, 11 nt, Artificial Sequence
  Description of Artificial Sequence: Synthetic oligonucleotide
agagagagaaa

SEQ ID NO: 119836 - RNA, 13 nt, Artificial Sequence
  Description of Artificial Sequence: Synthetic oligonucleotide
ucgcuguaguauu

SEQ ID NO: 119837 - RNA, 14 nt, Artificial Sequence
  Description of Artificial Sequence: Synthetic oligonucleotide
cgcuguaguauuua

SEQ ID NO: 119838 - RNA, 13 nt, Artificial Sequence
  Description of Artificial Sequence: Synthetic oligonucleotide
auuuaagcccaua

SEQ ID NO: 119839 - RNA, 15 nt, Artificial Sequence
  Description of Artificial Sequence: Synthetic oligonucleotide
auuaaaauaaacaug

SEQ ID NO: 119840 - RNA, 12 nt, Artificial Sequence
  Description of Artificial Sequence: Synthetic oligonucleotide
cuguucugaucg

SEQ ID NO: 119841 - RNA, 16 nt, Artificial Sequence
  Description of Artificial Sequence: Synthetic oligonucleotide
aaauaauuugaacuuu

SEQ ID NO: 119842 - RNA, 12 nt, Artificial Sequence
  Description of Artificial Sequence: Synthetic oligonucleotide
ugcgaccuuaau

SEQ ID NO: 119843 - RNA, 11 nt, Artificial Sequence
  Description of Artificial Sequence: Synthetic oligonucleotide
cugagaaagcu

SEQ ID NO: 119844 - RNA, 13 nt, Artificial Sequence
  Description of Artificial Sequence: Synthetic oligonucleotide
aguaaagaugcua

SEQ ID NO: 119845 - RNA, 12 nt, Artificial Sequence
  Description of Artificial Sequence: Synthetic oligonucleotide
cugcuuaauugc

SEQ ID NO: 119846 - RNA, 14 nt, Artificial Sequence
  Description of Artificial Sequence: Synthetic oligonucleotide
uaccauaugaauga

SEQ ID NO: 119847 - RNA, 12 nt, Artificial Sequence
  Description of Artificial Sequence: Synthetic oligonucleotide
aacuuucuuauc

SEQ ID NO: 119848 - RNA, 13 nt, Artificial Sequence
  Description of Artificial Sequence: Synthetic oligonucleotide
ccuugcaugacau

SEQ ID NO: 119849 - RNA, 14 nt, Artificial Sequence
  Description of Artificial Sequence: Synthetic oligonucleotide
ugaauuuguauaug

SEQ ID NO: 119850 - RNA, 12 nt, Artificial Sequence
  Description of Artificial Sequence: Synthetic oligonucleotide
gaauccuaguag

SEQ ID NO: 119851 - RNA, 10 nt, Artificial Sequence
  Description of Artificial Sequence: Synthetic oligonucleotide
gaaagggaag

SEQ ID NO: 119852 - RNA, 11 nt, Artificial Sequence
  Description of Artificial Sequence: Synthetic oligonucleotide
uaucggcaugc

SEQ ID NO: 119853 - RNA, 12 nt, Artificial Sequence
  Description of Artificial Sequence: Synthetic oligonucleotide
caccucauagua

SEQ ID NO: 119854 - RNA, 11 nt, Artificial Sequence
  Description of Artificial Sequence: Synthetic oligonucleotide
ccagaauugcc

SEQ ID NO: 119855 - RNA, 11 nt, Artificial Sequence
  Description of Artificial Sequence: Synthetic oligonucleotide
uggugaucugg

SEQ ID NO: 119856 - RNA, 12 nt, Artificial Sequence
  Description of Artificial Sequence: Synthetic oligonucleotide
gaucuggguaau

SEQ ID NO: 119857 - RNA, 12 nt, Artificial Sequence
  Description of Artificial Sequence: Synthetic oligonucleotide
ggaugugaugaa

SEQ ID NO: 119858 - RNA, 12 nt, Artificial Sequence
  Description of Artificial Sequence: Synthetic oligonucleotide
cauuuccacagc

SEQ ID NO: 119859 - RNA, 11 nt, Artificial Sequence
  Description of Artificial Sequence: Synthetic oligonucleotide
acagcuacacc

SEQ ID NO: 119860 - RNA, 12 nt, Artificial Sequence
  Description of Artificial Sequence: Synthetic oligonucleotide
ugcaguucuuac

SEQ ID NO: 119861 - RNA, 12 nt, Artificial Sequence
  Description of Artificial Sequence: Synthetic oligonucleotide
acgagaagaaga

SEQ ID NO: 119862 - RNA, 12 nt, Artificial Sequence
  Description of Artificial Sequence: Synthetic oligonucleotide
cgagaagaagau

SEQ ID NO: 119863 - RNA, 15 nt, Artificial Sequence
  Description of Artificial Sequence: Synthetic oligonucleotide
aagaagaucauuuac

SEQ ID NO: 119864 - RNA, 11 nt, Artificial Sequence
  Description of Artificial Sequence: Synthetic oligonucleotide
agaggaagagg

SEQ ID NO: 119865 - RNA, 12 nt, Artificial Sequence
  Description of Artificial Sequence: Synthetic oligonucleotide
gaggaagaggug

SEQ ID NO: 119866 - RNA, 13 nt, Artificial Sequence
  Description of Artificial Sequence: Synthetic oligonucleotide
cuacuuugagggc

SEQ ID NO: 119867 - RNA, 12 nt, Artificial Sequence
  Description of Artificial Sequence: Synthetic oligonucleotide
agggcaucuccu

SEQ ID NO: 119868 - RNA, 10 nt, Artificial Sequence
  Description of Artificial Sequence: Synthetic oligonucleotide
ggagugauau

SEQ ID NO: 119869 - RNA, 11 nt, Artificial Sequence
  Description of Artificial Sequence: Synthetic oligonucleotide
gagugauaugg

SEQ ID NO: 119870 - RNA, 12 nt, Artificial Sequence
  Description of Artificial Sequence: Synthetic oligonucleotide
ugcaguaaagau

SEQ ID NO: 119871 - RNA, 13 nt, Artificial Sequence
  Description of Artificial Sequence: Synthetic oligonucleotide
aguaaagauccua

SEQ ID NO: 119872 - RNA, 12 nt, Artificial Sequence
  Description of Artificial Sequence: Synthetic oligonucleotide
ugacaaaggaca

SEQ ID NO: 119873 - RNA, 13 nt, Artificial Sequence
  Description of Artificial Sequence: Synthetic oligonucleotide
gcaauugugaccc

SEQ ID NO: 119874 - RNA, 12 nt, Artificial Sequence
  Description of Artificial Sequence: Synthetic oligonucleotide
aacaucauccau

SEQ ID NO: 119875 - RNA, 12 nt, Artificial Sequence
  Description of Artificial Sequence: Synthetic oligonucleotide
ugaaauccaaca

SEQ ID NO: 119876 - RNA, 15 nt, Artificial Sequence
  Description of Artificial Sequence: Synthetic oligonucleotide
aacaauauauuucuc

SEQ ID NO: 119877 - RNA, 14 nt, Artificial Sequence
  Description of Artificial Sequence: Synthetic oligonucleotide
aacaguaaagucac

SEQ ID NO: 119878 - RNA, 14 nt, Artificial Sequence
  Description of Artificial Sequence: Synthetic oligonucleotide
ugugaagaaaguaa

SEQ ID NO: 119879 - RNA, 13 nt, Artificial Sequence
  Description of Artificial Sequence: Synthetic oligonucleotide
cuuccgagccauc

SEQ ID NO: 119880 - RNA, 12 nt, Artificial Sequence
  Description of Artificial Sequence: Synthetic oligonucleotide
aauggagguuga

SEQ ID NO: 119881 - RNA, 12 nt, Artificial Sequence
  Description of Artificial Sequence: Synthetic oligonucleotide
ggagguugaaua

SEQ ID NO: 119882 - RNA, 13 nt, Artificial Sequence
  Description of Artificial Sequence: Synthetic oligonucleotide
auuuugaguuuuc

SEQ ID NO: 119883 - RNA, 12 nt, Artificial Sequence
  Description of Artificial Sequence: Synthetic oligonucleotide
uauccuguuugu

SEQ ID NO: 119884 - RNA, 11 nt, Artificial Sequence
  Description of Artificial Sequence: Synthetic oligonucleotide
ccuguuuguuc

SEQ ID NO: 119885 - RNA, 10 nt, Artificial Sequence
  Description of Artificial Sequence: Synthetic oligonucleotide
cucuacagcc

SEQ ID NO: 119886 - RNA, 12 nt, Artificial Sequence
  Description of Artificial Sequence: Synthetic oligonucleotide
ucuuccauagcu

SEQ ID NO: 119887 - RNA, 12 nt, Artificial Sequence
  Description of Artificial Sequence: Synthetic oligonucleotide
auaaucuuccug

SEQ ID NO: 119888 - RNA, 12 nt, Artificial Sequence
  Description of Artificial Sequence: Synthetic oligonucleotide
uaaucuuccugu

SEQ ID NO: 119889 - RNA, 12 nt, Artificial Sequence
  Description of Artificial Sequence: Synthetic oligonucleotide
cuucaugacuug

SEQ ID NO: 119890 - RNA, 12 nt, Artificial Sequence
  Description of Artificial Sequence: Synthetic oligonucleotide
aagagggagaga

SEQ ID NO: 119891 - RNA, 12 nt, Artificial Sequence
  Description of Artificial Sequence: Synthetic oligonucleotide
cgucuccuacca

SEQ ID NO: 119892 - RNA, 12 nt, Artificial Sequence
  Description of Artificial Sequence: Synthetic oligonucleotide
gaucaaucggcc

SEQ ID NO: 119893 - RNA, 12 nt, Artificial Sequence
  Description of Artificial Sequence: Synthetic oligonucleotide
ggacgaacaucc

SEQ ID NO: 119894 - RNA, 11 nt, Artificial Sequence
  Description of Artificial Sequence: Synthetic oligonucleotide
agggucggaac

SEQ ID NO: 119895 - RNA, 10 nt, Artificial Sequence
  Description of Artificial Sequence: Synthetic oligonucleotide
ucggaaccca

SEQ ID NO: 119896 - RNA, 11 nt, Artificial Sequence
  Description of Artificial Sequence: Synthetic oligonucleotide
acccaagcuua

SEQ ID NO: 119897 - RNA, 14 nt, Artificial Sequence
  Description of Artificial Sequence: Synthetic oligonucleotide
gaacuuuaagcaac

SEQ ID NO: 119898 - RNA, 11 nt, Artificial Sequence
  Description of Artificial Sequence: Synthetic oligonucleotide
acuauucagug

SEQ ID NO: 119899 - RNA, 11 nt, Artificial Sequence
  Description of Artificial Sequence: Synthetic oligonucleotide
cuauucagugg

SEQ ID NO: 119900 - RNA, 13 nt, Artificial Sequence
  Description of Artificial Sequence: Synthetic oligonucleotide
aaacacagauaac

SEQ ID NO: 119901 - RNA, 12 nt, Artificial Sequence
  Description of Artificial Sequence: Synthetic oligonucleotide
cuuaagaaaaga

SEQ ID NO: 119902 - RNA, 12 nt, Artificial Sequence
  Description of Artificial Sequence: Synthetic oligonucleotide
cugaaggagugu

SEQ ID NO: 119903 - RNA, 10 nt, Artificial Sequence
  Description of Artificial Sequence: Synthetic oligonucleotide
ucaccgcggg

SEQ ID NO: 119904 - RNA, 14 nt, Artificial Sequence
  Description of Artificial Sequence: Synthetic oligonucleotide
agcagaaauaagcg

SEQ ID NO: 119905 - RNA, 12 nt, Artificial Sequence
  Description of Artificial Sequence: Synthetic oligonucleotide
aagcgugccguu

SEQ ID NO: 119906 - RNA, 12 nt, Artificial Sequence
  Description of Artificial Sequence: Synthetic oligonucleotide
agaaacagucac

SEQ ID NO: 119907 - RNA, 12 nt, Artificial Sequence
  Description of Artificial Sequence: Synthetic oligonucleotide
agaggaagaagg

SEQ ID NO: 119908 - RNA, 14 nt, Artificial Sequence
  Description of Artificial Sequence: Synthetic oligonucleotide
uguauucaaaauau

SEQ ID NO: 119909 - RNA, 13 nt, Artificial Sequence
  Description of Artificial Sequence: Synthetic oligonucleotide
auuuuccucccuu

SEQ ID NO: 119910 - RNA, 13 nt, Artificial Sequence
  Description of Artificial Sequence: Synthetic oligonucleotide
caaagaaagauag

SEQ ID NO: 119911 - RNA, 12 nt, Artificial Sequence
  Description of Artificial Sequence: Synthetic oligonucleotide
aagaaagauaga

SEQ ID NO: 119912 - RNA, 13 nt, Artificial Sequence
  Description of Artificial Sequence: Synthetic oligonucleotide
gaaagcauuuguu

SEQ ID NO: 119913 - RNA, 13 nt, Artificial Sequence
  Description of Artificial Sequence: Synthetic oligonucleotide
ugaguuaaacgaa

SEQ ID NO: 119914 - RNA, 12 nt, Artificial Sequence
  Description of Artificial Sequence: Synthetic oligonucleotide
acugauacagaa

SEQ ID NO: 119915 - RNA, 12 nt, Artificial Sequence
  Description of Artificial Sequence: Synthetic oligonucleotide
auauuauauaua

SEQ ID NO: 119916 - RNA, 12 nt, Artificial Sequence
  Description of Artificial Sequence: Synthetic oligonucleotide
auuauauauaua

SEQ ID NO: 119917 - RNA, 12 nt, Artificial Sequence
  Description of Artificial Sequence: Synthetic oligonucleotide
ucacuggaugua

SEQ ID NO: 119918 - RNA, 12 nt, Artificial Sequence
  Description of Artificial Sequence: Synthetic oligonucleotide
cagggaagagga

SEQ ID NO: 119919 - RNA, 15 nt, Artificial Sequence
  Description of Artificial Sequence: Synthetic oligonucleotide
augaucuuuuuuuug

SEQ ID NO: 119920 - RNA, 11 nt, Artificial Sequence
  Description of Artificial Sequence: Synthetic oligonucleotide
aguucacggcc

SEQ ID NO: 119921 - RNA, 13 nt, Artificial Sequence
  Description of Artificial Sequence: Synthetic oligonucleotide
caccaucacacca

SEQ ID NO: 119922 - RNA, 11 nt, Artificial Sequence
  Description of Artificial Sequence: Synthetic oligonucleotide
ccugcggguuu

SEQ ID NO: 119923 - RNA, 10 nt, Artificial Sequence
  Description of Artificial Sequence: Synthetic oligonucleotide
auccaguuug

SEQ ID NO: 119924 - RNA, 13 nt, Artificial Sequence
  Description of Artificial Sequence: Synthetic oligonucleotide
guuaaggacuucu

SEQ ID NO: 119925 - RNA, 13 nt, Artificial Sequence
  Description of Artificial Sequence: Synthetic oligonucleotide
cagugggacagag

SEQ ID NO: 119926 - RNA, 14 nt, Artificial Sequence
  Description of Artificial Sequence: Synthetic oligonucleotide
aauuuguuauugug

SEQ ID NO: 119927 - RNA, 13 nt, Artificial Sequence
  Description of Artificial Sequence: Synthetic oligonucleotide
uucaaaugcauuu

SEQ ID NO: 119928 - RNA, 10 nt, Artificial Sequence
  Description of Artificial Sequence: Synthetic oligonucleotide
caggaaagcc

SEQ ID NO: 119929 - RNA, 11 nt, Artificial Sequence
  Description of Artificial Sequence: Synthetic oligonucleotide
aggaaagcccu

SEQ ID NO: 119930 - RNA, 12 nt, Artificial Sequence
  Description of Artificial Sequence: Synthetic oligonucleotide
cccagcauggcc

SEQ ID NO: 119931 - RNA, 11 nt, Artificial Sequence
  Description of Artificial Sequence: Synthetic oligonucleotide
cuucucccuga

SEQ ID NO: 119932 - RNA, 12 nt, Artificial Sequence
  Description of Artificial Sequence: Synthetic oligonucleotide
gaagaagcccuu

SEQ ID NO: 119933 - RNA, 12 nt, Artificial Sequence
  Description of Artificial Sequence: Synthetic oligonucleotide
agaagcccuuca

SEQ ID NO: 119934 - RNA, 11 nt, Artificial Sequence
  Description of Artificial Sequence: Synthetic oligonucleotide
gcccuucagcg

SEQ ID NO: 119935 - RNA, 11 nt, Artificial Sequence
  Description of Artificial Sequence: Synthetic oligonucleotide
ccuucagcggc

SEQ ID NO: 119936 - RNA, 12 nt, Artificial Sequence
  Description of Artificial Sequence: Synthetic oligonucleotide
ucagcggccagu

SEQ ID NO: 119937 - RNA, 12 nt, Artificial Sequence
  Description of Artificial Sequence: Synthetic oligonucleotide
ugaaaagcuccg

SEQ ID NO: 119938 - RNA, 11 nt, Artificial Sequence
  Description of Artificial Sequence: Synthetic oligonucleotide
aaaagcuccgg

SEQ ID NO: 119939 - RNA, 13 nt, Artificial Sequence
  Description of Artificial Sequence: Synthetic oligonucleotide
agucaacagucug

SEQ ID NO: 119940 - RNA, 13 nt, Artificial Sequence
  Description of Artificial Sequence: Synthetic oligonucleotide
cagaguucaaaag

SEQ ID NO: 119941 - RNA, 13 nt, Artificial Sequence
  Description of Artificial Sequence: Synthetic oligonucleotide
agaguucaaaagc

SEQ ID NO: 119942 - RNA, 12 nt, Artificial Sequence
  Description of Artificial Sequence: Synthetic oligonucleotide
uucaaaagcccu

SEQ ID NO: 119943 - RNA, 12 nt, Artificial Sequence
  Description of Artificial Sequence: Synthetic oligonucleotide
ucaaaagcccuu

SEQ ID NO: 119944 - RNA, 12 nt, Artificial Sequence
  Description of Artificial Sequence: Synthetic oligonucleotide
aaaagcccuuca

SEQ ID NO: 119945 - RNA, 12 nt, Artificial Sequence
  Description of Artificial Sequence: Synthetic oligonucleotide
aaagcccuucag

SEQ ID NO: 119946 - RNA, 13 nt, Artificial Sequence
  Description of Artificial Sequence: Synthetic oligonucleotide
gugaagccgcucg

SEQ ID NO: 119947 - RNA, 12 nt, Artificial Sequence
  Description of Artificial Sequence: Synthetic oligonucleotide
cacgccagucaa

SEQ ID NO: 119948 - RNA, 13 nt, Artificial Sequence
  Description of Artificial Sequence: Synthetic oligonucleotide
uucuuggugcgug

SEQ ID NO: 119949 - RNA, 14 nt, Artificial Sequence
  Description of Artificial Sequence: Synthetic oligonucleotide
auuggauucaucag

SEQ ID NO: 119950 - RNA, 13 nt, Artificial Sequence
  Description of Artificial Sequence: Synthetic oligonucleotide
uggaauaccuaag

SEQ ID NO: 119951 - RNA, 12 nt, Artificial Sequence
  Description of Artificial Sequence: Synthetic oligonucleotide
auuugaggcuca

SEQ ID NO: 119952 - RNA, 11 nt, Artificial Sequence
  Description of Artificial Sequence: Synthetic oligonucleotide
ucuacaauugg

SEQ ID NO: 119953 - RNA, 12 nt, Artificial Sequence
  Description of Artificial Sequence: Synthetic oligonucleotide
uaguuaggagcc

SEQ ID NO: 119954 - RNA, 13 nt, Artificial Sequence
  Description of Artificial Sequence: Synthetic oligonucleotide
agucaauauccac

SEQ ID NO: 119955 - RNA, 13 nt, Artificial Sequence
  Description of Artificial Sequence: Synthetic oligonucleotide
auguucagucaca

SEQ ID NO: 119956 - RNA, 12 nt, Artificial Sequence
  Description of Artificial Sequence: Synthetic oligonucleotide
acacacacauac

SEQ ID NO: 119957 - RNA, 12 nt, Artificial Sequence
  Description of Artificial Sequence: Synthetic oligonucleotide
uuccuuuugcuu

SEQ ID NO: 119958 - RNA, 16 nt, Artificial Sequence
  Description of Artificial Sequence: Synthetic oligonucleotide
uuuuaaaguaauuuuu

SEQ ID NO: 119959 - RNA, 13 nt, Artificial Sequence
  Description of Artificial Sequence: Synthetic oligonucleotide
caacagucaaugg

SEQ ID NO: 119960 - RNA, 13 nt, Artificial Sequence
  Description of Artificial Sequence: Synthetic oligonucleotide
ucgacaaaccaau

SEQ ID NO: 119961 - RNA, 12 nt, Artificial Sequence
  Description of Artificial Sequence: Synthetic oligonucleotide
acugcuaccacu

SEQ ID NO: 119962 - RNA, 13 nt, Artificial Sequence
  Description of Artificial Sequence: Synthetic oligonucleotide
gcaagcggucuua

SEQ ID NO: 119963 - RNA, 13 nt, Artificial Sequence
  Description of Artificial Sequence: Synthetic oligonucleotide
ggucuuaccggcu

SEQ ID NO: 119964 - RNA, 11 nt, Artificial Sequence
  Description of Artificial Sequence: Synthetic oligonucleotide
gauggguuacc

SEQ ID NO: 119965 - RNA, 11 nt, Artificial Sequence
  Description of Artificial Sequence: Synthetic oligonucleotide
guuaccugcga

SEQ ID NO: 119966 - RNA, 12 nt, Artificial Sequence
  Description of Artificial Sequence: Synthetic oligonucleotide
aaucuugcugag

SEQ ID NO: 119967 - RNA, 13 nt, Artificial Sequence
  Description of Artificial Sequence: Synthetic oligonucleotide
agcauaaaacagu

SEQ ID NO: 119968 - RNA, 12 nt, Artificial Sequence
  Description of Artificial Sequence: Synthetic oligonucleotide
guccuuuauccu

SEQ ID NO: 119969 - RNA, 12 nt, Artificial Sequence
  Description of Artificial Sequence: Synthetic oligonucleotide
caacgcaaguug

SEQ ID NO: 119970 - RNA, 13 nt, Artificial Sequence
  Description of Artificial Sequence: Synthetic oligonucleotide
aaacugaaaccau

SEQ ID NO: 119971 - RNA, 14 nt, Artificial Sequence
  Description of Artificial Sequence: Synthetic oligonucleotide
acuuuguuaaauau

SEQ ID NO: 119972 - RNA, 14 nt, Artificial Sequence
  Description of Artificial Sequence: Synthetic oligonucleotide
guauauuaaaaguu

SEQ ID NO: 119973 - RNA, 13 nt, Artificial Sequence
  Description of Artificial Sequence: Synthetic oligonucleotide
guuuugacuuaac

SEQ ID NO: 119974 - RNA, 13 nt, Artificial Sequence
  Description of Artificial Sequence: Synthetic oligonucleotide
gcaaacucagcac

SEQ ID NO: 119975 - RNA, 11 nt, Artificial Sequence
  Description of Artificial Sequence: Synthetic oligonucleotide
ugcugaccuca

SEQ ID NO: 119976 - RNA, 14 nt, Artificial Sequence
  Description of Artificial Sequence: Synthetic oligonucleotide
uuuauucagaucgc

SEQ ID NO: 119977 - RNA, 13 nt, Artificial Sequence
  Description of Artificial Sequence: Synthetic oligonucleotide
aggguucugggau

SEQ ID NO: 119978 - RNA, 15 nt, Artificial Sequence
  Description of Artificial Sequence: Synthetic oligonucleotide
auauuggaaauuaug

SEQ ID NO: 119979 - RNA, 13 nt, Artificial Sequence
  Description of Artificial Sequence: Synthetic oligonucleotide
auggaagcacuag

SEQ ID NO: 119980 - RNA, 13 nt, Artificial Sequence
  Description of Artificial Sequence: Synthetic oligonucleotide
guuuuuaugugga

SEQ ID NO: 119981 - RNA, 12 nt, Artificial Sequence
  Description of Artificial Sequence: Synthetic oligonucleotide
ggaauugguaga

SEQ ID NO: 119982 - RNA, 13 nt, Artificial Sequence
  Description of Artificial Sequence: Synthetic oligonucleotide
uuagacuuggaga

SEQ ID NO: 119983 - RNA, 13 nt, Artificial Sequence
  Description of Artificial Sequence: Synthetic oligonucleotide
uuacaguauucca

SEQ ID NO: 119984 - RNA, 15 nt, Artificial Sequence
  Description of Artificial Sequence: Synthetic oligonucleotide
ccacugaugaauuaa

SEQ ID NO: 119985 - RNA, 12 nt, Artificial Sequence
  Description of Artificial Sequence: Synthetic oligonucleotide
ccacaucaucac

SEQ ID NO: 119986 - RNA, 13 nt, Artificial Sequence
  Description of Artificial Sequence: Synthetic oligonucleotide
cucaccaaacaga

SEQ ID NO: 119987 - RNA, 12 nt, Artificial Sequence
  Description of Artificial Sequence: Synthetic oligonucleotide
ggaacaugaugg

SEQ ID NO: 119988 - RNA, 12 nt, Artificial Sequence
  Description of Artificial Sequence: Synthetic oligonucleotide
cauguagacugc

SEQ ID NO: 119989 - RNA, 13 nt, Artificial Sequence
  Description of Artificial Sequence: Synthetic oligonucleotide
ggaucuauuuaug

SEQ ID NO: 119990 - RNA, 12 nt, Artificial Sequence
  Description of Artificial Sequence: Synthetic oligonucleotide
gcacuauuauca

SEQ ID NO: 119991 - RNA, 11 nt, Artificial Sequence
  Description of Artificial Sequence: Synthetic oligonucleotide
aucaguucugc

SEQ ID NO: 119992 - RNA, 13 nt, Artificial Sequence
  Description of Artificial Sequence: Synthetic oligonucleotide
agauuaaaccuac

SEQ ID NO: 119993 - RNA, 13 nt, Artificial Sequence
  Description of Artificial Sequence: Synthetic oligonucleotide
auaaaauccuucu

SEQ ID NO: 119994 - RNA, 12 nt, Artificial Sequence
  Description of Artificial Sequence: Synthetic oligonucleotide
aaugcuguagac

SEQ ID NO: 119995 - RNA, 13 nt, Artificial Sequence
  Description of Artificial Sequence: Synthetic oligonucleotide
uugauaggaauag

SEQ ID NO: 119996 - RNA, 11 nt, Artificial Sequence
  Description of Artificial Sequence: Synthetic oligonucleotide
aauggcccuga

SEQ ID NO: 119997 - RNA, 11 nt, Artificial Sequence
  Description of Artificial Sequence: Synthetic oligonucleotide
uuccucaagca

SEQ ID NO: 119998 - RNA, 10 nt, Artificial Sequence
  Description of Artificial Sequence: Synthetic oligonucleotide
guucagccca

SEQ ID NO: 119999 - RNA, 11 nt, Artificial Sequence
  Description of Artificial Sequence: Synthetic oligonucleotide
gcugcugaacc

SEQ ID NO: 120000 - RNA, 12 nt, Artificial Sequence
  Description of Artificial Sequence: Synthetic oligonucleotide
aaguucucuuca

SEQ ID NO: 120001 - RNA, 11 nt, Artificial Sequence
  Description of Artificial Sequence: Synthetic oligonucleotide
ccagccuagag

SEQ ID NO: 120002 - RNA, 13 nt, Artificial Sequence
  Description of Artificial Sequence: Synthetic oligonucleotide
cucugugaagugu

SEQ ID NO: 120003 - RNA, 14 nt, Artificial Sequence
  Description of Artificial Sequence: Synthetic oligonucleotide
ugagaaaauuucaa

SEQ ID NO: 120004 - RNA, 11 nt, Artificial Sequence
  Description of Artificial Sequence: Synthetic oligonucleotide
aauccuccuga

SEQ ID NO: 120005 - RNA, 12 nt, Artificial Sequence
  Description of Artificial Sequence: Synthetic oligonucleotide
gugacaucauau

SEQ ID NO: 120006 - RNA, 13 nt, Artificial Sequence
  Description of Artificial Sequence: Synthetic oligonucleotide
aaucuucaucaua

SEQ ID NO: 120007 - RNA, 13 nt, Artificial Sequence
  Description of Artificial Sequence: Synthetic oligonucleotide
gacuagcuauuaa

SEQ ID NO: 120008 - RNA, 14 nt, Artificial Sequence
  Description of Artificial Sequence: Synthetic oligonucleotide
ucucuacuaaaaau

SEQ ID NO: 120009 - RNA, 12 nt, Artificial Sequence
  Description of Artificial Sequence: Synthetic oligonucleotide
ucuaucucgccu

SEQ ID NO: 120010 - RNA, 13 nt, Artificial Sequence
  Description of Artificial Sequence: Synthetic oligonucleotide
cuucgguccaguu

SEQ ID NO: 120011 - RNA, 11 nt, Artificial Sequence
  Description of Artificial Sequence: Synthetic oligonucleotide
gauguagccgc

SEQ ID NO: 120012 - RNA, 12 nt, Artificial Sequence
  Description of Artificial Sequence: Synthetic oligonucleotide
ugaggagacuug

SEQ ID NO: 120013 - RNA, 12 nt, Artificial Sequence
  Description of Artificial Sequence: Synthetic oligonucleotide
gaguagugagga

SEQ ID NO: 120014 - RNA, 14 nt, Artificial Sequence
  Description of Artificial Sequence: Synthetic oligonucleotide
cagaugaguacaaa

SEQ ID NO: 120015 - RNA, 13 nt, Artificial Sequence
  Description of Artificial Sequence: Synthetic oligonucleotide
guuguuaaugggc

SEQ ID NO: 120016 - RNA, 13 nt, Artificial Sequence
  Description of Artificial Sequence: Synthetic oligonucleotide
uuuuuaauuuauu

SEQ ID NO: 120017 - RNA, 12 nt, Artificial Sequence
  Description of Artificial Sequence: Synthetic oligonucleotide
uauuuaaauaug

SEQ ID NO: 120018 - RNA, 13 nt, Artificial Sequence
  Description of Artificial Sequence: Synthetic oligonucleotide
uauccuuuguuuc

SEQ ID NO: 120019 - RNA, 14 nt, Artificial Sequence
  Description of Artificial Sequence: Synthetic oligonucleotide
cgucuaaguguuug

SEQ ID NO: 120020 - RNA, 12 nt, Artificial Sequence
  Description of Artificial Sequence: Synthetic oligonucleotide
accugugacaaa

SEQ ID NO: 120021 - RNA, 13 nt, Artificial Sequence
  Description of Artificial Sequence: Synthetic oligonucleotide
ccaggcugaauua

SEQ ID NO: 120022 - RNA, 14 nt, Artificial Sequence
  Description of Artificial Sequence: Synthetic oligonucleotide
gucauucuuacaau

SEQ ID NO: 120023 - RNA, 15 nt, Artificial Sequence
  Description of Artificial Sequence: Synthetic oligonucleotide
ucauucuuacaauug

SEQ ID NO: 120024 - RNA, 12 nt, Artificial Sequence
  Description of Artificial Sequence: Synthetic oligonucleotide
cagagaguguac

SEQ ID NO: 120025 - RNA, 12 nt, Artificial Sequence
  Description of Artificial Sequence: Synthetic oligonucleotide
agaacucagcag

SEQ ID NO: 120026 - RNA, 13 nt, Artificial Sequence
  Description of Artificial Sequence: Synthetic oligonucleotide
uuuauuuucagua

SEQ ID NO: 120027 - RNA, 12 nt, Artificial Sequence
  Description of Artificial Sequence: Synthetic oligonucleotide
ucuuaaauggaa

SEQ ID NO: 120028 - RNA, 13 nt, Artificial Sequence
  Description of Artificial Sequence: Synthetic oligonucleotide
ugccuaaaauugu

SEQ ID NO: 120029 - RNA, 12 nt, Artificial Sequence
  Description of Artificial Sequence: Synthetic oligonucleotide
agacugugagcu

SEQ ID NO: 120030 - RNA, 14 nt, Artificial Sequence
  Description of Artificial Sequence: Synthetic oligonucleotide
ugcuuuuuauuaau

SEQ ID NO: 120031 - RNA, 13 nt, Artificial Sequence
  Description of Artificial Sequence: Synthetic oligonucleotide
cucuucuuacauu

SEQ ID NO: 120032 - RNA, 15 nt, Artificial Sequence
  Description of Artificial Sequence: Synthetic oligonucleotide
cauuuguaaaaaugu

SEQ ID NO: 120033 - RNA, 15 nt, Artificial Sequence
  Description of Artificial Sequence: Synthetic oligonucleotide
aucuuaauucauauu

SEQ ID NO: 120034 - RNA, 13 nt, Artificial Sequence
  Description of Artificial Sequence: Synthetic oligonucleotide
gaacuaaucauga

SEQ ID NO: 120035 - RNA, 12 nt, Artificial Sequence
  Description of Artificial Sequence: Synthetic oligonucleotide
ucugcucuuggg

SEQ ID NO: 120036 - RNA, 13 nt, Artificial Sequence
  Description of Artificial Sequence: Synthetic oligonucleotide
caguagcuuugag

SEQ ID NO: 120037 - RNA, 14 nt, Artificial Sequence
  Description of Artificial Sequence: Synthetic oligonucleotide
cacguaauauuuca

SEQ ID NO: 120038 - RNA, 13 nt, Artificial Sequence
  Description of Artificial Sequence: Synthetic oligonucleotide
uauucucuucacu

SEQ ID NO: 120039 - RNA, 14 nt, Artificial Sequence
  Description of Artificial Sequence: Synthetic oligonucleotide
cuaaugcuaagaaa

SEQ ID NO: 120040 - RNA, 12 nt, Artificial Sequence
  Description of Artificial Sequence: Synthetic oligonucleotide
gcugaaaaucaa

SEQ ID NO: 120041 - RNA, 14 nt, Artificial Sequence
  Description of Artificial Sequence: Synthetic oligonucleotide
aauaugauuacuuu

SEQ ID NO: 120042 - RNA, 14 nt, Artificial Sequence
  Description of Artificial Sequence: Synthetic oligonucleotide
cauuuuguucuaca

SEQ ID NO: 120043 - RNA, 12 nt, Artificial Sequence
  Description of Artificial Sequence: Synthetic oligonucleotide
cccgggacucuc

SEQ ID NO: 120044 - RNA, 14 nt, Artificial Sequence
  Description of Artificial Sequence: Synthetic oligonucleotide
ccuuuaaaguaaag

SEQ ID NO: 120045 - RNA, 13 nt, Artificial Sequence
  Description of Artificial Sequence: Synthetic oligonucleotide
ucuggaagccugg

SEQ ID NO: 120046 - RNA, 14 nt, Artificial Sequence
  Description of Artificial Sequence: Synthetic oligonucleotide
aaaacaaaagagag

SEQ ID NO: 120047 - RNA, 13 nt, Artificial Sequence
  Description of Artificial Sequence: Synthetic oligonucleotide
aucaguuaugccg

SEQ ID NO: 120048 - RNA, 13 nt, Artificial Sequence
  Description of Artificial Sequence: Synthetic oligonucleotide
uaaaagaagucca

SEQ ID NO: 120049 - RNA, 11 nt, Artificial Sequence
  Description of Artificial Sequence: Synthetic oligonucleotide
aggugagguua

SEQ ID NO: 120050 - RNA, 11 nt, Artificial Sequence
  Description of Artificial Sequence: Synthetic oligonucleotide
gggaagaggac

SEQ ID NO: 120051 - RNA, 13 nt, Artificial Sequence
  Description of Artificial Sequence: Synthetic oligonucleotide
aagcaaguauugu

SEQ ID NO: 120052 - RNA, 12 nt, Artificial Sequence
  Description of Artificial Sequence: Synthetic oligonucleotide
auuguagcacuc

SEQ ID NO: 120053 - RNA, 14 nt, Artificial Sequence
  Description of Artificial Sequence: Synthetic oligonucleotide
acaaaaccacaaau

SEQ ID NO: 120054 - RNA, 12 nt, Artificial Sequence
  Description of Artificial Sequence: Synthetic oligonucleotide
uaagcccauaca

SEQ ID NO: 120055 - RNA, 11 nt, Artificial Sequence
  Description of Artificial Sequence: Synthetic oligonucleotide
agcccauacag

SEQ ID NO: 120056 - RNA, 12 nt, Artificial Sequence
  Description of Artificial Sequence: Synthetic oligonucleotide
cagaaaccuucc

SEQ ID NO: 120057 - RNA, 10 nt, Artificial Sequence
  Description of Artificial Sequence: Synthetic oligonucleotide
guauaccuac

SEQ ID NO: 120058 - RNA, 13 nt, Artificial Sequence
  Description of Artificial Sequence: Synthetic oligonucleotide
gccaguuuucgga

SEQ ID NO: 120059 - RNA, 9 nt, Artificial Sequence
  Description of Artificial Sequence: Synthetic oligonucleotide
ggaacaggg

SEQ ID NO: 120060 - RNA, 13 nt, Artificial Sequence
  Description of Artificial Sequence: Synthetic oligonucleotide
uuaacuuuccagu

SEQ ID NO: 120061 - RNA, 14 nt, Artificial Sequence
  Description of Artificial Sequence: Synthetic oligonucleotide
aaaguuugguuuug

SEQ ID NO: 120062 - RNA, 12 nt, Artificial Sequence
  Description of Artificial Sequence: Synthetic oligonucleotide
cuucccacugua

SEQ ID NO: 120063 - RNA, 13 nt, Artificial Sequence
  Description of Artificial Sequence: Synthetic oligonucleotide
ugauaccauauga

SEQ ID NO: 120064 - RNA, 11 nt, Artificial Sequence
  Description of Artificial Sequence: Synthetic oligonucleotide
aacaugggcug

SEQ ID NO: 120065 - RNA, 13 nt, Artificial Sequence
  Description of Artificial Sequence: Synthetic oligonucleotide
caacuuuuucaua

SEQ ID NO: 120066 - RNA, 12 nt, Artificial Sequence
  Description of Artificial Sequence: Synthetic oligonucleotide
caugaggccgga

SEQ ID NO: 120067 - RNA, 11 nt, Artificial Sequence
  Description of Artificial Sequence: Synthetic oligonucleotide
acugcauuugu

SEQ ID NO: 120068 - RNA, 13 nt, Artificial Sequence
  Description of Artificial Sequence: Synthetic oligonucleotide
aauguuuacuacc

SEQ ID NO: 120069 - RNA, 15 nt, Artificial Sequence
  Description of Artificial Sequence: Synthetic oligonucleotide
aauuuuuugaugaaa

SEQ ID NO: 120070 - RNA, 14 nt, Artificial Sequence
  Description of Artificial Sequence: Synthetic oligonucleotide
cagugugugaauuu

SEQ ID NO: 120071 - RNA, 13 nt, Artificial Sequence
  Description of Artificial Sequence: Synthetic oligonucleotide
gagcaauguaugu

SEQ ID NO: 120072 - RNA, 14 nt, Artificial Sequence
  Description of Artificial Sequence: Synthetic oligonucleotide
aaagcacauauaua

SEQ ID NO: 120073 - RNA, 14 nt, Artificial Sequence
  Description of Artificial Sequence: Synthetic oligonucleotide
guaauaguuucucc

SEQ ID NO: 120074 - RNA, 13 nt, Artificial Sequence
  Description of Artificial Sequence: Synthetic oligonucleotide
aguuucuccaaau

SEQ ID NO: 120075 - RNA, 13 nt, Artificial Sequence
  Description of Artificial Sequence: Synthetic oligonucleotide
uacuuccuagaaa

SEQ ID NO: 120076 - RNA, 13 nt, Artificial Sequence
  Description of Artificial Sequence: Synthetic oligonucleotide
uacaccauauaug

SEQ ID NO: 120077 - RNA, 14 nt, Artificial Sequence
  Description of Artificial Sequence: Synthetic oligonucleotide
auauaugaauggag

SEQ ID NO: 120078 - RNA, 13 nt, Artificial Sequence
  Description of Artificial Sequence: Synthetic oligonucleotide
acgagaagaagau

SEQ ID NO: 120079 - RNA, 13 nt, Artificial Sequence
  Description of Artificial Sequence: Synthetic oligonucleotide
ucauuuacaggga

SEQ ID NO: 120080 - RNA, 13 nt, Artificial Sequence
  Description of Artificial Sequence: Synthetic oligonucleotide
cauuuacagggac

SEQ ID NO: 120081 - RNA, 10 nt, Artificial Sequence
  Description of Artificial Sequence: Synthetic oligonucleotide
agggaccuga

SEQ ID NO: 120082 - RNA, 14 nt, Artificial Sequence
  Description of Artificial Sequence: Synthetic oligonucleotide
uguuugacugcauc

SEQ ID NO: 120083 - RNA, 13 nt, Artificial Sequence
  Description of Artificial Sequence: Synthetic oligonucleotide
uuugacugcaucg

SEQ ID NO: 120084 - RNA, 12 nt, Artificial Sequence
  Description of Artificial Sequence: Synthetic oligonucleotide
gaguucacaggg

SEQ ID NO: 120085 - RNA, 13 nt, Artificial Sequence
  Description of Artificial Sequence: Synthetic oligonucleotide
ggcaccucugucc

SEQ ID NO: 120086 - RNA, 15 nt, Artificial Sequence
  Description of Artificial Sequence: Synthetic oligonucleotide
gguuugucuuuuuaa

SEQ ID NO: 120087 - RNA, 14 nt, Artificial Sequence
  Description of Artificial Sequence: Synthetic oligonucleotide
uuugucuuuuuaag

SEQ ID NO: 120088 - RNA, 13 nt, Artificial Sequence
  Description of Artificial Sequence: Synthetic oligonucleotide
ccuaaagguuguc

SEQ ID NO: 120089 - RNA, 12 nt, Artificial Sequence
  Description of Artificial Sequence: Synthetic oligonucleotide
aagguugucgac

SEQ ID NO: 120090 - RNA, 13 nt, Artificial Sequence
  Description of Artificial Sequence: Synthetic oligonucleotide
accuggcaauugu

SEQ ID NO: 120091 - RNA, 12 nt, Artificial Sequence
  Description of Artificial Sequence: Synthetic oligonucleotide
aguggugcgagg

SEQ ID NO: 120092 - RNA, 13 nt, Artificial Sequence
  Description of Artificial Sequence: Synthetic oligonucleotide
agagacaugaaau

SEQ ID NO: 120093 - RNA, 13 nt, Artificial Sequence
  Description of Artificial Sequence: Synthetic oligonucleotide
auauauuucucca

SEQ ID NO: 120094 - RNA, 10 nt, Artificial Sequence
  Description of Artificial Sequence: Synthetic oligonucleotide
caugaaggcu

SEQ ID NO: 120095 - RNA, 11 nt, Artificial Sequence
  Description of Artificial Sequence: Synthetic oligonucleotide
gcuggaguggu

SEQ ID NO: 120096 - RNA, 11 nt, Artificial Sequence
  Description of Artificial Sequence: Synthetic oligonucleotide
aggaagagagg

SEQ ID NO: 120097 - RNA, 12 nt, Artificial Sequence
  Description of Artificial Sequence: Synthetic oligonucleotide
cuugcaucgggc

SEQ ID NO: 120098 - RNA, 13 nt, Artificial Sequence
  Description of Artificial Sequence: Synthetic oligonucleotide
auauccuacugug

SEQ ID NO: 120099 - RNA, 13 nt, Artificial Sequence
  Description of Artificial Sequence: Synthetic oligonucleotide
uccuacuguguaa

SEQ ID NO: 120100 - RNA, 12 nt, Artificial Sequence
  Description of Artificial Sequence: Synthetic oligonucleotide
ccuuguagugua

SEQ ID NO: 120101 - RNA, 13 nt, Artificial Sequence
  Description of Artificial Sequence: Synthetic oligonucleotide
ucuuuguugauug

SEQ ID NO: 120102 - RNA, 14 nt, Artificial Sequence
  Description of Artificial Sequence: Synthetic oligonucleotide
uuuguugauugaaa

SEQ ID NO: 120103 - RNA, 15 nt, Artificial Sequence
  Description of Artificial Sequence: Synthetic oligonucleotide
uucuuuuucuuccau

SEQ ID NO: 120104 - RNA, 13 nt, Artificial Sequence
  Description of Artificial Sequence: Synthetic oligonucleotide
aaucuuccuucua

SEQ ID NO: 120105 - RNA, 13 nt, Artificial Sequence
  Description of Artificial Sequence: Synthetic oligonucleotide
uugaaugcuucau

SEQ ID NO: 120106 - RNA, 13 nt, Artificial Sequence
  Description of Artificial Sequence: Synthetic oligonucleotide
ugaaugcuucaug

SEQ ID NO: 120107 - RNA, 13 nt, Artificial Sequence
  Description of Artificial Sequence: Synthetic oligonucleotide
aauucuacuuuga

SEQ ID NO: 120108 - RNA, 13 nt, Artificial Sequence
  Description of Artificial Sequence: Synthetic oligonucleotide
agcaacuacagac

SEQ ID NO: 120109 - RNA, 13 nt, Artificial Sequence
  Description of Artificial Sequence: Synthetic oligonucleotide
gaccaaggucaac

SEQ ID NO: 120110 - RNA, 13 nt, Artificial Sequence
  Description of Artificial Sequence: Synthetic oligonucleotide
cgacuaucucgac

SEQ ID NO: 120111 - RNA, 13 nt, Artificial Sequence
  Description of Artificial Sequence: Synthetic oligonucleotide
aaccuucccaaac

SEQ ID NO: 120112 - RNA, 14 nt, Artificial Sequence
  Description of Artificial Sequence: Synthetic oligonucleotide
ccaagcuuagaacu

SEQ ID NO: 120113 - RNA, 15 nt, Artificial Sequence
  Description of Artificial Sequence: Synthetic oligonucleotide
agcuuagaacuuuaa

SEQ ID NO: 120114 - RNA, 11 nt, Artificial Sequence
  Description of Artificial Sequence: Synthetic oligonucleotide
aagaccaccac

SEQ ID NO: 120115 - RNA, 14 nt, Artificial Sequence
  Description of Artificial Sequence: Synthetic oligonucleotide
gcgagaaauaaagu

SEQ ID NO: 120116 - RNA, 14 nt, Artificial Sequence
  Description of Artificial Sequence: Synthetic oligonucleotide
cgagaaauaaaguu

SEQ ID NO: 120117 - RNA, 12 nt, Artificial Sequence
  Description of Artificial Sequence: Synthetic oligonucleotide
aggaaaugaucc

SEQ ID NO: 120118 - RNA, 13 nt, Artificial Sequence
  Description of Artificial Sequence: Synthetic oligonucleotide
gaagaaaugaaac

SEQ ID NO: 120119 - RNA, 13 nt, Artificial Sequence
  Description of Artificial Sequence: Synthetic oligonucleotide
guuuccauccucc

SEQ ID NO: 120120 - RNA, 15 nt, Artificial Sequence
  Description of Artificial Sequence: Synthetic oligonucleotide
acugaaaaucuuuga

SEQ ID NO: 120121 - RNA, 11 nt, Artificial Sequence
  Description of Artificial Sequence: Synthetic oligonucleotide
ugccguucagg

SEQ ID NO: 120122 - RNA, 13 nt, Artificial Sequence
  Description of Artificial Sequence: Synthetic oligonucleotide
caggguccagaag

SEQ ID NO: 120123 - RNA, 13 nt, Artificial Sequence
  Description of Artificial Sequence: Synthetic oligonucleotide
ucaagacugcuug

SEQ ID NO: 120124 - RNA, 13 nt, Artificial Sequence
  Description of Artificial Sequence: Synthetic oligonucleotide
uccaugucuuugg

SEQ ID NO: 120125 - RNA, 11 nt, Artificial Sequence
  Description of Artificial Sequence: Synthetic oligonucleotide
gccugaaacac

SEQ ID NO: 120126 - RNA, 12 nt, Artificial Sequence
  Description of Artificial Sequence: Synthetic oligonucleotide
ucucuguaccuc

SEQ ID NO: 120127 - RNA, 12 nt, Artificial Sequence
  Description of Artificial Sequence: Synthetic oligonucleotide
agcaagacaaga

SEQ ID NO: 120128 - RNA, 13 nt, Artificial Sequence
  Description of Artificial Sequence: Synthetic oligonucleotide
gcaagacaagaaa

SEQ ID NO: 120129 - RNA, 12 nt, Artificial Sequence
  Description of Artificial Sequence: Synthetic oligonucleotide
uguacaagaucc

SEQ ID NO: 120130 - RNA, 12 nt, Artificial Sequence
  Description of Artificial Sequence: Synthetic oligonucleotide
cguacuugcaga

SEQ ID NO: 120131 - RNA, 13 nt, Artificial Sequence
  Description of Artificial Sequence: Synthetic oligonucleotide
cgaucgauacaga

SEQ ID NO: 120132 - RNA, 13 nt, Artificial Sequence
  Description of Artificial Sequence: Synthetic oligonucleotide
uauaaaaauaaau

SEQ ID NO: 120133 - RNA, 13 nt, Artificial Sequence
  Description of Artificial Sequence: Synthetic oligonucleotide
uaaaaauaaauau

SEQ ID NO: 120134 - RNA, 13 nt, Artificial Sequence
  Description of Artificial Sequence: Synthetic oligonucleotide
uuugacugcugug

SEQ ID NO: 120135 - RNA, 13 nt, Artificial Sequence
  Description of Artificial Sequence: Synthetic oligonucleotide
ggagaugagagac

SEQ ID NO: 120136 - RNA, 10 nt, Artificial Sequence
  Description of Artificial Sequence: Synthetic oligonucleotide
ucccacuugg

SEQ ID NO: 120137 - RNA, 10 nt, Artificial Sequence
  Description of Artificial Sequence: Synthetic oligonucleotide
guucacggcc

SEQ ID NO: 120138 - RNA, 12 nt, Artificial Sequence
  Description of Artificial Sequence: Synthetic oligonucleotide
accaucacacca

SEQ ID NO: 120139 - RNA, 10 nt, Artificial Sequence
  Description of Artificial Sequence: Synthetic oligonucleotide
cugcggguuu

SEQ ID NO: 120140 - RNA, 9 nt, Artificial Sequence
  Description of Artificial Sequence: Synthetic oligonucleotide
uccaguuug

SEQ ID NO: 120141 - RNA, 12 nt, Artificial Sequence
  Description of Artificial Sequence: Synthetic oligonucleotide
uuaaggacuucu

SEQ ID NO: 120142 - RNA, 12 nt, Artificial Sequence
  Description of Artificial Sequence: Synthetic oligonucleotide
agugggacagag

SEQ ID NO: 120143 - RNA, 13 nt, Artificial Sequence
  Description of Artificial Sequence: Synthetic oligonucleotide
auuuguuauugug

SEQ ID NO: 120144 - RNA, 12 nt, Artificial Sequence
  Description of Artificial Sequence: Synthetic oligonucleotide
ucaaaugcauuu

SEQ ID NO: 120145 - RNA, 9 nt, Artificial Sequence
  Description of Artificial Sequence: Synthetic oligonucleotide
aggaaagcc

SEQ ID NO: 120146 - RNA, 10 nt, Artificial Sequence
  Description of Artificial Sequence: Synthetic oligonucleotide
ggaaagcccu

SEQ ID NO: 120147 - RNA, 11 nt, Artificial Sequence
  Description of Artificial Sequence: Synthetic oligonucleotide
ccagcauggcc

SEQ ID NO: 120148 - RNA, 10 nt, Artificial Sequence
  Description of Artificial Sequence: Synthetic oligonucleotide
uucucccuga

SEQ ID NO: 120149 - RNA, 11 nt, Artificial Sequence
  Description of Artificial Sequence: Synthetic oligonucleotide
aagaagcccuu

SEQ ID NO: 120150 - RNA, 11 nt, Artificial Sequence
  Description of Artificial Sequence: Synthetic oligonucleotide
gaagcccuuca

SEQ ID NO: 120151 - RNA, 10 nt, Artificial Sequence
  Description of Artificial Sequence: Synthetic oligonucleotide
cccuucagcg

SEQ ID NO: 120152 - RNA, 10 nt, Artificial Sequence
  Description of Artificial Sequence: Synthetic oligonucleotide
cuucagcggc

SEQ ID NO: 120153 - RNA, 11 nt, Artificial Sequence
  Description of Artificial Sequence: Synthetic oligonucleotide
cagcggccagu

SEQ ID NO: 120154 - RNA, 11 nt, Artificial Sequence
  Description of Artificial Sequence: Synthetic oligonucleotide
gaaaagcuccg

SEQ ID NO: 120155 - RNA, 10 nt, Artificial Sequence
  Description of Artificial Sequence: Synthetic oligonucleotide
aaagcuccgg

SEQ ID NO: 120156 - RNA, 12 nt, Artificial Sequence
  Description of Artificial Sequence: Synthetic oligonucleotide
gucaacagucug

SEQ ID NO: 120157 - RNA, 12 nt, Artificial Sequence
  Description of Artificial Sequence: Synthetic oligonucleotide
agaguucaaaag

SEQ ID NO: 120158 - RNA, 12 nt, Artificial Sequence
  Description of Artificial Sequence: Synthetic oligonucleotide
gaguucaaaagc

SEQ ID NO: 120159 - RNA, 11 nt, Artificial Sequence
  Description of Artificial Sequence: Synthetic oligonucleotide
ucaaaagcccu

SEQ ID NO: 120160 - RNA, 11 nt, Artificial Sequence
  Description of Artificial Sequence: Synthetic oligonucleotide
caaaagcccuu

SEQ ID NO: 120161 - RNA, 11 nt, Artificial Sequence
  Description of Artificial Sequence: Synthetic oligonucleotide
aaagcccuuca

SEQ ID NO: 120162 - RNA, 11 nt, Artificial Sequence
  Description of Artificial Sequence: Synthetic oligonucleotide
aagcccuucag

SEQ ID NO: 120163 - RNA, 12 nt, Artificial Sequence
  Description of Artificial Sequence: Synthetic oligonucleotide
ugaagccgcucg

SEQ ID NO: 120164 - RNA, 11 nt, Artificial Sequence
  Description of Artificial Sequence: Synthetic oligonucleotide
acgccagucaa

SEQ ID NO: 120165 - RNA, 12 nt, Artificial Sequence
  Description of Artificial Sequence: Synthetic oligonucleotide
ucuuggugcgug

SEQ ID NO: 120166 - RNA, 13 nt, Artificial Sequence
  Description of Artificial Sequence: Synthetic oligonucleotide
uuggauucaucag

SEQ ID NO: 120167 - RNA, 12 nt, Artificial Sequence
  Description of Artificial Sequence: Synthetic oligonucleotide
ggaauaccuaag

SEQ ID NO: 120168 - RNA, 11 nt, Artificial Sequence
  Description of Artificial Sequence: Synthetic oligonucleotide
uuugaggcuca

SEQ ID NO: 120169 - RNA, 10 nt, Artificial Sequence
  Description of Artificial Sequence: Synthetic oligonucleotide
cuacaauugg

SEQ ID NO: 120170 - RNA, 11 nt, Artificial Sequence
  Description of Artificial Sequence: Synthetic oligonucleotide
aguuaggagcc

SEQ ID NO: 120171 - RNA, 12 nt, Artificial Sequence
  Description of Artificial Sequence: Synthetic oligonucleotide
gucaauauccac

SEQ ID NO: 120172 - RNA, 12 nt, Artificial Sequence
  Description of Artificial Sequence: Synthetic oligonucleotide
uguucagucaca

SEQ ID NO: 120173 - RNA, 11 nt, Artificial Sequence
  Description of Artificial Sequence: Synthetic oligonucleotide
cacacacauac

SEQ ID NO: 120174 - RNA, 11 nt, Artificial Sequence
  Description of Artificial Sequence: Synthetic oligonucleotide
uccuuuugcuu

SEQ ID NO: 120175 - RNA, 15 nt, Artificial Sequence
  Description of Artificial Sequence: Synthetic oligonucleotide
uuuaaaguaauuuuu

SEQ ID NO: 120176 - RNA, 12 nt, Artificial Sequence
  Description of Artificial Sequence: Synthetic oligonucleotide
aacagucaaugg

SEQ ID NO: 120177 - RNA, 12 nt, Artificial Sequence
  Description of Artificial Sequence: Synthetic oligonucleotide
cgacaaaccaau

SEQ ID NO: 120178 - RNA, 11 nt, Artificial Sequence
  Description of Artificial Sequence: Synthetic oligonucleotide
cugcuaccacu

SEQ ID NO: 120179 - RNA, 12 nt, Artificial Sequence
  Description of Artificial Sequence: Synthetic oligonucleotide
caagcggucuua

SEQ ID NO: 120180 - RNA, 12 nt, Artificial Sequence
  Description of Artificial Sequence: Synthetic oligonucleotide
gucuuaccggcu

SEQ ID NO: 120181 - RNA, 10 nt, Artificial Sequence
  Description of Artificial Sequence: Synthetic oligonucleotide
auggguuacc

SEQ ID NO: 120182 - RNA, 10 nt, Artificial Sequence
  Description of Artificial Sequence: Synthetic oligonucleotide
uuaccugcga

SEQ ID NO: 120183 - RNA, 11 nt, Artificial Sequence
  Description of Artificial Sequence: Synthetic oligonucleotide
aucuugcugag

SEQ ID NO: 120184 - RNA, 12 nt, Artificial Sequence
  Description of Artificial Sequence: Synthetic oligonucleotide
gcauaaaacagu

SEQ ID NO: 120185 - RNA, 11 nt, Artificial Sequence
  Description of Artificial Sequence: Synthetic oligonucleotide
uccuuuauccu

SEQ ID NO: 120186 - RNA, 11 nt, Artificial Sequence
  Description of Artificial Sequence: Synthetic oligonucleotide
aacgcaaguug

SEQ ID NO: 120187 - RNA, 12 nt, Artificial Sequence
  Description of Artificial Sequence: Synthetic oligonucleotide
aacugaaaccau

SEQ ID NO: 120188 - RNA, 13 nt, Artificial Sequence
  Description of Artificial Sequence: Synthetic oligonucleotide
cuuuguuaaauau

SEQ ID NO: 120189 - RNA, 13 nt, Artificial Sequence
  Description of Artificial Sequence: Synthetic oligonucleotide
uauauuaaaaguu

SEQ ID NO: 120190 - RNA, 12 nt, Artificial Sequence
  Description of Artificial Sequence: Synthetic oligonucleotide
uuuugacuuaac

SEQ ID NO: 120191 - RNA, 12 nt, Artificial Sequence
  Description of Artificial Sequence: Synthetic oligonucleotide
caaacucagcac

SEQ ID NO: 120192 - RNA, 10 nt, Artificial Sequence
  Description of Artificial Sequence: Synthetic oligonucleotide
gcugaccuca

SEQ ID NO: 120193 - RNA, 13 nt, Artificial Sequence
  Description of Artificial Sequence: Synthetic oligonucleotide
uuauucagaucgc

SEQ ID NO: 120194 - RNA, 12 nt, Artificial Sequence
  Description of Artificial Sequence: Synthetic oligonucleotide
ggguucugggau

SEQ ID NO: 120195 - RNA, 14 nt, Artificial Sequence
  Description of Artificial Sequence: Synthetic oligonucleotide
uauuggaaauuaug

SEQ ID NO: 120196 - RNA, 12 nt, Artificial Sequence
  Description of Artificial Sequence: Synthetic oligonucleotide
uggaagcacuag

SEQ ID NO: 120197 - RNA, 12 nt, Artificial Sequence
  Description of Artificial Sequence: Synthetic oligonucleotide
uuuuuaugugga

SEQ ID NO: 120198 - RNA, 11 nt, Artificial Sequence
  Description of Artificial Sequence: Synthetic oligonucleotide
gaauugguaga

SEQ ID NO: 120199 - RNA, 12 nt, Artificial Sequence
  Description of Artificial Sequence: Synthetic oligonucleotide
uagacuuggaga

SEQ ID NO: 120200 - RNA, 12 nt, Artificial Sequence
  Description of Artificial Sequence: Synthetic oligonucleotide
uacaguauucca

SEQ ID NO: 120201 - RNA, 14 nt, Artificial Sequence
  Description of Artificial Sequence: Synthetic oligonucleotide
cacugaugaauuaa

SEQ ID NO: 120202 - RNA, 11 nt, Artificial Sequence
  Description of Artificial Sequence: Synthetic oligonucleotide
cacaucaucac

SEQ ID NO: 120203 - RNA, 12 nt, Artificial Sequence
  Description of Artificial Sequence: Synthetic oligonucleotide
ucaccaaacaga

SEQ ID NO: 120204 - RNA, 11 nt, Artificial Sequence
  Description of Artificial Sequence: Synthetic oligonucleotide
gaacaugaugg

SEQ ID NO: 120205 - RNA, 11 nt, Artificial Sequence
  Description of Artificial Sequence: Synthetic oligonucleotide
auguagacugc

SEQ ID NO: 120206 - RNA, 12 nt, Artificial Sequence
  Description of Artificial Sequence: Synthetic oligonucleotide
gaucuauuuaug

SEQ ID NO: 120207 - RNA, 11 nt, Artificial Sequence
  Description of Artificial Sequence: Synthetic oligonucleotide
cacuauuauca

SEQ ID NO: 120208 - RNA, 10 nt, Artificial Sequence
  Description of Artificial Sequence: Synthetic oligonucleotide
ucaguucugc

SEQ ID NO: 120209 - RNA, 12 nt, Artificial Sequence
  Description of Artificial Sequence: Synthetic oligonucleotide
gauuaaaccuac

SEQ ID NO: 120210 - RNA, 12 nt, Artificial Sequence
  Description of Artificial Sequence: Synthetic oligonucleotide
uaaaauccuucu

SEQ ID NO: 120211 - RNA, 11 nt, Artificial Sequence
  Description of Artificial Sequence: Synthetic oligonucleotide
augcuguagac

SEQ ID NO: 120212 - RNA, 12 nt, Artificial Sequence
  Description of Artificial Sequence: Synthetic oligonucleotide
ugauaggaauag

SEQ ID NO: 120213 - RNA, 10 nt, Artificial Sequence
  Description of Artificial Sequence: Synthetic oligonucleotide
auggcccuga

SEQ ID NO: 120214 - RNA, 10 nt, Artificial Sequence
  Description of Artificial Sequence: Synthetic oligonucleotide
uccucaagca

SEQ ID NO: 120215 - RNA, 9 nt, Artificial Sequence
  Description of Artificial Sequence: Synthetic oligonucleotide
uucagccca

SEQ ID NO: 120216 - RNA, 10 nt, Artificial Sequence
  Description of Artificial Sequence: Synthetic oligonucleotide
cugcugaacc

SEQ ID NO: 120217 - RNA, 11 nt, Artificial Sequence
  Description of Artificial Sequence: Synthetic oligonucleotide
aguucucuuca

SEQ ID NO: 120218 - RNA, 10 nt, Artificial Sequence
  Description of Artificial Sequence: Synthetic oligonucleotide
cagccuagag

SEQ ID NO: 120219 - RNA, 12 nt, Artificial Sequence
  Description of Artificial Sequence: Synthetic oligonucleotide
ucugugaagugu

SEQ ID NO: 120220 - RNA, 13 nt, Artificial Sequence
  Description of Artificial Sequence: Synthetic oligonucleotide
gagaaaauuucaa

SEQ ID NO: 120221 - RNA, 10 nt, Artificial Sequence
  Description of Artificial Sequence: Synthetic oligonucleotide
auccuccuga

SEQ ID NO: 120222 - RNA, 11 nt, Artificial Sequence
  Description of Artificial Sequence: Synthetic oligonucleotide
ugacaucauau

SEQ ID NO: 120223 - RNA, 12 nt, Artificial Sequence
  Description of Artificial Sequence: Synthetic oligonucleotide
aucuucaucaua

SEQ ID NO: 120224 - RNA, 12 nt, Artificial Sequence
  Description of Artificial Sequence: Synthetic oligonucleotide
acuagcuauuaa

SEQ ID NO: 120225 - RNA, 13 nt, Artificial Sequence
  Description of Artificial Sequence: Synthetic oligonucleotide
cucuacuaaaaau

SEQ ID NO: 120226 - RNA, 11 nt, Artificial Sequence
  Description of Artificial Sequence: Synthetic oligonucleotide
cuaucucgccu

SEQ ID NO: 120227 - RNA, 12 nt, Artificial Sequence
  Description of Artificial Sequence: Synthetic oligonucleotide
uucgguccaguu

SEQ ID NO: 120228 - RNA, 10 nt, Artificial Sequence
  Description of Artificial Sequence: Synthetic oligonucleotide
auguagccgc

SEQ ID NO: 120229 - RNA, 11 nt, Artificial Sequence
  Description of Artificial Sequence: Synthetic oligonucleotide
gaggagacuug

SEQ ID NO: 120230 - RNA, 11 nt, Artificial Sequence
  Description of Artificial Sequence: Synthetic oligonucleotide
aguagugagga

SEQ ID NO: 120231 - RNA, 13 nt, Artificial Sequence
  Description of Artificial Sequence: Synthetic oligonucleotide
agaugaguacaaa

SEQ ID NO: 120232 - RNA, 12 nt, Artificial Sequence
  Description of Artificial Sequence: Synthetic oligonucleotide
uuguuaaugggc

SEQ ID NO: 120233 - RNA, 12 nt, Artificial Sequence
  Description of Artificial Sequence: Synthetic oligonucleotide
uuuuaauuuauu

SEQ ID NO: 120234 - RNA, 11 nt, Artificial Sequence
  Description of Artificial Sequence: Synthetic oligonucleotide
auuuaaauaug

SEQ ID NO: 120235 - RNA, 12 nt, Artificial Sequence
  Description of Artificial Sequence: Synthetic oligonucleotide
auccuuuguuuc

SEQ ID NO: 120236 - RNA, 13 nt, Artificial Sequence
  Description of Artificial Sequence: Synthetic oligonucleotide
gucuaaguguuug

SEQ ID NO: 120237 - RNA, 11 nt, Artificial Sequence
  Description of Artificial Sequence: Synthetic oligonucleotide
ccugugacaaa

SEQ ID NO: 120238 - RNA, 12 nt, Artificial Sequence
  Description of Artificial Sequence: Synthetic oligonucleotide
caggcugaauua

SEQ ID NO: 120239 - RNA, 13 nt, Artificial Sequence
  Description of Artificial Sequence: Synthetic oligonucleotide
ucauucuuacaau

SEQ ID NO: 120240 - RNA, 14 nt, Artificial Sequence
  Description of Artificial Sequence: Synthetic oligonucleotide
cauucuuacaauug

SEQ ID NO: 120241 - RNA, 11 nt, Artificial Sequence
  Description of Artificial Sequence: Synthetic oligonucleotide
agagaguguac

SEQ ID NO: 120242 - RNA, 11 nt, Artificial Sequence
  Description of Artificial Sequence: Synthetic oligonucleotide
gaacucagcag

SEQ ID NO: 120243 - RNA, 12 nt, Artificial Sequence
  Description of Artificial Sequence: Synthetic oligonucleotide
uuauuuucagua

SEQ ID NO: 120244 - RNA, 11 nt, Artificial Sequence
  Description of Artificial Sequence: Synthetic oligonucleotide
cuuaaauggaa

SEQ ID NO: 120245 - RNA, 12 nt, Artificial Sequence
  Description of Artificial Sequence: Synthetic oligonucleotide
gccuaaaauugu

SEQ ID NO: 120246 - RNA, 12 nt, Artificial Sequence
  Description of Artificial Sequence: Synthetic oligonucleotide
acuaacaucugg

SEQ ID NO: 120247 - RNA, 11 nt, Artificial Sequence
  Description of Artificial Sequence: Synthetic oligonucleotide
gacugugagcu

SEQ ID NO: 120248 - RNA, 13 nt, Artificial Sequence
  Description of Artificial Sequence: Synthetic oligonucleotide
gcuuuuuauuaau

SEQ ID NO: 120249 - RNA, 12 nt, Artificial Sequence
  Description of Artificial Sequence: Synthetic oligonucleotide
ucuucuuacauu

SEQ ID NO: 120250 - RNA, 14 nt, Artificial Sequence
  Description of Artificial Sequence: Synthetic oligonucleotide
auuuguaaaaaugu

SEQ ID NO: 120251 - RNA, 14 nt, Artificial Sequence
  Description of Artificial Sequence: Synthetic oligonucleotide
ucuuaauucauauu

SEQ ID NO: 120252 - RNA, 12 nt, Artificial Sequence
  Description of Artificial Sequence: Synthetic oligonucleotide
aacuaaucauga

SEQ ID NO: 120253 - RNA, 11 nt, Artificial Sequence
  Description of Artificial Sequence: Synthetic oligonucleotide
cugcucuuggg

SEQ ID NO: 120254 - RNA, 12 nt, Artificial Sequence
  Description of Artificial Sequence: Synthetic oligonucleotide
aguagcuuugag

SEQ ID NO: 120255 - RNA, 13 nt, Artificial Sequence
  Description of Artificial Sequence: Synthetic oligonucleotide
acguaauauuuca

SEQ ID NO: 120256 - RNA, 12 nt, Artificial Sequence
  Description of Artificial Sequence: Synthetic oligonucleotide
auucucuucacu

SEQ ID NO: 120257 - RNA, 13 nt, Artificial Sequence
  Description of Artificial Sequence: Synthetic oligonucleotide
uaaugcuaagaaa

SEQ ID NO: 120258 - RNA, 11 nt, Artificial Sequence
  Description of Artificial Sequence: Synthetic oligonucleotide
cugaaaaucaa

SEQ ID NO: 120259 - RNA, 13 nt, Artificial Sequence
  Description of Artificial Sequence: Synthetic oligonucleotide
auaugauuacuuu

SEQ ID NO: 120260 - RNA, 13 nt, Artificial Sequence
  Description of Artificial Sequence: Synthetic oligonucleotide
auuuuguucuaca

SEQ ID NO: 120261 - RNA, 11 nt, Artificial Sequence
  Description of Artificial Sequence: Synthetic oligonucleotide
ccgggacucuc

SEQ ID NO: 120262 - RNA, 13 nt, Artificial Sequence
  Description of Artificial Sequence: Synthetic oligonucleotide
cuuuaaaguaaag

SEQ ID NO: 120263 - RNA, 12 nt, Artificial Sequence
  Description of Artificial Sequence: Synthetic oligonucleotide
cuggaagccugg

SEQ ID NO: 120264 - RNA, 13 nt, Artificial Sequence
  Description of Artificial Sequence: Synthetic oligonucleotide
aaacaaaagagag

SEQ ID NO: 120265 - RNA, 12 nt, Artificial Sequence
  Description of Artificial Sequence: Synthetic oligonucleotide
ucaguuaugccg

SEQ ID NO: 120266 - RNA, 12 nt, Artificial Sequence
  Description of Artificial Sequence: Synthetic oligonucleotide
aaaagaagucca

SEQ ID NO: 120267 - RNA, 10 nt, Artificial Sequence
  Description of Artificial Sequence: Synthetic oligonucleotide
ggugagguua

SEQ ID NO: 120268 - RNA, 10 nt, Artificial Sequence
  Description of Artificial Sequence: Synthetic oligonucleotide
ggaagaggac

SEQ ID NO: 120269 - RNA, 12 nt, Artificial Sequence
  Description of Artificial Sequence: Synthetic oligonucleotide
agcaaguauugu

SEQ ID NO: 120270 - RNA, 11 nt, Artificial Sequence
  Description of Artificial Sequence: Synthetic oligonucleotide
uuguagcacuc

SEQ ID NO: 120271 - RNA, 13 nt, Artificial Sequence
  Description of Artificial Sequence: Synthetic oligonucleotide
caaaaccacaaau

SEQ ID NO: 120272 - RNA, 11 nt, Artificial Sequence
  Description of Artificial Sequence: Synthetic oligonucleotide
aagcccauaca

SEQ ID NO: 120273 - RNA, 10 nt, Artificial Sequence
  Description of Artificial Sequence: Synthetic oligonucleotide
gcccauacag

SEQ ID NO: 120274 - RNA, 11 nt, Artificial Sequence
  Description of Artificial Sequence: Synthetic oligonucleotide
agaaaccuucc

SEQ ID NO: 120275 - RNA, 9 nt, Artificial Sequence
  Description of Artificial Sequence: Synthetic oligonucleotide
uauaccuac

SEQ ID NO: 120276 - RNA, 12 nt, Artificial Sequence
  Description of Artificial Sequence: Synthetic oligonucleotide
ccaguuuucgga

SEQ ID NO: 120277 - RNA, 8 nt, Artificial Sequence
  Description of Artificial Sequence: Synthetic oligonucleotide
gaacaggg

SEQ ID NO: 120278 - RNA, 12 nt, Artificial Sequence
  Description of Artificial Sequence: Synthetic oligonucleotide
uaacuuuccagu

SEQ ID NO: 120279 - RNA, 13 nt, Artificial Sequence
  Description of Artificial Sequence: Synthetic oligonucleotide
aaguuugguuuug

SEQ ID NO: 120280 - RNA, 11 nt, Artificial Sequence
  Description of Artificial Sequence: Synthetic oligonucleotide
uucccacugua

SEQ ID NO: 120281 - RNA, 12 nt, Artificial Sequence
  Description of Artificial Sequence: Synthetic oligonucleotide
gauaccauauga

SEQ ID NO: 120282 - RNA, 10 nt, Artificial Sequence
  Description of Artificial Sequence: Synthetic oligonucleotide
acaugggcug

SEQ ID NO: 120283 - RNA, 12 nt, Artificial Sequence
  Description of Artificial Sequence: Synthetic oligonucleotide
aacuuuuucaua

SEQ ID NO: 120284 - RNA, 11 nt, Artificial Sequence
  Description of Artificial Sequence: Synthetic oligonucleotide
augaggccgga

SEQ ID NO: 120285 - RNA, 10 nt, Artificial Sequence
  Description of Artificial Sequence: Synthetic oligonucleotide
cugcauuugu

SEQ ID NO: 120286 - RNA, 12 nt, Artificial Sequence
  Description of Artificial Sequence: Synthetic oligonucleotide
auguuuacuacc

SEQ ID NO: 120287 - RNA, 14 nt, Artificial Sequence
  Description of Artificial Sequence: Synthetic oligonucleotide
auuuuuugaugaaa

SEQ ID NO: 120288 - RNA, 13 nt, Artificial Sequence
  Description of Artificial Sequence: Synthetic oligonucleotide
agugugugaauuu

SEQ ID NO: 120289 - RNA, 12 nt, Artificial Sequence
  Description of Artificial Sequence: Synthetic oligonucleotide
agcaauguaugu

SEQ ID NO: 120290 - RNA, 13 nt, Artificial Sequence
  Description of Artificial Sequence: Synthetic oligonucleotide
aagcacauauaua

SEQ ID NO: 120291 - RNA, 13 nt, Artificial Sequence
  Description of Artificial Sequence: Synthetic oligonucleotide
uaauaguuucucc

SEQ ID NO: 120292 - RNA, 12 nt, Artificial Sequence
  Description of Artificial Sequence: Synthetic oligonucleotide
guuucuccaaau

SEQ ID NO: 120293 - RNA, 12 nt, Artificial Sequence
  Description of Artificial Sequence: Synthetic oligonucleotide
acuuccuagaaa

SEQ ID NO: 120294 - RNA, 12 nt, Artificial Sequence
  Description of Artificial Sequence: Synthetic oligonucleotide
acaccauauaug

SEQ ID NO: 120295 - RNA, 13 nt, Artificial Sequence
  Description of Artificial Sequence: Synthetic oligonucleotide
uauaugaauggag

SEQ ID NO: 120296 - RNA, 12 nt, Artificial Sequence
  Description of Artificial Sequence: Synthetic oligonucleotide
cauuuacaggga

SEQ ID NO: 120297 - RNA, 12 nt, Artificial Sequence
  Description of Artificial Sequence: Synthetic oligonucleotide
auuuacagggac

SEQ ID NO: 120298 - RNA, 9 nt, Artificial Sequence
  Description of Artificial Sequence: Synthetic oligonucleotide
gggaccuga

SEQ ID NO: 120299 - RNA, 13 nt, Artificial Sequence
  Description of Artificial Sequence: Synthetic oligonucleotide
guuugacugcauc

SEQ ID NO: 120300 - RNA, 12 nt, Artificial Sequence
  Description of Artificial Sequence: Synthetic oligonucleotide
uugacugcaucg

SEQ ID NO: 120301 - RNA, 11 nt, Artificial Sequence
  Description of Artificial Sequence: Synthetic oligonucleotide
aguucacaggg

SEQ ID NO: 120302 - RNA, 12 nt, Artificial Sequence
  Description of Artificial Sequence: Synthetic oligonucleotide
gcaccucugucc

SEQ ID NO: 120303 - RNA, 14 nt, Artificial Sequence
  Description of Artificial Sequence: Synthetic oligonucleotide
guuugucuuuuuaa

SEQ ID NO: 120304 - RNA, 13 nt, Artificial Sequence
  Description of Artificial Sequence: Synthetic oligonucleotide
uugucuuuuuaag

SEQ ID NO: 120305 - RNA, 12 nt, Artificial Sequence
  Description of Artificial Sequence: Synthetic oligonucleotide
cuaaagguuguc

SEQ ID NO: 120306 - RNA, 11 nt, Artificial Sequence
  Description of Artificial Sequence: Synthetic oligonucleotide
agguugucgac

SEQ ID NO: 120307 - RNA, 12 nt, Artificial Sequence
  Description of Artificial Sequence: Synthetic oligonucleotide
ccuggcaauugu

SEQ ID NO: 120308 - RNA, 11 nt, Artificial Sequence
  Description of Artificial Sequence: Synthetic oligonucleotide
guggugcgagg

SEQ ID NO: 120309 - RNA, 12 nt, Artificial Sequence
  Description of Artificial Sequence: Synthetic oligonucleotide
gagacaugaaau

SEQ ID NO: 120310 - RNA, 12 nt, Artificial Sequence
  Description of Artificial Sequence: Synthetic oligonucleotide
uauauuucucca

SEQ ID NO: 120311 - RNA, 9 nt, Artificial Sequence
  Description of Artificial Sequence: Synthetic oligonucleotide
augaaggcu

SEQ ID NO: 120312 - RNA, 10 nt, Artificial Sequence
  Description of Artificial Sequence: Synthetic oligonucleotide
cuggaguggu

SEQ ID NO: 120313 - RNA, 10 nt, Artificial Sequence
  Description of Artificial Sequence: Synthetic oligonucleotide
ggaagagagg

SEQ ID NO: 120314 - RNA, 11 nt, Artificial Sequence
  Description of Artificial Sequence: Synthetic oligonucleotide
uugcaucgggc

SEQ ID NO: 120315 - RNA, 12 nt, Artificial Sequence
  Description of Artificial Sequence: Synthetic oligonucleotide
uauccuacugug

SEQ ID NO: 120316 - RNA, 12 nt, Artificial Sequence
  Description of Artificial Sequence: Synthetic oligonucleotide
ccuacuguguaa

SEQ ID NO: 120317 - RNA, 11 nt, Artificial Sequence
  Description of Artificial Sequence: Synthetic oligonucleotide
cuuguagugua

SEQ ID NO: 120318 - RNA, 12 nt, Artificial Sequence
  Description of Artificial Sequence: Synthetic oligonucleotide
cuuuguugauug

SEQ ID NO: 120319 - RNA, 13 nt, Artificial Sequence
  Description of Artificial Sequence: Synthetic oligonucleotide
uuguugauugaaa

SEQ ID NO: 120320 - RNA, 14 nt, Artificial Sequence
  Description of Artificial Sequence: Synthetic oligonucleotide
ucuuuuucuuccau

SEQ ID NO: 120321 - RNA, 12 nt, Artificial Sequence
  Description of Artificial Sequence: Synthetic oligonucleotide
aucuuccuucua

SEQ ID NO: 120322 - RNA, 12 nt, Artificial Sequence
  Description of Artificial Sequence: Synthetic oligonucleotide
ugaaugcuucau

SEQ ID NO: 120323 - RNA, 12 nt, Artificial Sequence
  Description of Artificial Sequence: Synthetic oligonucleotide
gaaugcuucaug

SEQ ID NO: 120324 - RNA, 12 nt, Artificial Sequence
  Description of Artificial Sequence: Synthetic oligonucleotide
auucuacuuuga

SEQ ID NO: 120325 - RNA, 12 nt, Artificial Sequence
  Description of Artificial Sequence: Synthetic oligonucleotide
gcaacuacagac

SEQ ID NO: 120326 - RNA, 12 nt, Artificial Sequence
  Description of Artificial Sequence: Synthetic oligonucleotide
accaaggucaac

SEQ ID NO: 120327 - RNA, 12 nt, Artificial Sequence
  Description of Artificial Sequence: Synthetic oligonucleotide
gacuaucucgac

SEQ ID NO: 120328 - RNA, 12 nt, Artificial Sequence
  Description of Artificial Sequence: Synthetic oligonucleotide
accuucccaaac

SEQ ID NO: 120329 - RNA, 13 nt, Artificial Sequence
  Description of Artificial Sequence: Synthetic oligonucleotide
caagcuuagaacu

SEQ ID NO: 120330 - RNA, 14 nt, Artificial Sequence
  Description of Artificial Sequence: Synthetic oligonucleotide
gcuuagaacuuuaa

SEQ ID NO: 120331 - RNA, 13 nt, Artificial Sequence
  Description of Artificial Sequence: Synthetic oligonucleotide
aacuuuaagcaac

SEQ ID NO: 120332 - RNA, 10 nt, Artificial Sequence
  Description of Artificial Sequence: Synthetic oligonucleotide
agaccaccac

SEQ ID NO: 120333 - RNA, 13 nt, Artificial Sequence
  Description of Artificial Sequence: Synthetic oligonucleotide
cgagaaauaaagu

SEQ ID NO: 120334 - RNA, 13 nt, Artificial Sequence
  Description of Artificial Sequence: Synthetic oligonucleotide
gagaaauaaaguu

SEQ ID NO: 120335 - RNA, 11 nt, Artificial Sequence
  Description of Artificial Sequence: Synthetic oligonucleotide
ggaaaugaucc

SEQ ID NO: 120336 - RNA, 12 nt, Artificial Sequence
  Description of Artificial Sequence: Synthetic oligonucleotide
aagaaaugaaac

SEQ ID NO: 120337 - RNA, 12 nt, Artificial Sequence
  Description of Artificial Sequence: Synthetic oligonucleotide
uuuccauccucc

SEQ ID NO: 120338 - RNA, 14 nt, Artificial Sequence
  Description of Artificial Sequence: Synthetic oligonucleotide
cugaaaaucuuuga

SEQ ID NO: 120339 - RNA, 10 nt, Artificial Sequence
  Description of Artificial Sequence: Synthetic oligonucleotide
gccguucagg

SEQ ID NO: 120340 - RNA, 12 nt, Artificial Sequence
  Description of Artificial Sequence: Synthetic oligonucleotide
aggguccagaag

SEQ ID NO: 120341 - RNA, 12 nt, Artificial Sequence
  Description of Artificial Sequence: Synthetic oligonucleotide
caagacugcuug

SEQ ID NO: 120342 - RNA, 12 nt, Artificial Sequence
  Description of Artificial Sequence: Synthetic oligonucleotide
ccaugucuuugg

SEQ ID NO: 120343 - RNA, 10 nt, Artificial Sequence
  Description of Artificial Sequence: Synthetic oligonucleotide
ccugaaacac

SEQ ID NO: 120344 - RNA, 11 nt, Artificial Sequence
  Description of Artificial Sequence: Synthetic oligonucleotide
cucuguaccuc

SEQ ID NO: 120345 - RNA, 11 nt, Artificial Sequence
  Description of Artificial Sequence: Synthetic oligonucleotide
gcaagacaaga

SEQ ID NO: 120346 - RNA, 12 nt, Artificial Sequence
  Description of Artificial Sequence: Synthetic oligonucleotide
caagacaagaaa

SEQ ID NO: 120347 - RNA, 11 nt, Artificial Sequence
  Description of Artificial Sequence: Synthetic oligonucleotide
guacaagaucc

SEQ ID NO: 120348 - RNA, 11 nt, Artificial Sequence
  Description of Artificial Sequence: Synthetic oligonucleotide
guacuugcaga

SEQ ID NO: 120349 - RNA, 12 nt, Artificial Sequence
  Description of Artificial Sequence: Synthetic oligonucleotide
gaucgauacaga

SEQ ID NO: 120350 - RNA, 12 nt, Artificial Sequence
  Description of Artificial Sequence: Synthetic oligonucleotide
auaaaaauaaau

SEQ ID NO: 120351 - RNA, 12 nt, Artificial Sequence
  Description of Artificial Sequence: Synthetic oligonucleotide
aaaaauaaauau

SEQ ID NO: 120352 - RNA, 12 nt, Artificial Sequence
  Description of Artificial Sequence: Synthetic oligonucleotide
uugacugcugug

SEQ ID NO: 120353 - RNA, 12 nt, Artificial Sequence
  Description of Artificial Sequence: Synthetic oligonucleotide
gagaugagagac

SEQ ID NO: 120354 - RNA, 9 nt, Artificial Sequence
  Description of Artificial Sequence: Synthetic oligonucleotide
cccacuugg

SEQ ID NO: 120355 - RNA, 1155 nt, Homo sapiens
accucucaagcagccagcgccugccugaaucuguucugcccccuccccacccauuucaccaccaccaugacaccgggcacccagucuccuuucuuccugcugcugcuccucacagugcuuacaguuguuacggguucuggucaugcaagcucuaccccagguggagaaaaggagacuucggcuacccagagaaguucagugcccagcucuacugagaagaaugcuuuuaauuccucucuggaagaucccagcaccgacuacuaccaagagcugcagagagacauuucugaaauguuuuugcagauuuauaaacaaggggguuuucugggccucuccaauauuaaguucaggccaggaucuguggugguacaauugacucuggccuuccgagaagguaccaucaauguccacgacguggagacacaguucaaucaguauaaaacggaagcagccucucgauauaaccugacgaucucagacgucagcgugagugaugugccauuuccuuucucugcccagucuggggcuggggugccaggcuggggcaucgcgcugcuggugcuggucuguguucugguugcgcuggccauugucuaucucauugccuuggcugucugucagugccgccgaaagaacuacgggcagcuggacaucuuuccagcccgggauaccuaccauccuaugagcgaguaccccaccuaccacacccaugggcgcuaugugcccccuagcaguaccgaucguagccccuaugagaagguuucugcagguaaugguggcagcagccucucuuacacaaacccagcaguggcagccacuucugccaacuuguaggggcacgucgcccgcugagcugaguggccagccagugccauuccacuccacucagguucuucagggccagagccccugcacccuguuugggcuggugagcugggaguucaggugggcugcucacagccuccuucagaggccccaccaauuucucggacacuucucaguguguggaagcucaugugggccccugagggcucaugccugggaaguguuguggugggggcucccaggaggacuggcccagagagcccugagauagcggggauccugaacuggacugaauaaaacguggucucccacugcgccaaaaaaaaaaaa

SEQ ID NO: 120356 - RNA, 1182 nt, Homo sapiens
accucucaagcagccagcgccugccugaaucuguucugcccccuccccacccauuucaccaccaccaugacaccgggcacccagucuccuuucuuccugcugcugcuccucacagugcuuacagcuaccacagccccuaaacccgcaacaguuguuacggguucuggucaugcaagcucuaccccagguggagaaaaggagacuucggcuacccagagaaguucagugcccagcucuacugagaagaaugcuuuuaauuccucucuggaagaucccagcaccgacuacuaccaagagcugcagagagacauuucugaaauguuuuugcagauuuauaaacaaggggguuuucugggccucuccaauauuaaguucaggccaggaucuguggugguacaauugacucuggccuuccgagaagguaccaucaauguccacgacguggagacacaguucaaucaguauaaaacggaagcagccucucgauauaaccugacgaucucagacgucagcgugagugaugugccauuuccuuucucugcccagucuggggcuggggugccaggcuggggcaucgcgcugcuggugcuggucuguguucugguugcgcuggccauugucuaucucauugccuuggcugucugucagugccgccgaaagaacuacgggcagcuggacaucuuuccagcccgggauaccuaccauccuaugagcgaguaccccaccuaccacacccaugggcgcuaugugcccccuagcaguaccgaucguagccccuaugagaagguuucugcagguaaugguggcagcagccucucuuacacaaacccagcaguggcagccacuucugccaacuuguaggggcacgucgcccgcugagcugaguggccagccagugccauuccacuccacucagguucuucagggccagagccccugcacccuguuugggcuggugagcugggaguucaggugggcugcucacagccuccuucagaggccccaccaauuucucggacacuucucaguguguggaagcucaugugggccccugagggcucaugccugggaaguguuguggugggggcucccaggaggacuggcccagagagcccugagauagcggggauccugaacuggacugaauaaaacguggucucccacugcgccaaaaaaaaaaaa

SEQ ID NO: 120357 - RNA, 1209 nt, Homo sapiens
accucucaagcagccagcgccugccugaaucuguucugcccccuccccacccauuucaccaccaccaugacaccgggcacccagucuccuuucuuccugcugcugcuccucacagugcuuacaguuguuacggguucuggucaugcaagcucuaccccagguggagaaaaggagacuucggcuacccagagaaguucagugcccagcucuacugagaagaaugcuuugucuacuggggucucuuucuuuuuccugucuuuucacauuucaaaccuccaguuuaauuccucucuggaagaucccagcaccgacuacuaccaagagcugcagagagacauuucugaaauguuuuugcagauuuauaaacaaggggguuuucugggccucuccaauauuaaguucaggccaggaucuguggugguacaauugacucuggccuuccgagaagguaccaucaauguccacgacguggagacacaguucaaucaguauaaaacggaagcagccucucgauauaaccugacgaucucagacgucagcgugagugaugugccauuuccuuucucugcccagucuggggcuggggugccaggcuggggcaucgcgcugcuggugcuggucuguguucugguugcgcuggccauugucuaucucauugccuuggcugucugucagugccgccgaaagaacuacgggcagcuggacaucuuuccagcccgggauaccuaccauccuaugagcgaguaccccaccuaccacacccaugggcgcuaugugcccccuagcaguaccgaucguagccccuaugagaagguuucugcagguaaugguggcagcagccucucuuacacaaacccagcaguggcagccacuucugccaacuuguaggggcacgucgcccgcugagcugaguggccagccagugccauuccacuccacucagguucuucagggccagagccccugcacccuguuugggcuggugagcugggaguucaggugggcugcucacagccuccuucagaggccccaccaauuucucggacacuucucaguguguggaagcucaugugggccccugagggcucaugccugggaaguguuguggugggggcucccaggaggacuggcccagagagcccugagauagcggggauccugaacuggacugaauaaaacguggucucccacugcgccaaaaaaaaaaaa

SEQ ID NO: 120358 - RNA, 973 nt, Homo sapiens
accucucaagcagccagcgccugccugaaucuguucugcccccuccccacccauuucaccaccaccaugacaccgggcacccagucuccuuucuuccugcugcugcuccucacagugcuuacaguuguuacggguucuggucaugcaagcucuaccccagguggagaaaaggagacuucggcuacccagagaaguucagugcccagcucuacugagaagaaugcuaucccagcaccgacuacuaccaagagcugcagagagacauuucugaaauguuuuugcagauuuauaaacaaggggguuuucugggccucuccaauauuaaguucagucuggggcuggggugccaggcuggggcaucgcgcugcuggugcuggucuguguucugguugcgcuggccauugucuaucucauugccuuggcugucugucagugccgccgaaagaacuacgggcagcuggacaucuuuccagcccgggauaccuaccauccuaugagcgaguaccccaccuaccacacccaugggcgcuaugugcccccuagcaguaccgaucguagccccuaugagaagguuucugcagguaaugguggcagcagccucucuuacacaaacccagcaguggcagccacuucugccaacuuguaggggcacgucgcccgcugagcugaguggccagccagugccauuccacuccacucagguucuucagggccagagccccugcacccuguuugggcuggugagcugggaguucaggugggcugcucacagccuccuucagaggccccaccaauuucucggacacuucucaguguguggaagcucaugugggccccugagggcucaugccugggaaguguuguggugggggcucccaggaggacuggcccagagagcccugagauagcggggauccugaacuggacugaauaaaacguggucucccacugcgccaaaaaaaaaaaaaaaaaa

SEQ ID NO: 120359 - RNA, 873 nt, Homo sapiens
accucucaagcagccagcgccugccugaaucuguucugcccccuccccacccauuucaccaccaccaugacaccgggcacccagucuccuuucuuccugcugcugcuccucacagugcuuacagcuaccacagccccuaaacccgcaacaguuguuacggguucuggucaugcaagcucuaccccagguggagaaaaggagacuucggcuacccagagaaguucagugcccagcucuacugagaagaaugcuuuuaauuccucucuggaagaucccagcaccgacuacuaccaagagcugcagagagacauuucugaaauggcugucugucagugccgccgaaagaacuacgggcagcuggacaucuuuccagcccgggauaccuaccauccuaugagcgaguaccccaccuaccacacccaugggcgcuaugugcccccuagcaguaccgaucguagccccuaugagaagguuucugcagguaaugguggcagcagccucucuuacacaaacccagcaguggcagccacuucugccaacuuguaggggcacgucgcccgcugagcugaguggccagccagugccauuccacuccacucagguucuucagggccagagccccugcacccuguuugggcuggugagcugggaguucaggugggcugcucacagccuccuucagaggccccaccaauuucucggacacuucucaguguguggaagcucaugugggccccugagggcucaugccugggaaguguuguggugggggcucccaggaggacuggcccagagagcccugagauagcggggauccugaacuggacugaauaaaacguggucucccacugcgccaaaaaaaaaaaaaaaaaa

SEQ ID NO: 120360 - RNA, 846 nt, Homo sapiens
accucucaagcagccagcgccugccugaaucuguucugcccccuccccacccauuucaccaccaccaugacaccgggcacccagucuccuuucuuccugcugcugcuccucacagugcuuacaguuguuacggguucuggucaugcaagcucuaccccagguggagaaaaggagacuucggcuacccagagaaguucagugcccagcucuacugagaagaaugcuuuuaauuccucucuggaagaucccagcaccgacuacuaccaagagcugcagagagacauuucugaaauggcugucugucagugccgccgaaagaacuacgggcagcuggacaucuuuccagcccgggauaccuaccauccuaugagcgaguaccccaccuaccacacccaugggcgcuaugugcccccuagcaguaccgaucguagccccuaugagaagguuucugcagguaaugguggcagcagccucucuuacacaaacccagcaguggcagccacuucugccaacuuguaggggcacgucgcccgcugagcugaguggccagccagugccauuccacuccacucagguucuucagggccagagccccugcacccuguuugggcuggugagcugggaguucaggugggcugcucacagccuccuucagaggccccaccaauuucucggacacuucucaguguguggaagcucaugugggccccugagggcucaugccugggaaguguuguggugggggcucccaggaggacuggcccagagagcccugagauagcggggauccugaacuggacugaauaaaacguggucucccacugcgccaaaaaaaaaaaaaaaaaa

SEQ ID NO: 120361 - RNA, 1005 nt, Homo sapiens
accucucaagcagccagcgccugccugaaucuguucugcccccuccccacccauuucaccaccaccaugacaccgggcacccagucuccuuucuuccugcugcugcuccucacagugcuuacaguuguuacggguucuggucaugcaagcucuaccccagguggagaaaaggagacuucggcuacccagagaaguucagugcccagcucuacugagaagaaugcuaucccagcaccgacuacuaccaagagcugcagagagacauuucugaaauguuuuugcagauuuauaaacaaggggguuuucugggccucuccaauauuaaguucagugagugaugugccauuuccuuucucugcccagucuggggcuggggugccaggcuggggcaucgcgcugcuggugcuggucuguguucugguugcgcuggccauugucuaucucauugccuuggcugucugucagugccgccgaaagaacuacgggcagcuggacaucuuuccagcccgggauaccuaccauccuaugagcgaguaccccaccuaccacacccaugggcgcuaugugcccccuagcaguaccgaucguagccccuaugagaagguuucugcagguaaugguggcagcagccucucuuacacaaacccagcaguggcagccacuucugccaacuuguaggggcacgucgcccgcugagcugaguggccagccagugccauuccacuccacucagguucuucagggccagagccccugcacccuguuugggcuggugagcugggaguucaggugggcugcucacagccuccuucagaggccccaccaauuucucggacacuucucaguguguggaagcucaugugggccccugagggcucaugccugggaaguguuguggugggggcucccaggaggacuggcccagagagcccugagauagcggggauccugaacuggacugaauaaaacguggucucccacugcgccaaaaaaaaaaaaaaaaaa

SEQ ID NO: 120362 - RNA, 19 nt, Artificial Sequence
  Description of Artificial Sequence: Synthetic oligonucleotide
accucucaagcagccagcg

SEQ ID NO: 120363 - RNA, 19 nt, Artificial Sequence
  Description of Artificial Sequence: Synthetic oligonucleotide
gccugccugaaucuguucu

SEQ ID NO: 120364 - RNA, 19 nt, Artificial Sequence
  Description of Artificial Sequence: Synthetic oligonucleotide
ugcccccuccccacccauu

SEQ ID NO: 120365 - RNA, 19 nt, Artificial Sequence
  Description of Artificial Sequence: Synthetic oligonucleotide
uucaccaccaccaugacac

SEQ ID NO: 120366 - RNA, 19 nt, Artificial Sequence
  Description of Artificial Sequence: Synthetic oligonucleotide
ccgggcacccagucuccuu

SEQ ID NO: 120367 - RNA, 19 nt, Artificial Sequence
  Description of Artificial Sequence: Synthetic oligonucleotide
uucuuccugcugcugcucc

SEQ ID NO: 120368 - RNA, 19 nt, Artificial Sequence
  Description of Artificial Sequence: Synthetic oligonucleotide
cucacagugcuuacaguug

SEQ ID NO: 120369 - RNA, 19 nt, Artificial Sequence
  Description of Artificial Sequence: Synthetic oligonucleotide
guuacggguucuggucaug

SEQ ID NO: 120370 - RNA, 19 nt, Artificial Sequence
  Description of Artificial Sequence: Synthetic oligonucleotide
gcaagcucuaccccaggug

SEQ ID NO: 120371 - RNA, 19 nt, Artificial Sequence
  Description of Artificial Sequence: Synthetic oligonucleotide
ggagaaaaggagacuucgg

SEQ ID NO: 120372 - RNA, 19 nt, Artificial Sequence
  Description of Artificial Sequence: Synthetic oligonucleotide
gcuacccagagaaguucag

SEQ ID NO: 120373 - RNA, 19 nt, Artificial Sequence
  Description of Artificial Sequence: Synthetic oligonucleotide
gugcccagcucuacugaga

SEQ ID NO: 120374 - RNA, 19 nt, Artificial Sequence
  Description of Artificial Sequence: Synthetic oligonucleotide
aagaaugcuaucccagcac

SEQ ID NO: 120375 - RNA, 19 nt, Artificial Sequence
  Description of Artificial Sequence: Synthetic oligonucleotide
ccgacuacuaccaagagcu

SEQ ID NO: 120376 - RNA, 19 nt, Artificial Sequence
  Description of Artificial Sequence: Synthetic oligonucleotide
ugcagagagacauuucuga

SEQ ID NO: 120377 - RNA, 19 nt, Artificial Sequence
  Description of Artificial Sequence: Synthetic oligonucleotide
aaauguuuuugcagauuua

SEQ ID NO: 120378 - RNA, 19 nt, Artificial Sequence
  Description of Artificial Sequence: Synthetic oligonucleotide
auaaacaaggggguuuucu

SEQ ID NO: 120379 - RNA, 19 nt, Artificial Sequence
  Description of Artificial Sequence: Synthetic oligonucleotide
ugggccucuccaauauuaa

SEQ ID NO: 120380 - RNA, 19 nt, Artificial Sequence
  Description of Artificial Sequence: Synthetic oligonucleotide
aguucagugagugaugugc

SEQ ID NO: 120381 - RNA, 19 nt, Artificial Sequence
  Description of Artificial Sequence: Synthetic oligonucleotide
ccauuuccuuucucugccc

SEQ ID NO: 120382 - RNA, 19 nt, Artificial Sequence
  Description of Artificial Sequence: Synthetic oligonucleotide
cagucuggggcuggggugc

SEQ ID NO: 120383 - RNA, 19 nt, Artificial Sequence
  Description of Artificial Sequence: Synthetic oligonucleotide
ccaggcuggggcaucgcgc

SEQ ID NO: 120384 - RNA, 19 nt, Artificial Sequence
  Description of Artificial Sequence: Synthetic oligonucleotide
cugcuggugcuggucugug

SEQ ID NO: 120385 - RNA, 19 nt, Artificial Sequence
  Description of Artificial Sequence: Synthetic oligonucleotide
guucugguugcgcuggcca

SEQ ID NO: 120386 - RNA, 19 nt, Artificial Sequence
  Description of Artificial Sequence: Synthetic oligonucleotide
auugucuaucucauugccu

SEQ ID NO: 120387 - RNA, 19 nt, Artificial Sequence
  Description of Artificial Sequence: Synthetic oligonucleotide
uuggcugucugucagugcc

SEQ ID NO: 120388 - RNA, 19 nt, Artificial Sequence
  Description of Artificial Sequence: Synthetic oligonucleotide
cgccgaaagaacuacgggc

SEQ ID NO: 120389 - RNA, 19 nt, Artificial Sequence
  Description of Artificial Sequence: Synthetic oligonucleotide
cagcuggacaucuuuccag

SEQ ID NO: 120390 - RNA, 19 nt, Artificial Sequence
  Description of Artificial Sequence: Synthetic oligonucleotide
gcccgggauaccuaccauc

SEQ ID NO: 120391 - RNA, 19 nt, Artificial Sequence
  Description of Artificial Sequence: Synthetic oligonucleotide
ccuaugagcgaguacccca

SEQ ID NO: 120392 - RNA, 19 nt, Artificial Sequence
  Description of Artificial Sequence: Synthetic oligonucleotide
accuaccacacccaugggc

SEQ ID NO: 120393 - RNA, 19 nt, Artificial Sequence
  Description of Artificial Sequence: Synthetic oligonucleotide
cgcuaugugcccccuagca

SEQ ID NO: 120394 - RNA, 19 nt, Artificial Sequence
  Description of Artificial Sequence: Synthetic oligonucleotide
aguaccgaucguagccccu

SEQ ID NO: 120395 - RNA, 19 nt, Artificial Sequence
  Description of Artificial Sequence: Synthetic oligonucleotide
uaugagaagguuucugcag

SEQ ID NO: 120396 - RNA, 19 nt, Artificial Sequence
  Description of Artificial Sequence: Synthetic oligonucleotide
gguaaugguggcagcagcc

SEQ ID NO: 120397 - RNA, 19 nt, Artificial Sequence
  Description of Artificial Sequence: Synthetic oligonucleotide
cucucuuacacaaacccag

SEQ ID NO: 120398 - RNA, 19 nt, Artificial Sequence
  Description of Artificial Sequence: Synthetic oligonucleotide
gcaguggcagccacuucug

SEQ ID NO: 120399 - RNA, 19 nt, Artificial Sequence
  Description of Artificial Sequence: Synthetic oligonucleotide
gccaacuuguaggggcacg

SEQ ID NO: 120400 - RNA, 19 nt, Artificial Sequence
  Description of Artificial Sequence: Synthetic oligonucleotide
gucgcccgcugagcugagu

SEQ ID NO: 120401 - RNA, 19 nt, Artificial Sequence
  Description of Artificial Sequence: Synthetic oligonucleotide
uggccagccagugccauuc

SEQ ID NO: 120402 - RNA, 19 nt, Artificial Sequence
  Description of Artificial Sequence: Synthetic oligonucleotide
ccacuccacucagguucuu

SEQ ID NO: 120403 - RNA, 19 nt, Artificial Sequence
  Description of Artificial Sequence: Synthetic oligonucleotide
ucagggccagagccccugc

SEQ ID NO: 120404 - RNA, 19 nt, Artificial Sequence
  Description of Artificial Sequence: Synthetic oligonucleotide
cacccuguuugggcuggug

SEQ ID NO: 120405 - RNA, 19 nt, Artificial Sequence
  Description of Artificial Sequence: Synthetic oligonucleotide
gagcugggaguucaggugg

SEQ ID NO: 120406 - RNA, 19 nt, Artificial Sequence
  Description of Artificial Sequence: Synthetic oligonucleotide
ggcugcucacagccuccuu

SEQ ID NO: 120407 - RNA, 19 nt, Artificial Sequence
  Description of Artificial Sequence: Synthetic oligonucleotide
ucagaggccccaccaauuu

SEQ ID NO: 120408 - RNA, 19 nt, Artificial Sequence
  Description of Artificial Sequence: Synthetic oligonucleotide
ucucggacacuucucagug

SEQ ID NO: 120409 - RNA, 19 nt, Artificial Sequence
  Description of Artificial Sequence: Synthetic oligonucleotide
guguggaagcucauguggg

SEQ ID NO: 120410 - RNA, 19 nt, Artificial Sequence
  Description of Artificial Sequence: Synthetic oligonucleotide
gccccugagggcucaugcc

SEQ ID NO: 120411 - RNA, 19 nt, Artificial Sequence
  Description of Artificial Sequence: Synthetic oligonucleotide
cugggaaguguuguggugg

SEQ ID NO: 120412 - RNA, 19 nt, Artificial Sequence
  Description of Artificial Sequence: Synthetic oligonucleotide
ggggcucccaggaggacug

SEQ ID NO: 120413 - RNA, 19 nt, Artificial Sequence
  Description of Artificial Sequence: Synthetic oligonucleotide
ggcccagagagcccugaga

SEQ ID NO: 120414 - RNA, 19 nt, Artificial Sequence
  Description of Artificial Sequence: Synthetic oligonucleotide
auagcggggauccugaacu

SEQ ID NO: 120415 - RNA, 19 nt, Artificial Sequence
  Description of Artificial Sequence: Synthetic oligonucleotide
uggacugaauaaaacgugg

SEQ ID NO: 120416 - RNA, 19 nt, Artificial Sequence
  Description of Artificial Sequence: Synthetic oligonucleotide
gucucccacugcgccaaaa

SEQ ID NO: 120417 - RNA, 19 nt, Artificial Sequence
  Description of Artificial Sequence: Synthetic oligonucleotide
aagaaugcuuuuaauuccu

SEQ ID NO: 120418 - RNA, 19 nt, Artificial Sequence
  Description of Artificial Sequence: Synthetic oligonucleotide
ucucuggaagaucccagca

SEQ ID NO: 120419 - RNA, 19 nt, Artificial Sequence
  Description of Artificial Sequence: Synthetic oligonucleotide
accgacuacuaccaagagc

SEQ ID NO: 120420 - RNA, 19 nt, Artificial Sequence
  Description of Artificial Sequence: Synthetic oligonucleotide
cugcagagagacauuucug

SEQ ID NO: 120421 - RNA, 19 nt, Artificial Sequence
  Description of Artificial Sequence: Synthetic oligonucleotide
gaaauguuuuugcagauuu

SEQ ID NO: 120422 - RNA, 19 nt, Artificial Sequence
  Description of Artificial Sequence: Synthetic oligonucleotide
uauaaacaaggggguuuuc

SEQ ID NO: 120423 - RNA, 19 nt, Artificial Sequence
  Description of Artificial Sequence: Synthetic oligonucleotide
cugggccucuccaauauua

SEQ ID NO: 120424 - RNA, 19 nt, Artificial Sequence
  Description of Artificial Sequence: Synthetic oligonucleotide
aaguucaggccaggaucug

SEQ ID NO: 120425 - RNA, 19 nt, Artificial Sequence
  Description of Artificial Sequence: Synthetic oligonucleotide
guggugguacaauugacuc

SEQ ID NO: 120426 - RNA, 19 nt, Artificial Sequence
  Description of Artificial Sequence: Synthetic oligonucleotide
cuggccuuccgagaaggua

SEQ ID NO: 120427 - RNA, 19 nt, Artificial Sequence
  Description of Artificial Sequence: Synthetic oligonucleotide
accaucaauguccacgacg

SEQ ID NO: 120428 - RNA, 19 nt, Artificial Sequence
  Description of Artificial Sequence: Synthetic oligonucleotide
guggagacacaguucaauc

SEQ ID NO: 120429 - RNA, 19 nt, Artificial Sequence
  Description of Artificial Sequence: Synthetic oligonucleotide
caguauaaaacggaagcag

SEQ ID NO: 120430 - RNA, 19 nt, Artificial Sequence
  Description of Artificial Sequence: Synthetic oligonucleotide
gccucucgauauaaccuga

SEQ ID NO: 120431 - RNA, 19 nt, Artificial Sequence
  Description of Artificial Sequence: Synthetic oligonucleotide
acgaucucagacgucagcg

SEQ ID NO: 120432 - RNA, 19 nt, Artificial Sequence
  Description of Artificial Sequence: Synthetic oligonucleotide
gugagugaugugccauuuc

SEQ ID NO: 120433 - RNA, 19 nt, Artificial Sequence
  Description of Artificial Sequence: Synthetic oligonucleotide
ccuuucucugcccagucug

SEQ ID NO: 120434 - RNA, 19 nt, Artificial Sequence
  Description of Artificial Sequence: Synthetic oligonucleotide
ggggcuggggugccaggcu

SEQ ID NO: 120435 - RNA, 19 nt, Artificial Sequence
  Description of Artificial Sequence: Synthetic oligonucleotide
uggggcaucgcgcugcugg

SEQ ID NO: 120436 - RNA, 19 nt, Artificial Sequence
  Description of Artificial Sequence: Synthetic oligonucleotide
gugcuggucuguguucugg

SEQ ID NO: 120437 - RNA, 19 nt, Artificial Sequence
  Description of Artificial Sequence: Synthetic oligonucleotide
guugcgcuggccauugucu

SEQ ID NO: 120438 - RNA, 19 nt, Artificial Sequence
  Description of Artificial Sequence: Synthetic oligonucleotide
uaucucauugccuuggcug

SEQ ID NO: 120439 - RNA, 19 nt, Artificial Sequence
  Description of Artificial Sequence: Synthetic oligonucleotide
gucugucagugccgccgaa

SEQ ID NO: 120440 - RNA, 19 nt, Artificial Sequence
  Description of Artificial Sequence: Synthetic oligonucleotide
aagaacuacgggcagcugg

SEQ ID NO: 120441 - RNA, 19 nt, Artificial Sequence
  Description of Artificial Sequence: Synthetic oligonucleotide
gacaucuuuccagcccggg

SEQ ID NO: 120442 - RNA, 19 nt, Artificial Sequence
  Description of Artificial Sequence: Synthetic oligonucleotide
gauaccuaccauccuauga

SEQ ID NO: 120443 - RNA, 19 nt, Artificial Sequence
  Description of Artificial Sequence: Synthetic oligonucleotide
agcgaguaccccaccuacc

SEQ ID NO: 120444 - RNA, 19 nt, Artificial Sequence
  Description of Artificial Sequence: Synthetic oligonucleotide
cacacccaugggcgcuaug

SEQ ID NO: 120445 - RNA, 19 nt, Artificial Sequence
  Description of Artificial Sequence: Synthetic oligonucleotide
gugcccccuagcaguaccg

SEQ ID NO: 120446 - RNA, 19 nt, Artificial Sequence
  Description of Artificial Sequence: Synthetic oligonucleotide
gaucguagccccuaugaga

SEQ ID NO: 120447 - RNA, 19 nt, Artificial Sequence
  Description of Artificial Sequence: Synthetic oligonucleotide
aagguuucugcagguaaug

SEQ ID NO: 120448 - RNA, 19 nt, Artificial Sequence
  Description of Artificial Sequence: Synthetic oligonucleotide
gguggcagcagccucucuu

SEQ ID NO: 120449 - RNA, 19 nt, Artificial Sequence
  Description of Artificial Sequence: Synthetic oligonucleotide
uacacaaacccagcagugg

SEQ ID NO: 120450 - RNA, 19 nt, Artificial Sequence
  Description of Artificial Sequence: Synthetic oligonucleotide
gcagccacuucugccaacu

SEQ ID NO: 120451 - RNA, 19 nt, Artificial Sequence
  Description of Artificial Sequence: Synthetic oligonucleotide
uuguaggggcacgucgccc

SEQ ID NO: 120452 - RNA, 19 nt, Artificial Sequence
  Description of Artificial Sequence: Synthetic oligonucleotide
cgcugagcugaguggccag

SEQ ID NO: 120453 - RNA, 19 nt, Artificial Sequence
  Description of Artificial Sequence: Synthetic oligonucleotide
gccagugccauuccacucc

SEQ ID NO: 120454 - RNA, 19 nt, Artificial Sequence
  Description of Artificial Sequence: Synthetic oligonucleotide
cacucagguucuucagggc

SEQ ID NO: 120455 - RNA, 19 nt, Artificial Sequence
  Description of Artificial Sequence: Synthetic oligonucleotide
ccagagccccugcacccug

SEQ ID NO: 120456 - RNA, 19 nt, Artificial Sequence
  Description of Artificial Sequence: Synthetic oligonucleotide
guuugggcuggugagcugg

SEQ ID NO: 120457 - RNA, 19 nt, Artificial Sequence
  Description of Artificial Sequence: Synthetic oligonucleotide
ggaguucaggugggcugcu

SEQ ID NO: 120458 - RNA, 19 nt, Artificial Sequence
  Description of Artificial Sequence: Synthetic oligonucleotide
ucacagccuccuucagagg

SEQ ID NO: 120459 - RNA, 19 nt, Artificial Sequence
  Description of Artificial Sequence: Synthetic oligonucleotide
gccccaccaauuucucgga

SEQ ID NO: 120460 - RNA, 19 nt, Artificial Sequence
  Description of Artificial Sequence: Synthetic oligonucleotide
acacuucucagugugugga

SEQ ID NO: 120461 - RNA, 19 nt, Artificial Sequence
  Description of Artificial Sequence: Synthetic oligonucleotide
aagcucaugugggccccug

SEQ ID NO: 120462 - RNA, 19 nt, Artificial Sequence
  Description of Artificial Sequence: Synthetic oligonucleotide
gagggcucaugccugggaa

SEQ ID NO: 120463 - RNA, 19 nt, Artificial Sequence
  Description of Artificial Sequence: Synthetic oligonucleotide
aguguuguggugggggcuc

SEQ ID NO: 120464 - RNA, 19 nt, Artificial Sequence
  Description of Artificial Sequence: Synthetic oligonucleotide
cccaggaggacuggcccag

SEQ ID NO: 120465 - RNA, 19 nt, Artificial Sequence
  Description of Artificial Sequence: Synthetic oligonucleotide
gagagcccugagauagcgg

SEQ ID NO: 120466 - RNA, 19 nt, Artificial Sequence
  Description of Artificial Sequence: Synthetic oligonucleotide
gggauccugaacuggacug

SEQ ID NO: 120467 - RNA, 19 nt, Artificial Sequence
  Description of Artificial Sequence: Synthetic oligonucleotide
gaauaaaacguggucuccc

SEQ ID NO: 120468 - RNA, 19 nt, Artificial Sequence
  Description of Artificial Sequence: Synthetic oligonucleotide
cucacagugcuuacagcua

SEQ ID NO: 120469 - RNA, 19 nt, Artificial Sequence
  Description of Artificial Sequence: Synthetic oligonucleotide
accacagccccuaaacccg

SEQ ID NO: 120470 - RNA, 19 nt, Artificial Sequence
  Description of Artificial Sequence: Synthetic oligonucleotide
gcaacaguuguuacggguu

SEQ ID NO: 120471 - RNA, 19 nt, Artificial Sequence
  Description of Artificial Sequence: Synthetic oligonucleotide
ucuggucaugcaagcucua

SEQ ID NO: 120472 - RNA, 19 nt, Artificial Sequence
  Description of Artificial Sequence: Synthetic oligonucleotide
accccagguggagaaaagg

SEQ ID NO: 120473 - RNA, 19 nt, Artificial Sequence
  Description of Artificial Sequence: Synthetic oligonucleotide
gagacuucggcuacccaga

SEQ ID NO: 120474 - RNA, 19 nt, Artificial Sequence
  Description of Artificial Sequence: Synthetic oligonucleotide
agaaguucagugcccagcu

SEQ ID NO: 120475 - RNA, 19 nt, Artificial Sequence
  Description of Artificial Sequence: Synthetic oligonucleotide
ucuacugagaagaaugcuu

SEQ ID NO: 120476 - RNA, 19 nt, Artificial Sequence
  Description of Artificial Sequence: Synthetic oligonucleotide
uuuaauuccucucuggaag

SEQ ID NO: 120477 - RNA, 19 nt, Artificial Sequence
  Description of Artificial Sequence: Synthetic oligonucleotide
gaucccagcaccgacuacu

SEQ ID NO: 120478 - RNA, 19 nt, Artificial Sequence
  Description of Artificial Sequence: Synthetic oligonucleotide
uaccaagagcugcagagag

SEQ ID NO: 120479 - RNA, 19 nt, Artificial Sequence
  Description of Artificial Sequence: Synthetic oligonucleotide
gacauuucugaaauggcug

SEQ ID NO: 120480 - RNA, 19 nt, Artificial Sequence
  Description of Artificial Sequence: Synthetic oligonucleotide
aagaaugcuuugucuacug

SEQ ID NO: 120481 - RNA, 19 nt, Artificial Sequence
  Description of Artificial Sequence: Synthetic oligonucleotide
ggggucucuuucuuuuucc

SEQ ID NO: 120482 - RNA, 19 nt, Artificial Sequence
  Description of Artificial Sequence: Synthetic oligonucleotide
cugucuuuucacauuucaa

SEQ ID NO: 120483 - RNA, 19 nt, Artificial Sequence
  Description of Artificial Sequence: Synthetic oligonucleotide
aaccuccaguuuaauuccu

SEQ ID NO: 120484 - RNA, 19 nt, Artificial Sequence
  Description of Artificial Sequence: Synthetic oligonucleotide
gacauuucugaaauguuuu

SEQ ID NO: 120485 - RNA, 19 nt, Artificial Sequence
  Description of Artificial Sequence: Synthetic oligonucleotide
uugcagauuuauaaacaag

SEQ ID NO: 120486 - RNA, 19 nt, Artificial Sequence
  Description of Artificial Sequence: Synthetic oligonucleotide
ggggguuuucugggccucu

SEQ ID NO: 120487 - RNA, 19 nt, Artificial Sequence
  Description of Artificial Sequence: Synthetic oligonucleotide
uccaauauuaaguucaggc

SEQ ID NO: 120488 - RNA, 19 nt, Artificial Sequence
  Description of Artificial Sequence: Synthetic oligonucleotide
ccaggaucuguggugguac

SEQ ID NO: 120489 - RNA, 19 nt, Artificial Sequence
  Description of Artificial Sequence: Synthetic oligonucleotide
caauugacucuggccuucc

SEQ ID NO: 120490 - RNA, 19 nt, Artificial Sequence
  Description of Artificial Sequence: Synthetic oligonucleotide
cgagaagguaccaucaaug

SEQ ID NO: 120491 - RNA, 19 nt, Artificial Sequence
  Description of Artificial Sequence: Synthetic oligonucleotide
guccacgacguggagacac

SEQ ID NO: 120492 - RNA, 19 nt, Artificial Sequence
  Description of Artificial Sequence: Synthetic oligonucleotide
caguucaaucaguauaaaa

SEQ ID NO: 120493 - RNA, 19 nt, Artificial Sequence
  Description of Artificial Sequence: Synthetic oligonucleotide
acggaagcagccucucgau

SEQ ID NO: 120494 - RNA, 19 nt, Artificial Sequence
  Description of Artificial Sequence: Synthetic oligonucleotide
uauaaccugacgaucucag

SEQ ID NO: 120495 - RNA, 19 nt, Artificial Sequence
  Description of Artificial Sequence: Synthetic oligonucleotide
gacgucagcgugagugaug

SEQ ID NO: 120496 - RNA, 19 nt, Artificial Sequence
  Description of Artificial Sequence: Synthetic oligonucleotide
gugccauuuccuuucucug

SEQ ID NO: 120497 - RNA, 19 nt, Artificial Sequence
  Description of Artificial Sequence: Synthetic oligonucleotide
gcccagucuggggcugggg

SEQ ID NO: 120498 - RNA, 19 nt, Artificial Sequence
  Description of Artificial Sequence: Synthetic oligonucleotide
gugccaggcuggggcaucg

SEQ ID NO: 120499 - RNA, 19 nt, Artificial Sequence
  Description of Artificial Sequence: Synthetic oligonucleotide
gcgcugcuggugcuggucu

SEQ ID NO: 120500 - RNA, 19 nt, Artificial Sequence
  Description of Artificial Sequence: Synthetic oligonucleotide
uguguucugguugcgcugg

SEQ ID NO: 120501 - RNA, 19 nt, Artificial Sequence
  Description of Artificial Sequence: Synthetic oligonucleotide
gccauugucuaucucauug

SEQ ID NO: 120502 - RNA, 19 nt, Artificial Sequence
  Description of Artificial Sequence: Synthetic oligonucleotide
gccuuggcugucugucagu

SEQ ID NO: 120503 - RNA, 19 nt, Artificial Sequence
  Description of Artificial Sequence: Synthetic oligonucleotide
ugccgccgaaagaacuacg

SEQ ID NO: 120504 - RNA, 19 nt, Artificial Sequence
  Description of Artificial Sequence: Synthetic oligonucleotide
gggcagcuggacaucuuuc

SEQ ID NO: 120505 - RNA, 19 nt, Artificial Sequence
  Description of Artificial Sequence: Synthetic oligonucleotide
ccagcccgggauaccuacc

SEQ ID NO: 120506 - RNA, 19 nt, Artificial Sequence
  Description of Artificial Sequence: Synthetic oligonucleotide
cauccuaugagcgaguacc

SEQ ID NO: 120507 - RNA, 19 nt, Artificial Sequence
  Description of Artificial Sequence: Synthetic oligonucleotide
cccaccuaccacacccaug

SEQ ID NO: 120508 - RNA, 19 nt, Artificial Sequence
  Description of Artificial Sequence: Synthetic oligonucleotide
gggcgcuaugugcccccua

SEQ ID NO: 120509 - RNA, 19 nt, Artificial Sequence
  Description of Artificial Sequence: Synthetic oligonucleotide
agcaguaccgaucguagcc

SEQ ID NO: 120510 - RNA, 19 nt, Artificial Sequence
  Description of Artificial Sequence: Synthetic oligonucleotide
cccuaugagaagguuucug

SEQ ID NO: 120511 - RNA, 19 nt, Artificial Sequence
  Description of Artificial Sequence: Synthetic oligonucleotide
gcagguaaugguggcagca

SEQ ID NO: 120512 - RNA, 19 nt, Artificial Sequence
  Description of Artificial Sequence: Synthetic oligonucleotide
agccucucuuacacaaacc

SEQ ID NO: 120513 - RNA, 19 nt, Artificial Sequence
  Description of Artificial Sequence: Synthetic oligonucleotide
ccagcaguggcagccacuu

SEQ ID NO: 120514 - RNA, 19 nt, Artificial Sequence
  Description of Artificial Sequence: Synthetic oligonucleotide
ucugccaacuuguaggggc

SEQ ID NO: 120515 - RNA, 19 nt, Artificial Sequence
  Description of Artificial Sequence: Synthetic oligonucleotide
cacgucgcccgcugagcug

SEQ ID NO: 120516 - RNA, 19 nt, Artificial Sequence
  Description of Artificial Sequence: Synthetic oligonucleotide
gaguggccagccagugcca

SEQ ID NO: 120517 - RNA, 19 nt, Artificial Sequence
  Description of Artificial Sequence: Synthetic oligonucleotide
auuccacuccacucagguu

SEQ ID NO: 120518 - RNA, 19 nt, Artificial Sequence
  Description of Artificial Sequence: Synthetic oligonucleotide
ucuucagggccagagcccc

SEQ ID NO: 120519 - RNA, 19 nt, Artificial Sequence
  Description of Artificial Sequence: Synthetic oligonucleotide
cugcacccuguuugggcug

SEQ ID NO: 120520 - RNA, 19 nt, Artificial Sequence
  Description of Artificial Sequence: Synthetic oligonucleotide
ggugagcugggaguucagg

SEQ ID NO: 120521 - RNA, 19 nt, Artificial Sequence
  Description of Artificial Sequence: Synthetic oligonucleotide
gugggcugcucacagccuc

SEQ ID NO: 120522 - RNA, 19 nt, Artificial Sequence
  Description of Artificial Sequence: Synthetic oligonucleotide
ccuucagaggccccaccaa

SEQ ID NO: 120523 - RNA, 19 nt, Artificial Sequence
  Description of Artificial Sequence: Synthetic oligonucleotide
auuucucggacacuucuca

SEQ ID NO: 120524 - RNA, 19 nt, Artificial Sequence
  Description of Artificial Sequence: Synthetic oligonucleotide
aguguguggaagcucaugu

SEQ ID NO: 120525 - RNA, 19 nt, Artificial Sequence
  Description of Artificial Sequence: Synthetic oligonucleotide
ugggccccugagggcucau

SEQ ID NO: 120526 - RNA, 19 nt, Artificial Sequence
  Description of Artificial Sequence: Synthetic oligonucleotide
ugccugggaaguguugugg

SEQ ID NO: 120527 - RNA, 19 nt, Artificial Sequence
  Description of Artificial Sequence: Synthetic oligonucleotide
gugggggcucccaggagga

SEQ ID NO: 120528 - RNA, 19 nt, Artificial Sequence
  Description of Artificial Sequence: Synthetic oligonucleotide
acuggcccagagagcccug

SEQ ID NO: 120529 - RNA, 19 nt, Artificial Sequence
  Description of Artificial Sequence: Synthetic oligonucleotide
gagauagcggggauccuga

SEQ ID NO: 120530 - RNA, 19 nt, Artificial Sequence
  Description of Artificial Sequence: Synthetic oligonucleotide
aacuggacugaauaaaacg

SEQ ID NO: 120531 - RNA, 19 nt, Artificial Sequence
  Description of Artificial Sequence: Synthetic oligonucleotide
guggucucccacugcgcca

SEQ ID NO: 120532 - RNA, 19 nt, Artificial Sequence
  Description of Artificial Sequence: Synthetic oligonucleotide
gaaauggcugucugucagu

SEQ ID NO: 120533 - RNA, 19 nt, Artificial Sequence
  Description of Artificial Sequence: Synthetic oligonucleotide
aguucagucuggggcuggg

SEQ ID NO: 120534 - RNA, 19 nt, Artificial Sequence
  Description of Artificial Sequence: Synthetic oligonucleotide
ggugccaggcuggggcauc

SEQ ID NO: 120535 - RNA, 19 nt, Artificial Sequence
  Description of Artificial Sequence: Synthetic oligonucleotide
cgcgcugcuggugcugguc

SEQ ID NO: 120536 - RNA, 19 nt, Artificial Sequence
  Description of Artificial Sequence: Synthetic oligonucleotide
cuguguucugguugcgcug

SEQ ID NO: 120537 - RNA, 19 nt, Artificial Sequence
  Description of Artificial Sequence: Synthetic oligonucleotide
ggccauugucuaucucauu

SEQ ID NO: 120538 - RNA, 19 nt, Artificial Sequence
  Description of Artificial Sequence: Synthetic oligonucleotide
ugccuuggcugucugucag

SEQ ID NO: 120539 - RNA, 19 nt, Artificial Sequence
  Description of Artificial Sequence: Synthetic oligonucleotide
gugccgccgaaagaacuac

SEQ ID NO: 120540 - RNA, 19 nt, Artificial Sequence
  Description of Artificial Sequence: Synthetic oligonucleotide
cgggcagcuggacaucuuu

SEQ ID NO: 120541 - RNA, 19 nt, Artificial Sequence
  Description of Artificial Sequence: Synthetic oligonucleotide
uccagcccgggauaccuac

SEQ ID NO: 120542 - RNA, 19 nt, Artificial Sequence
  Description of Artificial Sequence: Synthetic oligonucleotide
ccauccuaugagcgaguac

SEQ ID NO: 120543 - RNA, 19 nt, Artificial Sequence
  Description of Artificial Sequence: Synthetic oligonucleotide
ccccaccuaccacacccau

SEQ ID NO: 120544 - RNA, 19 nt, Artificial Sequence
  Description of Artificial Sequence: Synthetic oligonucleotide
ugggcgcuaugugcccccu

SEQ ID NO: 120545 - RNA, 19 nt, Artificial Sequence
  Description of Artificial Sequence: Synthetic oligonucleotide
uagcaguaccgaucguagc

SEQ ID NO: 120546 - RNA, 19 nt, Artificial Sequence
  Description of Artificial Sequence: Synthetic oligonucleotide
ccccuaugagaagguuucu

SEQ ID NO: 120547 - RNA, 19 nt, Artificial Sequence
  Description of Artificial Sequence: Synthetic oligonucleotide
ugcagguaaugguggcagc

SEQ ID NO: 120548 - RNA, 19 nt, Artificial Sequence
  Description of Artificial Sequence: Synthetic oligonucleotide
cagccucucuuacacaaac

SEQ ID NO: 120549 - RNA, 19 nt, Artificial Sequence
  Description of Artificial Sequence: Synthetic oligonucleotide
cccagcaguggcagccacu

SEQ ID NO: 120550 - RNA, 19 nt, Artificial Sequence
  Description of Artificial Sequence: Synthetic oligonucleotide
uucugccaacuuguagggg

SEQ ID NO: 120551 - RNA, 19 nt, Artificial Sequence
  Description of Artificial Sequence: Synthetic oligonucleotide
gcacgucgcccgcugagcu

SEQ ID NO: 120552 - RNA, 19 nt, Artificial Sequence
  Description of Artificial Sequence: Synthetic oligonucleotide
ugaguggccagccagugcc

SEQ ID NO: 120553 - RNA, 19 nt, Artificial Sequence
  Description of Artificial Sequence: Synthetic oligonucleotide
cauuccacuccacucaggu

SEQ ID NO: 120554 - RNA, 19 nt, Artificial Sequence
  Description of Artificial Sequence: Synthetic oligonucleotide
uucuucagggccagagccc

SEQ ID NO: 120555 - RNA, 19 nt, Artificial Sequence
  Description of Artificial Sequence: Synthetic oligonucleotide
ccugcacccuguuugggcu

SEQ ID NO: 120556 - RNA, 19 nt, Artificial Sequence
  Description of Artificial Sequence: Synthetic oligonucleotide
uggugagcugggaguucag

SEQ ID NO: 120557 - RNA, 19 nt, Artificial Sequence
  Description of Artificial Sequence: Synthetic oligonucleotide
ggugggcugcucacagccu

SEQ ID NO: 120558 - RNA, 19 nt, Artificial Sequence
  Description of Artificial Sequence: Synthetic oligonucleotide
uccuucagaggccccacca

SEQ ID NO: 120559 - RNA, 19 nt, Artificial Sequence
  Description of Artificial Sequence: Synthetic oligonucleotide
aauuucucggacacuucuc

SEQ ID NO: 120560 - RNA, 19 nt, Artificial Sequence
  Description of Artificial Sequence: Synthetic oligonucleotide
caguguguggaagcucaug

SEQ ID NO: 120561 - RNA, 19 nt, Artificial Sequence
  Description of Artificial Sequence: Synthetic oligonucleotide
gugggccccugagggcuca

SEQ ID NO: 120562 - RNA, 19 nt, Artificial Sequence
  Description of Artificial Sequence: Synthetic oligonucleotide
augccugggaaguguugug

SEQ ID NO: 120563 - RNA, 19 nt, Artificial Sequence
  Description of Artificial Sequence: Synthetic oligonucleotide
ggugggggcucccaggagg

SEQ ID NO: 120564 - RNA, 19 nt, Artificial Sequence
  Description of Artificial Sequence: Synthetic oligonucleotide
gacuggcccagagagcccu

SEQ ID NO: 120565 - RNA, 19 nt, Artificial Sequence
  Description of Artificial Sequence: Synthetic oligonucleotide
ugagauagcggggauccug

SEQ ID NO: 120566 - RNA, 19 nt, Artificial Sequence
  Description of Artificial Sequence: Synthetic oligonucleotide
gaacuggacugaauaaaac

SEQ ID NO: 120567 - RNA, 19 nt, Artificial Sequence
  Description of Artificial Sequence: Synthetic oligonucleotide
cguggucucccacugcgcc

SEQ ID NO: 120568 - RNA, 25 nt, Artificial Sequence
  Description of Artificial Sequence: Synthetic oligonucleotide
accucucaagcagccagcgccugcc

SEQ ID NO: 120569 - RNA, 25 nt, Artificial Sequence
  Description of Artificial Sequence: Synthetic oligonucleotide
cugaaucuguucugcccccucccca

SEQ ID NO: 120570 - RNA, 25 nt, Artificial Sequence
  Description of Artificial Sequence: Synthetic oligonucleotide
acccauuucaccaccaccaugacac

SEQ ID NO: 120571 - RNA, 25 nt, Artificial Sequence
  Description of Artificial Sequence: Synthetic oligonucleotide
ccgggcacccagucuccuuucuucc

SEQ ID NO: 120572 - RNA, 25 nt, Artificial Sequence
  Description of Artificial Sequence: Synthetic oligonucleotide
cugcugcugcuccucacagugcuua

SEQ ID NO: 120573 - RNA, 25 nt, Artificial Sequence
  Description of Artificial Sequence: Synthetic oligonucleotide
acaguuguuacggguucuggucaug

SEQ ID NO: 120574 - RNA, 25 nt, Artificial Sequence
  Description of Artificial Sequence: Synthetic oligonucleotide
gcaagcucuaccccagguggagaaa

SEQ ID NO: 120575 - RNA, 25 nt, Artificial Sequence
  Description of Artificial Sequence: Synthetic oligonucleotide
aaggagacuucggcuacccagagaa

SEQ ID NO: 120576 - RNA, 25 nt, Artificial Sequence
  Description of Artificial Sequence: Synthetic oligonucleotide
aguucagugcccagcucuacugaga

SEQ ID NO: 120577 - RNA, 25 nt, Artificial Sequence
  Description of Artificial Sequence: Synthetic oligonucleotide
aagaaugcuaucccagcaccgacua

SEQ ID NO: 120578 - RNA, 25 nt, Artificial Sequence
  Description of Artificial Sequence: Synthetic oligonucleotide
acuaccaagagcugcagagagacau

SEQ ID NO: 120579 - RNA, 25 nt, Artificial Sequence
  Description of Artificial Sequence: Synthetic oligonucleotide
uuucugaaauguuuuugcagauuua

SEQ ID NO: 120580 - RNA, 25 nt, Artificial Sequence
  Description of Artificial Sequence: Synthetic oligonucleotide
auaaacaaggggguuuucugggccu

SEQ ID NO: 120581 - RNA, 25 nt, Artificial Sequence
  Description of Artificial Sequence: Synthetic oligonucleotide
ucuccaauauuaaguucagugagug

SEQ ID NO: 120582 - RNA, 25 nt, Artificial Sequence
  Description of Artificial Sequence: Synthetic oligonucleotide
gaugugccauuuccuuucucugccc

SEQ ID NO: 120583 - RNA, 25 nt, Artificial Sequence
  Description of Artificial Sequence: Synthetic oligonucleotide
cagucuggggcuggggugccaggcu

SEQ ID NO: 120584 - RNA, 25 nt, Artificial Sequence
  Description of Artificial Sequence: Synthetic oligonucleotide
uggggcaucgcgcugcuggugcugg

SEQ ID NO: 120585 - RNA, 25 nt, Artificial Sequence
  Description of Artificial Sequence: Synthetic oligonucleotide
gucuguguucugguugcgcuggcca

SEQ ID NO: 120586 - RNA, 25 nt, Artificial Sequence
  Description of Artificial Sequence: Synthetic oligonucleotide
auugucuaucucauugccuuggcug

SEQ ID NO: 120587 - RNA, 25 nt, Artificial Sequence
  Description of Artificial Sequence: Synthetic oligonucleotide
gucugucagugccgccgaaagaacu

SEQ ID NO: 120588 - RNA, 25 nt, Artificial Sequence
  Description of Artificial Sequence: Synthetic oligonucleotide
uacgggcagcuggacaucuuuccag

SEQ ID NO: 120589 - RNA, 25 nt, Artificial Sequence
  Description of Artificial Sequence: Synthetic oligonucleotide
gcccgggauaccuaccauccuauga

SEQ ID NO: 120590 - RNA, 25 nt, Artificial Sequence
  Description of Artificial Sequence: Synthetic oligonucleotide
agcgaguaccccaccuaccacaccc

SEQ ID NO: 120591 - RNA, 25 nt, Artificial Sequence
  Description of Artificial Sequence: Synthetic oligonucleotide
caugggcgcuaugugcccccuagca

SEQ ID NO: 120592 - RNA, 25 nt, Artificial Sequence
  Description of Artificial Sequence: Synthetic oligonucleotide
aguaccgaucguagccccuaugaga

SEQ ID NO: 120593 - RNA, 25 nt, Artificial Sequence
  Description of Artificial Sequence: Synthetic oligonucleotide
aagguuucugcagguaaugguggca

SEQ ID NO: 120594 - RNA, 25 nt, Artificial Sequence
  Description of Artificial Sequence: Synthetic oligonucleotide
agcagccucucuuacacaaacccag

SEQ ID NO: 120595 - RNA, 25 nt, Artificial Sequence
  Description of Artificial Sequence: Synthetic oligonucleotide
gcaguggcagccacuucugccaacu

SEQ ID NO: 120596 - RNA, 25 nt, Artificial Sequence
  Description of Artificial Sequence: Synthetic oligonucleotide
uuguaggggcacgucgcccgcugag

SEQ ID NO: 120597 - RNA, 25 nt, Artificial Sequence
  Description of Artificial Sequence: Synthetic oligonucleotide
gcugaguggccagccagugccauuc

SEQ ID NO: 120598 - RNA, 25 nt, Artificial Sequence
  Description of Artificial Sequence: Synthetic oligonucleotide
ccacuccacucagguucuucagggc

SEQ ID NO: 120599 - RNA, 25 nt, Artificial Sequence
  Description of Artificial Sequence: Synthetic oligonucleotide
ccagagccccugcacccuguuuggg

SEQ ID NO: 120600 - RNA, 25 nt, Artificial Sequence
  Description of Artificial Sequence: Synthetic oligonucleotide
gcuggugagcugggaguucaggugg

SEQ ID NO: 120601 - RNA, 25 nt, Artificial Sequence
  Description of Artificial Sequence: Synthetic oligonucleotide
ggcugcucacagccuccuucagagg

SEQ ID NO: 120602 - RNA, 25 nt, Artificial Sequence
  Description of Artificial Sequence: Synthetic oligonucleotide
gccccaccaauuucucggacacuuc

SEQ ID NO: 120603 - RNA, 25 nt, Artificial Sequence
  Description of Artificial Sequence: Synthetic oligonucleotide
cucaguguguggaagcucauguggg

SEQ ID NO: 120604 - RNA, 25 nt, Artificial Sequence
  Description of Artificial Sequence: Synthetic oligonucleotide
gccccugagggcucaugccugggaa

SEQ ID NO: 120605 - RNA, 25 nt, Artificial Sequence
  Description of Artificial Sequence: Synthetic oligonucleotide
aguguuguggugggggcucccagga

SEQ ID NO: 120606 - RNA, 25 nt, Artificial Sequence
  Description of Artificial Sequence: Synthetic oligonucleotide
aggacuggcccagagagcccugaga

SEQ ID NO: 120607 - RNA, 25 nt, Artificial Sequence
  Description of Artificial Sequence: Synthetic oligonucleotide
auagcggggauccugaacuggacug

SEQ ID NO: 120608 - RNA, 25 nt, Artificial Sequence
  Description of Artificial Sequence: Synthetic oligonucleotide
gaauaaaacguggucucccacugcg

SEQ ID NO: 120609 - RNA, 25 nt, Artificial Sequence
  Description of Artificial Sequence: Synthetic oligonucleotide
aagaaugcuuuuaauuccucucugg

SEQ ID NO: 120610 - RNA, 25 nt, Artificial Sequence
  Description of Artificial Sequence: Synthetic oligonucleotide
gaagaucccagcaccgacuacuacc

SEQ ID NO: 120611 - RNA, 25 nt, Artificial Sequence
  Description of Artificial Sequence: Synthetic oligonucleotide
caagagcugcagagagacauuucug

SEQ ID NO: 120612 - RNA, 25 nt, Artificial Sequence
  Description of Artificial Sequence: Synthetic oligonucleotide
gaaauguuuuugcagauuuauaaac

SEQ ID NO: 120613 - RNA, 25 nt, Artificial Sequence
  Description of Artificial Sequence: Synthetic oligonucleotide
caaggggguuuucugggccucucca

SEQ ID NO: 120614 - RNA, 25 nt, Artificial Sequence
  Description of Artificial Sequence: Synthetic oligonucleotide
aauauuaaguucaggccaggaucug

SEQ ID NO: 120615 - RNA, 25 nt, Artificial Sequence
  Description of Artificial Sequence: Synthetic oligonucleotide
guggugguacaauugacucuggccu

SEQ ID NO: 120616 - RNA, 25 nt, Artificial Sequence
  Description of Artificial Sequence: Synthetic oligonucleotide
uuccgagaagguaccaucaaugucc

SEQ ID NO: 120617 - RNA, 25 nt, Artificial Sequence
  Description of Artificial Sequence: Synthetic oligonucleotide
cacgacguggagacacaguucaauc

SEQ ID NO: 120618 - RNA, 25 nt, Artificial Sequence
  Description of Artificial Sequence: Synthetic oligonucleotide
caguauaaaacggaagcagccucuc

SEQ ID NO: 120619 - RNA, 25 nt, Artificial Sequence
  Description of Artificial Sequence: Synthetic oligonucleotide
cgauauaaccugacgaucucagacg

SEQ ID NO: 120620 - RNA, 25 nt, Artificial Sequence
  Description of Artificial Sequence: Synthetic oligonucleotide
gucagcgugagugaugugccauuuc

SEQ ID NO: 120621 - RNA, 25 nt, Artificial Sequence
  Description of Artificial Sequence: Synthetic oligonucleotide
ccuuucucugcccagucuggggcug

SEQ ID NO: 120622 - RNA, 25 nt, Artificial Sequence
  Description of Artificial Sequence: Synthetic oligonucleotide
ggggugccaggcuggggcaucgcgc

SEQ ID NO: 120623 - RNA, 25 nt, Artificial Sequence
  Description of Artificial Sequence: Synthetic oligonucleotide
cugcuggugcuggucuguguucugg

SEQ ID NO: 120624 - RNA, 25 nt, Artificial Sequence
  Description of Artificial Sequence: Synthetic oligonucleotide
guugcgcuggccauugucuaucuca

SEQ ID NO: 120625 - RNA, 25 nt, Artificial Sequence
  Description of Artificial Sequence: Synthetic oligonucleotide
auugccuuggcugucugucagugcc

SEQ ID NO: 120626 - RNA, 25 nt, Artificial Sequence
  Description of Artificial Sequence: Synthetic oligonucleotide
cgccgaaagaacuacgggcagcugg

SEQ ID NO: 120627 - RNA, 25 nt, Artificial Sequence
  Description of Artificial Sequence: Synthetic oligonucleotide
gacaucuuuccagcccgggauaccu

SEQ ID NO: 120628 - RNA, 25 nt, Artificial Sequence
  Description of Artificial Sequence: Synthetic oligonucleotide
uaccauccuaugagcgaguacccca

SEQ ID NO: 120629 - RNA, 25 nt, Artificial Sequence
  Description of Artificial Sequence: Synthetic oligonucleotide
accuaccacacccaugggcgcuaug

SEQ ID NO: 120630 - RNA, 25 nt, Artificial Sequence
  Description of Artificial Sequence: Synthetic oligonucleotide
gugcccccuagcaguaccgaucgua

SEQ ID NO: 120631 - RNA, 25 nt, Artificial Sequence
  Description of Artificial Sequence: Synthetic oligonucleotide
agccccuaugagaagguuucugcag

SEQ ID NO: 120632 - RNA, 25 nt, Artificial Sequence
  Description of Artificial Sequence: Synthetic oligonucleotide
gguaaugguggcagcagccucucuu

SEQ ID NO: 120633 - RNA, 25 nt, Artificial Sequence
  Description of Artificial Sequence: Synthetic oligonucleotide
uacacaaacccagcaguggcagcca

SEQ ID NO: 120634 - RNA, 25 nt, Artificial Sequence
  Description of Artificial Sequence: Synthetic oligonucleotide
acuucugccaacuuguaggggcacg

SEQ ID NO: 120635 - RNA, 25 nt, Artificial Sequence
  Description of Artificial Sequence: Synthetic oligonucleotide
gucgcccgcugagcugaguggccag

SEQ ID NO: 120636 - RNA, 25 nt, Artificial Sequence
  Description of Artificial Sequence: Synthetic oligonucleotide
gccagugccauuccacuccacucag

SEQ ID NO: 120637 - RNA, 25 nt, Artificial Sequence
  Description of Artificial Sequence: Synthetic oligonucleotide
gguucuucagggccagagccccugc

SEQ ID NO: 120638 - RNA, 25 nt, Artificial Sequence
  Description of Artificial Sequence: Synthetic oligonucleotide
cacccuguuugggcuggugagcugg

SEQ ID NO: 120639 - RNA, 25 nt, Artificial Sequence
  Description of Artificial Sequence: Synthetic oligonucleotide
ggaguucaggugggcugcucacagc

SEQ ID NO: 120640 - RNA, 25 nt, Artificial Sequence
  Description of Artificial Sequence: Synthetic oligonucleotide
ccuccuucagaggccccaccaauuu

SEQ ID NO: 120641 - RNA, 25 nt, Artificial Sequence
  Description of Artificial Sequence: Synthetic oligonucleotide
ucucggacacuucucagugugugga

SEQ ID NO: 120642 - RNA, 25 nt, Artificial Sequence
  Description of Artificial Sequence: Synthetic oligonucleotide
aagcucaugugggccccugagggcu

SEQ ID NO: 120643 - RNA, 25 nt, Artificial Sequence
  Description of Artificial Sequence: Synthetic oligonucleotide
ucaugccugggaaguguuguggugg

SEQ ID NO: 120644 - RNA, 25 nt, Artificial Sequence
  Description of Artificial Sequence: Synthetic oligonucleotide
ggggcucccaggaggacuggcccag

SEQ ID NO: 120645 - RNA, 25 nt, Artificial Sequence
  Description of Artificial Sequence: Synthetic oligonucleotide
gagagcccugagauagcggggaucc

SEQ ID NO: 120646 - RNA, 25 nt, Artificial Sequence
  Description of Artificial Sequence: Synthetic oligonucleotide
cugaacuggacugaauaaaacgugg

SEQ ID NO: 120647 - RNA, 25 nt, Artificial Sequence
  Description of Artificial Sequence: Synthetic oligonucleotide
acagcuaccacagccccuaaacccg

SEQ ID NO: 120648 - RNA, 25 nt, Artificial Sequence
  Description of Artificial Sequence: Synthetic oligonucleotide
gcaacaguuguuacggguucugguc

SEQ ID NO: 120649 - RNA, 25 nt, Artificial Sequence
  Description of Artificial Sequence: Synthetic oligonucleotide
caugcaagcucuaccccagguggag

SEQ ID NO: 120650 - RNA, 25 nt, Artificial Sequence
  Description of Artificial Sequence: Synthetic oligonucleotide
gaaaaggagacuucggcuacccaga

SEQ ID NO: 120651 - RNA, 25 nt, Artificial Sequence
  Description of Artificial Sequence: Synthetic oligonucleotide
agaaguucagugcccagcucuacug

SEQ ID NO: 120652 - RNA, 25 nt, Artificial Sequence
  Description of Artificial Sequence: Synthetic oligonucleotide
gagaagaaugcuuuuaauuccucuc

SEQ ID NO: 120653 - RNA, 25 nt, Artificial Sequence
  Description of Artificial Sequence: Synthetic oligonucleotide
cuggaagaucccagcaccgacuacu

SEQ ID NO: 120654 - RNA, 25 nt, Artificial Sequence
  Description of Artificial Sequence: Synthetic oligonucleotide
uaccaagagcugcagagagacauuu

SEQ ID NO: 120655 - RNA, 25 nt, Artificial Sequence
  Description of Artificial Sequence: Synthetic oligonucleotide
ucugaaauggcugucugucagugcc

SEQ ID NO: 120656 - RNA, 25 nt, Artificial Sequence
  Description of Artificial Sequence: Synthetic oligonucleotide
aagaaugcuuugucuacuggggucu

SEQ ID NO: 120657 - RNA, 25 nt, Artificial Sequence
  Description of Artificial Sequence: Synthetic oligonucleotide
ucuuucuuuuuccugucuuuucaca

SEQ ID NO: 120658 - RNA, 25 nt, Artificial Sequence
  Description of Artificial Sequence: Synthetic oligonucleotide
auuucaaaccuccaguuuaauuccu

SEQ ID NO: 120659 - RNA, 25 nt, Artificial Sequence
  Description of Artificial Sequence: Synthetic oligonucleotide
ucucuggaagaucccagcaccgacu

SEQ ID NO: 120660 - RNA, 25 nt, Artificial Sequence
  Description of Artificial Sequence: Synthetic oligonucleotide
uacuaccaagagcugcagagagaca

SEQ ID NO: 120661 - RNA, 25 nt, Artificial Sequence
  Description of Artificial Sequence: Synthetic oligonucleotide
auuucugaaauguuuuugcagauuu

SEQ ID NO: 120662 - RNA, 25 nt, Artificial Sequence
  Description of Artificial Sequence: Synthetic oligonucleotide
uauaaacaaggggguuuucugggcc

SEQ ID NO: 120663 - RNA, 25 nt, Artificial Sequence
  Description of Artificial Sequence: Synthetic oligonucleotide
cucuccaauauuaaguucaggccag

SEQ ID NO: 120664 - RNA, 25 nt, Artificial Sequence
  Description of Artificial Sequence: Synthetic oligonucleotide
ggaucuguggugguacaauugacuc

SEQ ID NO: 120665 - RNA, 25 nt, Artificial Sequence
  Description of Artificial Sequence: Synthetic oligonucleotide
cuggccuuccgagaagguaccauca

SEQ ID NO: 120666 - RNA, 25 nt, Artificial Sequence
  Description of Artificial Sequence: Synthetic oligonucleotide
aauguccacgacguggagacacagu

SEQ ID NO: 120667 - RNA, 25 nt, Artificial Sequence
  Description of Artificial Sequence: Synthetic oligonucleotide
uucaaucaguauaaaacggaagcag

SEQ ID NO: 120668 - RNA, 25 nt, Artificial Sequence
  Description of Artificial Sequence: Synthetic oligonucleotide
gccucucgauauaaccugacgaucu

SEQ ID NO: 120669 - RNA, 25 nt, Artificial Sequence
  Description of Artificial Sequence: Synthetic oligonucleotide
ucagacgucagcgugagugaugugc

SEQ ID NO: 120670 - RNA, 25 nt, Artificial Sequence
  Description of Artificial Sequence: Synthetic oligonucleotide
ccauuuccuuucucugcccagucug

SEQ ID NO: 120671 - RNA, 25 nt, Artificial Sequence
  Description of Artificial Sequence: Synthetic oligonucleotide
ggggcuggggugccaggcuggggca

SEQ ID NO: 120672 - RNA, 25 nt, Artificial Sequence
  Description of Artificial Sequence: Synthetic oligonucleotide
aucgcgcugcuggugcuggucugug

SEQ ID NO: 120673 - RNA, 25 nt, Artificial Sequence
  Description of Artificial Sequence: Synthetic oligonucleotide
guucugguugcgcuggccauugucu

SEQ ID NO: 120674 - RNA, 25 nt, Artificial Sequence
  Description of Artificial Sequence: Synthetic oligonucleotide
uaucucauugccuuggcugucuguc

SEQ ID NO: 120675 - RNA, 25 nt, Artificial Sequence
  Description of Artificial Sequence: Synthetic oligonucleotide
cagugccgccgaaagaacuacgggc

SEQ ID NO: 120676 - RNA, 25 nt, Artificial Sequence
  Description of Artificial Sequence: Synthetic oligonucleotide
cagcuggacaucuuuccagcccggg

SEQ ID NO: 120677 - RNA, 25 nt, Artificial Sequence
  Description of Artificial Sequence: Synthetic oligonucleotide
gauaccuaccauccuaugagcgagu

SEQ ID NO: 120678 - RNA, 25 nt, Artificial Sequence
  Description of Artificial Sequence: Synthetic oligonucleotide
uaccccaccuaccacacccaugggc

SEQ ID NO: 120679 - RNA, 25 nt, Artificial Sequence
  Description of Artificial Sequence: Synthetic oligonucleotide
cgcuaugugcccccuagcaguaccg

SEQ ID NO: 120680 - RNA, 25 nt, Artificial Sequence
  Description of Artificial Sequence: Synthetic oligonucleotide
gaucguagccccuaugagaagguuu

SEQ ID NO: 120681 - RNA, 25 nt, Artificial Sequence
  Description of Artificial Sequence: Synthetic oligonucleotide
ucugcagguaaugguggcagcagcc

SEQ ID NO: 120682 - RNA, 25 nt, Artificial Sequence
  Description of Artificial Sequence: Synthetic oligonucleotide
cucucuuacacaaacccagcagugg

SEQ ID NO: 120683 - RNA, 25 nt, Artificial Sequence
  Description of Artificial Sequence: Synthetic oligonucleotide
gcagccacuucugccaacuuguagg

SEQ ID NO: 120684 - RNA, 25 nt, Artificial Sequence
  Description of Artificial Sequence: Synthetic oligonucleotide
gggcacgucgcccgcugagcugagu

SEQ ID NO: 120685 - RNA, 25 nt, Artificial Sequence
  Description of Artificial Sequence: Synthetic oligonucleotide
uggccagccagugccauuccacucc

SEQ ID NO: 120686 - RNA, 25 nt, Artificial Sequence
  Description of Artificial Sequence: Synthetic oligonucleotide
cacucagguucuucagggccagagc

SEQ ID NO: 120687 - RNA, 25 nt, Artificial Sequence
  Description of Artificial Sequence: Synthetic oligonucleotide
ccccugcacccuguuugggcuggug

SEQ ID NO: 120688 - RNA, 25 nt, Artificial Sequence
  Description of Artificial Sequence: Synthetic oligonucleotide
gagcugggaguucaggugggcugcu

SEQ ID NO: 120689 - RNA, 25 nt, Artificial Sequence
  Description of Artificial Sequence: Synthetic oligonucleotide
ucacagccuccuucagaggccccac

SEQ ID NO: 120690 - RNA, 25 nt, Artificial Sequence
  Description of Artificial Sequence: Synthetic oligonucleotide
ccaauuucucggacacuucucagug

SEQ ID NO: 120691 - RNA, 25 nt, Artificial Sequence
  Description of Artificial Sequence: Synthetic oligonucleotide
guguggaagcucaugugggccccug

SEQ ID NO: 120692 - RNA, 25 nt, Artificial Sequence
  Description of Artificial Sequence: Synthetic oligonucleotide
gagggcucaugccugggaaguguug

SEQ ID NO: 120693 - RNA, 25 nt, Artificial Sequence
  Description of Artificial Sequence: Synthetic oligonucleotide
guggugggggcucccaggaggacug

SEQ ID NO: 120694 - RNA, 25 nt, Artificial Sequence
  Description of Artificial Sequence: Synthetic oligonucleotide
ggcccagagagcccugagauagcgg

SEQ ID NO: 120695 - RNA, 25 nt, Artificial Sequence
  Description of Artificial Sequence: Synthetic oligonucleotide
gggauccugaacuggacugaauaaa

SEQ ID NO: 120696 - RNA, 25 nt, Artificial Sequence
  Description of Artificial Sequence: Synthetic oligonucleotide
aacguggucucccacugcgccaaaa

SEQ ID NO: 120697 - RNA, 25 nt, Artificial Sequence
  Description of Artificial Sequence: Synthetic oligonucleotide
ucugaaauguuuuugcagauuuaua

SEQ ID NO: 120698 - RNA, 25 nt, Artificial Sequence
  Description of Artificial Sequence: Synthetic oligonucleotide
aaacaaggggguuuucugggccucu

SEQ ID NO: 120699 - RNA, 25 nt, Artificial Sequence
  Description of Artificial Sequence: Synthetic oligonucleotide
uccaauauuaaguucaggccaggau

SEQ ID NO: 120700 - RNA, 25 nt, Artificial Sequence
  Description of Artificial Sequence: Synthetic oligonucleotide
ucuguggugguacaauugacucugg

SEQ ID NO: 120701 - RNA, 25 nt, Artificial Sequence
  Description of Artificial Sequence: Synthetic oligonucleotide
gccuuccgagaagguaccaucaaug

SEQ ID NO: 120702 - RNA, 25 nt, Artificial Sequence
  Description of Artificial Sequence: Synthetic oligonucleotide
guccacgacguggagacacaguuca

SEQ ID NO: 120703 - RNA, 25 nt, Artificial Sequence
  Description of Artificial Sequence: Synthetic oligonucleotide
aaucaguauaaaacggaagcagccu

SEQ ID NO: 120704 - RNA, 25 nt, Artificial Sequence
  Description of Artificial Sequence: Synthetic oligonucleotide
ucucgauauaaccugacgaucucag

SEQ ID NO: 120705 - RNA, 25 nt, Artificial Sequence
  Description of Artificial Sequence: Synthetic oligonucleotide
gacgucagcgugagugaugugccau

SEQ ID NO: 120706 - RNA, 25 nt, Artificial Sequence
  Description of Artificial Sequence: Synthetic oligonucleotide
uuuccuuucucugcccagucugggg

SEQ ID NO: 120707 - RNA, 25 nt, Artificial Sequence
  Description of Artificial Sequence: Synthetic oligonucleotide
gcuggggugccaggcuggggcaucg

SEQ ID NO: 120708 - RNA, 25 nt, Artificial Sequence
  Description of Artificial Sequence: Synthetic oligonucleotide
gcgcugcuggugcuggucuguguuc

SEQ ID NO: 120709 - RNA, 25 nt, Artificial Sequence
  Description of Artificial Sequence: Synthetic oligonucleotide
cugguugcgcuggccauugucuauc

SEQ ID NO: 120710 - RNA, 25 nt, Artificial Sequence
  Description of Artificial Sequence: Synthetic oligonucleotide
cucauugccuuggcugucugucagu

SEQ ID NO: 120711 - RNA, 25 nt, Artificial Sequence
  Description of Artificial Sequence: Synthetic oligonucleotide
ugccgccgaaagaacuacgggcagc

SEQ ID NO: 120712 - RNA, 25 nt, Artificial Sequence
  Description of Artificial Sequence: Synthetic oligonucleotide
cuggacaucuuuccagcccgggaua

SEQ ID NO: 120713 - RNA, 25 nt, Artificial Sequence
  Description of Artificial Sequence: Synthetic oligonucleotide
accuaccauccuaugagcgaguacc

SEQ ID NO: 120714 - RNA, 25 nt, Artificial Sequence
  Description of Artificial Sequence: Synthetic oligonucleotide
cccaccuaccacacccaugggcgcu

SEQ ID NO: 120715 - RNA, 25 nt, Artificial Sequence
  Description of Artificial Sequence: Synthetic oligonucleotide
uaugugcccccuagcaguaccgauc

SEQ ID NO: 120716 - RNA, 25 nt, Artificial Sequence
  Description of Artificial Sequence: Synthetic oligonucleotide
cguagccccuaugagaagguuucug

SEQ ID NO: 120717 - RNA, 25 nt, Artificial Sequence
  Description of Artificial Sequence: Synthetic oligonucleotide
gcagguaaugguggcagcagccucu

SEQ ID NO: 120718 - RNA, 25 nt, Artificial Sequence
  Description of Artificial Sequence: Synthetic oligonucleotide
ucuuacacaaacccagcaguggcag

SEQ ID NO: 120719 - RNA, 25 nt, Artificial Sequence
  Description of Artificial Sequence: Synthetic oligonucleotide
gccacuucugccaacuuguaggggc

SEQ ID NO: 120720 - RNA, 25 nt, Artificial Sequence
  Description of Artificial Sequence: Synthetic oligonucleotide
cacgucgcccgcugagcugaguggc

SEQ ID NO: 120721 - RNA, 25 nt, Artificial Sequence
  Description of Artificial Sequence: Synthetic oligonucleotide
ccagccagugccauuccacuccacu

SEQ ID NO: 120722 - RNA, 25 nt, Artificial Sequence
  Description of Artificial Sequence: Synthetic oligonucleotide
ucagguucuucagggccagagcccc

SEQ ID NO: 120723 - RNA, 25 nt, Artificial Sequence
  Description of Artificial Sequence: Synthetic oligonucleotide
cugcacccuguuugggcuggugagc

SEQ ID NO: 120724 - RNA, 25 nt, Artificial Sequence
  Description of Artificial Sequence: Synthetic oligonucleotide
cugggaguucaggugggcugcucac

SEQ ID NO: 120725 - RNA, 25 nt, Artificial Sequence
  Description of Artificial Sequence: Synthetic oligonucleotide
cagccuccuucagaggccccaccaa

SEQ ID NO: 120726 - RNA, 25 nt, Artificial Sequence
  Description of Artificial Sequence: Synthetic oligonucleotide
auuucucggacacuucucagugugu

SEQ ID NO: 120727 - RNA, 25 nt, Artificial Sequence
  Description of Artificial Sequence: Synthetic oligonucleotide
uggaagcucaugugggccccugagg

SEQ ID NO: 120728 - RNA, 25 nt, Artificial Sequence
  Description of Artificial Sequence: Synthetic oligonucleotide
ggcucaugccugggaaguguugugg

SEQ ID NO: 120729 - RNA, 25 nt, Artificial Sequence
  Description of Artificial Sequence: Synthetic oligonucleotide
gugggggcucccaggaggacuggcc

SEQ ID NO: 120730 - RNA, 25 nt, Artificial Sequence
  Description of Artificial Sequence: Synthetic oligonucleotide
ccagagagcccugagauagcgggga

SEQ ID NO: 120731 - RNA, 25 nt, Artificial Sequence
  Description of Artificial Sequence: Synthetic oligonucleotide
auccugaacuggacugaauaaaacg

SEQ ID NO: 120732 - RNA, 25 nt, Artificial Sequence
  Description of Artificial Sequence: Synthetic oligonucleotide
guggucucccacugcgccaaaaaaa

SEQ ID NO: 120733 - RNA, 25 nt, Artificial Sequence
  Description of Artificial Sequence: Synthetic oligonucleotide
gaaauggcugucugucagugccgcc

SEQ ID NO: 120734 - RNA, 25 nt, Artificial Sequence
  Description of Artificial Sequence: Synthetic oligonucleotide
cgaaagaacuacgggcagcuggaca

SEQ ID NO: 120735 - RNA, 25 nt, Artificial Sequence
  Description of Artificial Sequence: Synthetic oligonucleotide
aucuuuccagcccgggauaccuacc

SEQ ID NO: 120736 - RNA, 25 nt, Artificial Sequence
  Description of Artificial Sequence: Synthetic oligonucleotide
cauccuaugagcgaguaccccaccu

SEQ ID NO: 120737 - RNA, 25 nt, Artificial Sequence
  Description of Artificial Sequence: Synthetic oligonucleotide
uaccacacccaugggcgcuaugugc

SEQ ID NO: 120738 - RNA, 25 nt, Artificial Sequence
  Description of Artificial Sequence: Synthetic oligonucleotide
cccccuagcaguaccgaucguagcc

SEQ ID NO: 120739 - RNA, 25 nt, Artificial Sequence
  Description of Artificial Sequence: Synthetic oligonucleotide
cccuaugagaagguuucugcaggua

SEQ ID NO: 120740 - RNA, 25 nt, Artificial Sequence
  Description of Artificial Sequence: Synthetic oligonucleotide
aaugguggcagcagccucucuuaca

SEQ ID NO: 120741 - RNA, 25 nt, Artificial Sequence
  Description of Artificial Sequence: Synthetic oligonucleotide
acaaacccagcaguggcagccacuu

SEQ ID NO: 120742 - RNA, 25 nt, Artificial Sequence
  Description of Artificial Sequence: Synthetic oligonucleotide
ucugccaacuuguaggggcacgucg

SEQ ID NO: 120743 - RNA, 25 nt, Artificial Sequence
  Description of Artificial Sequence: Synthetic oligonucleotide
gcccgcugagcugaguggccagcca

SEQ ID NO: 120744 - RNA, 25 nt, Artificial Sequence
  Description of Artificial Sequence: Synthetic oligonucleotide
agugccauuccacuccacucagguu

SEQ ID NO: 120745 - RNA, 25 nt, Artificial Sequence
  Description of Artificial Sequence: Synthetic oligonucleotide
ucuucagggccagagccccugcacc

SEQ ID NO: 120746 - RNA, 25 nt, Artificial Sequence
  Description of Artificial Sequence: Synthetic oligonucleotide
ccuguuugggcuggugagcugggag

SEQ ID NO: 120747 - RNA, 25 nt, Artificial Sequence
  Description of Artificial Sequence: Synthetic oligonucleotide
guucaggugggcugcucacagccuc

SEQ ID NO: 120748 - RNA, 25 nt, Artificial Sequence
  Description of Artificial Sequence: Synthetic oligonucleotide
ccuucagaggccccaccaauuucuc

SEQ ID NO: 120749 - RNA, 25 nt, Artificial Sequence
  Description of Artificial Sequence: Synthetic oligonucleotide
cggacacuucucaguguguggaagc

SEQ ID NO: 120750 - RNA, 25 nt, Artificial Sequence
  Description of Artificial Sequence: Synthetic oligonucleotide
cucaugugggccccugagggcucau

SEQ ID NO: 120751 - RNA, 25 nt, Artificial Sequence
  Description of Artificial Sequence: Synthetic oligonucleotide
ugccugggaaguguugugguggggg

SEQ ID NO: 120752 - RNA, 25 nt, Artificial Sequence
  Description of Artificial Sequence: Synthetic oligonucleotide
gcucccaggaggacuggcccagaga

SEQ ID NO: 120753 - RNA, 25 nt, Artificial Sequence
  Description of Artificial Sequence: Synthetic oligonucleotide
agcccugagauagcggggauccuga

SEQ ID NO: 120754 - RNA, 25 nt, Artificial Sequence
  Description of Artificial Sequence: Synthetic oligonucleotide
aacuggacugaauaaaacguggucu

SEQ ID NO: 120755 - RNA, 25 nt, Artificial Sequence
  Description of Artificial Sequence: Synthetic oligonucleotide
ucuccaauauuaaguucagucuggg

SEQ ID NO: 120756 - RNA, 25 nt, Artificial Sequence
  Description of Artificial Sequence: Synthetic oligonucleotide
ggcuggggugccaggcuggggcauc

SEQ ID NO: 120757 - RNA, 25 nt, Artificial Sequence
  Description of Artificial Sequence: Synthetic oligonucleotide
cgcgcugcuggugcuggucuguguu

SEQ ID NO: 120758 - RNA, 25 nt, Artificial Sequence
  Description of Artificial Sequence: Synthetic oligonucleotide
ucugguugcgcuggccauugucuau

SEQ ID NO: 120759 - RNA, 25 nt, Artificial Sequence
  Description of Artificial Sequence: Synthetic oligonucleotide
ucucauugccuuggcugucugucag

SEQ ID NO: 120760 - RNA, 25 nt, Artificial Sequence
  Description of Artificial Sequence: Synthetic oligonucleotide
gugccgccgaaagaacuacgggcag

SEQ ID NO: 120761 - RNA, 25 nt, Artificial Sequence
  Description of Artificial Sequence: Synthetic oligonucleotide
gcuggacaucuuuccagcccgggau

SEQ ID NO: 120762 - RNA, 25 nt, Artificial Sequence
  Description of Artificial Sequence: Synthetic oligonucleotide
uaccuaccauccuaugagcgaguac

SEQ ID NO: 120763 - RNA, 25 nt, Artificial Sequence
  Description of Artificial Sequence: Synthetic oligonucleotide
ccccaccuaccacacccaugggcgc

SEQ ID NO: 120764 - RNA, 25 nt, Artificial Sequence
  Description of Artificial Sequence: Synthetic oligonucleotide
cuaugugcccccuagcaguaccgau

SEQ ID NO: 120765 - RNA, 25 nt, Artificial Sequence
  Description of Artificial Sequence: Synthetic oligonucleotide
ucguagccccuaugagaagguuucu

SEQ ID NO: 120766 - RNA, 25 nt, Artificial Sequence
  Description of Artificial Sequence: Synthetic oligonucleotide
ugcagguaaugguggcagcagccuc

SEQ ID NO: 120767 - RNA, 25 nt, Artificial Sequence
  Description of Artificial Sequence: Synthetic oligonucleotide
cucuuacacaaacccagcaguggca

SEQ ID NO: 120768 - RNA, 25 nt, Artificial Sequence
  Description of Artificial Sequence: Synthetic oligonucleotide
agccacuucugccaacuuguagggg

SEQ ID NO: 120769 - RNA, 25 nt, Artificial Sequence
  Description of Artificial Sequence: Synthetic oligonucleotide
gcacgucgcccgcugagcugagugg

SEQ ID NO: 120770 - RNA, 25 nt, Artificial Sequence
  Description of Artificial Sequence: Synthetic oligonucleotide
gccagccagugccauuccacuccac

SEQ ID NO: 120771 - RNA, 25 nt, Artificial Sequence
  Description of Artificial Sequence: Synthetic oligonucleotide
cucagguucuucagggccagagccc

SEQ ID NO: 120772 - RNA, 25 nt, Artificial Sequence
  Description of Artificial Sequence: Synthetic oligonucleotide
ccugcacccuguuugggcuggugag

SEQ ID NO: 120773 - RNA, 25 nt, Artificial Sequence
  Description of Artificial Sequence: Synthetic oligonucleotide
gcugggaguucaggugggcugcuca

SEQ ID NO: 120774 - RNA, 25 nt, Artificial Sequence
  Description of Artificial Sequence: Synthetic oligonucleotide
acagccuccuucagaggccccacca

SEQ ID NO: 120775 - RNA, 25 nt, Artificial Sequence
  Description of Artificial Sequence: Synthetic oligonucleotide
aauuucucggacacuucucagugug

SEQ ID NO: 120776 - RNA, 25 nt, Artificial Sequence
  Description of Artificial Sequence: Synthetic oligonucleotide
guggaagcucaugugggccccugag

SEQ ID NO: 120777 - RNA, 25 nt, Artificial Sequence
  Description of Artificial Sequence: Synthetic oligonucleotide
gggcucaugccugggaaguguugug

SEQ ID NO: 120778 - RNA, 25 nt, Artificial Sequence
  Description of Artificial Sequence: Synthetic oligonucleotide
ggugggggcucccaggaggacuggc

SEQ ID NO: 120779 - RNA, 25 nt, Artificial Sequence
  Description of Artificial Sequence: Synthetic oligonucleotide
cccagagagcccugagauagcgggg

SEQ ID NO: 120780 - RNA, 25 nt, Artificial Sequence
  Description of Artificial Sequence: Synthetic oligonucleotide
gauccugaacuggacugaauaaaac

SEQ ID NO: 120781 - RNA, 25 nt, Artificial Sequence
  Description of Artificial Sequence: Synthetic oligonucleotide
cguggucucccacugcgccaaaaaa

SEQ ID NO: 120782 - DNA, 21 bp, Artificial Sequence
  Description of Artificial Sequence: Synthetic oligonucleotide
  Description of Combined DNA/RNA Molecule: Synthetic oligonucleotide
cuacacaaaucagcgauuutt

SEQ ID NO: 120783 - DNA, 21 bp, Artificial Sequence
  Description of Artificial Sequence: Synthetic oligonucleotide
  Description of Combined DNA/RNA Molecule: Synthetic oligonucleotide
aaaucgcugauuuguguagtt

SEQ ID NO: 120784 - DNA, 25 bp, Artificial Sequence
  Description of Artificial Sequence: Synthetic oligonucleotide
  Description of Combined DNA/RNA Molecule: Synthetic oligonucleotide
cuacacaaaucagcgauuuccaugt

SEQ ID NO: 120785 - RNA, 27 nt, Artificial Sequence
  Description of Artificial Sequence: Synthetic oligonucleotide
acauggaaaucgcugauuuguguaguc

SEQ ID NO: 120786 - RNA, 13 nt, Artificial Sequence
  Description of Artificial Sequence: Synthetic oligonucleotide
cuacacaaaucag

SEQ ID NO: 120787 - DNA, 11 bp, Artificial Sequence
  Description of Artificial Sequence: Synthetic oligonucleotide
  Description of Combined DNA/RNA Molecule: Synthetic oligonucleotide
gauuuccaugt

SEQ ID NO: 120788 - DNA, 21 bp, Artificial Sequence
  Description of Artificial Sequence: Synthetic oligonucleotide
  Description of Combined DNA/RNA Molecule: Synthetic oligonucleotide
ggaucuuauuucuucggagtt

SEQ ID NO: 120789 - DNA, 21 bp, Artificial Sequence
  Description of Artificial Sequence: Synthetic oligonucleotide
  Description of Combined DNA/RNA Molecule: Synthetic oligonucleotide
cuccgaagaaauaagaucctt

SEQ ID NO: 120790 - RNA, 11 nt, Artificial Sequence
  Description of Artificial Sequence: Synthetic oligonucleotide
ggaucuuauuu

SEQ ID NO: 120791 - DNA, 10 bp, Artificial Sequence
  Description of Artificial Sequence: Synthetic oligonucleotide
  Description of Combined DNA/RNA Molecule: Synthetic oligonucleotide
cuucggagtt

SEQ ID NO: 120792 - RNA, 27 nt, Artificial Sequence
  Description of Artificial Sequence: Synthetic oligonucleotide
cauugucuccgaagaaauaagauccuu

SEQ ID NO: 120793 - RNA, 8 nt, Artificial Sequence
  Description of Artificial Sequence: Synthetic oligonucleotide
  modified_base (2): LNA-G
ggaucuua

SEQ ID NO: 120794 - DNA, 17 bp, Artificial Sequence
  Description of Artificial Sequence: Synthetic oligonucleotide
  Description of Combined DNA/RNA Molecule: Synthetic oligonucleotide
uuucuucggagacaatg

SEQ ID NO: 120795 - DNA, 16 bp, Artificial Sequence
  Description of Artificial Sequence: Synthetic oligonucleotide
  Description of Combined DNA/RNA Molecule: Synthetic oligonucleotide
uucuucggagacaatg

SEQ ID NO: 120796 - DNA, 15 bp, Artificial Sequence
  Description of Artificial Sequence: Synthetic oligonucleotide
  Description of Combined DNA/RNA Molecule: Synthetic oligonucleotide
ucuucggagacaatg

SEQ ID NO: 120797 - DNA, 14 bp, Artificial Sequence
  Description of Artificial Sequence: Synthetic oligonucleotide
  Description of Combined DNA/RNA Molecule: Synthetic oligonucleotide
cuucggagacaatg

SEQ ID NO: 120798 - DNA, 13 bp, Artificial Sequence
  Description of Artificial Sequence: Synthetic oligonucleotide
  Description of Combined DNA/RNA Molecule: Synthetic oligonucleotide
uucggagacaatg

SEQ ID NO: 120799 - DNA, 12 bp, Artificial Sequence
  Description of Artificial Sequence: Synthetic oligonucleotide
  Description of Combined DNA/RNA Molecule: Synthetic oligonucleotide
ucggagacaatg

SEQ ID NO: 120800 - DNA, 11 bp, Artificial Sequence
  Description of Artificial Sequence: Synthetic oligonucleotide
  Description of Combined DNA/RNA Molecule: Synthetic oligonucleotide
cggagacaatg

SEQ ID NO: 120801 - RNA, 9 nt, Artificial Sequence
  Description of Artificial Sequence: Synthetic oligonucleotide
  modified_base (2): LNA-G
ggaucuuau

SEQ ID NO: 120802 - RNA, 10 nt, Artificial Sequence
  Description of Artificial Sequence: Synthetic oligonucleotide
  modified_base (2): LNA-G
ggaucuuauu

SEQ ID NO: 120803 - RNA, 11 nt, Artificial Sequence
  Description of Artificial Sequence: Synthetic oligonucleotide
  modified_base (2): LNA-G
ggaucuuauuu

SEQ ID NO: 120804 - RNA, 12 nt, Artificial Sequence
  Description of Artificial Sequence: Synthetic oligonucleotide
  modified_base (2): LNA-G
ggaucuuauuuc

SEQ ID NO: 120805 - RNA, 8 nt, Artificial Sequence
  Description of Artificial Sequence: Synthetic oligonucleotide
  modified_base (3): LNA-A
cuacacaa

SEQ ID NO: 120806 - DNA, 13 bp, Artificial Sequence
  Description of Artificial Sequence: Synthetic oligonucleotide
  Description of Combined DNA/RNA Molecule: Synthetic oligonucleotide
  modified_base (8): LNA-A
aucagcgauuutt

SEQ ID NO: 120807 - DNA, 12 bp, Artificial Sequence
  Description of Artificial Sequence: Synthetic oligonucleotide
  Description of Combined DNA/RNA Molecule: Synthetic oligonucleotide
  modified_base (7): LNA-A
ucagcgauuutt

SEQ ID NO: 120808 - DNA, 11 bp, Artificial Sequence
  Description of Artificial Sequence: Synthetic oligonucleotide
  Description of Combined DNA/RNA Molecule: Synthetic oligonucleotide
  modified_base (6): LNA-A
cagcgauuutt

SEQ ID NO: 120809 - DNA, 10 bp, Artificial Sequence
  Description of Artificial Sequence: Synthetic oligonucleotide
  Description of Combined DNA/RNA Molecule: Synthetic oligonucleotide
  modified_base (5): LNA-A
agcgauuutt

SEQ ID NO: 120810 - DNA, 9 bp, Artificial Sequence
  Description of Artificial Sequence: Synthetic oligonucleotide
  Description of Combined DNA/RNA Molecule: Synthetic oligonucleotide
  modified_base (4): LNA-A
gcgauuutt

SEQ ID NO: 120811 - DNA, 8 bp, Artificial Sequence
  Description of Artificial Sequence: Synthetic oligonucleotide
  Description of Combined DNA/RNA Molecule: Synthetic oligonucleotide
  modified_base (3): LNA-A
cgauuutt

SEQ ID NO: 120812 - DNA, 7 bp, Artificial Sequence
  Description of Artificial Sequence: Synthetic oligonucleotide
  Description of Combined DNA/RNA Molecule: Synthetic oligonucleotide
  modified_base (2): LNA-A
gauuutt

SEQ ID NO: 120813 - RNA, 9 nt, Artificial Sequence
  Description of Artificial Sequence: Synthetic oligonucleotide
  modified_base (3): LNA-A
cuacacaaa

SEQ ID NO: 120814 - RNA, 10 nt, Artificial Sequence
  Description of Artificial Sequence: Synthetic oligonucleotide
  modified_base (3): LNA-A
cuacacaaau

SEQ ID NO: 120815 - RNA, 11 nt, Artificial Sequence
  Description of Artificial Sequence: Synthetic oligonucleotide
  modified_base (3): LNA-A
cuacacaaauc

SEQ ID NO: 120816 - RNA, 12 nt, Artificial Sequence
  Description of Artificial Sequence: Synthetic oligonucleotide
  modified_base (3): LNA-A
cuacacaaauca

SEQ ID NO: 120817 - RNA, 13 nt, Artificial Sequence
  Description of Artificial Sequence: Synthetic oligonucleotide
  modified_base (3): LNA-A
cuacacaaaucag

SEQ ID NO: 120818 - RNA, 14 nt, Artificial Sequence
  Description of Artificial Sequence: Synthetic oligonucleotide
  modified_base (3): LNA-A
cuacacaaaucagc

SEQ ID NO: 120819 - RNA, 13 nt, Artificial Sequence
  Description of Artificial Sequence: Synthetic oligonucleotide
  modified_base (2): LNA-G
ggaucuuauuucu

SEQ ID NO: 120820 - RNA, 14 nt, Artificial Sequence
  Description of Artificial Sequence: Synthetic oligonucleotide
  modified_base (2): LNA-G
ggaucuuauuucuu

SEQ ID NO: 120821 - RNA, 8 nt, Artificial Sequence
  Description of Artificial Sequence: Synthetic oligonucleotide
  modified_base (2): LNA-G
  modified_base (8): LNA-A
ggaucuua

SEQ ID NO: 120822 - RNA, 9 nt, Artificial Sequence
  Description of Artificial Sequence: Synthetic oligonucleotide
  modified_base (2): LNA-G
  modified_base (9): LNA-U
ggaucuuau

SEQ ID NO: 120823 - RNA, 10 nt, Artificial Sequence
  Description of Artificial Sequence: Synthetic oligonucleotide
  modified_base (2): LNA-G
  modified_base (10): LNA-U
ggaucuuauu

SEQ ID NO: 120824 - RNA, 11 nt, Artificial Sequence
  Description of Artificial Sequence: Synthetic oligonucleotide
  modified_base (2): LNA-G
  modified_base (11): LNA-U
ggaucuuauuu

SEQ ID NO: 120825 - RNA, 12 nt, Artificial Sequence
  Description of Artificial Sequence: Synthetic oligonucleotide
  modified_base (2): LNA-G
  modified_base (12): LNA-C
ggaucuuauuuc

SEQ ID NO: 120826 - RNA, 13 nt, Artificial Sequence
  Description of Artificial Sequence: Synthetic oligonucleotide
  modified_base (2): LNA-G
  modified_base (13): LNA-U
ggaucuuauuucu

SEQ ID NO: 120827 - RNA, 14 nt, Artificial Sequence
  Description of Artificial Sequence: Synthetic oligonucleotide
  modified_base (2): LNA-G
  modified_base (14): LNA-U
ggaucuuauuucuu

SEQ ID NO: 120828 - DNA, 13 bp, Artificial Sequence
  Description of Artificial Sequence: Synthetic oligonucleotide
  Description of Combined DNA/RNA Molecule: Synthetic oligonucleotide
  modified_base (8): LNA-G
uuucuucggagtt

SEQ ID NO: 120829 - DNA, 12 bp, Artificial Sequence
  Description of Artificial Sequence: Synthetic oligonucleotide
  Description of Combined DNA/RNA Molecule: Synthetic oligonucleotide
  modified_base (7): LNA-G
uucuucggagtt

SEQ ID NO: 120830 - DNA, 11 bp, Artificial Sequence
  Description of Artificial Sequence: Synthetic oligonucleotide
  Description of Combined DNA/RNA Molecule: Synthetic oligonucleotide
  modified_base (6): LNA-G
ucuucggagtt

SEQ ID NO: 120831 - DNA, 10 bp, Artificial Sequence
  Description of Artificial Sequence: Synthetic oligonucleotide
  Description of Combined DNA/RNA Molecule: Synthetic oligonucleotide
  modified_base (5): LNA-G
cuucggagtt

SEQ ID NO: 120832 - DNA, 9 bp, Artificial Sequence
  Description of Artificial Sequence: Synthetic oligonucleotide
  Description of Combined DNA/RNA Molecule: Synthetic oligonucleotide
  modified_base (4): LNA-G
uucggagtt

SEQ ID NO: 120833 - DNA, 8 bp, Artificial Sequence
  Description of Artificial Sequence: Synthetic oligonucleotide
  Description of Combined DNA/RNA Molecule: Synthetic oligonucleotide
  modified_base (3): LNA-G
ucggagtt

SEQ ID NO: 120834 - DNA, 7 bp, Artificial Sequence
  Description of Artificial Sequence: Synthetic oligonucleotide
  Description of Combined DNA/RNA Molecule: Synthetic oligonucleotide
  modified_base (2): LNA-G
cggagtt

SEQ ID NO: 120835 - DNA, 13 bp, Artificial Sequence
  Description of Artificial Sequence: Synthetic oligonucleotide
  Description of Combined DNA/RNA Molecule: Synthetic oligonucleotide
  modified_base (1): LNA-U
  modified_base (8): LNA-G
uuucuucggagtt

SEQ ID NO: 120836 - DNA, 12 bp, Artificial Sequence
  Description of Artificial Sequence: Synthetic oligonucleotide
  Description of Combined DNA/RNA Molecule: Synthetic oligonucleotide
  modified_base (1): LNA-U
  modified_base (7): LNA-G
uucuucggagtt

SEQ ID NO: 120837 - DNA, 11 bp, Artificial Sequence
  Description of Artificial Sequence: Synthetic oligonucleotide
  Description of Combined DNA/RNA Molecule: Synthetic oligonucleotide
  modified_base (1): LNA-U
  modified_base (6): LNA-G
ucuucggagtt

SEQ ID NO: 120838 - DNA, 10 bp, Artificial Sequence
  Description of Artificial Sequence: Synthetic oligonucleotide
  Description of Combined DNA/RNA Molecule: Synthetic oligonucleotide
  modified_base (1): LNA-C
  modified_base (5): LNA-G
cuucggagtt

SEQ ID NO: 120839 - DNA, 9 bp, Artificial Sequence
  Description of Artificial Sequence: Synthetic oligonucleotide
  Description of Combined DNA/RNA Molecule: Synthetic oligonucleotide
  modified_base (1): LNA-U
  modified_base (4): LNA-G
uucggagtt

SEQ ID NO: 120840 - DNA, 8 bp, Artificial Sequence
  Description of Artificial Sequence: Synthetic oligonucleotide
  Description of Combined DNA/RNA Molecule: Synthetic oligonucleotide
  modified_base (1): LNA-U
  modified_base (3): LNA-G
ucggagtt

SEQ ID NO: 120841 - DNA, 7 bp, Artificial Sequence
  Description of Artificial Sequence: Synthetic oligonucleotide
  Description of Combined DNA/RNA Molecule: Synthetic oligonucleotide
  modified_base (1): LNA-C
  modified_base (2): LNA-G
cggagtt

SEQ ID NO: 120842 - DNA, 21 bp, Artificial Sequence
  Description of Artificial Sequence: Synthetic oligonucleotide
  Description of Combined DNA/RNA Molecule: Synthetic oligonucleotide
  modified_base (2): LNA-G
  modified_base (16): LNA-G
ggaucuuauuucuucggagtt

SEQ ID NO: 120843 - DNA, 25 bp, Artificial Sequence
  Description of Artificial Sequence: Synthetic oligonucleotide
  Description of Combined DNA/RNA Molecule: Synthetic oligonucleotide
ggaucuuauuucuucggagacaatg

SEQ ID NO: 120844 - RNA, 25 nt, Artificial Sequence
  Description of Artificial Sequence: Synthetic oligonucleotide
guauuuugaugaggaguucacggcc

SEQ ID NO: 120845 - RNA, 25 nt, Artificial Sequence
  Description of Artificial Sequence: Synthetic oligonucleotide
ggcccagaugaucaccaucacacca

SEQ ID NO: 120846 - RNA, 25 nt, Artificial Sequence
  Description of Artificial Sequence: Synthetic oligonucleotide
gggaagaaaacuauccugcggguuu

SEQ ID NO: 120847 - RNA, 25 nt, Artificial Sequence
  Description of Artificial Sequence: Synthetic oligonucleotide
guuuuaauuuauuucauccaguuug

SEQ ID NO: 120848 - RNA, 25 nt, Artificial Sequence
  Description of Artificial Sequence: Synthetic oligonucleotide
acguagggaaauguuaaggacuucu

SEQ ID NO: 120849 - RNA, 25 nt, Artificial Sequence
  Description of Artificial Sequence: Synthetic oligonucleotide
ccaggguuuacccagugggacagag

SEQ ID NO: 120850 - RNA, 25 nt, Artificial Sequence
  Description of Artificial Sequence: Synthetic oligonucleotide
agcaagguuuaaauuuguuauugug

SEQ ID NO: 120851 - RNA, 25 nt, Artificial Sequence
  Description of Artificial Sequence: Synthetic oligonucleotide
uguauuauguuguucaaaugcauuu

SEQ ID NO: 120852 - RNA, 25 nt, Artificial Sequence
  Description of Artificial Sequence: Synthetic oligonucleotide
uuuuaaucuuugugacaggaaagcc

SEQ ID NO: 120853 - RNA, 25 nt, Artificial Sequence
  Description of Artificial Sequence: Synthetic oligonucleotide
uuaaucuuugugacaggaaagcccu

SEQ ID NO: 120854 - RNA, 25 nt, Artificial Sequence
  Description of Artificial Sequence: Synthetic oligonucleotide
gcugcuuaugucucccagcauggcc

SEQ ID NO: 120855 - RNA, 25 nt, Artificial Sequence
  Description of Artificial Sequence: Synthetic oligonucleotide
aaguguuucagaagcuucucccuga

SEQ ID NO: 120856 - RNA, 25 nt, Artificial Sequence
  Description of Artificial Sequence: Synthetic oligonucleotide
gaccaucaauaaggaagaagcccuu

SEQ ID NO: 120857 - RNA, 25 nt, Artificial Sequence
  Description of Artificial Sequence: Synthetic oligonucleotide
ccaucaauaaggaagaagcccuuca

SEQ ID NO: 120858 - RNA, 25 nt, Artificial Sequence
  Description of Artificial Sequence: Synthetic oligonucleotide
ucaauaaggaagaagcccuucagcg

SEQ ID NO: 120859 - RNA, 25 nt, Artificial Sequence
  Description of Artificial Sequence: Synthetic oligonucleotide
aauaaggaagaagcccuucagcggc

SEQ ID NO: 120860 - RNA, 25 nt, Artificial Sequence
  Description of Artificial Sequence: Synthetic oligonucleotide
aggaagaagcccuucagcggccagu

SEQ ID NO: 120861 - RNA, 25 nt, Artificial Sequence
  Description of Artificial Sequence: Synthetic oligonucleotide
gcauaacuaaaggugaaaagcuccg

SEQ ID NO: 120862 - RNA, 25 nt, Artificial Sequence
  Description of Artificial Sequence: Synthetic oligonucleotide
cauaacuaaaggugaaaagcuccgg

SEQ ID NO: 120863 - RNA, 25 nt, Artificial Sequence
  Description of Artificial Sequence: Synthetic oligonucleotide
cuacaucacgccagucaacagucug

SEQ ID NO: 120864 - RNA, 25 nt, Artificial Sequence
  Description of Artificial Sequence: Synthetic oligonucleotide
acuggauuuaagcagaguucaaaag

SEQ ID NO: 120865 - RNA, 25 nt, Artificial Sequence
  Description of Artificial Sequence: Synthetic oligonucleotide
cuggauuuaagcagaguucaaaagc

SEQ ID NO: 120866 - RNA, 25 nt, Artificial Sequence
  Description of Artificial Sequence: Synthetic oligonucleotide
gauuuaagcagaguucaaaagcccu

SEQ ID NO: 120867 - RNA, 25 nt, Artificial Sequence
  Description of Artificial Sequence: Synthetic oligonucleotide
auuuaagcagaguucaaaagcccuu

SEQ ID NO: 120868 - RNA, 25 nt, Artificial Sequence
  Description of Artificial Sequence: Synthetic oligonucleotide
uuaagcagaguucaaaagcccuuca

SEQ ID NO: 120869 - RNA, 25 nt, Artificial Sequence
  Description of Artificial Sequence: Synthetic oligonucleotide
uaagcagaguucaaaagcccuucag

SEQ ID NO: 120870 - RNA, 25 nt, Artificial Sequence
  Description of Artificial Sequence: Synthetic oligonucleotide
agcagaguucaaaagcccuucagcg

SEQ ID NO: 120871 - RNA, 25 nt, Artificial Sequence
  Description of Artificial Sequence: Synthetic oligonucleotide
cucagggucugagugaagccgcucg

SEQ ID NO: 120872 - RNA, 25 nt, Artificial Sequence
  Description of Artificial Sequence: Synthetic oligonucleotide
caagcaacuacaucacgccagucaa

SEQ ID NO: 120873 - RNA, 25 nt, Artificial Sequence
  Description of Artificial Sequence: Synthetic oligonucleotide
aucaauggcagcuucuuggugcgug

SEQ ID NO: 120874 - RNA, 25 nt, Artificial Sequence
  Description of Artificial Sequence: Synthetic oligonucleotide
uuccagcccacauuggauucaucag

SEQ ID NO: 120875 - RNA, 25 nt, Artificial Sequence
  Description of Artificial Sequence: Synthetic oligonucleotide
cagcugagaauguggaauaccuaag

SEQ ID NO: 120876 - RNA, 25 nt, Artificial Sequence
  Description of Artificial Sequence: Synthetic oligonucleotide
aacguaucuccuaauuugaggcuca

SEQ ID NO: 120877 - RNA, 25 nt, Artificial Sequence
  Description of Artificial Sequence: Synthetic oligonucleotide
ccuaaaauaauuucucuacaauugg

SEQ ID NO: 120878 - RNA, 25 nt, Artificial Sequence
  Description of Artificial Sequence: Synthetic oligonucleotide
uggaagauucagcuaguuaggagcc

SEQ ID NO: 120879 - RNA, 25 nt, Artificial Sequence
  Description of Artificial Sequence: Synthetic oligonucleotide
uuaaacucuccuagucaauauccac

SEQ ID NO: 120880 - RNA, 25 nt, Artificial Sequence
  Description of Artificial Sequence: Synthetic oligonucleotide
cagccuacaguuauguucagucaca

SEQ ID NO: 120881 - RNA, 25 nt, Artificial Sequence
  Description of Artificial Sequence: Synthetic oligonucleotide
guuauguucagucacacacacauac

SEQ ID NO: 120882 - RNA, 25 nt, Artificial Sequence
  Description of Artificial Sequence: Synthetic oligonucleotide
cacauacaaaauguuccuuuugcuu

SEQ ID NO: 120883 - RNA, 25 nt, Artificial Sequence
  Description of Artificial Sequence: Synthetic oligonucleotide
uccuuuugcuuuuaaaguaauuuuu

SEQ ID NO: 120884 - RNA, 25 nt, Artificial Sequence
  Description of Artificial Sequence: Synthetic oligonucleotide
ugaccugugaagcaacagucaaugg

SEQ ID NO: 120885 - RNA, 25 nt, Artificial Sequence
  Description of Artificial Sequence: Synthetic oligonucleotide
cuaucucacacaucgacaaaccaau

SEQ ID NO: 120886 - RNA, 25 nt, Artificial Sequence
  Description of Artificial Sequence: Synthetic oligonucleotide
uguccucaauuguacugcuaccacu

SEQ ID NO: 120887 - RNA, 25 nt, Artificial Sequence
  Description of Artificial Sequence: Synthetic oligonucleotide
aaaccguagcuggcaagcggucuua

SEQ ID NO: 120888 - RNA, 25 nt, Artificial Sequence
  Description of Artificial Sequence: Synthetic oligonucleotide
uagcuggcaagcggucuuaccggcu

SEQ ID NO: 120889 - RNA, 25 nt, Artificial Sequence
  Description of Artificial Sequence: Synthetic oligonucleotide
uuguaugguuaaaagauggguuacc

SEQ ID NO: 120890 - RNA, 25 nt, Artificial Sequence
  Description of Artificial Sequence: Synthetic oligonucleotide
ugguuaaaagauggguuaccugcga

SEQ ID NO: 120891 - RNA, 25 nt, Artificial Sequence
  Description of Artificial Sequence: Synthetic oligonucleotide
cagggaauuauacaaucuugcugag

SEQ ID NO: 120892 - RNA, 25 nt, Artificial Sequence
  Description of Artificial Sequence: Synthetic oligonucleotide
acaaucuugcugagcauaaaacagu

SEQ ID NO: 120893 - RNA, 25 nt, Artificial Sequence
  Description of Artificial Sequence: Synthetic oligonucleotide
ccaauaaugaagaguccuuuauccu

SEQ ID NO: 120894 - RNA, 25 nt, Artificial Sequence
  Description of Artificial Sequence: Synthetic oligonucleotide
acuuuggauguuccaacgcaaguug

SEQ ID NO: 120895 - RNA, 25 nt, Artificial Sequence
  Description of Artificial Sequence: Synthetic oligonucleotide
aaugcuuccacuaaacugaaaccau

SEQ ID NO: 120896 - RNA, 25 nt, Artificial Sequence
  Description of Artificial Sequence: Synthetic oligonucleotide
gagaaaguuugacuuuguuaaauau

SEQ ID NO: 120897 - RNA, 25 nt, Artificial Sequence
  Description of Artificial Sequence: Synthetic oligonucleotide
aaagaacuacuguauauuaaaaguu

SEQ ID NO: 120898 - RNA, 25 nt, Artificial Sequence
  Description of Artificial Sequence: Synthetic oligonucleotide
uuagaaauacggguuuugacuuaac

SEQ ID NO: 120899 - RNA, 25 nt, Artificial Sequence
  Description of Artificial Sequence: Synthetic oligonucleotide
aacauggguacagcaaacucagcac

SEQ ID NO: 120900 - RNA, 25 nt, Artificial Sequence
  Description of Artificial Sequence: Synthetic oligonucleotide
aaagacacagaagaugcugaccuca

SEQ ID NO: 120901 - RNA, 25 nt, Artificial Sequence
  Description of Artificial Sequence: Synthetic oligonucleotide
uaguagggagguuuauucagaucgc

SEQ ID NO: 120902 - RNA, 25 nt, Artificial Sequence
  Description of Artificial Sequence: Synthetic oligonucleotide
gccuucugcagcaggguucugggau

SEQ ID NO: 120903 - RNA, 25 nt, Artificial Sequence
  Description of Artificial Sequence: Synthetic oligonucleotide
ggucugguacauauuggaaauuaug

SEQ ID NO: 120904 - RNA, 25 nt, Artificial Sequence
  Description of Artificial Sequence: Synthetic oligonucleotide
cuaguccuuccgauggaagcacuag

SEQ ID NO: 120905 - RNA, 25 nt, Artificial Sequence
  Description of Artificial Sequence: Synthetic oligonucleotide
ccagugaauauuguuuuuaugugga

SEQ ID NO: 120906 - RNA, 25 nt, Artificial Sequence
  Description of Artificial Sequence: Synthetic oligonucleotide
augaauucaaguuggaauugguaga

SEQ ID NO: 120907 - RNA, 25 nt, Artificial Sequence
  Description of Artificial Sequence: Synthetic oligonucleotide
caggacacagauuuagacuuggaga

SEQ ID NO: 120908 - RNA, 25 nt, Artificial Sequence
  Description of Artificial Sequence: Synthetic oligonucleotide
cucaaagcacaguuacaguauucca

SEQ ID NO: 120909 - RNA, 25 nt, Artificial Sequence
  Description of Artificial Sequence: Synthetic oligonucleotide
accacugccaccacugaugaauuaa

SEQ ID NO: 120910 - RNA, 25 nt, Artificial Sequence
  Description of Artificial Sequence: Synthetic oligonucleotide
gaaacuacuagugccacaucaucac

SEQ ID NO: 120911 - RNA, 25 nt, Artificial Sequence
  Description of Artificial Sequence: Synthetic oligonucleotide
aagucggacagccucaccaaacaga

SEQ ID NO: 120912 - RNA, 25 nt, Artificial Sequence
  Description of Artificial Sequence: Synthetic oligonucleotide
gaaagcgaaaaauggaacaugaugg

SEQ ID NO: 120913 - RNA, 25 nt, Artificial Sequence
  Description of Artificial Sequence: Synthetic oligonucleotide
cccucugauuuagcauguagacugc

SEQ ID NO: 120914 - RNA, 25 nt, Artificial Sequence
  Description of Artificial Sequence: Synthetic oligonucleotide
ugagcuauuuaaggaucuauuuaug

SEQ ID NO: 120915 - RNA, 25 nt, Artificial Sequence
  Description of Artificial Sequence: Synthetic oligonucleotide
aaaaggugaaaaagcacuauuauca

SEQ ID NO: 120916 - RNA, 25 nt, Artificial Sequence
  Description of Artificial Sequence: Synthetic oligonucleotide
gaaaaagcacuauuaucaguucugc

SEQ ID NO: 120917 - RNA, 25 nt, Artificial Sequence
  Description of Artificial Sequence: Synthetic oligonucleotide
ggcugaaaagaaagauuaaaccuac

SEQ ID NO: 120918 - RNA, 25 nt, Artificial Sequence
  Description of Artificial Sequence: Synthetic oligonucleotide
uaaacccuuauaauaaaauccuucu

SEQ ID NO: 120919 - RNA, 25 nt, Artificial Sequence
  Description of Artificial Sequence: Synthetic oligonucleotide
cauacuauuagccaaugcuguagac

SEQ ID NO: 120920 - RNA, 25 nt, Artificial Sequence
  Description of Artificial Sequence: Synthetic oligonucleotide
gacagaagcauuuugauaggaauag

SEQ ID NO: 120921 - RNA, 25 nt, Artificial Sequence
  Description of Artificial Sequence: Synthetic oligonucleotide
agagcaaauaagauaauggcccuga

SEQ ID NO: 120922 - RNA, 25 nt, Artificial Sequence
  Description of Artificial Sequence: Synthetic oligonucleotide
ccaacauuuuucucuuccucaagca

SEQ ID NO: 120923 - RNA, 25 nt, Artificial Sequence
  Description of Artificial Sequence: Synthetic oligonucleotide
uuaaguaugagaaaaguucagccca

SEQ ID NO: 120924 - RNA, 25 nt, Artificial Sequence
  Description of Artificial Sequence: Synthetic oligonucleotide
caggaauaaagauggcugcugaacc

SEQ ID NO: 120925 - RNA, 25 nt, Artificial Sequence
  Description of Artificial Sequence: Synthetic oligonucleotide
aauuugaaugaccaaguucucuuca

SEQ ID NO: 120926 - RNA, 25 nt, Artificial Sequence
  Description of Artificial Sequence: Synthetic oligonucleotide
auguauaaagauagccagccuagag

SEQ ID NO: 120927 - RNA, 25 nt, Artificial Sequence
  Description of Artificial Sequence: Synthetic oligonucleotide
ggcuguaacuaucucugugaagugu

SEQ ID NO: 120928 - RNA, 25 nt, Artificial Sequence
  Description of Artificial Sequence: Synthetic oligonucleotide
ucugugaagugugagaaaauuucaa

SEQ ID NO: 120929 - RNA, 25 nt, Artificial Sequence
  Description of Artificial Sequence: Synthetic oligonucleotide
ccuuuaaggaaaugaauccuccuga

SEQ ID NO: 120930 - RNA, 25 nt, Artificial Sequence
  Description of Artificial Sequence: Synthetic oligonucleotide
aaggauacaaaaagugacaucauau

SEQ ID NO: 120931 - RNA, 25 nt, Artificial Sequence
  Description of Artificial Sequence: Synthetic oligonucleotide
agaugcaauuugaaucuucaucaua

SEQ ID NO: 120932 - RNA, 25 nt, Artificial Sequence
  Description of Artificial Sequence: Synthetic oligonucleotide
guucaaaacgaagacuagcuauuaa

SEQ ID NO: 120933 - RNA, 25 nt, Artificial Sequence
  Description of Artificial Sequence: Synthetic oligonucleotide
gugaaaccucaucucuacuaaaaau

SEQ ID NO: 120934 - RNA, 25 nt, Artificial Sequence
  Description of Artificial Sequence: Synthetic oligonucleotide
acgaaagagaagcucuaucucgccu

SEQ ID NO: 120935 - RNA, 25 nt, Artificial Sequence
  Description of Artificial Sequence: Synthetic oligonucleotide
cuccacaagcgccuucgguccaguu

SEQ ID NO: 120936 - RNA, 25 nt, Artificial Sequence
  Description of Artificial Sequence: Synthetic oligonucleotide
gagaagauuccaaagauguagccgc

SEQ ID NO: 120937 - RNA, 25 nt, Artificial Sequence
  Description of Artificial Sequence: Synthetic oligonucleotide
aaucuggauucaaugaggagacuug

SEQ ID NO: 120938 - RNA, 25 nt, Artificial Sequence
  Description of Artificial Sequence: Synthetic oligonucleotide
agaacagauuugagaguagugagga

SEQ ID NO: 120939 - RNA, 25 nt, Artificial Sequence
  Description of Artificial Sequence: Synthetic oligonucleotide
ccagagcugugcagaugaguacaaa

SEQ ID NO: 120940 - RNA, 25 nt, Artificial Sequence
  Description of Artificial Sequence: Synthetic oligonucleotide
ccucagauuguuguuguuaaugggc

SEQ ID NO: 120941 - RNA, 25 nt, Artificial Sequence
  Description of Artificial Sequence: Synthetic oligonucleotide
cuauuuuaauuauuuuuaauuuauu

SEQ ID NO: 120942 - RNA, 25 nt, Artificial Sequence
  Description of Artificial Sequence: Synthetic oligonucleotide
uuuaauuuauuaauauuuaaauaug

SEQ ID NO: 120943 - RNA, 25 nt, Artificial Sequence
  Description of Artificial Sequence: Synthetic oligonucleotide
augcaguuugaauauccuuuguuuc

SEQ ID NO: 120944 - RNA, 25 nt, Artificial Sequence
  Description of Artificial Sequence: Synthetic oligonucleotide
caugcugcuggcgucuaaguguuug

SEQ ID NO: 120945 - RNA, 25 nt, Artificial Sequence
  Description of Artificial Sequence: Synthetic oligonucleotide
agaugugcauuucaccugugacaaa

SEQ ID NO: 120946 - RNA, 25 nt, Artificial Sequence
  Description of Artificial Sequence: Synthetic oligonucleotide
ucaaaaccugugccaggcugaauua

SEQ ID NO: 120947 - RNA, 25 nt, Artificial Sequence
  Description of Artificial Sequence: Synthetic oligonucleotide
gaauguggguagucauucuuacaau

SEQ ID NO: 120948 - RNA, 25 nt, Artificial Sequence
  Description of Artificial Sequence: Synthetic oligonucleotide
auguggguagucauucuuacaauug

SEQ ID NO: 120949 - RNA, 25 nt, Artificial Sequence
  Description of Artificial Sequence: Synthetic oligonucleotide
ugaaaaugagcaucagagaguguac

SEQ ID NO: 120950 - RNA, 25 nt, Artificial Sequence
  Description of Artificial Sequence: Synthetic oligonucleotide
uugcuuuucauguagaacucagcag

SEQ ID NO: 120951 - RNA, 25 nt, Artificial Sequence
  Description of Artificial Sequence: Synthetic oligonucleotide
uguauuucuauauuuauuuucagua

SEQ ID NO: 120952 - RNA, 25 nt, Artificial Sequence
  Description of Artificial Sequence: Synthetic oligonucleotide
uuugauuaauguuucuuaaauggaa

SEQ ID NO: 120953 - RNA, 25 nt, Artificial Sequence
  Description of Artificial Sequence: Synthetic oligonucleotide
caacguguauagugccuaaaauugu

SEQ ID NO: 120954 - RNA, 25 nt, Artificial Sequence
  Description of Artificial Sequence: Synthetic oligonucleotide
cauauccuuggcuacuaacaucugg

SEQ ID NO: 120955 - RNA, 25 nt, Artificial Sequence
  Description of Artificial Sequence: Synthetic oligonucleotide
uacuaacaucuggagacugugagcu

SEQ ID NO: 120956 - RNA, 25 nt, Artificial Sequence
  Description of Artificial Sequence: Synthetic oligonucleotide
cauaaguugugugcuuuuuauuaau

SEQ ID NO: 120957 - RNA, 25 nt, Artificial Sequence
  Description of Artificial Sequence: Synthetic oligonucleotide
gcaucauuuuggcucuucuuacauu

SEQ ID NO: 120958 - RNA, 25 nt, Artificial Sequence
  Description of Artificial Sequence: Synthetic oligonucleotide
gcucuucuuacauuuguaaaaaugu

SEQ ID NO: 120959 - RNA, 25 nt, Artificial Sequence
  Description of Artificial Sequence: Synthetic oligonucleotide
agauuaggucaucuuaauucauauu

SEQ ID NO: 120960 - RNA, 25 nt, Artificial Sequence
  Description of Artificial Sequence: Synthetic oligonucleotide
auggaauugaaagaacuaaucauga

SEQ ID NO: 120961 - RNA, 25 nt, Artificial Sequence
  Description of Artificial Sequence: Synthetic oligonucleotide
cacacucauuccuucugcucuuggg

SEQ ID NO: 120962 - RNA, 25 nt, Artificial Sequence
  Description of Artificial Sequence: Synthetic oligonucleotide
uguagagguaaccaguagcuuugag

SEQ ID NO: 120963 - RNA, 25 nt, Artificial Sequence
  Description of Artificial Sequence: Synthetic oligonucleotide
caaccacaugccacguaauauuuca

SEQ ID NO: 120964 - RNA, 25 nt, Artificial Sequence
  Description of Artificial Sequence: Synthetic oligonucleotide
ucggaaacaaguuauucucuucacu

SEQ ID NO: 120965 - RNA, 25 nt, Artificial Sequence
  Description of Artificial Sequence: Synthetic oligonucleotide
acucccaauaacuaaugcuaagaaa

SEQ ID NO: 120966 - RNA, 25 nt, Artificial Sequence
  Description of Artificial Sequence: Synthetic oligonucleotide
aaugcuaagaaaugcugaaaaucaa

SEQ ID NO: 120967 - RNA, 25 nt, Artificial Sequence
  Description of Artificial Sequence: Synthetic oligonucleotide
gucuuucucuaaauaugauuacuuu

SEQ ID NO: 120968 - RNA, 25 nt, Artificial Sequence
  Description of Artificial Sequence: Synthetic oligonucleotide
ugaauuucaggcauuuuguucuaca

SEQ ID NO: 120969 - RNA, 25 nt, Artificial Sequence
  Description of Artificial Sequence: Synthetic oligonucleotide
cgauucccucucacccgggacucuc

SEQ ID NO: 120970 - RNA, 25 nt, Artificial Sequence
  Description of Artificial Sequence: Synthetic oligonucleotide
aggaaagugaaccuuuaaaguaaag

SEQ ID NO: 120971 - RNA, 25 nt, Artificial Sequence
  Description of Artificial Sequence: Synthetic oligonucleotide
gaggcugcaugcucuggaagccugg

SEQ ID NO: 120972 - RNA, 25 nt, Artificial Sequence
  Description of Artificial Sequence: Synthetic oligonucleotide
ucucugaacagaaaacaaaagagag

SEQ ID NO: 120973 - RNA, 25 nt, Artificial Sequence
  Description of Artificial Sequence: Synthetic oligonucleotide
aacuuggcuguaaucaguuaugccg

SEQ ID NO: 120974 - RNA, 25 nt, Artificial Sequence
  Description of Artificial Sequence: Synthetic oligonucleotide
agaagccaaaauuaaaagaagucca

SEQ ID NO: 120975 - RNA, 25 nt, Artificial Sequence
  Description of Artificial Sequence: Synthetic oligonucleotide
auuaaaagaaguccaggugagguua

SEQ ID NO: 120976 - RNA, 25 nt, Artificial Sequence
  Description of Artificial Sequence: Synthetic oligonucleotide
gaauccggauuaucgggaagaggac

SEQ ID NO: 120977 - RNA, 25 nt, Artificial Sequence
  Description of Artificial Sequence: Synthetic oligonucleotide
aaugugacaucaaagcaaguauugu

SEQ ID NO: 120978 - RNA, 25 nt, Artificial Sequence
  Description of Artificial Sequence: Synthetic oligonucleotide
caucaaagcaaguauuguagcacuc

SEQ ID NO: 120979 - RNA, 25 nt, Artificial Sequence
  Description of Artificial Sequence: Synthetic oligonucleotide
agagagagaaaacaaaaccacaaau

SEQ ID NO: 120980 - RNA, 25 nt, Artificial Sequence
  Description of Artificial Sequence: Synthetic oligonucleotide
ucgcuguaguauuuaagcccauaca

SEQ ID NO: 120981 - RNA, 25 nt, Artificial Sequence
  Description of Artificial Sequence: Synthetic oligonucleotide
cgcuguaguauuuaagcccauacag

SEQ ID NO: 120982 - RNA, 25 nt, Artificial Sequence
  Description of Artificial Sequence: Synthetic oligonucleotide
auuuaagcccauacagaaaccuucc

SEQ ID NO: 120983 - RNA, 25 nt, Artificial Sequence
  Description of Artificial Sequence: Synthetic oligonucleotide
auuaaaauaaacaugguauaccuac

SEQ ID NO: 120984 - RNA, 25 nt, Artificial Sequence
  Description of Artificial Sequence: Synthetic oligonucleotide
cuguucugaucggccaguuuucgga

SEQ ID NO: 120985 - RNA, 25 nt, Artificial Sequence
  Description of Artificial Sequence: Synthetic oligonucleotide
aaauaauuugaacuuuggaacaggg

SEQ ID NO: 120986 - RNA, 25 nt, Artificial Sequence
  Description of Artificial Sequence: Synthetic oligonucleotide
ugcgaccuuaauuuaacuuuccagu

SEQ ID NO: 120987 - RNA, 25 nt, Artificial Sequence
  Description of Artificial Sequence: Synthetic oligonucleotide
cugagaaagcuaaaguuugguuuug

SEQ ID NO: 120988 - RNA, 25 nt, Artificial Sequence
  Description of Artificial Sequence: Synthetic oligonucleotide
aguaaagaugcuacuucccacugua

SEQ ID NO: 120989 - RNA, 25 nt, Artificial Sequence
  Description of Artificial Sequence: Synthetic oligonucleotide
cugcuuaauugcugauaccauauga

SEQ ID NO: 120990 - RNA, 25 nt, Artificial Sequence
  Description of Artificial Sequence: Synthetic oligonucleotide
uaccauaugaaugaaacaugggcug

SEQ ID NO: 120991 - RNA, 25 nt, Artificial Sequence
  Description of Artificial Sequence: Synthetic oligonucleotide
aacuuucuuauccaacuuuuucaua

SEQ ID NO: 120992 - RNA, 25 nt, Artificial Sequence
  Description of Artificial Sequence: Synthetic oligonucleotide
ccuugcaugacaucaugaggccgga

SEQ ID NO: 120993 - RNA, 25 nt, Artificial Sequence
  Description of Artificial Sequence: Synthetic oligonucleotide
ugaauuuguauaugacugcauuugu

SEQ ID NO: 120994 - RNA, 25 nt, Artificial Sequence
  Description of Artificial Sequence: Synthetic oligonucleotide
gaauccuaguagaauguuuacuacc

SEQ ID NO: 120995 - RNA, 25 nt, Artificial Sequence
  Description of Artificial Sequence: Synthetic oligonucleotide
gaaagggaagaauuuuuugaugaaa

SEQ ID NO: 120996 - RNA, 25 nt, Artificial Sequence
  Description of Artificial Sequence: Synthetic oligonucleotide
uaucggcaugccagugugugaauuu

SEQ ID NO: 120997 - RNA, 25 nt, Artificial Sequence
  Description of Artificial Sequence: Synthetic oligonucleotide
caccucauaguagagcaauguaugu

SEQ ID NO: 120998 - RNA, 25 nt, Artificial Sequence
  Description of Artificial Sequence: Synthetic oligonucleotide
ccagaauugccaaagcacauauaua

SEQ ID NO: 120999 - RNA, 25 nt, Artificial Sequence
  Description of Artificial Sequence: Synthetic oligonucleotide
uggugaucuggguaauaguuucucc

SEQ ID NO: 121000 - RNA, 25 nt, Artificial Sequence
  Description of Artificial Sequence: Synthetic oligonucleotide
gaucuggguaauaguuucuccaaau

SEQ ID NO: 121001 - RNA, 25 nt, Artificial Sequence
  Description of Artificial Sequence: Synthetic oligonucleotide
ggaugugaugaauacuuccuagaaa

SEQ ID NO: 121002 - RNA, 25 nt, Artificial Sequence
  Description of Artificial Sequence: Synthetic oligonucleotide
cauuuccacagcuacaccauauaug

SEQ ID NO: 121003 - RNA, 25 nt, Artificial Sequence
  Description of Artificial Sequence: Synthetic oligonucleotide
acagcuacaccauauaugaauggag

SEQ ID NO: 121004 - RNA, 25 nt, Artificial Sequence
  Description of Artificial Sequence: Synthetic oligonucleotide
ugcaguucuuacacgagaagaagau

SEQ ID NO: 121005 - RNA, 25 nt, Artificial Sequence
  Description of Artificial Sequence: Synthetic oligonucleotide
acgagaagaagaucauuuacaggga

SEQ ID NO: 121006 - RNA, 25 nt, Artificial Sequence
  Description of Artificial Sequence: Synthetic oligonucleotide
cgagaagaagaucauuuacagggac

SEQ ID NO: 121007 - RNA, 25 nt, Artificial Sequence
  Description of Artificial Sequence: Synthetic oligonucleotide
aagaagaucauuuacagggaccuga

SEQ ID NO: 121008 - RNA, 25 nt, Artificial Sequence
  Description of Artificial Sequence: Synthetic oligonucleotide
agaggaagagguguuugacugcauc

SEQ ID NO: 121009 - RNA, 25 nt, Artificial Sequence
  Description of Artificial Sequence: Synthetic oligonucleotide
gaggaagagguguuugacugcaucg

SEQ ID NO: 121010 - RNA, 25 nt, Artificial Sequence
  Description of Artificial Sequence: Synthetic oligonucleotide
cuacuuugagggcgaguucacaggg

SEQ ID NO: 121011 - RNA, 25 nt, Artificial Sequence
  Description of Artificial Sequence: Synthetic oligonucleotide
agggcaucuccuggcaccucugucc

SEQ ID NO: 121012 - RNA, 25 nt, Artificial Sequence
  Description of Artificial Sequence: Synthetic oligonucleotide
ggagugauaugguuugucuuuuuaa

SEQ ID NO: 121013 - RNA, 25 nt, Artificial Sequence
  Description of Artificial Sequence: Synthetic oligonucleotide
gagugauaugguuugucuuuuuaag

SEQ ID NO: 121014 - RNA, 25 nt, Artificial Sequence
  Description of Artificial Sequence: Synthetic oligonucleotide
ugcaguaaagauccuaaagguuguc

SEQ ID NO: 121015 - RNA, 25 nt, Artificial Sequence
  Description of Artificial Sequence: Synthetic oligonucleotide
aguaaagauccuaaagguugucgac

SEQ ID NO: 121016 - RNA, 25 nt, Artificial Sequence
  Description of Artificial Sequence: Synthetic oligonucleotide
ugacaaaggacaaccuggcaauugu

SEQ ID NO: 121017 - RNA, 25 nt, Artificial Sequence
  Description of Artificial Sequence: Synthetic oligonucleotide
gcaauugugacccaguggugcgagg

SEQ ID NO: 121018 - RNA, 25 nt, Artificial Sequence
  Description of Artificial Sequence: Synthetic oligonucleotide
aacaucauccauagagacaugaaau

SEQ ID NO: 121019 - RNA, 25 nt, Artificial Sequence
  Description of Artificial Sequence: Synthetic oligonucleotide
ugaaauccaacaauauauuucucca

SEQ ID NO: 121020 - RNA, 25 nt, Artificial Sequence
  Description of Artificial Sequence: Synthetic oligonucleotide
aacaauauauuucuccaugaaggcu

SEQ ID NO: 121021 - RNA, 25 nt, Artificial Sequence
  Description of Artificial Sequence: Synthetic oligonucleotide
aacaguaaagucacgcuggaguggu

SEQ ID NO: 121022 - RNA, 25 nt, Artificial Sequence
  Description of Artificial Sequence: Synthetic oligonucleotide
ugugaagaaaguaaaggaagagagg

SEQ ID NO: 121023 - RNA, 25 nt, Artificial Sequence
  Description of Artificial Sequence: Synthetic oligonucleotide
cuuccgagccauccuugcaucgggc

SEQ ID NO: 121024 - RNA, 25 nt, Artificial Sequence
  Description of Artificial Sequence: Synthetic oligonucleotide
aauggagguugaauauccuacugug

SEQ ID NO: 121025 - RNA, 25 nt, Artificial Sequence
  Description of Artificial Sequence: Synthetic oligonucleotide
ggagguugaauauccuacuguguaa

SEQ ID NO: 121026 - RNA, 25 nt, Artificial Sequence
  Description of Artificial Sequence: Synthetic oligonucleotide
auuuugaguuuucccuuguagugua

SEQ ID NO: 121027 - RNA, 25 nt, Artificial Sequence
  Description of Artificial Sequence: Synthetic oligonucleotide
uauccuguuuguucuuuguugauug

SEQ ID NO: 121028 - RNA, 25 nt, Artificial Sequence
  Description of Artificial Sequence: Synthetic oligonucleotide
ccuguuuguucuuuguugauugaaa

SEQ ID NO: 121029 - RNA, 25 nt, Artificial Sequence
  Description of Artificial Sequence: Synthetic oligonucleotide
cucuacagccuucuuuuucuuccau

SEQ ID NO: 121030 - RNA, 25 nt, Artificial Sequence
  Description of Artificial Sequence: Synthetic oligonucleotide
ucuuccauagcuaaucuuccuucua

SEQ ID NO: 121031 - RNA, 25 nt, Artificial Sequence
  Description of Artificial Sequence: Synthetic oligonucleotide
auaaucuuccuguugaaugcuucau

SEQ ID NO: 121032 - RNA, 25 nt, Artificial Sequence
  Description of Artificial Sequence: Synthetic oligonucleotide
uaaucuuccuguugaaugcuucaug

SEQ ID NO: 121033 - RNA, 25 nt, Artificial Sequence
  Description of Artificial Sequence: Synthetic oligonucleotide
cuucaugacuugaauucuacuuuga

SEQ ID NO: 121034 - RNA, 25 nt, Artificial Sequence
  Description of Artificial Sequence: Synthetic oligonucleotide
aagagggagagaagcaacuacagac

SEQ ID NO: 121035 - RNA, 25 nt, Artificial Sequence
  Description of Artificial Sequence: Synthetic oligonucleotide
cgucuccuaccagaccaaggucaac

SEQ ID NO: 121036 - RNA, 25 nt, Artificial Sequence
  Description of Artificial Sequence: Synthetic oligonucleotide
gaucaaucggcccgacuaucucgac

SEQ ID NO: 121037 - RNA, 25 nt, Artificial Sequence
  Description of Artificial Sequence: Synthetic oligonucleotide
ggacgaacauccaaccuucccaaac

SEQ ID NO: 121038 - RNA, 25 nt, Artificial Sequence
  Description of Artificial Sequence: Synthetic oligonucleotide
agggucggaacccaagcuuagaacu

SEQ ID NO: 121039 - RNA, 25 nt, Artificial Sequence
  Description of Artificial Sequence: Synthetic oligonucleotide
ucggaacccaagcuuagaacuuuaa

SEQ ID NO: 121040 - RNA, 25 nt, Artificial Sequence
  Description of Artificial Sequence: Synthetic oligonucleotide
acccaagcuuagaacuuuaagcaac

SEQ ID NO: 121041 - RNA, 25 nt, Artificial Sequence
  Description of Artificial Sequence: Synthetic oligonucleotide
gaacuuuaagcaacaagaccaccac

SEQ ID NO: 121042 - RNA, 25 nt, Artificial Sequence
  Description of Artificial Sequence: Synthetic oligonucleotide
acuauucaguggcgagaaauaaagu

SEQ ID NO: 121043 - RNA, 25 nt, Artificial Sequence
  Description of Artificial Sequence: Synthetic oligonucleotide
cuauucaguggcgagaaauaaaguu

SEQ ID NO: 121044 - RNA, 25 nt, Artificial Sequence
  Description of Artificial Sequence: Synthetic oligonucleotide
aaacacagauaacaggaaaugaucc

SEQ ID NO: 121045 - RNA, 25 nt, Artificial Sequence
  Description of Artificial Sequence: Synthetic oligonucleotide
cuuaagaaaagagaagaaaugaaac

SEQ ID NO: 121046 - RNA, 25 nt, Artificial Sequence
  Description of Artificial Sequence: Synthetic oligonucleotide
cugaaggaguguguuuccauccucc

SEQ ID NO: 121047 - RNA, 25 nt, Artificial Sequence
  Description of Artificial Sequence: Synthetic oligonucleotide
ucaccgcgggacugaaaaucuuuga

SEQ ID NO: 121048 - RNA, 25 nt, Artificial Sequence
  Description of Artificial Sequence: Synthetic oligonucleotide
agcagaaauaagcgugccguucagg

SEQ ID NO: 121049 - RNA, 25 nt, Artificial Sequence
  Description of Artificial Sequence: Synthetic oligonucleotide
aagcgugccguucaggguccagaag

SEQ ID NO: 121050 - RNA, 25 nt, Artificial Sequence
  Description of Artificial Sequence: Synthetic oligonucleotide
agaaacagucacucaagacugcuug

SEQ ID NO: 121051 - RNA, 25 nt, Artificial Sequence
  Description of Artificial Sequence: Synthetic oligonucleotide
agaggaagaagguccaugucuuugg

SEQ ID NO: 121052 - RNA, 25 nt, Artificial Sequence
  Description of Artificial Sequence: Synthetic oligonucleotide
uguauucaaaauaugccugaaacac

SEQ ID NO: 121053 - RNA, 25 nt, Artificial Sequence
  Description of Artificial Sequence: Synthetic oligonucleotide
auuuuccucccuuucucuguaccuc

SEQ ID NO: 121054 - RNA, 25 nt, Artificial Sequence
  Description of Artificial Sequence: Synthetic oligonucleotide
caaagaaagauagagcaagacaaga

SEQ ID NO: 121055 - RNA, 25 nt, Artificial Sequence
  Description of Artificial Sequence: Synthetic oligonucleotide
aagaaagauagagcaagacaagaaa

SEQ ID NO: 121056 - RNA, 25 nt, Artificial Sequence
  Description of Artificial Sequence: Synthetic oligonucleotide
gaaagcauuuguuuguacaagaucc

SEQ ID NO: 121057 - RNA, 25 nt, Artificial Sequence
  Description of Artificial Sequence: Synthetic oligonucleotide
ugaguuaaacgaacguacuugcaga

SEQ ID NO: 121058 - RNA, 25 nt, Artificial Sequence
  Description of Artificial Sequence: Synthetic oligonucleotide
acugauacagaacgaucgauacaga

SEQ ID NO: 121059 - RNA, 25 nt, Artificial Sequence
  Description of Artificial Sequence: Synthetic oligonucleotide
auauuauauauauauaaaaauaaau

SEQ ID NO: 121060 - RNA, 25 nt, Artificial Sequence
  Description of Artificial Sequence: Synthetic oligonucleotide
auuauauauauauaaaaauaaauau

SEQ ID NO: 121061 - RNA, 25 nt, Artificial Sequence
  Description of Artificial Sequence: Synthetic oligonucleotide
ucacuggauguauuugacugcugug

SEQ ID NO: 121062 - RNA, 25 nt, Artificial Sequence
  Description of Artificial Sequence: Synthetic oligonucleotide
cagggaagaggaggagaugagagac

SEQ ID NO: 121063 - RNA, 25 nt, Artificial Sequence
  Description of Artificial Sequence: Synthetic oligonucleotide
augaucuuuuuuuugucccacuugg

SEQ ID NO: 121064 - RNA, 27 nt, Artificial Sequence
  Description of Artificial Sequence: Synthetic oligonucleotide
ggccgugaacuccucaucaaaauaccu

SEQ ID NO: 121065 - RNA, 27 nt, Artificial Sequence
  Description of Artificial Sequence: Synthetic oligonucleotide
uggugugauggugaucaucugggccgu

SEQ ID NO: 121066 - RNA, 27 nt, Artificial Sequence
  Description of Artificial Sequence: Synthetic oligonucleotide
aaacccgcaggauaguuuucuucccua

SEQ ID NO: 121067 - RNA, 27 nt, Artificial Sequence
  Description of Artificial Sequence: Synthetic oligonucleotide
caaacuggaugaaauaaauuaaaaccc

SEQ ID NO: 121068 - RNA, 27 nt, Artificial Sequence
  Description of Artificial Sequence: Synthetic oligonucleotide
agaaguccuuaacauuucccuacguga

SEQ ID NO: 121069 - RNA, 27 nt, Artificial Sequence
  Description of Artificial Sequence: Synthetic oligonucleotide
cucugucccacuggguaaacccuggcc

SEQ ID NO: 121070 - RNA, 27 nt, Artificial Sequence
  Description of Artificial Sequence: Synthetic oligonucleotide
cacaauaacaaauuuaaaccuugcucc

SEQ ID NO: 121071 - RNA, 27 nt, Artificial Sequence
  Description of Artificial Sequence: Synthetic oligonucleotide
aaaugcauuugaacaacauaauacaca

SEQ ID NO: 121072 - RNA, 27 nt, Artificial Sequence
  Description of Artificial Sequence: Synthetic oligonucleotide
ggcuuuccugucacaaagauuaaaaac

SEQ ID NO: 121073 - RNA, 27 nt, Artificial Sequence
  Description of Artificial Sequence: Synthetic oligonucleotide
agggcuuuccugucacaaagauuaaaa

SEQ ID NO: 121074 - RNA, 27 nt, Artificial Sequence
  Description of Artificial Sequence: Synthetic oligonucleotide
ggccaugcugggagacauaagcagcag

SEQ ID NO: 121075 - RNA, 27 nt, Artificial Sequence
  Description of Artificial Sequence: Synthetic oligonucleotide
ucagggagaagcuucugaaacacuucu

SEQ ID NO: 121076 - RNA, 27 nt, Artificial Sequence
  Description of Artificial Sequence: Synthetic oligonucleotide
aagggcuucuuccuuauugauggucag

SEQ ID NO: 121077 - RNA, 27 nt, Artificial Sequence
  Description of Artificial Sequence: Synthetic oligonucleotide
ugaagggcuucuuccuuauugaugguc

SEQ ID NO: 121078 - RNA, 27 nt, Artificial Sequence
  Description of Artificial Sequence: Synthetic oligonucleotide
cgcugaagggcuucuuccuuauugaug

SEQ ID NO: 121079 - RNA, 27 nt, Artificial Sequence
  Description of Artificial Sequence: Synthetic oligonucleotide
gccgcugaagggcuucuuccuuauuga

SEQ ID NO: 121080 - RNA, 27 nt, Artificial Sequence
  Description of Artificial Sequence: Synthetic oligonucleotide
acuggccgcugaagggcuucuuccuua

SEQ ID NO: 121081 - RNA, 27 nt, Artificial Sequence
  Description of Artificial Sequence: Synthetic oligonucleotide
cggagcuuuucaccuuuaguuaugcuu

SEQ ID NO: 121082 - RNA, 27 nt, Artificial Sequence
  Description of Artificial Sequence: Synthetic oligonucleotide
ccggagcuuuucaccuuuaguuaugcu

SEQ ID NO: 121083 - RNA, 27 nt, Artificial Sequence
  Description of Artificial Sequence: Synthetic oligonucleotide
cagacuguugacuggcgugauguaguu

SEQ ID NO: 121084 - RNA, 27 nt, Artificial Sequence
  Description of Artificial Sequence: Synthetic oligonucleotide
cuuuugaacucugcuuaaauccagugg

SEQ ID NO: 121085 - RNA, 27 nt, Artificial Sequence
  Description of Artificial Sequence: Synthetic oligonucleotide
gcuuuugaacucugcuuaaauccagug

SEQ ID NO: 121086 - RNA, 27 nt, Artificial Sequence
  Description of Artificial Sequence: Synthetic oligonucleotide
agggcuuuugaacucugcuuaaaucca

SEQ ID NO: 121087 - RNA, 27 nt, Artificial Sequence
  Description of Artificial Sequence: Synthetic oligonucleotide
aagggcuuuugaacucugcuuaaaucc

SEQ ID NO: 121088 - RNA, 27 nt, Artificial Sequence
  Description of Artificial Sequence: Synthetic oligonucleotide
ugaagggcuuuugaacucugcuuaaau

SEQ ID NO: 121089 - RNA, 27 nt, Artificial Sequence
  Description of Artificial Sequence: Synthetic oligonucleotide
cugaagggcuuuugaacucugcuuaaa

SEQ ID NO: 121090 - RNA, 27 nt, Artificial Sequence
  Description of Artificial Sequence: Synthetic oligonucleotide
cgcugaagggcuuuugaacucugcuua

SEQ ID NO: 121091 - RNA, 27 nt, Artificial Sequence
  Description of Artificial Sequence: Synthetic oligonucleotide
cgagcggcuucacucagacccugaggc

SEQ ID NO: 121092 - RNA, 27 nt, Artificial Sequence
  Description of Artificial Sequence: Synthetic oligonucleotide
uugacuggcgugauguaguugcuuggg

SEQ ID NO: 121093 - RNA, 27 nt, Artificial Sequence
  Description of Artificial Sequence: Synthetic oligonucleotide
cacgcaccaagaagcugccauugaucc

SEQ ID NO: 121094 - RNA, 27 nt, Artificial Sequence
  Description of Artificial Sequence: Synthetic oligonucleotide
cugaugaauccaaugugggcuggaauc

SEQ ID NO: 121095 - RNA, 27 nt, Artificial Sequence
  Description of Artificial Sequence: Synthetic oligonucleotide
cuuagguauuccacauucucagcugug

SEQ ID NO: 121096 - RNA, 27 nt, Artificial Sequence
  Description of Artificial Sequence: Synthetic oligonucleotide
ugagccucaaauuaggagauacguuuu

SEQ ID NO: 121097 - RNA, 27 nt, Artificial Sequence
  Description of Artificial Sequence: Synthetic oligonucleotide
ccaauuguagagaaauuauuuuaggaa

SEQ ID NO: 121098 - RNA, 27 nt, Artificial Sequence
  Description of Artificial Sequence: Synthetic oligonucleotide
ggcuccuaacuagcugaaucuuccaau

SEQ ID NO: 121099 - RNA, 27 nt, Artificial Sequence
  Description of Artificial Sequence: Synthetic oligonucleotide
guggauauugacuaggagaguuuaaaa

SEQ ID NO: 121100 - RNA, 27 nt, Artificial Sequence
  Description of Artificial Sequence: Synthetic oligonucleotide
ugugacugaacauaacuguaggcugaa

SEQ ID NO: 121101 - RNA, 27 nt, Artificial Sequence
  Description of Artificial Sequence: Synthetic oligonucleotide
guaugugugugugacugaacauaacug

SEQ ID NO: 121102 - RNA, 27 nt, Artificial Sequence
  Description of Artificial Sequence: Synthetic oligonucleotide
aagcaaaaggaacauuuuguaugugug

SEQ ID NO: 121103 - RNA, 27 nt, Artificial Sequence
  Description of Artificial Sequence: Synthetic oligonucleotide
aaaaauuacuuuaaaagcaaaaggaac

SEQ ID NO: 121104 - RNA, 27 nt, Artificial Sequence
  Description of Artificial Sequence: Synthetic oligonucleotide
ccauugacuguugcuucacaggucaga

SEQ ID NO: 121105 - RNA, 27 nt, Artificial Sequence
  Description of Artificial Sequence: Synthetic oligonucleotide
auugguuugucgaugugugagauaguu

SEQ ID NO: 121106 - RNA, 27 nt, Artificial Sequence
  Description of Artificial Sequence: Synthetic oligonucleotide
agugguagcaguacaauugaggacaag

SEQ ID NO: 121107 - RNA, 27 nt, Artificial Sequence
  Description of Artificial Sequence: Synthetic oligonucleotide
uaagaccgcuugccagcuacgguuuca

SEQ ID NO: 121108 - RNA, 27 nt, Artificial Sequence
  Description of Artificial Sequence: Synthetic oligonucleotide
agccgguaagaccgcuugccagcuacg

SEQ ID NO: 121109 - RNA, 27 nt, Artificial Sequence
  Description of Artificial Sequence: Synthetic oligonucleotide
gguaacccaucuuuuaaccauacaacu

SEQ ID NO: 121110 - RNA, 27 nt, Artificial Sequence
  Description of Artificial Sequence: Synthetic oligonucleotide
ucgcagguaacccaucuuuuaaccaua

SEQ ID NO: 121111 - RNA, 27 nt, Artificial Sequence
  Description of Artificial Sequence: Synthetic oligonucleotide
cucagcaagauuguauaauucccugca

SEQ ID NO: 121112 - RNA, 27 nt, Artificial Sequence
  Description of Artificial Sequence: Synthetic oligonucleotide
acuguuuuaugcucagcaagauuguau

SEQ ID NO: 121113 - RNA, 27 nt, Artificial Sequence
  Description of Artificial Sequence: Synthetic oligonucleotide
aggauaaaggacucuucauuauuggaa

SEQ ID NO: 121114 - RNA, 27 nt, Artificial Sequence
  Description of Artificial Sequence: Synthetic oligonucleotide
caacuugcguuggaacauccaaagugu

SEQ ID NO: 121115 - RNA, 27 nt, Artificial Sequence
  Description of Artificial Sequence: Synthetic oligonucleotide
augguuucaguuuaguggaagcauuua

SEQ ID NO: 121116 - RNA, 27 nt, Artificial Sequence
  Description of Artificial Sequence: Synthetic oligonucleotide
auauuuaacaaagucaaacuuucucac

SEQ ID NO: 121117 - RNA, 27 nt, Artificial Sequence
  Description of Artificial Sequence: Synthetic oligonucleotide
aacuuuuaauauacaguaguucuuuuc

SEQ ID NO: 121118 - RNA, 27 nt, Artificial Sequence
  Description of Artificial Sequence: Synthetic oligonucleotide
guuaagucaaaacccguauuucuaaag

SEQ ID NO: 121119 - RNA, 27 nt, Artificial Sequence
  Description of Artificial Sequence: Synthetic oligonucleotide
gugcugaguuugcuguacccauguuga

SEQ ID NO: 121120 - RNA, 27 nt, Artificial Sequence
  Description of Artificial Sequence: Synthetic oligonucleotide
ugaggucagcaucuucugugucuuuac

SEQ ID NO: 121121 - RNA, 27 nt, Artificial Sequence
  Description of Artificial Sequence: Synthetic oligonucleotide
gcgaucugaauaaaccucccuacuagc

SEQ ID NO: 121122 - RNA, 27 nt, Artificial Sequence
  Description of Artificial Sequence: Synthetic oligonucleotide
aucccagaacccugcugcagaaggcca

SEQ ID NO: 121123 - RNA, 27 nt, Artificial Sequence
  Description of Artificial Sequence: Synthetic oligonucleotide
cauaauuuccaauauguaccagaccuu

SEQ ID NO: 121124 - RNA, 27 nt, Artificial Sequence
  Description of Artificial Sequence: Synthetic oligonucleotide
cuagugcuuccaucggaaggacuaggu

SEQ ID NO: 121125 - RNA, 27 nt, Artificial Sequence
  Description of Artificial Sequence: Synthetic oligonucleotide
uccacauaaaaacaauauucacuggga

SEQ ID NO: 121126 - RNA, 27 nt, Artificial Sequence
  Description of Artificial Sequence: Synthetic oligonucleotide
ucuaccaauuccaacuugaauucauug

SEQ ID NO: 121127 - RNA, 27 nt, Artificial Sequence
  Description of Artificial Sequence: Synthetic oligonucleotide
ucuccaagucuaaaucuguguccugag

SEQ ID NO: 121128 - RNA, 27 nt, Artificial Sequence
  Description of Artificial Sequence: Synthetic oligonucleotide
uggaauacuguaacugugcuuugagga

SEQ ID NO: 121129 - RNA, 27 nt, Artificial Sequence
  Description of Artificial Sequence: Synthetic oligonucleotide
uuaauucaucagugguggcagugguag

SEQ ID NO: 121130 - RNA, 27 nt, Artificial Sequence
  Description of Artificial Sequence: Synthetic oligonucleotide
gugaugauguggcacuaguaguuucuu

SEQ ID NO: 121131 - RNA, 27 nt, Artificial Sequence
  Description of Artificial Sequence: Synthetic oligonucleotide
ucuguuuggugaggcuguccgacuuug

SEQ ID NO: 121132 - RNA, 27 nt, Artificial Sequence
  Description of Artificial Sequence: Synthetic oligonucleotide
ccaucauguuccauuuuucgcuuucuc

SEQ ID NO: 121133 - RNA, 27 nt, Artificial Sequence
  Description of Artificial Sequence: Synthetic oligonucleotide
gcagucuacaugcuaaaucagagggua

SEQ ID NO: 121134 - RNA, 27 nt, Artificial Sequence
  Description of Artificial Sequence: Synthetic oligonucleotide
cauaaauagauccuuaaauagcucaaa

SEQ ID NO: 121135 - RNA, 27 nt, Artificial Sequence
  Description of Artificial Sequence: Synthetic oligonucleotide
ugauaauagugcuuuuucaccuuuuuc

SEQ ID NO: 121136 - RNA, 27 nt, Artificial Sequence
  Description of Artificial Sequence: Synthetic oligonucleotide
gcagaacugauaauagugcuuuuucac

SEQ ID NO: 121137 - RNA, 27 nt, Artificial Sequence
  Description of Artificial Sequence: Synthetic oligonucleotide
guagguuuaaucuuucuuuucagccau

SEQ ID NO: 121138 - RNA, 27 nt, Artificial Sequence
  Description of Artificial Sequence: Synthetic oligonucleotide
agaaggauuuuauuauaaggguuuaau

SEQ ID NO: 121139 - RNA, 27 nt, Artificial Sequence
  Description of Artificial Sequence: Synthetic oligonucleotide
gucuacagcauuggcuaauaguaugaa

SEQ ID NO: 121140 - RNA, 27 nt, Artificial Sequence
  Description of Artificial Sequence: Synthetic oligonucleotide
cuauuccuaucaaaaugcuucugucua

SEQ ID NO: 121141 - RNA, 27 nt, Artificial Sequence
  Description of Artificial Sequence: Synthetic oligonucleotide
ucagggccauuaucuuauuugcucuau

SEQ ID NO: 121142 - RNA, 27 nt, Artificial Sequence
  Description of Artificial Sequence: Synthetic oligonucleotide
ugcuugaggaagagaaaaauguugguc

SEQ ID NO: 121143 - RNA, 27 nt, Artificial Sequence
  Description of Artificial Sequence: Synthetic oligonucleotide
ugggcugaacuuuucucauacuuaaag

SEQ ID NO: 121144 - RNA, 27 nt, Artificial Sequence
  Description of Artificial Sequence: Synthetic oligonucleotide
gguucagcagccaucuuuauuccugcg

SEQ ID NO: 121145 - RNA, 27 nt, Artificial Sequence
  Description of Artificial Sequence: Synthetic oligonucleotide
ugaagagaacuuggucauucaaauuuc

SEQ ID NO: 121146 - RNA, 27 nt, Artificial Sequence
  Description of Artificial Sequence: Synthetic oligonucleotide
cucuaggcuggcuaucuuuauacauac

SEQ ID NO: 121147 - RNA, 27 nt, Artificial Sequence
  Description of Artificial Sequence: Synthetic oligonucleotide
acacuucacagagauaguuacagccau

SEQ ID NO: 121148 - RNA, 27 nt, Artificial Sequence
  Description of Artificial Sequence: Synthetic oligonucleotide
uugaaauuuucucacacuucacagaga

SEQ ID NO: 121149 - RNA, 27 nt, Artificial Sequence
  Description of Artificial Sequence: Synthetic oligonucleotide
ucaggaggauucauuuccuuaaaggaa

SEQ ID NO: 121150 - RNA, 27 nt, Artificial Sequence
  Description of Artificial Sequence: Synthetic oligonucleotide
auaugaugucacuuuuuguauccuuga

SEQ ID NO: 121151 - RNA, 27 nt, Artificial Sequence
  Description of Artificial Sequence: Synthetic oligonucleotide
uaugaugaagauucaaauugcaucuua

SEQ ID NO: 121152 - RNA, 27 nt, Artificial Sequence
  Description of Artificial Sequence: Synthetic oligonucleotide
uuaauagcuagucuucguuuugaacag

SEQ ID NO: 121153 - RNA, 27 nt, Artificial Sequence
  Description of Artificial Sequence: Synthetic oligonucleotide
auuuuuaguagagaugagguuucacca

SEQ ID NO: 121154 - RNA, 27 nt, Artificial Sequence
  Description of Artificial Sequence: Synthetic oligonucleotide
aggcgagauagagcuucucuuucguuc

SEQ ID NO: 121155 - RNA, 27 nt, Artificial Sequence
  Description of Artificial Sequence: Synthetic oligonucleotide
aacuggaccgaaggcgcuuguggagaa

SEQ ID NO: 121156 - RNA, 27 nt, Artificial Sequence
  Description of Artificial Sequence: Synthetic oligonucleotide
gcggcuacaucuuuggaaucuucuccu

SEQ ID NO: 121157 - RNA, 27 nt, Artificial Sequence
  Description of Artificial Sequence: Synthetic oligonucleotide
caagucuccucauugaauccagauugg

SEQ ID NO: 121158 - RNA, 27 nt, Artificial Sequence
  Description of Artificial Sequence: Synthetic oligonucleotide
uccucacuacucucaaaucuguucugg

SEQ ID NO: 121159 - RNA, 27 nt, Artificial Sequence
  Description of Artificial Sequence: Synthetic oligonucleotide
uuuguacucaucugcacagcucuggcu

SEQ ID NO: 121160 - RNA, 27 nt, Artificial Sequence
  Description of Artificial Sequence: Synthetic oligonucleotide
gcccauuaacaacaacaaucugaggug

SEQ ID NO: 121161 - RNA, 27 nt, Artificial Sequence
  Description of Artificial Sequence: Synthetic oligonucleotide
aauaaauuaaaaauaauuaaaauagug

SEQ ID NO: 121162 - RNA, 27 nt, Artificial Sequence
  Description of Artificial Sequence: Synthetic oligonucleotide
cauauuuaaauauuaauaaauuaaaaa

SEQ ID NO: 121163 - RNA, 27 nt, Artificial Sequence
  Description of Artificial Sequence: Synthetic oligonucleotide
gaaacaaaggauauucaaacugcauag

SEQ ID NO: 121164 - RNA, 27 nt, Artificial Sequence
  Description of Artificial Sequence: Synthetic oligonucleotide
caaacacuuagacgccagcagcauggg

SEQ ID NO: 121165 - RNA, 27 nt, Artificial Sequence
  Description of Artificial Sequence: Synthetic oligonucleotide
uuugucacaggugaaaugcacaucuga

SEQ ID NO: 121166 - RNA, 27 nt, Artificial Sequence
  Description of Artificial Sequence: Synthetic oligonucleotide
uaauucagccuggcacagguuuugauc

SEQ ID NO: 121167 - RNA, 27 nt, Artificial Sequence
  Description of Artificial Sequence: Synthetic oligonucleotide
auuguaagaaugacuacccacauucac

SEQ ID NO: 121168 - RNA, 27 nt, Artificial Sequence
  Description of Artificial Sequence: Synthetic oligonucleotide
caauuguaagaaugacuacccacauuc

SEQ ID NO: 121169 - RNA, 27 nt, Artificial Sequence
  Description of Artificial Sequence: Synthetic oligonucleotide
guacacucucugaugcucauuuucaua

SEQ ID NO: 121170 - RNA, 27 nt, Artificial Sequence
  Description of Artificial Sequence: Synthetic oligonucleotide
cugcugaguucuacaugaaaagcaaau

SEQ ID NO: 121171 - RNA, 27 nt, Artificial Sequence
  Description of Artificial Sequence: Synthetic oligonucleotide
uacugaaaauaaauauagaaauacaac

SEQ ID NO: 121172 - RNA, 27 nt, Artificial Sequence
  Description of Artificial Sequence: Synthetic oligonucleotide
uuccauuuaagaaacauuaaucaaaac

SEQ ID NO: 121173 - RNA, 27 nt, Artificial Sequence
  Description of Artificial Sequence: Synthetic oligonucleotide
acaauuuuaggcacuauacacguuguu

SEQ ID NO: 121174 - RNA, 27 nt, Artificial Sequence
  Description of Artificial Sequence: Synthetic oligonucleotide
ccagauguuaguagccaaggauauggu

SEQ ID NO: 121175 - RNA, 27 nt, Artificial Sequence
  Description of Artificial Sequence: Synthetic oligonucleotide
agcucacagucuccagauguuaguagc

SEQ ID NO: 121176 - RNA, 27 nt, Artificial Sequence
  Description of Artificial Sequence: Synthetic oligonucleotide
auuaauaaaaagcacacaacuuauggc

SEQ ID NO: 121177 - RNA, 27 nt, Artificial Sequence
  Description of Artificial Sequence: Synthetic oligonucleotide
aauguaagaagagccaaaaugaugcau

SEQ ID NO: 121178 - RNA, 27 nt, Artificial Sequence
  Description of Artificial Sequence: Synthetic oligonucleotide
acauuuuuacaaauguaagaagagcca

SEQ ID NO: 121179 - RNA, 27 nt, Artificial Sequence
  Description of Artificial Sequence: Synthetic oligonucleotide
aauaugaauuaagaugaccuaaucugu

SEQ ID NO: 121180 - RNA, 27 nt, Artificial Sequence
  Description of Artificial Sequence: Synthetic oligonucleotide
ucaugauuaguucuuucaauuccaucc

SEQ ID NO: 121181 - RNA, 27 nt, Artificial Sequence
  Description of Artificial Sequence: Synthetic oligonucleotide
cccaagagcagaaggaaugagugugca

SEQ ID NO: 121182 - RNA, 27 nt, Artificial Sequence
  Description of Artificial Sequence: Synthetic oligonucleotide
cucaaagcuacugguuaccucuacacc

SEQ ID NO: 121183 - RNA, 27 nt, Artificial Sequence
  Description of Artificial Sequence: Synthetic oligonucleotide
ugaaauauuacguggcaugugguuggg

SEQ ID NO: 121184 - RNA, 27 nt, Artificial Sequence
  Description of Artificial Sequence: Synthetic oligonucleotide
agugaagagaauaacuuguuuccgaag

SEQ ID NO: 121185 - RNA, 27 nt, Artificial Sequence
  Description of Artificial Sequence: Synthetic oligonucleotide
uuucuuagcauuaguuauugggaguga

SEQ ID NO: 121186 - RNA, 27 nt, Artificial Sequence
  Description of Artificial Sequence: Synthetic oligonucleotide
uugauuuucagcauuucuuagcauuag

SEQ ID NO: 121187 - RNA, 27 nt, Artificial Sequence
  Description of Artificial Sequence: Synthetic oligonucleotide
aaaguaaucauauuuagagaaagacag

SEQ ID NO: 121188 - RNA, 27 nt, Artificial Sequence
  Description of Artificial Sequence: Synthetic oligonucleotide
uguagaacaaaaugccugaaauucagc

SEQ ID NO: 121189 - RNA, 27 nt, Artificial Sequence
  Description of Artificial Sequence: Synthetic oligonucleotide
gagagucccgggugagagggaaucgcc

SEQ ID NO: 121190 - RNA, 27 nt, Artificial Sequence
  Description of Artificial Sequence: Synthetic oligonucleotide
cuuuacuuuaaagguucacuuuccuug

SEQ ID NO: 121191 - RNA, 27 nt, Artificial Sequence
  Description of Artificial Sequence: Synthetic oligonucleotide
ccaggcuuccagagcaugcagccuccu

SEQ ID NO: 121192 - RNA, 27 nt, Artificial Sequence
  Description of Artificial Sequence: Synthetic oligonucleotide
cucucuuuuguuuucuguucagagaaa

SEQ ID NO: 121193 - RNA, 27 nt, Artificial Sequence
  Description of Artificial Sequence: Synthetic oligonucleotide
cggcauaacugauuacagccaaguuca

SEQ ID NO: 121194 - RNA, 27 nt, Artificial Sequence
  Description of Artificial Sequence: Synthetic oligonucleotide
uggacuucuuuuaauuuuggcuucuuc

SEQ ID NO: 121195 - RNA, 27 nt, Artificial Sequence
  Description of Artificial Sequence: Synthetic oligonucleotide
uaaccucaccuggacuucuuuuaauuu

SEQ ID NO: 121196 - RNA, 27 nt, Artificial Sequence
  Description of Artificial Sequence: Synthetic oligonucleotide
guccucuucccgauaauccggauucag

SEQ ID NO: 121197 - RNA, 27 nt, Artificial Sequence
  Description of Artificial Sequence: Synthetic oligonucleotide
acaauacuugcuuugaugucacauuaa

SEQ ID NO: 121198 - RNA, 27 nt, Artificial Sequence
  Description of Artificial Sequence: Synthetic oligonucleotide
gagugcuacaauacuugcuuugauguc

SEQ ID NO: 121199 - RNA, 27 nt, Artificial Sequence
  Description of Artificial Sequence: Synthetic oligonucleotide
auuugugguuuuguuuucucucucucu

SEQ ID NO: 121200 - RNA, 27 nt, Artificial Sequence
  Description of Artificial Sequence: Synthetic oligonucleotide
uguaugggcuuaaauacuacagcgagg

SEQ ID NO: 121201 - RNA, 27 nt, Artificial Sequence
  Description of Artificial Sequence: Synthetic oligonucleotide
cuguaugggcuuaaauacuacagcgag

SEQ ID NO: 121202 - RNA, 27 nt, Artificial Sequence
  Description of Artificial Sequence: Synthetic oligonucleotide
ggaagguuucuguaugggcuuaaauac

SEQ ID NO: 121203 - RNA, 27 nt, Artificial Sequence
  Description of Artificial Sequence: Synthetic oligonucleotide
guagguauaccauguuuauuuuaauac

SEQ ID NO: 121204 - RNA, 27 nt, Artificial Sequence
  Description of Artificial Sequence: Synthetic oligonucleotide
uccgaaaacuggccgaucagaacagcc

SEQ ID NO: 121205 - RNA, 27 nt, Artificial Sequence
  Description of Artificial Sequence: Synthetic oligonucleotide
cccuguuccaaaguucaaauuauuugu

SEQ ID NO: 121206 - RNA, 27 nt, Artificial Sequence
  Description of Artificial Sequence: Synthetic oligonucleotide
acuggaaaguuaaauuaaggucgcaau

SEQ ID NO: 121207 - RNA, 27 nt, Artificial Sequence
  Description of Artificial Sequence: Synthetic oligonucleotide
caaaaccaaacuuuagcuuucucagcc

SEQ ID NO: 121208 - RNA, 27 nt, Artificial Sequence
  Description of Artificial Sequence: Synthetic oligonucleotide
uacagugggaaguagcaucuuuacuuu

SEQ ID NO: 121209 - RNA, 27 nt, Artificial Sequence
  Description of Artificial Sequence: Synthetic oligonucleotide
ucauaugguaucagcaauuaagcagua

SEQ ID NO: 121210 - RNA, 27 nt, Artificial Sequence
  Description of Artificial Sequence: Synthetic oligonucleotide
cagcccauguuucauucauaugguauc

SEQ ID NO: 121211 - RNA, 27 nt, Artificial Sequence
  Description of Artificial Sequence: Synthetic oligonucleotide
uaugaaaaaguuggauaagaaaguugg

SEQ ID NO: 121212 - RNA, 27 nt, Artificial Sequence
  Description of Artificial Sequence: Synthetic oligonucleotide
uccggccucaugaugucaugcaaggcu

SEQ ID NO: 121213 - RNA, 27 nt, Artificial Sequence
  Description of Artificial Sequence: Synthetic oligonucleotide
acaaaugcagucauauacaaauucagg

SEQ ID NO: 121214 - RNA, 27 nt, Artificial Sequence
  Description of Artificial Sequence: Synthetic oligonucleotide
gguaguaaacauucuacuaggauucuu

SEQ ID NO: 121215 - RNA, 27 nt, Artificial Sequence
  Description of Artificial Sequence: Synthetic oligonucleotide
uuucaucaaaaaauucuucccuuucug

SEQ ID NO: 121216 - RNA, 27 nt, Artificial Sequence
  Description of Artificial Sequence: Synthetic oligonucleotide
aaauucacacacuggcaugccgauagc

SEQ ID NO: 121217 - RNA, 27 nt, Artificial Sequence
  Description of Artificial Sequence: Synthetic oligonucleotide
acauacauugcucuacuaugaggugaa

SEQ ID NO: 121218 - RNA, 27 nt, Artificial Sequence
  Description of Artificial Sequence: Synthetic oligonucleotide
uauauaugugcuuuggcaauucuggug

SEQ ID NO: 121219 - RNA, 27 nt, Artificial Sequence
  Description of Artificial Sequence: Synthetic oligonucleotide
ggagaaacuauuacccagaucaccacu

SEQ ID NO: 121220 - RNA, 27 nt, Artificial Sequence
  Description of Artificial Sequence: Synthetic oligonucleotide
auuuggagaaacuauuacccagaucac

SEQ ID NO: 121221 - RNA, 27 nt, Artificial Sequence
  Description of Artificial Sequence: Synthetic oligonucleotide
uuucuaggaaguauucaucacauccac

SEQ ID NO: 121222 - RNA, 27 nt, Artificial Sequence
  Description of Artificial Sequence: Synthetic oligonucleotide
cauauaugguguagcuguggaaaugcg

SEQ ID NO: 121223 - RNA, 27 nt, Artificial Sequence
  Description of Artificial Sequence: Synthetic oligonucleotide
cuccauucauauaugguguagcugugg

SEQ ID NO: 121224 - RNA, 27 nt, Artificial Sequence
  Description of Artificial Sequence: Synthetic oligonucleotide
aucuucuucucguguaagaacugcagc

SEQ ID NO: 121225 - RNA, 27 nt, Artificial Sequence
  Description of Artificial Sequence: Synthetic oligonucleotide
ucccuguaaaugaucuucuucucgugu

SEQ ID NO: 121226 - RNA, 27 nt, Artificial Sequence
  Description of Artificial Sequence: Synthetic oligonucleotide
gucccuguaaaugaucuucuucucgug

SEQ ID NO: 121227 - RNA, 27 nt, Artificial Sequence
  Description of Artificial Sequence: Synthetic oligonucleotide
ucaggucccuguaaaugaucuucuucu

SEQ ID NO: 121228 - RNA, 27 nt, Artificial Sequence
  Description of Artificial Sequence: Synthetic oligonucleotide
gaugcagucaaacaccucuuccucugu

SEQ ID NO: 121229 - RNA, 27 nt, Artificial Sequence
  Description of Artificial Sequence: Synthetic oligonucleotide
cgaugcagucaaacaccucuuccucug

SEQ ID NO: 121230 - RNA, 27 nt, Artificial Sequence
  Description of Artificial Sequence: Synthetic oligonucleotide
cccugugaacucgcccucaaaguagcg

SEQ ID NO: 121231 - RNA, 27 nt, Artificial Sequence
  Description of Artificial Sequence: Synthetic oligonucleotide
ggacagaggugccaggagaugcccuca

SEQ ID NO: 121232 - RNA, 27 nt, Artificial Sequence
  Description of Artificial Sequence: Synthetic oligonucleotide
uuaaaaagacaaaccauaucacuccuu

SEQ ID NO: 121233 - RNA, 27 nt, Artificial Sequence
  Description of Artificial Sequence: Synthetic oligonucleotide
cuuaaaaagacaaaccauaucacuccu

SEQ ID NO: 121234 - RNA, 27 nt, Artificial Sequence
  Description of Artificial Sequence: Synthetic oligonucleotide
gacaaccuuuaggaucuuuacugcaac

SEQ ID NO: 121235 - RNA, 27 nt, Artificial Sequence
  Description of Artificial Sequence: Synthetic oligonucleotide
gucgacaaccuuuaggaucuuuacugc

SEQ ID NO: 121236 - RNA, 27 nt, Artificial Sequence
  Description of Artificial Sequence: Synthetic oligonucleotide
acaauugccagguuguccuuugucaug

SEQ ID NO: 121237 - RNA, 27 nt, Artificial Sequence
  Description of Artificial Sequence: Synthetic oligonucleotide
ccucgcaccacugggucacaauugcca

SEQ ID NO: 121238 - RNA, 27 nt, Artificial Sequence
  Description of Artificial Sequence: Synthetic oligonucleotide
auuucaugucucuauggaugauguucu

SEQ ID NO: 121239 - RNA, 27 nt, Artificial Sequence
  Description of Artificial Sequence: Synthetic oligonucleotide
uggagaaauauauuguuggauuucaug

SEQ ID NO: 121240 - RNA, 27 nt, Artificial Sequence
  Description of Artificial Sequence: Synthetic oligonucleotide
agccuucauggagaaauauauuguugg

SEQ ID NO: 121241 - RNA, 27 nt, Artificial Sequence
  Description of Artificial Sequence: Synthetic oligonucleotide
accacuccagcgugacuuuacuguugc

SEQ ID NO: 121242 - RNA, 27 nt, Artificial Sequence
  Description of Artificial Sequence: Synthetic oligonucleotide
ccucucuuccuuuacuuucuucacaca

SEQ ID NO: 121243 - RNA, 27 nt, Artificial Sequence
  Description of Artificial Sequence: Synthetic oligonucleotide
gcccgaugcaaggauggcucggaagcg

SEQ ID NO: 121244 - RNA, 27 nt, Artificial Sequence
  Description of Artificial Sequence: Synthetic oligonucleotide
cacaguaggauauucaaccuccauuuc

SEQ ID NO: 121245 - RNA, 27 nt, Artificial Sequence
  Description of Artificial Sequence: Synthetic oligonucleotide
uuacacaguaggauauucaaccuccau

SEQ ID NO: 121246 - RNA, 27 nt, Artificial Sequence
  Description of Artificial Sequence: Synthetic oligonucleotide
uacacuacaagggaaaacucaaaaucu

SEQ ID NO: 121247 - RNA, 27 nt, Artificial Sequence
  Description of Artificial Sequence: Synthetic oligonucleotide
caaucaacaaagaacaaacaggauaaa

SEQ ID NO: 121248 - RNA, 27 nt, Artificial Sequence
  Description of Artificial Sequence: Synthetic oligonucleotide
uuucaaucaacaaagaacaaacaggau

SEQ ID NO: 121249 - RNA, 27 nt, Artificial Sequence
  Description of Artificial Sequence: Synthetic oligonucleotide
auggaagaaaaagaaggcuguagagaa

SEQ ID NO: 121250 - RNA, 27 nt, Artificial Sequence
  Description of Artificial Sequence: Synthetic oligonucleotide
uagaaggaagauuagcuauggaagaaa

SEQ ID NO: 121251 - RNA, 27 nt, Artificial Sequence
  Description of Artificial Sequence: Synthetic oligonucleotide
augaagcauucaacaggaagauuauuu

SEQ ID NO: 121252 - RNA, 27 nt, Artificial Sequence
  Description of Artificial Sequence: Synthetic oligonucleotide
caugaagcauucaacaggaagauuauu

SEQ ID NO: 121253 - RNA, 27 nt, Artificial Sequence
  Description of Artificial Sequence: Synthetic oligonucleotide
ucaaaguagaauucaagucaugaagca

SEQ ID NO: 121254 - RNA, 27 nt, Artificial Sequence
  Description of Artificial Sequence: Synthetic oligonucleotide
gucuguaguugcuucucucccucuuag

SEQ ID NO: 121255 - RNA, 27 nt, Artificial Sequence
  Description of Artificial Sequence: Synthetic oligonucleotide
guugaccuuggucugguaggagacggc

SEQ ID NO: 121256 - RNA, 27 nt, Artificial Sequence
  Description of Artificial Sequence: Synthetic oligonucleotide
gucgagauagucgggccgauugaucuc

SEQ ID NO: 121257 - RNA, 27 nt, Artificial Sequence
  Description of Artificial Sequence: Synthetic oligonucleotide
guuugggaagguuggauguucguccuc

SEQ ID NO: 121258 - RNA, 27 nt, Artificial Sequence
  Description of Artificial Sequence: Synthetic oligonucleotide
aguucuaagcuuggguuccgacccuaa

SEQ ID NO: 121259 - RNA, 27 nt, Artificial Sequence
  Description of Artificial Sequence: Synthetic oligonucleotide
uuaaaguucuaagcuuggguuccgacc

SEQ ID NO: 121260 - RNA, 27 nt, Artificial Sequence
  Description of Artificial Sequence: Synthetic oligonucleotide
guugcuuaaaguucuaagcuuggguuc

SEQ ID NO: 121261 - RNA, 27 nt, Artificial Sequence
  Description of Artificial Sequence: Synthetic oligonucleotide
gugguggucuuguugcuuaaaguucua

SEQ ID NO: 121262 - RNA, 27 nt, Artificial Sequence
  Description of Artificial Sequence: Synthetic oligonucleotide
acuuuauuucucgccacugaauaguag

SEQ ID NO: 121263 - RNA, 27 nt, Artificial Sequence
  Description of Artificial Sequence: Synthetic oligonucleotide
aacuuuauuucucgccacugaauagua

SEQ ID NO: 121264 - RNA, 27 nt, Artificial Sequence
  Description of Artificial Sequence: Synthetic oligonucleotide
ggaucauuuccuguuaucuguguuugu

SEQ ID NO: 121265 - RNA, 27 nt, Artificial Sequence
  Description of Artificial Sequence: Synthetic oligonucleotide
guuucauuucuucucuuuucuuaaggc

SEQ ID NO: 121266 - RNA, 27 nt, Artificial Sequence
  Description of Artificial Sequence: Synthetic oligonucleotide
ggaggauggaaacacacuccuucaguu

SEQ ID NO: 121267 - RNA, 27 nt, Artificial Sequence
  Description of Artificial Sequence: Synthetic oligonucleotide
ucaaagauuuucagucccgcggugaca

SEQ ID NO: 121268 - RNA, 27 nt, Artificial Sequence
  Description of Artificial Sequence: Synthetic oligonucleotide
ccugaacggcacgcuuauuucugcugu

SEQ ID NO: 121269 - RNA, 27 nt, Artificial Sequence
  Description of Artificial Sequence: Synthetic oligonucleotide
cuucuggacccugaacggcacgcuuau

SEQ ID NO: 121270 - RNA, 27 nt, Artificial Sequence
  Description of Artificial Sequence: Synthetic oligonucleotide
caagcagucuugagugacuguuucuuc

SEQ ID NO: 121271 - RNA, 27 nt, Artificial Sequence
  Description of Artificial Sequence: Synthetic oligonucleotide
ccaaagacauggaccuucuuccucuga

SEQ ID NO: 121272 - RNA, 27 nt, Artificial Sequence
  Description of Artificial Sequence: Synthetic oligonucleotide
guguuucaggcauauuuugaauacauc

SEQ ID NO: 121273 - RNA, 27 nt, Artificial Sequence
  Description of Artificial Sequence: Synthetic oligonucleotide
gagguacagagaaagggaggaaaauag

SEQ ID NO: 121274 - RNA, 27 nt, Artificial Sequence
  Description of Artificial Sequence: Synthetic oligonucleotide
ucuugucuugcucuaucuuucuuuggu

SEQ ID NO: 121275 - RNA, 27 nt, Artificial Sequence
  Description of Artificial Sequence: Synthetic oligonucleotide
uuucuugucuugcucuaucuuucuuug

SEQ ID NO: 121276 - RNA, 27 nt, Artificial Sequence
  Description of Artificial Sequence: Synthetic oligonucleotide
ggaucuuguacaaacaaaugcuuucuc

SEQ ID NO: 121277 - RNA, 27 nt, Artificial Sequence
  Description of Artificial Sequence: Synthetic oligonucleotide
ucugcaaguacguucguuuaacucaag

SEQ ID NO: 121278 - RNA, 27 nt, Artificial Sequence
  Description of Artificial Sequence: Synthetic oligonucleotide
ucuguaucgaucguucuguaucagucu

SEQ ID NO: 121279 - RNA, 27 nt, Artificial Sequence
  Description of Artificial Sequence: Synthetic oligonucleotide
auuuauuuuuauauauauauaauauau

SEQ ID NO: 121280 - RNA, 27 nt, Artificial Sequence
  Description of Artificial Sequence: Synthetic oligonucleotide
auauuuauuuuuauauauauauaauau

SEQ ID NO: 121281 - RNA, 27 nt, Artificial Sequence
  Description of Artificial Sequence: Synthetic oligonucleotide
cacagcagucaaauacauccagugaag

SEQ ID NO: 121282 - RNA, 27 nt, Artificial Sequence
  Description of Artificial Sequence: Synthetic oligonucleotide
gucucucaucuccuccucuucccuguc

SEQ ID NO: 121283 - RNA, 27 nt, Artificial Sequence
  Description of Artificial Sequence: Synthetic oligonucleotide
ccaagugggacaaaaaaaagaucaugc

SEQ ID NO: 121284 - RNA, 14 nt, Artificial Sequence
  Description of Artificial Sequence: Synthetic oligonucleotide
guauuuugaugagg

SEQ ID NO: 121285 - RNA, 12 nt, Artificial Sequence
  Description of Artificial Sequence: Synthetic oligonucleotide
ggcccagaugau

SEQ ID NO: 121286 - RNA, 14 nt, Artificial Sequence
  Description of Artificial Sequence: Synthetic oligonucleotide
gggaagaaaacuau

SEQ ID NO: 121287 - RNA, 15 nt, Artificial Sequence
  Description of Artificial Sequence: Synthetic oligonucleotide
guuuuaauuuauuuc

SEQ ID NO: 121288 - RNA, 12 nt, Artificial Sequence
  Description of Artificial Sequence: Synthetic oligonucleotide
acguagggaaau

SEQ ID NO: 121289 - RNA, 12 nt, Artificial Sequence
  Description of Artificial Sequence: Synthetic oligonucleotide
ccaggguuuacc

SEQ ID NO: 121290 - RNA, 11 nt, Artificial Sequence
  Description of Artificial Sequence: Synthetic oligonucleotide
agcaagguuua

SEQ ID NO: 121291 - RNA, 12 nt, Artificial Sequence
  Description of Artificial Sequence: Synthetic oligonucleotide
uguauuauguug

SEQ ID NO: 121292 - RNA, 15 nt, Artificial Sequence
  Description of Artificial Sequence: Synthetic oligonucleotide
uuuuaaucuuuguga

SEQ ID NO: 121293 - RNA, 14 nt, Artificial Sequence
  Description of Artificial Sequence: Synthetic oligonucleotide
uuaaucuuugugac

SEQ ID NO: 121294 - RNA, 13 nt, Artificial Sequence
  Description of Artificial Sequence: Synthetic oligonucleotide
gcugcuuaugucu

SEQ ID NO: 121295 - RNA, 14 nt, Artificial Sequence
  Description of Artificial Sequence: Synthetic oligonucleotide
aaguguuucagaag

SEQ ID NO: 121296 - RNA, 13 nt, Artificial Sequence
  Description of Artificial Sequence: Synthetic oligonucleotide
gaccaucaauaag

SEQ ID NO: 121297 - RNA, 13 nt, Artificial Sequence
  Description of Artificial Sequence: Synthetic oligonucleotide
ccaucaauaagga

SEQ ID NO: 121298 - RNA, 14 nt, Artificial Sequence
  Description of Artificial Sequence: Synthetic oligonucleotide
ucaauaaggaagaa

SEQ ID NO: 121299 - RNA, 14 nt, Artificial Sequence
  Description of Artificial Sequence: Synthetic oligonucleotide
aauaaggaagaagc

SEQ ID NO: 121300 - RNA, 13 nt, Artificial Sequence
  Description of Artificial Sequence: Synthetic oligonucleotide
aggaagaagcccu

SEQ ID NO: 121301 - RNA, 13 nt, Artificial Sequence
  Description of Artificial Sequence: Synthetic oligonucleotide
gcauaacuaaagg

SEQ ID NO: 121302 - RNA, 14 nt, Artificial Sequence
  Description of Artificial Sequence: Synthetic oligonucleotide
cauaacuaaaggug

SEQ ID NO: 121303 - RNA, 12 nt, Artificial Sequence
  Description of Artificial Sequence: Synthetic oligonucleotide
cuacaucacgcc

SEQ ID NO: 121304 - RNA, 12 nt, Artificial Sequence
  Description of Artificial Sequence: Synthetic oligonucleotide
acuggauuuaag

SEQ ID NO: 121305 - RNA, 12 nt, Artificial Sequence
  Description of Artificial Sequence: Synthetic oligonucleotide
cuggauuuaagc

SEQ ID NO: 121306 - RNA, 13 nt, Artificial Sequence
  Description of Artificial Sequence: Synthetic oligonucleotide
gauuuaagcagag

SEQ ID NO: 121307 - RNA, 13 nt, Artificial Sequence
  Description of Artificial Sequence: Synthetic oligonucleotide
auuuaagcagagu

SEQ ID NO: 121308 - RNA, 13 nt, Artificial Sequence
  Description of Artificial Sequence: Synthetic oligonucleotide
uuaagcagaguuc

SEQ ID NO: 121309 - RNA, 13 nt, Artificial Sequence
  Description of Artificial Sequence: Synthetic oligonucleotide
uaagcagaguuca

SEQ ID NO: 121310 - RNA, 14 nt, Artificial Sequence
  Description of Artificial Sequence: Synthetic oligonucleotide
agcagaguucaaaa

SEQ ID NO: 121311 - RNA, 12 nt, Artificial Sequence
  Description of Artificial Sequence: Synthetic oligonucleotide
cucagggucuga

SEQ ID NO: 121312 - RNA, 13 nt, Artificial Sequence
  Description of Artificial Sequence: Synthetic oligonucleotide
caagcaacuacau

SEQ ID NO: 121313 - RNA, 12 nt, Artificial Sequence
  Description of Artificial Sequence: Synthetic oligonucleotide
aucaauggcagc

SEQ ID NO: 121314 - RNA, 11 nt, Artificial Sequence
  Description of Artificial Sequence: Synthetic oligonucleotide
uuccagcccac

SEQ ID NO: 121315 - RNA, 12 nt, Artificial Sequence
  Description of Artificial Sequence: Synthetic oligonucleotide
cagcugagaaug

SEQ ID NO: 121316 - RNA, 13 nt, Artificial Sequence
  Description of Artificial Sequence: Synthetic oligonucleotide
aacguaucuccua

SEQ ID NO: 121317 - RNA, 14 nt, Artificial Sequence
  Description of Artificial Sequence: Synthetic oligonucleotide
ccuaaaauaauuuc

SEQ ID NO: 121318 - RNA, 13 nt, Artificial Sequence
  Description of Artificial Sequence: Synthetic oligonucleotide
uggaagauucagc

SEQ ID NO: 121319 - RNA, 12 nt, Artificial Sequence
  Description of Artificial Sequence: Synthetic oligonucleotide
uuaaacucuccu

SEQ ID NO: 121320 - RNA, 12 nt, Artificial Sequence
  Description of Artificial Sequence: Synthetic oligonucleotide
cagccuacaguu

SEQ ID NO: 121321 - RNA, 13 nt, Artificial Sequence
  Description of Artificial Sequence: Synthetic oligonucleotide
guuauguucaguc

SEQ ID NO: 121322 - RNA, 13 nt, Artificial Sequence
  Description of Artificial Sequence: Synthetic oligonucleotide
cacauacaaaaug

SEQ ID NO: 121323 - RNA, 9 nt, Artificial Sequence
  Description of Artificial Sequence: Synthetic oligonucleotide
uccuuuugc

SEQ ID NO: 121324 - RNA, 12 nt, Artificial Sequence
  Description of Artificial Sequence: Synthetic oligonucleotide
ugaccugugaag

SEQ ID NO: 121325 - RNA, 12 nt, Artificial Sequence
  Description of Artificial Sequence: Synthetic oligonucleotide
cuaucucacaca

SEQ ID NO: 121326 - RNA, 13 nt, Artificial Sequence
  Description of Artificial Sequence: Synthetic oligonucleotide
uguccucaauugu

SEQ ID NO: 121327 - RNA, 12 nt, Artificial Sequence
  Description of Artificial Sequence: Synthetic oligonucleotide
aaaccguagcug

SEQ ID NO: 121328 - RNA, 12 nt, Artificial Sequence
  Description of Artificial Sequence: Synthetic oligonucleotide
uagcuggcaagc

SEQ ID NO: 121329 - RNA, 14 nt, Artificial Sequence
  Description of Artificial Sequence: Synthetic oligonucleotide
uuguaugguuaaaa

SEQ ID NO: 121330 - RNA, 14 nt, Artificial Sequence
  Description of Artificial Sequence: Synthetic oligonucleotide
ugguuaaaagaugg

SEQ ID NO: 121331 - RNA, 13 nt, Artificial Sequence
  Description of Artificial Sequence: Synthetic oligonucleotide
cagggaauuauac

SEQ ID NO: 121332 - RNA, 12 nt, Artificial Sequence
  Description of Artificial Sequence: Synthetic oligonucleotide
acaaucuugcug

SEQ ID NO: 121333 - RNA, 13 nt, Artificial Sequence
  Description of Artificial Sequence: Synthetic oligonucleotide
ccaauaaugaaga

SEQ ID NO: 121334 - RNA, 13 nt, Artificial Sequence
  Description of Artificial Sequence: Synthetic oligonucleotide
acuuuggauguuc

SEQ ID NO: 121335 - RNA, 12 nt, Artificial Sequence
  Description of Artificial Sequence: Synthetic oligonucleotide
aaugcuuccacu

SEQ ID NO: 121336 - RNA, 11 nt, Artificial Sequence
  Description of Artificial Sequence: Synthetic oligonucleotide
gagaaaguuug

SEQ ID NO: 121337 - RNA, 11 nt, Artificial Sequence
  Description of Artificial Sequence: Synthetic oligonucleotide
aaagaacuacu

SEQ ID NO: 121338 - RNA, 12 nt, Artificial Sequence
  Description of Artificial Sequence: Synthetic oligonucleotide
uuagaaauacgg

SEQ ID NO: 121339 - RNA, 12 nt, Artificial Sequence
  Description of Artificial Sequence: Synthetic oligonucleotide
aacauggguaca

SEQ ID NO: 121340 - RNA, 14 nt, Artificial Sequence
  Description of Artificial Sequence: Synthetic oligonucleotide
aaagacacagaaga

SEQ ID NO: 121341 - RNA, 11 nt, Artificial Sequence
  Description of Artificial Sequence: Synthetic oligonucleotide
uaguagggagg

SEQ ID NO: 121342 - RNA, 12 nt, Artificial Sequence
  Description of Artificial Sequence: Synthetic oligonucleotide
gccuucugcagc

SEQ ID NO: 121343 - RNA, 10 nt, Artificial Sequence
  Description of Artificial Sequence: Synthetic oligonucleotide
ggucugguac

SEQ ID NO: 121344 - RNA, 12 nt, Artificial Sequence
  Description of Artificial Sequence: Synthetic oligonucleotide
cuaguccuuccg

SEQ ID NO: 121345 - RNA, 12 nt, Artificial Sequence
  Description of Artificial Sequence: Synthetic oligonucleotide
ccagugaauauu

SEQ ID NO: 121346 - RNA, 13 nt, Artificial Sequence
  Description of Artificial Sequence: Synthetic oligonucleotide
augaauucaaguu

SEQ ID NO: 121347 - RNA, 12 nt, Artificial Sequence
  Description of Artificial Sequence: Synthetic oligonucleotide
caggacacagau

SEQ ID NO: 121348 - RNA, 12 nt, Artificial Sequence
  Description of Artificial Sequence: Synthetic oligonucleotide
cucaaagcacag

SEQ ID NO: 121349 - RNA, 10 nt, Artificial Sequence
  Description of Artificial Sequence: Synthetic oligonucleotide
accacugcca

SEQ ID NO: 121350 - RNA, 13 nt, Artificial Sequence
  Description of Artificial Sequence: Synthetic oligonucleotide
gaaacuacuagug

SEQ ID NO: 121351 - RNA, 12 nt, Artificial Sequence
  Description of Artificial Sequence: Synthetic oligonucleotide
aagucggacagc

SEQ ID NO: 121352 - RNA, 13 nt, Artificial Sequence
  Description of Artificial Sequence: Synthetic oligonucleotide
gaaagcgaaaaau

SEQ ID NO: 121353 - RNA, 13 nt, Artificial Sequence
  Description of Artificial Sequence: Synthetic oligonucleotide
cccucugauuuag

SEQ ID NO: 121354 - RNA, 12 nt, Artificial Sequence
  Description of Artificial Sequence: Synthetic oligonucleotide
ugagcuauuuaa

SEQ ID NO: 121355 - RNA, 13 nt, Artificial Sequence
  Description of Artificial Sequence: Synthetic oligonucleotide
aaaaggugaaaaa

SEQ ID NO: 121356 - RNA, 14 nt, Artificial Sequence
  Description of Artificial Sequence: Synthetic oligonucleotide
gaaaaagcacuauu

SEQ ID NO: 121357 - RNA, 12 nt, Artificial Sequence
  Description of Artificial Sequence: Synthetic oligonucleotide
ggcugaaaagaa

SEQ ID NO: 121358 - RNA, 12 nt, Artificial Sequence
  Description of Artificial Sequence: Synthetic oligonucleotide
uaaacccuuaua

SEQ ID NO: 121359 - RNA, 13 nt, Artificial Sequence
  Description of Artificial Sequence: Synthetic oligonucleotide
cauacuauuagcc

SEQ ID NO: 121360 - RNA, 12 nt, Artificial Sequence
  Description of Artificial Sequence: Synthetic oligonucleotide
gacagaagcauu

SEQ ID NO: 121361 - RNA, 14 nt, Artificial Sequence
  Description of Artificial Sequence: Synthetic oligonucleotide
agagcaaauaagau

SEQ ID NO: 121362 - RNA, 14 nt, Artificial Sequence
  Description of Artificial Sequence: Synthetic oligonucleotide
ccaacauuuuucuc

SEQ ID NO: 121363 - RNA, 15 nt, Artificial Sequence
  Description of Artificial Sequence: Synthetic oligonucleotide
uuaaguaugagaaaa

SEQ ID NO: 121364 - RNA, 14 nt, Artificial Sequence
  Description of Artificial Sequence: Synthetic oligonucleotide
caggaauaaagaug

SEQ ID NO: 121365 - RNA, 13 nt, Artificial Sequence
  Description of Artificial Sequence: Synthetic oligonucleotide
aauuugaaugacc

SEQ ID NO: 121366 - RNA, 14 nt, Artificial Sequence
  Description of Artificial Sequence: Synthetic oligonucleotide
auguauaaagauag

SEQ ID NO: 121367 - RNA, 12 nt, Artificial Sequence
  Description of Artificial Sequence: Synthetic oligonucleotide
ggcuguaacuau

SEQ ID NO: 121368 - RNA, 11 nt, Artificial Sequence
  Description of Artificial Sequence: Synthetic oligonucleotide
ucugugaagug

SEQ ID NO: 121369 - RNA, 14 nt, Artificial Sequence
  Description of Artificial Sequence: Synthetic oligonucleotide
ccuuuaaggaaaug

SEQ ID NO: 121370 - RNA, 13 nt, Artificial Sequence
  Description of Artificial Sequence: Synthetic oligonucleotide
aaggauacaaaaa

SEQ ID NO: 121371 - RNA, 12 nt, Artificial Sequence
  Description of Artificial Sequence: Synthetic oligonucleotide
agaugcaauuug

SEQ ID NO: 121372 - RNA, 12 nt, Artificial Sequence
  Description of Artificial Sequence: Synthetic oligonucleotide
guucaaaacgaa

SEQ ID NO: 121373 - RNA, 11 nt, Artificial Sequence
  Description of Artificial Sequence: Synthetic oligonucleotide
gugaaaccuca

SEQ ID NO: 121374 - RNA, 13 nt, Artificial Sequence
  Description of Artificial Sequence: Synthetic oligonucleotide
acgaaagagaagc

SEQ ID NO: 121375 - RNA, 12 nt, Artificial Sequence
  Description of Artificial Sequence: Synthetic oligonucleotide
cuccacaagcgc

SEQ ID NO: 121376 - RNA, 14 nt, Artificial Sequence
  Description of Artificial Sequence: Synthetic oligonucleotide
gagaagauuccaaa

SEQ ID NO: 121377 - RNA, 13 nt, Artificial Sequence
  Description of Artificial Sequence: Synthetic oligonucleotide
aaucuggauucaa

SEQ ID NO: 121378 - RNA, 13 nt, Artificial Sequence
  Description of Artificial Sequence: Synthetic oligonucleotide
agaacagauuuga

SEQ ID NO: 121379 - RNA, 11 nt, Artificial Sequence
  Description of Artificial Sequence: Synthetic oligonucleotide
ccagagcugug

SEQ ID NO: 121380 - RNA, 12 nt, Artificial Sequence
  Description of Artificial Sequence: Synthetic oligonucleotide
ccucagauuguu

SEQ ID NO: 121381 - RNA, 12 nt, Artificial Sequence
  Description of Artificial Sequence: Synthetic oligonucleotide
cuauuuuaauua

SEQ ID NO: 121382 - RNA, 13 nt, Artificial Sequence
  Description of Artificial Sequence: Synthetic oligonucleotide
uuuaauuuauuaa

SEQ ID NO: 121383 - RNA, 12 nt, Artificial Sequence
  Description of Artificial Sequence: Synthetic oligonucleotide
augcaguuugaa

SEQ ID NO: 121384 - RNA, 11 nt, Artificial Sequence
  Description of Artificial Sequence: Synthetic oligonucleotide
caugcugcugg

SEQ ID NO: 121385 - RNA, 13 nt, Artificial Sequence
  Description of Artificial Sequence: Synthetic oligonucleotide
agaugugcauuuc

SEQ ID NO: 121386 - RNA, 12 nt, Artificial Sequence
  Description of Artificial Sequence: Synthetic oligonucleotide
ucaaaaccugug

SEQ ID NO: 121387 - RNA, 11 nt, Artificial Sequence
  Description of Artificial Sequence: Synthetic oligonucleotide
gaaugugggua

SEQ ID NO: 121388 - RNA, 10 nt, Artificial Sequence
  Description of Artificial Sequence: Synthetic oligonucleotide
auguggguag

SEQ ID NO: 121389 - RNA, 13 nt, Artificial Sequence
  Description of Artificial Sequence: Synthetic oligonucleotide
ugaaaaugagcau

SEQ ID NO: 121390 - RNA, 13 nt, Artificial Sequence
  Description of Artificial Sequence: Synthetic oligonucleotide
uugcuuuucaugu

SEQ ID NO: 121391 - RNA, 12 nt, Artificial Sequence
  Description of Artificial Sequence: Synthetic oligonucleotide
uguauuucuaua

SEQ ID NO: 121392 - RNA, 13 nt, Artificial Sequence
  Description of Artificial Sequence: Synthetic oligonucleotide
uuugauuaauguu

SEQ ID NO: 121393 - RNA, 12 nt, Artificial Sequence
  Description of Artificial Sequence: Synthetic oligonucleotide
caacguguauag

SEQ ID NO: 121394 - RNA, 12 nt, Artificial Sequence
  Description of Artificial Sequence: Synthetic oligonucleotide
cauauccuuggc

SEQ ID NO: 121395 - RNA, 13 nt, Artificial Sequence
  Description of Artificial Sequence: Synthetic oligonucleotide
uacuaacaucugg

SEQ ID NO: 121396 - RNA, 11 nt, Artificial Sequence
  Description of Artificial Sequence: Synthetic oligonucleotide
cauaaguugug

SEQ ID NO: 121397 - RNA, 12 nt, Artificial Sequence
  Description of Artificial Sequence: Synthetic oligonucleotide
gcaucauuuugg

SEQ ID NO: 121398 - RNA, 10 nt, Artificial Sequence
  Description of Artificial Sequence: Synthetic oligonucleotide
gcucuucuua

SEQ ID NO: 121399 - RNA, 10 nt, Artificial Sequence
  Description of Artificial Sequence: Synthetic oligonucleotide
agauuagguc

SEQ ID NO: 121400 - RNA, 12 nt, Artificial Sequence
  Description of Artificial Sequence: Synthetic oligonucleotide
auggaauugaaa

SEQ ID NO: 121401 - RNA, 13 nt, Artificial Sequence
  Description of Artificial Sequence: Synthetic oligonucleotide
cacacucauuccu

SEQ ID NO: 121402 - RNA, 12 nt, Artificial Sequence
  Description of Artificial Sequence: Synthetic oligonucleotide
uguagagguaac

SEQ ID NO: 121403 - RNA, 11 nt, Artificial Sequence
  Description of Artificial Sequence: Synthetic oligonucleotide
caaccacaugc

SEQ ID NO: 121404 - RNA, 12 nt, Artificial Sequence
  Description of Artificial Sequence: Synthetic oligonucleotide
ucggaaacaagu

SEQ ID NO: 121405 - RNA, 11 nt, Artificial Sequence
  Description of Artificial Sequence: Synthetic oligonucleotide
acucccaauaa

SEQ ID NO: 121406 - RNA, 13 nt, Artificial Sequence
  Description of Artificial Sequence: Synthetic oligonucleotide
aaugcuaagaaau

SEQ ID NO: 121407 - RNA, 11 nt, Artificial Sequence
  Description of Artificial Sequence: Synthetic oligonucleotide
gucuuucucua

SEQ ID NO: 121408 - RNA, 11 nt, Artificial Sequence
  Description of Artificial Sequence: Synthetic oligonucleotide
ugaauuucagg

SEQ ID NO: 121409 - RNA, 13 nt, Artificial Sequence
  Description of Artificial Sequence: Synthetic oligonucleotide
cgauucccucuca

SEQ ID NO: 121410 - RNA, 11 nt, Artificial Sequence
  Description of Artificial Sequence: Synthetic oligonucleotide
aggaaagugaa

SEQ ID NO: 121411 - RNA, 12 nt, Artificial Sequence
  Description of Artificial Sequence: Synthetic oligonucleotide
gaggcugcaugc

SEQ ID NO: 121412 - RNA, 11 nt, Artificial Sequence
  Description of Artificial Sequence: Synthetic oligonucleotide
ucucugaacag

SEQ ID NO: 121413 - RNA, 12 nt, Artificial Sequence
  Description of Artificial Sequence: Synthetic oligonucleotide
aacuuggcugua

SEQ ID NO: 121414 - RNA, 12 nt, Artificial Sequence
  Description of Artificial Sequence: Synthetic oligonucleotide
agaagccaaaau

SEQ ID NO: 121415 - RNA, 14 nt, Artificial Sequence
  Description of Artificial Sequence: Synthetic oligonucleotide
auuaaaagaagucc

SEQ ID NO: 121416 - RNA, 14 nt, Artificial Sequence
  Description of Artificial Sequence: Synthetic oligonucleotide
gaauccggauuauc

SEQ ID NO: 121417 - RNA, 12 nt, Artificial Sequence
  Description of Artificial Sequence: Synthetic oligonucleotide
aaugugacauca

SEQ ID NO: 121418 - RNA, 13 nt, Artificial Sequence
  Description of Artificial Sequence: Synthetic oligonucleotide
caucaaagcaagu

SEQ ID NO: 121419 - RNA, 11 nt, Artificial Sequence
  Description of Artificial Sequence: Synthetic oligonucleotide
agagagagaaa

SEQ ID NO: 121420 - RNA, 13 nt, Artificial Sequence
  Description of Artificial Sequence: Synthetic oligonucleotide
ucgcuguaguauu

SEQ ID NO: 121421 - RNA, 14 nt, Artificial Sequence
  Description of Artificial Sequence: Synthetic oligonucleotide
cgcuguaguauuua

SEQ ID NO: 121422 - RNA, 13 nt, Artificial Sequence
  Description of Artificial Sequence: Synthetic oligonucleotide
auuuaagcccaua

SEQ ID NO: 121423 - RNA, 15 nt, Artificial Sequence
  Description of Artificial Sequence: Synthetic oligonucleotide
auuaaaauaaacaug

SEQ ID NO: 121424 - RNA, 12 nt, Artificial Sequence
  Description of Artificial Sequence: Synthetic oligonucleotide
cuguucugaucg

SEQ ID NO: 121425 - RNA, 16 nt, Artificial Sequence
  Description of Artificial Sequence: Synthetic oligonucleotide
aaauaauuugaacuuu

SEQ ID NO: 121426 - RNA, 12 nt, Artificial Sequence
  Description of Artificial Sequence: Synthetic oligonucleotide
ugcgaccuuaau

SEQ ID NO: 121427 - RNA, 11 nt, Artificial Sequence
  Description of Artificial Sequence: Synthetic oligonucleotide
cugagaaagcu

SEQ ID NO: 121428 - RNA, 13 nt, Artificial Sequence
  Description of Artificial Sequence: Synthetic oligonucleotide
aguaaagaugcua

SEQ ID NO: 121429 - RNA, 12 nt, Artificial Sequence
  Description of Artificial Sequence: Synthetic oligonucleotide
cugcuuaauugc

SEQ ID NO: 121430 - RNA, 14 nt, Artificial Sequence
  Description of Artificial Sequence: Synthetic oligonucleotide
uaccauaugaauga

SEQ ID NO: 121431 - RNA, 12 nt, Artificial Sequence
  Description of Artificial Sequence: Synthetic oligonucleotide
aacuuucuuauc

SEQ ID NO: 121432 - RNA, 13 nt, Artificial Sequence
  Description of Artificial Sequence: Synthetic oligonucleotide
ccuugcaugacau

SEQ ID NO: 121433 - RNA, 14 nt, Artificial Sequence
  Description of Artificial Sequence: Synthetic oligonucleotide
ugaauuuguauaug

SEQ ID NO: 121434 - RNA, 12 nt, Artificial Sequence
  Description of Artificial Sequence: Synthetic oligonucleotide
gaauccuaguag

SEQ ID NO: 121435 - RNA, 10 nt, Artificial Sequence
  Description of Artificial Sequence: Synthetic oligonucleotide
gaaagggaag

SEQ ID NO: 121436 - RNA, 11 nt, Artificial Sequence
  Description of Artificial Sequence: Synthetic oligonucleotide
uaucggcaugc

SEQ ID NO: 121437 - RNA, 12 nt, Artificial Sequence
  Description of Artificial Sequence: Synthetic oligonucleotide
caccucauagua

SEQ ID NO: 121438 - RNA, 11 nt, Artificial Sequence
  Description of Artificial Sequence: Synthetic oligonucleotide
ccagaauugcc

SEQ ID NO: 121439 - RNA, 11 nt, Artificial Sequence
  Description of Artificial Sequence: Synthetic oligonucleotide
uggugaucugg

SEQ ID NO: 121440 - RNA, 12 nt, Artificial Sequence
  Description of Artificial Sequence: Synthetic oligonucleotide
gaucuggguaau

SEQ ID NO: 121441 - RNA, 12 nt, Artificial Sequence
  Description of Artificial Sequence: Synthetic oligonucleotide
ggaugugaugaa

SEQ ID NO: 121442 - RNA, 12 nt, Artificial Sequence
  Description of Artificial Sequence: Synthetic oligonucleotide
cauuuccacagc

SEQ ID NO: 121443 - RNA, 11 nt, Artificial Sequence
  Description of Artificial Sequence: Synthetic oligonucleotide
acagcuacacc

SEQ ID NO: 121444 - RNA, 12 nt, Artificial Sequence
  Description of Artificial Sequence: Synthetic oligonucleotide
ugcaguucuuac

SEQ ID NO: 121445 - RNA, 12 nt, Artificial Sequence
  Description of Artificial Sequence: Synthetic oligonucleotide
acgagaagaaga

SEQ ID NO: 121446 - RNA, 12 nt, Artificial Sequence
  Description of Artificial Sequence: Synthetic oligonucleotide
cgagaagaagau

SEQ ID NO: 121447 - RNA, 15 nt, Artificial Sequence
  Description of Artificial Sequence: Synthetic oligonucleotide
aagaagaucauuuac

SEQ ID NO: 121448 - RNA, 11 nt, Artificial Sequence
  Description of Artificial Sequence: Synthetic oligonucleotide
agaggaagagg

SEQ ID NO: 121449 - RNA, 12 nt, Artificial Sequence
  Description of Artificial Sequence: Synthetic oligonucleotide
gaggaagaggug

SEQ ID NO: 121450 - RNA, 13 nt, Artificial Sequence
  Description of Artificial Sequence: Synthetic oligonucleotide
cuacuuugagggc

SEQ ID NO: 121451 - RNA, 12 nt, Artificial Sequence
  Description of Artificial Sequence: Synthetic oligonucleotide
agggcaucuccu

SEQ ID NO: 121452 - RNA, 10 nt, Artificial Sequence
  Description of Artificial Sequence: Synthetic oligonucleotide
ggagugauau

SEQ ID NO: 121453 - RNA, 11 nt, Artificial Sequence
  Description of Artificial Sequence: Synthetic oligonucleotide
gagugauaugg

SEQ ID NO: 121454 - RNA, 12 nt, Artificial Sequence
  Description of Artificial Sequence: Synthetic oligonucleotide
ugcaguaaagau

SEQ ID NO: 121455 - RNA, 13 nt, Artificial Sequence
  Description of Artificial Sequence: Synthetic oligonucleotide
aguaaagauccua

SEQ ID NO: 121456 - RNA, 12 nt, Artificial Sequence
  Description of Artificial Sequence: Synthetic oligonucleotide
ugacaaaggaca

SEQ ID NO: 121457 - RNA, 13 nt, Artificial Sequence
  Description of Artificial Sequence: Synthetic oligonucleotide
gcaauugugaccc

SEQ ID NO: 121458 - RNA, 12 nt, Artificial Sequence
  Description of Artificial Sequence: Synthetic oligonucleotide
aacaucauccau

SEQ ID NO: 121459 - RNA, 12 nt, Artificial Sequence
  Description of Artificial Sequence: Synthetic oligonucleotide
ugaaauccaaca

SEQ ID NO: 121460 - RNA, 15 nt, Artificial Sequence
  Description of Artificial Sequence: Synthetic oligonucleotide
aacaauauauuucuc

SEQ ID NO: 121461 - RNA, 14 nt, Artificial Sequence
  Description of Artificial Sequence: Synthetic oligonucleotide
aacaguaaagucac

SEQ ID NO: 121462 - RNA, 14 nt, Artificial Sequence
  Description of Artificial Sequence: Synthetic oligonucleotide
ugugaagaaaguaa

SEQ ID NO: 121463 - RNA, 13 nt, Artificial Sequence
  Description of Artificial Sequence: Synthetic oligonucleotide
cuuccgagccauc

SEQ ID NO: 121464 - RNA, 12 nt, Artificial Sequence
  Description of Artificial Sequence: Synthetic oligonucleotide
aauggagguuga

SEQ ID NO: 121465 - RNA, 12 nt, Artificial Sequence
  Description of Artificial Sequence: Synthetic oligonucleotide
ggagguugaaua

SEQ ID NO: 121466 - RNA, 13 nt, Artificial Sequence
  Description of Artificial Sequence: Synthetic oligonucleotide
auuuugaguuuuc

SEQ ID NO: 121467 - RNA, 12 nt, Artificial Sequence
  Description of Artificial Sequence: Synthetic oligonucleotide
uauccuguuugu

SEQ ID NO: 121468 - RNA, 11 nt, Artificial Sequence
  Description of Artificial Sequence: Synthetic oligonucleotide
ccuguuuguuc

SEQ ID NO: 121469 - RNA, 10 nt, Artificial Sequence
  Description of Artificial Sequence: Synthetic oligonucleotide
cucuacagcc

SEQ ID NO: 121470 - RNA, 12 nt, Artificial Sequence
  Description of Artificial Sequence: Synthetic oligonucleotide
ucuuccauagcu

SEQ ID NO: 121471 - RNA, 12 nt, Artificial Sequence
  Description of Artificial Sequence: Synthetic oligonucleotide
auaaucuuccug

SEQ ID NO: 121472 - RNA, 12 nt, Artificial Sequence
  Description of Artificial Sequence: Synthetic oligonucleotide
uaaucuuccugu

SEQ ID NO: 121473 - RNA, 12 nt, Artificial Sequence
  Description of Artificial Sequence: Synthetic oligonucleotide
cuucaugacuug

SEQ ID NO: 121474 - RNA, 12 nt, Artificial Sequence
  Description of Artificial Sequence: Synthetic oligonucleotide
aagagggagaga

SEQ ID NO: 121475 - RNA, 12 nt, Artificial Sequence
  Description of Artificial Sequence: Synthetic oligonucleotide
cgucuccuacca

SEQ ID NO: 121476 - RNA, 12 nt, Artificial Sequence
  Description of Artificial Sequence: Synthetic oligonucleotide
gaucaaucggcc

SEQ ID NO: 121477 - RNA, 12 nt, Artificial Sequence
  Description of Artificial Sequence: Synthetic oligonucleotide
ggacgaacaucc

SEQ ID NO: 121478 - RNA, 11 nt, Artificial Sequence
  Description of Artificial Sequence: Synthetic oligonucleotide
agggucggaac

SEQ ID NO: 121479 - RNA, 10 nt, Artificial Sequence
  Description of Artificial Sequence: Synthetic oligonucleotide
ucggaaccca

SEQ ID NO: 121480 - RNA, 11 nt, Artificial Sequence
  Description of Artificial Sequence: Synthetic oligonucleotide
acccaagcuua

SEQ ID NO: 121481 - RNA, 14 nt, Artificial Sequence
  Description of Artificial Sequence: Synthetic oligonucleotide
gaacuuuaagcaac

SEQ ID NO: 121482 - RNA, 11 nt, Artificial Sequence
  Description of Artificial Sequence: Synthetic oligonucleotide
acuauucagug

SEQ ID NO: 121483 - RNA, 11 nt, Artificial Sequence
  Description of Artificial Sequence: Synthetic oligonucleotide
cuauucagugg

SEQ ID NO: 121484 - RNA, 13 nt, Artificial Sequence
  Description of Artificial Sequence: Synthetic oligonucleotide
aaacacagauaac

SEQ ID NO: 121485 - RNA, 12 nt, Artificial Sequence
  Description of Artificial Sequence: Synthetic oligonucleotide
cuuaagaaaaga

SEQ ID NO: 121486 - RNA, 12 nt, Artificial Sequence
  Description of Artificial Sequence: Synthetic oligonucleotide
cugaaggagugu

SEQ ID NO: 121487 - RNA, 10 nt, Artificial Sequence
  Description of Artificial Sequence: Synthetic oligonucleotide
ucaccgcggg

SEQ ID NO: 121488 - RNA, 14 nt, Artificial Sequence
  Description of Artificial Sequence: Synthetic oligonucleotide
agcagaaauaagcg

SEQ ID NO: 121489 - RNA, 12 nt, Artificial Sequence
  Description of Artificial Sequence: Synthetic oligonucleotide
aagcgugccguu

SEQ ID NO: 121490 - RNA, 12 nt, Artificial Sequence
  Description of Artificial Sequence: Synthetic oligonucleotide
agaaacagucac

SEQ ID NO: 121491 - RNA, 12 nt, Artificial Sequence
  Description of Artificial Sequence: Synthetic oligonucleotide
agaggaagaagg

SEQ ID NO: 121492 - RNA, 14 nt, Artificial Sequence
  Description of Artificial Sequence: Synthetic oligonucleotide
uguauucaaaauau

SEQ ID NO: 121493 - RNA, 13 nt, Artificial Sequence
  Description of Artificial Sequence: Synthetic oligonucleotide
auuuuccucccuu

SEQ ID NO: 121494 - RNA, 13 nt, Artificial Sequence
  Description of Artificial Sequence: Synthetic oligonucleotide
caaagaaagauag

SEQ ID NO: 121495 - RNA, 12 nt, Artificial Sequence
  Description of Artificial Sequence: Synthetic oligonucleotide
aagaaagauaga

SEQ ID NO: 121496 - RNA, 13 nt, Artificial Sequence
  Description of Artificial Sequence: Synthetic oligonucleotide
gaaagcauuuguu

SEQ ID NO: 121497 - RNA, 13 nt, Artificial Sequence
  Description of Artificial Sequence: Synthetic oligonucleotide
ugaguuaaacgaa

SEQ ID NO: 121498 - RNA, 12 nt, Artificial Sequence
  Description of Artificial Sequence: Synthetic oligonucleotide
acugauacagaa

SEQ ID NO: 121499 - RNA, 12 nt, Artificial Sequence
  Description of Artificial Sequence: Synthetic oligonucleotide
auauuauauaua

SEQ ID NO: 121500 - RNA, 12 nt, Artificial Sequence
  Description of Artificial Sequence: Synthetic oligonucleotide
auuauauauaua

SEQ ID NO: 121501 - RNA, 12 nt, Artificial Sequence
  Description of Artificial Sequence: Synthetic oligonucleotide
ucacuggaugua

SEQ ID NO: 121502 - RNA, 12 nt, Artificial Sequence
  Description of Artificial Sequence: Synthetic oligonucleotide
cagggaagagga

SEQ ID NO: 121503 - RNA, 15 nt, Artificial Sequence
  Description of Artificial Sequence: Synthetic oligonucleotide
augaucuuuuuuuug

SEQ ID NO: 121504 - RNA, 11 nt, Artificial Sequence
  Description of Artificial Sequence: Synthetic oligonucleotide
aguucacggcc

SEQ ID NO: 121505 - RNA, 13 nt, Artificial Sequence
  Description of Artificial Sequence: Synthetic oligonucleotide
caccaucacacca

SEQ ID NO: 121506 - RNA, 11 nt, Artificial Sequence
  Description of Artificial Sequence: Synthetic oligonucleotide
ccugcggguuu

SEQ ID NO: 121507 - RNA, 10 nt, Artificial Sequence
  Description of Artificial Sequence: Synthetic oligonucleotide
auccaguuug

SEQ ID NO: 121508 - RNA, 13 nt, Artificial Sequence
  Description of Artificial Sequence: Synthetic oligonucleotide
guuaaggacuucu

SEQ ID NO: 121509 - RNA, 13 nt, Artificial Sequence
  Description of Artificial Sequence: Synthetic oligonucleotide
cagugggacagag

SEQ ID NO: 121510 - RNA, 14 nt, Artificial Sequence
  Description of Artificial Sequence: Synthetic oligonucleotide
aauuuguuauugug

SEQ ID NO: 121511 - RNA, 13 nt, Artificial Sequence
  Description of Artificial Sequence: Synthetic oligonucleotide
uucaaaugcauuu

SEQ ID NO: 121512 - RNA, 10 nt, Artificial Sequence
  Description of Artificial Sequence: Synthetic oligonucleotide
caggaaagcc

SEQ ID NO: 121513 - RNA, 11 nt, Artificial Sequence
  Description of Artificial Sequence: Synthetic oligonucleotide
aggaaagcccu

SEQ ID NO: 121514 - RNA, 12 nt, Artificial Sequence
  Description of Artificial Sequence: Synthetic oligonucleotide
cccagcauggcc

SEQ ID NO: 121515 - RNA, 11 nt, Artificial Sequence
  Description of Artificial Sequence: Synthetic oligonucleotide
cuucucccuga

SEQ ID NO: 121516 - RNA, 12 nt, Artificial Sequence
  Description of Artificial Sequence: Synthetic oligonucleotide
gaagaagcccuu

SEQ ID NO: 121517 - RNA, 12 nt, Artificial Sequence
  Description of Artificial Sequence: Synthetic oligonucleotide
agaagcccuuca

SEQ ID NO: 121518 - RNA, 11 nt, Artificial Sequence
  Description of Artificial Sequence: Synthetic oligonucleotide
gcccuucagcg

SEQ ID NO: 121519 - RNA, 11 nt, Artificial Sequence
  Description of Artificial Sequence: Synthetic oligonucleotide
ccuucagcggc

SEQ ID NO: 121520 - RNA, 12 nt, Artificial Sequence
  Description of Artificial Sequence: Synthetic oligonucleotide
ucagcggccagu

SEQ ID NO: 121521 - RNA, 12 nt, Artificial Sequence
  Description of Artificial Sequence: Synthetic oligonucleotide
ugaaaagcuccg

SEQ ID NO: 121522 - RNA, 11 nt, Artificial Sequence
  Description of Artificial Sequence: Synthetic oligonucleotide
aaaagcuccgg

SEQ ID NO: 121523 - RNA, 13 nt, Artificial Sequence
  Description of Artificial Sequence: Synthetic oligonucleotide
agucaacagucug

SEQ ID NO: 121524 - RNA, 13 nt, Artificial Sequence
  Description of Artificial Sequence: Synthetic oligonucleotide
cagaguucaaaag

SEQ ID NO: 121525 - RNA, 13 nt, Artificial Sequence
  Description of Artificial Sequence: Synthetic oligonucleotide
agaguucaaaagc

SEQ ID NO: 121526 - RNA, 12 nt, Artificial Sequence
  Description of Artificial Sequence: Synthetic oligonucleotide
uucaaaagcccu

SEQ ID NO: 121527 - RNA, 12 nt, Artificial Sequence
  Description of Artificial Sequence: Synthetic oligonucleotide
ucaaaagcccuu

SEQ ID NO: 121528 - RNA, 12 nt, Artificial Sequence
  Description of Artificial Sequence: Synthetic oligonucleotide
aaaagcccuuca

SEQ ID NO: 121529 - RNA, 12 nt, Artificial Sequence
  Description of Artificial Sequence: Synthetic oligonucleotide
aaagcccuucag

SEQ ID NO: 121530 - RNA, 13 nt, Artificial Sequence
  Description of Artificial Sequence: Synthetic oligonucleotide
gugaagccgcucg

SEQ ID NO: 121531 - RNA, 12 nt, Artificial Sequence
  Description of Artificial Sequence: Synthetic oligonucleotide
cacgccagucaa

SEQ ID NO: 121532 - RNA, 13 nt, Artificial Sequence
  Description of Artificial Sequence: Synthetic oligonucleotide
uucuuggugcgug

SEQ ID NO: 121533 - RNA, 14 nt, Artificial Sequence
  Description of Artificial Sequence: Synthetic oligonucleotide
auuggauucaucag

SEQ ID NO: 121534 - RNA, 13 nt, Artificial Sequence
  Description of Artificial Sequence: Synthetic oligonucleotide
uggaauaccuaag

SEQ ID NO: 121535 - RNA, 12 nt, Artificial Sequence
  Description of Artificial Sequence: Synthetic oligonucleotide
auuugaggcuca

SEQ ID NO: 121536 - RNA, 11 nt, Artificial Sequence
  Description of Artificial Sequence: Synthetic oligonucleotide
ucuacaauugg

SEQ ID NO: 121537 - RNA, 12 nt, Artificial Sequence
  Description of Artificial Sequence: Synthetic oligonucleotide
uaguuaggagcc

SEQ ID NO: 121538 - RNA, 13 nt, Artificial Sequence
  Description of Artificial Sequence: Synthetic oligonucleotide
agucaauauccac

SEQ ID NO: 121539 - RNA, 13 nt, Artificial Sequence
  Description of Artificial Sequence: Synthetic oligonucleotide
auguucagucaca

SEQ ID NO: 121540 - RNA, 12 nt, Artificial Sequence
  Description of Artificial Sequence: Synthetic oligonucleotide
acacacacauac

SEQ ID NO: 121541 - RNA, 12 nt, Artificial Sequence
  Description of Artificial Sequence: Synthetic oligonucleotide
uuccuuuugcuu

SEQ ID NO: 121542 - RNA, 16 nt, Artificial Sequence
  Description of Artificial Sequence: Synthetic oligonucleotide
uuuuaaaguaauuuuu

SEQ ID NO: 121543 - RNA, 13 nt, Artificial Sequence
  Description of Artificial Sequence: Synthetic oligonucleotide
caacagucaaugg

SEQ ID NO: 121544 - RNA, 13 nt, Artificial Sequence
  Description of Artificial Sequence: Synthetic oligonucleotide
ucgacaaaccaau

SEQ ID NO: 121545 - RNA, 12 nt, Artificial Sequence
  Description of Artificial Sequence: Synthetic oligonucleotide
acugcuaccacu

SEQ ID NO: 121546 - RNA, 13 nt, Artificial Sequence
  Description of Artificial Sequence: Synthetic oligonucleotide
gcaagcggucuua

SEQ ID NO: 121547 - RNA, 13 nt, Artificial Sequence
  Description of Artificial Sequence: Synthetic oligonucleotide
ggucuuaccggcu

SEQ ID NO: 121548 - RNA, 11 nt, Artificial Sequence
  Description of Artificial Sequence: Synthetic oligonucleotide
gauggguuacc

SEQ ID NO: 121549 - RNA, 11 nt, Artificial Sequence
  Description of Artificial Sequence: Synthetic oligonucleotide
guuaccugcga

SEQ ID NO: 121550 - RNA, 12 nt, Artificial Sequence
  Description of Artificial Sequence: Synthetic oligonucleotide
aaucuugcugag

SEQ ID NO: 121551 - RNA, 13 nt, Artificial Sequence
  Description of Artificial Sequence: Synthetic oligonucleotide
agcauaaaacagu

SEQ ID NO: 121552 - RNA, 12 nt, Artificial Sequence
  Description of Artificial Sequence: Synthetic oligonucleotide
guccuuuauccu

SEQ ID NO: 121553 - RNA, 12 nt, Artificial Sequence
  Description of Artificial Sequence: Synthetic oligonucleotide
caacgcaaguug

SEQ ID NO: 121554 - RNA, 13 nt, Artificial Sequence
  Description of Artificial Sequence: Synthetic oligonucleotide
aaacugaaaccau

SEQ ID NO: 121555 - RNA, 14 nt, Artificial Sequence
  Description of Artificial Sequence: Synthetic oligonucleotide
acuuuguuaaauau

SEQ ID NO: 121556 - RNA, 14 nt, Artificial Sequence
  Description of Artificial Sequence: Synthetic oligonucleotide
guauauuaaaaguu

SEQ ID NO: 121557 - RNA, 13 nt, Artificial Sequence
  Description of Artificial Sequence: Synthetic oligonucleotide
guuuugacuuaac

SEQ ID NO: 121558 - RNA, 13 nt, Artificial Sequence
  Description of Artificial Sequence: Synthetic oligonucleotide
gcaaacucagcac

SEQ ID NO: 121559 - RNA, 11 nt, Artificial Sequence
  Description of Artificial Sequence: Synthetic oligonucleotide
ugcugaccuca

SEQ ID NO: 121560 - RNA, 14 nt, Artificial Sequence
  Description of Artificial Sequence: Synthetic oligonucleotide
uuuauucagaucgc

SEQ ID NO: 121561 - RNA, 13 nt, Artificial Sequence
  Description of Artificial Sequence: Synthetic oligonucleotide
aggguucugggau

SEQ ID NO: 121562 - RNA, 15 nt, Artificial Sequence
  Description of Artificial Sequence: Synthetic oligonucleotide
auauuggaaauuaug

SEQ ID NO: 121563 - RNA, 13 nt, Artificial Sequence
  Description of Artificial Sequence: Synthetic oligonucleotide
auggaagcacuag

SEQ ID NO: 121564 - RNA, 13 nt, Artificial Sequence
  Description of Artificial Sequence: Synthetic oligonucleotide
guuuuuaugugga

SEQ ID NO: 121565 - RNA, 12 nt, Artificial Sequence
  Description of Artificial Sequence: Synthetic oligonucleotide
ggaauugguaga

SEQ ID NO: 121566 - RNA, 13 nt, Artificial Sequence
  Description of Artificial Sequence: Synthetic oligonucleotide
uuagacuuggaga

SEQ ID NO: 121567 - RNA, 13 nt, Artificial Sequence
  Description of Artificial Sequence: Synthetic oligonucleotide
uuacaguauucca

SEQ ID NO: 121568 - RNA, 15 nt, Artificial Sequence
  Description of Artificial Sequence: Synthetic oligonucleotide
ccacugaugaauuaa

SEQ ID NO: 121569 - RNA, 12 nt, Artificial Sequence
  Description of Artificial Sequence: Synthetic oligonucleotide
ccacaucaucac

SEQ ID NO: 121570 - RNA, 13 nt, Artificial Sequence
  Description of Artificial Sequence: Synthetic oligonucleotide
cucaccaaacaga

SEQ ID NO: 121571 - RNA, 12 nt, Artificial Sequence
  Description of Artificial Sequence: Synthetic oligonucleotide
ggaacaugaugg

SEQ ID NO: 121572 - RNA, 12 nt, Artificial Sequence
  Description of Artificial Sequence: Synthetic oligonucleotide
cauguagacugc

SEQ ID NO: 121573 - RNA, 13 nt, Artificial Sequence
  Description of Artificial Sequence: Synthetic oligonucleotide
ggaucuauuuaug

SEQ ID NO: 121574 - RNA, 12 nt, Artificial Sequence
  Description of Artificial Sequence: Synthetic oligonucleotide
gcacuauuauca

SEQ ID NO: 121575 - RNA, 11 nt, Artificial Sequence
  Description of Artificial Sequence: Synthetic oligonucleotide
aucaguucugc

SEQ ID NO: 121576 - RNA, 13 nt, Artificial Sequence
  Description of Artificial Sequence: Synthetic oligonucleotide
agauuaaaccuac

SEQ ID NO: 121577 - RNA, 13 nt, Artificial Sequence
  Description of Artificial Sequence: Synthetic oligonucleotide
auaaaauccuucu

SEQ ID NO: 121578 - RNA, 12 nt, Artificial Sequence
  Description of Artificial Sequence: Synthetic oligonucleotide
aaugcuguagac

SEQ ID NO: 121579 - RNA, 13 nt, Artificial Sequence
  Description of Artificial Sequence: Synthetic oligonucleotide
uugauaggaauag

SEQ ID NO: 121580 - RNA, 11 nt, Artificial Sequence
  Description of Artificial Sequence: Synthetic oligonucleotide
aauggcccuga

SEQ ID NO: 121581 - RNA, 11 nt, Artificial Sequence
  Description of Artificial Sequence: Synthetic oligonucleotide
uuccucaagca

SEQ ID NO: 121582 - RNA, 10 nt, Artificial Sequence
  Description of Artificial Sequence: Synthetic oligonucleotide
guucagccca

SEQ ID NO: 121583 - RNA, 11 nt, Artificial Sequence
  Description of Artificial Sequence: Synthetic oligonucleotide
gcugcugaacc

SEQ ID NO: 121584 - RNA, 12 nt, Artificial Sequence
  Description of Artificial Sequence: Synthetic oligonucleotide
aaguucucuuca

SEQ ID NO: 121585 - RNA, 11 nt, Artificial Sequence
  Description of Artificial Sequence: Synthetic oligonucleotide
ccagccuagag

SEQ ID NO: 121586 - RNA, 13 nt, Artificial Sequence
  Description of Artificial Sequence: Synthetic oligonucleotide
cucugugaagugu

SEQ ID NO: 121587 - RNA, 14 nt, Artificial Sequence
  Description of Artificial Sequence: Synthetic oligonucleotide
ugagaaaauuucaa

SEQ ID NO: 121588 - RNA, 11 nt, Artificial Sequence
  Description of Artificial Sequence: Synthetic oligonucleotide
aauccuccuga

SEQ ID NO: 121589 - RNA, 12 nt, Artificial Sequence
  Description of Artificial Sequence: Synthetic oligonucleotide
gugacaucauau

SEQ ID NO: 121590 - RNA, 13 nt, Artificial Sequence
  Description of Artificial Sequence: Synthetic oligonucleotide
aaucuucaucaua

SEQ ID NO: 121591 - RNA, 13 nt, Artificial Sequence
  Description of Artificial Sequence: Synthetic oligonucleotide
gacuagcuauuaa

SEQ ID NO: 121592 - RNA, 14 nt, Artificial Sequence
  Description of Artificial Sequence: Synthetic oligonucleotide
ucucuacuaaaaau

SEQ ID NO: 121593 - RNA, 12 nt, Artificial Sequence
  Description of Artificial Sequence: Synthetic oligonucleotide
ucuaucucgccu

SEQ ID NO: 121594 - RNA, 13 nt, Artificial Sequence
  Description of Artificial Sequence: Synthetic oligonucleotide
cuucgguccaguu

SEQ ID NO: 121595 - RNA, 11 nt, Artificial Sequence
  Description of Artificial Sequence: Synthetic oligonucleotide
gauguagccgc

SEQ ID NO: 121596 - RNA, 12 nt, Artificial Sequence
  Description of Artificial Sequence: Synthetic oligonucleotide
ugaggagacuug

SEQ ID NO: 121597 - RNA, 12 nt, Artificial Sequence
  Description of Artificial Sequence: Synthetic oligonucleotide
gaguagugagga

SEQ ID NO: 121598 - RNA, 14 nt, Artificial Sequence
  Description of Artificial Sequence: Synthetic oligonucleotide
cagaugaguacaaa

SEQ ID NO: 121599 - RNA, 13 nt, Artificial Sequence
  Description of Artificial Sequence: Synthetic oligonucleotide
guuguuaaugggc

SEQ ID NO: 121600 - RNA, 13 nt, Artificial Sequence
  Description of Artificial Sequence: Synthetic oligonucleotide
uuuuuaauuuauu

SEQ ID NO: 121601 - RNA, 12 nt, Artificial Sequence
  Description of Artificial Sequence: Synthetic oligonucleotide
uauuuaaauaug

SEQ ID NO: 121602 - RNA, 13 nt, Artificial Sequence
  Description of Artificial Sequence: Synthetic oligonucleotide
uauccuuuguuuc

SEQ ID NO: 121603 - RNA, 14 nt, Artificial Sequence
  Description of Artificial Sequence: Synthetic oligonucleotide
cgucuaaguguuug

SEQ ID NO: 121604 - RNA, 12 nt, Artificial Sequence
  Description of Artificial Sequence: Synthetic oligonucleotide
accugugacaaa

SEQ ID NO: 121605 - RNA, 13 nt, Artificial Sequence
  Description of Artificial Sequence: Synthetic oligonucleotide
ccaggcugaauua

SEQ ID NO: 121606 - RNA, 14 nt, Artificial Sequence
  Description of Artificial Sequence: Synthetic oligonucleotide
gucauucuuacaau

SEQ ID NO: 121607 - RNA, 15 nt, Artificial Sequence
  Description of Artificial Sequence: Synthetic oligonucleotide
ucauucuuacaauug

SEQ ID NO: 121608 - RNA, 12 nt, Artificial Sequence
  Description of Artificial Sequence: Synthetic oligonucleotide
cagagaguguac

SEQ ID NO: 121609 - RNA, 12 nt, Artificial Sequence
  Description of Artificial Sequence: Synthetic oligonucleotide
agaacucagcag

SEQ ID NO: 121610 - RNA, 13 nt, Artificial Sequence
  Description of Artificial Sequence: Synthetic oligonucleotide
uuuauuuucagua

SEQ ID NO: 121611 - RNA, 12 nt, Artificial Sequence
  Description of Artificial Sequence: Synthetic oligonucleotide
ucuuaaauggaa

SEQ ID NO: 121612 - RNA, 13 nt, Artificial Sequence
  Description of Artificial Sequence: Synthetic oligonucleotide
ugccuaaaauugu

SEQ ID NO: 121613 - RNA, 12 nt, Artificial Sequence
  Description of Artificial Sequence: Synthetic oligonucleotide
agacugugagcu

SEQ ID NO: 121614 - RNA, 14 nt, Artificial Sequence
  Description of Artificial Sequence: Synthetic oligonucleotide
ugcuuuuuauuaau

SEQ ID NO: 121615 - RNA, 13 nt, Artificial Sequence
  Description of Artificial Sequence: Synthetic oligonucleotide
cucuucuuacauu

SEQ ID NO: 121616 - RNA, 15 nt, Artificial Sequence
  Description of Artificial Sequence: Synthetic oligonucleotide
cauuuguaaaaaugu

SEQ ID NO: 121617 - RNA, 15 nt, Artificial Sequence
  Description of Artificial Sequence: Synthetic oligonucleotide
aucuuaauucauauu

SEQ ID NO: 121618 - RNA, 13 nt, Artificial Sequence
  Description of Artificial Sequence: Synthetic oligonucleotide
gaacuaaucauga

SEQ ID NO: 121619 - RNA, 12 nt, Artificial Sequence
  Description of Artificial Sequence: Synthetic oligonucleotide
ucugcucuuggg

SEQ ID NO: 121620 - RNA, 13 nt, Artificial Sequence
  Description of Artificial Sequence: Synthetic oligonucleotide
caguagcuuugag

SEQ ID NO: 121621 - RNA, 14 nt, Artificial Sequence
  Description of Artificial Sequence: Synthetic oligonucleotide
cacguaauauuuca

SEQ ID NO: 121622 - RNA, 13 nt, Artificial Sequence
  Description of Artificial Sequence: Synthetic oligonucleotide
uauucucuucacu

SEQ ID NO: 121623 - RNA, 14 nt, Artificial Sequence
  Description of Artificial Sequence: Synthetic oligonucleotide
cuaaugcuaagaaa

SEQ ID NO: 121624 - RNA, 12 nt, Artificial Sequence
  Description of Artificial Sequence: Synthetic oligonucleotide
gcugaaaaucaa

SEQ ID NO: 121625 - RNA, 14 nt, Artificial Sequence
  Description of Artificial Sequence: Synthetic oligonucleotide
aauaugauuacuuu

SEQ ID NO: 121626 - RNA, 14 nt, Artificial Sequence
  Description of Artificial Sequence: Synthetic oligonucleotide
cauuuuguucuaca

SEQ ID NO: 121627 - RNA, 12 nt, Artificial Sequence
  Description of Artificial Sequence: Synthetic oligonucleotide
cccgggacucuc

SEQ ID NO: 121628 - RNA, 14 nt, Artificial Sequence
  Description of Artificial Sequence: Synthetic oligonucleotide
ccuuuaaaguaaag

SEQ ID NO: 121629 - RNA, 13 nt, Artificial Sequence
  Description of Artificial Sequence: Synthetic oligonucleotide
ucuggaagccugg

SEQ ID NO: 121630 - RNA, 14 nt, Artificial Sequence
  Description of Artificial Sequence: Synthetic oligonucleotide
aaaacaaaagagag

SEQ ID NO: 121631 - RNA, 13 nt, Artificial Sequence
  Description of Artificial Sequence: Synthetic oligonucleotide
aucaguuaugccg

SEQ ID NO: 121632 - RNA, 13 nt, Artificial Sequence
  Description of Artificial Sequence: Synthetic oligonucleotide
uaaaagaagucca

SEQ ID NO: 121633 - RNA, 11 nt, Artificial Sequence
  Description of Artificial Sequence: Synthetic oligonucleotide
aggugagguua

SEQ ID NO: 121634 - RNA, 11 nt, Artificial Sequence
  Description of Artificial Sequence: Synthetic oligonucleotide
gggaagaggac

SEQ ID NO: 121635 - RNA, 13 nt, Artificial Sequence
  Description of Artificial Sequence: Synthetic oligonucleotide
aagcaaguauugu

SEQ ID NO: 121636 - RNA, 12 nt, Artificial Sequence
  Description of Artificial Sequence: Synthetic oligonucleotide
auuguagcacuc

SEQ ID NO: 121637 - RNA, 14 nt, Artificial Sequence
  Description of Artificial Sequence: Synthetic oligonucleotide
acaaaaccacaaau

SEQ ID NO: 121638 - RNA, 12 nt, Artificial Sequence
  Description of Artificial Sequence: Synthetic oligonucleotide
uaagcccauaca

SEQ ID NO: 121639 - RNA, 11 nt, Artificial Sequence
  Description of Artificial Sequence: Synthetic oligonucleotide
agcccauacag

SEQ ID NO: 121640 - RNA, 12 nt, Artificial Sequence
  Description of Artificial Sequence: Synthetic oligonucleotide
cagaaaccuucc

SEQ ID NO: 121641 - RNA, 10 nt, Artificial Sequence
  Description of Artificial Sequence: Synthetic oligonucleotide
guauaccuac

SEQ ID NO: 121642 - RNA, 13 nt, Artificial Sequence
  Description of Artificial Sequence: Synthetic oligonucleotide
gccaguuuucgga

SEQ ID NO: 121643 - RNA, 9 nt, Artificial Sequence
  Description of Artificial Sequence: Synthetic oligonucleotide
ggaacaggg

SEQ ID NO: 121644 - RNA, 13 nt, Artificial Sequence
  Description of Artificial Sequence: Synthetic oligonucleotide
uuaacuuuccagu

SEQ ID NO: 121645 - RNA, 14 nt, Artificial Sequence
  Description of Artificial Sequence: Synthetic oligonucleotide
aaaguuugguuuug

SEQ ID NO: 121646 - RNA, 12 nt, Artificial Sequence
  Description of Artificial Sequence: Synthetic oligonucleotide
cuucccacugua

SEQ ID NO: 121647 - RNA, 13 nt, Artificial Sequence
  Description of Artificial Sequence: Synthetic oligonucleotide
ugauaccauauga

SEQ ID NO: 121648 - RNA, 11 nt, Artificial Sequence
  Description of Artificial Sequence: Synthetic oligonucleotide
aacaugggcug

SEQ ID NO: 121649 - RNA, 13 nt, Artificial Sequence
  Description of Artificial Sequence: Synthetic oligonucleotide
caacuuuuucaua

SEQ ID NO: 121650 - RNA, 12 nt, Artificial Sequence
  Description of Artificial Sequence: Synthetic oligonucleotide
caugaggccgga

SEQ ID NO: 121651 - RNA, 11 nt, Artificial Sequence
  Description of Artificial Sequence: Synthetic oligonucleotide
acugcauuugu

SEQ ID NO: 121652 - RNA, 13 nt, Artificial Sequence
  Description of Artificial Sequence: Synthetic oligonucleotide
aauguuuacuacc

SEQ ID NO: 121653 - RNA, 15 nt, Artificial Sequence
  Description of Artificial Sequence: Synthetic oligonucleotide
aauuuuuugaugaaa

SEQ ID NO: 121654 - RNA, 14 nt, Artificial Sequence
  Description of Artificial Sequence: Synthetic oligonucleotide
cagugugugaauuu

SEQ ID NO: 121655 - RNA, 13 nt, Artificial Sequence
  Description of Artificial Sequence: Synthetic oligonucleotide
gagcaauguaugu

SEQ ID NO: 121656 - RNA, 14 nt, Artificial Sequence
  Description of Artificial Sequence: Synthetic oligonucleotide
aaagcacauauaua

SEQ ID NO: 121657 - RNA, 14 nt, Artificial Sequence
  Description of Artificial Sequence: Synthetic oligonucleotide
guaauaguuucucc

SEQ ID NO: 121658 - RNA, 13 nt, Artificial Sequence
  Description of Artificial Sequence: Synthetic oligonucleotide
aguuucuccaaau

SEQ ID NO: 121659 - RNA, 13 nt, Artificial Sequence
  Description of Artificial Sequence: Synthetic oligonucleotide
uacuuccuagaaa

SEQ ID NO: 121660 - RNA, 13 nt, Artificial Sequence
  Description of Artificial Sequence: Synthetic oligonucleotide
uacaccauauaug

SEQ ID NO: 121661 - RNA, 14 nt, Artificial Sequence
  Description of Artificial Sequence: Synthetic oligonucleotide
auauaugaauggag

SEQ ID NO: 121662 - RNA, 13 nt, Artificial Sequence
  Description of Artificial Sequence: Synthetic oligonucleotide
acgagaagaagau

SEQ ID NO: 121663 - RNA, 13 nt, Artificial Sequence
  Description of Artificial Sequence: Synthetic oligonucleotide
ucauuuacaggga

SEQ ID NO: 121664 - RNA, 13 nt, Artificial Sequence
  Description of Artificial Sequence: Synthetic oligonucleotide
cauuuacagggac

SEQ ID NO: 121665 - RNA, 10 nt, Artificial Sequence
  Description of Artificial Sequence: Synthetic oligonucleotide
agggaccuga

SEQ ID NO: 121666 - RNA, 14 nt, Artificial Sequence
  Description of Artificial Sequence: Synthetic oligonucleotide
uguuugacugcauc

SEQ ID NO: 121667 - RNA, 13 nt, Artificial Sequence
  Description of Artificial Sequence: Synthetic oligonucleotide
uuugacugcaucg

SEQ ID NO: 121668 - RNA, 12 nt, Artificial Sequence
  Description of Artificial Sequence: Synthetic oligonucleotide
gaguucacaggg

SEQ ID NO: 121669 - RNA, 13 nt, Artificial Sequence
  Description of Artificial Sequence: Synthetic oligonucleotide
ggcaccucugucc

SEQ ID NO: 121670 - RNA, 15 nt, Artificial Sequence
  Description of Artificial Sequence: Synthetic oligonucleotide
gguuugucuuuuuaa

SEQ ID NO: 121671 - RNA, 14 nt, Artificial Sequence
  Description of Artificial Sequence: Synthetic oligonucleotide
uuugucuuuuuaag

SEQ ID NO: 121672 - RNA, 13 nt, Artificial Sequence
  Description of Artificial Sequence: Synthetic oligonucleotide
ccuaaagguuguc

SEQ ID NO: 121673 - RNA, 12 nt, Artificial Sequence
  Description of Artificial Sequence: Synthetic oligonucleotide
aagguugucgac

SEQ ID NO: 121674 - RNA, 13 nt, Artificial Sequence
  Description of Artificial Sequence: Synthetic oligonucleotide
accuggcaauugu

SEQ ID NO: 121675 - RNA, 12 nt, Artificial Sequence
  Description of Artificial Sequence: Synthetic oligonucleotide
aguggugcgagg

SEQ ID NO: 121676 - RNA, 13 nt, Artificial Sequence
  Description of Artificial Sequence: Synthetic oligonucleotide
agagacaugaaau

SEQ ID NO: 121677 - RNA, 13 nt, Artificial Sequence
  Description of Artificial Sequence: Synthetic oligonucleotide
auauauuucucca

SEQ ID NO: 121678 - RNA, 10 nt, Artificial Sequence
  Description of Artificial Sequence: Synthetic oligonucleotide
caugaaggcu

SEQ ID NO: 121679 - RNA, 11 nt, Artificial Sequence
  Description of Artificial Sequence: Synthetic oligonucleotide
gcuggaguggu

SEQ ID NO: 121680 - RNA, 11 nt, Artificial Sequence
  Description of Artificial Sequence: Synthetic oligonucleotide
aggaagagagg

SEQ ID NO: 121681 - RNA, 12 nt, Artificial Sequence
  Description of Artificial Sequence: Synthetic oligonucleotide
cuugcaucgggc

SEQ ID NO: 121682 - RNA, 13 nt, Artificial Sequence
  Description of Artificial Sequence: Synthetic oligonucleotide
auauccuacugug

SEQ ID NO: 121683 - RNA, 13 nt, Artificial Sequence
  Description of Artificial Sequence: Synthetic oligonucleotide
uccuacuguguaa

SEQ ID NO: 121684 - RNA, 12 nt, Artificial Sequence
  Description of Artificial Sequence: Synthetic oligonucleotide
ccuuguagugua

SEQ ID NO: 121685 - RNA, 13 nt, Artificial Sequence
  Description of Artificial Sequence: Synthetic oligonucleotide
ucuuuguugauug

SEQ ID NO: 121686 - RNA, 14 nt, Artificial Sequence
  Description of Artificial Sequence: Synthetic oligonucleotide
uuuguugauugaaa

SEQ ID NO: 121687 - RNA, 15 nt, Artificial Sequence
  Description of Artificial Sequence: Synthetic oligonucleotide
uucuuuuucuuccau

SEQ ID NO: 121688 - RNA, 13 nt, Artificial Sequence
  Description of Artificial Sequence: Synthetic oligonucleotide
aaucuuccuucua

SEQ ID NO: 121689 - RNA, 13 nt, Artificial Sequence
  Description of Artificial Sequence: Synthetic oligonucleotide
uugaaugcuucau

SEQ ID NO: 121690 - RNA, 13 nt, Artificial Sequence
  Description of Artificial Sequence: Synthetic oligonucleotide
ugaaugcuucaug

SEQ ID NO: 121691 - RNA, 13 nt, Artificial Sequence
  Description of Artificial Sequence: Synthetic oligonucleotide
aauucuacuuuga

SEQ ID NO: 121692 - RNA, 13 nt, Artificial Sequence
  Description of Artificial Sequence: Synthetic oligonucleotide
agcaacuacagac

SEQ ID NO: 121693 - RNA, 13 nt, Artificial Sequence
  Description of Artificial Sequence: Synthetic oligonucleotide
gaccaaggucaac

SEQ ID NO: 121694 - RNA, 13 nt, Artificial Sequence
  Description of Artificial Sequence: Synthetic oligonucleotide
cgacuaucucgac

SEQ ID NO: 121695 - RNA, 13 nt, Artificial Sequence
  Description of Artificial Sequence: Synthetic oligonucleotide
aaccuucccaaac

SEQ ID NO: 121696 - RNA, 14 nt, Artificial Sequence
  Description of Artificial Sequence: Synthetic oligonucleotide
ccaagcuuagaacu

SEQ ID NO: 121697 - RNA, 15 nt, Artificial Sequence
  Description of Artificial Sequence: Synthetic oligonucleotide
agcuuagaacuuuaa

SEQ ID NO: 121698 - RNA, 11 nt, Artificial Sequence
  Description of Artificial Sequence: Synthetic oligonucleotide
aagaccaccac

SEQ ID NO: 121699 - RNA, 14 nt, Artificial Sequence
  Description of Artificial Sequence: Synthetic oligonucleotide
gcgagaaauaaagu

SEQ ID NO: 121700 - RNA, 14 nt, Artificial Sequence
  Description of Artificial Sequence: Synthetic oligonucleotide
cgagaaauaaaguu

SEQ ID NO: 121701 - RNA, 12 nt, Artificial Sequence
  Description of Artificial Sequence: Synthetic oligonucleotide
aggaaaugaucc

SEQ ID NO: 121702 - RNA, 13 nt, Artificial Sequence
  Description of Artificial Sequence: Synthetic oligonucleotide
gaagaaaugaaac

SEQ ID NO: 121703 - RNA, 13 nt, Artificial Sequence
  Description of Artificial Sequence: Synthetic oligonucleotide
guuuccauccucc

SEQ ID NO: 121704 - RNA, 15 nt, Artificial Sequence
  Description of Artificial Sequence: Synthetic oligonucleotide
acugaaaaucuuuga

SEQ ID NO: 121705 - RNA, 11 nt, Artificial Sequence
  Description of Artificial Sequence: Synthetic oligonucleotide
ugccguucagg

SEQ ID NO: 121706 - RNA, 13 nt, Artificial Sequence
  Description of Artificial Sequence: Synthetic oligonucleotide
caggguccagaag

SEQ ID NO: 121707 - RNA, 13 nt, Artificial Sequence
  Description of Artificial Sequence: Synthetic oligonucleotide
ucaagacugcuug

SEQ ID NO: 121708 - RNA, 13 nt, Artificial Sequence
  Description of Artificial Sequence: Synthetic oligonucleotide
uccaugucuuugg

SEQ ID NO: 121709 - RNA, 11 nt, Artificial Sequence
  Description of Artificial Sequence: Synthetic oligonucleotide
gccugaaacac

SEQ ID NO: 121710 - RNA, 12 nt, Artificial Sequence
  Description of Artificial Sequence: Synthetic oligonucleotide
ucucuguaccuc

SEQ ID NO: 121711 - RNA, 12 nt, Artificial Sequence
  Description of Artificial Sequence: Synthetic oligonucleotide
agcaagacaaga

SEQ ID NO: 121712 - RNA, 13 nt, Artificial Sequence
  Description of Artificial Sequence: Synthetic oligonucleotide
gcaagacaagaaa

SEQ ID NO: 121713 - RNA, 12 nt, Artificial Sequence
  Description of Artificial Sequence: Synthetic oligonucleotide
uguacaagaucc

SEQ ID NO: 121714 - RNA, 12 nt, Artificial Sequence
  Description of Artificial Sequence: Synthetic oligonucleotide
cguacuugcaga

SEQ ID NO: 121715 - RNA, 13 nt, Artificial Sequence
  Description of Artificial Sequence: Synthetic oligonucleotide
cgaucgauacaga

SEQ ID NO: 121716 - RNA, 13 nt, Artificial Sequence
  Description of Artificial Sequence: Synthetic oligonucleotide
uauaaaaauaaau

SEQ ID NO: 121717 - RNA, 13 nt, Artificial Sequence
  Description of Artificial Sequence: Synthetic oligonucleotide
uaaaaauaaauau

SEQ ID NO: 121718 - RNA, 13 nt, Artificial Sequence
  Description of Artificial Sequence: Synthetic oligonucleotide
uuugacugcugug

SEQ ID NO: 121719 - RNA, 13 nt, Artificial Sequence
  Description of Artificial Sequence: Synthetic oligonucleotide
ggagaugagagac

SEQ ID NO: 121720 - RNA, 10 nt, Artificial Sequence
  Description of Artificial Sequence: Synthetic oligonucleotide
ucccacuugg

SEQ ID NO: 121721 - RNA, 10 nt, Artificial Sequence
  Description of Artificial Sequence: Synthetic oligonucleotide
guucacggcc

SEQ ID NO: 121722 - RNA, 12 nt, Artificial Sequence
  Description of Artificial Sequence: Synthetic oligonucleotide
accaucacacca

SEQ ID NO: 121723 - RNA, 10 nt, Artificial Sequence
  Description of Artificial Sequence: Synthetic oligonucleotide
cugcggguuu

SEQ ID NO: 121724 - RNA, 9 nt, Artificial Sequence
  Description of Artificial Sequence: Synthetic oligonucleotide
uccaguuug

SEQ ID NO: 121725 - RNA, 12 nt, Artificial Sequence
  Description of Artificial Sequence: Synthetic oligonucleotide
uuaaggacuucu

SEQ ID NO: 121726 - RNA, 12 nt, Artificial Sequence
  Description of Artificial Sequence: Synthetic oligonucleotide
agugggacagag

SEQ ID NO: 121727 - RNA, 13 nt, Artificial Sequence
  Description of Artificial Sequence: Synthetic oligonucleotide
auuuguuauugug

SEQ ID NO: 121728 - RNA, 12 nt, Artificial Sequence
  Description of Artificial Sequence: Synthetic oligonucleotide
ucaaaugcauuu

SEQ ID NO: 121729 - RNA, 9 nt, Artificial Sequence
  Description of Artificial Sequence: Synthetic oligonucleotide
aggaaagcc

SEQ ID NO: 121730 - RNA, 10 nt, Artificial Sequence
  Description of Artificial Sequence: Synthetic oligonucleotide
ggaaagcccu

SEQ ID NO: 121731 - RNA, 11 nt, Artificial Sequence
  Description of Artificial Sequence: Synthetic oligonucleotide
ccagcauggcc

SEQ ID NO: 121732 - RNA, 10 nt, Artificial Sequence
  Description of Artificial Sequence: Synthetic oligonucleotide
uucucccuga

SEQ ID NO: 121733 - RNA, 11 nt, Artificial Sequence
  Description of Artificial Sequence: Synthetic oligonucleotide
aagaagcccuu

SEQ ID NO: 121734 - RNA, 11 nt, Artificial Sequence
  Description of Artificial Sequence: Synthetic oligonucleotide
gaagcccuuca

SEQ ID NO: 121735 - RNA, 10 nt, Artificial Sequence
  Description of Artificial Sequence: Synthetic oligonucleotide
cccuucagcg

SEQ ID NO: 121736 - RNA, 10 nt, Artificial Sequence
  Description of Artificial Sequence: Synthetic oligonucleotide
cuucagcggc

SEQ ID NO: 121737 - RNA, 11 nt, Artificial Sequence
  Description of Artificial Sequence: Synthetic oligonucleotide
cagcggccagu

SEQ ID NO: 121738 - RNA, 11 nt, Artificial Sequence
  Description of Artificial Sequence: Synthetic oligonucleotide
gaaaagcuccg

SEQ ID NO: 121739 - RNA, 10 nt, Artificial Sequence
  Description of Artificial Sequence: Synthetic oligonucleotide
aaagcuccgg

SEQ ID NO: 121740 - RNA, 12 nt, Artificial Sequence
  Description of Artificial Sequence: Synthetic oligonucleotide
gucaacagucug

SEQ ID NO: 121741 - RNA, 12 nt, Artificial Sequence
  Description of Artificial Sequence: Synthetic oligonucleotide
agaguucaaaag

SEQ ID NO: 121742 - RNA, 12 nt, Artificial Sequence
  Description of Artificial Sequence: Synthetic oligonucleotide
gaguucaaaagc

SEQ ID NO: 121743 - RNA, 11 nt, Artificial Sequence
  Description of Artificial Sequence: Synthetic oligonucleotide
ucaaaagcccu

SEQ ID NO: 121744 - RNA, 11 nt, Artificial Sequence
  Description of Artificial Sequence: Synthetic oligonucleotide
caaaagcccuu

SEQ ID NO: 121745 - RNA, 11 nt, Artificial Sequence
  Description of Artificial Sequence: Synthetic oligonucleotide
aaagcccuuca

SEQ ID NO: 121746 - RNA, 11 nt, Artificial Sequence
  Description of Artificial Sequence: Synthetic oligonucleotide
aagcccuucag

SEQ ID NO: 121747 - RNA, 12 nt, Artificial Sequence
  Description of Artificial Sequence: Synthetic oligonucleotide
ugaagccgcucg

SEQ ID NO: 121748 - RNA, 11 nt, Artificial Sequence
  Description of Artificial Sequence: Synthetic oligonucleotide
acgccagucaa

SEQ ID NO: 121749 - RNA, 12 nt, Artificial Sequence
  Description of Artificial Sequence: Synthetic oligonucleotide
ucuuggugcgug

SEQ ID NO: 121750 - RNA, 13 nt, Artificial Sequence
  Description of Artificial Sequence: Synthetic oligonucleotide
uuggauucaucag

SEQ ID NO: 121751 - RNA, 12 nt, Artificial Sequence
  Description of Artificial Sequence: Synthetic oligonucleotide
ggaauaccuaag

SEQ ID NO: 121752 - RNA, 11 nt, Artificial Sequence
  Description of Artificial Sequence: Synthetic oligonucleotide
uuugaggcuca

SEQ ID NO: 121753 - RNA, 10 nt, Artificial Sequence
  Description of Artificial Sequence: Synthetic oligonucleotide
cuacaauugg

SEQ ID NO: 121754 - RNA, 11 nt, Artificial Sequence
  Description of Artificial Sequence: Synthetic oligonucleotide
aguuaggagcc

SEQ ID NO: 121755 - RNA, 12 nt, Artificial Sequence
  Description of Artificial Sequence: Synthetic oligonucleotide
gucaauauccac

SEQ ID NO: 121756 - RNA, 12 nt, Artificial Sequence
  Description of Artificial Sequence: Synthetic oligonucleotide
uguucagucaca

SEQ ID NO: 121757 - RNA, 11 nt, Artificial Sequence
  Description of Artificial Sequence: Synthetic oligonucleotide
cacacacauac

SEQ ID NO: 121758 - RNA, 11 nt, Artificial Sequence
  Description of Artificial Sequence: Synthetic oligonucleotide
uccuuuugcuu

SEQ ID NO: 121759 - RNA, 15 nt, Artificial Sequence
  Description of Artificial Sequence: Synthetic oligonucleotide
uuuaaaguaauuuuu

SEQ ID NO: 121760 - RNA, 12 nt, Artificial Sequence
  Description of Artificial Sequence: Synthetic oligonucleotide
aacagucaaugg

SEQ ID NO: 121761 - RNA, 12 nt, Artificial Sequence
  Description of Artificial Sequence: Synthetic oligonucleotide
cgacaaaccaau

SEQ ID NO: 121762 - RNA, 11 nt, Artificial Sequence
  Description of Artificial Sequence: Synthetic oligonucleotide
cugcuaccacu

SEQ ID NO: 121763 - RNA, 12 nt, Artificial Sequence
  Description of Artificial Sequence: Synthetic oligonucleotide
caagcggucuua

SEQ ID NO: 121764 - RNA, 12 nt, Artificial Sequence
  Description of Artificial Sequence: Synthetic oligonucleotide
gucuuaccggcu

SEQ ID NO: 121765 - RNA, 10 nt, Artificial Sequence
  Description of Artificial Sequence: Synthetic oligonucleotide
auggguuacc

SEQ ID NO: 121766 - RNA, 10 nt, Artificial Sequence
  Description of Artificial Sequence: Synthetic oligonucleotide
uuaccugcga

SEQ ID NO: 121767 - RNA, 11 nt, Artificial Sequence
  Description of Artificial Sequence: Synthetic oligonucleotide
aucuugcugag

SEQ ID NO: 121768 - RNA, 12 nt, Artificial Sequence
  Description of Artificial Sequence: Synthetic oligonucleotide
gcauaaaacagu

SEQ ID NO: 121769 - RNA, 11 nt, Artificial Sequence
  Description of Artificial Sequence: Synthetic oligonucleotide
uccuuuauccu

SEQ ID NO: 121770 - RNA, 11 nt, Artificial Sequence
  Description of Artificial Sequence: Synthetic oligonucleotide
aacgcaaguug

SEQ ID NO: 121771 - RNA, 12 nt, Artificial Sequence
  Description of Artificial Sequence: Synthetic oligonucleotide
aacugaaaccau

SEQ ID NO: 121772 - RNA, 13 nt, Artificial Sequence
  Description of Artificial Sequence: Synthetic oligonucleotide
cuuuguuaaauau

SEQ ID NO: 121773 - RNA, 13 nt, Artificial Sequence
  Description of Artificial Sequence: Synthetic oligonucleotide
uauauuaaaaguu

SEQ ID NO: 121774 - RNA, 12 nt, Artificial Sequence
  Description of Artificial Sequence: Synthetic oligonucleotide
uuuugacuuaac

SEQ ID NO: 121775 - RNA, 12 nt, Artificial Sequence
  Description of Artificial Sequence: Synthetic oligonucleotide
caaacucagcac

SEQ ID NO: 121776 - RNA, 10 nt, Artificial Sequence
  Description of Artificial Sequence: Synthetic oligonucleotide
gcugaccuca

SEQ ID NO: 121777 - RNA, 13 nt, Artificial Sequence
  Description of Artificial Sequence: Synthetic oligonucleotide
uuauucagaucgc

SEQ ID NO: 121778 - RNA, 12 nt, Artificial Sequence
  Description of Artificial Sequence: Synthetic oligonucleotide
ggguucugggau

SEQ ID NO: 121779 - RNA, 14 nt, Artificial Sequence
  Description of Artificial Sequence: Synthetic oligonucleotide
uauuggaaauuaug

SEQ ID NO: 121780 - RNA, 12 nt, Artificial Sequence
  Description of Artificial Sequence: Synthetic oligonucleotide
uggaagcacuag

SEQ ID NO: 121781 - RNA, 12 nt, Artificial Sequence
  Description of Artificial Sequence: Synthetic oligonucleotide
uuuuuaugugga

SEQ ID NO: 121782 - RNA, 11 nt, Artificial Sequence
  Description of Artificial Sequence: Synthetic oligonucleotide
gaauugguaga

SEQ ID NO: 121783 - RNA, 12 nt, Artificial Sequence
  Description of Artificial Sequence: Synthetic oligonucleotide
uagacuuggaga

SEQ ID NO: 121784 - RNA, 12 nt, Artificial Sequence
  Description of Artificial Sequence: Synthetic oligonucleotide
uacaguauucca

SEQ ID NO: 121785 - RNA, 14 nt, Artificial Sequence
  Description of Artificial Sequence: Synthetic oligonucleotide
cacugaugaauuaa

SEQ ID NO: 121786 - RNA, 11 nt, Artificial Sequence
  Description of Artificial Sequence: Synthetic oligonucleotide
cacaucaucac

SEQ ID NO: 121787 - RNA, 12 nt, Artificial Sequence
  Description of Artificial Sequence: Synthetic oligonucleotide
ucaccaaacaga

SEQ ID NO: 121788 - RNA, 11 nt, Artificial Sequence
  Description of Artificial Sequence: Synthetic oligonucleotide
gaacaugaugg

SEQ ID NO: 121789 - RNA, 11 nt, Artificial Sequence
  Description of Artificial Sequence: Synthetic oligonucleotide
auguagacugc

SEQ ID NO: 121790 - RNA, 12 nt, Artificial Sequence
  Description of Artificial Sequence: Synthetic oligonucleotide
gaucuauuuaug

SEQ ID NO: 121791 - RNA, 11 nt, Artificial Sequence
  Description of Artificial Sequence: Synthetic oligonucleotide
cacuauuauca

SEQ ID NO: 121792 - RNA, 10 nt, Artificial Sequence
  Description of Artificial Sequence: Synthetic oligonucleotide
ucaguucugc

SEQ ID NO: 121793 - RNA, 12 nt, Artificial Sequence
  Description of Artificial Sequence: Synthetic oligonucleotide
gauuaaaccuac

SEQ ID NO: 121794 - RNA, 12 nt, Artificial Sequence
  Description of Artificial Sequence: Synthetic oligonucleotide
uaaaauccuucu

SEQ ID NO: 121795 - RNA, 11 nt, Artificial Sequence
  Description of Artificial Sequence: Synthetic oligonucleotide
augcuguagac

SEQ ID NO: 121796 - RNA, 12 nt, Artificial Sequence
  Description of Artificial Sequence: Synthetic oligonucleotide
ugauaggaauag

SEQ ID NO: 121797 - RNA, 10 nt, Artificial Sequence
  Description of Artificial Sequence: Synthetic oligonucleotide
auggcccuga

SEQ ID NO: 121798 - RNA, 10 nt, Artificial Sequence
  Description of Artificial Sequence: Synthetic oligonucleotide
uccucaagca

SEQ ID NO: 121799 - RNA, 9 nt, Artificial Sequence
  Description of Artificial Sequence: Synthetic oligonucleotide
uucagccca

SEQ ID NO: 121800 - RNA, 10 nt, Artificial Sequence
  Description of Artificial Sequence: Synthetic oligonucleotide
cugcugaacc

SEQ ID NO: 121801 - RNA, 11 nt, Artificial Sequence
  Description of Artificial Sequence: Synthetic oligonucleotide
aguucucuuca

SEQ ID NO: 121802 - RNA, 10 nt, Artificial Sequence
  Description of Artificial Sequence: Synthetic oligonucleotide
cagccuagag

SEQ ID NO: 121803 - RNA, 12 nt, Artificial Sequence
  Description of Artificial Sequence: Synthetic oligonucleotide
ucugugaagugu

SEQ ID NO: 121804 - RNA, 13 nt, Artificial Sequence
  Description of Artificial Sequence: Synthetic oligonucleotide
gagaaaauuucaa

SEQ ID NO: 121805 - RNA, 10 nt, Artificial Sequence
  Description of Artificial Sequence: Synthetic oligonucleotide
auccuccuga

SEQ ID NO: 121806 - RNA, 11 nt, Artificial Sequence
  Description of Artificial Sequence: Synthetic oligonucleotide
ugacaucauau

SEQ ID NO: 121807 - RNA, 12 nt, Artificial Sequence
  Description of Artificial Sequence: Synthetic oligonucleotide
aucuucaucaua

SEQ ID NO: 121808 - RNA, 12 nt, Artificial Sequence
  Description of Artificial Sequence: Synthetic oligonucleotide
acuagcuauuaa

SEQ ID NO: 121809 - RNA, 13 nt, Artificial Sequence
  Description of Artificial Sequence: Synthetic oligonucleotide
cucuacuaaaaau

SEQ ID NO: 121810 - RNA, 11 nt, Artificial Sequence
  Description of Artificial Sequence: Synthetic oligonucleotide
cuaucucgccu

SEQ ID NO: 121811 - RNA, 12 nt, Artificial Sequence
  Description of Artificial Sequence: Synthetic oligonucleotide
uucgguccaguu

SEQ ID NO: 121812 - RNA, 10 nt, Artificial Sequence
  Description of Artificial Sequence: Synthetic oligonucleotide
auguagccgc

SEQ ID NO: 121813 - RNA, 11 nt, Artificial Sequence
  Description of Artificial Sequence: Synthetic oligonucleotide
gaggagacuug

SEQ ID NO: 121814 - RNA, 11 nt, Artificial Sequence
  Description of Artificial Sequence: Synthetic oligonucleotide
aguagugagga

SEQ ID NO: 121815 - RNA, 13 nt, Artificial Sequence
  Description of Artificial Sequence: Synthetic oligonucleotide
agaugaguacaaa

SEQ ID NO: 121816 - RNA, 12 nt, Artificial Sequence
  Description of Artificial Sequence: Synthetic oligonucleotide
uuguuaaugggc

SEQ ID NO: 121817 - RNA, 12 nt, Artificial Sequence
  Description of Artificial Sequence: Synthetic oligonucleotide
uuuuaauuuauu

SEQ ID NO: 121818 - RNA, 11 nt, Artificial Sequence
  Description of Artificial Sequence: Synthetic oligonucleotide
auuuaaauaug

SEQ ID NO: 121819 - RNA, 12 nt, Artificial Sequence
  Description of Artificial Sequence: Synthetic oligonucleotide
auccuuuguuuc

SEQ ID NO: 121820 - RNA, 13 nt, Artificial Sequence
  Description of Artificial Sequence: Synthetic oligonucleotide
gucuaaguguuug

SEQ ID NO: 121821 - RNA, 11 nt, Artificial Sequence
  Description of Artificial Sequence: Synthetic oligonucleotide
ccugugacaaa

SEQ ID NO: 121822 - RNA, 12 nt, Artificial Sequence
  Description of Artificial Sequence: Synthetic oligonucleotide
caggcugaauua

SEQ ID NO: 121823 - RNA, 13 nt, Artificial Sequence
  Description of Artificial Sequence: Synthetic oligonucleotide
ucauucuuacaau

SEQ ID NO: 121824 - RNA, 14 nt, Artificial Sequence
  Description of Artificial Sequence: Synthetic oligonucleotide
cauucuuacaauug

SEQ ID NO: 121825 - RNA, 11 nt, Artificial Sequence
  Description of Artificial Sequence: Synthetic oligonucleotide
agagaguguac

SEQ ID NO: 121826 - RNA, 11 nt, Artificial Sequence
  Description of Artificial Sequence: Synthetic oligonucleotide
gaacucagcag

SEQ ID NO: 121827 - RNA, 12 nt, Artificial Sequence
  Description of Artificial Sequence: Synthetic oligonucleotide
uuauuuucagua

SEQ ID NO: 121828 - RNA, 11 nt, Artificial Sequence
  Description of Artificial Sequence: Synthetic oligonucleotide
cuuaaauggaa

SEQ ID NO: 121829 - RNA, 12 nt, Artificial Sequence
  Description of Artificial Sequence: Synthetic oligonucleotide
gccuaaaauugu

SEQ ID NO: 121830 - RNA, 12 nt, Artificial Sequence
  Description of Artificial Sequence: Synthetic oligonucleotide
acuaacaucugg

SEQ ID NO: 121831 - RNA, 11 nt, Artificial Sequence
  Description of Artificial Sequence: Synthetic oligonucleotide
gacugugagcu

SEQ ID NO: 121832 - RNA, 13 nt, Artificial Sequence
  Description of Artificial Sequence: Synthetic oligonucleotide
gcuuuuuauuaau

SEQ ID NO: 121833 - RNA, 12 nt, Artificial Sequence
  Description of Artificial Sequence: Synthetic oligonucleotide
ucuucuuacauu

SEQ ID NO: 121834 - RNA, 14 nt, Artificial Sequence
  Description of Artificial Sequence: Synthetic oligonucleotide
auuuguaaaaaugu

SEQ ID NO: 121835 - RNA, 14 nt, Artificial Sequence
  Description of Artificial Sequence: Synthetic oligonucleotide
ucuuaauucauauu

SEQ ID NO: 121836 - RNA, 12 nt, Artificial Sequence
  Description of Artificial Sequence: Synthetic oligonucleotide
aacuaaucauga

SEQ ID NO: 121837 - RNA, 11 nt, Artificial Sequence
  Description of Artificial Sequence: Synthetic oligonucleotide
cugcucuuggg

SEQ ID NO: 121838 - RNA, 12 nt, Artificial Sequence
  Description of Artificial Sequence: Synthetic oligonucleotide
aguagcuuugag

SEQ ID NO: 121839 - RNA, 13 nt, Artificial Sequence
  Description of Artificial Sequence: Synthetic oligonucleotide
acguaauauuuca

SEQ ID NO: 121840 - RNA, 12 nt, Artificial Sequence
  Description of Artificial Sequence: Synthetic oligonucleotide
auucucuucacu

SEQ ID NO: 121841 - RNA, 13 nt, Artificial Sequence
  Description of Artificial Sequence: Synthetic oligonucleotide
uaaugcuaagaaa

SEQ ID NO: 121842 - RNA, 11 nt, Artificial Sequence
  Description of Artificial Sequence: Synthetic oligonucleotide
cugaaaaucaa

SEQ ID NO: 121843 - RNA, 13 nt, Artificial Sequence
  Description of Artificial Sequence: Synthetic oligonucleotide
auaugauuacuuu

SEQ ID NO: 121844 - RNA, 13 nt, Artificial Sequence
  Description of Artificial Sequence: Synthetic oligonucleotide
auuuuguucuaca

SEQ ID NO: 121845 - RNA, 11 nt, Artificial Sequence
  Description of Artificial Sequence: Synthetic oligonucleotide
ccgggacucuc

SEQ ID NO: 121846 - RNA, 13 nt, Artificial Sequence
  Description of Artificial Sequence: Synthetic oligonucleotide
cuuuaaaguaaag

SEQ ID NO: 121847 - RNA, 12 nt, Artificial Sequence
  Description of Artificial Sequence: Synthetic oligonucleotide
cuggaagccugg

SEQ ID NO: 121848 - RNA, 13 nt, Artificial Sequence
  Description of Artificial Sequence: Synthetic oligonucleotide
aaacaaaagagag

SEQ ID NO: 121849 - RNA, 12 nt, Artificial Sequence
  Description of Artificial Sequence: Synthetic oligonucleotide
ucaguuaugccg

SEQ ID NO: 121850 - RNA, 12 nt, Artificial Sequence
  Description of Artificial Sequence: Synthetic oligonucleotide
aaaagaagucca

SEQ ID NO: 121851 - RNA, 10 nt, Artificial Sequence
  Description of Artificial Sequence: Synthetic oligonucleotide
ggugagguua

SEQ ID NO: 121852 - RNA, 10 nt, Artificial Sequence
  Description of Artificial Sequence: Synthetic oligonucleotide
ggaagaggac

SEQ ID NO: 121853 - RNA, 12 nt, Artificial Sequence
  Description of Artificial Sequence: Synthetic oligonucleotide
agcaaguauugu

SEQ ID NO: 121854 - RNA, 11 nt, Artificial Sequence
  Description of Artificial Sequence: Synthetic oligonucleotide
uuguagcacuc

SEQ ID NO: 121855 - RNA, 13 nt, Artificial Sequence
  Description of Artificial Sequence: Synthetic oligonucleotide
caaaaccacaaau

SEQ ID NO: 121856 - RNA, 11 nt, Artificial Sequence
  Description of Artificial Sequence: Synthetic oligonucleotide
aagcccauaca

SEQ ID NO: 121857 - RNA, 10 nt, Artificial Sequence
  Description of Artificial Sequence: Synthetic oligonucleotide
gcccauacag

SEQ ID NO: 121858 - RNA, 11 nt, Artificial Sequence
  Description of Artificial Sequence: Synthetic oligonucleotide
agaaaccuucc

SEQ ID NO: 121859 - RNA, 9 nt, Artificial Sequence
  Description of Artificial Sequence: Synthetic oligonucleotide
uauaccuac

SEQ ID NO: 121860 - RNA, 12 nt, Artificial Sequence
  Description of Artificial Sequence: Synthetic oligonucleotide
ccaguuuucgga

SEQ ID NO: 121861 - RNA, 8 nt, Artificial Sequence
  Description of Artificial Sequence: Synthetic oligonucleotide
gaacaggg

SEQ ID NO: 121862 - RNA, 12 nt, Artificial Sequence
  Description of Artificial Sequence: Synthetic oligonucleotide
uaacuuuccagu

SEQ ID NO: 121863 - RNA, 13 nt, Artificial Sequence
  Description of Artificial Sequence: Synthetic oligonucleotide
aaguuugguuuug

SEQ ID NO: 121864 - RNA, 11 nt, Artificial Sequence
  Description of Artificial Sequence: Synthetic oligonucleotide
uucccacugua

SEQ ID NO: 121865 - RNA, 12 nt, Artificial Sequence
  Description of Artificial Sequence: Synthetic oligonucleotide
gauaccauauga

SEQ ID NO: 121866 - RNA, 10 nt, Artificial Sequence
  Description of Artificial Sequence: Synthetic oligonucleotide
acaugggcug

SEQ ID NO: 121867 - RNA, 12 nt, Artificial Sequence
  Description of Artificial Sequence: Synthetic oligonucleotide
aacuuuuucaua

SEQ ID NO: 121868 - RNA, 11 nt, Artificial Sequence
  Description of Artificial Sequence: Synthetic oligonucleotide
augaggccgga

SEQ ID NO: 121869 - RNA, 10 nt, Artificial Sequence
  Description of Artificial Sequence: Synthetic oligonucleotide
cugcauuugu

SEQ ID NO: 121870 - RNA, 12 nt, Artificial Sequence
  Description of Artificial Sequence: Synthetic oligonucleotide
auguuuacuacc

SEQ ID NO: 121871 - RNA, 14 nt, Artificial Sequence
  Description of Artificial Sequence: Synthetic oligonucleotide
auuuuuugaugaaa

SEQ ID NO: 121872 - RNA, 13 nt, Artificial Sequence
  Description of Artificial Sequence: Synthetic oligonucleotide
agugugugaauuu

SEQ ID NO: 121873 - RNA, 12 nt, Artificial Sequence
  Description of Artificial Sequence: Synthetic oligonucleotide
agcaauguaugu

SEQ ID NO: 121874 - RNA, 13 nt, Artificial Sequence
  Description of Artificial Sequence: Synthetic oligonucleotide
aagcacauauaua

SEQ ID NO: 121875 - RNA, 13 nt, Artificial Sequence
  Description of Artificial Sequence: Synthetic oligonucleotide
uaauaguuucucc

SEQ ID NO: 121876 - RNA, 12 nt, Artificial Sequence
  Description of Artificial Sequence: Synthetic oligonucleotide
guuucuccaaau

SEQ ID NO: 121877 - RNA, 12 nt, Artificial Sequence
  Description of Artificial Sequence: Synthetic oligonucleotide
acuuccuagaaa

SEQ ID NO: 121878 - RNA, 12 nt, Artificial Sequence
  Description of Artificial Sequence: Synthetic oligonucleotide
acaccauauaug

SEQ ID NO: 121879 - RNA, 13 nt, Artificial Sequence
  Description of Artificial Sequence: Synthetic oligonucleotide
uauaugaauggag

SEQ ID NO: 121880 - RNA, 12 nt, Artificial Sequence
  Description of Artificial Sequence: Synthetic oligonucleotide
cauuuacaggga

SEQ ID NO: 121881 - RNA, 12 nt, Artificial Sequence
  Description of Artificial Sequence: Synthetic oligonucleotide
auuuacagggac

SEQ ID NO: 121882 - RNA, 9 nt, Artificial Sequence
  Description of Artificial Sequence: Synthetic oligonucleotide
gggaccuga

SEQ ID NO: 121883 - RNA, 13 nt, Artificial Sequence
  Description of Artificial Sequence: Synthetic oligonucleotide
guuugacugcauc

SEQ ID NO: 121884 - RNA, 12 nt, Artificial Sequence
  Description of Artificial Sequence: Synthetic oligonucleotide
uugacugcaucg

SEQ ID NO: 121885 - RNA, 11 nt, Artificial Sequence
  Description of Artificial Sequence: Synthetic oligonucleotide
aguucacaggg

SEQ ID NO: 121886 - RNA, 12 nt, Artificial Sequence
  Description of Artificial Sequence: Synthetic oligonucleotide
gcaccucugucc

SEQ ID NO: 121887 - RNA, 14 nt, Artificial Sequence
  Description of Artificial Sequence: Synthetic oligonucleotide
guuugucuuuuuaa

SEQ ID NO: 121888 - RNA, 13 nt, Artificial Sequence
  Description of Artificial Sequence: Synthetic oligonucleotide
uugucuuuuuaag

SEQ ID NO: 121889 - RNA, 12 nt, Artificial Sequence
  Description of Artificial Sequence: Synthetic oligonucleotide
cuaaagguuguc

SEQ ID NO: 121890 - RNA, 11 nt, Artificial Sequence
  Description of Artificial Sequence: Synthetic oligonucleotide
agguugucgac

SEQ ID NO: 121891 - RNA, 12 nt, Artificial Sequence
  Description of Artificial Sequence: Synthetic oligonucleotide
ccuggcaauugu

SEQ ID NO: 121892 - RNA, 11 nt, Artificial Sequence
  Description of Artificial Sequence: Synthetic oligonucleotide
guggugcgagg

SEQ ID NO: 121893 - RNA, 12 nt, Artificial Sequence
  Description of Artificial Sequence: Synthetic oligonucleotide
gagacaugaaau

SEQ ID NO: 121894 - RNA, 12 nt, Artificial Sequence
  Description of Artificial Sequence: Synthetic oligonucleotide
uauauuucucca

SEQ ID NO: 121895 - RNA, 9 nt, Artificial Sequence
  Description of Artificial Sequence: Synthetic oligonucleotide
augaaggcu

SEQ ID NO: 121896 - RNA, 10 nt, Artificial Sequence
  Description of Artificial Sequence: Synthetic oligonucleotide
cuggaguggu

SEQ ID NO: 121897 - RNA, 10 nt, Artificial Sequence
  Description of Artificial Sequence: Synthetic oligonucleotide
ggaagagagg

SEQ ID NO: 121898 - RNA, 11 nt, Artificial Sequence
  Description of Artificial Sequence: Synthetic oligonucleotide
uugcaucgggc

SEQ ID NO: 121899 - RNA, 12 nt, Artificial Sequence
  Description of Artificial Sequence: Synthetic oligonucleotide
uauccuacugug

SEQ ID NO: 121900 - RNA, 12 nt, Artificial Sequence
  Description of Artificial Sequence: Synthetic oligonucleotide
ccuacuguguaa

SEQ ID NO: 121901 - RNA, 11 nt, Artificial Sequence
  Description of Artificial Sequence: Synthetic oligonucleotide
cuuguagugua

SEQ ID NO: 121902 - RNA, 12 nt, Artificial Sequence
  Description of Artificial Sequence: Synthetic oligonucleotide
cuuuguugauug

SEQ ID NO: 121903 - RNA, 13 nt, Artificial Sequence
  Description of Artificial Sequence: Synthetic oligonucleotide
uuguugauugaaa

SEQ ID NO: 121904 - RNA, 14 nt, Artificial Sequence
  Description of Artificial Sequence: Synthetic oligonucleotide
ucuuuuucuuccau

SEQ ID NO: 121905 - RNA, 12 nt, Artificial Sequence
  Description of Artificial Sequence: Synthetic oligonucleotide
aucuuccuucua

SEQ ID NO: 121906 - RNA, 12 nt, Artificial Sequence
  Description of Artificial Sequence: Synthetic oligonucleotide
ugaaugcuucau

SEQ ID NO: 121907 - RNA, 12 nt, Artificial Sequence
  Description of Artificial Sequence: Synthetic oligonucleotide
gaaugcuucaug

SEQ ID NO: 121908 - RNA, 12 nt, Artificial Sequence
  Description of Artificial Sequence: Synthetic oligonucleotide
auucuacuuuga

SEQ ID NO: 121909 - RNA, 12 nt, Artificial Sequence
  Description of Artificial Sequence: Synthetic oligonucleotide
gcaacuacagac

SEQ ID NO: 121910 - RNA, 12 nt, Artificial Sequence
  Description of Artificial Sequence: Synthetic oligonucleotide
accaaggucaac

SEQ ID NO: 121911 - RNA, 12 nt, Artificial Sequence
  Description of Artificial Sequence: Synthetic oligonucleotide
gacuaucucgac

SEQ ID NO: 121912 - RNA, 12 nt, Artificial Sequence
  Description of Artificial Sequence: Synthetic oligonucleotide
accuucccaaac

SEQ ID NO: 121913 - RNA, 13 nt, Artificial Sequence
  Description of Artificial Sequence: Synthetic oligonucleotide
caagcuuagaacu

SEQ ID NO: 121914 - RNA, 14 nt, Artificial Sequence
  Description of Artificial Sequence: Synthetic oligonucleotide
gcuuagaacuuuaa

SEQ ID NO: 121915 - RNA, 13 nt, Artificial Sequence
  Description of Artificial Sequence: Synthetic oligonucleotide
aacuuuaagcaac

SEQ ID NO: 121916 - RNA, 10 nt, Artificial Sequence
  Description of Artificial Sequence: Synthetic oligonucleotide
agaccaccac

SEQ ID NO: 121917 - RNA, 13 nt, Artificial Sequence
  Description of Artificial Sequence: Synthetic oligonucleotide
cgagaaauaaagu

SEQ ID NO: 121918 - RNA, 13 nt, Artificial Sequence
  Description of Artificial Sequence: Synthetic oligonucleotide
gagaaauaaaguu

SEQ ID NO: 121919 - RNA, 11 nt, Artificial Sequence
  Description of Artificial Sequence: Synthetic oligonucleotide
ggaaaugaucc

SEQ ID NO: 121920 - RNA, 12 nt, Artificial Sequence
  Description of Artificial Sequence: Synthetic oligonucleotide
aagaaaugaaac

SEQ ID NO: 121921 - RNA, 12 nt, Artificial Sequence
  Description of Artificial Sequence: Synthetic oligonucleotide
uuuccauccucc

SEQ ID NO: 121922 - RNA, 14 nt, Artificial Sequence
  Description of Artificial Sequence: Synthetic oligonucleotide
cugaaaaucuuuga

SEQ ID NO: 121923 - RNA, 10 nt, Artificial Sequence
  Description of Artificial Sequence: Synthetic oligonucleotide
gccguucagg

SEQ ID NO: 121924 - RNA, 12 nt, Artificial Sequence
  Description of Artificial Sequence: Synthetic oligonucleotide
aggguccagaag

SEQ ID NO: 121925 - RNA, 12 nt, Artificial Sequence
  Description of Artificial Sequence: Synthetic oligonucleotide
caagacugcuug

SEQ ID NO: 121926 - RNA, 12 nt, Artificial Sequence
  Description of Artificial Sequence: Synthetic oligonucleotide
ccaugucuuugg

SEQ ID NO: 121927 - RNA, 10 nt, Artificial Sequence
  Description of Artificial Sequence: Synthetic oligonucleotide
ccugaaacac

SEQ ID NO: 121928 - RNA, 11 nt, Artificial Sequence
  Description of Artificial Sequence: Synthetic oligonucleotide
cucuguaccuc

SEQ ID NO: 121929 - RNA, 11 nt, Artificial Sequence
  Description of Artificial Sequence: Synthetic oligonucleotide
gcaagacaaga

SEQ ID NO: 121930 - RNA, 12 nt, Artificial Sequence
  Description of Artificial Sequence: Synthetic oligonucleotide
caagacaagaaa

SEQ ID NO: 121931 - RNA, 11 nt, Artificial Sequence
  Description of Artificial Sequence: Synthetic oligonucleotide
guacaagaucc

SEQ ID NO: 121932 - RNA, 11 nt, Artificial Sequence
  Description of Artificial Sequence: Synthetic oligonucleotide
guacuugcaga

SEQ ID NO: 121933 - RNA, 12 nt, Artificial Sequence
  Description of Artificial Sequence: Synthetic oligonucleotide
gaucgauacaga

SEQ ID NO: 121934 - RNA, 12 nt, Artificial Sequence
  Description of Artificial Sequence: Synthetic oligonucleotide
auaaaaauaaau

SEQ ID NO: 121935 - RNA, 12 nt, Artificial Sequence
  Description of Artificial Sequence: Synthetic oligonucleotide
aaaaauaaauau

SEQ ID NO: 121936 - RNA, 12 nt, Artificial Sequence
  Description of Artificial Sequence: Synthetic oligonucleotide
uugacugcugug

SEQ ID NO: 121937 - RNA, 12 nt, Artificial Sequence
  Description of Artificial Sequence: Synthetic oligonucleotide
gagaugagagac

SEQ ID NO: 121938 - RNA, 9 nt, Artificial Sequence
  Description of Artificial Sequence: Synthetic oligonucleotide
cccacuugg

SEQ ID NO: 121939 - RNA, 6300 nt, Homo sapiens
cggccgcgguuuccaggaggaagcaaggaugcuuuggacacugugcguggcgccuccgcggagcccccgcgcugccauucccggccgucgcucgguccuccgcugacgggaagcaggaaguggcggcgggcgucgcgagcggugacaucacgggggcgacggcggcgaagggcgggggcggaggaggagcgagccgggccggggggcagcugcacagucuccgggauccccaggccuggaggggggucugugcgcggccggcuggcucugccccgcguccggucccgagcgggccucccucgggccagcccgaugugaccgagcccagcggagccugagcaaggagcggguccgucgcggagccggagggcgggaggaacaugacaucgcggagaugguuucacccaaauaucacugguguggaggcagaaaaccuacuguugacaagaggaguugauggcaguuuuuuggcaaggccuaguaaaaguaacccuggagacuucacacuuuccguuagaagaaauggagcugucacccacaucaagauucagaacacuggugauuacuaugaccuguauggaggggagaaauuugccacuuuggcugaguugguccaguauuacauggaacaucacgggcaauuaaaagagaagaauggagaugucauugagcuuaaauauccucugaacugugcagauccuaccucugaaaggugguuucauggacaucucucugggaaagaagcagagaaauuauuaacugaaaaaggaaaacaugguaguuuucuuguacgagagagccagagccacccuggagauuuuguucuuucugugcgcacuggugaugacaaaggggagagcaaugacggcaagucuaaagugacccauguuaugauucgcugucaggaacugaaauacgacguugguggaggagaacgguuugauucuuugacagaucuuguggaacauuauaagaagaauccuaugguggaaacauuggguacaguacuacaacucaagcagccccuuaacacgacucguauaaaugcugcugaaauagaaagcagaguucgagaacuaagcaaauuagcugagaccacagauaaagucaaacaaggcuuuugggaagaauuugagacacuacaacaacaggagugcaaacuucucuacagccgaaaagagggucaaaggcaagaaaacaaaaacaaaaauagauauaaaaacauccugcccuuugaucauaccaggguuguccuacacgauggugaucccaaugagccuguuucagauuacaucaaugcaaauaucaucaugccugaauuugaaaccaagugcaacaauucaaagcccaaaaagaguuacauugccacacaaggcugccugcaaaacacggugaaugacuuuuggcggaugguguuccaagaaaacucccgagugauugucaugacaacgaaagaaguggagagaggaaagaguaaaugugucaaauacuggccugaugaguaugcucuaaaagaauauggcgucaugcguguuaggaacgucaaagaaagcgccgcucaugacuauacgcuaagagaacuuaaacuuucaaagguuggacaagggaauacggagagaacggucuggcaauaccacuuucggaccuggccggaccacggcgugcccagcgacccugggggcgugcuggacuuccuggaggaggugcaccauaagcaggagagcaucauggaugcagggccggucguggugcacugcagugcuggaauuggccggacagggacguucauugugauugauauucuuauugacaucaucagagagaaagguguugacugcgauauugacguucccaaaaccauccagauggugcggucucagaggucagggaugguccagacagaagcacaguaccgauuuaucuauauggcgguccagcauuauauugaaacacuacagcgcaggauugaagaagagcagaaaagcaagaggaaagggcacgaauauacaaauauuaaguauucucuagcggaccagacgaguggagaucagagcccucucccgccuuguacuccaacgccacccugugcagaaaugagagaagacagugcuagagucuaugaaaacgugggccugaugcaacagcagaaaaguuucagaugagaaaaccugccaaaacuucagcacagaaauagauguggacuuucacccucucccuaaaaagaucaagaacagacgcaagaaaguuuaugugaagacagaauuuggauuuggaaggcuugcaaugugguugacuaccuuuugauaagcaaaauuugaaaccauuuaaagaccacuguauuuuaacucaacaauaccugcuucccaauuacucauuuccucagauaagaagaaaucaucucuacaauguagacaacauuauauuuuauagaauuuguuugaaauugaggaagcaguuaaauugugcgcuguauuuugcagauuauggggauucaaauucuaguaauaggcuuuuuuauuuuuauuuuuauacccuuaaccaguuuaauuuuuuuuuuccucauuguuggggaugaugagaagaaaugauuugggaaaauuaaguaacaacgaccuagaaaagugagaacaaucucauuuaccaucauguauccaguaguggauaauucauuuugauggcuucuauuuuuggccaaaugagaauuaagccagugccugagacugucagaaguugaccuuugcacuggcauuaaagagucauagaaaaagaaucauggauauuuaugaauuaagguaagagguguggcuuuuuuuuuuuucuuuuuuccagccguugaccaauuauaguucggcuguugacugagaaguuuguggugggaaaacguuugccauauuuucuuugcauuugaauaauugucuuguacuuagaaaaaaggcgucuaugaaugaccaguguuuuuggucgccaaauguugcugacaaacuuaucccaaaacuuuaguggcuuaaaaaaaccugcccccaacuguuagucaaucugagcugggcucagcugggcuguucuucugccagccugcagguggccacucauguggucagcaggucggcggagagacugggauggcugggcuucucucucugccugcaguccugagucucuccuucuucguguagucucuuucaguggccuggcuggcaggguagcuagaccucucacaugcagcucagagcucccaagagcucaaaagcagaaauggccaggccuucugaaaacuuaaguccagaauugucacagugucccuucuacuucccucuauugaugaugaugaugaugaugaugaugaugaugaugaugaugaugaugguuuuuucuaaucagaagaaagcugggguaugcccucuacuuacuaaacaagucacaagcccagcucagauucaagaaaagggugugaaguagaggugcaguuaaguggggggccacuagucuaacagacggucacaaccagugccauggaaaaccaaggauauuagcaaaagcagaaguugcuagugaccuugggaagccgaagcugcuuacaguagcugggacaagcugaaagucagacuaagaaauaaagagagggccuucaagaagcuuccugaaugauuucugcuagcccugagccuauuuuuggaaccagcacuuggggaaacugaucuugugaggauggauguguuuagggacacagggcuuuugagagcagcaccaccccacuggggcauccccagacuugggaaacgugacucuuucuuaaugccacuggguuuuagucaggccacagugagaaggaacagcccuaacaggccuccagccagguugaaugagcucauuuuuguuguagccaaccaguaagauuugcuaauguucuacauuaagugccuucuccaaagacaucccucuuugccucauauguugaaucauccagugcggauauuucaaugaaaauaucauugguugacuuuugugaugguaauaaugcuauggcaucuuugccaugaaguuguggccuccuuggauucuucugacuuuggcuucugaaaggaaggccuagauccagcccuggugguaguuccuuucugaggucucucagucccuugagacuuugggguaguuuggcugccauucucacugacaaaauguauaucagcccccaccuccaccccccaauauuccuugaacuuugaauugcuucagaacacagguguggccugaagguauucccuuauuagggaagugucacugcugucuucuagucaaacuuguaaagaaaaagauuccaguucaguauuugcagcaagaagcuugaaugcuguucuuuuuaucgcauuguuacaucgacucauucuccauuuugcuuugguuuugucuugacuugacuugacuuuggggguaaagucuuucaccagcacacaagaguuugauuguacaaauauaucuucugcauuaacaucucugccuguugcuuaagaucaguugcuuuuauacucagaauggaaauaccugaucuuggcuaguuuuguuauaagauauugauuucauuuagauuucccuccacgaggucagcaaacuaucauguucuuauguaaacuuaggccaaggccagaguuaucauagucccuagguugcuacggcuuaucaugugcuugguaaaaggugaucgcagguucucagacgaguuuacuuuacaugagauggaaucaggcagagaggcugggaugauggagaaagcucgaggugaaguuuuaaaaaaaaaguuguggaaaggaaaguuccaaagaggugguuucugaggaagucagagcgcccagggccagagcagucaguaaugggugaaugagguuguuuggaaagucggugugacagacacauggaugccaucuacuucuagguugcugguggguauuaaauaugcacaauauuccauagcucacugaggauuuuaaaauuauaagcauaggauuuuauauuuuggggugaaagaauuaucuggcacauuagguauuggaguuuaaaaaaaaagccaaauuucacagucuuaauaacuuuuuuuaaaaaaaacuaaaaggcgcuucauguccaguguguggcccuucugaaacuuauggucaucucucccacugaaaccaaggucuuuucaaauguggcuaaauggggaugaggagacacggguaggacuuucuuggugugugugcauucuuuaaagagccaaguugcuucggggaaacagccaggaaaauggucaagauuauuuuuagagguuauuuuauuggggauuuuaagaacuaauaacaucuugaguuauuuuuaauucagggggauguggaaagguuugcaauugucaaguguuuuguuguagcuuaguauccauaagggaaacuuagacuauagacauaacuacaaagccagugcagcuuuuguuuucuguauguuguugggggaucaacuuucacacauagcaagcacauggccucccugaugucaggaugccuuuguuaggaucuguauuugcccuuaauuuuguugaaaucuuuuuuccuucuuccucuugaaaaguuccaaaauauaguuuauuguaucuuucaucacuaaaaauuuguuccuuuuucacuaugggcaguucacacaaggcaaaaacuauugaacaguugguuuuaguguguuguauaacuuugcuguauaucaaacuaauuuugacaaguuuucauccuaagccucaaaucauguaauuaauaauuugccuguuuauuuaugaccuaauugugauucuuuuauuaauaaaagcuaaugggaaaaggaucccugauuaagcugaugacuagaccuacaauuaauuuuccugcaguauaugaaguauuguaccagaguauuaaaagauauguaauauuuuauugauaaaucuauccuuuaaaaggaauacguuuuaggaugucaucauuuugaugugaaucauguaaauguugauaauaugcuguuuauuauacauuuaguguuucaagagauucacuuaauugccuuuuugcccacguauauuauguagucuauuugcaacuguucuuaaaaaaaugacauuaaaagaauaguuuauguagagaaacauuaguggauguuaauugucuccccaccuauauuuauggguguuagcgcaacugcuuugcuaguugcaaagcuguauuaucagaguaaaaguguauuuguaaacuguaugggaacuaaaaauuaggaauaaaaccauuuucuuauaugaaaaaaaaaaaaaaaaaa

SEQ ID NO: 121940 - RNA, 19 nt, Artificial Sequence
  Description of Artificial Sequence: Synthetic oligonucleotide
cggccgcgguuuccaggag

SEQ ID NO: 121941 - RNA, 19 nt, Artificial Sequence
  Description of Artificial Sequence: Synthetic oligonucleotide
ggaagcaaggaugcuuugg

SEQ ID NO: 121942 - RNA, 19 nt, Artificial Sequence
  Description of Artificial Sequence: Synthetic oligonucleotide
gacacugugcguggcgccu

SEQ ID NO: 121943 - RNA, 19 nt, Artificial Sequence
  Description of Artificial Sequence: Synthetic oligonucleotide
uccgcggagcccccgcgcu

SEQ ID NO: 121944 - RNA, 19 nt, Artificial Sequence
  Description of Artificial Sequence: Synthetic oligonucleotide
ugccauucccggccgucgc

SEQ ID NO: 121945 - RNA, 19 nt, Artificial Sequence
  Description of Artificial Sequence: Synthetic oligonucleotide
cucgguccuccgcugacgg

SEQ ID NO: 121946 - RNA, 19 nt, Artificial Sequence
  Description of Artificial Sequence: Synthetic oligonucleotide
ggaagcaggaaguggcggc

SEQ ID NO: 121947 - RNA, 19 nt, Artificial Sequence
  Description of Artificial Sequence: Synthetic oligonucleotide
cgggcgucgcgagcgguga

SEQ ID NO: 121948 - RNA, 19 nt, Artificial Sequence
  Description of Artificial Sequence: Synthetic oligonucleotide
acaucacgggggcgacggc

SEQ ID NO: 121949 - RNA, 19 nt, Artificial Sequence
  Description of Artificial Sequence: Synthetic oligonucleotide
cggcgaagggcgggggcgg

SEQ ID NO: 121950 - RNA, 19 nt, Artificial Sequence
  Description of Artificial Sequence: Synthetic oligonucleotide
gaggaggagcgagccgggc

SEQ ID NO: 121951 - RNA, 19 nt, Artificial Sequence
  Description of Artificial Sequence: Synthetic oligonucleotide
ccggggggcagcugcacag

SEQ ID NO: 121952 - RNA, 19 nt, Artificial Sequence
  Description of Artificial Sequence: Synthetic oligonucleotide
gucuccgggauccccaggc

SEQ ID NO: 121953 - RNA, 19 nt, Artificial Sequence
  Description of Artificial Sequence: Synthetic oligonucleotide
ccuggaggggggucugugc

SEQ ID NO: 121954 - RNA, 19 nt, Artificial Sequence
  Description of Artificial Sequence: Synthetic oligonucleotide
cgcggccggcuggcucugc

SEQ ID NO: 121955 - RNA, 19 nt, Artificial Sequence
  Description of Artificial Sequence: Synthetic oligonucleotide
ccccgcguccggucccgag

SEQ ID NO: 121956 - RNA, 19 nt, Artificial Sequence
  Description of Artificial Sequence: Synthetic oligonucleotide
gcgggccucccucgggcca

SEQ ID NO: 121957 - RNA, 19 nt, Artificial Sequence
  Description of Artificial Sequence: Synthetic oligonucleotide
agcccgaugugaccgagcc

SEQ ID NO: 121958 - RNA, 19 nt, Artificial Sequence
  Description of Artificial Sequence: Synthetic oligonucleotide
ccagcggagccugagcaag

SEQ ID NO: 121959 - RNA, 19 nt, Artificial Sequence
  Description of Artificial Sequence: Synthetic oligonucleotide
ggagcggguccgucgcgga

SEQ ID NO: 121960 - RNA, 19 nt, Artificial Sequence
  Description of Artificial Sequence: Synthetic oligonucleotide
agccggagggcgggaggaa

SEQ ID NO: 121961 - RNA, 19 nt, Artificial Sequence
  Description of Artificial Sequence: Synthetic oligonucleotide
acaugacaucgcggagaug

SEQ ID NO: 121962 - RNA, 19 nt, Artificial Sequence
  Description of Artificial Sequence: Synthetic oligonucleotide
gguuucacccaaauaucac

SEQ ID NO: 121963 - RNA, 19 nt, Artificial Sequence
  Description of Artificial Sequence: Synthetic oligonucleotide
cugguguggaggcagaaaa

SEQ ID NO: 121964 - RNA, 19 nt, Artificial Sequence
  Description of Artificial Sequence: Synthetic oligonucleotide
accuacuguugacaagagg

SEQ ID NO: 121965 - RNA, 19 nt, Artificial Sequence
  Description of Artificial Sequence: Synthetic oligonucleotide
gaguugauggcaguuuuuu

SEQ ID NO: 121966 - RNA, 19 nt, Artificial Sequence
  Description of Artificial Sequence: Synthetic oligonucleotide
uggcaaggccuaguaaaag

SEQ ID NO: 121967 - RNA, 19 nt, Artificial Sequence
  Description of Artificial Sequence: Synthetic oligonucleotide
guaacccuggagacuucac

SEQ ID NO: 121968 - RNA, 19 nt, Artificial Sequence
  Description of Artificial Sequence: Synthetic oligonucleotide
cacuuuccguuagaagaaa

SEQ ID NO: 121969 - RNA, 19 nt, Artificial Sequence
  Description of Artificial Sequence: Synthetic oligonucleotide
auggagcugucacccacau

SEQ ID NO: 121970 - RNA, 19 nt, Artificial Sequence
  Description of Artificial Sequence: Synthetic oligonucleotide
ucaagauucagaacacugg

SEQ ID NO: 121971 - RNA, 19 nt, Artificial Sequence
  Description of Artificial Sequence: Synthetic oligonucleotide
gugauuacuaugaccugua

SEQ ID NO: 121972 - RNA, 19 nt, Artificial Sequence
  Description of Artificial Sequence: Synthetic oligonucleotide
auggaggggagaaauuugc

SEQ ID NO: 121973 - RNA, 19 nt, Artificial Sequence
  Description of Artificial Sequence: Synthetic oligonucleotide
ccacuuuggcugaguuggu

SEQ ID NO: 121974 - RNA, 19 nt, Artificial Sequence
  Description of Artificial Sequence: Synthetic oligonucleotide
uccaguauuacauggaaca

SEQ ID NO: 121975 - RNA, 19 nt, Artificial Sequence
  Description of Artificial Sequence: Synthetic oligonucleotide
aucacgggcaauuaaaaga

SEQ ID NO: 121976 - RNA, 19 nt, Artificial Sequence
  Description of Artificial Sequence: Synthetic oligonucleotide
agaagaauggagaugucau

SEQ ID NO: 121977 - RNA, 19 nt, Artificial Sequence
  Description of Artificial Sequence: Synthetic oligonucleotide
uugagcuuaaauauccucu

SEQ ID NO: 121978 - RNA, 19 nt, Artificial Sequence
  Description of Artificial Sequence: Synthetic oligonucleotide
ugaacugugcagauccuac

SEQ ID NO: 121979 - RNA, 19 nt, Artificial Sequence
  Description of Artificial Sequence: Synthetic oligonucleotide
ccucugaaaggugguuuca

SEQ ID NO: 121980 - RNA, 19 nt, Artificial Sequence
  Description of Artificial Sequence: Synthetic oligonucleotide
auggacaucucucugggaa

SEQ ID NO: 121981 - RNA, 19 nt, Artificial Sequence
  Description of Artificial Sequence: Synthetic oligonucleotide
aagaagcagagaaauuauu

SEQ ID NO: 121982 - RNA, 19 nt, Artificial Sequence
  Description of Artificial Sequence: Synthetic oligonucleotide
uaacugaaaaaggaaaaca

SEQ ID NO: 121983 - RNA, 19 nt, Artificial Sequence
  Description of Artificial Sequence: Synthetic oligonucleotide
augguaguuuucuuguacg

SEQ ID NO: 121984 - RNA, 19 nt, Artificial Sequence
  Description of Artificial Sequence: Synthetic oligonucleotide
gagagagccagagccaccc

SEQ ID NO: 121985 - RNA, 19 nt, Artificial Sequence
  Description of Artificial Sequence: Synthetic oligonucleotide
cuggagauuuuguucuuuc

SEQ ID NO: 121986 - RNA, 19 nt, Artificial Sequence
  Description of Artificial Sequence: Synthetic oligonucleotide
cugugcgcacuggugauga

SEQ ID NO: 121987 - RNA, 19 nt, Artificial Sequence
  Description of Artificial Sequence: Synthetic oligonucleotide
acaaaggggagagcaauga

SEQ ID NO: 121988 - RNA, 19 nt, Artificial Sequence
  Description of Artificial Sequence: Synthetic oligonucleotide
acggcaagucuaaagugac

SEQ ID NO: 121989 - RNA, 19 nt, Artificial Sequence
  Description of Artificial Sequence: Synthetic oligonucleotide
cccauguuaugauucgcug

SEQ ID NO: 121990 - RNA, 19 nt, Artificial Sequence
  Description of Artificial Sequence: Synthetic oligonucleotide
gucaggaacugaaauacga

SEQ ID NO: 121991 - RNA, 19 nt, Artificial Sequence
  Description of Artificial Sequence: Synthetic oligonucleotide
acguugguggaggagaacg

SEQ ID NO: 121992 - RNA, 19 nt, Artificial Sequence
  Description of Artificial Sequence: Synthetic oligonucleotide
gguuugauucuuugacaga

SEQ ID NO: 121993 - RNA, 19 nt, Artificial Sequence
  Description of Artificial Sequence: Synthetic oligonucleotide
aucuuguggaacauuauaa

SEQ ID NO: 121994 - RNA, 19 nt, Artificial Sequence
  Description of Artificial Sequence: Synthetic oligonucleotide
agaagaauccuauggugga

SEQ ID NO: 121995 - RNA, 19 nt, Artificial Sequence
  Description of Artificial Sequence: Synthetic oligonucleotide
aaacauuggguacaguacu

SEQ ID NO: 121996 - RNA, 19 nt, Artificial Sequence
  Description of Artificial Sequence: Synthetic oligonucleotide
uacaacucaagcagccccu

SEQ ID NO: 121997 - RNA, 19 nt, Artificial Sequence
  Description of Artificial Sequence: Synthetic oligonucleotide
uuaacacgacucguauaaa

SEQ ID NO: 121998 - RNA, 19 nt, Artificial Sequence
  Description of Artificial Sequence: Synthetic oligonucleotide
augcugcugaaauagaaag

SEQ ID NO: 121999 - RNA, 19 nt, Artificial Sequence
  Description of Artificial Sequence: Synthetic oligonucleotide
gcagaguucgagaacuaag

SEQ ID NO: 122000 - RNA, 19 nt, Artificial Sequence
  Description of Artificial Sequence: Synthetic oligonucleotide
gcaaauuagcugagaccac

SEQ ID NO: 122001 - RNA, 19 nt, Artificial Sequence
  Description of Artificial Sequence: Synthetic oligonucleotide
cagauaaagucaaacaagg

SEQ ID NO: 122002 - RNA, 19 nt, Artificial Sequence
  Description of Artificial Sequence: Synthetic oligonucleotide
gcuuuugggaagaauuuga

SEQ ID NO: 122003 - RNA, 19 nt, Artificial Sequence
  Description of Artificial Sequence: Synthetic oligonucleotide
agacacuacaacaacagga

SEQ ID NO: 122004 - RNA, 19 nt, Artificial Sequence
  Description of Artificial Sequence: Synthetic oligonucleotide
agugcaaacuucucuacag

SEQ ID NO: 122005 - RNA, 19 nt, Artificial Sequence
  Description of Artificial Sequence: Synthetic oligonucleotide
gccgaaaagagggucaaag

SEQ ID NO: 122006 - RNA, 19 nt, Artificial Sequence
  Description of Artificial Sequence: Synthetic oligonucleotide
ggcaagaaaacaaaaacaa

SEQ ID NO: 122007 - RNA, 19 nt, Artificial Sequence
  Description of Artificial Sequence: Synthetic oligonucleotide
aaaauagauauaaaaacau

SEQ ID NO: 122008 - RNA, 19 nt, Artificial Sequence
  Description of Artificial Sequence: Synthetic oligonucleotide
uccugcccuuugaucauac

SEQ ID NO: 122009 - RNA, 19 nt, Artificial Sequence
  Description of Artificial Sequence: Synthetic oligonucleotide
ccaggguuguccuacacga

SEQ ID NO: 122010 - RNA, 19 nt, Artificial Sequence
  Description of Artificial Sequence: Synthetic oligonucleotide
auggugaucccaaugagcc

SEQ ID NO: 122011 - RNA, 19 nt, Artificial Sequence
  Description of Artificial Sequence: Synthetic oligonucleotide
cuguuucagauuacaucaa

SEQ ID NO: 122012 - RNA, 19 nt, Artificial Sequence
  Description of Artificial Sequence: Synthetic oligonucleotide
augcaaauaucaucaugcc

SEQ ID NO: 122013 - RNA, 19 nt, Artificial Sequence
  Description of Artificial Sequence: Synthetic oligonucleotide
cugaauuugaaaccaagug

SEQ ID NO: 122014 - RNA, 19 nt, Artificial Sequence
  Description of Artificial Sequence: Synthetic oligonucleotide
gcaacaauucaaagcccaa

SEQ ID NO: 122015 - RNA, 19 nt, Artificial Sequence
  Description of Artificial Sequence: Synthetic oligonucleotide
aaaagaguuacauugccac

SEQ ID NO: 122016 - RNA, 19 nt, Artificial Sequence
  Description of Artificial Sequence: Synthetic oligonucleotide
cacaaggcugccugcaaaa

SEQ ID NO: 122017 - RNA, 19 nt, Artificial Sequence
  Description of Artificial Sequence: Synthetic oligonucleotide
acacggugaaugacuuuug

SEQ ID NO: 122018 - RNA, 19 nt, Artificial Sequence
  Description of Artificial Sequence: Synthetic oligonucleotide
ggcggaugguguuccaaga

SEQ ID NO: 122019 - RNA, 19 nt, Artificial Sequence
  Description of Artificial Sequence: Synthetic oligonucleotide
aaaacucccgagugauugu

SEQ ID NO: 122020 - RNA, 19 nt, Artificial Sequence
  Description of Artificial Sequence: Synthetic oligonucleotide
ucaugacaacgaaagaagu

SEQ ID NO: 122021 - RNA, 19 nt, Artificial Sequence
  Description of Artificial Sequence: Synthetic oligonucleotide
uggagagaggaaagaguaa

SEQ ID NO: 122022 - RNA, 19 nt, Artificial Sequence
  Description of Artificial Sequence: Synthetic oligonucleotide
aaugugucaaauacuggcc

SEQ ID NO: 122023 - RNA, 19 nt, Artificial Sequence
  Description of Artificial Sequence: Synthetic oligonucleotide
cugaugaguaugcucuaaa

SEQ ID NO: 122024 - RNA, 19 nt, Artificial Sequence
  Description of Artificial Sequence: Synthetic oligonucleotide
aagaauauggcgucaugcg

SEQ ID NO: 122025 - RNA, 19 nt, Artificial Sequence
  Description of Artificial Sequence: Synthetic oligonucleotide
guguuaggaacgucaaaga

SEQ ID NO: 122026 - RNA, 19 nt, Artificial Sequence
  Description of Artificial Sequence: Synthetic oligonucleotide
aaagcgccgcucaugacua

SEQ ID NO: 122027 - RNA, 19 nt, Artificial Sequence
  Description of Artificial Sequence: Synthetic oligonucleotide
auacgcuaagagaacuuaa

SEQ ID NO: 122028 - RNA, 19 nt, Artificial Sequence
  Description of Artificial Sequence: Synthetic oligonucleotide
aacuuucaaagguuggaca

SEQ ID NO: 122029 - RNA, 19 nt, Artificial Sequence
  Description of Artificial Sequence: Synthetic oligonucleotide
aagggaauacggagagaac

SEQ ID NO: 122030 - RNA, 19 nt, Artificial Sequence
  Description of Artificial Sequence: Synthetic oligonucleotide
cggucuggcaauaccacuu

SEQ ID NO: 122031 - RNA, 19 nt, Artificial Sequence
  Description of Artificial Sequence: Synthetic oligonucleotide
uucggaccuggccggacca

SEQ ID NO: 122032 - RNA, 19 nt, Artificial Sequence
  Description of Artificial Sequence: Synthetic oligonucleotide
acggcgugcccagcgaccc

SEQ ID NO: 122033 - RNA, 19 nt, Artificial Sequence
  Description of Artificial Sequence: Synthetic oligonucleotide
cugggggcgugcuggacuu

SEQ ID NO: 122034 - RNA, 19 nt, Artificial Sequence
  Description of Artificial Sequence: Synthetic oligonucleotide
uccuggaggaggugcacca

SEQ ID NO: 122035 - RNA, 19 nt, Artificial Sequence
  Description of Artificial Sequence: Synthetic oligonucleotide
auaagcaggagagcaucau

SEQ ID NO: 122036 - RNA, 19 nt, Artificial Sequence
  Description of Artificial Sequence: Synthetic oligonucleotide
uggaugcagggccggucgu

SEQ ID NO: 122037 - RNA, 19 nt, Artificial Sequence
  Description of Artificial Sequence: Synthetic oligonucleotide
uggugcacugcagugcugg

SEQ ID NO: 122038 - RNA, 19 nt, Artificial Sequence
  Description of Artificial Sequence: Synthetic oligonucleotide
gaauuggccggacagggac

SEQ ID NO: 122039 - RNA, 19 nt, Artificial Sequence
  Description of Artificial Sequence: Synthetic oligonucleotide
cguucauugugauugauau

SEQ ID NO: 122040 - RNA, 19 nt, Artificial Sequence
  Description of Artificial Sequence: Synthetic oligonucleotide
uucuuauugacaucaucag

SEQ ID NO: 122041 - RNA, 19 nt, Artificial Sequence
  Description of Artificial Sequence: Synthetic oligonucleotide
gagagaaagguguugacug

SEQ ID NO: 122042 - RNA, 19 nt, Artificial Sequence
  Description of Artificial Sequence: Synthetic oligonucleotide
gcgauauugacguucccaa

SEQ ID NO: 122043 - RNA, 19 nt, Artificial Sequence
  Description of Artificial Sequence: Synthetic oligonucleotide
aaaccauccagauggugcg

SEQ ID NO: 122044 - RNA, 19 nt, Artificial Sequence
  Description of Artificial Sequence: Synthetic oligonucleotide
ggucucagaggucagggau

SEQ ID NO: 122045 - RNA, 19 nt, Artificial Sequence
  Description of Artificial Sequence: Synthetic oligonucleotide
ugguccagacagaagcaca

SEQ ID NO: 122046 - RNA, 19 nt, Artificial Sequence
  Description of Artificial Sequence: Synthetic oligonucleotide
aguaccgauuuaucuauau

SEQ ID NO: 122047 - RNA, 19 nt, Artificial Sequence
  Description of Artificial Sequence: Synthetic oligonucleotide
uggcgguccagcauuauau

SEQ ID NO: 122048 - RNA, 19 nt, Artificial Sequence
  Description of Artificial Sequence: Synthetic oligonucleotide
uugaaacacuacagcgcag

SEQ ID NO: 122049 - RNA, 19 nt, Artificial Sequence
  Description of Artificial Sequence: Synthetic oligonucleotide
ggauugaagaagagcagaa

SEQ ID NO: 122050 - RNA, 19 nt, Artificial Sequence
  Description of Artificial Sequence: Synthetic oligonucleotide
aaagcaagaggaaagggca

SEQ ID NO: 122051 - RNA, 19 nt, Artificial Sequence
  Description of Artificial Sequence: Synthetic oligonucleotide
acgaauauacaaauauuaa

SEQ ID NO: 122052 - RNA, 19 nt, Artificial Sequence
  Description of Artificial Sequence: Synthetic oligonucleotide
aguauucucuagcggacca

SEQ ID NO: 122053 - RNA, 19 nt, Artificial Sequence
  Description of Artificial Sequence: Synthetic oligonucleotide
agacgaguggagaucagag

SEQ ID NO: 122054 - RNA, 19 nt, Artificial Sequence
  Description of Artificial Sequence: Synthetic oligonucleotide
gcccucucccgccuuguac

SEQ ID NO: 122055 - RNA, 19 nt, Artificial Sequence
  Description of Artificial Sequence: Synthetic oligonucleotide
cuccaacgccacccugugc

SEQ ID NO: 122056 - RNA, 19 nt, Artificial Sequence
  Description of Artificial Sequence: Synthetic oligonucleotide
cagaaaugagagaagacag

SEQ ID NO: 122057 - RNA, 19 nt, Artificial Sequence
  Description of Artificial Sequence: Synthetic oligonucleotide
gugcuagagucuaugaaaa

SEQ ID NO: 122058 - RNA, 19 nt, Artificial Sequence
  Description of Artificial Sequence: Synthetic oligonucleotide
acgugggccugaugcaaca

SEQ ID NO: 122059 - RNA, 19 nt, Artificial Sequence
  Description of Artificial Sequence: Synthetic oligonucleotide
agcagaaaaguuucagaug

SEQ ID NO: 122060 - RNA, 19 nt, Artificial Sequence
  Description of Artificial Sequence: Synthetic oligonucleotide
gagaaaaccugccaaaacu

SEQ ID NO: 122061 - RNA, 19 nt, Artificial Sequence
  Description of Artificial Sequence: Synthetic oligonucleotide
uucagcacagaaauagaug

SEQ ID NO: 122062 - RNA, 19 nt, Artificial Sequence
  Description of Artificial Sequence: Synthetic oligonucleotide
guggacuuucacccucucc

SEQ ID NO: 122063 - RNA, 19 nt, Artificial Sequence
  Description of Artificial Sequence: Synthetic oligonucleotide
ccuaaaaagaucaagaaca

SEQ ID NO: 122064 - RNA, 19 nt, Artificial Sequence
  Description of Artificial Sequence: Synthetic oligonucleotide
agacgcaagaaaguuuaug

SEQ ID NO: 122065 - RNA, 19 nt, Artificial Sequence
  Description of Artificial Sequence: Synthetic oligonucleotide
gugaagacagaauuuggau

SEQ ID NO: 122066 - RNA, 19 nt, Artificial Sequence
  Description of Artificial Sequence: Synthetic oligonucleotide
uuuggaaggcuugcaaugu

SEQ ID NO: 122067 - RNA, 19 nt, Artificial Sequence
  Description of Artificial Sequence: Synthetic oligonucleotide
ugguugacuaccuuuugau

SEQ ID NO: 122068 - RNA, 19 nt, Artificial Sequence
  Description of Artificial Sequence: Synthetic oligonucleotide
uaagcaaaauuugaaacca

SEQ ID NO: 122069 - RNA, 19 nt, Artificial Sequence
  Description of Artificial Sequence: Synthetic oligonucleotide
auuuaaagaccacuguauu

SEQ ID NO: 122070 - RNA, 19 nt, Artificial Sequence
  Description of Artificial Sequence: Synthetic oligonucleotide
uuuaacucaacaauaccug

SEQ ID NO: 122071 - RNA, 19 nt, Artificial Sequence
  Description of Artificial Sequence: Synthetic oligonucleotide
gcuucccaauuacucauuu

SEQ ID NO: 122072 - RNA, 19 nt, Artificial Sequence
  Description of Artificial Sequence: Synthetic oligonucleotide
uccucagauaagaagaaau

SEQ ID NO: 122073 - RNA, 19 nt, Artificial Sequence
  Description of Artificial Sequence: Synthetic oligonucleotide
ucaucucuacaauguagac

SEQ ID NO: 122074 - RNA, 19 nt, Artificial Sequence
  Description of Artificial Sequence: Synthetic oligonucleotide
caacauuauauuuuauaga

SEQ ID NO: 122075 - RNA, 19 nt, Artificial Sequence
  Description of Artificial Sequence: Synthetic oligonucleotide
aauuuguuugaaauugagg

SEQ ID NO: 122076 - RNA, 19 nt, Artificial Sequence
  Description of Artificial Sequence: Synthetic oligonucleotide
gaagcaguuaaauugugcg

SEQ ID NO: 122077 - RNA, 19 nt, Artificial Sequence
  Description of Artificial Sequence: Synthetic oligonucleotide
gcuguauuuugcagauuau

SEQ ID NO: 122078 - RNA, 19 nt, Artificial Sequence
  Description of Artificial Sequence: Synthetic oligonucleotide
uggggauucaaauucuagu

SEQ ID NO: 122079 - RNA, 19 nt, Artificial Sequence
  Description of Artificial Sequence: Synthetic oligonucleotide
uaauaggcuuuuuuauuuu

SEQ ID NO: 122080 - RNA, 19 nt, Artificial Sequence
  Description of Artificial Sequence: Synthetic oligonucleotide
uuauuuuuauacccuuaac

SEQ ID NO: 122081 - RNA, 19 nt, Artificial Sequence
  Description of Artificial Sequence: Synthetic oligonucleotide
uccucauuguuggggauga

SEQ ID NO: 122082 - RNA, 19 nt, Artificial Sequence
  Description of Artificial Sequence: Synthetic oligonucleotide
augagaagaaaugauuugg

SEQ ID NO: 122083 - RNA, 19 nt, Artificial Sequence
  Description of Artificial Sequence: Synthetic oligonucleotide
ggaaaauuaaguaacaacg

SEQ ID NO: 122084 - RNA, 19 nt, Artificial Sequence
  Description of Artificial Sequence: Synthetic oligonucleotide
gaccuagaaaagugagaac

SEQ ID NO: 122085 - RNA, 19 nt, Artificial Sequence
  Description of Artificial Sequence: Synthetic oligonucleotide
caaucucauuuaccaucau

SEQ ID NO: 122086 - RNA, 19 nt, Artificial Sequence
  Description of Artificial Sequence: Synthetic oligonucleotide
uguauccaguaguggauaa

SEQ ID NO: 122087 - RNA, 19 nt, Artificial Sequence
  Description of Artificial Sequence: Synthetic oligonucleotide
auucauuuugauggcuucu

SEQ ID NO: 122088 - RNA, 19 nt, Artificial Sequence
  Description of Artificial Sequence: Synthetic oligonucleotide
uauuuuuggccaaaugaga

SEQ ID NO: 122089 - RNA, 19 nt, Artificial Sequence
  Description of Artificial Sequence: Synthetic oligonucleotide
aauuaagccagugccugag

SEQ ID NO: 122090 - RNA, 19 nt, Artificial Sequence
  Description of Artificial Sequence: Synthetic oligonucleotide
gacugucagaaguugaccu

SEQ ID NO: 122091 - RNA, 19 nt, Artificial Sequence
  Description of Artificial Sequence: Synthetic oligonucleotide
uuugcacuggcauuaaaga

SEQ ID NO: 122092 - RNA, 19 nt, Artificial Sequence
  Description of Artificial Sequence: Synthetic oligonucleotide
agucauagaaaaagaauca

SEQ ID NO: 122093 - RNA, 19 nt, Artificial Sequence
  Description of Artificial Sequence: Synthetic oligonucleotide
auggauauuuaugaauuaa

SEQ ID NO: 122094 - RNA, 19 nt, Artificial Sequence
  Description of Artificial Sequence: Synthetic oligonucleotide
agguaagagguguggcuuu

SEQ ID NO: 122095 - RNA, 19 nt, Artificial Sequence
  Description of Artificial Sequence: Synthetic oligonucleotide
cagccguugaccaauuaua

SEQ ID NO: 122096 - RNA, 19 nt, Artificial Sequence
  Description of Artificial Sequence: Synthetic oligonucleotide
aguucggcuguugacugag

SEQ ID NO: 122097 - RNA, 19 nt, Artificial Sequence
  Description of Artificial Sequence: Synthetic oligonucleotide
gaaguuuguggugggaaaa

SEQ ID NO: 122098 - RNA, 19 nt, Artificial Sequence
  Description of Artificial Sequence: Synthetic oligonucleotide
acguuugccauauuuucuu

SEQ ID NO: 122099 - RNA, 19 nt, Artificial Sequence
  Description of Artificial Sequence: Synthetic oligonucleotide
uugcauuugaauaauuguc

SEQ ID NO: 122100 - RNA, 19 nt, Artificial Sequence
  Description of Artificial Sequence: Synthetic oligonucleotide
cuuguacuuagaaaaaagg

SEQ ID NO: 122101 - RNA, 19 nt, Artificial Sequence
  Description of Artificial Sequence: Synthetic oligonucleotide
gcgucuaugaaugaccagu

SEQ ID NO: 122102 - RNA, 19 nt, Artificial Sequence
  Description of Artificial Sequence: Synthetic oligonucleotide
uguuuuuggucgccaaaug

SEQ ID NO: 122103 - RNA, 19 nt, Artificial Sequence
  Description of Artificial Sequence: Synthetic oligonucleotide
guugcugacaaacuuaucc

SEQ ID NO: 122104 - RNA, 19 nt, Artificial Sequence
  Description of Artificial Sequence: Synthetic oligonucleotide
ccaaaacuuuaguggcuua

SEQ ID NO: 122105 - RNA, 19 nt, Artificial Sequence
  Description of Artificial Sequence: Synthetic oligonucleotide
aaaaaaaccugcccccaac

SEQ ID NO: 122106 - RNA, 19 nt, Artificial Sequence
  Description of Artificial Sequence: Synthetic oligonucleotide
cuguuagucaaucugagcu

SEQ ID NO: 122107 - RNA, 19 nt, Artificial Sequence
  Description of Artificial Sequence: Synthetic oligonucleotide
ugggcucagcugggcuguu

SEQ ID NO: 122108 - RNA, 19 nt, Artificial Sequence
  Description of Artificial Sequence: Synthetic oligonucleotide
ucuucugccagccugcagg

SEQ ID NO: 122109 - RNA, 19 nt, Artificial Sequence
  Description of Artificial Sequence: Synthetic oligonucleotide
guggccacucaugugguca

SEQ ID NO: 122110 - RNA, 19 nt, Artificial Sequence
  Description of Artificial Sequence: Synthetic oligonucleotide
agcaggucggcggagagac

SEQ ID NO: 122111 - RNA, 19 nt, Artificial Sequence
  Description of Artificial Sequence: Synthetic oligonucleotide
cugggauggcugggcuucu

SEQ ID NO: 122112 - RNA, 19 nt, Artificial Sequence
  Description of Artificial Sequence: Synthetic oligonucleotide
ucucucugccugcaguccu

SEQ ID NO: 122113 - RNA, 19 nt, Artificial Sequence
  Description of Artificial Sequence: Synthetic oligonucleotide
ugagucucuccuucuucgu

SEQ ID NO: 122114 - RNA, 19 nt, Artificial Sequence
  Description of Artificial Sequence: Synthetic oligonucleotide
uguagucucuuucaguggc

SEQ ID NO: 122115 - RNA, 19 nt, Artificial Sequence
  Description of Artificial Sequence: Synthetic oligonucleotide
ccuggcuggcaggguagcu

SEQ ID NO: 122116 - RNA, 19 nt, Artificial Sequence
  Description of Artificial Sequence: Synthetic oligonucleotide
uagaccucucacaugcagc

SEQ ID NO: 122117 - RNA, 19 nt, Artificial Sequence
  Description of Artificial Sequence: Synthetic oligonucleotide
cucagagcucccaagagcu

SEQ ID NO: 122118 - RNA, 19 nt, Artificial Sequence
  Description of Artificial Sequence: Synthetic oligonucleotide
ucaaaagcagaaauggcca

SEQ ID NO: 122119 - RNA, 19 nt, Artificial Sequence
  Description of Artificial Sequence: Synthetic oligonucleotide
aggccuucugaaaacuuaa

SEQ ID NO: 122120 - RNA, 19 nt, Artificial Sequence
  Description of Artificial Sequence: Synthetic oligonucleotide
aguccagaauugucacagu

SEQ ID NO: 122121 - RNA, 19 nt, Artificial Sequence
  Description of Artificial Sequence: Synthetic oligonucleotide
ugucccuucuacuucccuc

SEQ ID NO: 122122 - RNA, 19 nt, Artificial Sequence
  Description of Artificial Sequence: Synthetic oligonucleotide
cuauugaugaugaugauga

SEQ ID NO: 122123 - RNA, 19 nt, Artificial Sequence
  Description of Artificial Sequence: Synthetic oligonucleotide
augaugaugaugaugauga

SEQ ID NO: 122124 - RNA, 19 nt, Artificial Sequence
  Description of Artificial Sequence: Synthetic oligonucleotide
augaugaugaugaugguuu

SEQ ID NO: 122125 - RNA, 19 nt, Artificial Sequence
  Description of Artificial Sequence: Synthetic oligonucleotide
uuuucuaaucagaagaaag

SEQ ID NO: 122126 - RNA, 19 nt, Artificial Sequence
  Description of Artificial Sequence: Synthetic oligonucleotide
gcugggguaugcccucuac

SEQ ID NO: 122127 - RNA, 19 nt, Artificial Sequence
  Description of Artificial Sequence: Synthetic oligonucleotide
cuuacuaaacaagucacaa

SEQ ID NO: 122128 - RNA, 19 nt, Artificial Sequence
  Description of Artificial Sequence: Synthetic oligonucleotide
agcccagcucagauucaag

SEQ ID NO: 122129 - RNA, 19 nt, Artificial Sequence
  Description of Artificial Sequence: Synthetic oligonucleotide
gaaaagggugugaaguaga

SEQ ID NO: 122130 - RNA, 19 nt, Artificial Sequence
  Description of Artificial Sequence: Synthetic oligonucleotide
aggugcaguuaaguggggg

SEQ ID NO: 122131 - RNA, 19 nt, Artificial Sequence
  Description of Artificial Sequence: Synthetic oligonucleotide
ggccacuagucuaacagac

SEQ ID NO: 122132 - RNA, 19 nt, Artificial Sequence
  Description of Artificial Sequence: Synthetic oligonucleotide
cggucacaaccagugccau

SEQ ID NO: 122133 - RNA, 19 nt, Artificial Sequence
  Description of Artificial Sequence: Synthetic oligonucleotide
uggaaaaccaaggauauua

SEQ ID NO: 122134 - RNA, 19 nt, Artificial Sequence
  Description of Artificial Sequence: Synthetic oligonucleotide
agcaaaagcagaaguugcu

SEQ ID NO: 122135 - RNA, 19 nt, Artificial Sequence
  Description of Artificial Sequence: Synthetic oligonucleotide
uagugaccuugggaagccg

SEQ ID NO: 122136 - RNA, 19 nt, Artificial Sequence
  Description of Artificial Sequence: Synthetic oligonucleotide
gaagcugcuuacaguagcu

SEQ ID NO: 122137 - RNA, 19 nt, Artificial Sequence
  Description of Artificial Sequence: Synthetic oligonucleotide
ugggacaagcugaaaguca

SEQ ID NO: 122138 - RNA, 19 nt, Artificial Sequence
  Description of Artificial Sequence: Synthetic oligonucleotide
agacuaagaaauaaagaga

SEQ ID NO: 122139 - RNA, 19 nt, Artificial Sequence
  Description of Artificial Sequence: Synthetic oligonucleotide
agggccuucaagaagcuuc

SEQ ID NO: 122140 - RNA, 19 nt, Artificial Sequence
  Description of Artificial Sequence: Synthetic oligonucleotide
ccugaaugauuucugcuag

SEQ ID NO: 122141 - RNA, 19 nt, Artificial Sequence
  Description of Artificial Sequence: Synthetic oligonucleotide
gcccugagccuauuuuugg

SEQ ID NO: 122142 - RNA, 19 nt, Artificial Sequence
  Description of Artificial Sequence: Synthetic oligonucleotide
gaaccagcacuuggggaaa

SEQ ID NO: 122143 - RNA, 19 nt, Artificial Sequence
  Description of Artificial Sequence: Synthetic oligonucleotide
acugaucuugugaggaugg

SEQ ID NO: 122144 - RNA, 19 nt, Artificial Sequence
  Description of Artificial Sequence: Synthetic oligonucleotide
gauguguuuagggacacag

SEQ ID NO: 122145 - RNA, 19 nt, Artificial Sequence
  Description of Artificial Sequence: Synthetic oligonucleotide
gggcuuuugagagcagcac

SEQ ID NO: 122146 - RNA, 19 nt, Artificial Sequence
  Description of Artificial Sequence: Synthetic oligonucleotide
ccaccccacuggggcaucc

SEQ ID NO: 122147 - RNA, 19 nt, Artificial Sequence
  Description of Artificial Sequence: Synthetic oligonucleotide
cccagacuugggaaacgug

SEQ ID NO: 122148 - RNA, 19 nt, Artificial Sequence
  Description of Artificial Sequence: Synthetic oligonucleotide
gacucuuucuuaaugccac

SEQ ID NO: 122149 - RNA, 19 nt, Artificial Sequence
  Description of Artificial Sequence: Synthetic oligonucleotide
cuggguuuuagucaggcca

SEQ ID NO: 122150 - RNA, 19 nt, Artificial Sequence
  Description of Artificial Sequence: Synthetic oligonucleotide
acagugagaaggaacagcc

SEQ ID NO: 122151 - RNA, 19 nt, Artificial Sequence
  Description of Artificial Sequence: Synthetic oligonucleotide
ccuaacaggccuccagcca

SEQ ID NO: 122152 - RNA, 19 nt, Artificial Sequence
  Description of Artificial Sequence: Synthetic oligonucleotide
agguugaaugagcucauuu

SEQ ID NO: 122153 - RNA, 19 nt, Artificial Sequence
  Description of Artificial Sequence: Synthetic oligonucleotide
uuuguuguagccaaccagu

SEQ ID NO: 122154 - RNA, 19 nt, Artificial Sequence
  Description of Artificial Sequence: Synthetic oligonucleotide
uaagauuugcuaauguucu

SEQ ID NO: 122155 - RNA, 19 nt, Artificial Sequence
  Description of Artificial Sequence: Synthetic oligonucleotide
uacauuaagugccuucucc

SEQ ID NO: 122156 - RNA, 19 nt, Artificial Sequence
  Description of Artificial Sequence: Synthetic oligonucleotide
caaagacaucccucuuugc

SEQ ID NO: 122157 - RNA, 19 nt, Artificial Sequence
  Description of Artificial Sequence: Synthetic oligonucleotide
ccucauauguugaaucauc

SEQ ID NO: 122158 - RNA, 19 nt, Artificial Sequence
  Description of Artificial Sequence: Synthetic oligonucleotide
ccagugcggauauuucaau

SEQ ID NO: 122159 - RNA, 19 nt, Artificial Sequence
  Description of Artificial Sequence: Synthetic oligonucleotide
ugaaaauaucauugguuga

SEQ ID NO: 122160 - RNA, 19 nt, Artificial Sequence
  Description of Artificial Sequence: Synthetic oligonucleotide
acuuuugugaugguaauaa

SEQ ID NO: 122161 - RNA, 19 nt, Artificial Sequence
  Description of Artificial Sequence: Synthetic oligonucleotide
augcuauggcaucuuugcc

SEQ ID NO: 122162 - RNA, 19 nt, Artificial Sequence
  Description of Artificial Sequence: Synthetic oligonucleotide
caugaaguuguggccuccu

SEQ ID NO: 122163 - RNA, 19 nt, Artificial Sequence
  Description of Artificial Sequence: Synthetic oligonucleotide
uuggauucuucugacuuug

SEQ ID NO: 122164 - RNA, 19 nt, Artificial Sequence
  Description of Artificial Sequence: Synthetic oligonucleotide
ggcuucugaaaggaaggcc

SEQ ID NO: 122165 - RNA, 19 nt, Artificial Sequence
  Description of Artificial Sequence: Synthetic oligonucleotide
cuagauccagcccuggugg

SEQ ID NO: 122166 - RNA, 19 nt, Artificial Sequence
  Description of Artificial Sequence: Synthetic oligonucleotide
guaguuccuuucugagguc

SEQ ID NO: 122167 - RNA, 19 nt, Artificial Sequence
  Description of Artificial Sequence: Synthetic oligonucleotide
cucucagucccuugagacu

SEQ ID NO: 122168 - RNA, 19 nt, Artificial Sequence
  Description of Artificial Sequence: Synthetic oligonucleotide
uuugggguaguuuggcugc

SEQ ID NO: 122169 - RNA, 19 nt, Artificial Sequence
  Description of Artificial Sequence: Synthetic oligonucleotide
ccauucucacugacaaaau

SEQ ID NO: 122170 - RNA, 19 nt, Artificial Sequence
  Description of Artificial Sequence: Synthetic oligonucleotide
uguauaucagcccccaccu

SEQ ID NO: 122171 - RNA, 19 nt, Artificial Sequence
  Description of Artificial Sequence: Synthetic oligonucleotide
uccaccccccaauauuccu

SEQ ID NO: 122172 - RNA, 19 nt, Artificial Sequence
  Description of Artificial Sequence: Synthetic oligonucleotide
uugaacuuugaauugcuuc

SEQ ID NO: 122173 - RNA, 19 nt, Artificial Sequence
  Description of Artificial Sequence: Synthetic oligonucleotide
cagaacacagguguggccu

SEQ ID NO: 122174 - RNA, 19 nt, Artificial Sequence
  Description of Artificial Sequence: Synthetic oligonucleotide
ugaagguauucccuuauua

SEQ ID NO: 122175 - RNA, 19 nt, Artificial Sequence
  Description of Artificial Sequence: Synthetic oligonucleotide
agggaagugucacugcugu

SEQ ID NO: 122176 - RNA, 19 nt, Artificial Sequence
  Description of Artificial Sequence: Synthetic oligonucleotide
ucuucuagucaaacuugua

SEQ ID NO: 122177 - RNA, 19 nt, Artificial Sequence
  Description of Artificial Sequence: Synthetic oligonucleotide
aaagaaaaagauuccaguu

SEQ ID NO: 122178 - RNA, 19 nt, Artificial Sequence
  Description of Artificial Sequence: Synthetic oligonucleotide
ucaguauuugcagcaagaa

SEQ ID NO: 122179 - RNA, 19 nt, Artificial Sequence
  Description of Artificial Sequence: Synthetic oligonucleotide
agcuugaaugcuguucuuu

SEQ ID NO: 122180 - RNA, 19 nt, Artificial Sequence
  Description of Artificial Sequence: Synthetic oligonucleotide
uuuaucgcauuguuacauc

SEQ ID NO: 122181 - RNA, 19 nt, Artificial Sequence
  Description of Artificial Sequence: Synthetic oligonucleotide
cgacucauucuccauuuug

SEQ ID NO: 122182 - RNA, 19 nt, Artificial Sequence
  Description of Artificial Sequence: Synthetic oligonucleotide
gcuuugguuuugucuugac

SEQ ID NO: 122183 - RNA, 19 nt, Artificial Sequence
  Description of Artificial Sequence: Synthetic oligonucleotide
cuugacuugacuuuggggg

SEQ ID NO: 122184 - RNA, 19 nt, Artificial Sequence
  Description of Artificial Sequence: Synthetic oligonucleotide
guaaagucuuucaccagca

SEQ ID NO: 122185 - RNA, 19 nt, Artificial Sequence
  Description of Artificial Sequence: Synthetic oligonucleotide
acacaagaguuugauugua

SEQ ID NO: 122186 - RNA, 19 nt, Artificial Sequence
  Description of Artificial Sequence: Synthetic oligonucleotide
acaaauauaucuucugcau

SEQ ID NO: 122187 - RNA, 19 nt, Artificial Sequence
  Description of Artificial Sequence: Synthetic oligonucleotide
uuaacaucucugccuguug

SEQ ID NO: 122188 - RNA, 19 nt, Artificial Sequence
  Description of Artificial Sequence: Synthetic oligonucleotide
gcuuaagaucaguugcuuu

SEQ ID NO: 122189 - RNA, 19 nt, Artificial Sequence
  Description of Artificial Sequence: Synthetic oligonucleotide
uuauacucagaauggaaau

SEQ ID NO: 122190 - RNA, 19 nt, Artificial Sequence
  Description of Artificial Sequence: Synthetic oligonucleotide
uaccugaucuuggcuaguu

SEQ ID NO: 122191 - RNA, 19 nt, Artificial Sequence
  Description of Artificial Sequence: Synthetic oligonucleotide
uuuguuauaagauauugau

SEQ ID NO: 122192 - RNA, 19 nt, Artificial Sequence
  Description of Artificial Sequence: Synthetic oligonucleotide
uuucauuuagauuucccuc

SEQ ID NO: 122193 - RNA, 19 nt, Artificial Sequence
  Description of Artificial Sequence: Synthetic oligonucleotide
ccacgaggucagcaaacua

SEQ ID NO: 122194 - RNA, 19 nt, Artificial Sequence
  Description of Artificial Sequence: Synthetic oligonucleotide
aucauguucuuauguaaac

SEQ ID NO: 122195 - RNA, 19 nt, Artificial Sequence
  Description of Artificial Sequence: Synthetic oligonucleotide
cuuaggccaaggccagagu

SEQ ID NO: 122196 - RNA, 19 nt, Artificial Sequence
  Description of Artificial Sequence: Synthetic oligonucleotide
uuaucauagucccuagguu

SEQ ID NO: 122197 - RNA, 19 nt, Artificial Sequence
  Description of Artificial Sequence: Synthetic oligonucleotide
ugcuacggcuuaucaugug

SEQ ID NO: 122198 - RNA, 19 nt, Artificial Sequence
  Description of Artificial Sequence: Synthetic oligonucleotide
gcuugguaaaaggugaucg

SEQ ID NO: 122199 - RNA, 19 nt, Artificial Sequence
  Description of Artificial Sequence: Synthetic oligonucleotide
gcagguucucagacgaguu

SEQ ID NO: 122200 - RNA, 19 nt, Artificial Sequence
  Description of Artificial Sequence: Synthetic oligonucleotide
uuacuuuacaugagaugga

SEQ ID NO: 122201 - RNA, 19 nt, Artificial Sequence
  Description of Artificial Sequence: Synthetic oligonucleotide
aaucaggcagagaggcugg

SEQ ID NO: 122202 - RNA, 19 nt, Artificial Sequence
  Description of Artificial Sequence: Synthetic oligonucleotide
ggaugauggagaaagcucg

SEQ ID NO: 122203 - RNA, 19 nt, Artificial Sequence
  Description of Artificial Sequence: Synthetic oligonucleotide
gaggugaaguuuuaaaaaa

SEQ ID NO: 122204 - RNA, 19 nt, Artificial Sequence
  Description of Artificial Sequence: Synthetic oligonucleotide
aaaaguuguggaaaggaaa

SEQ ID NO: 122205 - RNA, 19 nt, Artificial Sequence
  Description of Artificial Sequence: Synthetic oligonucleotide
aguuccaaagaggugguuu

SEQ ID NO: 122206 - RNA, 19 nt, Artificial Sequence
  Description of Artificial Sequence: Synthetic oligonucleotide
ucugaggaagucagagcgc

SEQ ID NO: 122207 - RNA, 19 nt, Artificial Sequence
  Description of Artificial Sequence: Synthetic oligonucleotide
cccagggccagagcaguca

SEQ ID NO: 122208 - RNA, 19 nt, Artificial Sequence
  Description of Artificial Sequence: Synthetic oligonucleotide
aguaaugggugaaugaggu

SEQ ID NO: 122209 - RNA, 19 nt, Artificial Sequence
  Description of Artificial Sequence: Synthetic oligonucleotide
uuguuuggaaagucggugu

SEQ ID NO: 122210 - RNA, 19 nt, Artificial Sequence
  Description of Artificial Sequence: Synthetic oligonucleotide
ugacagacacauggaugcc

SEQ ID NO: 122211 - RNA, 19 nt, Artificial Sequence
  Description of Artificial Sequence: Synthetic oligonucleotide
caucuacuucuagguugcu

SEQ ID NO: 122212 - RNA, 19 nt, Artificial Sequence
  Description of Artificial Sequence: Synthetic oligonucleotide
ugguggguauuaaauaugc

SEQ ID NO: 122213 - RNA, 19 nt, Artificial Sequence
  Description of Artificial Sequence: Synthetic oligonucleotide
cacaauauuccauagcuca

SEQ ID NO: 122214 - RNA, 19 nt, Artificial Sequence
  Description of Artificial Sequence: Synthetic oligonucleotide
acugaggauuuuaaaauua

SEQ ID NO: 122215 - RNA, 19 nt, Artificial Sequence
  Description of Artificial Sequence: Synthetic oligonucleotide
auaagcauaggauuuuaua

SEQ ID NO: 122216 - RNA, 19 nt, Artificial Sequence
  Description of Artificial Sequence: Synthetic oligonucleotide
auuuuggggugaaagaauu

SEQ ID NO: 122217 - RNA, 19 nt, Artificial Sequence
  Description of Artificial Sequence: Synthetic oligonucleotide
uaucuggcacauuagguau

SEQ ID NO: 122218 - RNA, 19 nt, Artificial Sequence
  Description of Artificial Sequence: Synthetic oligonucleotide
uuggaguuuaaaaaaaaag

SEQ ID NO: 122219 - RNA, 19 nt, Artificial Sequence
  Description of Artificial Sequence: Synthetic oligonucleotide
gccaaauuucacagucuua

SEQ ID NO: 122220 - RNA, 19 nt, Artificial Sequence
  Description of Artificial Sequence: Synthetic oligonucleotide
aauaacuuuuuuuaaaaaa

SEQ ID NO: 122221 - RNA, 19 nt, Artificial Sequence
  Description of Artificial Sequence: Synthetic oligonucleotide
aaacuaaaaggcgcuucau

SEQ ID NO: 122222 - RNA, 19 nt, Artificial Sequence
  Description of Artificial Sequence: Synthetic oligonucleotide
uguccaguguguggcccuu

SEQ ID NO: 122223 - RNA, 19 nt, Artificial Sequence
  Description of Artificial Sequence: Synthetic oligonucleotide
ucugaaacuuauggucauc

SEQ ID NO: 122224 - RNA, 19 nt, Artificial Sequence
  Description of Artificial Sequence: Synthetic oligonucleotide
cucucccacugaaaccaag

SEQ ID NO: 122225 - RNA, 19 nt, Artificial Sequence
  Description of Artificial Sequence: Synthetic oligonucleotide
ggucuuuucaaauguggcu

SEQ ID NO: 122226 - RNA, 19 nt, Artificial Sequence
  Description of Artificial Sequence: Synthetic oligonucleotide
uaaauggggaugaggagac

SEQ ID NO: 122227 - RNA, 19 nt, Artificial Sequence
  Description of Artificial Sequence: Synthetic oligonucleotide
cacggguaggacuuucuug

SEQ ID NO: 122228 - RNA, 19 nt, Artificial Sequence
  Description of Artificial Sequence: Synthetic oligonucleotide
ggugugugugcauucuuua

SEQ ID NO: 122229 - RNA, 19 nt, Artificial Sequence
  Description of Artificial Sequence: Synthetic oligonucleotide
aaagagccaaguugcuucg

SEQ ID NO: 122230 - RNA, 19 nt, Artificial Sequence
  Description of Artificial Sequence: Synthetic oligonucleotide
ggggaaacagccaggaaaa

SEQ ID NO: 122231 - RNA, 19 nt, Artificial Sequence
  Description of Artificial Sequence: Synthetic oligonucleotide
auggucaagauuauuuuua

SEQ ID NO: 122232 - RNA, 19 nt, Artificial Sequence
  Description of Artificial Sequence: Synthetic oligonucleotide
agagguuauuuuauugggg

SEQ ID NO: 122233 - RNA, 19 nt, Artificial Sequence
  Description of Artificial Sequence: Synthetic oligonucleotide
gauuuuaagaacuaauaac

SEQ ID NO: 122234 - RNA, 19 nt, Artificial Sequence
  Description of Artificial Sequence: Synthetic oligonucleotide
caucuugaguuauuuuuaa

SEQ ID NO: 122235 - RNA, 19 nt, Artificial Sequence
  Description of Artificial Sequence: Synthetic oligonucleotide
auucagggggauguggaaa

SEQ ID NO: 122236 - RNA, 19 nt, Artificial Sequence
  Description of Artificial Sequence: Synthetic oligonucleotide
agguuugcaauugucaagu

SEQ ID NO: 122237 - RNA, 19 nt, Artificial Sequence
  Description of Artificial Sequence: Synthetic oligonucleotide
uguuuuguuguagcuuagu

SEQ ID NO: 122238 - RNA, 19 nt, Artificial Sequence
  Description of Artificial Sequence: Synthetic oligonucleotide
uauccauaagggaaacuua

SEQ ID NO: 122239 - RNA, 19 nt, Artificial Sequence
  Description of Artificial Sequence: Synthetic oligonucleotide
agacuauagacauaacuac

SEQ ID NO: 122240 - RNA, 19 nt, Artificial Sequence
  Description of Artificial Sequence: Synthetic oligonucleotide
caaagccagugcagcuuuu

SEQ ID NO: 122241 - RNA, 19 nt, Artificial Sequence
  Description of Artificial Sequence: Synthetic oligonucleotide
uguuuucuguauguuguug

SEQ ID NO: 122242 - RNA, 19 nt, Artificial Sequence
  Description of Artificial Sequence: Synthetic oligonucleotide
gggggaucaacuuucacac

SEQ ID NO: 122243 - RNA, 19 nt, Artificial Sequence
  Description of Artificial Sequence: Synthetic oligonucleotide
cauagcaagcacauggccu

SEQ ID NO: 122244 - RNA, 19 nt, Artificial Sequence
  Description of Artificial Sequence: Synthetic oligonucleotide
ucccugaugucaggaugcc

SEQ ID NO: 122245 - RNA, 19 nt, Artificial Sequence
  Description of Artificial Sequence: Synthetic oligonucleotide
cuuuguuaggaucuguauu

SEQ ID NO: 122246 - RNA, 19 nt, Artificial Sequence
  Description of Artificial Sequence: Synthetic oligonucleotide
uugcccuuaauuuuguuga

SEQ ID NO: 122247 - RNA, 19 nt, Artificial Sequence
  Description of Artificial Sequence: Synthetic oligonucleotide
aaaucuuuuuuccuucuuc

SEQ ID NO: 122248 - RNA, 19 nt, Artificial Sequence
  Description of Artificial Sequence: Synthetic oligonucleotide
ccucuugaaaaguuccaaa

SEQ ID NO: 122249 - RNA, 19 nt, Artificial Sequence
  Description of Artificial Sequence: Synthetic oligonucleotide
aauauaguuuauuguaucu

SEQ ID NO: 122250 - RNA, 19 nt, Artificial Sequence
  Description of Artificial Sequence: Synthetic oligonucleotide
uuucaucacuaaaaauuug

SEQ ID NO: 122251 - RNA, 19 nt, Artificial Sequence
  Description of Artificial Sequence: Synthetic oligonucleotide
guuccuuuuucacuauggg

SEQ ID NO: 122252 - RNA, 19 nt, Artificial Sequence
  Description of Artificial Sequence: Synthetic oligonucleotide
gcaguucacacaaggcaaa

SEQ ID NO: 122253 - RNA, 19 nt, Artificial Sequence
  Description of Artificial Sequence: Synthetic oligonucleotide
aaacuauugaacaguuggu

SEQ ID NO: 122254 - RNA, 19 nt, Artificial Sequence
  Description of Artificial Sequence: Synthetic oligonucleotide
uuuuaguguguuguauaac

SEQ ID NO: 122255 - RNA, 19 nt, Artificial Sequence
  Description of Artificial Sequence: Synthetic oligonucleotide
cuuugcuguauaucaaacu

SEQ ID NO: 122256 - RNA, 19 nt, Artificial Sequence
  Description of Artificial Sequence: Synthetic oligonucleotide
uaauuuugacaaguuuuca

SEQ ID NO: 122257 - RNA, 19 nt, Artificial Sequence
  Description of Artificial Sequence: Synthetic oligonucleotide
auccuaagccucaaaucau

SEQ ID NO: 122258 - RNA, 19 nt, Artificial Sequence
  Description of Artificial Sequence: Synthetic oligonucleotide
uguaauuaauaauuugccu

SEQ ID NO: 122259 - RNA, 19 nt, Artificial Sequence
  Description of Artificial Sequence: Synthetic oligonucleotide
uguuuauuuaugaccuaau

SEQ ID NO: 122260 - RNA, 19 nt, Artificial Sequence
  Description of Artificial Sequence: Synthetic oligonucleotide
uugugauucuuuuauuaau

SEQ ID NO: 122261 - RNA, 19 nt, Artificial Sequence
  Description of Artificial Sequence: Synthetic oligonucleotide
uaaaagcuaaugggaaaag

SEQ ID NO: 122262 - RNA, 19 nt, Artificial Sequence
  Description of Artificial Sequence: Synthetic oligonucleotide
ggaucccugauuaagcuga

SEQ ID NO: 122263 - RNA, 19 nt, Artificial Sequence
  Description of Artificial Sequence: Synthetic oligonucleotide
augacuagaccuacaauua

SEQ ID NO: 122264 - RNA, 19 nt, Artificial Sequence
  Description of Artificial Sequence: Synthetic oligonucleotide
aauuuuccugcaguauaug

SEQ ID NO: 122265 - RNA, 19 nt, Artificial Sequence
  Description of Artificial Sequence: Synthetic oligonucleotide
gaaguauuguaccagagua

SEQ ID NO: 122266 - RNA, 19 nt, Artificial Sequence
  Description of Artificial Sequence: Synthetic oligonucleotide
auuaaaagauauguaauau

SEQ ID NO: 122267 - RNA, 19 nt, Artificial Sequence
  Description of Artificial Sequence: Synthetic oligonucleotide
uuuuauugauaaaucuauc

SEQ ID NO: 122268 - RNA, 19 nt, Artificial Sequence
  Description of Artificial Sequence: Synthetic oligonucleotide
ccuuuaaaaggaauacguu

SEQ ID NO: 122269 - RNA, 19 nt, Artificial Sequence
  Description of Artificial Sequence: Synthetic oligonucleotide
uuuaggaugucaucauuuu

SEQ ID NO: 122270 - RNA, 19 nt, Artificial Sequence
  Description of Artificial Sequence: Synthetic oligonucleotide
ugaugugaaucauguaaau

SEQ ID NO: 122271 - RNA, 19 nt, Artificial Sequence
  Description of Artificial Sequence: Synthetic oligonucleotide
uguugauaauaugcuguuu

SEQ ID NO: 122272 - RNA, 19 nt, Artificial Sequence
  Description of Artificial Sequence: Synthetic oligonucleotide
uauuauacauuuaguguuu

SEQ ID NO: 122273 - RNA, 19 nt, Artificial Sequence
  Description of Artificial Sequence: Synthetic oligonucleotide
ucaagagauucacuuaauu

SEQ ID NO: 122274 - RNA, 19 nt, Artificial Sequence
  Description of Artificial Sequence: Synthetic oligonucleotide
ugccuuuuugcccacguau

SEQ ID NO: 122275 - RNA, 19 nt, Artificial Sequence
  Description of Artificial Sequence: Synthetic oligonucleotide
uauuauguagucuauuugc

SEQ ID NO: 122276 - RNA, 19 nt, Artificial Sequence
  Description of Artificial Sequence: Synthetic oligonucleotide
caacuguucuuaaaaaaau

SEQ ID NO: 122277 - RNA, 19 nt, Artificial Sequence
  Description of Artificial Sequence: Synthetic oligonucleotide
ugacauuaaaagaauaguu

SEQ ID NO: 122278 - RNA, 19 nt, Artificial Sequence
  Description of Artificial Sequence: Synthetic oligonucleotide
uuauguagagaaacauuag

SEQ ID NO: 122279 - RNA, 19 nt, Artificial Sequence
  Description of Artificial Sequence: Synthetic oligonucleotide
guggauguuaauugucucc

SEQ ID NO: 122280 - RNA, 19 nt, Artificial Sequence
  Description of Artificial Sequence: Synthetic oligonucleotide
cccaccuauauuuaugggu

SEQ ID NO: 122281 - RNA, 19 nt, Artificial Sequence
  Description of Artificial Sequence: Synthetic oligonucleotide
uguuagcgcaacugcuuug

SEQ ID NO: 122282 - RNA, 19 nt, Artificial Sequence
  Description of Artificial Sequence: Synthetic oligonucleotide
gcuaguugcaaagcuguau

SEQ ID NO: 122283 - RNA, 19 nt, Artificial Sequence
  Description of Artificial Sequence: Synthetic oligonucleotide
uuaucagaguaaaagugua

SEQ ID NO: 122284 - RNA, 19 nt, Artificial Sequence
  Description of Artificial Sequence: Synthetic oligonucleotide
auuuguaaacuguauggga

SEQ ID NO: 122285 - RNA, 19 nt, Artificial Sequence
  Description of Artificial Sequence: Synthetic oligonucleotide
aacuaaaaauuaggaauaa

SEQ ID NO: 122286 - RNA, 19 nt, Artificial Sequence
  Description of Artificial Sequence: Synthetic oligonucleotide
aaaccauuuucuuauauga

SEQ ID NO: 122287 - RNA, 25 nt, Artificial Sequence
  Description of Artificial Sequence: Synthetic oligonucleotide
cggccgcgguuuccaggaggaagca

SEQ ID NO: 122288 - RNA, 25 nt, Artificial Sequence
  Description of Artificial Sequence: Synthetic oligonucleotide
aaggaugcuuuggacacugugcgug

SEQ ID NO: 122289 - RNA, 25 nt, Artificial Sequence
  Description of Artificial Sequence: Synthetic oligonucleotide
ggcgccuccgcggagcccccgcgcu

SEQ ID NO: 122290 - RNA, 25 nt, Artificial Sequence
  Description of Artificial Sequence: Synthetic oligonucleotide
ugccauucccggccgucgcucgguc

SEQ ID NO: 122291 - RNA, 25 nt, Artificial Sequence
  Description of Artificial Sequence: Synthetic oligonucleotide
ccuccgcugacgggaagcaggaagu

SEQ ID NO: 122292 - RNA, 25 nt, Artificial Sequence
  Description of Artificial Sequence: Synthetic oligonucleotide
uggcggcgggcgucgcgagcgguga

SEQ ID NO: 122293 - RNA, 25 nt, Artificial Sequence
  Description of Artificial Sequence: Synthetic oligonucleotide
acaucacgggggcgacggcggcgaa

SEQ ID NO: 122294 - RNA, 25 nt, Artificial Sequence
  Description of Artificial Sequence: Synthetic oligonucleotide
agggcgggggcggaggaggagcgag

SEQ ID NO: 122295 - RNA, 25 nt, Artificial Sequence
  Description of Artificial Sequence: Synthetic oligonucleotide
gccgggccggggggcagcugcacag

SEQ ID NO: 122296 - RNA, 25 nt, Artificial Sequence
  Description of Artificial Sequence: Synthetic oligonucleotide
gucuccgggauccccaggccuggag

SEQ ID NO: 122297 - RNA, 25 nt, Artificial Sequence
  Description of Artificial Sequence: Synthetic oligonucleotide
ggggggucugugcgcggccggcugg

SEQ ID NO: 122298 - RNA, 25 nt, Artificial Sequence
  Description of Artificial Sequence: Synthetic oligonucleotide
gcucugccccgcguccggucccgag

SEQ ID NO: 122299 - RNA, 25 nt, Artificial Sequence
  Description of Artificial Sequence: Synthetic oligonucleotide
gcgggccucccucgggccagcccga

SEQ ID NO: 122300 - RNA, 25 nt, Artificial Sequence
  Description of Artificial Sequence: Synthetic oligonucleotide
augugaccgagcccagcggagccug

SEQ ID NO: 122301 - RNA, 25 nt, Artificial Sequence
  Description of Artificial Sequence: Synthetic oligonucleotide
gagcaaggagcggguccgucgcgga

SEQ ID NO: 122302 - RNA, 25 nt, Artificial Sequence
  Description of Artificial Sequence: Synthetic oligonucleotide
agccggagggcgggaggaacaugac

SEQ ID NO: 122303 - RNA, 25 nt, Artificial Sequence
  Description of Artificial Sequence: Synthetic oligonucleotide
caucgcggagaugguuucacccaaa

SEQ ID NO: 122304 - RNA, 25 nt, Artificial Sequence
  Description of Artificial Sequence: Synthetic oligonucleotide
auaucacugguguggaggcagaaaa

SEQ ID NO: 122305 - RNA, 25 nt, Artificial Sequence
  Description of Artificial Sequence: Synthetic oligonucleotide
accuacuguugacaagaggaguuga

SEQ ID NO: 122306 - RNA, 25 nt, Artificial Sequence
  Description of Artificial Sequence: Synthetic oligonucleotide
auggcaguuuuuuggcaaggccuag

SEQ ID NO: 122307 - RNA, 25 nt, Artificial Sequence
  Description of Artificial Sequence: Synthetic oligonucleotide
guaaaaguaacccuggagacuucac

SEQ ID NO: 122308 - RNA, 25 nt, Artificial Sequence
  Description of Artificial Sequence: Synthetic oligonucleotide
cacuuuccguuagaagaaauggagc

SEQ ID NO: 122309 - RNA, 25 nt, Artificial Sequence
  Description of Artificial Sequence: Synthetic oligonucleotide
cugucacccacaucaagauucagaa

SEQ ID NO: 122310 - RNA, 25 nt, Artificial Sequence
  Description of Artificial Sequence: Synthetic oligonucleotide
acacuggugauuacuaugaccugua

SEQ ID NO: 122311 - RNA, 25 nt, Artificial Sequence
  Description of Artificial Sequence: Synthetic oligonucleotide
auggaggggagaaauuugccacuuu

SEQ ID NO: 122312 - RNA, 25 nt, Artificial Sequence
  Description of Artificial Sequence: Synthetic oligonucleotide
uggcugaguugguccaguauuacau

SEQ ID NO: 122313 - RNA, 25 nt, Artificial Sequence
  Description of Artificial Sequence: Synthetic oligonucleotide
uggaacaucacgggcaauuaaaaga

SEQ ID NO: 122314 - RNA, 25 nt, Artificial Sequence
  Description of Artificial Sequence: Synthetic oligonucleotide
agaagaauggagaugucauugagcu

SEQ ID NO: 122315 - RNA, 25 nt, Artificial Sequence
  Description of Artificial Sequence: Synthetic oligonucleotide
uuaaauauccucugaacugugcaga

SEQ ID NO: 122316 - RNA, 25 nt, Artificial Sequence
  Description of Artificial Sequence: Synthetic oligonucleotide
auccuaccucugaaaggugguuuca

SEQ ID NO: 122317 - RNA, 25 nt, Artificial Sequence
  Description of Artificial Sequence: Synthetic oligonucleotide
auggacaucucucugggaaagaagc

SEQ ID NO: 122318 - RNA, 25 nt, Artificial Sequence
  Description of Artificial Sequence: Synthetic oligonucleotide
cagagaaauuauuaacugaaaaagg

SEQ ID NO: 122319 - RNA, 25 nt, Artificial Sequence
  Description of Artificial Sequence: Synthetic oligonucleotide
gaaaacaugguaguuuucuuguacg

SEQ ID NO: 122320 - RNA, 25 nt, Artificial Sequence
  Description of Artificial Sequence: Synthetic oligonucleotide
gagagagccagagccacccuggaga

SEQ ID NO: 122321 - RNA, 25 nt, Artificial Sequence
  Description of Artificial Sequence: Synthetic oligonucleotide
auuuuguucuuucugugcgcacugg

SEQ ID NO: 122322 - RNA, 25 nt, Artificial Sequence
  Description of Artificial Sequence: Synthetic oligonucleotide
gugaugacaaaggggagagcaauga

SEQ ID NO: 122323 - RNA, 25 nt, Artificial Sequence
  Description of Artificial Sequence: Synthetic oligonucleotide
acggcaagucuaaagugacccaugu

SEQ ID NO: 122324 - RNA, 25 nt, Artificial Sequence
  Description of Artificial Sequence: Synthetic oligonucleotide
uuaugauucgcugucaggaacugaa

SEQ ID NO: 122325 - RNA, 25 nt, Artificial Sequence
  Description of Artificial Sequence: Synthetic oligonucleotide
aauacgacguugguggaggagaacg

SEQ ID NO: 122326 - RNA, 25 nt, Artificial Sequence
  Description of Artificial Sequence: Synthetic oligonucleotide
gguuugauucuuugacagaucuugu

SEQ ID NO: 122327 - RNA, 25 nt, Artificial Sequence
  Description of Artificial Sequence: Synthetic oligonucleotide
uggaacauuauaagaagaauccuau

SEQ ID NO: 122328 - RNA, 25 nt, Artificial Sequence
  Description of Artificial Sequence: Synthetic oligonucleotide
ugguggaaacauuggguacaguacu

SEQ ID NO: 122329 - RNA, 25 nt, Artificial Sequence
  Description of Artificial Sequence: Synthetic oligonucleotide
uacaacucaagcagccccuuaacac

SEQ ID NO: 122330 - RNA, 25 nt, Artificial Sequence
  Description of Artificial Sequence: Synthetic oligonucleotide
cgacucguauaaaugcugcugaaau

SEQ ID NO: 122331 - RNA, 25 nt, Artificial Sequence
  Description of Artificial Sequence: Synthetic oligonucleotide
uagaaagcagaguucgagaacuaag

SEQ ID NO: 122332 - RNA, 25 nt, Artificial Sequence
  Description of Artificial Sequence: Synthetic oligonucleotide
gcaaauuagcugagaccacagauaa

SEQ ID NO: 122333 - RNA, 25 nt, Artificial Sequence
  Description of Artificial Sequence: Synthetic oligonucleotide
aagucaaacaaggcuuuugggaaga

SEQ ID NO: 122334 - RNA, 25 nt, Artificial Sequence
  Description of Artificial Sequence: Synthetic oligonucleotide
aauuugagacacuacaacaacagga

SEQ ID NO: 122335 - RNA, 25 nt, Artificial Sequence
  Description of Artificial Sequence: Synthetic oligonucleotide
agugcaaacuucucuacagccgaaa

SEQ ID NO: 122336 - RNA, 25 nt, Artificial Sequence
  Description of Artificial Sequence: Synthetic oligonucleotide
aagagggucaaaggcaagaaaacaa

SEQ ID NO: 122337 - RNA, 25 nt, Artificial Sequence
  Description of Artificial Sequence: Synthetic oligonucleotide
aaaacaaaaauagauauaaaaacau

SEQ ID NO: 122338 - RNA, 25 nt, Artificial Sequence
  Description of Artificial Sequence: Synthetic oligonucleotide
uccugcccuuugaucauaccagggu

SEQ ID NO: 122339 - RNA, 25 nt, Artificial Sequence
  Description of Artificial Sequence: Synthetic oligonucleotide
uuguccuacacgauggugaucccaa

SEQ ID NO: 122340 - RNA, 25 nt, Artificial Sequence
  Description of Artificial Sequence: Synthetic oligonucleotide
augagccuguuucagauuacaucaa

SEQ ID NO: 122341 - RNA, 25 nt, Artificial Sequence
  Description of Artificial Sequence: Synthetic oligonucleotide
augcaaauaucaucaugccugaauu

SEQ ID NO: 122342 - RNA, 25 nt, Artificial Sequence
  Description of Artificial Sequence: Synthetic oligonucleotide
uugaaaccaagugcaacaauucaaa

SEQ ID NO: 122343 - RNA, 25 nt, Artificial Sequence
  Description of Artificial Sequence: Synthetic oligonucleotide
agcccaaaaagaguuacauugccac

SEQ ID NO: 122344 - RNA, 25 nt, Artificial Sequence
  Description of Artificial Sequence: Synthetic oligonucleotide
cacaaggcugccugcaaaacacggu

SEQ ID NO: 122345 - RNA, 25 nt, Artificial Sequence
  Description of Artificial Sequence: Synthetic oligonucleotide
ugaaugacuuuuggcggaugguguu

SEQ ID NO: 122346 - RNA, 25 nt, Artificial Sequence
  Description of Artificial Sequence: Synthetic oligonucleotide
uccaagaaaacucccgagugauugu

SEQ ID NO: 122347 - RNA, 25 nt, Artificial Sequence
  Description of Artificial Sequence: Synthetic oligonucleotide
ucaugacaacgaaagaaguggagag

SEQ ID NO: 122348 - RNA, 25 nt, Artificial Sequence
  Description of Artificial Sequence: Synthetic oligonucleotide
gaggaaagaguaaaugugucaaaua

SEQ ID NO: 122349 - RNA, 25 nt, Artificial Sequence
  Description of Artificial Sequence: Synthetic oligonucleotide
acuggccugaugaguaugcucuaaa

SEQ ID NO: 122350 - RNA, 25 nt, Artificial Sequence
  Description of Artificial Sequence: Synthetic oligonucleotide
aagaauauggcgucaugcguguuag

SEQ ID NO: 122351 - RNA, 25 nt, Artificial Sequence
  Description of Artificial Sequence: Synthetic oligonucleotide
ggaacgucaaagaaagcgccgcuca

SEQ ID NO: 122352 - RNA, 25 nt, Artificial Sequence
  Description of Artificial Sequence: Synthetic oligonucleotide
augacuauacgcuaagagaacuuaa

SEQ ID NO: 122353 - RNA, 25 nt, Artificial Sequence
  Description of Artificial Sequence: Synthetic oligonucleotide
aacuuucaaagguuggacaagggaa

SEQ ID NO: 122354 - RNA, 25 nt, Artificial Sequence
  Description of Artificial Sequence: Synthetic oligonucleotide
auacggagagaacggucuggcaaua

SEQ ID NO: 122355 - RNA, 25 nt, Artificial Sequence
  Description of Artificial Sequence: Synthetic oligonucleotide
accacuuucggaccuggccggacca

SEQ ID NO: 122356 - RNA, 25 nt, Artificial Sequence
  Description of Artificial Sequence: Synthetic oligonucleotide
acggcgugcccagcgacccuggggg

SEQ ID NO: 122357 - RNA, 25 nt, Artificial Sequence
  Description of Artificial Sequence: Synthetic oligonucleotide
gcgugcuggacuuccuggaggaggu

SEQ ID NO: 122358 - RNA, 25 nt, Artificial Sequence
  Description of Artificial Sequence: Synthetic oligonucleotide
ugcaccauaagcaggagagcaucau

SEQ ID NO: 122359 - RNA, 25 nt, Artificial Sequence
  Description of Artificial Sequence: Synthetic oligonucleotide
uggaugcagggccggucguggugca

SEQ ID NO: 122360 - RNA, 25 nt, Artificial Sequence
  Description of Artificial Sequence: Synthetic oligonucleotide
acugcagugcuggaauuggccggac

SEQ ID NO: 122361 - RNA, 25 nt, Artificial Sequence
  Description of Artificial Sequence: Synthetic oligonucleotide
cagggacguucauugugauugauau

SEQ ID NO: 122362 - RNA, 25 nt, Artificial Sequence
  Description of Artificial Sequence: Synthetic oligonucleotide
uucuuauugacaucaucagagagaa

SEQ ID NO: 122363 - RNA, 25 nt, Artificial Sequence
  Description of Artificial Sequence: Synthetic oligonucleotide
aagguguugacugcgauauugacgu

SEQ ID NO: 122364 - RNA, 25 nt, Artificial Sequence
  Description of Artificial Sequence: Synthetic oligonucleotide
uucccaaaaccauccagauggugcg

SEQ ID NO: 122365 - RNA, 25 nt, Artificial Sequence
  Description of Artificial Sequence: Synthetic oligonucleotide
ggucucagaggucagggauggucca

SEQ ID NO: 122366 - RNA, 25 nt, Artificial Sequence
  Description of Artificial Sequence: Synthetic oligonucleotide
agacagaagcacaguaccgauuuau

SEQ ID NO: 122367 - RNA, 25 nt, Artificial Sequence
  Description of Artificial Sequence: Synthetic oligonucleotide
ucuauauggcgguccagcauuauau

SEQ ID NO: 122368 - RNA, 25 nt, Artificial Sequence
  Description of Artificial Sequence: Synthetic oligonucleotide
uugaaacacuacagcgcaggauuga

SEQ ID NO: 122369 - RNA, 25 nt, Artificial Sequence
  Description of Artificial Sequence: Synthetic oligonucleotide
aagaagagcagaaaagcaagaggaa

SEQ ID NO: 122370 - RNA, 25 nt, Artificial Sequence
  Description of Artificial Sequence: Synthetic oligonucleotide
aagggcacgaauauacaaauauuaa

SEQ ID NO: 122371 - RNA, 25 nt, Artificial Sequence
  Description of Artificial Sequence: Synthetic oligonucleotide
aguauucucuagcggaccagacgag

SEQ ID NO: 122372 - RNA, 25 nt, Artificial Sequence
  Description of Artificial Sequence: Synthetic oligonucleotide
guggagaucagagcccucucccgcc

SEQ ID NO: 122373 - RNA, 25 nt, Artificial Sequence
  Description of Artificial Sequence: Synthetic oligonucleotide
cuuguacuccaacgccacccugugc

SEQ ID NO: 122374 - RNA, 25 nt, Artificial Sequence
  Description of Artificial Sequence: Synthetic oligonucleotide
cagaaaugagagaagacagugcuag

SEQ ID NO: 122375 - RNA, 25 nt, Artificial Sequence
  Description of Artificial Sequence: Synthetic oligonucleotide
gagucuaugaaaacgugggccugau

SEQ ID NO: 122376 - RNA, 25 nt, Artificial Sequence
  Description of Artificial Sequence: Synthetic oligonucleotide
ugcaacagcagaaaaguuucagaug

SEQ ID NO: 122377 - RNA, 25 nt, Artificial Sequence
  Description of Artificial Sequence: Synthetic oligonucleotide
gagaaaaccugccaaaacuucagca

SEQ ID NO: 122378 - RNA, 25 nt, Artificial Sequence
  Description of Artificial Sequence: Synthetic oligonucleotide
acagaaauagauguggacuuucacc

SEQ ID NO: 122379 - RNA, 25 nt, Artificial Sequence
  Description of Artificial Sequence: Synthetic oligonucleotide
ccucucccuaaaaagaucaagaaca

SEQ ID NO: 122380 - RNA, 25 nt, Artificial Sequence
  Description of Artificial Sequence: Synthetic oligonucleotide
agacgcaagaaaguuuaugugaaga

SEQ ID NO: 122381 - RNA, 25 nt, Artificial Sequence
  Description of Artificial Sequence: Synthetic oligonucleotide
acagaauuuggauuuggaaggcuug

SEQ ID NO: 122382 - RNA, 25 nt, Artificial Sequence
  Description of Artificial Sequence: Synthetic oligonucleotide
gcaaugugguugacuaccuuuugau

SEQ ID NO: 122383 - RNA, 25 nt, Artificial Sequence
  Description of Artificial Sequence: Synthetic oligonucleotide
uaagcaaaauuugaaaccauuuaaa

SEQ ID NO: 122384 - RNA, 25 nt, Artificial Sequence
  Description of Artificial Sequence: Synthetic oligonucleotide
agaccacuguauuuuaacucaacaa

SEQ ID NO: 122385 - RNA, 25 nt, Artificial Sequence
  Description of Artificial Sequence: Synthetic oligonucleotide
auaccugcuucccaauuacucauuu

SEQ ID NO: 122386 - RNA, 25 nt, Artificial Sequence
  Description of Artificial Sequence: Synthetic oligonucleotide
uccucagauaagaagaaaucaucuc

SEQ ID NO: 122387 - RNA, 25 nt, Artificial Sequence
  Description of Artificial Sequence: Synthetic oligonucleotide
cuacaauguagacaacauuauauuu

SEQ ID NO: 122388 - RNA, 25 nt, Artificial Sequence
  Description of Artificial Sequence: Synthetic oligonucleotide
uuauagaauuuguuugaaauugagg

SEQ ID NO: 122389 - RNA, 25 nt, Artificial Sequence
  Description of Artificial Sequence: Synthetic oligonucleotide
gaagcaguuaaauugugcgcuguau

SEQ ID NO: 122390 - RNA, 25 nt, Artificial Sequence
  Description of Artificial Sequence: Synthetic oligonucleotide
uuuugcagauuauggggauucaaau

SEQ ID NO: 122391 - RNA, 25 nt, Artificial Sequence
  Description of Artificial Sequence: Synthetic oligonucleotide
uucuaguaauaggcuuuuuuauuuu

SEQ ID NO: 122392 - RNA, 25 nt, Artificial Sequence
  Description of Artificial Sequence: Synthetic oligonucleotide
uuauuuuuauacccuuaaccaguuu

SEQ ID NO: 122393 - RNA, 25 nt, Artificial Sequence
  Description of Artificial Sequence: Synthetic oligonucleotide
gggaugaugagaagaaaugauuugg

SEQ ID NO: 122394 - RNA, 25 nt, Artificial Sequence
  Description of Artificial Sequence: Synthetic oligonucleotide
ggaaaauuaaguaacaacgaccuag

SEQ ID NO: 122395 - RNA, 25 nt, Artificial Sequence
  Description of Artificial Sequence: Synthetic oligonucleotide
gaaaagugagaacaaucucauuuac

SEQ ID NO: 122396 - RNA, 25 nt, Artificial Sequence
  Description of Artificial Sequence: Synthetic oligonucleotide
ccaucauguauccaguaguggauaa

SEQ ID NO: 122397 - RNA, 25 nt, Artificial Sequence
  Description of Artificial Sequence: Synthetic oligonucleotide
auucauuuugauggcuucuauuuuu

SEQ ID NO: 122398 - RNA, 25 nt, Artificial Sequence
  Description of Artificial Sequence: Synthetic oligonucleotide
uggccaaaugagaauuaagccagug

SEQ ID NO: 122399 - RNA, 25 nt, Artificial Sequence
  Description of Artificial Sequence: Synthetic oligonucleotide
gccugagacugucagaaguugaccu

SEQ ID NO: 122400 - RNA, 25 nt, Artificial Sequence
  Description of Artificial Sequence: Synthetic oligonucleotide
uuugcacuggcauuaaagagucaua

SEQ ID NO: 122401 - RNA, 25 nt, Artificial Sequence
  Description of Artificial Sequence: Synthetic oligonucleotide
agaaaaagaaucauggauauuuaug

SEQ ID NO: 122402 - RNA, 25 nt, Artificial Sequence
  Description of Artificial Sequence: Synthetic oligonucleotide
gaauuaagguaagagguguggcuuu

SEQ ID NO: 122403 - RNA, 25 nt, Artificial Sequence
  Description of Artificial Sequence: Synthetic oligonucleotide
uugaccaauuauaguucggcuguug

SEQ ID NO: 122404 - RNA, 25 nt, Artificial Sequence
  Description of Artificial Sequence: Synthetic oligonucleotide
gacugagaaguuuguggugggaaaa

SEQ ID NO: 122405 - RNA, 25 nt, Artificial Sequence
  Description of Artificial Sequence: Synthetic oligonucleotide
acguuugccauauuuucuuugcauu

SEQ ID NO: 122406 - RNA, 25 nt, Artificial Sequence
  Description of Artificial Sequence: Synthetic oligonucleotide
uugaauaauugucuuguacuuagaa

SEQ ID NO: 122407 - RNA, 25 nt, Artificial Sequence
  Description of Artificial Sequence: Synthetic oligonucleotide
aaaaaggcgucuaugaaugaccagu

SEQ ID NO: 122408 - RNA, 25 nt, Artificial Sequence
  Description of Artificial Sequence: Synthetic oligonucleotide
uguuuuuggucgccaaauguugcug

SEQ ID NO: 122409 - RNA, 25 nt, Artificial Sequence
  Description of Artificial Sequence: Synthetic oligonucleotide
gacaaacuuaucccaaaacuuuagu

SEQ ID NO: 122410 - RNA, 25 nt, Artificial Sequence
  Description of Artificial Sequence: Synthetic oligonucleotide
uggcuuaaaaaaaccugcccccaac

SEQ ID NO: 122411 - RNA, 25 nt, Artificial Sequence
  Description of Artificial Sequence: Synthetic oligonucleotide
cuguuagucaaucugagcugggcuc

SEQ ID NO: 122412 - RNA, 25 nt, Artificial Sequence
  Description of Artificial Sequence: Synthetic oligonucleotide
cagcugggcuguucuucugccagcc

SEQ ID NO: 122413 - RNA, 25 nt, Artificial Sequence
  Description of Artificial Sequence: Synthetic oligonucleotide
cugcagguggccacucaugugguca

SEQ ID NO: 122414 - RNA, 25 nt, Artificial Sequence
  Description of Artificial Sequence: Synthetic oligonucleotide
agcaggucggcggagagacugggau

SEQ ID NO: 122415 - RNA, 25 nt, Artificial Sequence
  Description of Artificial Sequence: Synthetic oligonucleotide
uggcugggcuucucucucugccugc

SEQ ID NO: 122416 - RNA, 25 nt, Artificial Sequence
  Description of Artificial Sequence: Synthetic oligonucleotide
caguccugagucucuccuucuucgu

SEQ ID NO: 122417 - RNA, 25 nt, Artificial Sequence
  Description of Artificial Sequence: Synthetic oligonucleotide
uguagucucuuucaguggccuggcu

SEQ ID NO: 122418 - RNA, 25 nt, Artificial Sequence
  Description of Artificial Sequence: Synthetic oligonucleotide
uggcaggguagcuagaccucucaca

SEQ ID NO: 122419 - RNA, 25 nt, Artificial Sequence
  Description of Artificial Sequence: Synthetic oligonucleotide
augcagcucagagcucccaagagcu

SEQ ID NO: 122420 - RNA, 25 nt, Artificial Sequence
  Description of Artificial Sequence: Synthetic oligonucleotide
ucaaaagcagaaauggccaggccuu

SEQ ID NO: 122421 - RNA, 25 nt, Artificial Sequence
  Description of Artificial Sequence: Synthetic oligonucleotide
ucugaaaacuuaaguccagaauugu

SEQ ID NO: 122422 - RNA, 25 nt, Artificial Sequence
  Description of Artificial Sequence: Synthetic oligonucleotide
ucacagugucccuucuacuucccuc

SEQ ID NO: 122423 - RNA, 25 nt, Artificial Sequence
  Description of Artificial Sequence: Synthetic oligonucleotide
cuauugaugaugaugaugaugauga

SEQ ID NO: 122424 - RNA, 25 nt, Artificial Sequence
  Description of Artificial Sequence: Synthetic oligonucleotide
augaugaugaugaugaugaugauga

SEQ ID NO: 122425 - RNA, 25 nt, Artificial Sequence
  Description of Artificial Sequence: Synthetic oligonucleotide
augguuuuuucuaaucagaagaaag

SEQ ID NO: 122426 - RNA, 25 nt, Artificial Sequence
  Description of Artificial Sequence: Synthetic oligonucleotide
gcugggguaugcccucuacuuacua

SEQ ID NO: 122427 - RNA, 25 nt, Artificial Sequence
  Description of Artificial Sequence: Synthetic oligonucleotide
aaacaagucacaagcccagcucaga

SEQ ID NO: 122428 - RNA, 25 nt, Artificial Sequence
  Description of Artificial Sequence: Synthetic oligonucleotide
auucaagaaaagggugugaaguaga

SEQ ID NO: 122429 - RNA, 25 nt, Artificial Sequence
  Description of Artificial Sequence: Synthetic oligonucleotide
aggugcaguuaaguggggggccacu

SEQ ID NO: 122430 - RNA, 25 nt, Artificial Sequence
  Description of Artificial Sequence: Synthetic oligonucleotide
uagucuaacagacggucacaaccag

SEQ ID NO: 122431 - RNA, 25 nt, Artificial Sequence
  Description of Artificial Sequence: Synthetic oligonucleotide
gugccauggaaaaccaaggauauua

SEQ ID NO: 122432 - RNA, 25 nt, Artificial Sequence
  Description of Artificial Sequence: Synthetic oligonucleotide
agcaaaagcagaaguugcuagugac

SEQ ID NO: 122433 - RNA, 25 nt, Artificial Sequence
  Description of Artificial Sequence: Synthetic oligonucleotide
ccuugggaagccgaagcugcuuaca

SEQ ID NO: 122434 - RNA, 25 nt, Artificial Sequence
  Description of Artificial Sequence: Synthetic oligonucleotide
aguagcugggacaagcugaaaguca

SEQ ID NO: 122435 - RNA, 25 nt, Artificial Sequence
  Description of Artificial Sequence: Synthetic oligonucleotide
agacuaagaaauaaagagagggccu

SEQ ID NO: 122436 - RNA, 25 nt, Artificial Sequence
  Description of Artificial Sequence: Synthetic oligonucleotide
uucaagaagcuuccugaaugauuuc

SEQ ID NO: 122437 - RNA, 25 nt, Artificial Sequence
  Description of Artificial Sequence: Synthetic oligonucleotide
cugcuagcccugagccuauuuuugg

SEQ ID NO: 122438 - RNA, 25 nt, Artificial Sequence
  Description of Artificial Sequence: Synthetic oligonucleotide
gaaccagcacuuggggaaacugauc

SEQ ID NO: 122439 - RNA, 25 nt, Artificial Sequence
  Description of Artificial Sequence: Synthetic oligonucleotide
cuugugaggauggauguguuuaggg

SEQ ID NO: 122440 - RNA, 25 nt, Artificial Sequence
  Description of Artificial Sequence: Synthetic oligonucleotide
gacacagggcuuuugagagcagcac

SEQ ID NO: 122441 - RNA, 25 nt, Artificial Sequence
  Description of Artificial Sequence: Synthetic oligonucleotide
ccaccccacuggggcauccccagac

SEQ ID NO: 122442 - RNA, 25 nt, Artificial Sequence
  Description of Artificial Sequence: Synthetic oligonucleotide
cuugggaaacgugacucuuucuuaa

SEQ ID NO: 122443 - RNA, 25 nt, Artificial Sequence
  Description of Artificial Sequence: Synthetic oligonucleotide
augccacuggguuuuagucaggcca

SEQ ID NO: 122444 - RNA, 25 nt, Artificial Sequence
  Description of Artificial Sequence: Synthetic oligonucleotide
acagugagaaggaacagcccuaaca

SEQ ID NO: 122445 - RNA, 25 nt, Artificial Sequence
  Description of Artificial Sequence: Synthetic oligonucleotide
aggccuccagccagguugaaugagc

SEQ ID NO: 122446 - RNA, 25 nt, Artificial Sequence
  Description of Artificial Sequence: Synthetic oligonucleotide
cucauuuuuguuguagccaaccagu

SEQ ID NO: 122447 - RNA, 25 nt, Artificial Sequence
  Description of Artificial Sequence: Synthetic oligonucleotide
uaagauuugcuaauguucuacauua

SEQ ID NO: 122448 - RNA, 25 nt, Artificial Sequence
  Description of Artificial Sequence: Synthetic oligonucleotide
aagugccuucuccaaagacaucccu

SEQ ID NO: 122449 - RNA, 25 nt, Artificial Sequence
  Description of Artificial Sequence: Synthetic oligonucleotide
ucuuugccucauauguugaaucauc

SEQ ID NO: 122450 - RNA, 25 nt, Artificial Sequence
  Description of Artificial Sequence: Synthetic oligonucleotide
ccagugcggauauuucaaugaaaau

SEQ ID NO: 122451 - RNA, 25 nt, Artificial Sequence
  Description of Artificial Sequence: Synthetic oligonucleotide
uaucauugguugacuuuugugaugg

SEQ ID NO: 122452 - RNA, 25 nt, Artificial Sequence
  Description of Artificial Sequence: Synthetic oligonucleotide
guaauaaugcuauggcaucuuugcc

SEQ ID NO: 122453 - RNA, 25 nt, Artificial Sequence
  Description of Artificial Sequence: Synthetic oligonucleotide
caugaaguuguggccuccuuggauu

SEQ ID NO: 122454 - RNA, 25 nt, Artificial Sequence
  Description of Artificial Sequence: Synthetic oligonucleotide
ucuucugacuuuggcuucugaaagg

SEQ ID NO: 122455 - RNA, 25 nt, Artificial Sequence
  Description of Artificial Sequence: Synthetic oligonucleotide
gaaggccuagauccagcccuggugg

SEQ ID NO: 122456 - RNA, 25 nt, Artificial Sequence
  Description of Artificial Sequence: Synthetic oligonucleotide
guaguuccuuucugaggucucucag

SEQ ID NO: 122457 - RNA, 25 nt, Artificial Sequence
  Description of Artificial Sequence: Synthetic oligonucleotide
gucccuugagacuuugggguaguuu

SEQ ID NO: 122458 - RNA, 25 nt, Artificial Sequence
  Description of Artificial Sequence: Synthetic oligonucleotide
uggcugccauucucacugacaaaau

SEQ ID NO: 122459 - RNA, 25 nt, Artificial Sequence
  Description of Artificial Sequence: Synthetic oligonucleotide
uguauaucagcccccaccuccaccc

SEQ ID NO: 122460 - RNA, 25 nt, Artificial Sequence
  Description of Artificial Sequence: Synthetic oligonucleotide
ccccaauauuccuugaacuuugaau

SEQ ID NO: 122461 - RNA, 25 nt, Artificial Sequence
  Description of Artificial Sequence: Synthetic oligonucleotide
uugcuucagaacacagguguggccu

SEQ ID NO: 122462 - RNA, 25 nt, Artificial Sequence
  Description of Artificial Sequence: Synthetic oligonucleotide
ugaagguauucccuuauuagggaag

SEQ ID NO: 122463 - RNA, 25 nt, Artificial Sequence
  Description of Artificial Sequence: Synthetic oligonucleotide
gugucacugcugucuucuagucaaa

SEQ ID NO: 122464 - RNA, 25 nt, Artificial Sequence
  Description of Artificial Sequence: Synthetic oligonucleotide
acuuguaaagaaaaagauuccaguu

SEQ ID NO: 122465 - RNA, 25 nt, Artificial Sequence
  Description of Artificial Sequence: Synthetic oligonucleotide
ucaguauuugcagcaagaagcuuga

SEQ ID NO: 122466 - RNA, 25 nt, Artificial Sequence
  Description of Artificial Sequence: Synthetic oligonucleotide
aaugcuguucuuuuuaucgcauugu

SEQ ID NO: 122467 - RNA, 25 nt, Artificial Sequence
  Description of Artificial Sequence: Synthetic oligonucleotide
uuacaucgacucauucuccauuuug

SEQ ID NO: 122468 - RNA, 25 nt, Artificial Sequence
  Description of Artificial Sequence: Synthetic oligonucleotide
gcuuugguuuugucuugacuugacu

SEQ ID NO: 122469 - RNA, 25 nt, Artificial Sequence
  Description of Artificial Sequence: Synthetic oligonucleotide
uugacuuuggggguaaagucuuuca

SEQ ID NO: 122470 - RNA, 25 nt, Artificial Sequence
  Description of Artificial Sequence: Synthetic oligonucleotide
accagcacacaagaguuugauugua

SEQ ID NO: 122471 - RNA, 25 nt, Artificial Sequence
  Description of Artificial Sequence: Synthetic oligonucleotide
acaaauauaucuucugcauuaacau

SEQ ID NO: 122472 - RNA, 25 nt, Artificial Sequence
  Description of Artificial Sequence: Synthetic oligonucleotide
ucucugccuguugcuuaagaucagu

SEQ ID NO: 122473 - RNA, 25 nt, Artificial Sequence
  Description of Artificial Sequence: Synthetic oligonucleotide
uugcuuuuauacucagaauggaaau

SEQ ID NO: 122474 - RNA, 25 nt, Artificial Sequence
  Description of Artificial Sequence: Synthetic oligonucleotide
uaccugaucuuggcuaguuuuguua

SEQ ID NO: 122475 - RNA, 25 nt, Artificial Sequence
  Description of Artificial Sequence: Synthetic oligonucleotide
auaagauauugauuucauuuagauu

SEQ ID NO: 122476 - RNA, 25 nt, Artificial Sequence
  Description of Artificial Sequence: Synthetic oligonucleotide
uucccuccacgaggucagcaaacua

SEQ ID NO: 122477 - RNA, 25 nt, Artificial Sequence
  Description of Artificial Sequence: Synthetic oligonucleotide
aucauguucuuauguaaacuuaggc

SEQ ID NO: 122478 - RNA, 25 nt, Artificial Sequence
  Description of Artificial Sequence: Synthetic oligonucleotide
ccaaggccagaguuaucauaguccc

SEQ ID NO: 122479 - RNA, 25 nt, Artificial Sequence
  Description of Artificial Sequence: Synthetic oligonucleotide
cuagguugcuacggcuuaucaugug

SEQ ID NO: 122480 - RNA, 25 nt, Artificial Sequence
  Description of Artificial Sequence: Synthetic oligonucleotide
gcuugguaaaaggugaucgcagguu

SEQ ID NO: 122481 - RNA, 25 nt, Artificial Sequence
  Description of Artificial Sequence: Synthetic oligonucleotide
ucucagacgaguuuacuuuacauga

SEQ ID NO: 122482 - RNA, 25 nt, Artificial Sequence
  Description of Artificial Sequence: Synthetic oligonucleotide
agauggaaucaggcagagaggcugg

SEQ ID NO: 122483 - RNA, 25 nt, Artificial Sequence
  Description of Artificial Sequence: Synthetic oligonucleotide
ggaugauggagaaagcucgagguga

SEQ ID NO: 122484 - RNA, 25 nt, Artificial Sequence
  Description of Artificial Sequence: Synthetic oligonucleotide
aaguuuuaaaaaaaaaguuguggaa

SEQ ID NO: 122485 - RNA, 25 nt, Artificial Sequence
  Description of Artificial Sequence: Synthetic oligonucleotide
aaggaaaguuccaaagaggugguuu

SEQ ID NO: 122486 - RNA, 25 nt, Artificial Sequence
  Description of Artificial Sequence: Synthetic oligonucleotide
ucugaggaagucagagcgcccaggg

SEQ ID NO: 122487 - RNA, 25 nt, Artificial Sequence
  Description of Artificial Sequence: Synthetic oligonucleotide
gccagagcagucaguaaugggugaa

SEQ ID NO: 122488 - RNA, 25 nt, Artificial Sequence
  Description of Artificial Sequence: Synthetic oligonucleotide
augagguuguuuggaaagucggugu

SEQ ID NO: 122489 - RNA, 25 nt, Artificial Sequence
  Description of Artificial Sequence: Synthetic oligonucleotide
ugacagacacauggaugccaucuac

SEQ ID NO: 122490 - RNA, 25 nt, Artificial Sequence
  Description of Artificial Sequence: Synthetic oligonucleotide
cuucuagguugcugguggguauuaa

SEQ ID NO: 122491 - RNA, 25 nt, Artificial Sequence
  Description of Artificial Sequence: Synthetic oligonucleotide
aauaugcacaauauuccauagcuca

SEQ ID NO: 122492 - RNA, 25 nt, Artificial Sequence
  Description of Artificial Sequence: Synthetic oligonucleotide
acugaggauuuuaaaauuauaagca

SEQ ID NO: 122493 - RNA, 25 nt, Artificial Sequence
  Description of Artificial Sequence: Synthetic oligonucleotide
auaggauuuuauauuuuggggugaa

SEQ ID NO: 122494 - RNA, 25 nt, Artificial Sequence
  Description of Artificial Sequence: Synthetic oligonucleotide
aagaauuaucuggcacauuagguau

SEQ ID NO: 122495 - RNA, 25 nt, Artificial Sequence
  Description of Artificial Sequence: Synthetic oligonucleotide
uuggaguuuaaaaaaaaagccaaau

SEQ ID NO: 122496 - RNA, 25 nt, Artificial Sequence
  Description of Artificial Sequence: Synthetic oligonucleotide
uuucacagucuuaauaacuuuuuuu

SEQ ID NO: 122497 - RNA, 25 nt, Artificial Sequence
  Description of Artificial Sequence: Synthetic oligonucleotide
uaaaaaaaacuaaaaggcgcuucau

SEQ ID NO: 122498 - RNA, 25 nt, Artificial Sequence
  Description of Artificial Sequence: Synthetic oligonucleotide
uguccaguguguggcccuucugaaa

SEQ ID NO: 122499 - RNA, 25 nt, Artificial Sequence
  Description of Artificial Sequence: Synthetic oligonucleotide
acuuauggucaucucucccacugaa

SEQ ID NO: 122500 - RNA, 25 nt, Artificial Sequence
  Description of Artificial Sequence: Synthetic oligonucleotide
aaccaaggucuuuucaaauguggcu

SEQ ID NO: 122501 - RNA, 25 nt, Artificial Sequence
  Description of Artificial Sequence: Synthetic oligonucleotide
uaaauggggaugaggagacacgggu

SEQ ID NO: 122502 - RNA, 25 nt, Artificial Sequence
  Description of Artificial Sequence: Synthetic oligonucleotide
uaggacuuucuuggugugugugcau

SEQ ID NO: 122503 - RNA, 25 nt, Artificial Sequence
  Description of Artificial Sequence: Synthetic oligonucleotide
uucuuuaaagagccaaguugcuucg

SEQ ID NO: 122504 - RNA, 25 nt, Artificial Sequence
  Description of Artificial Sequence: Synthetic oligonucleotide
ggggaaacagccaggaaaaugguca

SEQ ID NO: 122505 - RNA, 25 nt, Artificial Sequence
  Description of Artificial Sequence: Synthetic oligonucleotide
aagauuauuuuuagagguuauuuua

SEQ ID NO: 122506 - RNA, 25 nt, Artificial Sequence
  Description of Artificial Sequence: Synthetic oligonucleotide
auuggggauuuuaagaacuaauaac

SEQ ID NO: 122507 - RNA, 25 nt, Artificial Sequence
  Description of Artificial Sequence: Synthetic oligonucleotide
caucuugaguuauuuuuaauucagg

SEQ ID NO: 122508 - RNA, 25 nt, Artificial Sequence
  Description of Artificial Sequence: Synthetic oligonucleotide
ggggauguggaaagguuugcaauug

SEQ ID NO: 122509 - RNA, 25 nt, Artificial Sequence
  Description of Artificial Sequence: Synthetic oligonucleotide
gucaaguguuuuguuguagcuuagu

SEQ ID NO: 122510 - RNA, 25 nt, Artificial Sequence
  Description of Artificial Sequence: Synthetic oligonucleotide
uauccauaagggaaacuuagacuau

SEQ ID NO: 122511 - RNA, 25 nt, Artificial Sequence
  Description of Artificial Sequence: Synthetic oligonucleotide
uagacauaacuacaaagccagugca

SEQ ID NO: 122512 - RNA, 25 nt, Artificial Sequence
  Description of Artificial Sequence: Synthetic oligonucleotide
agcuuuuguuuucuguauguuguug

SEQ ID NO: 122513 - RNA, 25 nt, Artificial Sequence
  Description of Artificial Sequence: Synthetic oligonucleotide
gggggaucaacuuucacacauagca

SEQ ID NO: 122514 - RNA, 25 nt, Artificial Sequence
  Description of Artificial Sequence: Synthetic oligonucleotide
aagcacauggccucccugaugucag

SEQ ID NO: 122515 - RNA, 25 nt, Artificial Sequence
  Description of Artificial Sequence: Synthetic oligonucleotide
ggaugccuuuguuaggaucuguauu

SEQ ID NO: 122516 - RNA, 25 nt, Artificial Sequence
  Description of Artificial Sequence: Synthetic oligonucleotide
uugcccuuaauuuuguugaaaucuu

SEQ ID NO: 122517 - RNA, 25 nt, Artificial Sequence
  Description of Artificial Sequence: Synthetic oligonucleotide
uuuuuccuucuuccucuugaaaagu

SEQ ID NO: 122518 - RNA, 25 nt, Artificial Sequence
  Description of Artificial Sequence: Synthetic oligonucleotide
uuccaaaauauaguuuauuguaucu

SEQ ID NO: 122519 - RNA, 25 nt, Artificial Sequence
  Description of Artificial Sequence: Synthetic oligonucleotide
uuucaucacuaaaaauuuguuccuu

SEQ ID NO: 122520 - RNA, 25 nt, Artificial Sequence
  Description of Artificial Sequence: Synthetic oligonucleotide
uuuucacuaugggcaguucacacaa

SEQ ID NO: 122521 - RNA, 25 nt, Artificial Sequence
  Description of Artificial Sequence: Synthetic oligonucleotide
aggcaaaaacuauugaacaguuggu

SEQ ID NO: 122522 - RNA, 25 nt, Artificial Sequence
  Description of Artificial Sequence: Synthetic oligonucleotide
uuuuaguguguuguauaacuuugcu

SEQ ID NO: 122523 - RNA, 25 nt, Artificial Sequence
  Description of Artificial Sequence: Synthetic oligonucleotide
uguauaucaaacuaauuuugacaag

SEQ ID NO: 122524 - RNA, 25 nt, Artificial Sequence
  Description of Artificial Sequence: Synthetic oligonucleotide
guuuucauccuaagccucaaaucau

SEQ ID NO: 122525 - RNA, 25 nt, Artificial Sequence
  Description of Artificial Sequence: Synthetic oligonucleotide
uguaauuaauaauuugccuguuuau

SEQ ID NO: 122526 - RNA, 25 nt, Artificial Sequence
  Description of Artificial Sequence: Synthetic oligonucleotide
uuuaugaccuaauugugauucuuuu

SEQ ID NO: 122527 - RNA, 25 nt, Artificial Sequence
  Description of Artificial Sequence: Synthetic oligonucleotide
uauuaauaaaagcuaaugggaaaag

SEQ ID NO: 122528 - RNA, 25 nt, Artificial Sequence
  Description of Artificial Sequence: Synthetic oligonucleotide
ggaucccugauuaagcugaugacua

SEQ ID NO: 122529 - RNA, 25 nt, Artificial Sequence
  Description of Artificial Sequence: Synthetic oligonucleotide
agaccuacaauuaauuuuccugcag

SEQ ID NO: 122530 - RNA, 25 nt, Artificial Sequence
  Description of Artificial Sequence: Synthetic oligonucleotide
guauaugaaguauuguaccagagua

SEQ ID NO: 122531 - RNA, 25 nt, Artificial Sequence
  Description of Artificial Sequence: Synthetic oligonucleotide
auuaaaagauauguaauauuuuauu

SEQ ID NO: 122532 - RNA, 25 nt, Artificial Sequence
  Description of Artificial Sequence: Synthetic oligonucleotide
ugauaaaucuauccuuuaaaaggaa

SEQ ID NO: 122533 - RNA, 25 nt, Artificial Sequence
  Description of Artificial Sequence: Synthetic oligonucleotide
auacguuuuaggaugucaucauuuu

SEQ ID NO: 122534 - RNA, 25 nt, Artificial Sequence
  Description of Artificial Sequence: Synthetic oligonucleotide
ugaugugaaucauguaaauguugau

SEQ ID NO: 122535 - RNA, 25 nt, Artificial Sequence
  Description of Artificial Sequence: Synthetic oligonucleotide
uaauaugcuguuuauuauacauuua

SEQ ID NO: 122536 - RNA, 25 nt, Artificial Sequence
  Description of Artificial Sequence: Synthetic oligonucleotide
aguguuucaagagauucacuuaauu

SEQ ID NO: 122537 - RNA, 25 nt, Artificial Sequence
  Description of Artificial Sequence: Synthetic oligonucleotide
ugccuuuuugcccacguauauuaug

SEQ ID NO: 122538 - RNA, 25 nt, Artificial Sequence
  Description of Artificial Sequence: Synthetic oligonucleotide
guagucuauuugcaacuguucuuaa

SEQ ID NO: 122539 - RNA, 25 nt, Artificial Sequence
  Description of Artificial Sequence: Synthetic oligonucleotide
aaaaaaugacauuaaaagaauaguu

SEQ ID NO: 122540 - RNA, 25 nt, Artificial Sequence
  Description of Artificial Sequence: Synthetic oligonucleotide
uuauguagagaaacauuaguggaug

SEQ ID NO: 122541 - RNA, 25 nt, Artificial Sequence
  Description of Artificial Sequence: Synthetic oligonucleotide
guuaauugucuccccaccuauauuu

SEQ ID NO: 122542 - RNA, 25 nt, Artificial Sequence
  Description of Artificial Sequence: Synthetic oligonucleotide
uauggguguuagcgcaacugcuuug

SEQ ID NO: 122543 - RNA, 25 nt, Artificial Sequence
  Description of Artificial Sequence: Synthetic oligonucleotide
gcuaguugcaaagcuguauuaucag

SEQ ID NO: 122544 - RNA, 25 nt, Artificial Sequence
  Description of Artificial Sequence: Synthetic oligonucleotide
gaguaaaaguguauuuguaaacugu

SEQ ID NO: 122545 - RNA, 25 nt, Artificial Sequence
  Description of Artificial Sequence: Synthetic oligonucleotide
uaugggaacuaaaaauuaggaauaa

SEQ ID NO: 122546 - RNA, 25 nt, Artificial Sequence
  Description of Artificial Sequence: Synthetic oligonucleotide
aaaccauuuucuuauaugaaaaaaa

SEQ ID NO: 122547 - DNA, 21 bp, Artificial Sequence
  Description of Artificial Sequence: Synthetic oligonucleotide
  Description of Combined DNA/RNA Molecule: Synthetic oligonucleotide
cuacacaaaucagcgauuutt

SEQ ID NO: 122548 - DNA, 21 bp, Artificial Sequence
  Description of Artificial Sequence: Synthetic oligonucleotide
  Description of Combined DNA/RNA Molecule: Synthetic oligonucleotide
aaaucgcugauuuguguagtt

SEQ ID NO: 122549 - DNA, 25 bp, Artificial Sequence
  Description of Artificial Sequence: Synthetic oligonucleotide
  Description of Combined DNA/RNA Molecule: Synthetic oligonucleotide
cuacacaaaucagcgauuuccaugt

SEQ ID NO: 122550 - RNA, 27 nt, Artificial Sequence
  Description of Artificial Sequence: Synthetic oligonucleotide
acauggaaaucgcugauuuguguaguc

SEQ ID NO: 122551 - RNA, 13 nt, Artificial Sequence
  Description of Artificial Sequence: Synthetic oligonucleotide
cuacacaaaucag

SEQ ID NO: 122552 - DNA, 11 bp, Artificial Sequence
  Description of Artificial Sequence: Synthetic oligonucleotide
  Description of Combined DNA/RNA Molecule: Synthetic oligonucleotide
gauuuccaugt

SEQ ID NO: 122553 - DNA, 21 bp, Artificial Sequence
  Description of Artificial Sequence: Synthetic oligonucleotide
  Description of Combined DNA/RNA Molecule: Synthetic oligonucleotide
ggaucuuauuucuucggagtt

SEQ ID NO: 122554 - DNA, 21 bp, Artificial Sequence
  Description of Artificial Sequence: Synthetic oligonucleotide
  Description of Combined DNA/RNA Molecule: Synthetic oligonucleotide
cuccgaagaaauaagaucctt

SEQ ID NO: 122555 - RNA, 11 nt, Artificial Sequence
  Description of Artificial Sequence: Synthetic oligonucleotide
ggaucuuauuu

SEQ ID NO: 122556 - DNA, 10 bp, Artificial Sequence
  Description of Artificial Sequence: Synthetic oligonucleotide
  Description of Combined DNA/RNA Molecule: Synthetic oligonucleotide
cuucggagtt

SEQ ID NO: 122557 - RNA, 27 nt, Artificial Sequence
  Description of Artificial Sequence: Synthetic oligonucleotide
cauugucuccgaagaaauaagauccuu

SEQ ID NO: 122558 - RNA, 8 nt, Artificial Sequence
  Description of Artificial Sequence: Synthetic oligonucleotide
  modified_base (2): LNA-G
ggaucuua

SEQ ID NO: 122559 - DNA, 17 bp, Artificial Sequence
  Description of Artificial Sequence: Synthetic oligonucleotide
  Description of Combined DNA/RNA Molecule: Synthetic oligonucleotide
uuucuucggagacaatg

SEQ ID NO: 122560 - DNA, 16 bp, Artificial Sequence
  Description of Artificial Sequence: Synthetic oligonucleotide
  Description of Combined DNA/RNA Molecule: Synthetic oligonucleotide
uucuucggagacaatg

SEQ ID NO: 122561 - DNA, 15 bp, Artificial Sequence
  Description of Artificial Sequence: Synthetic oligonucleotide
  Description of Combined DNA/RNA Molecule: Synthetic oligonucleotide
ucuucggagacaatg

SEQ ID NO: 122562 - DNA, 14 bp, Artificial Sequence
  Description of Artificial Sequence: Synthetic oligonucleotide
  Description of Combined DNA/RNA Molecule: Synthetic oligonucleotide
cuucggagacaatg

SEQ ID NO: 122563 - DNA, 13 bp, Artificial Sequence
  Description of Artificial Sequence: Synthetic oligonucleotide
  Description of Combined DNA/RNA Molecule: Synthetic oligonucleotide
uucggagacaatg

SEQ ID NO: 122564 - DNA, 12 bp, Artificial Sequence
  Description of Artificial Sequence: Synthetic oligonucleotide
  Description of Combined DNA/RNA Molecule: Synthetic oligonucleotide
ucggagacaatg

SEQ ID NO: 122565 - DNA, 11 bp, Artificial Sequence
  Description of Artificial Sequence: Synthetic oligonucleotide
  Description of Combined DNA/RNA Molecule: Synthetic oligonucleotide
cggagacaatg

SEQ ID NO: 122566 - RNA, 9 nt, Artificial Sequence
  Description of Artificial Sequence: Synthetic oligonucleotide
  modified_base (2): LNA-G
ggaucuuau

SEQ ID NO: 122567 - RNA, 10 nt, Artificial Sequence
  Description of Artificial Sequence: Synthetic oligonucleotide
  modified_base (2): LNA-G
ggaucuuauu

SEQ ID NO: 122568 - RNA, 11 nt, Artificial Sequence
  Description of Artificial Sequence: Synthetic oligonucleotide
  modified_base (2): LNA-G
ggaucuuauuu

SEQ ID NO: 122569 - RNA, 12 nt, Artificial Sequence
  Description of Artificial Sequence: Synthetic oligonucleotide
  modified_base (2): LNA-G
ggaucuuauuuc

SEQ ID NO: 122570 - RNA, 8 nt, Artificial Sequence
  Description of Artificial Sequence: Synthetic oligonucleotide
  modified_base (3): LNA-A
cuacacaa

SEQ ID NO: 122571 - DNA, 13 bp, Artificial Sequence
  Description of Artificial Sequence: Synthetic oligonucleotide
  Description of Combined DNA/RNA Molecule: Synthetic oligonucleotide
  modified_base (8): LNA-A
aucagcgauuutt

SEQ ID NO: 122572 - DNA, 12 bp, Artificial Sequence
  Description of Artificial Sequence: Synthetic oligonucleotide
  Description of Combined DNA/RNA Molecule: Synthetic oligonucleotide
  modified_base (7): LNA-A
ucagcgauuutt

SEQ ID NO: 122573 - DNA, 11 bp, Artificial Sequence
  Description of Artificial Sequence: Synthetic oligonucleotide
  Description of Combined DNA/RNA Molecule: Synthetic oligonucleotide
  modified_base (6): LNA-A
cagcgauuutt

SEQ ID NO: 122574 - DNA, 10 bp, Artificial Sequence
  Description of Artificial Sequence: Synthetic oligonucleotide
  Description of Combined DNA/RNA Molecule: Synthetic oligonucleotide
  modified_base (5): LNA-A
agcgauuutt

SEQ ID NO: 122575 - DNA, 9 bp, Artificial Sequence
  Description of Artificial Sequence: Synthetic oligonucleotide
  Description of Combined DNA/RNA Molecule: Synthetic oligonucleotide
  modified_base (4): LNA-A
gcgauuutt

SEQ ID NO: 122576 - DNA, 8 bp, Artificial Sequence
  Description of Artificial Sequence: Synthetic oligonucleotide
  Description of Combined DNA/RNA Molecule: Synthetic oligonucleotide
  modified_base (3): LNA-A
cgauuutt

SEQ ID NO: 122577 - DNA, 7 bp, Artificial Sequence
  Description of Artificial Sequence: Synthetic oligonucleotide
  Description of Combined DNA/RNA Molecule: Synthetic oligonucleotide
  modified_base (2): LNA-A
gauuutt

SEQ ID NO: 122578 - RNA, 9 nt, Artificial Sequence
  Description of Artificial Sequence: Synthetic oligonucleotide
  modified_base (3): LNA-A
cuacacaaa

SEQ ID NO: 122579 - RNA, 10 nt, Artificial Sequence
  Description of Artificial Sequence: Synthetic oligonucleotide
  modified_base (3): LNA-A
cuacacaaau

SEQ ID NO: 122580 - RNA, 11 nt, Artificial Sequence
  Description of Artificial Sequence: Synthetic oligonucleotide
  modified_base (3): LNA-A
cuacacaaauc

SEQ ID NO: 122581 - RNA, 12 nt, Artificial Sequence
  Description of Artificial Sequence: Synthetic oligonucleotide
  modified_base (3): LNA-A
cuacacaaauca

SEQ ID NO: 122582 - RNA, 13 nt, Artificial Sequence
  Description of Artificial Sequence: Synthetic oligonucleotide
  modified_base (3): LNA-A
cuacacaaaucag

SEQ ID NO: 122583 - RNA, 14 nt, Artificial Sequence
  Description of Artificial Sequence: Synthetic oligonucleotide
  modified_base (3): LNA-A
cuacacaaaucagc

SEQ ID NO: 122584 - RNA, 13 nt, Artificial Sequence
  Description of Artificial Sequence: Synthetic oligonucleotide
  modified_base (2): LNA-G
ggaucuuauuucu

SEQ ID NO: 122585 - RNA, 14 nt, Artificial Sequence
  Description of Artificial Sequence: Synthetic oligonucleotide
  modified_base (2): LNA-G
ggaucuuauuucuu

SEQ ID NO: 122586 - RNA, 8 nt, Artificial Sequence
  Description of Artificial Sequence: Synthetic oligonucleotide
  modified_base (2): LNA-G
  modified_base (8): LNA-A
ggaucuua

SEQ ID NO: 122587 - RNA, 9 nt, Artificial Sequence
  Description of Artificial Sequence: Synthetic oligonucleotide
  modified_base (2): LNA-G
  modified_base (9): LNA-U
ggaucuuau

SEQ ID NO: 122588 - RNA, 10 nt, Artificial Sequence
  Description of Artificial Sequence: Synthetic oligonucleotide
  modified_base (2): LNA-G
  modified_base (10): LNA-U
ggaucuuauu

SEQ ID NO: 122589 - RNA, 11 nt, Artificial Sequence
  Description of Artificial Sequence: Synthetic oligonucleotide
  modified_base (2): LNA-G
  modified_base (11): LNA-U
ggaucuuauuu

SEQ ID NO: 122590 - RNA, 12 nt, Artificial Sequence
  Description of Artificial Sequence: Synthetic oligonucleotide
  modified_base (2): LNA-G
  modified_base (12): LNA-C
ggaucuuauuuc

SEQ ID NO: 122591 - RNA, 13 nt, Artificial Sequence
  Description of Artificial Sequence: Synthetic oligonucleotide
  modified_base (2): LNA-G
  modified_base (13): LNA-U
ggaucuuauuucu

SEQ ID NO: 122592 - RNA, 14 nt, Artificial Sequence
  Description of Artificial Sequence: Synthetic oligonucleotide
  modified_base (2): LNA-G
  modified_base (14): LNA-U
ggaucuuauuucuu

SEQ ID NO: 122593 - DNA, 13 bp, Artificial Sequence
  Description of Artificial Sequence: Synthetic oligonucleotide
  Description of Combined DNA/RNA Molecule: Synthetic oligonucleotide
  modified_base (8): LNA-G
uuucuucggagtt

SEQ ID NO: 122594 - DNA, 12 bp, Artificial Sequence
  Description of Artificial Sequence: Synthetic oligonucleotide
  Description of Combined DNA/RNA Molecule: Synthetic oligonucleotide
  modified_base (7): LNA-G
uucuucggagtt

SEQ ID NO: 122595 - DNA, 11 bp, Artificial Sequence
  Description of Artificial Sequence: Synthetic oligonucleotide
  Description of Combined DNA/RNA Molecule: Synthetic oligonucleotide
  modified_base (6): LNA-G
ucuucggagtt

SEQ ID NO: 122596 - DNA, 10 bp, Artificial Sequence
  Description of Artificial Sequence: Synthetic oligonucleotide
  Description of Combined DNA/RNA Molecule: Synthetic oligonucleotide
  modified_base (5): LNA-G
cuucggagtt

SEQ ID NO: 122597 - DNA, 9 bp, Artificial Sequence
  Description of Artificial Sequence: Synthetic oligonucleotide
  Description of Combined DNA/RNA Molecule: Synthetic oligonucleotide
  modified_base (4): LNA-G
uucggagtt

SEQ ID NO: 122598 - DNA, 8 bp, Artificial Sequence
  Description of Artificial Sequence: Synthetic oligonucleotide
  Description of Combined DNA/RNA Molecule: Synthetic oligonucleotide
  modified_base (3): LNA-G
ucggagtt

SEQ ID NO: 122599 - DNA, 7 bp, Artificial Sequence
  Description of Artificial Sequence: Synthetic oligonucleotide
  Description of Combined DNA/RNA Molecule: Synthetic oligonucleotide
  modified_base (2): LNA-G
cggagtt

SEQ ID NO: 122600 - DNA, 13 bp, Artificial Sequence
  Description of Artificial Sequence: Synthetic oligonucleotide
  Description of Combined DNA/RNA Molecule: Synthetic oligonucleotide
  modified_base (1): LNA-U
  modified_base (8): LNA-G
uuucuucggagtt

SEQ ID NO: 122601 - DNA, 12 bp, Artificial Sequence
  Description of Artificial Sequence: Synthetic oligonucleotide
  Description of Combined DNA/RNA Molecule: Synthetic oligonucleotide
  modified_base (1): LNA-U
  modified_base (7): LNA-G
uucuucggagtt

SEQ ID NO: 122602 - DNA, 11 bp, Artificial Sequence
  Description of Artificial Sequence: Synthetic oligonucleotide
  Description of Combined DNA/RNA Molecule: Synthetic oligonucleotide
  modified_base (1): LNA-U
  modified_base (6): LNA-G
ucuucggagtt

SEQ ID NO: 122603 - DNA, 10 bp, Artificial Sequence
  Description of Artificial Sequence: Synthetic oligonucleotide
  Description of Combined DNA/RNA Molecule: Synthetic oligonucleotide
  modified_base (1): LNA-C
  modified_base (5): LNA-G
cuucggagtt

SEQ ID NO: 122604 - DNA, 9 bp, Artificial Sequence
  Description of Artificial Sequence: Synthetic oligonucleotide
  Description of Combined DNA/RNA Molecule: Synthetic oligonucleotide
  modified_base (1): LNA-U
  modified_base (4): LNA-G
uucggagtt

SEQ ID NO: 122605 - DNA, 8 bp, Artificial Sequence
  Description of Artificial Sequence: Synthetic oligonucleotide
  Description of Combined DNA/RNA Molecule: Synthetic oligonucleotide
  modified_base (1): LNA-U
  modified_base (3): LNA-G
ucggagtt

SEQ ID NO: 122606 - DNA, 7 bp, Artificial Sequence
  Description of Artificial Sequence: Synthetic oligonucleotide
  Description of Combined DNA/RNA Molecule: Synthetic oligonucleotide
  modified_base (1): LNA-C
  modified_base (2): LNA-G
cggagtt

SEQ ID NO: 122607 - DNA, 21 bp, Artificial Sequence
  Description of Artificial Sequence: Synthetic oligonucleotide
  Description of Combined DNA/RNA Molecule: Synthetic oligonucleotide
  modified_base (2): LNA-G
  modified_base (16): LNA-G
ggaucuuauuucuucggagtt

SEQ ID NO: 122608 - DNA, 25 bp, Artificial Sequence
  Description of Artificial Sequence: Synthetic oligonucleotide
  Description of Combined DNA/RNA Molecule: Synthetic oligonucleotide
ggaucuuauuucuucggagacaatg

SEQ ID NO: 122609 - RNA, 25 nt, Artificial Sequence
  Description of Artificial Sequence: Synthetic oligonucleotide
guauuuugaugaggaguucacggcc

SEQ ID NO: 122610 - RNA, 25 nt, Artificial Sequence
  Description of Artificial Sequence: Synthetic oligonucleotide
ggcccagaugaucaccaucacacca

SEQ ID NO: 122611 - RNA, 25 nt, Artificial Sequence
  Description of Artificial Sequence: Synthetic oligonucleotide
gggaagaaaacuauccugcggguuu

SEQ ID NO: 122612 - RNA, 25 nt, Artificial Sequence
  Description of Artificial Sequence: Synthetic oligonucleotide
guuuuaauuuauuucauccaguuug

SEQ ID NO: 122613 - RNA, 25 nt, Artificial Sequence
  Description of Artificial Sequence: Synthetic oligonucleotide
acguagggaaauguuaaggacuucu

SEQ ID NO: 122614 - RNA, 25 nt, Artificial Sequence
  Description of Artificial Sequence: Synthetic oligonucleotide
ccaggguuuacccagugggacagag

SEQ ID NO: 122615 - RNA, 25 nt, Artificial Sequence
  Description of Artificial Sequence: Synthetic oligonucleotide
agcaagguuuaaauuuguuauugug

SEQ ID NO: 122616 - RNA, 25 nt, Artificial Sequence
  Description of Artificial Sequence: Synthetic oligonucleotide
uguauuauguuguucaaaugcauuu

SEQ ID NO: 122617 - RNA, 25 nt, Artificial Sequence
  Description of Artificial Sequence: Synthetic oligonucleotide
uuuuaaucuuugugacaggaaagcc

SEQ ID NO: 122618 - RNA, 25 nt, Artificial Sequence
  Description of Artificial Sequence: Synthetic oligonucleotide
uuaaucuuugugacaggaaagcccu

SEQ ID NO: 122619 - RNA, 25 nt, Artificial Sequence
  Description of Artificial Sequence: Synthetic oligonucleotide
gcugcuuaugucucccagcauggcc

SEQ ID NO: 122620 - RNA, 25 nt, Artificial Sequence
  Description of Artificial Sequence: Synthetic oligonucleotide
aaguguuucagaagcuucucccuga

SEQ ID NO: 122621 - RNA, 25 nt, Artificial Sequence
  Description of Artificial Sequence: Synthetic oligonucleotide
gaccaucaauaaggaagaagcccuu

SEQ ID NO: 122622 - RNA, 25 nt, Artificial Sequence
  Description of Artificial Sequence: Synthetic oligonucleotide
ccaucaauaaggaagaagcccuuca

SEQ ID NO: 122623 - RNA, 25 nt, Artificial Sequence
  Description of Artificial Sequence: Synthetic oligonucleotide
ucaauaaggaagaagcccuucagcg

SEQ ID NO: 122624 - RNA, 25 nt, Artificial Sequence
  Description of Artificial Sequence: Synthetic oligonucleotide
aauaaggaagaagcccuucagcggc

SEQ ID NO: 122625 - RNA, 25 nt, Artificial Sequence
  Description of Artificial Sequence: Synthetic oligonucleotide
aggaagaagcccuucagcggccagu

SEQ ID NO: 122626 - RNA, 25 nt, Artificial Sequence
  Description of Artificial Sequence: Synthetic oligonucleotide
gcauaacuaaaggugaaaagcuccg

SEQ ID NO: 122627 - RNA, 25 nt, Artificial Sequence
  Description of Artificial Sequence: Synthetic oligonucleotide
cauaacuaaaggugaaaagcuccgg

SEQ ID NO: 122628 - RNA, 25 nt, Artificial Sequence
  Description of Artificial Sequence: Synthetic oligonucleotide
cuacaucacgccagucaacagucug

SEQ ID NO: 122629 - RNA, 25 nt, Artificial Sequence
  Description of Artificial Sequence: Synthetic oligonucleotide
acuggauuuaagcagaguucaaaag

SEQ ID NO: 122630 - RNA, 25 nt, Artificial Sequence
  Description of Artificial Sequence: Synthetic oligonucleotide
cuggauuuaagcagaguucaaaagc

SEQ ID NO: 122631 - RNA, 25 nt, Artificial Sequence
  Description of Artificial Sequence: Synthetic oligonucleotide
gauuuaagcagaguucaaaagcccu

SEQ ID NO: 122632 - RNA, 25 nt, Artificial Sequence
  Description of Artificial Sequence: Synthetic oligonucleotide
auuuaagcagaguucaaaagcccuu

SEQ ID NO: 122633 - RNA, 25 nt, Artificial Sequence
  Description of Artificial Sequence: Synthetic oligonucleotide
uuaagcagaguucaaaagcccuuca

SEQ ID NO: 122634 - RNA, 25 nt, Artificial Sequence
  Description of Artificial Sequence: Synthetic oligonucleotide
uaagcagaguucaaaagcccuucag

SEQ ID NO: 122635 - RNA, 25 nt, Artificial Sequence
  Description of Artificial Sequence: Synthetic oligonucleotide
agcagaguucaaaagcccuucagcg

SEQ ID NO: 122636 - RNA, 25 nt, Artificial Sequence
  Description of Artificial Sequence: Synthetic oligonucleotide
cucagggucugagugaagccgcucg

SEQ ID NO: 122637 - RNA, 25 nt, Artificial Sequence
  Description of Artificial Sequence: Synthetic oligonucleotide
caagcaacuacaucacgccagucaa

SEQ ID NO: 122638 - RNA, 25 nt, Artificial Sequence
  Description of Artificial Sequence: Synthetic oligonucleotide
aucaauggcagcuucuuggugcgug

SEQ ID NO: 122639 - RNA, 25 nt, Artificial Sequence
  Description of Artificial Sequence: Synthetic oligonucleotide
uuccagcccacauuggauucaucag

SEQ ID NO: 122640 - RNA, 25 nt, Artificial Sequence
  Description of Artificial Sequence: Synthetic oligonucleotide
cagcugagaauguggaauaccuaag

SEQ ID NO: 122641 - RNA, 25 nt, Artificial Sequence
  Description of Artificial Sequence: Synthetic oligonucleotide
aacguaucuccuaauuugaggcuca

SEQ ID NO: 122642 - RNA, 25 nt, Artificial Sequence
  Description of Artificial Sequence: Synthetic oligonucleotide
ccuaaaauaauuucucuacaauugg

SEQ ID NO: 122643 - RNA, 25 nt, Artificial Sequence
  Description of Artificial Sequence: Synthetic oligonucleotide
uggaagauucagcuaguuaggagcc

SEQ ID NO: 122644 - RNA, 25 nt, Artificial Sequence
  Description of Artificial Sequence: Synthetic oligonucleotide
uuaaacucuccuagucaauauccac

SEQ ID NO: 122645 - RNA, 25 nt, Artificial Sequence
  Description of Artificial Sequence: Synthetic oligonucleotide
cagccuacaguuauguucagucaca

SEQ ID NO: 122646 - RNA, 25 nt, Artificial Sequence
  Description of Artificial Sequence: Synthetic oligonucleotide
guuauguucagucacacacacauac

SEQ ID NO: 122647 - RNA, 25 nt, Artificial Sequence
  Description of Artificial Sequence: Synthetic oligonucleotide
cacauacaaaauguuccuuuugcuu

SEQ ID NO: 122648 - RNA, 25 nt, Artificial Sequence
  Description of Artificial Sequence: Synthetic oligonucleotide
uccuuuugcuuuuaaaguaauuuuu

SEQ ID NO: 122649 - RNA, 25 nt, Artificial Sequence
  Description of Artificial Sequence: Synthetic oligonucleotide
ugaccugugaagcaacagucaaugg

SEQ ID NO: 122650 - RNA, 25 nt, Artificial Sequence
  Description of Artificial Sequence: Synthetic oligonucleotide
cuaucucacacaucgacaaaccaau

SEQ ID NO: 122651 - RNA, 25 nt, Artificial Sequence
  Description of Artificial Sequence: Synthetic oligonucleotide
uguccucaauuguacugcuaccacu

SEQ ID NO: 122652 - RNA, 25 nt, Artificial Sequence
  Description of Artificial Sequence: Synthetic oligonucleotide
aaaccguagcuggcaagcggucuua

SEQ ID NO: 122653 - RNA, 25 nt, Artificial Sequence
  Description of Artificial Sequence: Synthetic oligonucleotide
uagcuggcaagcggucuuaccggcu

SEQ ID NO: 122654 - RNA, 25 nt, Artificial Sequence
  Description of Artificial Sequence: Synthetic oligonucleotide
uuguaugguuaaaagauggguuacc

SEQ ID NO: 122655 - RNA, 25 nt, Artificial Sequence
  Description of Artificial Sequence: Synthetic oligonucleotide
ugguuaaaagauggguuaccugcga

SEQ ID NO: 122656 - RNA, 25 nt, Artificial Sequence
  Description of Artificial Sequence: Synthetic oligonucleotide
cagggaauuauacaaucuugcugag

SEQ ID NO: 122657 - RNA, 25 nt, Artificial Sequence
  Description of Artificial Sequence: Synthetic oligonucleotide
acaaucuugcugagcauaaaacagu

SEQ ID NO: 122658 - RNA, 25 nt, Artificial Sequence
  Description of Artificial Sequence: Synthetic oligonucleotide
ccaauaaugaagaguccuuuauccu

SEQ ID NO: 122659 - RNA, 25 nt, Artificial Sequence
  Description of Artificial Sequence: Synthetic oligonucleotide
acuuuggauguuccaacgcaaguug

SEQ ID NO: 122660 - RNA, 25 nt, Artificial Sequence
  Description of Artificial Sequence: Synthetic oligonucleotide
aaugcuuccacuaaacugaaaccau

SEQ ID NO: 122661 - RNA, 25 nt, Artificial Sequence
  Description of Artificial Sequence: Synthetic oligonucleotide
gagaaaguuugacuuuguuaaauau

SEQ ID NO: 122662 - RNA, 25 nt, Artificial Sequence
  Description of Artificial Sequence: Synthetic oligonucleotide
aaagaacuacuguauauuaaaaguu

SEQ ID NO: 122663 - RNA, 25 nt, Artificial Sequence
  Description of Artificial Sequence: Synthetic oligonucleotide
uuagaaauacggguuuugacuuaac

SEQ ID NO: 122664 - RNA, 25 nt, Artificial Sequence
  Description of Artificial Sequence: Synthetic oligonucleotide
aacauggguacagcaaacucagcac

SEQ ID NO: 122665 - RNA, 25 nt, Artificial Sequence
  Description of Artificial Sequence: Synthetic oligonucleotide
aaagacacagaagaugcugaccuca

SEQ ID NO: 122666 - RNA, 25 nt, Artificial Sequence
  Description of Artificial Sequence: Synthetic oligonucleotide
uaguagggagguuuauucagaucgc

SEQ ID NO: 122667 - RNA, 25 nt, Artificial Sequence
  Description of Artificial Sequence: Synthetic oligonucleotide
gccuucugcagcaggguucugggau

SEQ ID NO: 122668 - RNA, 25 nt, Artificial Sequence
  Description of Artificial Sequence: Synthetic oligonucleotide
ggucugguacauauuggaaauuaug

SEQ ID NO: 122669 - RNA, 25 nt, Artificial Sequence
  Description of Artificial Sequence: Synthetic oligonucleotide
cuaguccuuccgauggaagcacuag

SEQ ID NO: 122670 - RNA, 25 nt, Artificial Sequence
  Description of Artificial Sequence: Synthetic oligonucleotide
ccagugaauauuguuuuuaugugga

SEQ ID NO: 122671 - RNA, 25 nt, Artificial Sequence
  Description of Artificial Sequence: Synthetic oligonucleotide
augaauucaaguuggaauugguaga

SEQ ID NO: 122672 - RNA, 25 nt, Artificial Sequence
  Description of Artificial Sequence: Synthetic oligonucleotide
caggacacagauuuagacuuggaga

SEQ ID NO: 122673 - RNA, 25 nt, Artificial Sequence
  Description of Artificial Sequence: Synthetic oligonucleotide
cucaaagcacaguuacaguauucca

SEQ ID NO: 122674 - RNA, 25 nt, Artificial Sequence
  Description of Artificial Sequence: Synthetic oligonucleotide
accacugccaccacugaugaauuaa

SEQ ID NO: 122675 - RNA, 25 nt, Artificial Sequence
  Description of Artificial Sequence: Synthetic oligonucleotide
gaaacuacuagugccacaucaucac

SEQ ID NO: 122676 - RNA, 25 nt, Artificial Sequence
  Description of Artificial Sequence: Synthetic oligonucleotide
aagucggacagccucaccaaacaga

SEQ ID NO: 122677 - RNA, 25 nt, Artificial Sequence
  Description of Artificial Sequence: Synthetic oligonucleotide
gaaagcgaaaaauggaacaugaugg

SEQ ID NO: 122678 - RNA, 25 nt, Artificial Sequence
  Description of Artificial Sequence: Synthetic oligonucleotide
cccucugauuuagcauguagacugc

SEQ ID NO: 122679 - RNA, 25 nt, Artificial Sequence
  Description of Artificial Sequence: Synthetic oligonucleotide
ugagcuauuuaaggaucuauuuaug

SEQ ID NO: 122680 - RNA, 25 nt, Artificial Sequence
  Description of Artificial Sequence: Synthetic oligonucleotide
aaaaggugaaaaagcacuauuauca

SEQ ID NO: 122681 - RNA, 25 nt, Artificial Sequence
  Description of Artificial Sequence: Synthetic oligonucleotide
gaaaaagcacuauuaucaguucugc

SEQ ID NO: 122682 - RNA, 25 nt, Artificial Sequence
  Description of Artificial Sequence: Synthetic oligonucleotide
ggcugaaaagaaagauuaaaccuac

SEQ ID NO: 122683 - RNA, 25 nt, Artificial Sequence
  Description of Artificial Sequence: Synthetic oligonucleotide
uaaacccuuauaauaaaauccuucu

SEQ ID NO: 122684 - RNA, 25 nt, Artificial Sequence
  Description of Artificial Sequence: Synthetic oligonucleotide
cauacuauuagccaaugcuguagac

SEQ ID NO: 122685 - RNA, 25 nt, Artificial Sequence
  Description of Artificial Sequence: Synthetic oligonucleotide
gacagaagcauuuugauaggaauag

SEQ ID NO: 122686 - RNA, 25 nt, Artificial Sequence
  Description of Artificial Sequence: Synthetic oligonucleotide
agagcaaauaagauaauggcccuga

SEQ ID NO: 122687 - RNA, 25 nt, Artificial Sequence
  Description of Artificial Sequence: Synthetic oligonucleotide
ccaacauuuuucucuuccucaagca

SEQ ID NO: 122688 - RNA, 25 nt, Artificial Sequence
  Description of Artificial Sequence: Synthetic oligonucleotide
uuaaguaugagaaaaguucagccca

SEQ ID NO: 122689 - RNA, 25 nt, Artificial Sequence
  Description of Artificial Sequence: Synthetic oligonucleotide
caggaauaaagauggcugcugaacc

SEQ ID NO: 122690 - RNA, 25 nt, Artificial Sequence
  Description of Artificial Sequence: Synthetic oligonucleotide
aauuugaaugaccaaguucucuuca

SEQ ID NO: 122691 - RNA, 25 nt, Artificial Sequence
  Description of Artificial Sequence: Synthetic oligonucleotide
auguauaaagauagccagccuagag

SEQ ID NO: 122692 - RNA, 25 nt, Artificial Sequence
  Description of Artificial Sequence: Synthetic oligonucleotide
ggcuguaacuaucucugugaagugu

SEQ ID NO: 122693 - RNA, 25 nt, Artificial Sequence
  Description of Artificial Sequence: Synthetic oligonucleotide
ucugugaagugugagaaaauuucaa

SEQ ID NO: 122694 - RNA, 25 nt, Artificial Sequence
  Description of Artificial Sequence: Synthetic oligonucleotide
ccuuuaaggaaaugaauccuccuga

SEQ ID NO: 122695 - RNA, 25 nt, Artificial Sequence
  Description of Artificial Sequence: Synthetic oligonucleotide
aaggauacaaaaagugacaucauau

SEQ ID NO: 122696 - RNA, 25 nt, Artificial Sequence
  Description of Artificial Sequence: Synthetic oligonucleotide
agaugcaauuugaaucuucaucaua

SEQ ID NO: 122697 - RNA, 25 nt, Artificial Sequence
  Description of Artificial Sequence: Synthetic oligonucleotide
guucaaaacgaagacuagcuauuaa

SEQ ID NO: 122698 - RNA, 25 nt, Artificial Sequence
  Description of Artificial Sequence: Synthetic oligonucleotide
gugaaaccucaucucuacuaaaaau

SEQ ID NO: 122699 - RNA, 25 nt, Artificial Sequence
  Description of Artificial Sequence: Synthetic oligonucleotide
acgaaagagaagcucuaucucgccu

SEQ ID NO: 122700 - RNA, 25 nt, Artificial Sequence
  Description of Artificial Sequence: Synthetic oligonucleotide
cuccacaagcgccuucgguccaguu

SEQ ID NO: 122701 - RNA, 25 nt, Artificial Sequence
  Description of Artificial Sequence: Synthetic oligonucleotide
gagaagauuccaaagauguagccgc

SEQ ID NO: 122702 - RNA, 25 nt, Artificial Sequence
  Description of Artificial Sequence: Synthetic oligonucleotide
aaucuggauucaaugaggagacuug

SEQ ID NO: 122703 - RNA, 25 nt, Artificial Sequence
  Description of Artificial Sequence: Synthetic oligonucleotide
agaacagauuugagaguagugagga

SEQ ID NO: 122704 - RNA, 25 nt, Artificial Sequence
  Description of Artificial Sequence: Synthetic oligonucleotide
ccagagcugugcagaugaguacaaa

SEQ ID NO: 122705 - RNA, 25 nt, Artificial Sequence
  Description of Artificial Sequence: Synthetic oligonucleotide
ccucagauuguuguuguuaaugggc

SEQ ID NO: 122706 - RNA, 25 nt, Artificial Sequence
  Description of Artificial Sequence: Synthetic oligonucleotide
cuauuuuaauuauuuuuaauuuauu

SEQ ID NO: 122707 - RNA, 25 nt, Artificial Sequence
  Description of Artificial Sequence: Synthetic oligonucleotide
uuuaauuuauuaauauuuaaauaug

SEQ ID NO: 122708 - RNA, 25 nt, Artificial Sequence
  Description of Artificial Sequence: Synthetic oligonucleotide
augcaguuugaauauccuuuguuuc

SEQ ID NO: 122709 - RNA, 25 nt, Artificial Sequence
  Description of Artificial Sequence: Synthetic oligonucleotide
caugcugcuggcgucuaaguguuug

SEQ ID NO: 122710 - RNA, 25 nt, Artificial Sequence
  Description of Artificial Sequence: Synthetic oligonucleotide
agaugugcauuucaccugugacaaa

SEQ ID NO: 122711 - RNA, 25 nt, Artificial Sequence
  Description of Artificial Sequence: Synthetic oligonucleotide
ucaaaaccugugccaggcugaauua

SEQ ID NO: 122712 - RNA, 25 nt, Artificial Sequence
  Description of Artificial Sequence: Synthetic oligonucleotide
gaauguggguagucauucuuacaau

SEQ ID NO: 122713 - RNA, 25 nt, Artificial Sequence
  Description of Artificial Sequence: Synthetic oligonucleotide
auguggguagucauucuuacaauug

SEQ ID NO: 122714 - RNA, 25 nt, Artificial Sequence
  Description of Artificial Sequence: Synthetic oligonucleotide
ugaaaaugagcaucagagaguguac

SEQ ID NO: 122715 - RNA, 25 nt, Artificial Sequence
  Description of Artificial Sequence: Synthetic oligonucleotide
uugcuuuucauguagaacucagcag

SEQ ID NO: 122716 - RNA, 25 nt, Artificial Sequence
  Description of Artificial Sequence: Synthetic oligonucleotide
uguauuucuauauuuauuuucagua

SEQ ID NO: 122717 - RNA, 25 nt, Artificial Sequence
  Description of Artificial Sequence: Synthetic oligonucleotide
uuugauuaauguuucuuaaauggaa

SEQ ID NO: 122718 - RNA, 25 nt, Artificial Sequence
  Description of Artificial Sequence: Synthetic oligonucleotide
caacguguauagugccuaaaauugu

SEQ ID NO: 122719 - RNA, 25 nt, Artificial Sequence
  Description of Artificial Sequence: Synthetic oligonucleotide
cauauccuuggcuacuaacaucugg

SEQ ID NO: 122720 - RNA, 25 nt, Artificial Sequence
  Description of Artificial Sequence: Synthetic oligonucleotide
uacuaacaucuggagacugugagcu

SEQ ID NO: 122721 - RNA, 25 nt, Artificial Sequence
  Description of Artificial Sequence: Synthetic oligonucleotide
cauaaguugugugcuuuuuauuaau

SEQ ID NO: 122722 - RNA, 25 nt, Artificial Sequence
  Description of Artificial Sequence: Synthetic oligonucleotide
gcaucauuuuggcucuucuuacauu

SEQ ID NO: 122723 - RNA, 25 nt, Artificial Sequence
  Description of Artificial Sequence: Synthetic oligonucleotide
gcucuucuuacauuuguaaaaaugu

SEQ ID NO: 122724 - RNA, 25 nt, Artificial Sequence
  Description of Artificial Sequence: Synthetic oligonucleotide
agauuaggucaucuuaauucauauu

SEQ ID NO: 122725 - RNA, 25 nt, Artificial Sequence
  Description of Artificial Sequence: Synthetic oligonucleotide
auggaauugaaagaacuaaucauga

SEQ ID NO: 122726 - RNA, 25 nt, Artificial Sequence
  Description of Artificial Sequence: Synthetic oligonucleotide
cacacucauuccuucugcucuuggg

SEQ ID NO: 122727 - RNA, 25 nt, Artificial Sequence
  Description of Artificial Sequence: Synthetic oligonucleotide
uguagagguaaccaguagcuuugag

SEQ ID NO: 122728 - RNA, 25 nt, Artificial Sequence
  Description of Artificial Sequence: Synthetic oligonucleotide
caaccacaugccacguaauauuuca

SEQ ID NO: 122729 - RNA, 25 nt, Artificial Sequence
  Description of Artificial Sequence: Synthetic oligonucleotide
ucggaaacaaguuauucucuucacu

SEQ ID NO: 122730 - RNA, 25 nt, Artificial Sequence
  Description of Artificial Sequence: Synthetic oligonucleotide
acucccaauaacuaaugcuaagaaa

SEQ ID NO: 122731 - RNA, 25 nt, Artificial Sequence
  Description of Artificial Sequence: Synthetic oligonucleotide
aaugcuaagaaaugcugaaaaucaa

SEQ ID NO: 122732 - RNA, 25 nt, Artificial Sequence
  Description of Artificial Sequence: Synthetic oligonucleotide
gucuuucucuaaauaugauuacuuu

SEQ ID NO: 122733 - RNA, 25 nt, Artificial Sequence
  Description of Artificial Sequence: Synthetic oligonucleotide
ugaauuucaggcauuuuguucuaca

SEQ ID NO: 122734 - RNA, 25 nt, Artificial Sequence
  Description of Artificial Sequence: Synthetic oligonucleotide
cgauucccucucacccgggacucuc

SEQ ID NO: 122735 - RNA, 25 nt, Artificial Sequence
  Description of Artificial Sequence: Synthetic oligonucleotide
aggaaagugaaccuuuaaaguaaag

SEQ ID NO: 122736 - RNA, 25 nt, Artificial Sequence
  Description of Artificial Sequence: Synthetic oligonucleotide
gaggcugcaugcucuggaagccugg

SEQ ID NO: 122737 - RNA, 25 nt, Artificial Sequence
  Description of Artificial Sequence: Synthetic oligonucleotide
ucucugaacagaaaacaaaagagag

SEQ ID NO: 122738 - RNA, 25 nt, Artificial Sequence
  Description of Artificial Sequence: Synthetic oligonucleotide
aacuuggcuguaaucaguuaugccg

SEQ ID NO: 122739 - RNA, 25 nt, Artificial Sequence
  Description of Artificial Sequence: Synthetic oligonucleotide
agaagccaaaauuaaaagaagucca

SEQ ID NO: 122740 - RNA, 25 nt, Artificial Sequence
  Description of Artificial Sequence: Synthetic oligonucleotide
auuaaaagaaguccaggugagguua

SEQ ID NO: 122741 - RNA, 25 nt, Artificial Sequence
  Description of Artificial Sequence: Synthetic oligonucleotide
gaauccggauuaucgggaagaggac

SEQ ID NO: 122742 - RNA, 25 nt, Artificial Sequence
  Description of Artificial Sequence: Synthetic oligonucleotide
aaugugacaucaaagcaaguauugu

SEQ ID NO: 122743 - RNA, 25 nt, Artificial Sequence
  Description of Artificial Sequence: Synthetic oligonucleotide
caucaaagcaaguauuguagcacuc

SEQ ID NO: 122744 - RNA, 25 nt, Artificial Sequence
  Description of Artificial Sequence: Synthetic oligonucleotide
agagagagaaaacaaaaccacaaau

SEQ ID NO: 122745 - RNA, 25 nt, Artificial Sequence
  Description of Artificial Sequence: Synthetic oligonucleotide
ucgcuguaguauuuaagcccauaca

SEQ ID NO: 122746 - RNA, 25 nt, Artificial Sequence
  Description of Artificial Sequence: Synthetic oligonucleotide
cgcuguaguauuuaagcccauacag

SEQ ID NO: 122747 - RNA, 25 nt, Artificial Sequence
  Description of Artificial Sequence: Synthetic oligonucleotide
auuuaagcccauacagaaaccuucc

SEQ ID NO: 122748 - RNA, 25 nt, Artificial Sequence
  Description of Artificial Sequence: Synthetic oligonucleotide
auuaaaauaaacaugguauaccuac

SEQ ID NO: 122749 - RNA, 25 nt, Artificial Sequence
  Description of Artificial Sequence: Synthetic oligonucleotide
cuguucugaucggccaguuuucgga

SEQ ID NO: 122750 - RNA, 25 nt, Artificial Sequence
  Description of Artificial Sequence: Synthetic oligonucleotide
aaauaauuugaacuuuggaacaggg

SEQ ID NO: 122751 - RNA, 25 nt, Artificial Sequence
  Description of Artificial Sequence: Synthetic oligonucleotide
ugcgaccuuaauuuaacuuuccagu

SEQ ID NO: 122752 - RNA, 25 nt, Artificial Sequence
  Description of Artificial Sequence: Synthetic oligonucleotide
cugagaaagcuaaaguuugguuuug

SEQ ID NO: 122753 - RNA, 25 nt, Artificial Sequence
  Description of Artificial Sequence: Synthetic oligonucleotide
aguaaagaugcuacuucccacugua

SEQ ID NO: 122754 - RNA, 25 nt, Artificial Sequence
  Description of Artificial Sequence: Synthetic oligonucleotide
cugcuuaauugcugauaccauauga

SEQ ID NO: 122755 - RNA, 25 nt, Artificial Sequence
  Description of Artificial Sequence: Synthetic oligonucleotide
uaccauaugaaugaaacaugggcug

SEQ ID NO: 122756 - RNA, 25 nt, Artificial Sequence
  Description of Artificial Sequence: Synthetic oligonucleotide
aacuuucuuauccaacuuuuucaua

SEQ ID NO: 122757 - RNA, 25 nt, Artificial Sequence
  Description of Artificial Sequence: Synthetic oligonucleotide
ccuugcaugacaucaugaggccgga

SEQ ID NO: 122758 - RNA, 25 nt, Artificial Sequence
  Description of Artificial Sequence: Synthetic oligonucleotide
ugaauuuguauaugacugcauuugu

SEQ ID NO: 122759 - RNA, 25 nt, Artificial Sequence
  Description of Artificial Sequence: Synthetic oligonucleotide
gaauccuaguagaauguuuacuacc

SEQ ID NO: 122760 - RNA, 25 nt, Artificial Sequence
  Description of Artificial Sequence: Synthetic oligonucleotide
gaaagggaagaauuuuuugaugaaa

SEQ ID NO: 122761 - RNA, 25 nt, Artificial Sequence
  Description of Artificial Sequence: Synthetic oligonucleotide
uaucggcaugccagugugugaauuu

SEQ ID NO: 122762 - RNA, 25 nt, Artificial Sequence
  Description of Artificial Sequence: Synthetic oligonucleotide
caccucauaguagagcaauguaugu

SEQ ID NO: 122763 - RNA, 25 nt, Artificial Sequence
  Description of Artificial Sequence: Synthetic oligonucleotide
ccagaauugccaaagcacauauaua

SEQ ID NO: 122764 - RNA, 25 nt, Artificial Sequence
  Description of Artificial Sequence: Synthetic oligonucleotide
uggugaucuggguaauaguuucucc

SEQ ID NO: 122765 - RNA, 25 nt, Artificial Sequence
  Description of Artificial Sequence: Synthetic oligonucleotide
gaucuggguaauaguuucuccaaau

SEQ ID NO: 122766 - RNA, 25 nt, Artificial Sequence
  Description of Artificial Sequence: Synthetic oligonucleotide
ggaugugaugaauacuuccuagaaa

SEQ ID NO: 122767 - RNA, 25 nt, Artificial Sequence
  Description of Artificial Sequence: Synthetic oligonucleotide
cauuuccacagcuacaccauauaug

SEQ ID NO: 122768 - RNA, 25 nt, Artificial Sequence
  Description of Artificial Sequence: Synthetic oligonucleotide
acagcuacaccauauaugaauggag

SEQ ID NO: 122769 - RNA, 25 nt, Artificial Sequence
  Description of Artificial Sequence: Synthetic oligonucleotide
ugcaguucuuacacgagaagaagau

SEQ ID NO: 122770 - RNA, 25 nt, Artificial Sequence
  Description of Artificial Sequence: Synthetic oligonucleotide
acgagaagaagaucauuuacaggga

SEQ ID NO: 122771 - RNA, 25 nt, Artificial Sequence
  Description of Artificial Sequence: Synthetic oligonucleotide
cgagaagaagaucauuuacagggac

SEQ ID NO: 122772 - RNA, 25 nt, Artificial Sequence
  Description of Artificial Sequence: Synthetic oligonucleotide
aagaagaucauuuacagggaccuga

SEQ ID NO: 122773 - RNA, 25 nt, Artificial Sequence
  Description of Artificial Sequence: Synthetic oligonucleotide
agaggaagagguguuugacugcauc

SEQ ID NO: 122774 - RNA, 25 nt, Artificial Sequence
  Description of Artificial Sequence: Synthetic oligonucleotide
gaggaagagguguuugacugcaucg

SEQ ID NO: 122775 - RNA, 25 nt, Artificial Sequence
  Description of Artificial Sequence: Synthetic oligonucleotide
cuacuuugagggcgaguucacaggg

SEQ ID NO: 122776 - RNA, 25 nt, Artificial Sequence
  Description of Artificial Sequence: Synthetic oligonucleotide
agggcaucuccuggcaccucugucc

SEQ ID NO: 122777 - RNA, 25 nt, Artificial Sequence
  Description of Artificial Sequence: Synthetic oligonucleotide
ggagugauaugguuugucuuuuuaa

SEQ ID NO: 122778 - RNA, 25 nt, Artificial Sequence
  Description of Artificial Sequence: Synthetic oligonucleotide
gagugauaugguuugucuuuuuaag

SEQ ID NO: 122779 - RNA, 25 nt, Artificial Sequence
  Description of Artificial Sequence: Synthetic oligonucleotide
ugcaguaaagauccuaaagguuguc

SEQ ID NO: 122780 - RNA, 25 nt, Artificial Sequence
  Description of Artificial Sequence: Synthetic oligonucleotide
aguaaagauccuaaagguugucgac

SEQ ID NO: 122781 - RNA, 25 nt, Artificial Sequence
  Description of Artificial Sequence: Synthetic oligonucleotide
ugacaaaggacaaccuggcaauugu

SEQ ID NO: 122782 - RNA, 25 nt, Artificial Sequence
  Description of Artificial Sequence: Synthetic oligonucleotide
gcaauugugacccaguggugcgagg

SEQ ID NO: 122783 - RNA, 25 nt, Artificial Sequence
  Description of Artificial Sequence: Synthetic oligonucleotide
aacaucauccauagagacaugaaau

SEQ ID NO: 122784 - RNA, 25 nt, Artificial Sequence
  Description of Artificial Sequence: Synthetic oligonucleotide
ugaaauccaacaauauauuucucca

SEQ ID NO: 122785 - RNA, 25 nt, Artificial Sequence
  Description of Artificial Sequence: Synthetic oligonucleotide
aacaauauauuucuccaugaaggcu

SEQ ID NO: 122786 - RNA, 25 nt, Artificial Sequence
  Description of Artificial Sequence: Synthetic oligonucleotide
aacaguaaagucacgcuggaguggu

SEQ ID NO: 122787 - RNA, 25 nt, Artificial Sequence
  Description of Artificial Sequence: Synthetic oligonucleotide
ugugaagaaaguaaaggaagagagg

SEQ ID NO: 122788 - RNA, 25 nt, Artificial Sequence
  Description of Artificial Sequence: Synthetic oligonucleotide
cuuccgagccauccuugcaucgggc

SEQ ID NO: 122789 - RNA, 25 nt, Artificial Sequence
  Description of Artificial Sequence: Synthetic oligonucleotide
aauggagguugaauauccuacugug

SEQ ID NO: 122790 - RNA, 25 nt, Artificial Sequence
  Description of Artificial Sequence: Synthetic oligonucleotide
ggagguugaauauccuacuguguaa

SEQ ID NO: 122791 - RNA, 25 nt, Artificial Sequence
  Description of Artificial Sequence: Synthetic oligonucleotide
auuuugaguuuucccuuguagugua

SEQ ID NO: 122792 - RNA, 25 nt, Artificial Sequence
  Description of Artificial Sequence: Synthetic oligonucleotide
uauccuguuuguucuuuguugauug

SEQ ID NO: 122793 - RNA, 25 nt, Artificial Sequence
  Description of Artificial Sequence: Synthetic oligonucleotide
ccuguuuguucuuuguugauugaaa

SEQ ID NO: 122794 - RNA, 25 nt, Artificial Sequence
  Description of Artificial Sequence: Synthetic oligonucleotide
cucuacagccuucuuuuucuuccau

SEQ ID NO: 122795 - RNA, 25 nt, Artificial Sequence
  Description of Artificial Sequence: Synthetic oligonucleotide
ucuuccauagcuaaucuuccuucua

SEQ ID NO: 122796 - RNA, 25 nt, Artificial Sequence
  Description of Artificial Sequence: Synthetic oligonucleotide
auaaucuuccuguugaaugcuucau

SEQ ID NO: 122797 - RNA, 25 nt, Artificial Sequence
  Description of Artificial Sequence: Synthetic oligonucleotide
uaaucuuccuguugaaugcuucaug

SEQ ID NO: 122798 - RNA, 25 nt, Artificial Sequence
  Description of Artificial Sequence: Synthetic oligonucleotide
cuucaugacuugaauucuacuuuga

SEQ ID NO: 122799 - RNA, 25 nt, Artificial Sequence
  Description of Artificial Sequence: Synthetic oligonucleotide
aagagggagagaagcaacuacagac

SEQ ID NO: 122800 - RNA, 25 nt, Artificial Sequence
  Description of Artificial Sequence: Synthetic oligonucleotide
cgucuccuaccagaccaaggucaac

SEQ ID NO: 122801 - RNA, 25 nt, Artificial Sequence
  Description of Artificial Sequence: Synthetic oligonucleotide
gaucaaucggcccgacuaucucgac

SEQ ID NO: 122802 - RNA, 25 nt, Artificial Sequence
  Description of Artificial Sequence: Synthetic oligonucleotide
ggacgaacauccaaccuucccaaac

SEQ ID NO: 122803 - RNA, 25 nt, Artificial Sequence
  Description of Artificial Sequence: Synthetic oligonucleotide
agggucggaacccaagcuuagaacu

SEQ ID NO: 122804 - RNA, 25 nt, Artificial Sequence
  Description of Artificial Sequence: Synthetic oligonucleotide
ucggaacccaagcuuagaacuuuaa

SEQ ID NO: 122805 - RNA, 25 nt, Artificial Sequence
  Description of Artificial Sequence: Synthetic oligonucleotide
acccaagcuuagaacuuuaagcaac

SEQ ID NO: 122806 - RNA, 25 nt, Artificial Sequence
  Description of Artificial Sequence: Synthetic oligonucleotide
gaacuuuaagcaacaagaccaccac

SEQ ID NO: 122807 - RNA, 25 nt, Artificial Sequence
  Description of Artificial Sequence: Synthetic oligonucleotide
acuauucaguggcgagaaauaaagu

SEQ ID NO: 122808 - RNA, 25 nt, Artificial Sequence
  Description of Artificial Sequence: Synthetic oligonucleotide
cuauucaguggcgagaaauaaaguu

SEQ ID NO: 122809 - RNA, 25 nt, Artificial Sequence
  Description of Artificial Sequence: Synthetic oligonucleotide
aaacacagauaacaggaaaugaucc

SEQ ID NO: 122810 - RNA, 25 nt, Artificial Sequence
  Description of Artificial Sequence: Synthetic oligonucleotide
cuuaagaaaagagaagaaaugaaac

SEQ ID NO: 122811 - RNA, 25 nt, Artificial Sequence
  Description of Artificial Sequence: Synthetic oligonucleotide
cugaaggaguguguuuccauccucc

SEQ ID NO: 122812 - RNA, 25 nt, Artificial Sequence
  Description of Artificial Sequence: Synthetic oligonucleotide
ucaccgcgggacugaaaaucuuuga

SEQ ID NO: 122813 - RNA, 25 nt, Artificial Sequence
  Description of Artificial Sequence: Synthetic oligonucleotide
agcagaaauaagcgugccguucagg

SEQ ID NO: 122814 - RNA, 25 nt, Artificial Sequence
  Description of Artificial Sequence: Synthetic oligonucleotide
aagcgugccguucaggguccagaag

SEQ ID NO: 122815 - RNA, 25 nt, Artificial Sequence
  Description of Artificial Sequence: Synthetic oligonucleotide
agaaacagucacucaagacugcuug

SEQ ID NO: 122816 - RNA, 25 nt, Artificial Sequence
  Description of Artificial Sequence: Synthetic oligonucleotide
agaggaagaagguccaugucuuugg

SEQ ID NO: 122817 - RNA, 25 nt, Artificial Sequence
  Description of Artificial Sequence: Synthetic oligonucleotide
uguauucaaaauaugccugaaacac

SEQ ID NO: 122818 - RNA, 25 nt, Artificial Sequence
  Description of Artificial Sequence: Synthetic oligonucleotide
auuuuccucccuuucucuguaccuc

SEQ ID NO: 122819 - RNA, 25 nt, Artificial Sequence
  Description of Artificial Sequence: Synthetic oligonucleotide
caaagaaagauagagcaagacaaga

SEQ ID NO: 122820 - RNA, 25 nt, Artificial Sequence
  Description of Artificial Sequence: Synthetic oligonucleotide
aagaaagauagagcaagacaagaaa

SEQ ID NO: 122821 - RNA, 25 nt, Artificial Sequence
  Description of Artificial Sequence: Synthetic oligonucleotide
gaaagcauuuguuuguacaagaucc

SEQ ID NO: 122822 - RNA, 25 nt, Artificial Sequence
  Description of Artificial Sequence: Synthetic oligonucleotide
ugaguuaaacgaacguacuugcaga

SEQ ID NO: 122823 - RNA, 25 nt, Artificial Sequence
  Description of Artificial Sequence: Synthetic oligonucleotide
acugauacagaacgaucgauacaga

SEQ ID NO: 122824 - RNA, 25 nt, Artificial Sequence
  Description of Artificial Sequence: Synthetic oligonucleotide
auauuauauauauauaaaaauaaau

SEQ ID NO: 122825 - RNA, 25 nt, Artificial Sequence
  Description of Artificial Sequence: Synthetic oligonucleotide
auuauauauauauaaaaauaaauau

SEQ ID NO: 122826 - RNA, 25 nt, Artificial Sequence
  Description of Artificial Sequence: Synthetic oligonucleotide
ucacuggauguauuugacugcugug

SEQ ID NO: 122827 - RNA, 25 nt, Artificial Sequence
  Description of Artificial Sequence: Synthetic oligonucleotide
cagggaagaggaggagaugagagac

SEQ ID NO: 122828 - RNA, 25 nt, Artificial Sequence
  Description of Artificial Sequence: Synthetic oligonucleotide
augaucuuuuuuuugucccacuugg

SEQ ID NO: 122829 - RNA, 27 nt, Artificial Sequence
  Description of Artificial Sequence: Synthetic oligonucleotide
ggccgugaacuccucaucaaaauaccu

SEQ ID NO: 122830 - RNA, 27 nt, Artificial Sequence
  Description of Artificial Sequence: Synthetic oligonucleotide
uggugugauggugaucaucugggccgu

SEQ ID NO: 122831 - RNA, 27 nt, Artificial Sequence
  Description of Artificial Sequence: Synthetic oligonucleotide
aaacccgcaggauaguuuucuucccua

SEQ ID NO: 122832 - RNA, 27 nt, Artificial Sequence
  Description of Artificial Sequence: Synthetic oligonucleotide
caaacuggaugaaauaaauuaaaaccc

SEQ ID NO: 122833 - RNA, 27 nt, Artificial Sequence
  Description of Artificial Sequence: Synthetic oligonucleotide
agaaguccuuaacauuucccuacguga

SEQ ID NO: 122834 - RNA, 27 nt, Artificial Sequence
  Description of Artificial Sequence: Synthetic oligonucleotide
cucugucccacuggguaaacccuggcc

SEQ ID NO: 122835 - RNA, 27 nt, Artificial Sequence
  Description of Artificial Sequence: Synthetic oligonucleotide
cacaauaacaaauuuaaaccuugcucc

SEQ ID NO: 122836 - RNA, 27 nt, Artificial Sequence
  Description of Artificial Sequence: Synthetic oligonucleotide
aaaugcauuugaacaacauaauacaca

SEQ ID NO: 122837 - RNA, 27 nt, Artificial Sequence
  Description of Artificial Sequence: Synthetic oligonucleotide
ggcuuuccugucacaaagauuaaaaac

SEQ ID NO: 122838 - RNA, 27 nt, Artificial Sequence
  Description of Artificial Sequence: Synthetic oligonucleotide
agggcuuuccugucacaaagauuaaaa

SEQ ID NO: 122839 - RNA, 27 nt, Artificial Sequence
  Description of Artificial Sequence: Synthetic oligonucleotide
ggccaugcugggagacauaagcagcag

SEQ ID NO: 122840 - RNA, 27 nt, Artificial Sequence
  Description of Artificial Sequence: Synthetic oligonucleotide
ucagggagaagcuucugaaacacuucu

SEQ ID NO: 122841 - RNA, 27 nt, Artificial Sequence
  Description of Artificial Sequence: Synthetic oligonucleotide
aagggcuucuuccuuauugauggucag

SEQ ID NO: 122842 - RNA, 27 nt, Artificial Sequence
  Description of Artificial Sequence: Synthetic oligonucleotide
ugaagggcuucuuccuuauugaugguc

SEQ ID NO: 122843 - RNA, 27 nt, Artificial Sequence
  Description of Artificial Sequence: Synthetic oligonucleotide
cgcugaagggcuucuuccuuauugaug

SEQ ID NO: 122844 - RNA, 27 nt, Artificial Sequence
  Description of Artificial Sequence: Synthetic oligonucleotide
gccgcugaagggcuucuuccuuauuga

SEQ ID NO: 122845 - RNA, 27 nt, Artificial Sequence
  Description of Artificial Sequence: Synthetic oligonucleotide
acuggccgcugaagggcuucuuccuua

SEQ ID NO: 122846 - RNA, 27 nt, Artificial Sequence
  Description of Artificial Sequence: Synthetic oligonucleotide
cggagcuuuucaccuuuaguuaugcuu

SEQ ID NO: 122847 - RNA, 27 nt, Artificial Sequence
  Description of Artificial Sequence: Synthetic oligonucleotide
ccggagcuuuucaccuuuaguuaugcu

SEQ ID NO: 122848 - RNA, 27 nt, Artificial Sequence
  Description of Artificial Sequence: Synthetic oligonucleotide
cagacuguugacuggcgugauguaguu

SEQ ID NO: 122849 - RNA, 27 nt, Artificial Sequence
  Description of Artificial Sequence: Synthetic oligonucleotide
cuuuugaacucugcuuaaauccagugg

SEQ ID NO: 122850 - RNA, 27 nt, Artificial Sequence
  Description of Artificial Sequence: Synthetic oligonucleotide
gcuuuugaacucugcuuaaauccagug

SEQ ID NO: 122851 - RNA, 27 nt, Artificial Sequence
  Description of Artificial Sequence: Synthetic oligonucleotide
agggcuuuugaacucugcuuaaaucca

SEQ ID NO: 122852 - RNA, 27 nt, Artificial Sequence
  Description of Artificial Sequence: Synthetic oligonucleotide
aagggcuuuugaacucugcuuaaaucc

SEQ ID NO: 122853 - RNA, 27 nt, Artificial Sequence
  Description of Artificial Sequence: Synthetic oligonucleotide
ugaagggcuuuugaacucugcuuaaau

SEQ ID NO: 122854 - RNA, 27 nt, Artificial Sequence
  Description of Artificial Sequence: Synthetic oligonucleotide
cugaagggcuuuugaacucugcuuaaa

SEQ ID NO: 122855 - RNA, 27 nt, Artificial Sequence
  Description of Artificial Sequence: Synthetic oligonucleotide
cgcugaagggcuuuugaacucugcuua

SEQ ID NO: 122856 - RNA, 27 nt, Artificial Sequence
  Description of Artificial Sequence: Synthetic oligonucleotide
cgagcggcuucacucagacccugaggc

SEQ ID NO: 122857 - RNA, 27 nt, Artificial Sequence
  Description of Artificial Sequence: Synthetic oligonucleotide
uugacuggcgugauguaguugcuuggg

SEQ ID NO: 122858 - RNA, 27 nt, Artificial Sequence
  Description of Artificial Sequence: Synthetic oligonucleotide
cacgcaccaagaagcugccauugaucc

SEQ ID NO: 122859 - RNA, 27 nt, Artificial Sequence
  Description of Artificial Sequence: Synthetic oligonucleotide
cugaugaauccaaugugggcuggaauc

SEQ ID NO: 122860 - RNA, 27 nt, Artificial Sequence
  Description of Artificial Sequence: Synthetic oligonucleotide
cuuagguauuccacauucucagcugug

SEQ ID NO: 122861 - RNA, 27 nt, Artificial Sequence
  Description of Artificial Sequence: Synthetic oligonucleotide
ugagccucaaauuaggagauacguuuu

SEQ ID NO: 122862 - RNA, 27 nt, Artificial Sequence
  Description of Artificial Sequence: Synthetic oligonucleotide
ccaauuguagagaaauuauuuuaggaa

SEQ ID NO: 122863 - RNA, 27 nt, Artificial Sequence
  Description of Artificial Sequence: Synthetic oligonucleotide
ggcuccuaacuagcugaaucuuccaau

SEQ ID NO: 122864 - RNA, 27 nt, Artificial Sequence
  Description of Artificial Sequence: Synthetic oligonucleotide
guggauauugacuaggagaguuuaaaa

SEQ ID NO: 122865 - RNA, 27 nt, Artificial Sequence
  Description of Artificial Sequence: Synthetic oligonucleotide
ugugacugaacauaacuguaggcugaa

SEQ ID NO: 122866 - RNA, 27 nt, Artificial Sequence
  Description of Artificial Sequence: Synthetic oligonucleotide
guaugugugugugacugaacauaacug

SEQ ID NO: 122867 - RNA, 27 nt, Artificial Sequence
  Description of Artificial Sequence: Synthetic oligonucleotide
aagcaaaaggaacauuuuguaugugug

SEQ ID NO: 122868 - RNA, 27 nt, Artificial Sequence
  Description of Artificial Sequence: Synthetic oligonucleotide
aaaaauuacuuuaaaagcaaaaggaac

SEQ ID NO: 122869 - RNA, 27 nt, Artificial Sequence
  Description of Artificial Sequence: Synthetic oligonucleotide
ccauugacuguugcuucacaggucaga

SEQ ID NO: 122870 - RNA, 27 nt, Artificial Sequence
  Description of Artificial Sequence: Synthetic oligonucleotide
auugguuugucgaugugugagauaguu

SEQ ID NO: 122871 - RNA, 27 nt, Artificial Sequence
  Description of Artificial Sequence: Synthetic oligonucleotide
agugguagcaguacaauugaggacaag

SEQ ID NO: 122872 - RNA, 27 nt, Artificial Sequence
  Description of Artificial Sequence: Synthetic oligonucleotide
uaagaccgcuugccagcuacgguuuca

SEQ ID NO: 122873 - RNA, 27 nt, Artificial Sequence
  Description of Artificial Sequence: Synthetic oligonucleotide
agccgguaagaccgcuugccagcuacg

SEQ ID NO: 122874 - RNA, 27 nt, Artificial Sequence
  Description of Artificial Sequence: Synthetic oligonucleotide
gguaacccaucuuuuaaccauacaacu

SEQ ID NO: 122875 - RNA, 27 nt, Artificial Sequence
  Description of Artificial Sequence: Synthetic oligonucleotide
ucgcagguaacccaucuuuuaaccaua

SEQ ID NO: 122876 - RNA, 27 nt, Artificial Sequence
  Description of Artificial Sequence: Synthetic oligonucleotide
cucagcaagauuguauaauucccugca

SEQ ID NO: 122877 - RNA, 27 nt, Artificial Sequence
  Description of Artificial Sequence: Synthetic oligonucleotide
acuguuuuaugcucagcaagauuguau

SEQ ID NO: 122878 - RNA, 27 nt, Artificial Sequence
  Description of Artificial Sequence: Synthetic oligonucleotide
aggauaaaggacucuucauuauuggaa

SEQ ID NO: 122879 - RNA, 27 nt, Artificial Sequence
  Description of Artificial Sequence: Synthetic oligonucleotide
caacuugcguuggaacauccaaagugu

SEQ ID NO: 122880 - RNA, 27 nt, Artificial Sequence
  Description of Artificial Sequence: Synthetic oligonucleotide
augguuucaguuuaguggaagcauuua

SEQ ID NO: 122881 - RNA, 27 nt, Artificial Sequence
  Description of Artificial Sequence: Synthetic oligonucleotide
auauuuaacaaagucaaacuuucucac

SEQ ID NO: 122882 - RNA, 27 nt, Artificial Sequence
  Description of Artificial Sequence: Synthetic oligonucleotide
aacuuuuaauauacaguaguucuuuuc

SEQ ID NO: 122883 - RNA, 27 nt, Artificial Sequence
  Description of Artificial Sequence: Synthetic oligonucleotide
guuaagucaaaacccguauuucuaaag

SEQ ID NO: 122884 - RNA, 27 nt, Artificial Sequence
  Description of Artificial Sequence: Synthetic oligonucleotide
gugcugaguuugcuguacccauguuga

SEQ ID NO: 122885 - RNA, 27 nt, Artificial Sequence
  Description of Artificial Sequence: Synthetic oligonucleotide
ugaggucagcaucuucugugucuuuac

SEQ ID NO: 122886 - RNA, 27 nt, Artificial Sequence
  Description of Artificial Sequence: Synthetic oligonucleotide
gcgaucugaauaaaccucccuacuagc

SEQ ID NO: 122887 - RNA, 27 nt, Artificial Sequence
  Description of Artificial Sequence: Synthetic oligonucleotide
aucccagaacccugcugcagaaggcca

SEQ ID NO: 122888 - RNA, 27 nt, Artificial Sequence
  Description of Artificial Sequence: Synthetic oligonucleotide
cauaauuuccaauauguaccagaccuu

SEQ ID NO: 122889 - RNA, 27 nt, Artificial Sequence
  Description of Artificial Sequence: Synthetic oligonucleotide
cuagugcuuccaucggaaggacuaggu

SEQ ID NO: 122890 - RNA, 27 nt, Artificial Sequence
  Description of Artificial Sequence: Synthetic oligonucleotide
uccacauaaaaacaauauucacuggga

SEQ ID NO: 122891 - RNA, 27 nt, Artificial Sequence
  Description of Artificial Sequence: Synthetic oligonucleotide
ucuaccaauuccaacuugaauucauug

SEQ ID NO: 122892 - RNA, 27 nt, Artificial Sequence
  Description of Artificial Sequence: Synthetic oligonucleotide
ucuccaagucuaaaucuguguccugag

SEQ ID NO: 122893 - RNA, 27 nt, Artificial Sequence
  Description of Artificial Sequence: Synthetic oligonucleotide
uggaauacuguaacugugcuuugagga

SEQ ID NO: 122894 - RNA, 27 nt, Artificial Sequence
  Description of Artificial Sequence: Synthetic oligonucleotide
uuaauucaucagugguggcagugguag

SEQ ID NO: 122895 - RNA, 27 nt, Artificial Sequence
  Description of Artificial Sequence: Synthetic oligonucleotide
gugaugauguggcacuaguaguuucuu

SEQ ID NO: 122896 - RNA, 27 nt, Artificial Sequence
  Description of Artificial Sequence: Synthetic oligonucleotide
ucuguuuggugaggcuguccgacuuug

SEQ ID NO: 122897 - RNA, 27 nt, Artificial Sequence
  Description of Artificial Sequence: Synthetic oligonucleotide
ccaucauguuccauuuuucgcuuucuc

SEQ ID NO: 122898 - RNA, 27 nt, Artificial Sequence
  Description of Artificial Sequence: Synthetic oligonucleotide
gcagucuacaugcuaaaucagagggua

SEQ ID NO: 122899 - RNA, 27 nt, Artificial Sequence
  Description of Artificial Sequence: Synthetic oligonucleotide
cauaaauagauccuuaaauagcucaaa

SEQ ID NO: 122900 - RNA, 27 nt, Artificial Sequence
  Description of Artificial Sequence: Synthetic oligonucleotide
ugauaauagugcuuuuucaccuuuuuc

SEQ ID NO: 122901 - RNA, 27 nt, Artificial Sequence
  Description of Artificial Sequence: Synthetic oligonucleotide
gcagaacugauaauagugcuuuuucac

SEQ ID NO: 122902 - RNA, 27 nt, Artificial Sequence
  Description of Artificial Sequence: Synthetic oligonucleotide
guagguuuaaucuuucuuuucagccau

SEQ ID NO: 122903 - RNA, 27 nt, Artificial Sequence
  Description of Artificial Sequence: Synthetic oligonucleotide
agaaggauuuuauuauaaggguuuaau

SEQ ID NO: 122904 - RNA, 27 nt, Artificial Sequence
  Description of Artificial Sequence: Synthetic oligonucleotide
gucuacagcauuggcuaauaguaugaa

SEQ ID NO: 122905 - RNA, 27 nt, Artificial Sequence
  Description of Artificial Sequence: Synthetic oligonucleotide
cuauuccuaucaaaaugcuucugucua

SEQ ID NO: 122906 - RNA, 27 nt, Artificial Sequence
  Description of Artificial Sequence: Synthetic oligonucleotide
ucagggccauuaucuuauuugcucuau

SEQ ID NO: 122907 - RNA, 27 nt, Artificial Sequence
  Description of Artificial Sequence: Synthetic oligonucleotide
ugcuugaggaagagaaaaauguugguc

SEQ ID NO: 122908 - RNA, 27 nt, Artificial Sequence
  Description of Artificial Sequence: Synthetic oligonucleotide
ugggcugaacuuuucucauacuuaaag

SEQ ID NO: 122909 - RNA, 27 nt, Artificial Sequence
  Description of Artificial Sequence: Synthetic oligonucleotide
gguucagcagccaucuuuauuccugcg

SEQ ID NO: 122910 - RNA, 27 nt, Artificial Sequence
  Description of Artificial Sequence: Synthetic oligonucleotide
ugaagagaacuuggucauucaaauuuc

SEQ ID NO: 122911 - RNA, 27 nt, Artificial Sequence
  Description of Artificial Sequence: Synthetic oligonucleotide
cucuaggcuggcuaucuuuauacauac

SEQ ID NO: 122912 - RNA, 27 nt, Artificial Sequence
  Description of Artificial Sequence: Synthetic oligonucleotide
acacuucacagagauaguuacagccau

SEQ ID NO: 122913 - RNA, 27 nt, Artificial Sequence
  Description of Artificial Sequence: Synthetic oligonucleotide
uugaaauuuucucacacuucacagaga

SEQ ID NO: 122914 - RNA, 27 nt, Artificial Sequence
  Description of Artificial Sequence: Synthetic oligonucleotide
ucaggaggauucauuuccuuaaaggaa

SEQ ID NO: 122915 - RNA, 27 nt, Artificial Sequence
  Description of Artificial Sequence: Synthetic oligonucleotide
auaugaugucacuuuuuguauccuuga

SEQ ID NO: 122916 - RNA, 27 nt, Artificial Sequence
  Description of Artificial Sequence: Synthetic oligonucleotide
uaugaugaagauucaaauugcaucuua

SEQ ID NO: 122917 - RNA, 27 nt, Artificial Sequence
  Description of Artificial Sequence: Synthetic oligonucleotide
uuaauagcuagucuucguuuugaacag

SEQ ID NO: 122918 - RNA, 27 nt, Artificial Sequence
  Description of Artificial Sequence: Synthetic oligonucleotide
auuuuuaguagagaugagguuucacca

SEQ ID NO: 122919 - RNA, 27 nt, Artificial Sequence
  Description of Artificial Sequence: Synthetic oligonucleotide
aggcgagauagagcuucucuuucguuc

SEQ ID NO: 122920 - RNA, 27 nt, Artificial Sequence
  Description of Artificial Sequence: Synthetic oligonucleotide
aacuggaccgaaggcgcuuguggagaa

SEQ ID NO: 122921 - RNA, 27 nt, Artificial Sequence
  Description of Artificial Sequence: Synthetic oligonucleotide
gcggcuacaucuuuggaaucuucuccu

SEQ ID NO: 122922 - RNA, 27 nt, Artificial Sequence
  Description of Artificial Sequence: Synthetic oligonucleotide
caagucuccucauugaauccagauugg

SEQ ID NO: 122923 - RNA, 27 nt, Artificial Sequence
  Description of Artificial Sequence: Synthetic oligonucleotide
uccucacuacucucaaaucuguucugg

SEQ ID NO: 122924 - RNA, 27 nt, Artificial Sequence
  Description of Artificial Sequence: Synthetic oligonucleotide
uuuguacucaucugcacagcucuggcu

SEQ ID NO: 122925 - RNA, 27 nt, Artificial Sequence
  Description of Artificial Sequence: Synthetic oligonucleotide
gcccauuaacaacaacaaucugaggug

SEQ ID NO: 122926 - RNA, 27 nt, Artificial Sequence
  Description of Artificial Sequence: Synthetic oligonucleotide
aauaaauuaaaaauaauuaaaauagug

SEQ ID NO: 122927 - RNA, 27 nt, Artificial Sequence
  Description of Artificial Sequence: Synthetic oligonucleotide
cauauuuaaauauuaauaaauuaaaaa

SEQ ID NO: 122928 - RNA, 27 nt, Artificial Sequence
  Description of Artificial Sequence: Synthetic oligonucleotide
gaaacaaaggauauucaaacugcauag

SEQ ID NO: 122929 - RNA, 27 nt, Artificial Sequence
  Description of Artificial Sequence: Synthetic oligonucleotide
caaacacuuagacgccagcagcauggg

SEQ ID NO: 122930 - RNA, 27 nt, Artificial Sequence
  Description of Artificial Sequence: Synthetic oligonucleotide
uuugucacaggugaaaugcacaucuga

SEQ ID NO: 122931 - RNA, 27 nt, Artificial Sequence
  Description of Artificial Sequence: Synthetic oligonucleotide
uaauucagccuggcacagguuuugauc

SEQ ID NO: 122932 - RNA, 27 nt, Artificial Sequence
  Description of Artificial Sequence: Synthetic oligonucleotide
auuguaagaaugacuacccacauucac

SEQ ID NO: 122933 - RNA, 27 nt, Artificial Sequence
  Description of Artificial Sequence: Synthetic oligonucleotide
caauuguaagaaugacuacccacauuc

SEQ ID NO: 122934 - RNA, 27 nt, Artificial Sequence
  Description of Artificial Sequence: Synthetic oligonucleotide
guacacucucugaugcucauuuucaua

SEQ ID NO: 122935 - RNA, 27 nt, Artificial Sequence
  Description of Artificial Sequence: Synthetic oligonucleotide
cugcugaguucuacaugaaaagcaaau

SEQ ID NO: 122936 - RNA, 27 nt, Artificial Sequence
  Description of Artificial Sequence: Synthetic oligonucleotide
uacugaaaauaaauauagaaauacaac

SEQ ID NO: 122937 - RNA, 27 nt, Artificial Sequence
  Description of Artificial Sequence: Synthetic oligonucleotide
uuccauuuaagaaacauuaaucaaaac

SEQ ID NO: 122938 - RNA, 27 nt, Artificial Sequence
  Description of Artificial Sequence: Synthetic oligonucleotide
acaauuuuaggcacuauacacguuguu

SEQ ID NO: 122939 - RNA, 27 nt, Artificial Sequence
  Description of Artificial Sequence: Synthetic oligonucleotide
ccagauguuaguagccaaggauauggu

SEQ ID NO: 122940 - RNA, 27 nt, Artificial Sequence
  Description of Artificial Sequence: Synthetic oligonucleotide
agcucacagucuccagauguuaguagc

SEQ ID NO: 122941 - RNA, 27 nt, Artificial Sequence
  Description of Artificial Sequence: Synthetic oligonucleotide
auuaauaaaaagcacacaacuuauggc

SEQ ID NO: 122942 - RNA, 27 nt, Artificial Sequence
  Description of Artificial Sequence: Synthetic oligonucleotide
aauguaagaagagccaaaaugaugcau

SEQ ID NO: 122943 - RNA, 27 nt, Artificial Sequence
  Description of Artificial Sequence: Synthetic oligonucleotide
acauuuuuacaaauguaagaagagcca

SEQ ID NO: 122944 - RNA, 27 nt, Artificial Sequence
  Description of Artificial Sequence: Synthetic oligonucleotide
aauaugaauuaagaugaccuaaucugu

SEQ ID NO: 122945 - RNA, 27 nt, Artificial Sequence
  Description of Artificial Sequence: Synthetic oligonucleotide
ucaugauuaguucuuucaauuccaucc

SEQ ID NO: 122946 - RNA, 27 nt, Artificial Sequence
  Description of Artificial Sequence: Synthetic oligonucleotide
cccaagagcagaaggaaugagugugca

SEQ ID NO: 122947 - RNA, 27 nt, Artificial Sequence
  Description of Artificial Sequence: Synthetic oligonucleotide
cucaaagcuacugguuaccucuacacc

SEQ ID NO: 122948 - RNA, 27 nt, Artificial Sequence
  Description of Artificial Sequence: Synthetic oligonucleotide
ugaaauauuacguggcaugugguuggg

SEQ ID NO: 122949 - RNA, 27 nt, Artificial Sequence
  Description of Artificial Sequence: Synthetic oligonucleotide
agugaagagaauaacuuguuuccgaag

SEQ ID NO: 122950 - RNA, 27 nt, Artificial Sequence
  Description of Artificial Sequence: Synthetic oligonucleotide
uuucuuagcauuaguuauugggaguga

SEQ ID NO: 122951 - RNA, 27 nt, Artificial Sequence
  Description of Artificial Sequence: Synthetic oligonucleotide
uugauuuucagcauuucuuagcauuag

SEQ ID NO: 122952 - RNA, 27 nt, Artificial Sequence
  Description of Artificial Sequence: Synthetic oligonucleotide
aaaguaaucauauuuagagaaagacag

SEQ ID NO: 122953 - RNA, 27 nt, Artificial Sequence
  Description of Artificial Sequence: Synthetic oligonucleotide
uguagaacaaaaugccugaaauucagc

SEQ ID NO: 122954 - RNA, 27 nt, Artificial Sequence
  Description of Artificial Sequence: Synthetic oligonucleotide
gagagucccgggugagagggaaucgcc

SEQ ID NO: 122955 - RNA, 27 nt, Artificial Sequence
  Description of Artificial Sequence: Synthetic oligonucleotide
cuuuacuuuaaagguucacuuuccuug

SEQ ID NO: 122956 - RNA, 27 nt, Artificial Sequence
  Description of Artificial Sequence: Synthetic oligonucleotide
ccaggcuuccagagcaugcagccuccu

SEQ ID NO: 122957 - RNA, 27 nt, Artificial Sequence
  Description of Artificial Sequence: Synthetic oligonucleotide
cucucuuuuguuuucuguucagagaaa

SEQ ID NO: 122958 - RNA, 27 nt, Artificial Sequence
  Description of Artificial Sequence: Synthetic oligonucleotide
cggcauaacugauuacagccaaguuca

SEQ ID NO: 122959 - RNA, 27 nt, Artificial Sequence
  Description of Artificial Sequence: Synthetic oligonucleotide
uggacuucuuuuaauuuuggcuucuuc

SEQ ID NO: 122960 - RNA, 27 nt, Artificial Sequence
  Description of Artificial Sequence: Synthetic oligonucleotide
uaaccucaccuggacuucuuuuaauuu

SEQ ID NO: 122961 - RNA, 27 nt, Artificial Sequence
  Description of Artificial Sequence: Synthetic oligonucleotide
guccucuucccgauaauccggauucag

SEQ ID NO: 122962 - RNA, 27 nt, Artificial Sequence
  Description of Artificial Sequence: Synthetic oligonucleotide
acaauacuugcuuugaugucacauuaa

SEQ ID NO: 122963 - RNA, 27 nt, Artificial Sequence
  Description of Artificial Sequence: Synthetic oligonucleotide
gagugcuacaauacuugcuuugauguc

SEQ ID NO: 122964 - RNA, 27 nt, Artificial Sequence
  Description of Artificial Sequence: Synthetic oligonucleotide
auuugugguuuuguuuucucucucucu

SEQ ID NO: 122965 - RNA, 27 nt, Artificial Sequence
  Description of Artificial Sequence: Synthetic oligonucleotide
uguaugggcuuaaauacuacagcgagg

SEQ ID NO: 122966 - RNA, 27 nt, Artificial Sequence
  Description of Artificial Sequence: Synthetic oligonucleotide
cuguaugggcuuaaauacuacagcgag

SEQ ID NO: 122967 - RNA, 27 nt, Artificial Sequence
  Description of Artificial Sequence: Synthetic oligonucleotide
ggaagguuucuguaugggcuuaaauac

SEQ ID NO: 122968 - RNA, 27 nt, Artificial Sequence
  Description of Artificial Sequence: Synthetic oligonucleotide
guagguauaccauguuuauuuuaauac

SEQ ID NO: 122969 - RNA, 27 nt, Artificial Sequence
  Description of Artificial Sequence: Synthetic oligonucleotide
uccgaaaacuggccgaucagaacagcc

SEQ ID NO: 122970 - RNA, 27 nt, Artificial Sequence
  Description of Artificial Sequence: Synthetic oligonucleotide
cccuguuccaaaguucaaauuauuugu

SEQ ID NO: 122971 - RNA, 27 nt, Artificial Sequence
  Description of Artificial Sequence: Synthetic oligonucleotide
acuggaaaguuaaauuaaggucgcaau

SEQ ID NO: 122972 - RNA, 27 nt, Artificial Sequence
  Description of Artificial Sequence: Synthetic oligonucleotide
caaaaccaaacuuuagcuuucucagcc

SEQ ID NO: 122973 - RNA, 27 nt, Artificial Sequence
  Description of Artificial Sequence: Synthetic oligonucleotide
uacagugggaaguagcaucuuuacuuu

SEQ ID NO: 122974 - RNA, 27 nt, Artificial Sequence
  Description of Artificial Sequence: Synthetic oligonucleotide
ucauaugguaucagcaauuaagcagua

SEQ ID NO: 122975 - RNA, 27 nt, Artificial Sequence
  Description of Artificial Sequence: Synthetic oligonucleotide
cagcccauguuucauucauaugguauc

SEQ ID NO: 122976 - RNA, 27 nt, Artificial Sequence
  Description of Artificial Sequence: Synthetic oligonucleotide
uaugaaaaaguuggauaagaaaguugg

SEQ ID NO: 122977 - RNA, 27 nt, Artificial Sequence
  Description of Artificial Sequence: Synthetic oligonucleotide
uccggccucaugaugucaugcaaggcu

SEQ ID NO: 122978 - RNA, 27 nt, Artificial Sequence
  Description of Artificial Sequence: Synthetic oligonucleotide
acaaaugcagucauauacaaauucagg

SEQ ID NO: 122979 - RNA, 27 nt, Artificial Sequence
  Description of Artificial Sequence: Synthetic oligonucleotide
gguaguaaacauucuacuaggauucuu

SEQ ID NO: 122980 - RNA, 27 nt, Artificial Sequence
  Description of Artificial Sequence: Synthetic oligonucleotide
uuucaucaaaaaauucuucccuuucug

SEQ ID NO: 122981 - RNA, 27 nt, Artificial Sequence
  Description of Artificial Sequence: Synthetic oligonucleotide
aaauucacacacuggcaugccgauagc

SEQ ID NO: 122982 - RNA, 27 nt, Artificial Sequence
  Description of Artificial Sequence: Synthetic oligonucleotide
acauacauugcucuacuaugaggugaa

SEQ ID NO: 122983 - RNA, 27 nt, Artificial Sequence
  Description of Artificial Sequence: Synthetic oligonucleotide
uauauaugugcuuuggcaauucuggug

SEQ ID NO: 122984 - RNA, 27 nt, Artificial Sequence
  Description of Artificial Sequence: Synthetic oligonucleotide
ggagaaacuauuacccagaucaccacu

SEQ ID NO: 122985 - RNA, 27 nt, Artificial Sequence
  Description of Artificial Sequence: Synthetic oligonucleotide
auuuggagaaacuauuacccagaucac

SEQ ID NO: 122986 - RNA, 27 nt, Artificial Sequence
  Description of Artificial Sequence: Synthetic oligonucleotide
uuucuaggaaguauucaucacauccac

SEQ ID NO: 122987 - RNA, 27 nt, Artificial Sequence
  Description of Artificial Sequence: Synthetic oligonucleotide
cauauaugguguagcuguggaaaugcg

SEQ ID NO: 122988 - RNA, 27 nt, Artificial Sequence
  Description of Artificial Sequence: Synthetic oligonucleotide
cuccauucauauaugguguagcugugg

SEQ ID NO: 122989 - RNA, 27 nt, Artificial Sequence
  Description of Artificial Sequence: Synthetic oligonucleotide
aucuucuucucguguaagaacugcagc

SEQ ID NO: 122990 - RNA, 27 nt, Artificial Sequence
  Description of Artificial Sequence: Synthetic oligonucleotide
ucccuguaaaugaucuucuucucgugu

SEQ ID NO: 122991 - RNA, 27 nt, Artificial Sequence
  Description of Artificial Sequence: Synthetic oligonucleotide
gucccuguaaaugaucuucuucucgug

SEQ ID NO: 122992 - RNA, 27 nt, Artificial Sequence
  Description of Artificial Sequence: Synthetic oligonucleotide
ucaggucccuguaaaugaucuucuucu

SEQ ID NO: 122993 - RNA, 27 nt, Artificial Sequence
  Description of Artificial Sequence: Synthetic oligonucleotide
gaugcagucaaacaccucuuccucugu

SEQ ID NO: 122994 - RNA, 27 nt, Artificial Sequence
  Description of Artificial Sequence: Synthetic oligonucleotide
cgaugcagucaaacaccucuuccucug

SEQ ID NO: 122995 - RNA, 27 nt, Artificial Sequence
  Description of Artificial Sequence: Synthetic oligonucleotide
cccugugaacucgcccucaaaguagcg

SEQ ID NO: 122996 - RNA, 27 nt, Artificial Sequence
  Description of Artificial Sequence: Synthetic oligonucleotide
ggacagaggugccaggagaugcccuca

SEQ ID NO: 122997 - RNA, 27 nt, Artificial Sequence
  Description of Artificial Sequence: Synthetic oligonucleotide
uuaaaaagacaaaccauaucacuccuu

SEQ ID NO: 122998 - RNA, 27 nt, Artificial Sequence
  Description of Artificial Sequence: Synthetic oligonucleotide
cuuaaaaagacaaaccauaucacuccu

SEQ ID NO: 122999 - RNA, 27 nt, Artificial Sequence
  Description of Artificial Sequence: Synthetic oligonucleotide
gacaaccuuuaggaucuuuacugcaac

SEQ ID NO: 123000 - RNA, 27 nt, Artificial Sequence
  Description of Artificial Sequence: Synthetic oligonucleotide
gucgacaaccuuuaggaucuuuacugc

SEQ ID NO: 123001 - RNA, 27 nt, Artificial Sequence
  Description of Artificial Sequence: Synthetic oligonucleotide
acaauugccagguuguccuuugucaug

SEQ ID NO: 123002 - RNA, 27 nt, Artificial Sequence
  Description of Artificial Sequence: Synthetic oligonucleotide
ccucgcaccacugggucacaauugcca

SEQ ID NO: 123003 - RNA, 27 nt, Artificial Sequence
  Description of Artificial Sequence: Synthetic oligonucleotide
auuucaugucucuauggaugauguucu

SEQ ID NO: 123004 - RNA, 27 nt, Artificial Sequence
  Description of Artificial Sequence: Synthetic oligonucleotide
uggagaaauauauuguuggauuucaug

SEQ ID NO: 123005 - RNA, 27 nt, Artificial Sequence
  Description of Artificial Sequence: Synthetic oligonucleotide
agccuucauggagaaauauauuguugg

SEQ ID NO: 123006 - RNA, 27 nt, Artificial Sequence
  Description of Artificial Sequence: Synthetic oligonucleotide
accacuccagcgugacuuuacuguugc

SEQ ID NO: 123007 - RNA, 27 nt, Artificial Sequence
  Description of Artificial Sequence: Synthetic oligonucleotide
ccucucuuccuuuacuuucuucacaca

SEQ ID NO: 123008 - RNA, 27 nt, Artificial Sequence
  Description of Artificial Sequence: Synthetic oligonucleotide
gcccgaugcaaggauggcucggaagcg

SEQ ID NO: 123009 - RNA, 27 nt, Artificial Sequence
  Description of Artificial Sequence: Synthetic oligonucleotide
cacaguaggauauucaaccuccauuuc

SEQ ID NO: 123010 - RNA, 27 nt, Artificial Sequence
  Description of Artificial Sequence: Synthetic oligonucleotide
uuacacaguaggauauucaaccuccau

SEQ ID NO: 123011 - RNA, 27 nt, Artificial Sequence
  Description of Artificial Sequence: Synthetic oligonucleotide
uacacuacaagggaaaacucaaaaucu

SEQ ID NO: 123012 - RNA, 27 nt, Artificial Sequence
  Description of Artificial Sequence: Synthetic oligonucleotide
caaucaacaaagaacaaacaggauaaa

SEQ ID NO: 123013 - RNA, 27 nt, Artificial Sequence
  Description of Artificial Sequence: Synthetic oligonucleotide
uuucaaucaacaaagaacaaacaggau

SEQ ID NO: 123014 - RNA, 27 nt, Artificial Sequence
  Description of Artificial Sequence: Synthetic oligonucleotide
auggaagaaaaagaaggcuguagagaa

SEQ ID NO: 123015 - RNA, 27 nt, Artificial Sequence
  Description of Artificial Sequence: Synthetic oligonucleotide
uagaaggaagauuagcuauggaagaaa

SEQ ID NO: 123016 - RNA, 27 nt, Artificial Sequence
  Description of Artificial Sequence: Synthetic oligonucleotide
augaagcauucaacaggaagauuauuu

SEQ ID NO: 123017 - RNA, 27 nt, Artificial Sequence
  Description of Artificial Sequence: Synthetic oligonucleotide
caugaagcauucaacaggaagauuauu

SEQ ID NO: 123018 - RNA, 27 nt, Artificial Sequence
  Description of Artificial Sequence: Synthetic oligonucleotide
ucaaaguagaauucaagucaugaagca

SEQ ID NO: 123019 - RNA, 27 nt, Artificial Sequence
  Description of Artificial Sequence: Synthetic oligonucleotide
gucuguaguugcuucucucccucuuag

SEQ ID NO: 123020 - RNA, 27 nt, Artificial Sequence
  Description of Artificial Sequence: Synthetic oligonucleotide
guugaccuuggucugguaggagacggc

SEQ ID NO: 123021 - RNA, 27 nt, Artificial Sequence
  Description of Artificial Sequence: Synthetic oligonucleotide
gucgagauagucgggccgauugaucuc

SEQ ID NO: 123022 - RNA, 27 nt, Artificial Sequence
  Description of Artificial Sequence: Synthetic oligonucleotide
guuugggaagguuggauguucguccuc

SEQ ID NO: 123023 - RNA, 27 nt, Artificial Sequence
  Description of Artificial Sequence: Synthetic oligonucleotide
aguucuaagcuuggguuccgacccuaa

SEQ ID NO: 123024 - RNA, 27 nt, Artificial Sequence
  Description of Artificial Sequence: Synthetic oligonucleotide
uuaaaguucuaagcuuggguuccgacc

SEQ ID NO: 123025 - RNA, 27 nt, Artificial Sequence
  Description of Artificial Sequence: Synthetic oligonucleotide
guugcuuaaaguucuaagcuuggguuc

SEQ ID NO: 123026 - RNA, 27 nt, Artificial Sequence
  Description of Artificial Sequence: Synthetic oligonucleotide
gugguggucuuguugcuuaaaguucua

SEQ ID NO: 123027 - RNA, 27 nt, Artificial Sequence
  Description of Artificial Sequence: Synthetic oligonucleotide
acuuuauuucucgccacugaauaguag

SEQ ID NO: 123028 - RNA, 27 nt, Artificial Sequence
  Description of Artificial Sequence: Synthetic oligonucleotide
aacuuuauuucucgccacugaauagua

SEQ ID NO: 123029 - RNA, 27 nt, Artificial Sequence
  Description of Artificial Sequence: Synthetic oligonucleotide
ggaucauuuccuguuaucuguguuugu

SEQ ID NO: 123030 - RNA, 27 nt, Artificial Sequence
  Description of Artificial Sequence: Synthetic oligonucleotide
guuucauuucuucucuuuucuuaaggc

SEQ ID NO: 123031 - RNA, 27 nt, Artificial Sequence
  Description of Artificial Sequence: Synthetic oligonucleotide
ggaggauggaaacacacuccuucaguu

SEQ ID NO: 123032 - RNA, 27 nt, Artificial Sequence
  Description of Artificial Sequence: Synthetic oligonucleotide
ucaaagauuuucagucccgcggugaca

SEQ ID NO: 123033 - RNA, 27 nt, Artificial Sequence
  Description of Artificial Sequence: Synthetic oligonucleotide
ccugaacggcacgcuuauuucugcugu

SEQ ID NO: 123034 - RNA, 27 nt, Artificial Sequence
  Description of Artificial Sequence: Synthetic oligonucleotide
cuucuggacccugaacggcacgcuuau

SEQ ID NO: 123035 - RNA, 27 nt, Artificial Sequence
  Description of Artificial Sequence: Synthetic oligonucleotide
caagcagucuugagugacuguuucuuc

SEQ ID NO: 123036 - RNA, 27 nt, Artificial Sequence
  Description of Artificial Sequence: Synthetic oligonucleotide
ccaaagacauggaccuucuuccucuga

SEQ ID NO: 123037 - RNA, 27 nt, Artificial Sequence
  Description of Artificial Sequence: Synthetic oligonucleotide
guguuucaggcauauuuugaauacauc

SEQ ID NO: 123038 - RNA, 27 nt, Artificial Sequence
  Description of Artificial Sequence: Synthetic oligonucleotide
gagguacagagaaagggaggaaaauag

SEQ ID NO: 123039 - RNA, 27 nt, Artificial Sequence
  Description of Artificial Sequence: Synthetic oligonucleotide
ucuugucuugcucuaucuuucuuuggu

SEQ ID NO: 123040 - RNA, 27 nt, Artificial Sequence
  Description of Artificial Sequence: Synthetic oligonucleotide
uuucuugucuugcucuaucuuucuuug

SEQ ID NO: 123041 - RNA, 27 nt, Artificial Sequence
  Description of Artificial Sequence: Synthetic oligonucleotide
ggaucuuguacaaacaaaugcuuucuc

SEQ ID NO: 123042 - RNA, 27 nt, Artificial Sequence
  Description of Artificial Sequence: Synthetic oligonucleotide
ucugcaaguacguucguuuaacucaag

SEQ ID NO: 123043 - RNA, 27 nt, Artificial Sequence
  Description of Artificial Sequence: Synthetic oligonucleotide
ucuguaucgaucguucuguaucagucu

SEQ ID NO: 123044 - RNA, 27 nt, Artificial Sequence
  Description of Artificial Sequence: Synthetic oligonucleotide
auuuauuuuuauauauauauaauauau

SEQ ID NO: 123045 - RNA, 27 nt, Artificial Sequence
  Description of Artificial Sequence: Synthetic oligonucleotide
auauuuauuuuuauauauauauaauau

SEQ ID NO: 123046 - RNA, 27 nt, Artificial Sequence
  Description of Artificial Sequence: Synthetic oligonucleotide
cacagcagucaaauacauccagugaag

SEQ ID NO: 123047 - RNA, 27 nt, Artificial Sequence
  Description of Artificial Sequence: Synthetic oligonucleotide
gucucucaucuccuccucuucccuguc

SEQ ID NO: 123048 - RNA, 27 nt, Artificial Sequence
  Description of Artificial Sequence: Synthetic oligonucleotide
ccaagugggacaaaaaaaagaucaugc

SEQ ID NO: 123049 - RNA, 14 nt, Artificial Sequence
  Description of Artificial Sequence: Synthetic oligonucleotide
guauuuugaugagg

SEQ ID NO: 123050 - RNA, 12 nt, Artificial Sequence
  Description of Artificial Sequence: Synthetic oligonucleotide
ggcccagaugau

SEQ ID NO: 123051 - RNA, 14 nt, Artificial Sequence
  Description of Artificial Sequence: Synthetic oligonucleotide
gggaagaaaacuau

SEQ ID NO: 123052 - RNA, 15 nt, Artificial Sequence
  Description of Artificial Sequence: Synthetic oligonucleotide
guuuuaauuuauuuc

SEQ ID NO: 123053 - RNA, 12 nt, Artificial Sequence
  Description of Artificial Sequence: Synthetic oligonucleotide
acguagggaaau

SEQ ID NO: 123054 - RNA, 12 nt, Artificial Sequence
  Description of Artificial Sequence: Synthetic oligonucleotide
ccaggguuuacc
